United States Patent Application Publication US 2024/0229078 A1 - sequence listing, part 2

SEQ ID NO: 21207 - DNA, 20 bp, synthetic construct
  misc_feature 1..20: note = chemically synthesized
  source 1..20: mol_type = other DNA
ttaactgctgttgctttaaa

SEQ ID NO: 21208 - DNA, 20 bp, synthetic construct
  misc_feature 1..20: note = chemically synthesized
  source 1..20: mol_type = other DNA
tgagctcccagggcctttct

SEQ ID NO: 21209 - DNA, 20 bp, synthetic construct
  misc_feature 1..20: note = chemically synthesized
  source 1..20: mol_type = other DNA
acttctcccacaaacagacc

SEQ ID NO: 21210 - DNA, 20 bp, synthetic construct
  misc_feature 1..20: note = chemically synthesized
  source 1..20: mol_type = other DNA
tcagtttctccagtgggagt

SEQ ID NO: 21211 - DNA, 20 bp, synthetic construct
  misc_feature 1..20: note = chemically synthesized
  source 1..20: mol_type = other DNA
cagagggtctgtgggtcctc

SEQ ID NO: 21212 - DNA, 20 bp, synthetic construct
  misc_feature 1..20: note = chemically synthesized
  source 1..20: mol_type = other DNA
ctgtgggtcctctcaggatt

SEQ ID NO: 21213 - DNA, 20 bp, synthetic construct
  misc_feature 1..20: note = chemically synthesized
  source 1..20: mol_type = other DNA
ccgccaagatcctgagaagt

SEQ ID NO: 21214 - DNA, 20 bp, synthetic construct
  misc_feature 1..20: note = chemically synthesized
  source 1..20: mol_type = other DNA
gttggggattatatttcaac

SEQ ID NO: 21215 - DNA, 20 bp, synthetic construct
  misc_feature 1..20: note = chemically synthesized
  source 1..20: mol_type = other DNA
catccaaaccatatcagcag

SEQ ID NO: 21216 - DNA, 20 bp, synthetic construct
  misc_feature 1..20: note = chemically synthesized
  source 1..20: mol_type = other DNA
ctgttctaatgtcagtatca

SEQ ID NO: 21217 - DNA, 20 bp, synthetic construct
  misc_feature 1..20: note = chemically synthesized
  source 1..20: mol_type = other DNA
ttttttaatttcatacaaat

SEQ ID NO: 21218 - DNA, 20 bp, synthetic construct
  misc_feature 1..20: note = chemically synthesized
  source 1..20: mol_type = other DNA
taatttcatacaaattttag

SEQ ID NO: 21219 - DNA, 20 bp, synthetic construct
  misc_feature 1..20: note = chemically synthesized
  source 1..20: mol_type = other DNA
gatagcggtcatatagaatc

SEQ ID NO: 21220 - DNA, 20 bp, synthetic construct
  misc_feature 1..20: note = chemically synthesized
  source 1..20: mol_type = other DNA
gcggtcatatagaatctgta

SEQ ID NO: 21221 - DNA, 20 bp, synthetic construct
  misc_feature 1..20: note = chemically synthesized
  source 1..20: mol_type = other DNA
tgaacataggatatctctcc

SEQ ID NO: 21222 - DNA, 20 bp, synthetic construct
  misc_feature 1..20: note = chemically synthesized
  source 1..20: mol_type = other DNA
gtccttttcaattcttttat

SEQ ID NO: 21223 - DNA, 20 bp, synthetic construct
  misc_feature 1..20: note = chemically synthesized
  source 1..20: mol_type = other DNA
caattcttttatcagtgttt

SEQ ID NO: 21224 - DNA, 20 bp, synthetic construct
  misc_feature 1..20: note = chemically synthesized
  source 1..20: mol_type = other DNA
tgttttgtagttttccgaat

SEQ ID NO: 21225 - DNA, 20 bp, synthetic construct
  misc_feature 1..20: note = chemically synthesized
  source 1..20: mol_type = other DNA
ttattttttagctattgtaa

SEQ ID NO: 21226 - DNA, 20 bp, synthetic construct
  misc_feature 1..20: note = chemically synthesized
  source 1..20: mol_type = other DNA
ccttcttaatttccttctca

SEQ ID NO: 21227 - DNA, 20 bp, synthetic construct
  misc_feature 1..20: note = chemically synthesized
  source 1..20: mol_type = other DNA
ttattattggtgtgtagaaa

SEQ ID NO: 21228 - DNA, 20 bp, synthetic construct
  misc_feature 1..20: note = chemically synthesized
  source 1..20: mol_type = other DNA
tattggtgtgtagaaacatt

SEQ ID NO: 21229 - DNA, 20 bp, synthetic construct
  misc_feature 1..20: note = chemically synthesized
  source 1..20: mol_type = other DNA
gaaacattgcttgtttcata

SEQ ID NO: 21230 - DNA, 20 bp, synthetic construct
  misc_feature 1..20: note = chemically synthesized
  source 1..20: mol_type = other DNA
aatttatttttcagcgctaa

SEQ ID NO: 21231 - DNA, 20 bp, synthetic construct
  misc_feature 1..20: note = chemically synthesized
  source 1..20: mol_type = other DNA
taagagtgctttggtggagt

SEQ ID NO: 21232 - DNA, 20 bp, synthetic construct
  misc_feature 1..20: note = chemically synthesized
  source 1..20: mol_type = other DNA
tcatgtcatctggaaagatg

SEQ ID NO: 21233 - DNA, 20 bp, synthetic construct
  misc_feature 1..20: note = chemically synthesized
  source 1..20: mol_type = other DNA
gatggaagtgggcatcctta

SEQ ID NO: 21234 - DNA, 20 bp, synthetic construct
  misc_feature 1..20: note = chemically synthesized
  source 1..20: mol_type = other DNA
tttgtttcagttcttagagg

SEQ ID NO: 21235 - DNA, 20 bp, synthetic construct
  misc_feature 1..20: note = chemically synthesized
  source 1..20: mol_type = other DNA
cagttcttagaggaaaggct

SEQ ID NO: 21236 - DNA, 20 bp, synthetic construct
  misc_feature 1..20: note = chemically synthesized
  source 1..20: mol_type = other DNA
aattcagtatgatgttagct

SEQ ID NO: 21237 - DNA, 20 bp, synthetic construct
  misc_feature 1..20: note = chemically synthesized
  source 1..20: mol_type = other DNA
tatattgagatatgttcctt

SEQ ID NO: 21238 - DNA, 20 bp, synthetic construct
  misc_feature 1..20: note = chemically synthesized
  source 1..20: mol_type = other DNA
tccttctatgattggctgca

SEQ ID NO: 21239 - DNA, 20 bp, synthetic construct
  misc_feature 1..20: note = chemically synthesized
  source 1..20: mol_type = other DNA
tgtatctattgagatgatca

SEQ ID NO: 21240 - DNA, 20 bp, synthetic construct
  misc_feature 1..20: note = chemically synthesized
  source 1..20: mol_type = other DNA
ttgatgtgatgtatcacatt

SEQ ID NO: 21241 - DNA, 20 bp, synthetic construct
  misc_feature 1..20: note = chemically synthesized
  source 1..20: mol_type = other DNA
tattatcttttggatgtact

SEQ ID NO: 21242 - DNA, 20 bp, synthetic construct
  misc_feature 1..20: note = chemically synthesized
  source 1..20: mol_type = other DNA
cttttggatgtactgttgga

SEQ ID NO: 21243 - DNA, 20 bp, synthetic construct
  misc_feature 1..20: note = chemically synthesized
  source 1..20: mol_type = other DNA
tcagtttgctagtattttgt

SEQ ID NO: 21244 - DNA, 20 bp, synthetic construct
  misc_feature 1..20: note = chemically synthesized
  source 1..20: mol_type = other DNA
ttccatcagggatattgacc

SEQ ID NO: 21245 - DNA, 20 bp, synthetic construct
  misc_feature 1..20: note = chemically synthesized
  source 1..20: mol_type = other DNA
atgagttagggagaattcct

SEQ ID NO: 21246 - DNA, 20 bp, synthetic construct
  misc_feature 1..20: note = chemically synthesized
  source 1..20: mol_type = other DNA
aaaagaatttaaggagactt

SEQ ID NO: 21247 - DNA, 20 bp, synthetic construct
  misc_feature 1..20: note = chemically synthesized
  source 1..20: mol_type = other DNA
gagacttgttagttttcttt

SEQ ID NO: 21248 - DNA, 20 bp, synthetic construct
  misc_feature 1..20: note = chemically synthesized
  source 1..20: mol_type = other DNA
ttttttgggagactttttac

SEQ ID NO: 21249 - DNA, 20 bp, synthetic construct
  misc_feature 1..20: note = chemically synthesized
  source 1..20: mol_type = other DNA
attattcattactggtctgt

SEQ ID NO: 21250 - DNA, 20 bp, synthetic construct
  misc_feature 1..20: note = chemically synthesized
  source 1..20: mol_type = other DNA
ccagaaatttattaatttcc

SEQ ID NO: 21251 - DNA, 20 bp, synthetic construct
  misc_feature 1..20: note = chemically synthesized
  source 1..20: mol_type = other DNA
tattaatttcctctagattt

SEQ ID NO: 21252 - DNA, 20 bp, synthetic construct
  misc_feature 1..20: note = chemically synthesized
  source 1..20: mol_type = other DNA
taatatattttcttttttat

SEQ ID NO: 21253 - DNA, 20 bp, synthetic construct
  misc_feature 1..20: note = chemically synthesized
  source 1..20: mol_type = other DNA
tcattttgctaatcccttgt

SEQ ID NO: 21254 - DNA, 20 bp, synthetic construct
  misc_feature 1..20: note = chemically synthesized
  source 1..20: mol_type = other DNA
ttcattttttctttccttct

SEQ ID NO: 21255 - DNA, 20 bp, synthetic construct
  misc_feature 1..20: note = chemically synthesized
  source 1..20: mol_type = other DNA
tttctttccttctgctagtt

SEQ ID NO: 21256 - DNA, 20 bp, synthetic construct
  misc_feature 1..20: note = chemically synthesized
  source 1..20: mol_type = other DNA
ctgctagttttgggttttgt

SEQ ID NO: 21257 - DNA, 20 bp, synthetic construct
  misc_feature 1..20: note = chemically synthesized
  source 1..20: mol_type = other DNA
ttgggttttgttcttgcttt

SEQ ID NO: 21258 - DNA, 20 bp, synthetic construct
  misc_feature 1..20: note = chemically synthesized
  source 1..20: mol_type = other DNA
cttttctagcttgttgaggt

SEQ ID NO: 21259 - DNA, 20 bp, synthetic construct
  misc_feature 1..20: note = chemically synthesized
  source 1..20: mol_type = other DNA
ctagcttgttgaggtacatg

SEQ ID NO: 21260 - DNA, 20 bp, synthetic construct
  misc_feature 1..20: note = chemically synthesized
  source 1..20: mol_type = other DNA
attatatatttgaaatcttt

SEQ ID NO: 21261 - DNA, 20 bp, synthetic construct
  misc_feature 1..20: note = chemically synthesized
  source 1..20: mol_type = other DNA
tctttctatgtttttaattt

SEQ ID NO: 21262 - DNA, 20 bp, synthetic construct
  misc_feature 1..20: note = chemically synthesized
  source 1..20: mol_type = other DNA
tttaatttaagtgtttattg

SEQ ID NO: 21263 - DNA, 20 bp, synthetic construct
  misc_feature 1..20: note = chemically synthesized
  source 1..20: mol_type = other DNA
ttgataagcttctctcttag

SEQ ID NO: 21264 - DNA, 20 bp, synthetic construct
  misc_feature 1..20: note = chemically synthesized
  source 1..20: mol_type = other DNA
gcactgcttttgctgtatcc

SEQ ID NO: 21265 - DNA, 20 bp, synthetic construct
  misc_feature 1..20: note = chemically synthesized
  source 1..20: mol_type = other DNA
tatgttgtatttcaattttc

SEQ ID NO: 21266 - DNA, 20 bp, synthetic construct
  misc_feature 1..20: note = chemically synthesized
  source 1..20: mol_type = other DNA
tttcatttgtttcaaaaaat

SEQ ID NO: 21267 - DNA, 20 bp, synthetic construct
  misc_feature 1..20: note = chemically synthesized
  source 1..20: mol_type = other DNA
ataacgttcattcaggagca

SEQ ID NO: 21268 - DNA, 20 bp, synthetic construct
  misc_feature 1..20: note = chemically synthesized
  source 1..20: mol_type = other DNA
tttaatttccatgtatttgt

SEQ ID NO: 21269 - DNA, 20 bp, synthetic construct
  misc_feature 1..20: note = chemically synthesized
  source 1..20: mol_type = other DNA
ccatgtatttgtataggttt

SEQ ID NO: 21270 - DNA, 20 bp, synthetic construct
  misc_feature 1..20: note = chemically synthesized
  source 1..20: mol_type = other DNA
ggttttaaagtttttcttgt

SEQ ID NO: 21271 - DNA, 20 bp, synthetic construct
  misc_feature 1..20: note = chemically synthesized
  source 1..20: mol_type = other DNA
agtttttcttgttattgatt

SEQ ID NO: 21272 - DNA, 20 bp, synthetic construct
  misc_feature 1..20: note = chemically synthesized
  source 1..20: mol_type = other DNA
tattccattgtggtctgaga

SEQ ID NO: 21273 - DNA, 20 bp, synthetic construct
  misc_feature 1..20: note = chemically synthesized
  source 1..20: mol_type = other DNA
gtggtctgagaagatgctta

SEQ ID NO: 21274 - DNA, 20 bp, synthetic construct
  misc_feature 1..20: note = chemically synthesized
  source 1..20: mol_type = other DNA
tagatccatttggtctaaag

SEQ ID NO: 21275 - DNA, 20 bp, synthetic construct
  misc_feature 1..20: note = chemically synthesized
  source 1..20: mol_type = other DNA
tctaaagtcaagtttaaatc

SEQ ID NO: 21276 - DNA, 20 bp, synthetic construct
  misc_feature 1..20: note = chemically synthesized
  source 1..20: mol_type = other DNA
tctagatgatctatctgatg

SEQ ID NO: 21277 - DNA, 20 bp, synthetic construct
  misc_feature 1..20: note = chemically synthesized
  source 1..20: mol_type = other DNA
aaatccccaactattattgt

SEQ ID NO: 21278 - DNA, 20 bp, synthetic construct
  misc_feature 1..20: note = chemically synthesized
  source 1..20: mol_type = other DNA
caccctttatatctaataac

SEQ ID NO: 21279 - DNA, 20 bp, synthetic construct
  misc_feature 1..20: note = chemically synthesized
  source 1..20: mol_type = other DNA
gatgctctggtgttgagtgt

SEQ ID NO: 21280 - DNA, 20 bp, synthetic construct
  misc_feature 1..20: note = chemically synthesized
  source 1..20: mol_type = other DNA
atgtaatgacttttgtctct

SEQ ID NO: 21281 - DNA, 20 bp, synthetic construct
  misc_feature 1..20: note = chemically synthesized
  source 1..20: mol_type = other DNA
tataactacttttgctcatt

SEQ ID NO: 21282 - DNA, 20 bp, synthetic construct
  misc_feature 1..20: note = chemically synthesized
  source 1..20: mol_type = other DNA
tatttatctttacaagtgag

SEQ ID NO: 21283 - DNA, 20 bp, synthetic construct
  misc_feature 1..20: note = chemically synthesized
  source 1..20: mol_type = other DNA
agtgagataagtttcttata

SEQ ID NO: 21284 - DNA, 20 bp, synthetic construct
  misc_feature 1..20: note = chemically synthesized
  source 1..20: mol_type = other DNA
agcttacaactgggtcatat

SEQ ID NO: 21285 - DNA, 20 bp, synthetic construct
  misc_feature 1..20: note = chemically synthesized
  source 1..20: mol_type = other DNA
caaggctattattgacatgt

SEQ ID NO: 21286 - DNA, 20 bp, synthetic construct
  misc_feature 1..20: note = chemically synthesized
  source 1..20: mol_type = other DNA
cttattcctgccattttgtt

SEQ ID NO: 21287 - DNA, 20 bp, synthetic construct
  misc_feature 1..20: note = chemically synthesized
  source 1..20: mol_type = other DNA
cattttgttaattgattcct

SEQ ID NO: 21288 - DNA, 20 bp, synthetic construct
  misc_feature 1..20: note = chemically synthesized
  source 1..20: mol_type = other DNA
tgttaattgattcctggttg

SEQ ID NO: 21289 - DNA, 20 bp, synthetic construct
  misc_feature 1..20: note = chemically synthesized
  source 1..20: mol_type = other DNA
cctggttgttttgttttttt

SEQ ID NO: 21290 - DNA, 20 bp, synthetic construct
  misc_feature 1..20: note = chemically synthesized
  source 1..20: mol_type = other DNA
gttgttttgtttttttttta

SEQ ID NO: 21291 - DNA, 20 bp, synthetic construct
  misc_feature 1..20: note = chemically synthesized
  source 1..20: mol_type = other DNA
ttttgttttttttttagttt

SEQ ID NO: 21292 - DNA, 20 bp, synthetic construct
  misc_feature 1..20: note = chemically synthesized
  source 1..20: mol_type = other DNA
ttttttttagtttgtttgtt

SEQ ID NO: 21293 - DNA, 20 bp, synthetic construct
  misc_feature 1..20: note = chemically synthesized
  source 1..20: mol_type = other DNA
ctttctttctttcttattat

SEQ ID NO: 21294 - DNA, 20 bp, synthetic construct
  misc_feature 1..20: note = chemically synthesized
  source 1..20: mol_type = other DNA
tctttcttattatttatgat

SEQ ID NO: 21295 - DNA, 20 bp, synthetic construct
  misc_feature 1..20: note = chemically synthesized
  source 1..20: mol_type = other DNA
tattatttatgattgtggtt

SEQ ID NO: 21296 - DNA, 20 bp, synthetic construct
  misc_feature 1..20: note = chemically synthesized
  source 1..20: mol_type = other DNA
ttggtgattttctgtagtgg

SEQ ID NO: 21297 - DNA, 20 bp, synthetic construct
  misc_feature 1..20: note = chemically synthesized
  source 1..20: mol_type = other DNA
gagttctttctcttctttat

SEQ ID NO: 21298 - DNA, 20 bp, synthetic construct
  misc_feature 1..20: note = chemically synthesized
  source 1..20: mol_type = other DNA
ttcaaatttttcttgcccag

SEQ ID NO: 21299 - DNA, 20 bp, synthetic construct
  misc_feature 1..20: note = chemically synthesized
  source 1..20: mol_type = other DNA
tcccatcttctcctggcctg

SEQ ID NO: 21300 - DNA, 20 bp, synthetic construct
  misc_feature 1..20: note = chemically synthesized
  source 1..20: mol_type = other DNA
cccttataagtgactagaca

SEQ ID NO: 21301 - DNA, 20 bp, synthetic construct
  misc_feature 1..20: note = chemically synthesized
  source 1..20: mol_type = other DNA
aagtgactagacattttgct

SEQ ID NO: 21302 - DNA, 20 bp, synthetic construct
  misc_feature 1..20: note = chemically synthesized
  source 1..20: mol_type = other DNA
ctgttttagagttcttactc

SEQ ID NO: 21303 - DNA, 20 bp, synthetic construct
  misc_feature 1..20: note = chemically synthesized
  source 1..20: mol_type = other DNA
gttcttactctttggctttt

SEQ ID NO: 21304 - DNA, 20 bp, synthetic construct
  misc_feature 1..20: note = chemically synthesized
  source 1..20: mol_type = other DNA
gactataatgtgctgtggag

SEQ ID NO: 21305 - DNA, 20 bp, synthetic construct
  misc_feature 1..20: note = chemically synthesized
  source 1..20: mol_type = other DNA
gcattatattatttgggaat

SEQ ID NO: 21306 - DNA, 20 bp, synthetic construct
  misc_feature 1..20: note = chemically synthesized
  source 1..20: mol_type = other DNA
tacatttcttgctagacttg

SEQ ID NO: 21307 - DNA, 20 bp, synthetic construct
  misc_feature 1..20: note = chemically synthesized
  source 1..20: mol_type = other DNA
ttcagctattgtgttgttac

SEQ ID NO: 21308 - DNA, 20 bp, synthetic construct
  misc_feature 1..20: note = chemically synthesized
  source 1..20: mol_type = other DNA
ttcaagttctgaaatttttc

SEQ ID NO: 21309 - DNA, 20 bp, synthetic construct
  misc_feature 1..20: note = chemically synthesized
  source 1..20: mol_type = other DNA
tgcttgatctgatctattgt

SEQ ID NO: 21310 - DNA, 20 bp, synthetic construct
  misc_feature 1..20: note = chemically synthesized
  source 1..20: mol_type = other DNA
aaactcttcagttacagaat

SEQ ID NO: 21311 - DNA, 20 bp, synthetic construct
  misc_feature 1..20: note = chemically synthesized
  source 1..20: mol_type = other DNA
aatttctcattcatatcctg

SEQ ID NO: 21312 - DNA, 20 bp, synthetic construct
  misc_feature 1..20: note = chemically synthesized
  source 1..20: mol_type = other DNA
attcatatcctgaattgttt

SEQ ID NO: 21313 - DNA, 20 bp, synthetic construct
  misc_feature 1..20: note = chemically synthesized
  source 1..20: mol_type = other DNA
ttgtttttctgatttctttt

SEQ ID NO: 21314 - DNA, 20 bp, synthetic construct
  misc_feature 1..20: note = chemically synthesized
  source 1..20: mol_type = other DNA
ctgagttctcttgtgtctca

SEQ ID NO: 21315 - DNA, 20 bp, synthetic construct
  misc_feature 1..20: note = chemically synthesized
  source 1..20: mol_type = other DNA
agcttccttaatatcaacat

SEQ ID NO: 21316 - DNA, 20 bp, synthetic construct
  misc_feature 1..20: note = chemically synthesized
  source 1..20: mol_type = other DNA
tataaatgtcttttttttcc

SEQ ID NO: 21317 - DNA, 20 bp, synthetic construct
  misc_feature 1..20: note = chemically synthesized
  source 1..20: mol_type = other DNA
tgtcatatttcttcaccttt

SEQ ID NO: 21318 - DNA, 20 bp, synthetic construct
  misc_feature 1..20: note = chemically synthesized
  source 1..20: mol_type = other DNA
tgatatctctgcatctggtg

SEQ ID NO: 21319 - DNA, 20 bp, synthetic construct
  misc_feature 1..20: note = chemically synthesized
  source 1..20: mol_type = other DNA
tctgcatctggtgtaatgat

SEQ ID NO: 21320 - DNA, 20 bp, synthetic construct
  misc_feature 1..20: note = chemically synthesized
  source 1..20: mol_type = other DNA
ctggtgtaatgattgctgct

SEQ ID NO: 21321 - DNA, 20 bp, synthetic construct
  misc_feature 1..20: note = chemically synthesized
  source 1..20: mol_type = other DNA
tgctgcttccagttttgtaa

SEQ ID NO: 21322 - DNA, 20 bp, synthetic construct
  misc_feature 1..20: note = chemically synthesized
  source 1..20: mol_type = other DNA
tttctgaagatgtatcttgg

SEQ ID NO: 21323 - DNA, 20 bp, synthetic construct
  misc_feature 1..20: note = chemically synthesized
  source 1..20: mol_type = other DNA
ggtgttgattgagtagggca

SEQ ID NO: 21324 - DNA, 20 bp, synthetic construct
  misc_feature 1..20: note = chemically synthesized
  source 1..20: mol_type = other DNA
gattgagtagggcactttga

SEQ ID NO: 21325 - DNA, 20 bp, synthetic construct
  misc_feature 1..20: note = chemically synthesized
  source 1..20: mol_type = other DNA
gccaacagtatcatcagtgt

SEQ ID NO: 21326 - DNA, 20 bp, synthetic construct
  misc_feature 1..20: note = chemically synthesized
  source 1..20: mol_type = other DNA
tcagtgtctgtgattttttc

SEQ ID NO: 21327 - DNA, 20 bp, synthetic construct
  misc_feature 1..20: note = chemically synthesized
  source 1..20: mol_type = other DNA
gatggtaatgagtctagttg

SEQ ID NO: 21328 - DNA, 20 bp, synthetic construct
  misc_feature 1..20: note = chemically synthesized
  source 1..20: mol_type = other DNA
ggttgattctttggccttca

SEQ ID NO: 21329 - DNA, 20 bp, synthetic construct
  misc_feature 1..20: note = chemically synthesized
  source 1..20: mol_type = other DNA
gattctttggccttcaggca

SEQ ID NO: 21330 - DNA, 20 bp, synthetic construct
  misc_feature 1..20: note = chemically synthesized
  source 1..20: mol_type = other DNA
ctgggctggtgtgtgggtcc

SEQ ID NO: 21331 - DNA, 20 bp, synthetic construct
  misc_feature 1..20: note = chemically synthesized
  source 1..20: mol_type = other DNA
gtgccagttgtgatggcagt

SEQ ID NO: 21332 - DNA, 20 bp, synthetic construct
  misc_feature 1..20: note = chemically synthesized
  source 1..20: mol_type = other DNA
cagattgggtaggcccatca

SEQ ID NO: 21333 - DNA, 20 bp, synthetic construct
  misc_feature 1..20: note = chemically synthesized
  source 1..20: mol_type = other DNA
catcatcaggcttctgggag

SEQ ID NO: 21334 - DNA, 20 bp, synthetic construct
  misc_feature 1..20: note = chemically synthesized
  source 1..20: mol_type = other DNA
tgtctctgggttcccagaca

SEQ ID NO: 21335 - DNA, 20 bp, synthetic construct
  misc_feature 1..20: note = chemically synthesized
  source 1..20: mol_type = other DNA
tcttgaaggggtgcggggtg

SEQ ID NO: 21336 - DNA, 20 bp, synthetic construct
  misc_feature 1..20: note = chemically synthesized
  source 1..20: mol_type = other DNA
taaatgggttgctggtgggc

SEQ ID NO: 21337 - DNA, 20 bp, synthetic construct
  misc_feature 1..20: note = chemically synthesized
  source 1..20: mol_type = other DNA
agtggggtagcattttctta

SEQ ID NO: 21338 - DNA, 20 bp, synthetic construct
  misc_feature 1..20: note = chemically synthesized
  source 1..20: mol_type = other DNA
ctgtgggtgggggatgtcag

SEQ ID NO: 21339 - DNA, 20 bp, synthetic construct
  misc_feature 1..20: note = chemically synthesized
  source 1..20: mol_type = other DNA
ttctctggagcaatgccttt

SEQ ID NO: 21340 - DNA, 20 bp, synthetic construct
  misc_feature 1..20: note = chemically synthesized
  source 1..20: mol_type = other DNA
gtcaagggactctcctgtgg

SEQ ID NO: 21341 - DNA, 20 bp, synthetic construct
  misc_feature 1..20: note = chemically synthesized
  source 1..20: mol_type = other DNA
tcacagaggatccctactgg

SEQ ID NO: 21342 - DNA, 20 bp, synthetic construct
  misc_feature 1..20: note = chemically synthesized
  source 1..20: mol_type = other DNA
gatccctactgggtaggctt

SEQ ID NO: 21343 - DNA, 20 bp, synthetic construct
  misc_feature 1..20: note = chemically synthesized
  source 1..20: mol_type = other DNA
tccctccccttcattgcctt

SEQ ID NO: 21344 - DNA, 20 bp, synthetic construct
  misc_feature 1..20: note = chemically synthesized
  source 1..20: mol_type = other DNA
attccagaattctctcttat

SEQ ID NO: 21345 - DNA, 20 bp, synthetic construct
  misc_feature 1..20: note = chemically synthesized
  source 1..20: mol_type = other DNA
gccccttcccttgaaatttt

SEQ ID NO: 21346 - DNA, 20 bp, synthetic construct
  misc_feature 1..20: note = chemically synthesized
  source 1..20: mol_type = other DNA
cccttgaaattttttaagct

SEQ ID NO: 21347 - DNA, 20 bp, synthetic construct
  misc_feature 1..20: note = chemically synthesized
  source 1..20: mol_type = other DNA
agaagtagcgaattagttaa

SEQ ID NO: 21348 - DNA, 20 bp, synthetic construct
  misc_feature 1..20: note = chemically synthesized
  source 1..20: mol_type = other DNA
ttcatttcccaaatcaaatc

SEQ ID NO: 21349 - DNA, 20 bp, synthetic construct
  misc_feature 1..20: note = chemically synthesized
  source 1..20: mol_type = other DNA
ttatgttcttcagcaaataa

SEQ ID NO: 21350 - DNA, 20 bp, synthetic construct
  misc_feature 1..20: note = chemically synthesized
  source 1..20: mol_type = other DNA
atacgtaatctaacaaacaa

SEQ ID NO: 21351 - DNA, 20 bp, synthetic construct
  misc_feature 1..20: note = chemically synthesized
  source 1..20: mol_type = other DNA
gatgcatagttgcaaataaa

SEQ ID NO: 21352 - DNA, 20 bp, synthetic construct
  misc_feature 1..20: note = chemically synthesized
  source 1..20: mol_type = other DNA
aattttgcatttttgtggat

SEQ ID NO: 21353 - DNA, 20 bp, synthetic construct
  misc_feature 1..20: note = chemically synthesized
  source 1..20: mol_type = other DNA
ttgtggatagtggttttgaa

SEQ ID NO: 21354 - DNA, 20 bp, synthetic construct
  misc_feature 1..20: note = chemically synthesized
  source 1..20: mol_type = other DNA
tagttgcccttgcaaattgg

SEQ ID NO: 21355 - DNA, 20 bp, synthetic construct
  misc_feature 1..20: note = chemically synthesized
  source 1..20: mol_type = other DNA
tttcctcaacaaataatttt

SEQ ID NO: 21356 - DNA, 20 bp, synthetic construct
  misc_feature 1..20: note = chemically synthesized
  source 1..20: mol_type = other DNA
atgacatcaatttatgttaa

SEQ ID NO: 21357 - DNA, 20 bp, synthetic construct
  misc_feature 1..20: note = chemically synthesized
  source 1..20: mol_type = other DNA
tgtctgttcttgtccagtct

SEQ ID NO: 21358 - DNA, 20 bp, synthetic construct
  misc_feature 1..20: note = chemically synthesized
  source 1..20: mol_type = other DNA
ttcttgtccagtctagaagt

SEQ ID NO: 21359 - DNA, 20 bp, synthetic construct
  misc_feature 1..20: note = chemically synthesized
  source 1..20: mol_type = other DNA
ctcatcacataacatctgaa

SEQ ID NO: 21360 - DNA, 20 bp, synthetic construct
  misc_feature 1..20: note = chemically synthesized
  source 1..20: mol_type = other DNA
attatcagactctgctcaat

SEQ ID NO: 21361 - DNA, 20 bp, synthetic construct
  misc_feature 1..20: note = chemically synthesized
  source 1..20: mol_type = other DNA
agatgaaattcttaaggaca

SEQ ID NO: 21362 - DNA, 20 bp, synthetic construct
  misc_feature 1..20: note = chemically synthesized
  source 1..20: mol_type = other DNA
cttgtgtagactcatatgaa

SEQ ID NO: 21363 - DNA, 20 bp, synthetic construct
  misc_feature 1..20: note = chemically synthesized
  source 1..20: mol_type = other DNA
atgaagttctactttgtgac

SEQ ID NO: 21364 - DNA, 20 bp, synthetic construct
  misc_feature 1..20: note = chemically synthesized
  source 1..20: mol_type = other DNA
accattgattgtgactattg

SEQ ID NO: 21365 - DNA, 20 bp, synthetic construct
  misc_feature 1..20: note = chemically synthesized
  source 1..20: mol_type = other DNA
ctgtagtctgatgaaatgga

SEQ ID NO: 21366 - DNA, 20 bp, synthetic construct
  misc_feature 1..20: note = chemically synthesized
  source 1..20: mol_type = other DNA
aagtaatatataagtaataa

SEQ ID NO: 21367 - DNA, 20 bp, synthetic construct
  misc_feature 1..20: note = chemically synthesized
  source 1..20: mol_type = other DNA
attgctttttgcaattgagt

SEQ ID NO: 21368 - DNA, 20 bp, synthetic construct
  misc_feature 1..20: note = chemically synthesized
  source 1..20: mol_type = other DNA
atgccaggatcttattacct

SEQ ID NO: 21369 - DNA, 20 bp, synthetic construct
  misc_feature 1..20: note = chemically synthesized
  source 1..20: mol_type = other DNA
tattacctccaggatttcac

SEQ ID NO: 21370 - DNA, 20 bp, synthetic construct
  misc_feature 1..20: note = chemically synthesized
  source 1..20: mol_type = other DNA
aaagtattgctcaagtaatc

SEQ ID NO: 21371 - DNA, 20 bp, synthetic construct
  misc_feature 1..20: note = chemically synthesized
  source 1..20: mol_type = other DNA
gattatttgtgtattctcac

SEQ ID NO: 21372 - DNA, 20 bp, synthetic construct
  misc_feature 1..20: note = chemically synthesized
  source 1..20: mol_type = other DNA
tgtcacgggaaatatcctgc

SEQ ID NO: 21373 - DNA, 20 bp, synthetic construct
  misc_feature 1..20: note = chemically synthesized
  source 1..20: mol_type = other DNA
tctttccttgcacactctac

SEQ ID NO: 21374 - DNA, 20 bp, synthetic construct
  misc_feature 1..20: note = chemically synthesized
  source 1..20: mol_type = other DNA
aattaccccattaagtgata

SEQ ID NO: 21375 - DNA, 20 bp, synthetic construct
  misc_feature 1..20: note = chemically synthesized
  source 1..20: mol_type = other DNA
tatgtactagttcgttatca

SEQ ID NO: 21376 - DNA, 20 bp, synthetic construct
  misc_feature 1..20: note = chemically synthesized
  source 1..20: mol_type = other DNA
ctgggtaatttataaggaaa

SEQ ID NO: 21377 - DNA, 20 bp, synthetic construct
  misc_feature 1..20: note = chemically synthesized
  source 1..20: mol_type = other DNA
tgccaagcaaaagggggaaa

SEQ ID NO: 21378 - DNA, 20 bp, synthetic construct
  misc_feature 1..20: note = chemically synthesized
  source 1..20: mol_type = other DNA
gagcatgagagtaacctcct

SEQ ID NO: 21379 - DNA, 20 bp, synthetic construct
  misc_feature 1..20: note = chemically synthesized
  source 1..20: mol_type = other DNA
caaatccctcccacaacacg

SEQ ID NO: 21380 - DNA, 20 bp, synthetic construct
  misc_feature 1..20: note = chemically synthesized
  source 1..20: mol_type = other DNA
tatgggaactacaattcaag

SEQ ID NO: 21381 - DNA, 20 bp, synthetic construct
  misc_feature 1..20: note = chemically synthesized
  source 1..20: mol_type = other DNA
atgttgcatagtggtgaagt

SEQ ID NO: 21382 - DNA, 20 bp, synthetic construct
  misc_feature 1..20: note = chemically synthesized
  source 1..20: mol_type = other DNA
agtgaatgttgtatccaatc

SEQ ID NO: 21383 - DNA, 20 bp, synthetic construct
  misc_feature 1..20: note = chemically synthesized
  source 1..20: mol_type = other DNA
tattatttcattctatatgt

SEQ ID NO: 21384 - DNA, 20 bp, synthetic construct
  misc_feature 1..20: note = chemically synthesized
  source 1..20: mol_type = other DNA
tctatatgtctatgcttact

SEQ ID NO: 21385 - DNA, 20 bp, synthetic construct
  misc_feature 1..20: note = chemically synthesized
  source 1..20: mol_type = other DNA
tctcactaaatgagaacata

SEQ ID NO: 21386 - DNA, 20 bp, synthetic construct
  misc_feature 1..20: note = chemically synthesized
  source 1..20: mol_type = other DNA
agaacatactgtgtttgact

SEQ ID NO: 21387 - DNA, 20 bp, synthetic construct
  misc_feature 1..20: note = chemically synthesized
  source 1..20: mol_type = other DNA
ataatgtcctccagttctaa

SEQ ID NO: 21388 - DNA, 20 bp, synthetic construct
  misc_feature 1..20: note = chemically synthesized
  source 1..20: mol_type = other DNA
taaccatgtttctagagaag

SEQ ID NO: 21389 - DNA, 20 bp, synthetic construct
  misc_feature 1..20: note = chemically synthesized
  source 1..20: mol_type = other DNA
cgtccattggtagacattta

SEQ ID NO: 21390 - DNA, 20 bp, synthetic construct
  misc_feature 1..20: note = chemically synthesized
  source 1..20: mol_type = other DNA
ctttgggtccatacccagta

SEQ ID NO: 21391 - DNA, 20 bp, synthetic construct
  misc_feature 1..20: note = chemically synthesized
  source 1..20: mol_type = other DNA
ccatacccagtagtgggatt

SEQ ID NO: 21392 - DNA, 20 bp, synthetic construct
  misc_feature 1..20: note = chemically synthesized
  source 1..20: mol_type = other DNA
attgcaggattgaatggtag

SEQ ID NO: 21393 - DNA, 20 bp, synthetic construct
  misc_feature 1..20: note = chemically synthesized
  source 1..20: mol_type = other DNA
aatcttcatgctgtcttcca

SEQ ID NO: 21394 - DNA, 20 bp, synthetic construct
  misc_feature 1..20: note = chemically synthesized
  source 1..20: mol_type = other DNA
tccacatcctcaccaacatc

SEQ ID NO: 21395 - DNA, 20 bp, synthetic construct
  misc_feature 1..20: note = chemically synthesized
  source 1..20: mol_type = other DNA
ggcataaggaggtatcatat

SEQ ID NO: 21396 - DNA, 20 bp, synthetic construct
  misc_feature 1..20: note = chemically synthesized
  source 1..20: mol_type = other DNA
tggtggttttaatttgcatt

SEQ ID NO: 21397 - DNA, 20 bp, synthetic construct
  misc_feature 1..20: note = chemically synthesized
  source 1..20: mol_type = other DNA
agtgatgttgaacttttttt

SEQ ID NO: 21398 - DNA, 20 bp, synthetic construct
  misc_feature 1..20: note = chemically synthesized
  source 1..20: mol_type = other DNA
tagatagatagatagataga

SEQ ID NO: 21399 - DNA, 20 bp, synthetic construct
  misc_feature 1..20: note = chemically synthesized
  source 1..20: mol_type = other DNA
atatagatttagatataaaa

SEQ ID NO: 21400 - DNA, 20 bp, synthetic construct
  misc_feature 1..20: note = chemically synthesized
  source 1..20: mol_type = other DNA
aagctgaaggacttggagtc

SEQ ID NO: 21401 - DNA, 20 bp, synthetic construct
  misc_feature 1..20: note = chemically synthesized
  source 1..20: mol_type = other DNA
atccagcatgggagaaagat

SEQ ID NO: 21402 - DNA, 20 bp, synthetic construct
  misc_feature 1..20: note = chemically synthesized
  source 1..20: mol_type = other DNA
ggcttggaggctaagccagt

SEQ ID NO: 21403 - DNA, 20 bp, synthetic construct
  misc_feature 1..20: note = chemically synthesized
  source 1..20: mol_type = other DNA
taagccagtccaggattttc

SEQ ID NO: 21404 - DNA, 20 bp, synthetic construct
  misc_feature 1..20: note = chemically synthesized
  source 1..20: mol_type = other DNA
ttttcacatgttttttttct

SEQ ID NO: 21405 - DNA, 20 bp, synthetic construct
  misc_feature 1..20: note = chemically synthesized
  source 1..20: mol_type = other DNA
tatatcctggccacactggc

SEQ ID NO: 21406 - DNA, 20 bp, synthetic construct
  misc_feature 1..20: note = chemically synthesized
  source 1..20: mol_type = other DNA
aactgattagatggtgccca

SEQ ID NO: 21407 - DNA, 20 bp, synthetic construct
  misc_feature 1..20: note = chemically synthesized
  source 1..20: mol_type = other DNA
agtattaaccatcacaagtc

SEQ ID NO: 21408 - DNA, 20 bp, synthetic construct
  misc_feature 1..20: note = chemically synthesized
  source 1..20: mol_type = other DNA
acaagtgtatacagacacga

SEQ ID NO: 21409 - DNA, 20 bp, synthetic construct
  misc_feature 1..20: note = chemically synthesized
  source 1..20: mol_type = other DNA
tcctgcctggaatggcctgt

SEQ ID NO: 21410 - DNA, 20 bp, synthetic construct
  misc_feature 1..20: note = chemically synthesized
  source 1..20: mol_type = other DNA
ggatctcctatattccatgc

SEQ ID NO: 21411 - DNA, 20 bp, synthetic construct
  misc_feature 1..20: note = chemically synthesized
  source 1..20: mol_type = other DNA
acctccattgtggagttgta

SEQ ID NO: 21412 - DNA, 20 bp, synthetic construct
  misc_feature 1..20: note = chemically synthesized
  source 1..20: mol_type = other DNA
tccaggtggcaatcttaatt

SEQ ID NO: 21413 - DNA, 20 bp, synthetic construct
  misc_feature 1..20: note = chemically synthesized
  source 1..20: mol_type = other DNA
cttccacttccacttccacc

SEQ ID NO: 21414 - DNA, 20 bp, synthetic construct
  misc_feature 1..20: note = chemically synthesized
  source 1..20: mol_type = other DNA
aaacagtaccatatattgga

SEQ ID NO: 21415 - DNA, 20 bp, synthetic construct
  misc_feature 1..20: note = chemically synthesized
  source 1..20: mol_type = other DNA
acttcaaaaggccattcaaa

SEQ ID NO: 21416 - DNA, 20 bp, synthetic construct
  misc_feature 1..20: note = chemically synthesized
  source 1..20: mol_type = other DNA
acttctttagccataaagtg

SEQ ID NO: 21417 - DNA, 20 bp, synthetic construct
  misc_feature 1..20: note = chemically synthesized
  source 1..20: mol_type = other DNA
atgacagtggatacggcatt

SEQ ID NO: 21418 - DNA, 20 bp, synthetic construct
  misc_feature 1..20: note = chemically synthesized
  source 1..20: mol_type = other DNA
tcttggcataagcattgagt

SEQ ID NO: 21419 - DNA, 20 bp, synthetic construct
  misc_feature 1..20: note = chemically synthesized
  source 1..20: mol_type = other DNA
ccgaggaatggtgccatatc

SEQ ID NO: 21420 - DNA, 20 bp, synthetic construct
  misc_feature 1..20: note = chemically synthesized
  source 1..20: mol_type = other DNA
caagcagtggctgtggccag

SEQ ID NO: 21421 - DNA, 20 bp, synthetic construct
  misc_feature 1..20: note = chemically synthesized
  source 1..20: mol_type = other DNA
cagaattgatcatcctatcc

SEQ ID NO: 21422 - DNA, 20 bp, synthetic construct
  misc_feature 1..20: note = chemically synthesized
  source 1..20: mol_type = other DNA
acatgggatgaaaatatctt

SEQ ID NO: 21423 - DNA, 20 bp, synthetic construct
  misc_feature 1..20: note = chemically synthesized
  source 1..20: mol_type = other DNA
ctttgtcatcaattttccag

SEQ ID NO: 21424 - DNA, 20 bp, synthetic construct
  misc_feature 1..20: note = chemically synthesized
  source 1..20: mol_type = other DNA
gctcaaagttctgccaacta

SEQ ID NO: 21425 - DNA, 20 bp, synthetic construct
  misc_feature 1..20: note = chemically synthesized
  source 1..20: mol_type = other DNA
tgatgactcatagtcaaata

SEQ ID NO: 21426 - DNA, 20 bp, synthetic construct
  misc_feature 1..20: note = chemically synthesized
  source 1..20: mol_type = other DNA
ccaaagcccagtaacaggcc

SEQ ID NO: 21427 - DNA, 20 bp, synthetic construct
  misc_feature 1..20: note = chemically synthesized
  source 1..20: mol_type = other DNA
caaaatcctagaggcctccg

SEQ ID NO: 21428 - DNA, 20 bp, synthetic construct
  misc_feature 1..20: note = chemically synthesized
  source 1..20: mol_type = other DNA
tcatatggcccaagtggcat

SEQ ID NO: 21429 - DNA, 20 bp, synthetic construct
  misc_feature 1..20: note = chemically synthesized
  source 1..20: mol_type = other DNA
gtagaaggtccctgaattta

SEQ ID NO: 21430 - DNA, 20 bp, synthetic construct
  misc_feature 1..20: note = chemically synthesized
  source 1..20: mol_type = other DNA
atgtctcatcaataaatcca

SEQ ID NO: 21431 - DNA, 20 bp, synthetic construct
  misc_feature 1..20: note = chemically synthesized
  source 1..20: mol_type = other DNA
ggtgagcaagttctctccaa

SEQ ID NO: 21432 - DNA, 20 bp, synthetic construct
  misc_feature 1..20: note = chemically synthesized
  source 1..20: mol_type = other DNA
ccaaccaacttcactatgtt

SEQ ID NO: 21433 - DNA, 20 bp, synthetic construct
  misc_feature 1..20: note = chemically synthesized
  source 1..20: mol_type = other DNA
actctctaaacaattgatgc

SEQ ID NO: 21434 - DNA, 20 bp, synthetic construct
  misc_feature 1..20: note = chemically synthesized
  source 1..20: mol_type = other DNA
ctctatatctatatctatat

SEQ ID NO: 21435 - DNA, 20 bp, synthetic construct
  misc_feature 1..20: note = chemically synthesized
  source 1..20: mol_type = other DNA
tagccttttcacatttttct

SEQ ID NO: 21436 - DNA, 20 bp, synthetic construct
  misc_feature 1..20: note = chemically synthesized
  source 1..20: mol_type = other DNA
tatatcctggctgtgctggc

SEQ ID NO: 21437 - DNA, 20 bp, synthetic construct
  misc_feature 1..20: note = chemically synthesized
  source 1..20: mol_type = other DNA
aactgattagatggtgccca

SEQ ID NO: 21438 - DNA, 20 bp, synthetic construct
  misc_feature 1..20: note = chemically synthesized
  source 1..20: mol_type = other DNA
cacagtcactttctaatgag

SEQ ID NO: 21439 - DNA, 20 bp, synthetic construct
  misc_feature 1..20: note = chemically synthesized
  source 1..20: mol_type = other DNA
ttttttgttgttgagttcct

SEQ ID NO: 21440 - DNA, 20 bp, synthetic construct
  misc_feature 1..20: note = chemically synthesized
  source 1..20: mol_type = other DNA
tattagccttttgttgcatt

SEQ ID NO: 21441 - DNA, 20 bp, synthetic construct
  misc_feature 1..20: note = chemically synthesized
  source 1..20: mol_type = other DNA
tttttctcattctgtaggtt

SEQ ID NO: 21442 - DNA, 20 bp, synthetic construct
  misc_feature 1..20: note = chemically synthesized
  source 1..20: mol_type = other DNA
tgtaggttatccgtttactc

SEQ ID NO: 21443 - DNA, 20 bp, synthetic construct
  misc_feature 1..20: note = chemically synthesized
  source 1..20: mol_type = other DNA
cttttgcggtgcagaagcat

SEQ ID NO: 21444 - DNA, 20 bp, synthetic construct
  misc_feature 1..20: note = chemically synthesized
  source 1..20: mol_type = other DNA
agtttaattaagtcccattt

SEQ ID NO: 21445 - DNA, 20 bp, synthetic construct
  misc_feature 1..20: note = chemically synthesized
  source 1..20: mol_type = other DNA
attaagtcccatttgtctgt

SEQ ID NO: 21446 - DNA, 20 bp, synthetic construct
  misc_feature 1..20: note = chemically synthesized
  source 1..20: mol_type = other DNA
tttgtctgtttttgtttttg

SEQ ID NO: 21447 - DNA, 20 bp, synthetic construct
  misc_feature 1..20: note = chemically synthesized
  source 1..20: mol_type = other DNA
ctgtttttgtttttgttgtg

SEQ ID NO: 21448 - DNA, 20 bp, synthetic construct
  misc_feature 1..20: note = chemically synthesized
  source 1..20: mol_type = other DNA
aagttgactagttcagtgta

SEQ ID NO: 21449 - DNA, 20 bp, synthetic construct
  misc_feature 1..20: note = chemically synthesized
  source 1..20: mol_type = other DNA
tttctaattttttgccatca

SEQ ID NO: 21450 - DNA, 20 bp, synthetic construct
  misc_feature 1..20: note = chemically synthesized
  source 1..20: mol_type = other DNA
tctccttaattttcccccag

SEQ ID NO: 21451 - DNA, 20 bp, synthetic construct
  misc_feature 1..20: note = chemically synthesized
  source 1..20: mol_type = other DNA
ttccaaatgtatccatatat

SEQ ID NO: 21452 - DNA, 20 bp, synthetic construct
  misc_feature 1..20: note = chemically synthesized
  source 1..20: mol_type = other DNA
tgtatccatatattgtggct

SEQ ID NO: 21453 - DNA, 20 bp, synthetic construct
  misc_feature 1..20: note = chemically synthesized
  source 1..20: mol_type = other DNA
tattagaggagagaattaag

SEQ ID NO: 21454 - DNA, 20 bp, synthetic construct
  misc_feature 1..20: note = chemically synthesized
  source 1..20: mol_type = other DNA
agacaccgagttaaagaagg

SEQ ID NO: 21455 - DNA, 20 bp, synthetic construct
  misc_feature 1..20: note = chemically synthesized
  source 1..20: mol_type = other DNA
aggaagggctttattcggct

SEQ ID NO: 21456 - DNA, 20 bp, synthetic construct
  misc_feature 1..20: note = chemically synthesized
  source 1..20: mol_type = other DNA
gagcaattcctgtccctttt

SEQ ID NO: 21457 - DNA, 20 bp, synthetic construct
  misc_feature 1..20: note = chemically synthesized
  source 1..20: mol_type = other DNA
cagaatggaacagaacagga

SEQ ID NO: 21458 - DNA, 20 bp, synthetic construct
  misc_feature 1..20: note = chemically synthesized
  source 1..20: mol_type = other DNA
gaacaggacagggattttca

SEQ ID NO: 21459 - DNA, 20 bp, synthetic construct
  misc_feature 1..20: note = chemically synthesized
  source 1..20: mol_type = other DNA
aggcccaggatgtggtctca

SEQ ID NO: 21460 - DNA, 20 bp, synthetic construct
  misc_feature 1..20: note = chemically synthesized
  source 1..20: mol_type = other DNA
gtggtctcaggctgtttgcc

SEQ ID NO: 21461 - DNA, 20 bp, synthetic construct
  misc_feature 1..20: note = chemically synthesized
  source 1..20: mol_type = other DNA
tgtggatttcatttctgcct

SEQ ID NO: 21462 - DNA, 20 bp, synthetic construct
  misc_feature 1..20: note = chemically synthesized
  source 1..20: mol_type = other DNA
atgaaatacgtatttgtgtt

SEQ ID NO: 21463 - DNA, 20 bp, synthetic construct
  misc_feature 1..20: note = chemically synthesized
  source 1..20: mol_type = other DNA
gttctccttatcaaaaggta

SEQ ID NO: 21464 - DNA, 20 bp, synthetic construct
  misc_feature 1..20: note = chemically synthesized
  source 1..20: mol_type = other DNA
ttatcaaaaggtactttgct

SEQ ID NO: 21465 - DNA, 20 bp, synthetic construct
  misc_feature 1..20: note = chemically synthesized
  source 1..20: mol_type = other DNA
ctttaaaagataaatgacta

SEQ ID NO: 21466 - DNA, 20 bp, synthetic construct
  misc_feature 1..20: note = chemically synthesized
  source 1..20: mol_type = other DNA
gataaatgactatgtagctt

SEQ ID NO: 21467 - DNA, 20 bp, synthetic construct
  misc_feature 1..20: note = chemically synthesized
  source 1..20: mol_type = other DNA
agaaggaggaagagaggtga

SEQ ID NO: 21468 - DNA, 20 bp, synthetic construct
  misc_feature 1..20: note = chemically synthesized
  source 1..20: mol_type = other DNA
ctttgacactacaaagtgac

SEQ ID NO: 21469 - DNA, 20 bp, synthetic construct
  misc_feature 1..20: note = chemically synthesized
  source 1..20: mol_type = other DNA
tttgaaaggtaaataaatcc

SEQ ID NO: 21470 - DNA, 20 bp, synthetic construct
  misc_feature 1..20: note = chemically synthesized
  source 1..20: mol_type = other DNA
aacagttggaggcatctata

SEQ ID NO: 21471 - DNA, 22 bp, synthetic construct
  misc_feature 1..22: note = chemically synthesized
  source 1..22: mol_type = other DNA
gcagccatgcttattcattgcg

SEQ ID NO: 21472 - DNA, 22 bp, synthetic construct
  misc_feature 1..22: note = chemically synthesized
  source 1..22: mol_type = other DNA
attcattgcgtccactgctctt

SEQ ID NO: 21473 - DNA, 22 bp, synthetic construct
  misc_feature 1..22: note = chemically synthesized
  source 1..22: mol_type = other DNA
ttcattgcgtccactgctcttc

SEQ ID NO: 21474 - DNA, 22 bp, synthetic construct
  misc_feature 1..22: note = chemically synthesized
  source 1..22: mol_type = other DNA
attgcgtccactgctcttctga

SEQ ID NO: 21475 - DNA, 22 bp, synthetic construct
  misc_feature 1..22: note = chemically synthesized
  source 1..22: mol_type = other DNA
cgtccactgctcttctgacagc

SEQ ID NO: 21476 - DNA, 22 bp, synthetic construct
  misc_feature 1..22: note = chemically synthesized
  source 1..22: mol_type = other DNA
ctcttctgacagcatcatttac

SEQ ID NO: 21477 - DNA, 22 bp, synthetic construct
  misc_feature 1..22: note = chemically synthesized
  source 1..22: mol_type = other DNA
ttctgacagcatcatttacagg

SEQ ID NO: 21478 - DNA, 22 bp, synthetic construct
  misc_feature 1..22: note = chemically synthesized
  source 1..22: mol_type = other DNA
ctgacagcatcatttacaggtt

SEQ ID NO: 21479 - DNA, 22 bp, synthetic construct
  misc_feature 1..22: note = chemically synthesized
  source 1..22: mol_type = other DNA
tgacagcatcatttacaggttc

SEQ ID NO: 21480 - DNA, 22 bp, synthetic construct
  misc_feature 1..22: note = chemically synthesized
  source 1..22: mol_type = other DNA
acagcatcatttacaggttcac

SEQ ID NO: 21481 - DNA, 22 bp, synthetic construct
  misc_feature 1..22: note = chemically synthesized
  source 1..22: mol_type = other DNA
acaggttcacactgttccacct

SEQ ID NO: 21482 - DNA, 22 bp, synthetic construct
  misc_feature 1..22: note = chemically synthesized
  source 1..22: mol_type = other DNA
caggttcacactgttccacctg

SEQ ID NO: 21483 - DNA, 22 bp, synthetic construct
  misc_feature 1..22: note = chemically synthesized
  source 1..22: mol_type = other DNA
acactgttccacctgagtcttc

SEQ ID NO: 21484 - DNA, 22 bp, synthetic construct
  misc_feature 1..22: note = chemically synthesized
  source 1..22: mol_type = other DNA
ttccacctgagtcttcatatta

SEQ ID NO: 21485 - DNA, 22 bp, synthetic construct
  misc_feature 1..22: note = chemically synthesized
  source 1..22: mol_type = other DNA
cacctgagtcttcatattatgc

SEQ ID NO: 21486 - DNA, 22 bp, synthetic construct
  misc_feature 1..22: note = chemically synthesized
  source 1..22: mol_type = other DNA
agtcttcatattatgctcaaaa

SEQ ID NO: 21487 - DNA, 22 bp, synthetic construct
  misc_feature 1..22: note = chemically synthesized
  source 1..22: mol_type = other DNA
catattatgctcaaaatatgga

SEQ ID NO: 21488 - DNA, 22 bp, synthetic construct
  misc_feature 1..22: note = chemically synthesized
  source 1..22: mol_type = other DNA
atattatgctcaaaatatggac

SEQ ID NO: 21489 - DNA, 22 bp, synthetic construct
  misc_feature 1..22: note = chemically synthesized
  source 1..22: mol_type = other DNA
tgctcaaaatatggacctatca

SEQ ID NO: 21490 - DNA, 22 bp, synthetic construct
  misc_feature 1..22: note = chemically synthesized
  source 1..22: mol_type = other DNA
aaaatatggacctatcagaaaa

SEQ ID NO: 21491 - DNA, 22 bp, synthetic construct
  misc_feature 1..22: note = chemically synthesized
  source 1..22: mol_type = other DNA
tcagaaaatagttctctcccca

SEQ ID NO: 21492 - DNA, 22 bp, synthetic construct
  misc_feature 1..22: note = chemically synthesized
  source 1..22: mol_type = other DNA
tctccccattcatctgctgttg

SEQ ID NO: 21493 - DNA, 22 bp, synthetic construct
  misc_feature 1..22: note = chemically synthesized
  source 1..22: mol_type = other DNA
tccccattcatctgctgttgtt

SEQ ID NO: 21494 - DNA, 22 bp, synthetic construct
  misc_feature 1..22: note = chemically synthesized
  source 1..22: mol_type = other DNA
cccattcatctgctgttgtttt

SEQ ID NO: 21495 - DNA, 22 bp, synthetic construct
  misc_feature 1..22: note = chemically synthesized
  source 1..22: mol_type = other DNA
atctgctgttgttttggccttt

SEQ ID NO: 21496 - DNA, 22 bp, synthetic construct
  misc_feature 1..22: note = chemically synthesized
  source 1..22: mol_type = other DNA
ctgttgttttggcctttgtctg

SEQ ID NO: 21497 - DNA, 22 bp, synthetic construct
  misc_feature 1..22: note = chemically synthesized
  source 1..22: mol_type = other DNA
ttgttttggcctttgtctgaat

SEQ ID NO: 21498 - DNA, 22 bp, synthetic construct
  misc_feature 1..22: note = chemically synthesized
  source 1..22: mol_type = other DNA
ttttggcctttgtctgaatcac

SEQ ID NO: 21499 - DNA, 22 bp, synthetic construct
  misc_feature 1..22: note = chemically synthesized
  source 1..22: mol_type = other DNA
tggcctttgtctgaatcacagt

SEQ ID NO: 21500 - DNA, 22 bp, synthetic construct
  misc_feature 1..22: note = chemically synthesized
  source 1..22: mol_type = other DNA
ggcctttgtctgaatcacagta

SEQ ID NO: 21501 - DNA, 22 bp, synthetic construct
  misc_feature 1..22: note = chemically synthesized
  source 1..22: mol_type = other DNA
gcctttgtctgaatcacagtat

SEQ ID NO: 21502 - DNA, 22 bp, synthetic construct
  misc_feature 1..22: note = chemically synthesized
  source 1..22: mol_type = other DNA
tgtctgaatcacagtatagatg

SEQ ID NO: 21503 - DNA, 22 bp, synthetic construct
  misc_feature 1..22: note = chemically synthesized
  source 1..22: mol_type = other DNA
gtctgaatcacagtatagatgc

SEQ ID NO: 21504 - DNA, 22 bp, synthetic construct
  misc_feature 1..22: note = chemically synthesized
  source 1..22: mol_type = other DNA
tctgaatcacagtatagatgcc

SEQ ID NO: 21505 - DNA, 22 bp, synthetic construct
  misc_feature 1..22: note = chemically synthesized
  source 1..22: mol_type = other DNA
aatcacagtatagatgcctcca

SEQ ID NO: 21506 - DNA, 22 bp, synthetic construct
  misc_feature 1..22: note = chemically synthesized
  source 1..22: mol_type = other DNA
caactgttaaaaggaaaaaagt

SEQ ID NO: 21507 - DNA, 22 bp, synthetic construct
  misc_feature 1..22: note = chemically synthesized
  source 1..22: mol_type = other DNA
ttaaaaggaaaaaagtttctat

SEQ ID NO: 21508 - DNA, 22 bp, synthetic construct
  misc_feature 1..22: note = chemically synthesized
  source 1..22: mol_type = other DNA
aaaggaaaaaagtttctattat

SEQ ID NO: 21509 - DNA, 22 bp, synthetic construct
  misc_feature 1..22: note = chemically synthesized
  source 1..22: mol_type = other DNA
ctattatcattcaggttagcaa

SEQ ID NO: 21510 - DNA, 22 bp, synthetic construct
  misc_feature 1..22: note = chemically synthesized
  source 1..22: mol_type = other DNA
tattatcattcaggttagcaat

SEQ ID NO: 21511 - DNA, 22 bp, synthetic construct
  misc_feature 1..22: note = chemically synthesized
  source 1..22: mol_type = other DNA
ttatcattcaggttagcaattt

SEQ ID NO: 21512 - DNA, 22 bp, synthetic construct
  misc_feature 1..22: note = chemically synthesized
  source 1..22: mol_type = other DNA
tcattcaggttagcaatttgtt

SEQ ID NO: 21513 - DNA, 22 bp, synthetic construct
  misc_feature 1..22: note = chemically synthesized
  source 1..22: mol_type = other DNA
aggttagcaatttgtttaaagt

SEQ ID NO: 21514 - DNA, 22 bp, synthetic construct
  misc_feature 1..22: note = chemically synthesized
  source 1..22: mol_type = other DNA
gcaatttgtttaaagtaataag

SEQ ID NO: 21515 - DNA, 22 bp, synthetic construct
  misc_feature 1..22: note = chemically synthesized
  source 1..22: mol_type = other DNA
gtttaaagtaataagggatgga

SEQ ID NO: 21516 - DNA, 22 bp, synthetic construct
  misc_feature 1..22: note = chemically synthesized
  source 1..22: mol_type = other DNA
tttaaagtaataagggatggaa

SEQ ID NO: 21517 - DNA, 22 bp, synthetic construct
  misc_feature 1..22: note = chemically synthesized
  source 1..22: mol_type = other DNA
aaagtaataagggatggaaatg

SEQ ID NO: 21518 - DNA, 22 bp, synthetic construct
  misc_feature 1..22: note = chemically synthesized
  source 1..22: mol_type = other DNA
aagtaataagggatggaaatga

SEQ ID NO: 21519 - DNA, 22 bp, synthetic construct
  misc_feature 1..22: note = chemically synthesized
  source 1..22: mol_type = other DNA
agatttttaaattagcatttag

SEQ ID NO: 21520 - DNA, 22 bp, synthetic construct
  misc_feature 1..22: note = chemically synthesized
  source 1..22: mol_type = other DNA
ttaaattagcatttaggatcca

SEQ ID NO: 21521 - DNA, 22 bp, synthetic construct
  misc_feature 1..22: note = chemically synthesized
  source 1..22: mol_type = other DNA
taaattagcatttaggatccac

SEQ ID NO: 21522 - DNA, 22 bp, synthetic construct
  misc_feature 1..22: note = chemically synthesized
  source 1..22: mol_type = other DNA
aaattagcatttaggatccact

SEQ ID NO: 21523 - DNA, 22 bp, synthetic construct
  misc_feature 1..22: note = chemically synthesized
  source 1..22: mol_type = other DNA
aattagcatttaggatccacta

SEQ ID NO: 21524 - DNA, 22 bp, synthetic construct
  misc_feature 1..22: note = chemically synthesized
  source 1..22: mol_type = other DNA
gcatttaggatccactaagccc

SEQ ID NO: 21525 - DNA, 22 bp, synthetic construct
  misc_feature 1..22: note = chemically synthesized
  source 1..22: mol_type = other DNA
aggatccactaagcccaaggat

SEQ ID NO: 21526 - DNA, 22 bp, synthetic construct
  misc_feature 1..22: note = chemically synthesized
  source 1..22: mol_type = other DNA
ggatccactaagcccaaggatt

SEQ ID NO: 21527 - DNA, 22 bp, synthetic construct
  misc_feature 1..22: note = chemically synthesized
  source 1..22: mol_type = other DNA
agcccaaggatttatttacctt

SEQ ID NO: 21528 - DNA, 22 bp, synthetic construct
  misc_feature 1..22: note = chemically synthesized
  source 1..22: mol_type = other DNA
atttacctttcaaaaataatag

SEQ ID NO: 21529 - DNA, 22 bp, synthetic construct
  misc_feature 1..22: note = chemically synthesized
  source 1..22: mol_type = other DNA
tttacctttcaaaaataatagt

SEQ ID NO: 21530 - DNA, 22 bp, synthetic construct
  misc_feature 1..22: note = chemically synthesized
  source 1..22: mol_type = other DNA
acctttcaaaaataatagtatt

SEQ ID NO: 21531 - DNA, 22 bp, synthetic construct
  misc_feature 1..22: note = chemically synthesized
  source 1..22: mol_type = other DNA
cctttcaaaaataatagtattt

SEQ ID NO: 21532 - DNA, 22 bp, synthetic construct
  misc_feature 1..22: note = chemically synthesized
  source 1..22: mol_type = other DNA
tcaaaaataatagtatttgaca

SEQ ID NO: 21533 - DNA, 22 bp, synthetic construct
  misc_feature 1..22: note = chemically synthesized
  source 1..22: mol_type = other DNA
caaaaataatagtatttgacat

SEQ ID NO: 21534 - DNA, 22 bp, synthetic construct
  misc_feature 1..22: note = chemically synthesized
  source 1..22: mol_type = other DNA
aaaaataatagtatttgacata

SEQ ID NO: 21535 - DNA, 22 bp, synthetic construct
  misc_feature 1..22: note = chemically synthesized
  source 1..22: mol_type = other DNA
gacatattgttaagggacacca

SEQ ID NO: 21536 - DNA, 22 bp, synthetic construct
  misc_feature 1..22: note = chemically synthesized
  source 1..22: mol_type = other DNA
acatattgttaagggacaccaa

SEQ ID NO: 21537 - DNA, 22 bp, synthetic construct
  misc_feature 1..22: note = chemically synthesized
  source 1..22: mol_type = other DNA
ttaagggacaccaacgaatggt

SEQ ID NO: 21538 - DNA, 22 bp, synthetic construct
  misc_feature 1..22: note = chemically synthesized
  source 1..22: mol_type = other DNA
agggacaccaacgaatggttac

SEQ ID NO: 21539 - DNA, 22 bp, synthetic construct
  misc_feature 1..22: note = chemically synthesized
  source 1..22: mol_type = other DNA
ctgctttgttcaattctgtgca

SEQ ID NO: 21540 - DNA, 22 bp, synthetic construct
  misc_feature 1..22: note = chemically synthesized
  source 1..22: mol_type = other DNA
ctttgttcaattctgtgcatgt

SEQ ID NO: 21541 - DNA, 22 bp, synthetic construct
  misc_feature 1..22: note = chemically synthesized
  source 1..22: mol_type = other DNA
tgttcaattctgtgcatgtttt

SEQ ID NO: 21542 - DNA, 22 bp, synthetic construct
  misc_feature 1..22: note = chemically synthesized
  source 1..22: mol_type = other DNA
gttcaattctgtgcatgtttta

SEQ ID NO: 21543 - DNA, 22 bp, synthetic construct
  misc_feature 1..22: note = chemically synthesized
  source 1..22: mol_type = other DNA
ttcaattctgtgcatgttttaa

SEQ ID NO: 21544 - DNA, 22 bp, synthetic construct
  misc_feature 1..22: note = chemically synthesized
  source 1..22: mol_type = other DNA
aattctgtgcatgttttaaagt

SEQ ID NO: 21545 - DNA, 22 bp, synthetic construct
  misc_feature 1..22: note = chemically synthesized
  source 1..22: mol_type = other DNA
tgtgcatgttttaaagtccctt

SEQ ID NO: 21546 - DNA, 22 bp, synthetic construct
  misc_feature 1..22: note = chemically synthesized
  source 1..22: mol_type = other DNA
tgcatgttttaaagtcccttct

SEQ ID NO: 21547 - DNA, 22 bp, synthetic construct
  misc_feature 1..22: note = chemically synthesized
  source 1..22: mol_type = other DNA
taaagtcccttctaggtgcatg

SEQ ID NO: 21548 - DNA, 22 bp, synthetic construct
  misc_feature 1..22: note = chemically synthesized
  source 1..22: mol_type = other DNA
aaagtcccttctaggtgcatgt

SEQ ID NO: 21549 - DNA, 22 bp, synthetic construct
  misc_feature 1..22: note = chemically synthesized
  source 1..22: mol_type = other DNA
aagtcccttctaggtgcatgtg

SEQ ID NO: 21550 - DNA, 22 bp, synthetic construct
  misc_feature 1..22: note = chemically synthesized
  source 1..22: mol_type = other DNA
ctaggtgcatgtgaaatagcag

SEQ ID NO: 21551 - DNA, 22 bp, synthetic construct
  misc_feature 1..22: note = chemically synthesized
  source 1..22: mol_type = other DNA
taggtgcatgtgaaatagcagc

SEQ ID NO: 21552 - DNA, 22 bp, synthetic construct
  misc_feature 1..22: note = chemically synthesized
  source 1..22: mol_type = other DNA
ggtgcatgtgaaatagcagcag

SEQ ID NO: 21553 - DNA, 22 bp, synthetic construct
  misc_feature 1..22: note = chemically synthesized
  source 1..22: mol_type = other DNA
atgccgcaaagaggtcaaatac

SEQ ID NO: 21554 - DNA, 22 bp, synthetic construct
  misc_feature 1..22: note = chemically synthesized
  source 1..22: mol_type = other DNA
aaaaagaaagagtctgaaaaga

SEQ ID NO: 21555 - DNA, 22 bp, synthetic construct
  misc_feature 1..22: note = chemically synthesized
  source 1..22: mol_type = other DNA
aaaagacaattggagtaactac

SEQ ID NO: 21556 - DNA, 22 bp, synthetic construct
  misc_feature 1..22: note = chemically synthesized
  source 1..22: mol_type = other DNA
gagtaactacttgcctaaagct

SEQ ID NO: 21557 - DNA, 22 bp, synthetic construct
  misc_feature 1..22: note = chemically synthesized
  source 1..22: mol_type = other DNA
cttgcctaaagctccagtcact

SEQ ID NO: 21558 - DNA, 22 bp, synthetic construct
  misc_feature 1..22: note = chemically synthesized
  source 1..22: mol_type = other DNA
gcctaaagctccagtcactttg

SEQ ID NO: 21559 - DNA, 22 bp, synthetic construct
  misc_feature 1..22: note = chemically synthesized
  source 1..22: mol_type = other DNA
cctaaagctccagtcactttgt

SEQ ID NO: 21560 - DNA, 22 bp, synthetic construct
  misc_feature 1..22: note = chemically synthesized
  source 1..22: mol_type = other DNA
aagctccagtcactttgtagtg

SEQ ID NO: 21561 - DNA, 22 bp, synthetic construct
  misc_feature 1..22: note = chemically synthesized
  source 1..22: mol_type = other DNA
cagtcactttgtagtgtcaaag

SEQ ID NO: 21562 - DNA, 22 bp, synthetic construct
  misc_feature 1..22: note = chemically synthesized
  source 1..22: mol_type = other DNA
tgtagtgtcaaagttaggacaa

SEQ ID NO: 21563 - DNA, 22 bp, synthetic construct
  misc_feature 1..22: note = chemically synthesized
  source 1..22: mol_type = other DNA
gtagtgtcaaagttaggacaaa

SEQ ID NO: 21564 - DNA, 22 bp, synthetic construct
  misc_feature 1..22: note = chemically synthesized
  source 1..22: mol_type = other DNA
tagtgtcaaagttaggacaaat

SEQ ID NO: 21565 - DNA, 22 bp, synthetic construct
  misc_feature 1..22: note = chemically synthesized
  source 1..22: mol_type = other DNA
ggacaaatacccattgtcatca

SEQ ID NO: 21566 - DNA, 22 bp, synthetic construct
  misc_feature 1..22: note = chemically synthesized
  source 1..22: mol_type = other DNA
tcatcatacatgccctcagcag

SEQ ID NO: 21567 - DNA, 22 bp, synthetic construct
  misc_feature 1..22: note = chemically synthesized
  source 1..22: mol_type = other DNA
agcagcagaaatcactttcacc

SEQ ID NO: 21568 - DNA, 22 bp, synthetic construct
  misc_feature 1..22: note = chemically synthesized
  source 1..22: mol_type = other DNA
tcacctctcttcctccttctcc

SEQ ID NO: 21569 - DNA, 22 bp, synthetic construct
  misc_feature 1..22: note = chemically synthesized
  source 1..22: mol_type = other DNA
cacctctcttcctccttctcct

SEQ ID NO: 21570 - DNA, 22 bp, synthetic construct
  misc_feature 1..22: note = chemically synthesized
  source 1..22: mol_type = other DNA
acctctcttcctccttctccta

SEQ ID NO: 21571 - DNA, 22 bp, synthetic construct
  misc_feature 1..22: note = chemically synthesized
  source 1..22: mol_type = other DNA
tcttcctccttctcctacagtg

SEQ ID NO: 21572 - DNA, 22 bp, synthetic construct
  misc_feature 1..22: note = chemically synthesized
  source 1..22: mol_type = other DNA
ttcctccttctcctacagtggt

SEQ ID NO: 21573 - DNA, 22 bp, synthetic construct
  misc_feature 1..22: note = chemically synthesized
  source 1..22: mol_type = other DNA
cctccttctcctacagtggtcc

SEQ ID NO: 21574 - DNA, 22 bp, synthetic construct
  misc_feature 1..22: note = chemically synthesized
  source 1..22: mol_type = other DNA
ctccttctcctacagtggtcca

SEQ ID NO: 21575 - DNA, 22 bp, synthetic construct
  misc_feature 1..22: note = chemically synthesized
  source 1..22: mol_type = other DNA
cttctcctacagtggtccagaa

SEQ ID NO: 21576 - DNA, 22 bp, synthetic construct
  misc_feature 1..22: note = chemically synthesized
  source 1..22: mol_type = other DNA
ctcctacagtggtccagaaggg

SEQ ID NO: 21577 - DNA, 22 bp, synthetic construct
  misc_feature 1..22: note = chemically synthesized
  source 1..22: mol_type = other DNA
tcctacagtggtccagaagggg

SEQ ID NO: 21578 - DNA, 22 bp, synthetic construct
  misc_feature 1..22: note = chemically synthesized
  source 1..22: mol_type = other DNA
ctacagtggtccagaaggggct

SEQ ID NO: 21579 - DNA, 22 bp, synthetic construct
  misc_feature 1..22: note = chemically synthesized
  source 1..22: mol_type = other DNA
cagtggtccagaaggggctcag

SEQ ID NO: 21580 - DNA, 22 bp, synthetic construct
  misc_feature 1..22: note = chemically synthesized
  source 1..22: mol_type = other DNA
aggtatgttcaaataacagctg

SEQ ID NO: 21581 - DNA, 22 bp, synthetic construct
  misc_feature 1..22: note = chemically synthesized
  source 1..22: mol_type = other DNA
aaataacagctgctgtggtttt

SEQ ID NO: 21582 - DNA, 22 bp, synthetic construct
  misc_feature 1..22: note = chemically synthesized
  source 1..22: mol_type = other DNA
ctgtggttttcaattatgaaga

SEQ ID NO: 21583 - DNA, 22 bp, synthetic construct
  misc_feature 1..22: note = chemically synthesized
  source 1..22: mol_type = other DNA
tggttttcaattatgaagaaat

SEQ ID NO: 21584 - DNA, 22 bp, synthetic construct
  misc_feature 1..22: note = chemically synthesized
  source 1..22: mol_type = other DNA
tcaattatgaagaaatctccta

SEQ ID NO: 21585 - DNA, 22 bp, synthetic construct
  misc_feature 1..22: note = chemically synthesized
  source 1..22: mol_type = other DNA
caattatgaagaaatctcctaa

SEQ ID NO: 21586 - DNA, 22 bp, synthetic construct
  misc_feature 1..22: note = chemically synthesized
  source 1..22: mol_type = other DNA
aattatgaagaaatctcctaag

SEQ ID NO: 21587 - DNA, 22 bp, synthetic construct
  misc_feature 1..22: note = chemically synthesized
  source 1..22: mol_type = other DNA
tgaagaaatctcctaagctaca

SEQ ID NO: 21588 - DNA, 22 bp, synthetic construct
  misc_feature 1..22: note = chemically synthesized
  source 1..22: mol_type = other DNA
ctaagctacatagtcatttatc

SEQ ID NO: 21589 - DNA, 22 bp, synthetic construct
  misc_feature 1..22: note = chemically synthesized
  source 1..22: mol_type = other DNA
agctacatagtcatttatcttt

SEQ ID NO: 21590 - DNA, 22 bp, synthetic construct
  misc_feature 1..22: note = chemically synthesized
  source 1..22: mol_type = other DNA
catagtcatttatcttttaaag

SEQ ID NO: 21591 - DNA, 22 bp, synthetic construct
  misc_feature 1..22: note = chemically synthesized
  source 1..22: mol_type = other DNA
atcttttaaagcaccaagcaaa

SEQ ID NO: 21592 - DNA, 22 bp, synthetic construct
  misc_feature 1..22: note = chemically synthesized
  source 1..22: mol_type = other DNA
tcttttaaagcaccaagcaaag

SEQ ID NO: 21593 - DNA, 22 bp, synthetic construct
  misc_feature 1..22: note = chemically synthesized
  source 1..22: mol_type = other DNA
ttaaagcaccaagcaaagtacc

SEQ ID NO: 21594 - DNA, 22 bp, synthetic construct
  misc_feature 1..22: note = chemically synthesized
  source 1..22: mol_type = other DNA
taaagcaccaagcaaagtacct

SEQ ID NO: 21595 - DNA, 22 bp, synthetic construct
  misc_feature 1..22: note = chemically synthesized
  source 1..22: mol_type = other DNA
aaagcaccaagcaaagtacctt

SEQ ID NO: 21596 - DNA, 22 bp, synthetic construct
  misc_feature 1..22: note = chemically synthesized
  source 1..22: mol_type = other DNA
aagcaccaagcaaagtaccttt

SEQ ID NO: 21597 - DNA, 22 bp, synthetic construct
  misc_feature 1..22: note = chemically synthesized
  source 1..22: mol_type = other DNA
ttgataaggagaacgtgcttat

SEQ ID NO: 21598 - DNA, 22 bp, synthetic construct
  misc_feature 1..22: note = chemically synthesized
  source 1..22: mol_type = other DNA
tgataaggagaacgtgcttata

SEQ ID NO: 21599 - DNA, 22 bp, synthetic construct
  misc_feature 1..22: note = chemically synthesized
  source 1..22: mol_type = other DNA
gataaggagaacgtgcttatag

SEQ ID NO: 21600 - DNA, 22 bp, synthetic construct
  misc_feature 1..22: note = chemically synthesized
  source 1..22: mol_type = other DNA
ataaggagaacgtgcttataga

SEQ ID NO: 21601 - DNA, 22 bp, synthetic construct
  misc_feature 1..22: note = chemically synthesized
  source 1..22: mol_type = other DNA
atagatgttcatagaagatgct

SEQ ID NO: 21602 - DNA, 22 bp, synthetic construct
  misc_feature 1..22: note = chemically synthesized
  source 1..22: mol_type = other DNA
tagatgttcatagaagatgctt

SEQ ID NO: 21603 - DNA, 22 bp, synthetic construct
  misc_feature 1..22: note = chemically synthesized
  source 1..22: mol_type = other DNA
atagaagatgcttggtccaacc

SEQ ID NO: 21604 - DNA, 22 bp, synthetic construct
  misc_feature 1..22: note = chemically synthesized
  source 1..22: mol_type = other DNA
ggtccaaccccgatgtcaaatc

SEQ ID NO: 21605 - DNA, 22 bp, synthetic construct
  misc_feature 1..22: note = chemically synthesized
  source 1..22: mol_type = other DNA
gtccaaccccgatgtcaaatcc

SEQ ID NO: 21606 - DNA, 22 bp, synthetic construct
  misc_feature 1..22: note = chemically synthesized
  source 1..22: mol_type = other DNA
cattctcacatggtatttctct

SEQ ID NO: 21607 - DNA, 22 bp, synthetic construct
  misc_feature 1..22: note = chemically synthesized
  source 1..22: mol_type = other DNA
attctcacatggtatttctctc

SEQ ID NO: 21608 - DNA, 22 bp, synthetic construct
  misc_feature 1..22: note = chemically synthesized
  source 1..22: mol_type = other DNA
tcacatggtatttctctcttcc

SEQ ID NO: 21609 - DNA, 22 bp, synthetic construct
  misc_feature 1..22: note = chemically synthesized
  source 1..22: mol_type = other DNA
acatggtatttctctcttccta

SEQ ID NO: 21610 - DNA, 22 bp, synthetic construct
  misc_feature 1..22: note = chemically synthesized
  source 1..22: mol_type = other DNA
ctctcttcctagtaagggagga

SEQ ID NO: 21611 - DNA, 22 bp, synthetic construct
  misc_feature 1..22: note = chemically synthesized
  source 1..22: mol_type = other DNA
tctcttcctagtaagggaggag

SEQ ID NO: 21612 - DNA, 22 bp, synthetic construct
  misc_feature 1..22: note = chemically synthesized
  source 1..22: mol_type = other DNA
tcttcctagtaagggaggagac

SEQ ID NO: 21613 - DNA, 22 bp, synthetic construct
  misc_feature 1..22: note = chemically synthesized
  source 1..22: mol_type = other DNA
ttcctagtaagggaggagacca

SEQ ID NO: 21614 - DNA, 22 bp, synthetic construct
  misc_feature 1..22: note = chemically synthesized
  source 1..22: mol_type = other DNA
cctagtaagggaggagaccacc

SEQ ID NO: 21615 - DNA, 22 bp, synthetic construct
  misc_feature 1..22: note = chemically synthesized
  source 1..22: mol_type = other DNA
ctagtaagggaggagaccaccc

SEQ ID NO: 21616 - DNA, 22 bp, synthetic construct
  misc_feature 1..22: note = chemically synthesized
  source 1..22: mol_type = other DNA
gtaagggaggagaccacccttc

SEQ ID NO: 21617 - DNA, 22 bp, synthetic construct
  misc_feature 1..22: note = chemically synthesized
  source 1..22: mol_type = other DNA
catattgttttatgcccaattt

SEQ ID NO: 21618 - DNA, 22 bp, synthetic construct
  misc_feature 1..22: note = chemically synthesized
  source 1..22: mol_type = other DNA
atattgttttatgcccaatttc

SEQ ID NO: 21619 - DNA, 22 bp, synthetic construct
  misc_feature 1..22: note = chemically synthesized
  source 1..22: mol_type = other DNA
ttttatgcccaatttctgcctc

SEQ ID NO: 21620 - DNA, 22 bp, synthetic construct
  misc_feature 1..22: note = chemically synthesized
  source 1..22: mol_type = other DNA
tatgcccaatttctgcctccaa

SEQ ID NO: 21621 - DNA, 22 bp, synthetic construct
  misc_feature 1..22: note = chemically synthesized
  source 1..22: mol_type = other DNA
atgcccaatttctgcctccaaa

SEQ ID NO: 21622 - DNA, 22 bp, synthetic construct
  misc_feature 1..22: note = chemically synthesized
  source 1..22: mol_type = other DNA
tgcccaatttctgcctccaaag

SEQ ID NO: 21623 - DNA, 22 bp, synthetic construct
  misc_feature 1..22: note = chemically synthesized
  source 1..22: mol_type = other DNA
ctgcctccaaagaaagaagaag

SEQ ID NO: 21624 - DNA, 22 bp, synthetic construct
  misc_feature 1..22: note = chemically synthesized
  source 1..22: mol_type = other DNA
tgcctccaaagaaagaagaagt

SEQ ID NO: 21625 - DNA, 22 bp, synthetic construct
  misc_feature 1..22: note = chemically synthesized
  source 1..22: mol_type = other DNA
cctccaaagaaagaagaagtaa

SEQ ID NO: 21626 - DNA, 22 bp, synthetic construct
  misc_feature 1..22: note = chemically synthesized
  source 1..22: mol_type = other DNA
caaagaaagaagaagtaaaaac

SEQ ID NO: 21627 - DNA, 22 bp, synthetic construct
  misc_feature 1..22: note = chemically synthesized
  source 1..22: mol_type = other DNA
aaaggcagaaatgaaatccaca

SEQ ID NO: 21628 - DNA, 22 bp, synthetic construct
  misc_feature 1..22: note = chemically synthesized
  source 1..22: mol_type = other DNA
agaccacatcctgggcctggtt

SEQ ID NO: 21629 - DNA, 22 bp, synthetic construct
  misc_feature 1..22: note = chemically synthesized
  source 1..22: mol_type = other DNA
ggcctggttaaagatagacccc

SEQ ID NO: 21630 - DNA, 22 bp, synthetic construct
  misc_feature 1..22: note = chemically synthesized
  source 1..22: mol_type = other DNA
gttaaagatagacccctgacct

SEQ ID NO: 21631 - DNA, 22 bp, synthetic construct
  misc_feature 1..22: note = chemically synthesized
  source 1..22: mol_type = other DNA
aagatagacccctgacctggcc

SEQ ID NO: 21632 - DNA, 22 bp, synthetic construct
  misc_feature 1..22: note = chemically synthesized
  source 1..22: mol_type = other DNA
acctggccagttatgttatcta

SEQ ID NO: 21633 - DNA, 22 bp, synthetic construct
  misc_feature 1..22: note = chemically synthesized
  source 1..22: mol_type = other DNA
gccagttatgttatctatagat

SEQ ID NO: 21634 - DNA, 22 bp, synthetic construct
  misc_feature 1..22: note = chemically synthesized
  source 1..22: mol_type = other DNA
tgttatctatagattccagaca

SEQ ID NO: 21635 - DNA, 22 bp, synthetic construct
  misc_feature 1..22: note = chemically synthesized
  source 1..22: mol_type = other DNA
tctatagattccagacactgta

SEQ ID NO: 21636 - DNA, 22 bp, synthetic construct
  misc_feature 1..22: note = chemically synthesized
  source 1..22: mol_type = other DNA
tagattccagacactgtatgga

SEQ ID NO: 21637 - DNA, 22 bp, synthetic construct
  misc_feature 1..22: note = chemically synthesized
  source 1..22: mol_type = other DNA
cagacactgtatggaaaagcag

SEQ ID NO: 21638 - DNA, 22 bp, synthetic construct
  misc_feature 1..22: note = chemically synthesized
  source 1..22: mol_type = other DNA
tatggaaaagcagtgtgaaaat

SEQ ID NO: 21639 - DNA, 22 bp, synthetic construct
  misc_feature 1..22: note = chemically synthesized
  source 1..22: mol_type = other DNA
tcctgttctgttccattctgat

SEQ ID NO: 21640 - DNA, 22 bp, synthetic construct
  misc_feature 1..22: note = chemically synthesized
  source 1..22: mol_type = other DNA
ttctgttccattctgatgacca

SEQ ID NO: 21641 - DNA, 22 bp, synthetic construct
  misc_feature 1..22: note = chemically synthesized
  source 1..22: mol_type = other DNA
tgttccattctgatgaccagtg

SEQ ID NO: 21642 - DNA, 22 bp, synthetic construct
  misc_feature 1..22: note = chemically synthesized
  source 1..22: mol_type = other DNA
ttccattctgatgaccagtgca

SEQ ID NO: 21643 - DNA, 22 bp, synthetic construct
  misc_feature 1..22: note = chemically synthesized
  source 1..22: mol_type = other DNA
cattctgatgaccagtgcatgc

SEQ ID NO: 21644 - DNA, 22 bp, synthetic construct
  misc_feature 1..22: note = chemically synthesized
  source 1..22: mol_type = other DNA
tgatgaccagtgcatgcagccc

SEQ ID NO: 21645 - DNA, 22 bp, synthetic construct
  misc_feature 1..22: note = chemically synthesized
  source 1..22: mol_type = other DNA
atgaccagtgcatgcagccccc

SEQ ID NO: 21646 - DNA, 22 bp, synthetic construct
  misc_feature 1..22: note = chemically synthesized
  source 1..22: mol_type = other DNA
agagttgtaagcccttaaaagg

SEQ ID NO: 21647 - DNA, 22 bp, synthetic construct
  misc_feature 1..22: note = chemically synthesized
  source 1..22: mol_type = other DNA
gagttgtaagcccttaaaaggg

SEQ ID NO: 21648 - DNA, 22 bp, synthetic construct
  misc_feature 1..22: note = chemically synthesized
  source 1..22: mol_type = other DNA
taagcccttaaaagggacagga

SEQ ID NO: 21649 - DNA, 22 bp, synthetic construct
  misc_feature 1..22: note = chemically synthesized
  source 1..22: mol_type = other DNA
aaaagggacaggaattgctcac

SEQ ID NO: 21650 - DNA, 22 bp, synthetic construct
  misc_feature 1..22: note = chemically synthesized
  source 1..22: mol_type = other DNA
aaagggacaggaattgctcact

SEQ ID NO: 21651 - DNA, 22 bp, synthetic construct
  misc_feature 1..22: note = chemically synthesized
  source 1..22: mol_type = other DNA
ctcactctgagagcttggttgt

SEQ ID NO: 21652 - DNA, 22 bp, synthetic construct
  misc_feature 1..22: note = chemically synthesized
  source 1..22: mol_type = other DNA
actctgagagcttggttgttgg

SEQ ID NO: 21653 - DNA, 22 bp, synthetic construct
  misc_feature 1..22: note = chemically synthesized
  source 1..22: mol_type = other DNA
tgagagcttggttgttggagat

SEQ ID NO: 21654 - DNA, 22 bp, synthetic construct
  misc_feature 1..22: note = chemically synthesized
  source 1..22: mol_type = other DNA
agagcttggttgttggagatgt

SEQ ID NO: 21655 - DNA, 22 bp, synthetic construct
  misc_feature 1..22: note = chemically synthesized
  source 1..22: mol_type = other DNA
ggttgttggagatgtgagtctt

SEQ ID NO: 21656 - DNA, 22 bp, synthetic construct
  misc_feature 1..22: note = chemically synthesized
  source 1..22: mol_type = other DNA
gttgttggagatgtgagtcttg

SEQ ID NO: 21657 - DNA, 22 bp, synthetic construct
  misc_feature 1..22: note = chemically synthesized
  source 1..22: mol_type = other DNA
ttggagatgtgagtcttgccca

SEQ ID NO: 21658 - DNA, 22 bp, synthetic construct
  misc_feature 1..22: note = chemically synthesized
  source 1..22: mol_type = other DNA
gagatgtgagtcttgcccaagc

SEQ ID NO: 21659 - DNA, 22 bp, synthetic construct
  misc_feature 1..22: note = chemically synthesized
  source 1..22: mol_type = other DNA
gcccaagctcccagccgaataa

SEQ ID NO: 21660 - DNA, 22 bp, synthetic construct
  misc_feature 1..22: note = chemically synthesized
  source 1..22: mol_type = other DNA
cccaagctcccagccgaataaa

SEQ ID NO: 21661 - DNA, 22 bp, synthetic construct
  misc_feature 1..22: note = chemically synthesized
  source 1..22: mol_type = other DNA
ccagccgaataaagcccttcct

SEQ ID NO: 21662 - DNA, 22 bp, synthetic construct
  misc_feature 1..22: note = chemically synthesized
  source 1..22: mol_type = other DNA
ccttctttaactcggtgtctga

SEQ ID NO: 21663 - DNA, 22 bp, synthetic construct
  misc_feature 1..22: note = chemically synthesized
  source 1..22: mol_type = other DNA
cttctttaactcggtgtctgag

SEQ ID NO: 21664 - DNA, 22 bp, synthetic construct
  misc_feature 1..22: note = chemically synthesized
  source 1..22: mol_type = other DNA
ctttaactcggtgtctgagggg

SEQ ID NO: 21665 - DNA, 22 bp, synthetic construct
  misc_feature 1..22: note = chemically synthesized
  source 1..22: mol_type = other DNA
tttaactcggtgtctgaggggt

SEQ ID NO: 21666 - DNA, 22 bp, synthetic construct
  misc_feature 1..22: note = chemically synthesized
  source 1..22: mol_type = other DNA
taactcggtgtctgaggggttt

SEQ ID NO: 21667 - DNA, 22 bp, synthetic construct
  misc_feature 1..22: note = chemically synthesized
  source 1..22: mol_type = other DNA
aactcggtgtctgaggggtttt

SEQ ID NO: 21668 - DNA, 22 bp, synthetic construct
  misc_feature 1..22: note = chemically synthesized
  source 1..22: mol_type = other DNA
actcggtgtctgaggggttttg

SEQ ID NO: 21669 - DNA, 22 bp, synthetic construct
  misc_feature 1..22: note = chemically synthesized
  source 1..22: mol_type = other DNA
ggtgtctgaggggttttgtatg

SEQ ID NO: 21670 - DNA, 22 bp, synthetic construct
  misc_feature 1..22: note = chemically synthesized
  source 1..22: mol_type = other DNA
aggggttttgtatgcagcttgt

SEQ ID NO: 21671 - DNA, 22 bp, synthetic construct
  misc_feature 1..22: note = chemically synthesized
  source 1..22: mol_type = other DNA
tgtatgcagcttgtcctgctac

SEQ ID NO: 21672 - DNA, 22 bp, synthetic construct
  misc_feature 1..22: note = chemically synthesized
  source 1..22: mol_type = other DNA
gtatgcagcttgtcctgctaca

SEQ ID NO: 21673 - DNA, 22 bp, synthetic construct
  misc_feature 1..22: note = chemically synthesized
  source 1..22: mol_type = other DNA
tatgcagcttgtcctgctacac

SEQ ID NO: 21674 - DNA, 22 bp, synthetic construct
  misc_feature 1..22: note = chemically synthesized
  source 1..22: mol_type = other DNA
gtcctgctacactagaatcgtt

SEQ ID NO: 21675 - DNA, 22 bp, synthetic construct
  misc_feature 1..22: note = chemically synthesized
  source 1..22: mol_type = other DNA
tcctgctacactagaatcgttc

SEQ ID NO: 21676 - DNA, 22 bp, synthetic construct
  misc_feature 1..22: note = chemically synthesized
  source 1..22: mol_type = other DNA
ctacactagaatcgttccttaa

SEQ ID NO: 21677 - DNA, 22 bp, synthetic construct
  misc_feature 1..22: note = chemically synthesized
  source 1..22: mol_type = other DNA
cactagaatcgttccttaattc

SEQ ID NO: 21678 - DNA, 22 bp, synthetic construct
  misc_feature 1..22: note = chemically synthesized
  source 1..22: mol_type = other DNA
gaatcgttccttaattctctcc

SEQ ID NO: 21679 - DNA, 22 bp, synthetic construct
  misc_feature 1..22: note = chemically synthesized
  source 1..22: mol_type = other DNA
cttaattctctcctctaatatt

SEQ ID NO: 21680 - DNA, 22 bp, synthetic construct
  misc_feature 1..22: note = chemically synthesized
  source 1..22: mol_type = other DNA
aattctctcctctaatattgct

SEQ ID NO: 21681 - DNA, 22 bp, synthetic construct
  misc_feature 1..22: note = chemically synthesized
  source 1..22: mol_type = other DNA
attctctcctctaatattgctg

SEQ ID NO: 21682 - DNA, 22 bp, synthetic construct
  misc_feature 1..22: note = chemically synthesized
  source 1..22: mol_type = other DNA
tctcctctaatattgctgctac

SEQ ID NO: 21683 - DNA, 22 bp, synthetic construct
  misc_feature 1..22: note = chemically synthesized
  source 1..22: mol_type = other DNA
tcctctaatattgctgctacct

SEQ ID NO: 21684 - DNA, 22 bp, synthetic construct
  misc_feature 1..22: note = chemically synthesized
  source 1..22: mol_type = other DNA
ctctaatattgctgctacctct

SEQ ID NO: 21685 - DNA, 22 bp, synthetic construct
  misc_feature 1..22: note = chemically synthesized
  source 1..22: mol_type = other DNA
taatattgctgctacctctatt

SEQ ID NO: 21686 - DNA, 22 bp, synthetic construct
  misc_feature 1..22: note = chemically synthesized
  source 1..22: mol_type = other DNA
atattgctgctacctctattaa

SEQ ID NO: 21687 - DNA, 22 bp, synthetic construct
  misc_feature 1..22: note = chemically synthesized
  source 1..22: mol_type = other DNA
ctgctacctctattaaaacaca

SEQ ID NO: 21688 - DNA, 22 bp, synthetic construct
  misc_feature 1..22: note = chemically synthesized
  source 1..22: mol_type = other DNA
ctacctctattaaaacacaaag

SEQ ID NO: 21689 - DNA, 22 bp, synthetic construct
  misc_feature 1..22: note = chemically synthesized
  source 1..22: mol_type = other DNA
cctctattaaaacacaaagcca

SEQ ID NO: 21690 - DNA, 22 bp, synthetic construct
  misc_feature 1..22: note = chemically synthesized
  source 1..22: mol_type = other DNA
tattaaaacacaaagccacaat

SEQ ID NO: 21691 - DNA, 22 bp, synthetic construct
  misc_feature 1..22: note = chemically synthesized
  source 1..22: mol_type = other DNA
ttaaaacacaaagccacaatat

SEQ ID NO: 21692 - DNA, 22 bp, synthetic construct
  misc_feature 1..22: note = chemically synthesized
  source 1..22: mol_type = other DNA
aaacacaaagccacaatatatg

SEQ ID NO: 21693 - DNA, 22 bp, synthetic construct
  misc_feature 1..22: note = chemically synthesized
  source 1..22: mol_type = other DNA
ggaaaatatgcacactttggat

SEQ ID NO: 21694 - DNA, 22 bp, synthetic construct
  misc_feature 1..22: note = chemically synthesized
  source 1..22: mol_type = other DNA
gaaaatatgcacactttggatc

SEQ ID NO: 21695 - DNA, 22 bp, synthetic construct
  misc_feature 1..22: note = chemically synthesized
  source 1..22: mol_type = other DNA
tggatccagcaagtccacatct

SEQ ID NO: 21696 - DNA, 22 bp, synthetic construct
  misc_feature 1..22: note = chemically synthesized
  source 1..22: mol_type = other DNA
ggatccagcaagtccacatcta

SEQ ID NO: 21697 - DNA, 22 bp, synthetic construct
  misc_feature 1..22: note = chemically synthesized
  source 1..22: mol_type = other DNA
gatccagcaagtccacatctag

SEQ ID NO: 21698 - DNA, 22 bp, synthetic construct
  misc_feature 1..22: note = chemically synthesized
  source 1..22: mol_type = other DNA
gaaaaccatcctgggggaaaat

SEQ ID NO: 21699 - DNA, 22 bp, synthetic construct
  misc_feature 1..22: note = chemically synthesized
  source 1..22: mol_type = other DNA
ggggaaaattaaggagagtatg

SEQ ID NO: 21700 - DNA, 22 bp, synthetic construct
  misc_feature 1..22: note = chemically synthesized
  source 1..22: mol_type = other DNA
aggagagtatgaaaaggatgtt

SEQ ID NO: 21701 - DNA, 22 bp, synthetic construct
  misc_feature 1..22: note = chemically synthesized
  source 1..22: mol_type = other DNA
actaaagcattatgatggcaaa

SEQ ID NO: 21702 - DNA, 22 bp, synthetic construct
  misc_feature 1..22: note = chemically synthesized
  source 1..22: mol_type = other DNA
ctaaagcattatgatggcaaaa

SEQ ID NO: 21703 - DNA, 22 bp, synthetic construct
  misc_feature 1..22: note = chemically synthesized
  source 1..22: mol_type = other DNA
aagcattatgatggcaaaaaat

SEQ ID NO: 21704 - DNA, 22 bp, synthetic construct
  misc_feature 1..22: note = chemically synthesized
  source 1..22: mol_type = other DNA
tgatggcaaaaaattagaaaca

SEQ ID NO: 21705 - DNA, 22 bp, synthetic construct
  misc_feature 1..22: note = chemically synthesized
  source 1..22: mol_type = other DNA
gaaacaacttacactgaactag

SEQ ID NO: 21706 - DNA, 22 bp, synthetic construct
  misc_feature 1..22: note = chemically synthesized
  source 1..22: mol_type = other DNA
acactgaactagtcaacttact

SEQ ID NO: 21707 - DNA, 22 bp, synthetic construct
  misc_feature 1..22: note = chemically synthesized
  source 1..22: mol_type = other DNA
cactgaactagtcaacttactt

SEQ ID NO: 21708 - DNA, 22 bp, synthetic construct
  misc_feature 1..22: note = chemically synthesized
  source 1..22: mol_type = other DNA
aactagtcaacttacttaacag

SEQ ID NO: 21709 - DNA, 22 bp, synthetic construct
  misc_feature 1..22: note = chemically synthesized
  source 1..22: mol_type = other DNA
gtcaacttacttaacagacaga

SEQ ID NO: 21710 - DNA, 22 bp, synthetic construct
  misc_feature 1..22: note = chemically synthesized
  source 1..22: mol_type = other DNA
acttaacagacagaaggctcaa

SEQ ID NO: 21711 - DNA, 22 bp, synthetic construct
  misc_feature 1..22: note = chemically synthesized
  source 1..22: mol_type = other DNA
cttaacagacagaaggctcaat

SEQ ID NO: 21712 - DNA, 22 bp, synthetic construct
  misc_feature 1..22: note = chemically synthesized
  source 1..22: mol_type = other DNA
aacagacagaaggctcaattag

SEQ ID NO: 21713 - DNA, 22 bp, synthetic construct
  misc_feature 1..22: note = chemically synthesized
  source 1..22: mol_type = other DNA
acagacagaaggctcaattagc

SEQ ID NO: 21714 - DNA, 22 bp, synthetic construct
  misc_feature 1..22: note = chemically synthesized
  source 1..22: mol_type = other DNA
aattagctcatgtgtcaaatgg

SEQ ID NO: 21715 - DNA, 22 bp, synthetic construct
  misc_feature 1..22: note = chemically synthesized
  source 1..22: mol_type = other DNA
gctcatgtgtcaaatgggggta

SEQ ID NO: 21716 - DNA, 22 bp, synthetic construct
  misc_feature 1..22: note = chemically synthesized
  source 1..22: mol_type = other DNA
atgtgtcaaatgggggtaaaat

SEQ ID NO: 21717 - DNA, 22 bp, synthetic construct
  misc_feature 1..22: note = chemically synthesized
  source 1..22: mol_type = other DNA
agtttggagggaaagacaggct

SEQ ID NO: 21718 - DNA, 22 bp, synthetic construct
  misc_feature 1..22: note = chemically synthesized
  source 1..22: mol_type = other DNA
gtttggagggaaagacaggctc

SEQ ID NO: 21719 - DNA, 22 bp, synthetic construct
  misc_feature 1..22: note = chemically synthesized
  source 1..22: mol_type = other DNA
ggagggaaagacaggctctaaa

SEQ ID NO: 21720 - DNA, 22 bp, synthetic construct
  misc_feature 1..22: note = chemically synthesized
  source 1..22: mol_type = other DNA
gagggaaagacaggctctaaaa

SEQ ID NO: 21721 - DNA, 22 bp, synthetic construct
  misc_feature 1..22: note = chemically synthesized
  source 1..22: mol_type = other DNA
taaaagaggattaaaaattaga

SEQ ID NO: 21722 - DNA, 22 bp, synthetic construct
  misc_feature 1..22: note = chemically synthesized
  source 1..22: mol_type = other DNA
aaagaggattaaaaattagatg

SEQ ID NO: 21723 - DNA, 22 bp, synthetic construct
  misc_feature 1..22: note = chemically synthesized
  source 1..22: mol_type = other DNA
aaaattagatgtggcctaggca

SEQ ID NO: 21724 - DNA, 22 bp, synthetic construct
  misc_feature 1..22: note = chemically synthesized
  source 1..22: mol_type = other DNA
gatgtggcctaggcaaagaatt

SEQ ID NO: 21725 - DNA, 22 bp, synthetic construct
  misc_feature 1..22: note = chemically synthesized
  source 1..22: mol_type = other DNA
ggcaaagaatttatgaccaagt

SEQ ID NO: 21726 - DNA, 22 bp, synthetic construct
  misc_feature 1..22: note = chemically synthesized
  source 1..22: mol_type = other DNA
atgaccaagtcctcaaaactaa

SEQ ID NO: 21727 - DNA, 22 bp, synthetic construct
  misc_feature 1..22: note = chemically synthesized
  source 1..22: mol_type = other DNA
tgaccaagtcctcaaaactaaa

SEQ ID NO: 21728 - DNA, 22 bp, synthetic construct
  misc_feature 1..22: note = chemically synthesized
  source 1..22: mol_type = other DNA
aaaactaaacacaacaaaaaca

SEQ ID NO: 21729 - DNA, 22 bp, synthetic construct
  misc_feature 1..22: note = chemically synthesized
  source 1..22: mol_type = other DNA
aacacaacaaaaacaaaaacag

SEQ ID NO: 21730 - DNA, 22 bp, synthetic construct
  misc_feature 1..22: note = chemically synthesized
  source 1..22: mol_type = other DNA
aattaaactaaaatgcttctgc

SEQ ID NO: 21731 - DNA, 22 bp, synthetic construct
  misc_feature 1..22: note = chemically synthesized
  source 1..22: mol_type = other DNA
attaaactaaaatgcttctgca

SEQ ID NO: 21732 - DNA, 22 bp, synthetic construct
  misc_feature 1..22: note = chemically synthesized
  source 1..22: mol_type = other DNA
aactaaaatgcttctgcaccgc

SEQ ID NO: 21733 - DNA, 22 bp, synthetic construct
  misc_feature 1..22: note = chemically synthesized
  source 1..22: mol_type = other DNA
aaatgcttctgcaccgcaaaag

SEQ ID NO: 21734 - DNA, 22 bp, synthetic construct
  misc_feature 1..22: note = chemically synthesized
  source 1..22: mol_type = other DNA
ctgcaccgcaaaagaccgaatc

SEQ ID NO: 21735 - DNA, 22 bp, synthetic construct
  misc_feature 1..22: note = chemically synthesized
  source 1..22: mol_type = other DNA
tgcaccgcaaaagaccgaatca

SEQ ID NO: 21736 - DNA, 22 bp, synthetic construct
  misc_feature 1..22: note = chemically synthesized
  source 1..22: mol_type = other DNA
caccgcaaaagaccgaatcaac

SEQ ID NO: 21737 - DNA, 22 bp, synthetic construct
  misc_feature 1..22: note = chemically synthesized
  source 1..22: mol_type = other DNA
cagaatgagaaaaaaaaattgc

SEQ ID NO: 21738 - DNA, 22 bp, synthetic construct
  misc_feature 1..22: note = chemically synthesized
  source 1..22: mol_type = other DNA
caaactatgaatgcaacaaaag

SEQ ID NO: 21739 - DNA, 22 bp, synthetic construct
  misc_feature 1..22: note = chemically synthesized
  source 1..22: mol_type = other DNA
tgaatgcaacaaaaggctaata

SEQ ID NO: 21740 - DNA, 22 bp, synthetic construct
  misc_feature 1..22: note = chemically synthesized
  source 1..22: mol_type = other DNA
atatacagaatctacaaggaac

SEQ ID NO: 21741 - DNA, 22 bp, synthetic construct
  misc_feature 1..22: note = chemically synthesized
  source 1..22: mol_type = other DNA
caaggaactcaacaacaaaaaa

SEQ ID NO: 21742 - DNA, 22 bp, synthetic construct
  misc_feature 1..22: note = chemically synthesized
  source 1..22: mol_type = other DNA
aacaacaaaaaaaccaacctca

SEQ ID NO: 21743 - DNA, 22 bp, synthetic construct
  misc_feature 1..22: note = chemically synthesized
  source 1..22: mol_type = other DNA
attagaaagtgactgtgatggt

SEQ ID NO: 21744 - DNA, 22 bp, synthetic construct
  misc_feature 1..22: note = chemically synthesized
  source 1..22: mol_type = other DNA
gaaagtgactgtgatggttaat

SEQ ID NO: 21745 - DNA, 22 bp, synthetic construct
  misc_feature 1..22: note = chemically synthesized
  source 1..22: mol_type = other DNA
tgatggttaatactgagtgtca

SEQ ID NO: 21746 - DNA, 22 bp, synthetic construct
  misc_feature 1..22: note = chemically synthesized
  source 1..22: mol_type = other DNA
atactgagtgtcaacttgattg

SEQ ID NO: 21747 - DNA, 22 bp, synthetic construct
  misc_feature 1..22: note = chemically synthesized
  source 1..22: mol_type = other DNA
agtgtcaacttgattggactga

SEQ ID NO: 21748 - DNA, 22 bp, synthetic construct
  misc_feature 1..22: note = chemically synthesized
  source 1..22: mol_type = other DNA
gattggactgaaggatgcaaag

SEQ ID NO: 21749 - DNA, 22 bp, synthetic construct
  misc_feature 1..22: note = chemically synthesized
  source 1..22: mol_type = other DNA
attggactgaaggatgcaaagt

SEQ ID NO: 21750 - DNA, 22 bp, synthetic construct
  misc_feature 1..22: note = chemically synthesized
  source 1..22: mol_type = other DNA
gactgaaggatgcaaagtaatg

SEQ ID NO: 21751 - DNA, 22 bp, synthetic construct
  misc_feature 1..22: note = chemically synthesized
  source 1..22: mol_type = other DNA
aaggatgcaaagtaatgatctt

SEQ ID NO: 21752 - DNA, 22 bp, synthetic construct
  misc_feature 1..22: note = chemically synthesized
  source 1..22: mol_type = other DNA
gggtgtgtctgtgagggtgtta

SEQ ID NO: 21753 - DNA, 22 bp, synthetic construct
  misc_feature 1..22: note = chemically synthesized
  source 1..22: mol_type = other DNA
ggtgtgtctgtgagggtgttac

SEQ ID NO: 21754 - DNA, 22 bp, synthetic construct
  misc_feature 1..22: note = chemically synthesized
  source 1..22: mol_type = other DNA
tgagggtgttaccaaaggagat

SEQ ID NO: 21755 - DNA, 22 bp, synthetic construct
  misc_feature 1..22: note = chemically synthesized
  source 1..22: mol_type = other DNA
ccaaaggagattaatatttcag

SEQ ID NO: 21756 - DNA, 22 bp, synthetic construct
  misc_feature 1..22: note = chemically synthesized
  source 1..22: mol_type = other DNA
atatttcagtcagtgggctggg

SEQ ID NO: 21757 - DNA, 22 bp, synthetic construct
  misc_feature 1..22: note = chemically synthesized
  source 1..22: mol_type = other DNA
cagtcagtgggctggggaaggc

SEQ ID NO: 21758 - DNA, 22 bp, synthetic construct
  misc_feature 1..22: note = chemically synthesized
  source 1..22: mol_type = other DNA
agtcagtgggctggggaaggca

SEQ ID NO: 21759 - DNA, 22 bp, synthetic construct
  misc_feature 1..22: note = chemically synthesized
  source 1..22: mol_type = other DNA
gggaaggcagacccacccttaa

SEQ ID NO: 21760 - DNA, 22 bp, synthetic construct
  misc_feature 1..22: note = chemically synthesized
  source 1..22: mol_type = other DNA
aatctgggtgggcaccatctaa

SEQ ID NO: 21761 - DNA, 22 bp, synthetic construct
  misc_feature 1..22: note = chemically synthesized
  source 1..22: mol_type = other DNA
atctgggtgggcaccatctaat

SEQ ID NO: 21762 - DNA, 22 bp, synthetic construct
  misc_feature 1..22: note = chemically synthesized
  source 1..22: mol_type = other DNA
ggtgggcaccatctaatcagtt

SEQ ID NO: 21763 - DNA, 22 bp, synthetic construct
  misc_feature 1..22: note = chemically synthesized
  source 1..22: mol_type = other DNA
atcagttgccagcacagccagg

SEQ ID NO: 21764 - DNA, 22 bp, synthetic construct
  misc_feature 1..22: note = chemically synthesized
  source 1..22: mol_type = other DNA
ccagcacagccaggatataaag

SEQ ID NO: 21765 - DNA, 22 bp, synthetic construct
  misc_feature 1..22: note = chemically synthesized
  source 1..22: mol_type = other DNA
gattggcttggcatcccagcct

SEQ ID NO: 21766 - DNA, 22 bp, synthetic construct
  misc_feature 1..22: note = chemically synthesized
  source 1..22: mol_type = other DNA
gcttggcatcccagcctacatt

SEQ ID NO: 21767 - DNA, 22 bp, synthetic construct
  misc_feature 1..22: note = chemically synthesized
  source 1..22: mol_type = other DNA
ggcatcccagcctacatttttc

SEQ ID NO: 21768 - DNA, 22 bp, synthetic construct
  misc_feature 1..22: note = chemically synthesized
  source 1..22: mol_type = other DNA
gcatcccagcctacatttttct

SEQ ID NO: 21769 - DNA, 22 bp, synthetic construct
  misc_feature 1..22: note = chemically synthesized
  source 1..22: mol_type = other DNA
catttttctcccatgctggatt

SEQ ID NO: 21770 - DNA, 22 bp, synthetic construct
  misc_feature 1..22: note = chemically synthesized
  source 1..22: mol_type = other DNA
ttctcccatgctggattcttcc

SEQ ID NO: 21771 - DNA, 22 bp, synthetic construct
  misc_feature 1..22: note = chemically synthesized
  source 1..22: mol_type = other DNA
tctcccatgctggattcttcct

SEQ ID NO: 21772 - DNA, 22 bp, synthetic construct
  misc_feature 1..22: note = chemically synthesized
  source 1..22: mol_type = other DNA
ctcccatgctggattcttcctg

SEQ ID NO: 21773 - DNA, 22 bp, synthetic construct
  misc_feature 1..22: note = chemically synthesized
  source 1..22: mol_type = other DNA
tcccatgctggattcttcctgc

SEQ ID NO: 21774 - DNA, 22 bp, synthetic construct
  misc_feature 1..22: note = chemically synthesized
  source 1..22: mol_type = other DNA
ccatgctggattcttcctgccc

SEQ ID NO: 21775 - DNA, 22 bp, synthetic construct
  misc_feature 1..22: note = chemically synthesized
  source 1..22: mol_type = other DNA
gattcttcctgccctggaacat

SEQ ID NO: 21776 - DNA, 22 bp, synthetic construct
  misc_feature 1..22: note = chemically synthesized
  source 1..22: mol_type = other DNA
ttcctgccctggaacattgaac

SEQ ID NO: 21777 - DNA, 22 bp, synthetic construct
  misc_feature 1..22: note = chemically synthesized
  source 1..22: mol_type = other DNA
cctgccctggaacattgaactc

SEQ ID NO: 21778 - DNA, 22 bp, synthetic construct
  misc_feature 1..22: note = chemically synthesized
  source 1..22: mol_type = other DNA
ctgccctggaacattgaactcc

SEQ ID NO: 21779 - DNA, 22 bp, synthetic construct
  misc_feature 1..22: note = chemically synthesized
  source 1..22: mol_type = other DNA
ccctggaacattgaactccagg

SEQ ID NO: 21780 - DNA, 22 bp, synthetic construct
  misc_feature 1..22: note = chemically synthesized
  source 1..22: mol_type = other DNA
gaacattgaactccaggttctt

SEQ ID NO: 21781 - DNA, 22 bp, synthetic construct
  misc_feature 1..22: note = chemically synthesized
  source 1..22: mol_type = other DNA
aactccaggttcttcagctttg

SEQ ID NO: 21782 - DNA, 22 bp, synthetic construct
  misc_feature 1..22: note = chemically synthesized
  source 1..22: mol_type = other DNA
caggttcttcagctttgggact

SEQ ID NO: 21783 - DNA, 22 bp, synthetic construct
  misc_feature 1..22: note = chemically synthesized
  source 1..22: mol_type = other DNA
ttcagctttgggactccgacta

SEQ ID NO: 21784 - DNA, 22 bp, synthetic construct
  misc_feature 1..22: note = chemically synthesized
  source 1..22: mol_type = other DNA
cagctttgggactccgactagc

SEQ ID NO: 21785 - DNA, 22 bp, synthetic construct
  misc_feature 1..22: note = chemically synthesized
  source 1..22: mol_type = other DNA
agctttgggactccgactagct

SEQ ID NO: 21786 - DNA, 22 bp, synthetic construct
  misc_feature 1..22: note = chemically synthesized
  source 1..22: mol_type = other DNA
tgggactccgactagcttcctt

SEQ ID NO: 21787 - DNA, 22 bp, synthetic construct
  misc_feature 1..22: note = chemically synthesized
  source 1..22: mol_type = other DNA
gggactccgactagcttccttg

SEQ ID NO: 21788 - DNA, 22 bp, synthetic construct
  misc_feature 1..22: note = chemically synthesized
  source 1..22: mol_type = other DNA
ggactccgactagcttccttgt

SEQ ID NO: 21789 - DNA, 22 bp, synthetic construct
  misc_feature 1..22: note = chemically synthesized
  source 1..22: mol_type = other DNA
cgactagcttccttgttcctca

SEQ ID NO: 21790 - DNA, 22 bp, synthetic construct
  misc_feature 1..22: note = chemically synthesized
  source 1..22: mol_type = other DNA
gcttccttgttcctcagctggc

SEQ ID NO: 21791 - DNA, 22 bp, synthetic construct
  misc_feature 1..22: note = chemically synthesized
  source 1..22: mol_type = other DNA
ccttgttcctcagctggcagat

SEQ ID NO: 21792 - DNA, 22 bp, synthetic construct
  misc_feature 1..22: note = chemically synthesized
  source 1..22: mol_type = other DNA
cttgttcctcagctggcagatg

SEQ ID NO: 21793 - DNA, 22 bp, synthetic construct
  misc_feature 1..22: note = chemically synthesized
  source 1..22: mol_type = other DNA
gttcctcagctggcagatggcc

SEQ ID NO: 21794 - DNA, 22 bp, synthetic construct
  misc_feature 1..22: note = chemically synthesized
  source 1..22: mol_type = other DNA
ttcctcagctggcagatggcct

SEQ ID NO: 21795 - DNA, 22 bp, synthetic construct
  misc_feature 1..22: note = chemically synthesized
  source 1..22: mol_type = other DNA
ctcagctggcagatggcctgtt

SEQ ID NO: 21796 - DNA, 22 bp, synthetic construct
  misc_feature 1..22: note = chemically synthesized
  source 1..22: mol_type = other DNA
agctggcagatggcctgttttg

SEQ ID NO: 21797 - DNA, 22 bp, synthetic construct
  misc_feature 1..22: note = chemically synthesized
  source 1..22: mol_type = other DNA
gcagatggcctgttttgggacc

SEQ ID NO: 21798 - DNA, 22 bp, synthetic construct
  misc_feature 1..22: note = chemically synthesized
  source 1..22: mol_type = other DNA
ttttgggaccttgtgaacatgt

SEQ ID NO: 21799 - DNA, 22 bp, synthetic construct
  misc_feature 1..22: note = chemically synthesized
  source 1..22: mol_type = other DNA
tgggaccttgtgaacatgtgag

SEQ ID NO: 21800 - DNA, 22 bp, synthetic construct
  misc_feature 1..22: note = chemically synthesized
  source 1..22: mol_type = other DNA
gggaccttgtgaacatgtgagt

SEQ ID NO: 21801 - DNA, 22 bp, synthetic construct
  misc_feature 1..22: note = chemically synthesized
  source 1..22: mol_type = other DNA
ggaccttgtgaacatgtgagtc

SEQ ID NO: 21802 - DNA, 22 bp, synthetic construct
  misc_feature 1..22: note = chemically synthesized
  source 1..22: mol_type = other DNA
gtgaacatgtgagtcaatacta

SEQ ID NO: 21803 - DNA, 22 bp, synthetic construct
  misc_feature 1..22: note = chemically synthesized
  source 1..22: mol_type = other DNA
tgaacatgtgagtcaatactac

SEQ ID NO: 21804 - DNA, 22 bp, synthetic construct
  misc_feature 1..22: note = chemically synthesized
  source 1..22: mol_type = other DNA
cataataaactctcatatagat

SEQ ID NO: 21805 - DNA, 22 bp, synthetic construct
  misc_feature 1..22: note = chemically synthesized
  source 1..22: mol_type = other DNA
tcatatagatatagatatagag

SEQ ID NO: 21806 - DNA, 22 bp, synthetic construct
  misc_feature 1..22: note = chemically synthesized
  source 1..22: mol_type = other DNA
atatagatatagatatagagat

SEQ ID NO: 21807 - DNA, 22 bp, synthetic construct
  misc_feature 1..22: note = chemically synthesized
  source 1..22: mol_type = other DNA
ctattaattctgtttctctgta

SEQ ID NO: 21808 - DNA, 22 bp, synthetic construct
  misc_feature 1..22: note = chemically synthesized
  source 1..22: mol_type = other DNA
ttaattctgtttctctgtagaa

SEQ ID NO: 21809 - DNA, 22 bp, synthetic construct
  misc_feature 1..22: note = chemically synthesized
  source 1..22: mol_type = other DNA
attctgtttctctgtagaaccc

SEQ ID NO: 21810 - DNA, 22 bp, synthetic construct
  misc_feature 1..22: note = chemically synthesized
  source 1..22: mol_type = other DNA
tgtttctctgtagaaccctaat

SEQ ID NO: 21811 - DNA, 22 bp, synthetic construct
  misc_feature 1..22: note = chemically synthesized
  source 1..22: mol_type = other DNA
tttctctgtagaaccctaatac

SEQ ID NO: 21812 - DNA, 22 bp, synthetic construct
  misc_feature 1..22: note = chemically synthesized
  source 1..22: mol_type = other DNA
ctctgtagaaccctaatacaga

SEQ ID NO: 21813 - DNA, 22 bp, synthetic construct
  misc_feature 1..22: note = chemically synthesized
  source 1..22: mol_type = other DNA
tctgtagaaccctaatacagat

SEQ ID NO: 21814 - DNA, 22 bp, synthetic construct
  misc_feature 1..22: note = chemically synthesized
  source 1..22: mol_type = other DNA
tgtagaaccctaatacagattt

SEQ ID NO: 21815 - DNA, 22 bp, synthetic construct
  misc_feature 1..22: note = chemically synthesized
  source 1..22: mol_type = other DNA
tagaaccctaatacagattttg

SEQ ID NO: 21816 - DNA, 22 bp, synthetic construct
  misc_feature 1..22: note = chemically synthesized
  source 1..22: mol_type = other DNA
atacagattttggtaccaggag

SEQ ID NO: 21817 - DNA, 22 bp, synthetic construct
  misc_feature 1..22: note = chemically synthesized
  source 1..22: mol_type = other DNA
tggtaccaggagtggttctaga

SEQ ID NO: 21818 - DNA, 22 bp, synthetic construct
  misc_feature 1..22: note = chemically synthesized
  source 1..22: mol_type = other DNA
ggtaccaggagtggttctagag

SEQ ID NO: 21819 - DNA, 22 bp, synthetic construct
  misc_feature 1..22: note = chemically synthesized
  source 1..22: mol_type = other DNA
gtaccaggagtggttctagagg

SEQ ID NO: 21820 - DNA, 22 bp, synthetic construct
  misc_feature 1..22: note = chemically synthesized
  source 1..22: mol_type = other DNA
tagaggaacagaatattaagga

SEQ ID NO: 21821 - DNA, 22 bp, synthetic construct
  misc_feature 1..22: note = chemically synthesized
  source 1..22: mol_type = other DNA
gaggaacagaatattaaggatg

SEQ ID NO: 21822 - DNA, 22 bp, synthetic construct
  misc_feature 1..22: note = chemically synthesized
  source 1..22: mol_type = other DNA
aggatggagttctttcattggt

SEQ ID NO: 21823 - DNA, 22 bp, synthetic construct
  misc_feature 1..22: note = chemically synthesized
  source 1..22: mol_type = other DNA
tttcattggttttggggtttct

SEQ ID NO: 21824 - DNA, 22 bp, synthetic construct
  misc_feature 1..22: note = chemically synthesized
  source 1..22: mol_type = other DNA
tcattggttttggggtttctgg

SEQ ID NO: 21825 - DNA, 22 bp, synthetic construct
  misc_feature 1..22: note = chemically synthesized
  source 1..22: mol_type = other DNA
cattggttttggggtttctgga

SEQ ID NO: 21826 - DNA, 22 bp, synthetic construct
  misc_feature 1..22: note = chemically synthesized
  source 1..22: mol_type = other DNA
attggttttggggtttctggag

SEQ ID NO: 21827 - DNA, 22 bp, synthetic construct
  misc_feature 1..22: note = chemically synthesized
  source 1..22: mol_type = other DNA
gttttggggtttctggagttgg

SEQ ID NO: 21828 - DNA, 22 bp, synthetic construct
  misc_feature 1..22: note = chemically synthesized
  source 1..22: mol_type = other DNA
tggggtttctggagttggctgc

SEQ ID NO: 21829 - DNA, 22 bp, synthetic construct
  misc_feature 1..22: note = chemically synthesized
  source 1..22: mol_type = other DNA
ggggtttctggagttggctgct

SEQ ID NO: 21830 - DNA, 22 bp, synthetic construct
  misc_feature 1..22: note = chemically synthesized
  source 1..22: mol_type = other DNA
gggtttctggagttggctgctt

SEQ ID NO: 21831 - DNA, 22 bp, synthetic construct
  misc_feature 1..22: note = chemically synthesized
  source 1..22: mol_type = other DNA
ctggagttggctgcttaatatg

SEQ ID NO: 21832 - DNA, 22 bp, synthetic construct
  misc_feature 1..22: note = chemically synthesized
  source 1..22: mol_type = other DNA
tggagttggctgcttaatatga

SEQ ID NO: 21833 - DNA, 22 bp, synthetic construct
  misc_feature 1..22: note = chemically synthesized
  source 1..22: mol_type = other DNA
gagttggctgcttaatatgatt

SEQ ID NO: 21834 - DNA, 22 bp, synthetic construct
  misc_feature 1..22: note = chemically synthesized
  source 1..22: mol_type = other DNA
gctgcttaatatgattagaccc

SEQ ID NO: 21835 - DNA, 22 bp, synthetic construct
  misc_feature 1..22: note = chemically synthesized
  source 1..22: mol_type = other DNA
cttaatatgattagacccaaat

SEQ ID NO: 21836 - DNA, 22 bp, synthetic construct
  misc_feature 1..22: note = chemically synthesized
  source 1..22: mol_type = other DNA
aatatgattagacccaaatatg

SEQ ID NO: 21837 - DNA, 22 bp, synthetic construct
  misc_feature 1..22: note = chemically synthesized
  source 1..22: mol_type = other DNA
atatgattagacccaaatatgc

SEQ ID NO: 21838 - DNA, 22 bp, synthetic construct
  misc_feature 1..22: note = chemically synthesized
  source 1..22: mol_type = other DNA
gacccaaatatgctaaggactc

SEQ ID NO: 21839 - DNA, 22 bp, synthetic construct
  misc_feature 1..22: note = chemically synthesized
  source 1..22: mol_type = other DNA
aggactcttcttctaatggtat

SEQ ID NO: 21840 - DNA, 22 bp, synthetic construct
  misc_feature 1..22: note = chemically synthesized
  source 1..22: mol_type = other DNA
ttcttctaatggtatggagaac

SEQ ID NO: 21841 - DNA, 22 bp, synthetic construct
  misc_feature 1..22: note = chemically synthesized
  source 1..22: mol_type = other DNA
cttctaatggtatggagaacac

SEQ ID NO: 21842 - DNA, 22 bp, synthetic construct
  misc_feature 1..22: note = chemically synthesized
  source 1..22: mol_type = other DNA
ttctaatggtatggagaacact

SEQ ID NO: 21843 - DNA, 22 bp, synthetic construct
  misc_feature 1..22: note = chemically synthesized
  source 1..22: mol_type = other DNA
ctaatggtatggagaacactga

SEQ ID NO: 21844 - DNA, 22 bp, synthetic construct
  misc_feature 1..22: note = chemically synthesized
  source 1..22: mol_type = other DNA
taatggtatggagaacactgat

SEQ ID NO: 21845 - DNA, 22 bp, synthetic construct
  misc_feature 1..22: note = chemically synthesized
  source 1..22: mol_type = other DNA
atggtatggagaacactgataa

SEQ ID NO: 21846 - DNA, 22 bp, synthetic construct
  misc_feature 1..22: note = chemically synthesized
  source 1..22: mol_type = other DNA
ataatccttggcatcaattgtt

SEQ ID NO: 21847 - DNA, 22 bp, synthetic construct
  misc_feature 1..22: note = chemically synthesized
  source 1..22: mol_type = other DNA
ggcatcaattgtttagagagtt

SEQ ID NO: 21848 - DNA, 22 bp, synthetic construct
  misc_feature 1..22: note = chemically synthesized
  source 1..22: mol_type = other DNA
gcatcaattgtttagagagtta

SEQ ID NO: 21849 - DNA, 22 bp, synthetic construct
  misc_feature 1..22: note = chemically synthesized
  source 1..22: mol_type = other DNA
tttagagagttatgcaaaataa

SEQ ID NO: 21850 - DNA, 22 bp, synthetic construct
  misc_feature 1..22: note = chemically synthesized
  source 1..22: mol_type = other DNA
agagagttatgcaaaataaatg

SEQ ID NO: 21851 - DNA, 22 bp, synthetic construct
  misc_feature 1..22: note = chemically synthesized
  source 1..22: mol_type = other DNA
gagagttatgcaaaataaatgc

SEQ ID NO: 21852 - DNA, 22 bp, synthetic construct
  misc_feature 1..22: note = chemically synthesized
  source 1..22: mol_type = other DNA
tgcaaaataaatgcatttgaca

SEQ ID NO: 21853 - DNA, 22 bp, synthetic construct
  misc_feature 1..22: note = chemically synthesized
  source 1..22: mol_type = other DNA
gacactcttgattcaacgcttg

SEQ ID NO: 21854 - DNA, 22 bp, synthetic construct
  misc_feature 1..22: note = chemically synthesized
  source 1..22: mol_type = other DNA
acactcttgattcaacgcttgt

SEQ ID NO: 21855 - DNA, 22 bp, synthetic construct
  misc_feature 1..22: note = chemically synthesized
  source 1..22: mol_type = other DNA
ttgattcaacgcttgtgagagg

SEQ ID NO: 21856 - DNA, 22 bp, synthetic construct
  misc_feature 1..22: note = chemically synthesized
  source 1..22: mol_type = other DNA
gattcaacgcttgtgagaggca

SEQ ID NO: 21857 - DNA, 22 bp, synthetic construct
  misc_feature 1..22: note = chemically synthesized
  source 1..22: mol_type = other DNA
attcaacgcttgtgagaggcaa

SEQ ID NO: 21858 - DNA, 22 bp, synthetic construct
  misc_feature 1..22: note = chemically synthesized
  source 1..22: mol_type = other DNA
aacgcttgtgagaggcaaggaa

SEQ ID NO: 21859 - DNA, 22 bp, synthetic construct
  misc_feature 1..22: note = chemically synthesized
  source 1..22: mol_type = other DNA
gtgagaggcaaggaatttagct

SEQ ID NO: 21860 - DNA, 22 bp, synthetic construct
  misc_feature 1..22: note = chemically synthesized
  source 1..22: mol_type = other DNA
tgagaggcaaggaatttagcta

SEQ ID NO: 21861 - DNA, 22 bp, synthetic construct
  misc_feature 1..22: note = chemically synthesized
  source 1..22: mol_type = other DNA
agctactgtatacataatactt

SEQ ID NO: 21862 - DNA, 22 bp, synthetic construct
  misc_feature 1..22: note = chemically synthesized
  source 1..22: mol_type = other DNA
gctactgtatacataatacttt

SEQ ID NO: 21863 - DNA, 22 bp, synthetic construct
  misc_feature 1..22: note = chemically synthesized
  source 1..22: mol_type = other DNA
ctgtatacataatacttttgac

SEQ ID NO: 21864 - DNA, 22 bp, synthetic construct
  misc_feature 1..22: note = chemically synthesized
  source 1..22: mol_type = other DNA
tatacataatacttttgactat

SEQ ID NO: 21865 - DNA, 22 bp, synthetic construct
  misc_feature 1..22: note = chemically synthesized
  source 1..22: mol_type = other DNA
ttgactatatgtggagaatcaa

SEQ ID NO: 21866 - DNA, 22 bp, synthetic construct
  misc_feature 1..22: note = chemically synthesized
  source 1..22: mol_type = other DNA
tgactatatgtggagaatcaag

SEQ ID NO: 21867 - DNA, 22 bp, synthetic construct
  misc_feature 1..22: note = chemically synthesized
  source 1..22: mol_type = other DNA
gactatatgtggagaatcaagg

SEQ ID NO: 21868 - DNA, 22 bp, synthetic construct
  misc_feature 1..22: note = chemically synthesized
  source 1..22: mol_type = other DNA
actatatgtggagaatcaagga

SEQ ID NO: 21869 - DNA, 22 bp, synthetic construct
  misc_feature 1..22: note = chemically synthesized
  source 1..22: mol_type = other DNA
tatgtggagaatcaaggaacat

SEQ ID NO: 21870 - DNA, 22 bp, synthetic construct
  misc_feature 1..22: note = chemically synthesized
  source 1..22: mol_type = other DNA
gttggttgcttgtaagttcgct

SEQ ID NO: 21871 - DNA, 22 bp, synthetic construct
  misc_feature 1..22: note = chemically synthesized
  source 1..22: mol_type = other DNA
gttgcttgtaagttcgctggac

SEQ ID NO: 21872 - DNA, 22 bp, synthetic construct
  misc_feature 1..22: note = chemically synthesized
  source 1..22: mol_type = other DNA
cttgtaagttcgctggacaaag

SEQ ID NO: 21873 - DNA, 22 bp, synthetic construct
  misc_feature 1..22: note = chemically synthesized
  source 1..22: mol_type = other DNA
gtaagttcgctggacaaagtga

SEQ ID NO: 21874 - DNA, 22 bp, synthetic construct
  misc_feature 1..22: note = chemically synthesized
  source 1..22: mol_type = other DNA
taagttcgctggacaaagtgat

SEQ ID NO: 21875 - DNA, 22 bp, synthetic construct
  misc_feature 1..22: note = chemically synthesized
  source 1..22: mol_type = other DNA
gctggacaaagtgatgaaagaa

SEQ ID NO: 21876 - DNA, 22 bp, synthetic construct
  misc_feature 1..22: note = chemically synthesized
  source 1..22: mol_type = other DNA
gacaaagtgatgaaagaaaatg

SEQ ID NO: 21877 - DNA, 22 bp, synthetic construct
  misc_feature 1..22: note = chemically synthesized
  source 1..22: mol_type = other DNA
aggagtatatcaactctccagc

SEQ ID NO: 21878 - DNA, 22 bp, synthetic construct
  misc_feature 1..22: note = chemically synthesized
  source 1..22: mol_type = other DNA
tccagctttgtgccataatctt

SEQ ID NO: 21879 - DNA, 22 bp, synthetic construct
  misc_feature 1..22: note = chemically synthesized
  source 1..22: mol_type = other DNA
cagctttgtgccataatcttat

SEQ ID NO: 21880 - DNA, 22 bp, synthetic construct
  misc_feature 1..22: note = chemically synthesized
  source 1..22: mol_type = other DNA
tgtgccataatcttatttggag

SEQ ID NO: 21881 - DNA, 22 bp, synthetic construct
  misc_feature 1..22: note = chemically synthesized
  source 1..22: mol_type = other DNA
gtgccataatcttatttggaga

SEQ ID NO: 21882 - DNA, 22 bp, synthetic construct
  misc_feature 1..22: note = chemically synthesized
  source 1..22: mol_type = other DNA
tgccataatcttatttggagag

SEQ ID NO: 21883 - DNA, 22 bp, synthetic construct
  misc_feature 1..22: note = chemically synthesized
  source 1..22: mol_type = other DNA
atttggagagaacttgctcacc

SEQ ID NO: 21884 - DNA, 22 bp, synthetic construct
  misc_feature 1..22: note = chemically synthesized
  source 1..22: mol_type = other DNA
tttggagagaacttgctcacct

SEQ ID NO: 21885 - DNA, 22 bp, synthetic construct
  misc_feature 1..22: note = chemically synthesized
  source 1..22: mol_type = other DNA
ggagagaacttgctcacctttc

SEQ ID NO: 21886 - DNA, 22 bp, synthetic construct
  misc_feature 1..22: note = chemically synthesized
  source 1..22: mol_type = other DNA
gagagaacttgctcacctttca

SEQ ID NO: 21887 - DNA, 22 bp, synthetic construct
  misc_feature 1..22: note = chemically synthesized
  source 1..22: mol_type = other DNA
gctcacctttcacttccacaag

SEQ ID NO: 21888 - DNA, 22 bp, synthetic construct
  misc_feature 1..22: note = chemically synthesized
  source 1..22: mol_type = other DNA
ctcacctttcacttccacaaga

SEQ ID NO: 21889 - DNA, 22 bp, synthetic construct
  misc_feature 1..22: note = chemically synthesized
  source 1..22: mol_type = other DNA
acctttcacttccacaagatat

SEQ ID NO: 21890 - DNA, 22 bp, synthetic construct
  misc_feature 1..22: note = chemically synthesized
  source 1..22: mol_type = other DNA
tcacttccacaagatatcacag

SEQ ID NO: 21891 - DNA, 22 bp, synthetic construct
  misc_feature 1..22: note = chemically synthesized
  source 1..22: mol_type = other DNA
cacttccacaagatatcacagt

SEQ ID NO: 21892 - DNA, 22 bp, synthetic construct
  misc_feature 1..22: note = chemically synthesized
  source 1..22: mol_type = other DNA
acttccacaagatatcacagtg

SEQ ID NO: 21893 - DNA, 22 bp, synthetic construct
  misc_feature 1..22: note = chemically synthesized
  source 1..22: mol_type = other DNA
ccacaagatatcacagtggtcc

SEQ ID NO: 21894 - DNA, 22 bp, synthetic construct
  misc_feature 1..22: note = chemically synthesized
  source 1..22: mol_type = other DNA
cacaagatatcacagtggtcca

SEQ ID NO: 21895 - DNA, 22 bp, synthetic construct
  misc_feature 1..22: note = chemically synthesized
  source 1..22: mol_type = other DNA
cattgatgacatgctgactgga

SEQ ID NO: 21896 - DNA, 22 bp, synthetic construct
  misc_feature 1..22: note = chemically synthesized
  source 1..22: mol_type = other DNA
atgacatgctgactggaactag

SEQ ID NO: 21897 - DNA, 22 bp, synthetic construct
  misc_feature 1..22: note = chemically synthesized
  source 1..22: mol_type = other DNA
actggaactagtgagcaagaag

SEQ ID NO: 21898 - DNA, 22 bp, synthetic construct
  misc_feature 1..22: note = chemically synthesized
  source 1..22: mol_type = other DNA
gaactagtgagcaagaagtagc

SEQ ID NO: 21899 - DNA, 22 bp, synthetic construct
  misc_feature 1..22: note = chemically synthesized
  source 1..22: mol_type = other DNA
gtgagcaagaagtagcaaacac

SEQ ID NO: 21900 - DNA, 22 bp, synthetic construct
  misc_feature 1..22: note = chemically synthesized
  source 1..22: mol_type = other DNA
gatttattgatgagacatttgt

SEQ ID NO: 21901 - DNA, 22 bp, synthetic construct
  misc_feature 1..22: note = chemically synthesized
  source 1..22: mol_type = other DNA
attgatgagacatttgtgggac

SEQ ID NO: 21902 - DNA, 22 bp, synthetic construct
  misc_feature 1..22: note = chemically synthesized
  source 1..22: mol_type = other DNA
ttgatgagacatttgtgggaca

SEQ ID NO: 21903 - DNA, 22 bp, synthetic construct
  misc_feature 1..22: note = chemically synthesized
  source 1..22: mol_type = other DNA
atgagacatttgtgggacagag

SEQ ID NO: 21904 - DNA, 22 bp, synthetic construct
  misc_feature 1..22: note = chemically synthesized
  source 1..22: mol_type = other DNA
gtgggacagaggatgggaaata

SEQ ID NO: 21905 - DNA, 22 bp, synthetic construct
  misc_feature 1..22: note = chemically synthesized
  source 1..22: mol_type = other DNA
tgggacagaggatgggaaataa

SEQ ID NO: 21906 - DNA, 22 bp, synthetic construct
  misc_feature 1..22: note = chemically synthesized
  source 1..22: mol_type = other DNA
attaaattcagggaccttctac

SEQ ID NO: 21907 - DNA, 22 bp, synthetic construct
  misc_feature 1..22: note = chemically synthesized
  source 1..22: mol_type = other DNA
aattcagggaccttctacctca

SEQ ID NO: 21908 - DNA, 22 bp, synthetic construct
  misc_feature 1..22: note = chemically synthesized
  source 1..22: mol_type = other DNA
agggaccttctacctcagtaaa

SEQ ID NO: 21909 - DNA, 22 bp, synthetic construct
  misc_feature 1..22: note = chemically synthesized
  source 1..22: mol_type = other DNA
ctacctcagtaaaatttatagg

SEQ ID NO: 21910 - DNA, 22 bp, synthetic construct
  misc_feature 1..22: note = chemically synthesized
  source 1..22: mol_type = other DNA
tacctcagtaaaatttataggg

SEQ ID NO: 21911 - DNA, 22 bp, synthetic construct
  misc_feature 1..22: note = chemically synthesized
  source 1..22: mol_type = other DNA
cctcagtaaaatttataggggt

SEQ ID NO: 21912 - DNA, 22 bp, synthetic construct
  misc_feature 1..22: note = chemically synthesized
  source 1..22: mol_type = other DNA
agtaaaatttataggggtccaa

SEQ ID NO: 21913 - DNA, 22 bp, synthetic construct
  misc_feature 1..22: note = chemically synthesized
  source 1..22: mol_type = other DNA
ataggggtccaatggtttgggg

SEQ ID NO: 21914 - DNA, 22 bp, synthetic construct
  misc_feature 1..22: note = chemically synthesized
  source 1..22: mol_type = other DNA
taggggtccaatggtttggggc

SEQ ID NO: 21915 - DNA, 22 bp, synthetic construct
  misc_feature 1..22: note = chemically synthesized
  source 1..22: mol_type = other DNA
ggggctctttgagatattcctt

SEQ ID NO: 21916 - DNA, 22 bp, synthetic construct
  misc_feature 1..22: note = chemically synthesized
  source 1..22: mol_type = other DNA
gggctctttgagatattccttc

SEQ ID NO: 21917 - DNA, 22 bp, synthetic construct
  misc_feature 1..22: note = chemically synthesized
  source 1..22: mol_type = other DNA
tttgagatattccttctaaagt

SEQ ID NO: 21918 - DNA, 22 bp, synthetic construct
  misc_feature 1..22: note = chemically synthesized
  source 1..22: mol_type = other DNA
tgagatattccttctaaagtga

SEQ ID NO: 21919 - DNA, 22 bp, synthetic construct
  misc_feature 1..22: note = chemically synthesized
  source 1..22: mol_type = other DNA
gagatattccttctaaagtgaa

SEQ ID NO: 21920 - DNA, 22 bp, synthetic construct
  misc_feature 1..22: note = chemically synthesized
  source 1..22: mol_type = other DNA
agatattccttctaaagtgaag

SEQ ID NO: 21921 - DNA, 22 bp, synthetic construct
  misc_feature 1..22: note = chemically synthesized
  source 1..22: mol_type = other DNA
cttctaaagtgaaggataattt

SEQ ID NO: 21922 - DNA, 22 bp, synthetic construct
  misc_feature 1..22: note = chemically synthesized
  source 1..22: mol_type = other DNA
ctaaagtgaaggataatttgct

SEQ ID NO: 21923 - DNA, 22 bp, synthetic construct
  misc_feature 1..22: note = chemically synthesized
  source 1..22: mol_type = other DNA
taaagtgaaggataatttgctg

SEQ ID NO: 21924 - DNA, 22 bp, synthetic construct
  misc_feature 1..22: note = chemically synthesized
  source 1..22: mol_type = other DNA
aagtgaaggataatttgctgca

SEQ ID NO: 21925 - DNA, 22 bp, synthetic construct
  misc_feature 1..22: note = chemically synthesized
  source 1..22: mol_type = other DNA
gctgcatttggccactcttaca

SEQ ID NO: 21926 - DNA, 22 bp, synthetic construct
  misc_feature 1..22: note = chemically synthesized
  source 1..22: mol_type = other DNA
ctgcatttggccactcttacaa

SEQ ID NO: 21927 - DNA, 22 bp, synthetic construct
  misc_feature 1..22: note = chemically synthesized
  source 1..22: mol_type = other DNA
catttggccactcttacaacca

SEQ ID NO: 21928 - DNA, 22 bp, synthetic construct
  misc_feature 1..22: note = chemically synthesized
  source 1..22: mol_type = other DNA
ggccactcttacaaccaagaaa

SEQ ID NO: 21929 - DNA, 22 bp, synthetic construct
  misc_feature 1..22: note = chemically synthesized
  source 1..22: mol_type = other DNA
gccactcttacaaccaagaaat

SEQ ID NO: 21930 - DNA, 22 bp, synthetic construct
  misc_feature 1..22: note = chemically synthesized
  source 1..22: mol_type = other DNA
ttacaaccaagaaataggcaca

SEQ ID NO: 21931 - DNA, 22 bp, synthetic construct
  misc_feature 1..22: note = chemically synthesized
  source 1..22: mol_type = other DNA
acaaccaagaaataggcacaac

SEQ ID NO: 21932 - DNA, 22 bp, synthetic construct
  misc_feature 1..22: note = chemically synthesized
  source 1..22: mol_type = other DNA
caaccaagaaataggcacaacg

SEQ ID NO: 21933 - DNA, 22 bp, synthetic construct
  misc_feature 1..22: note = chemically synthesized
  source 1..22: mol_type = other DNA
gtgggcctatttggattttgga

SEQ ID NO: 21934 - DNA, 22 bp, synthetic construct
  misc_feature 1..22: note = chemically synthesized
  source 1..22: mol_type = other DNA
tttggattttggaggcaacata

SEQ ID NO: 21935 - DNA, 22 bp, synthetic construct
  misc_feature 1..22: note = chemically synthesized
  source 1..22: mol_type = other DNA
ggattttggaggcaacatattc

SEQ ID NO: 21936 - DNA, 22 bp, synthetic construct
  misc_feature 1..22: note = chemically synthesized
  source 1..22: mol_type = other DNA
gattttggaggcaacatattcc

SEQ ID NO: 21937 - DNA, 22 bp, synthetic construct
  misc_feature 1..22: note = chemically synthesized
  source 1..22: mol_type = other DNA
tggaggcaacatattcctgatt

SEQ ID NO: 21938 - DNA, 22 bp, synthetic construct
  misc_feature 1..22: note = chemically synthesized
  source 1..22: mol_type = other DNA
ggaggcaacatattcctgattt

SEQ ID NO: 21939 - DNA, 22 bp, synthetic construct
  misc_feature 1..22: note = chemically synthesized
  source 1..22: mol_type = other DNA
gaggcaacatattcctgatttg

SEQ ID NO: 21940 - DNA, 22 bp, synthetic construct
  misc_feature 1..22: note = chemically synthesized
  source 1..22: mol_type = other DNA
ctgatttgggtgtgttactctg

SEQ ID NO: 21941 - DNA, 22 bp, synthetic construct
  misc_feature 1..22: note = chemically synthesized
  source 1..22: mol_type = other DNA
atttgggtgtgttactctggcc

SEQ ID NO: 21942 - DNA, 22 bp, synthetic construct
  misc_feature 1..22: note = chemically synthesized
  source 1..22: mol_type = other DNA
gggtgtgttactctggcccatt

SEQ ID NO: 21943 - DNA, 22 bp, synthetic construct
  misc_feature 1..22: note = chemically synthesized
  source 1..22: mol_type = other DNA
ggtgtgttactctggcccattt

SEQ ID NO: 21944 - DNA, 22 bp, synthetic construct
  misc_feature 1..22: note = chemically synthesized
  source 1..22: mol_type = other DNA
ctctggcccatttatcgagtga

SEQ ID NO: 21945 - DNA, 22 bp, synthetic construct
  misc_feature 1..22: note = chemically synthesized
  source 1..22: mol_type = other DNA
tggcccatttatcgagtgatcc

SEQ ID NO: 21946 - DNA, 22 bp, synthetic construct
  misc_feature 1..22: note = chemically synthesized
  source 1..22: mol_type = other DNA
gcccatttatcgagtgatccaa

SEQ ID NO: 21947 - DNA, 22 bp, synthetic construct
  misc_feature 1..22: note = chemically synthesized
  source 1..22: mol_type = other DNA
atcgagtgatccaaaaggctgc

SEQ ID NO: 21948 - DNA, 22 bp, synthetic construct
  misc_feature 1..22: note = chemically synthesized
  source 1..22: mol_type = other DNA
tcgagtgatccaaaaggctgcc

SEQ ID NO: 21949 - DNA, 22 bp, synthetic construct
  misc_feature 1..22: note = chemically synthesized
  source 1..22: mol_type = other DNA
ccagttttgagtggagtccaga

SEQ ID NO: 21950 - DNA, 22 bp, synthetic construct
  misc_feature 1..22: note = chemically synthesized
  source 1..22: mol_type = other DNA
tgagtggagtccagaacagaag

SEQ ID NO: 21951 - DNA, 22 bp, synthetic construct
  misc_feature 1..22: note = chemically synthesized
  source 1..22: mol_type = other DNA
gagtggagtccagaacagaagg

SEQ ID NO: 21952 - DNA, 22 bp, synthetic construct
  misc_feature 1..22: note = chemically synthesized
  source 1..22: mol_type = other DNA
agtggagtccagaacagaaggc

SEQ ID NO: 21953 - DNA, 22 bp, synthetic construct
  misc_feature 1..22: note = chemically synthesized
  source 1..22: mol_type = other DNA
tgccacaggtccaggctgctgt

SEQ ID NO: 21954 - DNA, 22 bp, synthetic construct
  misc_feature 1..22: note = chemically synthesized
  source 1..22: mol_type = other DNA
ccacaggtccaggctgctgtgc

SEQ ID NO: 21955 - DNA, 22 bp, synthetic construct
  misc_feature 1..22: note = chemically synthesized
  source 1..22: mol_type = other DNA
ctgtgcaagctgctatgccact

SEQ ID NO: 21956 - DNA, 22 bp, synthetic construct
  misc_feature 1..22: note = chemically synthesized
  source 1..22: mol_type = other DNA
tgcaagctgctatgccacttgg

SEQ ID NO: 21957 - DNA, 22 bp, synthetic construct
  misc_feature 1..22: note = chemically synthesized
  source 1..22: mol_type = other DNA
ctatgccacttgggccatatga

SEQ ID NO: 21958 - DNA, 22 bp, synthetic construct
  misc_feature 1..22: note = chemically synthesized
  source 1..22: mol_type = other DNA
tgccacttgggccatatgacct

SEQ ID NO: 21959 - DNA, 22 bp, synthetic construct
  misc_feature 1..22: note = chemically synthesized
  source 1..22: mol_type = other DNA
gggccatatgacctagcagatc

SEQ ID NO: 21960 - DNA, 22 bp, synthetic construct
  misc_feature 1..22: note = chemically synthesized
  source 1..22: mol_type = other DNA
ggccatatgacctagcagatcc

SEQ ID NO: 21961 - DNA, 22 bp, synthetic construct
  misc_feature 1..22: note = chemically synthesized
  source 1..22: mol_type = other DNA
gcagatccaatgatgcttgagg

SEQ ID NO: 21962 - DNA, 22 bp, synthetic construct
  misc_feature 1..22: note = chemically synthesized
  source 1..22: mol_type = other DNA
gaggtgtcagtgccagataggg

SEQ ID NO: 21963 - DNA, 22 bp, synthetic construct
  misc_feature 1..22: note = chemically synthesized
  source 1..22: mol_type = other DNA
aggtgtcagtgccagataggga

SEQ ID NO: 21964 - DNA, 22 bp, synthetic construct
  misc_feature 1..22: note = chemically synthesized
  source 1..22: mol_type = other DNA
tttggagcatttggcaggctga

SEQ ID NO: 21965 - DNA, 22 bp, synthetic construct
  misc_feature 1..22: note = chemically synthesized
  source 1..22: mol_type = other DNA
ggagcatttggcaggctgaatc

SEQ ID NO: 21966 - DNA, 22 bp, synthetic construct
  misc_feature 1..22: note = chemically synthesized
  source 1..22: mol_type = other DNA
gagcatttggcaggctgaatca

SEQ ID NO: 21967 - DNA, 22 bp, synthetic construct
  misc_feature 1..22: note = chemically synthesized
  source 1..22: mol_type = other DNA
ggcaggctgaatcacagcggag

SEQ ID NO: 21968 - DNA, 22 bp, synthetic construct
  misc_feature 1..22: note = chemically synthesized
  source 1..22: mol_type = other DNA
gcaggctgaatcacagcggagg

SEQ ID NO: 21969 - DNA, 22 bp, synthetic construct
  misc_feature 1..22: note = chemically synthesized
  source 1..22: mol_type = other DNA
aatcacagcggaggcctctagg

SEQ ID NO: 21970 - DNA, 22 bp, synthetic construct
  misc_feature 1..22: note = chemically synthesized
  source 1..22: mol_type = other DNA
taggattttggagcaaggccct

SEQ ID NO: 21971 - DNA, 22 bp, synthetic construct
  misc_feature 1..22: note = chemically synthesized
  source 1..22: mol_type = other DNA
ggattttggagcaaggccctgc

SEQ ID NO: 21972 - DNA, 22 bp, synthetic construct
  misc_feature 1..22: note = chemically synthesized
  source 1..22: mol_type = other DNA
tggagcaaggccctgccatctt

SEQ ID NO: 21973 - DNA, 22 bp, synthetic construct
  misc_feature 1..22: note = chemically synthesized
  source 1..22: mol_type = other DNA
ggagcaaggccctgccatcttc

SEQ ID NO: 21974 - DNA, 22 bp, synthetic construct
  misc_feature 1..22: note = chemically synthesized
  source 1..22: mol_type = other DNA
gagcaaggccctgccatcttct

SEQ ID NO: 21975 - DNA, 22 bp, synthetic construct
  misc_feature 1..22: note = chemically synthesized
  source 1..22: mol_type = other DNA
ccatcttctgcagataactact

SEQ ID NO: 21976 - DNA, 22 bp, synthetic construct
  misc_feature 1..22: note = chemically synthesized
  source 1..22: mol_type = other DNA
ctgcagataactactctctttt

SEQ ID NO: 21977 - DNA, 22 bp, synthetic construct
  misc_feature 1..22: note = chemically synthesized
  source 1..22: mol_type = other DNA
tgcagataactactctctttta

SEQ ID NO: 21978 - DNA, 22 bp, synthetic construct
  misc_feature 1..22: note = chemically synthesized
  source 1..22: mol_type = other DNA
cagataactactctcttttagg

SEQ ID NO: 21979 - DNA, 22 bp, synthetic construct
  misc_feature 1..22: note = chemically synthesized
  source 1..22: mol_type = other DNA
ctctcttttagggagaaagctc

SEQ ID NO: 21980 - DNA, 22 bp, synthetic construct
  misc_feature 1..22: note = chemically synthesized
  source 1..22: mol_type = other DNA
tcttttagggagaaagctcttg

SEQ ID NO: 21981 - DNA, 22 bp, synthetic construct
  misc_feature 1..22: note = chemically synthesized
  source 1..22: mol_type = other DNA
ttttagggagaaagctcttggc

SEQ ID NO: 21982 - DNA, 22 bp, synthetic construct
  misc_feature 1..22: note = chemically synthesized
  source 1..22: mol_type = other DNA
ttagggagaaagctcttggcct

SEQ ID NO: 21983 - DNA, 22 bp, synthetic construct
  misc_feature 1..22: note = chemically synthesized
  source 1..22: mol_type = other DNA
tagggagaaagctcttggcctg

SEQ ID NO: 21984 - DNA, 22 bp, synthetic construct
  misc_feature 1..22: note = chemically synthesized
  source 1..22: mol_type = other DNA
agggagaaagctcttggcctgt

SEQ ID NO: 21985 - DNA, 22 bp, synthetic construct
  misc_feature 1..22: note = chemically synthesized
  source 1..22: mol_type = other DNA
gggagaaagctcttggcctgtt

SEQ ID NO: 21986 - DNA, 22 bp, synthetic construct
  misc_feature 1..22: note = chemically synthesized
  source 1..22: mol_type = other DNA
ttggcctgttactgggctttgg

SEQ ID NO: 21987 - DNA, 22 bp, synthetic construct
  misc_feature 1..22: note = chemically synthesized
  source 1..22: mol_type = other DNA
ggcctgttactgggctttggtg

SEQ ID NO: 21988 - DNA, 22 bp, synthetic construct
  misc_feature 1..22: note = chemically synthesized
  source 1..22: mol_type = other DNA
gcctgttactgggctttggtgg

SEQ ID NO: 21989 - DNA, 22 bp, synthetic construct
  misc_feature 1..22: note = chemically synthesized
  source 1..22: mol_type = other DNA
ttactgggctttggtggaaacg

SEQ ID NO: 21990 - DNA, 22 bp, synthetic construct
  misc_feature 1..22: note = chemically synthesized
  source 1..22: mol_type = other DNA
ctgggctttggtggaaacgaaa

SEQ ID NO: 21991 - DNA, 22 bp, synthetic construct
  misc_feature 1..22: note = chemically synthesized
  source 1..22: mol_type = other DNA
ggctttggtggaaacgaaatat

SEQ ID NO: 21992 - DNA, 22 bp, synthetic construct
  misc_feature 1..22: note = chemically synthesized
  source 1..22: mol_type = other DNA
tggtggaaacgaaatatttgac

SEQ ID NO: 21993 - DNA, 22 bp, synthetic construct
  misc_feature 1..22: note = chemically synthesized
  source 1..22: mol_type = other DNA
ggtggaaacgaaatatttgact

SEQ ID NO: 21994 - DNA, 22 bp, synthetic construct
  misc_feature 1..22: note = chemically synthesized
  source 1..22: mol_type = other DNA
gtggaaacgaaatatttgacta

SEQ ID NO: 21995 - DNA, 22 bp, synthetic construct
  misc_feature 1..22: note = chemically synthesized
  source 1..22: mol_type = other DNA
gactatgagtcatcaagtcacc

SEQ ID NO: 21996 - DNA, 22 bp, synthetic construct
  misc_feature 1..22: note = chemically synthesized
  source 1..22: mol_type = other DNA
actatgagtcatcaagtcacca

SEQ ID NO: 21997 - DNA, 22 bp, synthetic construct
  misc_feature 1..22: note = chemically synthesized
  source 1..22: mol_type = other DNA
tgagtcatcaagtcaccatgtg

SEQ ID NO: 21998 - DNA, 22 bp, synthetic construct
  misc_feature 1..22: note = chemically synthesized
  source 1..22: mol_type = other DNA
aactgcctatcatgaactgggt

SEQ ID NO: 21999 - DNA, 22 bp, synthetic construct
  misc_feature 1..22: note = chemically synthesized
  source 1..22: mol_type = other DNA
cctatcatgaactgggtgcttt

SEQ ID NO: 22000 - DNA, 22 bp, synthetic construct
  misc_feature 1..22: note = chemically synthesized
  source 1..22: mol_type = other DNA
tcatgaactgggtgctttctga

SEQ ID NO: 22001 - DNA, 22 bp, synthetic construct
  misc_feature 1..22: note = chemically synthesized
  source 1..22: mol_type = other DNA
ggtgctttctgatccatctagc

SEQ ID NO: 22002 - DNA, 22 bp, synthetic construct
  misc_feature 1..22: note = chemically synthesized
  source 1..22: mol_type = other DNA
tctgatccatctagccataaag

SEQ ID NO: 22003 - DNA, 22 bp, synthetic construct
  misc_feature 1..22: note = chemically synthesized
  source 1..22: mol_type = other DNA
ctgatccatctagccataaagt

SEQ ID NO: 22004 - DNA, 22 bp, synthetic construct
  misc_feature 1..22: note = chemically synthesized
  source 1..22: mol_type = other DNA
tgatccatctagccataaagtg

SEQ ID NO: 22005 - DNA, 22 bp, synthetic construct
  misc_feature 1..22: note = chemically synthesized
  source 1..22: mol_type = other DNA
atccatctagccataaagtggg

SEQ ID NO: 22006 - DNA, 22 bp, synthetic construct
  misc_feature 1..22: note = chemically synthesized
  source 1..22: mol_type = other DNA
gccataaagtgggctgtgcaca

SEQ ID NO: 22007 - DNA, 22 bp, synthetic construct
  misc_feature 1..22: note = chemically synthesized
  source 1..22: mol_type = other DNA
tgcacagcagcattgcatcagc

SEQ ID NO: 22008 - DNA, 22 bp, synthetic construct
  misc_feature 1..22: note = chemically synthesized
  source 1..22: mol_type = other DNA
catcagcaaatggaagtggtat

SEQ ID NO: 22009 - DNA, 22 bp, synthetic construct
  misc_feature 1..22: note = chemically synthesized
  source 1..22: mol_type = other DNA
ggcttgagcagatcctgaaggc

SEQ ID NO: 22010 - DNA, 22 bp, synthetic construct
  misc_feature 1..22: note = chemically synthesized
  source 1..22: mol_type = other DNA
gagcagatcctgaaggcactag

SEQ ID NO: 22011 - DNA, 22 bp, synthetic construct
  misc_feature 1..22: note = chemically synthesized
  source 1..22: mol_type = other DNA
agcagatcctgaaggcactagt

SEQ ID NO: 22012 - DNA, 22 bp, synthetic construct
  misc_feature 1..22: note = chemically synthesized
  source 1..22: mol_type = other DNA
aaggcactagtaagttacatga

SEQ ID NO: 22013 - DNA, 22 bp, synthetic construct
  misc_feature 1..22: note = chemically synthesized
  source 1..22: mol_type = other DNA
gtaagttacatgagaaaggggc

SEQ ID NO: 22014 - DNA, 22 bp, synthetic construct
  misc_feature 1..22: note = chemically synthesized
  source 1..22: mol_type = other DNA
catgagaaaggggctcaaatgc

SEQ ID NO: 22015 - DNA, 22 bp, synthetic construct
  misc_feature 1..22: note = chemically synthesized
  source 1..22: mol_type = other DNA
aaatgcccatggtctccactcc

SEQ ID NO: 22016 - DNA, 22 bp, synthetic construct
  misc_feature 1..22: note = chemically synthesized
  source 1..22: mol_type = other DNA
cactcctgacacactgctttct

SEQ ID NO: 22017 - DNA, 22 bp, synthetic construct
  misc_feature 1..22: note = chemically synthesized
  source 1..22: mol_type = other DNA
ctgacacactgctttctctccc

SEQ ID NO: 22018 - DNA, 22 bp, synthetic construct
  misc_feature 1..22: note = chemically synthesized
  source 1..22: mol_type = other DNA
acacactgctttctctccctga

SEQ ID NO: 22019 - DNA, 22 bp, synthetic construct
  misc_feature 1..22: note = chemically synthesized
  source 1..22: mol_type = other DNA
ctttctctccctgagactgcac

SEQ ID NO: 22020 - DNA, 22 bp, synthetic construct
  misc_feature 1..22: note = chemically synthesized
  source 1..22: mol_type = other DNA
tctctccctgagactgcaccga

SEQ ID NO: 22021 - DNA, 22 bp, synthetic construct
  misc_feature 1..22: note = chemically synthesized
  source 1..22: mol_type = other DNA
ctctccctgagactgcaccgat

SEQ ID NO: 22022 - DNA, 22 bp, synthetic construct
  misc_feature 1..22: note = chemically synthesized
  source 1..22: mol_type = other DNA
tctccctgagactgcaccgatg

SEQ ID NO: 22023 - DNA, 22 bp, synthetic construct
  misc_feature 1..22: note = chemically synthesized
  source 1..22: mol_type = other DNA
tccctgagactgcaccgatggt

SEQ ID NO: 22024 - DNA, 22 bp, synthetic construct
  misc_feature 1..22: note = chemically synthesized
  source 1..22: mol_type = other DNA
cctgagactgcaccgatggtct

SEQ ID NO: 22025 - DNA, 22 bp, synthetic construct
  misc_feature 1..22: note = chemically synthesized
  source 1..22: mol_type = other DNA
agactgcaccgatggtctcatg

SEQ ID NO: 22026 - DNA, 22 bp, synthetic construct
  misc_feature 1..22: note = chemically synthesized
  source 1..22: mol_type = other DNA
caccgatggtctcatggggagt

SEQ ID NO: 22027 - DNA, 22 bp, synthetic construct
  misc_feature 1..22: note = chemically synthesized
  source 1..22: mol_type = other DNA
atggggagttccctatgatcag

SEQ ID NO: 22028 - DNA, 22 bp, synthetic construct
  misc_feature 1..22: note = chemically synthesized
  source 1..22: mol_type = other DNA
cctatgatcagctgacagagga

SEQ ID NO: 22029 - DNA, 22 bp, synthetic construct
  misc_feature 1..22: note = chemically synthesized
  source 1..22: mol_type = other DNA
tgatcagctgacagaggaagag

SEQ ID NO: 22030 - DNA, 22 bp, synthetic construct
  misc_feature 1..22: note = chemically synthesized
  source 1..22: mol_type = other DNA
acagaggaagagaagactaggt

SEQ ID NO: 22031 - DNA, 22 bp, synthetic construct
  misc_feature 1..22: note = chemically synthesized
  source 1..22: mol_type = other DNA
ggtcctggttcacagatagttc

SEQ ID NO: 22032 - DNA, 22 bp, synthetic construct
  misc_feature 1..22: note = chemically synthesized
  source 1..22: mol_type = other DNA
gttcacagatagttctgcacga

SEQ ID NO: 22033 - DNA, 22 bp, synthetic construct
  misc_feature 1..22: note = chemically synthesized
  source 1..22: mol_type = other DNA
acagatagttctgcacgatatg

SEQ ID NO: 22034 - DNA, 22 bp, synthetic construct
  misc_feature 1..22: note = chemically synthesized
  source 1..22: mol_type = other DNA
tgcacgatatgcaggcaccacc

SEQ ID NO: 22035 - DNA, 22 bp, synthetic construct
  misc_feature 1..22: note = chemically synthesized
  source 1..22: mol_type = other DNA
cacgatatgcaggcaccaccca

SEQ ID NO: 22036 - DNA, 22 bp, synthetic construct
  misc_feature 1..22: note = chemically synthesized
  source 1..22: mol_type = other DNA
cagcccctttctaggacatccc

SEQ ID NO: 22037 - DNA, 22 bp, synthetic construct
  misc_feature 1..22: note = chemically synthesized
  source 1..22: mol_type = other DNA
tctaggacatccctgaaggaca

SEQ ID NO: 22038 - DNA, 22 bp, synthetic construct
  misc_feature 1..22: note = chemically synthesized
  source 1..22: mol_type = other DNA
ctaggacatccctgaaggacaa

SEQ ID NO: 22039 - DNA, 22 bp, synthetic construct
  misc_feature 1..22: note = chemically synthesized
  source 1..22: mol_type = other DNA
taggacatccctgaaggacaac

SEQ ID NO: 22040 - DNA, 22 bp, synthetic construct
  misc_feature 1..22: note = chemically synthesized
  source 1..22: mol_type = other DNA
ggacatccctgaaggacaacgg

SEQ ID NO: 22041 - DNA, 22 bp, synthetic construct
  misc_feature 1..22: note = chemically synthesized
  source 1..22: mol_type = other DNA
aaggacaacggtgaagggaaat

SEQ ID NO: 22042 - DNA, 22 bp, synthetic construct
  misc_feature 1..22: note = chemically synthesized
  source 1..22: mol_type = other DNA
cctagttggcagaactttgagc

SEQ ID NO: 22043 - DNA, 22 bp, synthetic construct
  misc_feature 1..22: note = chemically synthesized
  source 1..22: mol_type = other DNA
ctagttggcagaactttgagca

SEQ ID NO: 22044 - DNA, 22 bp, synthetic construct
  misc_feature 1..22: note = chemically synthesized
  source 1..22: mol_type = other DNA
gttggcagaactttgagcagtg

SEQ ID NO: 22045 - DNA, 22 bp, synthetic construct
  misc_feature 1..22: note = chemically synthesized
  source 1..22: mol_type = other DNA
gcagaactttgagcagtgtgcc

SEQ ID NO: 22046 - DNA, 22 bp, synthetic construct
  misc_feature 1..22: note = chemically synthesized
  source 1..22: mol_type = other DNA
tgagcagtgtgcctggttgtgc

SEQ ID NO: 22047 - DNA, 22 bp, synthetic construct
  misc_feature 1..22: note = chemically synthesized
  source 1..22: mol_type = other DNA
gagcagtgtgcctggttgtgca

SEQ ID NO: 22048 - DNA, 22 bp, synthetic construct
  misc_feature 1..22: note = chemically synthesized
  source 1..22: mol_type = other DNA
agcagtgtgcctggttgtgcac

SEQ ID NO: 22049 - DNA, 22 bp, synthetic construct
  misc_feature 1..22: note = chemically synthesized
  source 1..22: mol_type = other DNA
gttgtgcactttgcacagaagg

SEQ ID NO: 22050 - DNA, 22 bp, synthetic construct
  misc_feature 1..22: note = chemically synthesized
  source 1..22: mol_type = other DNA
tgcactttgcacagaaggagaa

SEQ ID NO: 22051 - DNA, 22 bp, synthetic construct
  misc_feature 1..22: note = chemically synthesized
  source 1..22: mol_type = other DNA
tgcacagaaggagaaatggcca

SEQ ID NO: 22052 - DNA, 22 bp, synthetic construct
  misc_feature 1..22: note = chemically synthesized
  source 1..22: mol_type = other DNA
gcacagaaggagaaatggccag

SEQ ID NO: 22053 - DNA, 22 bp, synthetic construct
  misc_feature 1..22: note = chemically synthesized
  source 1..22: mol_type = other DNA
cacagaaggagaaatggccaga

SEQ ID NO: 22054 - DNA, 22 bp, synthetic construct
  misc_feature 1..22: note = chemically synthesized
  source 1..22: mol_type = other DNA
gcgattatatacttattcatgg

SEQ ID NO: 22055 - DNA, 22 bp, synthetic construct
  misc_feature 1..22: note = chemically synthesized
  source 1..22: mol_type = other DNA
cgattatatacttattcatggg

SEQ ID NO: 22056 - DNA, 22 bp, synthetic construct
  misc_feature 1..22: note = chemically synthesized
  source 1..22: mol_type = other DNA
tatacttattcatgggctgtag

SEQ ID NO: 22057 - DNA, 22 bp, synthetic construct
  misc_feature 1..22: note = chemically synthesized
  source 1..22: mol_type = other DNA
attcatgggctgtagccaaagg

SEQ ID NO: 22058 - DNA, 22 bp, synthetic construct
  misc_feature 1..22: note = chemically synthesized
  source 1..22: mol_type = other DNA
ttcatgggctgtagccaaaggt

SEQ ID NO: 22059 - DNA, 22 bp, synthetic construct
  misc_feature 1..22: note = chemically synthesized
  source 1..22: mol_type = other DNA
atgggctgtagccaaaggtttg

SEQ ID NO: 22060 - DNA, 22 bp, synthetic construct
  misc_feature 1..22: note = chemically synthesized
  source 1..22: mol_type = other DNA
tagccaaaggtttggctagatg

SEQ ID NO: 22061 - DNA, 22 bp, synthetic construct
  misc_feature 1..22: note = chemically synthesized
  source 1..22: mol_type = other DNA
ggctagatggtcagggacttgg

SEQ ID NO: 22062 - DNA, 22 bp, synthetic construct
  misc_feature 1..22: note = chemically synthesized
  source 1..22: mol_type = other DNA
gctagatggtcagggacttgga

SEQ ID NO: 22063 - DNA, 22 bp, synthetic construct
  misc_feature 1..22: note = chemically synthesized
  source 1..22: mol_type = other DNA
gatggtcagggacttggaaaaa

SEQ ID NO: 22064 - DNA, 22 bp, synthetic construct
  misc_feature 1..22: note = chemically synthesized
  source 1..22: mol_type = other DNA
ggaaaaagcatgactggaaaat

SEQ ID NO: 22065 - DNA, 22 bp, synthetic construct
  misc_feature 1..22: note = chemically synthesized
  source 1..22: mol_type = other DNA
gaaaaagcatgactggaaaatt

SEQ ID NO: 22066 - DNA, 22 bp, synthetic construct
  misc_feature 1..22: note = chemically synthesized
  source 1..22: mol_type = other DNA
gaaaattgatgacaaagaaatt

SEQ ID NO: 22067 - DNA, 22 bp, synthetic construct
  misc_feature 1..22: note = chemically synthesized
  source 1..22: mol_type = other DNA
atgacaaagaaatttggggaag

SEQ ID NO: 22068 - DNA, 22 bp, synthetic construct
  misc_feature 1..22: note = chemically synthesized
  source 1..22: mol_type = other DNA
ggggaagaggtatgtggatgga

SEQ ID NO: 22069 - DNA, 22 bp, synthetic construct
  misc_feature 1..22: note = chemically synthesized
  source 1..22: mol_type = other DNA
gggaagaggtatgtggatggac

SEQ ID NO: 22070 - DNA, 22 bp, synthetic construct
  misc_feature 1..22: note = chemically synthesized
  source 1..22: mol_type = other DNA
tatgattagtcaaaaactacaa

SEQ ID NO: 22071 - DNA, 22 bp, synthetic construct
  misc_feature 1..22: note = chemically synthesized
  source 1..22: mol_type = other DNA
tgattagtcaaaaactacaaag

SEQ ID NO: 22072 - DNA, 22 bp, synthetic construct
  misc_feature 1..22: note = chemically synthesized
  source 1..22: mol_type = other DNA
gtcaaaaactacaaagatattt

SEQ ID NO: 22073 - DNA, 22 bp, synthetic construct
  misc_feature 1..22: note = chemically synthesized
  source 1..22: mol_type = other DNA
caaagatattttcatcccatgt

SEQ ID NO: 22074 - DNA, 22 bp, synthetic construct
  misc_feature 1..22: note = chemically synthesized
  source 1..22: mol_type = other DNA
tcatcccatgtgagtgctcacc

SEQ ID NO: 22075 - DNA, 22 bp, synthetic construct
  misc_feature 1..22: note = chemically synthesized
  source 1..22: mol_type = other DNA
catcccatgtgagtgctcacca

SEQ ID NO: 22076 - DNA, 22 bp, synthetic construct
  misc_feature 1..22: note = chemically synthesized
  source 1..22: mol_type = other DNA
atcccatgtgagtgctcaccaa

SEQ ID NO: 22077 - DNA, 22 bp, synthetic construct
  misc_feature 1..22: note = chemically synthesized
  source 1..22: mol_type = other DNA
accaatgggtgacctcagcaga

SEQ ID NO: 22078 - DNA, 22 bp, synthetic construct
  misc_feature 1..22: note = chemically synthesized
  source 1..22: mol_type = other DNA
agcagaagaggattttaataat

SEQ ID NO: 22079 - DNA, 22 bp, synthetic construct
  misc_feature 1..22: note = chemically synthesized
  source 1..22: mol_type = other DNA
taataatcaagtggataggatg

SEQ ID NO: 22080 - DNA, 22 bp, synthetic construct
  misc_feature 1..22: note = chemically synthesized
  source 1..22: mol_type = other DNA
aataatcaagtggataggatga

SEQ ID NO: 22081 - DNA, 22 bp, synthetic construct
  misc_feature 1..22: note = chemically synthesized
  source 1..22: mol_type = other DNA
ataatcaagtggataggatgat

SEQ ID NO: 22082 - DNA, 22 bp, synthetic construct
  misc_feature 1..22: note = chemically synthesized
  source 1..22: mol_type = other DNA
tgtggacaccactcagcctttt

SEQ ID NO: 22083 - DNA, 22 bp, synthetic construct
  misc_feature 1..22: note = chemically synthesized
  source 1..22: mol_type = other DNA
tggacaccactcagccttttcc

SEQ ID NO: 22084 - DNA, 22 bp, synthetic construct
  misc_feature 1..22: note = chemically synthesized
  source 1..22: mol_type = other DNA
agccttttcccaggccactcat

SEQ ID NO: 22085 - DNA, 22 bp, synthetic construct
  misc_feature 1..22: note = chemically synthesized
  source 1..22: mol_type = other DNA
ttcccaggccactcatgtcatc

SEQ ID NO: 22086 - DNA, 22 bp, synthetic construct
  misc_feature 1..22: note = chemically synthesized
  source 1..22: mol_type = other DNA
tcccaggccactcatgtcatcg

SEQ ID NO: 22087 - DNA, 22 bp, synthetic construct
  misc_feature 1..22: note = chemically synthesized
  source 1..22: mol_type = other DNA
cccaggccactcatgtcatcgt

SEQ ID NO: 22088 - DNA, 22 bp, synthetic construct
  misc_feature 1..22: note = chemically synthesized
  source 1..22: mol_type = other DNA
ccaggccactcatgtcatcgtc

SEQ ID NO: 22089 - DNA, 22 bp, synthetic construct
  misc_feature 1..22: note = chemically synthesized
  source 1..22: mol_type = other DNA
atgtcatcgtccaatggaccca

SEQ ID NO: 22090 - DNA, 22 bp, synthetic construct
  misc_feature 1..22: note = chemically synthesized
  source 1..22: mol_type = other DNA
cagggatggaagttatgcttgg

SEQ ID NO: 22091 - DNA, 22 bp, synthetic construct
  misc_feature 1..22: note = chemically synthesized
  source 1..22: mol_type = other DNA
tgcttgggctcagcaacatgga

SEQ ID NO: 22092 - DNA, 22 bp, synthetic construct
  misc_feature 1..22: note = chemically synthesized
  source 1..22: mol_type = other DNA
gggctcagcaacatggacttcc

SEQ ID NO: 22093 - DNA, 22 bp, synthetic construct
  misc_feature 1..22: note = chemically synthesized
  source 1..22: mol_type = other DNA
ggctcagcaacatggacttcca

SEQ ID NO: 22094 - DNA, 22 bp, synthetic construct
  misc_feature 1..22: note = chemically synthesized
  source 1..22: mol_type = other DNA
agcaacatggacttccactcac

SEQ ID NO: 22095 - DNA, 22 bp, synthetic construct
  misc_feature 1..22: note = chemically synthesized
  source 1..22: mol_type = other DNA
ccactcaccaaagctgacctgg

SEQ ID NO: 22096 - DNA, 22 bp, synthetic construct
  misc_feature 1..22: note = chemically synthesized
  source 1..22: mol_type = other DNA
cactcaccaaagctgacctggc

SEQ ID NO: 22097 - DNA, 22 bp, synthetic construct
  misc_feature 1..22: note = chemically synthesized
  source 1..22: mol_type = other DNA
accaaagctgacctggccacag

SEQ ID NO: 22098 - DNA, 22 bp, synthetic construct
  misc_feature 1..22: note = chemically synthesized
  source 1..22: mol_type = other DNA
acctggccacagccactgcttg

SEQ ID NO: 22099 - DNA, 22 bp, synthetic construct
  misc_feature 1..22: note = chemically synthesized
  source 1..22: mol_type = other DNA
gccacagccactgcttgccagc

SEQ ID NO: 22100 - DNA, 22 bp, synthetic construct
  misc_feature 1..22: note = chemically synthesized
  source 1..22: mol_type = other DNA
cttgccagcatcagagaccaac

SEQ ID NO: 22101 - DNA, 22 bp, synthetic construct
  misc_feature 1..22: note = chemically synthesized
  source 1..22: mol_type = other DNA
gccagcatcagagaccaacact

SEQ ID NO: 22102 - DNA, 22 bp, synthetic construct
  misc_feature 1..22: note = chemically synthesized
  source 1..22: mol_type = other DNA
ccagcatcagagaccaacacta

SEQ ID NO: 22103 - DNA, 22 bp, synthetic construct
  misc_feature 1..22: note = chemically synthesized
  source 1..22: mol_type = other DNA
agcccttgatatggcaccattc

SEQ ID NO: 22104 - DNA, 22 bp, synthetic construct
  misc_feature 1..22: note = chemically synthesized
  source 1..22: mol_type = other DNA
gatatggcaccattcctcgggg

SEQ ID NO: 22105 - DNA, 22 bp, synthetic construct
  misc_feature 1..22: note = chemically synthesized
  source 1..22: mol_type = other DNA
atatggcaccattcctcggggt

SEQ ID NO: 22106 - DNA, 22 bp, synthetic construct
  misc_feature 1..22: note = chemically synthesized
  source 1..22: mol_type = other DNA
ctcggggtgatcagccagctac

SEQ ID NO: 22107 - DNA, 22 bp, synthetic construct
  misc_feature 1..22: note = chemically synthesized
  source 1..22: mol_type = other DNA
ggggtgatcagccagctacctg

SEQ ID NO: 22108 - DNA, 22 bp, synthetic construct
  misc_feature 1..22: note = chemically synthesized
  source 1..22: mol_type = other DNA
cctggtggcaggttgattatat

SEQ ID NO: 22109 - DNA, 22 bp, synthetic construct
  misc_feature 1..22: note = chemically synthesized
  source 1..22: mol_type = other DNA
gtggcaggttgattatattgga

SEQ ID NO: 22110 - DNA, 22 bp, synthetic construct
  misc_feature 1..22: note = chemically synthesized
  source 1..22: mol_type = other DNA
attatattggacctcttccatc

SEQ ID NO: 22111 - DNA, 22 bp, synthetic construct
  misc_feature 1..22: note = chemically synthesized
  source 1..22: mol_type = other DNA
tattggacctcttccatcatgg

SEQ ID NO: 22112 - DNA, 22 bp, synthetic construct
  misc_feature 1..22: note = chemically synthesized
  source 1..22: mol_type = other DNA
gacctcttccatcatggaaagg

SEQ ID NO: 22113 - DNA, 22 bp, synthetic construct
  misc_feature 1..22: note = chemically synthesized
  source 1..22: mol_type = other DNA
ttccatcatggaaagggcagag

SEQ ID NO: 22114 - DNA, 22 bp, synthetic construct
  misc_feature 1..22: note = chemically synthesized
  source 1..22: mol_type = other DNA
ccatcatggaaagggcagaggc

SEQ ID NO: 22115 - DNA, 22 bp, synthetic construct
  misc_feature 1..22: note = chemically synthesized
  source 1..22: mol_type = other DNA
catcatggaaagggcagaggct

SEQ ID NO: 22116 - DNA, 22 bp, synthetic construct
  misc_feature 1..22: note = chemically synthesized
  source 1..22: mol_type = other DNA
gtcctcactggaatagacactt

SEQ ID NO: 22117 - DNA, 22 bp, synthetic construct
  misc_feature 1..22: note = chemically synthesized
  source 1..22: mol_type = other DNA
tcctcactggaatagacactta

SEQ ID NO: 22118 - DNA, 22 bp, synthetic construct
  misc_feature 1..22: note = chemically synthesized
  source 1..22: mol_type = other DNA
actggaatagacacttactctg

SEQ ID NO: 22119 - DNA, 22 bp, synthetic construct
  misc_feature 1..22: note = chemically synthesized
  source 1..22: mol_type = other DNA
gaatagacacttactctggata

SEQ ID NO: 22120 - DNA, 22 bp, synthetic construct
  misc_feature 1..22: note = chemically synthesized
  source 1..22: mol_type = other DNA
actctggatatgggtttcccaa

SEQ ID NO: 22121 - DNA, 22 bp, synthetic construct
  misc_feature 1..22: note = chemically synthesized
  source 1..22: mol_type = other DNA
ctctggatatgggtttcccaat

SEQ ID NO: 22122 - DNA, 22 bp, synthetic construct
  misc_feature 1..22: note = chemically synthesized
  source 1..22: mol_type = other DNA
tggatatgggtttcccaatcct

SEQ ID NO: 22123 - DNA, 22 bp, synthetic construct
  misc_feature 1..22: note = chemically synthesized
  source 1..22: mol_type = other DNA
gatatgggtttcccaatcctga

SEQ ID NO: 22124 - DNA, 22 bp, synthetic construct
  misc_feature 1..22: note = chemically synthesized
  source 1..22: mol_type = other DNA
cccaatcctgaactcaatgctt

SEQ ID NO: 22125 - DNA, 22 bp, synthetic construct
  misc_feature 1..22: note = chemically synthesized
  source 1..22: mol_type = other DNA
ccaatcctgaactcaatgctta

SEQ ID NO: 22126 - DNA, 22 bp, synthetic construct
  misc_feature 1..22: note = chemically synthesized
  source 1..22: mol_type = other DNA
aactcaatgcttatgccaagac

SEQ ID NO: 22127 - DNA, 22 bp, synthetic construct
  misc_feature 1..22: note = chemically synthesized
  source 1..22: mol_type = other DNA
aatgcttatgccaagactacca

SEQ ID NO: 22128 - DNA, 22 bp, synthetic construct
  misc_feature 1..22: note = chemically synthesized
  source 1..22: mol_type = other DNA
atgccaagactaccatccatgg

SEQ ID NO: 22129 - DNA, 22 bp, synthetic construct
  misc_feature 1..22: note = chemically synthesized
  source 1..22: mol_type = other DNA
tgccaagactaccatccatgga

SEQ ID NO: 22130 - DNA, 22 bp, synthetic construct
  misc_feature 1..22: note = chemically synthesized
  source 1..22: mol_type = other DNA
ccatccatggaatcacagaatg

SEQ ID NO: 22131 - DNA, 22 bp, synthetic construct
  misc_feature 1..22: note = chemically synthesized
  source 1..22: mol_type = other DNA
tcatggtattccacacagcatt

SEQ ID NO: 22132 - DNA, 22 bp, synthetic construct
  misc_feature 1..22: note = chemically synthesized
  source 1..22: mol_type = other DNA
cacacagcattgcttctgacca

SEQ ID NO: 22133 - DNA, 22 bp, synthetic construct
  misc_feature 1..22: note = chemically synthesized
  source 1..22: mol_type = other DNA
cttctgaccaagccactcactt

SEQ ID NO: 22134 - DNA, 22 bp, synthetic construct
  misc_feature 1..22: note = chemically synthesized
  source 1..22: mol_type = other DNA
ctgaccaagccactcactttat

SEQ ID NO: 22135 - DNA, 22 bp, synthetic construct
  misc_feature 1..22: note = chemically synthesized
  source 1..22: mol_type = other DNA
tgaccaagccactcactttatg

SEQ ID NO: 22136 - DNA, 22 bp, synthetic construct
  misc_feature 1..22: note = chemically synthesized
  source 1..22: mol_type = other DNA
accaagccactcactttatggc

SEQ ID NO: 22137 - DNA, 22 bp, synthetic construct
  misc_feature 1..22: note = chemically synthesized
  source 1..22: mol_type = other DNA
actttatggctaaagaagtgtg

SEQ ID NO: 22138 - DNA, 22 bp, synthetic construct
  misc_feature 1..22: note = chemically synthesized
  source 1..22: mol_type = other DNA
tatggctaaagaagtgtgacag

SEQ ID NO: 22139 - DNA, 22 bp, synthetic construct
  misc_feature 1..22: note = chemically synthesized
  source 1..22: mol_type = other DNA
atggctaaagaagtgtgacagt

SEQ ID NO: 22140 - DNA, 22 bp, synthetic construct
  misc_feature 1..22: note = chemically synthesized
  source 1..22: mol_type = other DNA
tggctaaagaagtgtgacagtg

SEQ ID NO: 22141 - DNA, 22 bp, synthetic construct
  misc_feature 1..22: note = chemically synthesized
  source 1..22: mol_type = other DNA
aagaagtgtgacagtgggctca

SEQ ID NO: 22142 - DNA, 22 bp, synthetic construct
  misc_feature 1..22: note = chemically synthesized
  source 1..22: mol_type = other DNA
atgctcatggaatttactggtc

SEQ ID NO: 22143 - DNA, 22 bp, synthetic construct
  misc_feature 1..22: note = chemically synthesized
  source 1..22: mol_type = other DNA
atggaatttactggtcttacca

SEQ ID NO: 22144 - DNA, 22 bp, synthetic construct
  misc_feature 1..22: note = chemically synthesized
  source 1..22: mol_type = other DNA
actggtcttaccatgatcccta

SEQ ID NO: 22145 - DNA, 22 bp, synthetic construct
  misc_feature 1..22: note = chemically synthesized
  source 1..22: mol_type = other DNA
ctggtcttaccatgatccctat

SEQ ID NO: 22146 - DNA, 22 bp, synthetic construct
  misc_feature 1..22: note = chemically synthesized
  source 1..22: mol_type = other DNA
gtcttaccatgatccctatcat

SEQ ID NO: 22147 - DNA, 22 bp, synthetic construct
  misc_feature 1..22: note = chemically synthesized
  source 1..22: mol_type = other DNA
accatgatccctatcatcctga

SEQ ID NO: 22148 - DNA, 22 bp, synthetic construct
  misc_feature 1..22: note = chemically synthesized
  source 1..22: mol_type = other DNA
ccatgatccctatcatcctgaa

SEQ ID NO: 22149 - DNA, 22 bp, synthetic construct
  misc_feature 1..22: note = chemically synthesized
  source 1..22: mol_type = other DNA
tcatcctgaagcagcttttgaa

SEQ ID NO: 22150 - DNA, 22 bp, synthetic construct
  misc_feature 1..22: note = chemically synthesized
  source 1..22: mol_type = other DNA
aagcagcttttgaatggccttt

SEQ ID NO: 22151 - DNA, 22 bp, synthetic construct
  misc_feature 1..22: note = chemically synthesized
  source 1..22: mol_type = other DNA
ttgaatggccttttgaagtcac

SEQ ID NO: 22152 - DNA, 22 bp, synthetic construct
  misc_feature 1..22: note = chemically synthesized
  source 1..22: mol_type = other DNA
tgaatggccttttgaagtcacg

SEQ ID NO: 22153 - DNA, 22 bp, synthetic construct
  misc_feature 1..22: note = chemically synthesized
  source 1..22: mol_type = other DNA
gaatggccttttgaagtcacga

SEQ ID NO: 22154 - DNA, 22 bp, synthetic construct
  misc_feature 1..22: note = chemically synthesized
  source 1..22: mol_type = other DNA
aatggccttttgaagtcacgat

SEQ ID NO: 22155 - DNA, 22 bp, synthetic construct
  misc_feature 1..22: note = chemically synthesized
  source 1..22: mol_type = other DNA
ttgaagtcacgattacaatgcc

SEQ ID NO: 22156 - DNA, 22 bp, synthetic construct
  misc_feature 1..22: note = chemically synthesized
  source 1..22: mol_type = other DNA
tgaagtcacgattacaatgcca

SEQ ID NO: 22157 - DNA, 22 bp, synthetic construct
  misc_feature 1..22: note = chemically synthesized
  source 1..22: mol_type = other DNA
gaagtcacgattacaatgccaa

SEQ ID NO: 22158 - DNA, 22 bp, synthetic construct
  misc_feature 1..22: note = chemically synthesized
  source 1..22: mol_type = other DNA
aagtcacgattacaatgccaac

SEQ ID NO: 22159 - DNA, 22 bp, synthetic construct
  misc_feature 1..22: note = chemically synthesized
  source 1..22: mol_type = other DNA
caatgccaactaggtgacaata

SEQ ID NO: 22160 - DNA, 22 bp, synthetic construct
  misc_feature 1..22: note = chemically synthesized
  source 1..22: mol_type = other DNA
ggtgacaatactttgcaggcct

SEQ ID NO: 22161 - DNA, 22 bp, synthetic construct
  misc_feature 1..22: note = chemically synthesized
  source 1..22: mol_type = other DNA
tgcaggcctggggcaaagttct

SEQ ID NO: 22162 - DNA, 22 bp, synthetic construct
  misc_feature 1..22: note = chemically synthesized
  source 1..22: mol_type = other DNA
gcaggcctggggcaaagttctc

SEQ ID NO: 22163 - DNA, 22 bp, synthetic construct
  misc_feature 1..22: note = chemically synthesized
  source 1..22: mol_type = other DNA
caggcctggggcaaagttctcc

SEQ ID NO: 22164 - DNA, 22 bp, synthetic construct
  misc_feature 1..22: note = chemically synthesized
  source 1..22: mol_type = other DNA
gggcaaagttctccagaaggct

SEQ ID NO: 22165 - DNA, 22 bp, synthetic construct
  misc_feature 1..22: note = chemically synthesized
  source 1..22: mol_type = other DNA
tccagaaggctgtgtatgctct

SEQ ID NO: 22166 - DNA, 22 bp, synthetic construct
  misc_feature 1..22: note = chemically synthesized
  source 1..22: mol_type = other DNA
cagaaggctgtgtatgctctga

SEQ ID NO: 22167 - DNA, 22 bp, synthetic construct
  misc_feature 1..22: note = chemically synthesized
  source 1..22: mol_type = other DNA
tgtatgctctgaatcagtgtcc

SEQ ID NO: 22168 - DNA, 22 bp, synthetic construct
  misc_feature 1..22: note = chemically synthesized
  source 1..22: mol_type = other DNA
tgaatcagtgtccaatatatgg

SEQ ID NO: 22169 - DNA, 22 bp, synthetic construct
  misc_feature 1..22: note = chemically synthesized
  source 1..22: mol_type = other DNA
aatcagtgtccaatatatggta

SEQ ID NO: 22170 - DNA, 22 bp, synthetic construct
  misc_feature 1..22: note = chemically synthesized
  source 1..22: mol_type = other DNA
tttctcccatagacaggattca

SEQ ID NO: 22171 - DNA, 22 bp, synthetic construct
  misc_feature 1..22: note = chemically synthesized
  source 1..22: mol_type = other DNA
ctcccatagacaggattcacgg

SEQ ID NO: 22172 - DNA, 22 bp, synthetic construct
  misc_feature 1..22: note = chemically synthesized
  source 1..22: mol_type = other DNA
tcccatagacaggattcacggg

SEQ ID NO: 22173 - DNA, 22 bp, synthetic construct
  misc_feature 1..22: note = chemically synthesized
  source 1..22: mol_type = other DNA
ccatagacaggattcacgggtc

SEQ ID NO: 22174 - DNA, 22 bp, synthetic construct
  misc_feature 1..22: note = chemically synthesized
  source 1..22: mol_type = other DNA
acgggtccaggaatcaaagggt

SEQ ID NO: 22175 - DNA, 22 bp, synthetic construct
  misc_feature 1..22: note = chemically synthesized
  source 1..22: mol_type = other DNA
accatcacccctagtgttccac

SEQ ID NO: 22176 - DNA, 22 bp, synthetic construct
  misc_feature 1..22: note = chemically synthesized
  source 1..22: mol_type = other DNA
gtgttccactagcaaaattttt

SEQ ID NO: 22177 - DNA, 22 bp, synthetic construct
  misc_feature 1..22: note = chemically synthesized
  source 1..22: mol_type = other DNA
cactagcaaaatttttgcttcc

SEQ ID NO: 22178 - DNA, 22 bp, synthetic construct
  misc_feature 1..22: note = chemically synthesized
  source 1..22: mol_type = other DNA
gcaaaatttttgcttcctgttc

SEQ ID NO: 22179 - DNA, 22 bp, synthetic construct
  misc_feature 1..22: note = chemically synthesized
  source 1..22: mol_type = other DNA
ttgcttcctgttcccatggcat

SEQ ID NO: 22180 - DNA, 22 bp, synthetic construct
  misc_feature 1..22: note = chemically synthesized
  source 1..22: mol_type = other DNA
tgcttcctgttcccatggcatt

SEQ ID NO: 22181 - DNA, 22 bp, synthetic construct
  misc_feature 1..22: note = chemically synthesized
  source 1..22: mol_type = other DNA
gcttcctgttcccatggcatta

SEQ ID NO: 22182 - DNA, 22 bp, synthetic construct
  misc_feature 1..22: note = chemically synthesized
  source 1..22: mol_type = other DNA
cttcctgttcccatggcattat

SEQ ID NO: 22183 - DNA, 22 bp, synthetic construct
  misc_feature 1..22: note = chemically synthesized
  source 1..22: mol_type = other DNA
cctgttcccatggcattatgtt

SEQ ID NO: 22184 - DNA, 22 bp, synthetic construct
  misc_feature 1..22: note = chemically synthesized
  source 1..22: mol_type = other DNA
ctgttcccatggcattatgttc

SEQ ID NO: 22185 - DNA, 22 bp, synthetic construct
  misc_feature 1..22: note = chemically synthesized
  source 1..22: mol_type = other DNA
ttcccatggcattatgttctgc

SEQ ID NO: 22186 - DNA, 22 bp, synthetic construct
  misc_feature 1..22: note = chemically synthesized
  source 1..22: mol_type = other DNA
ccatggcattatgttctgctgg

SEQ ID NO: 22187 - DNA, 22 bp, synthetic construct
  misc_feature 1..22: note = chemically synthesized
  source 1..22: mol_type = other DNA
tgttctgctggcttagaggtct

SEQ ID NO: 22188 - DNA, 22 bp, synthetic construct
  misc_feature 1..22: note = chemically synthesized
  source 1..22: mol_type = other DNA
tgctggcttagaggtcttagtt

SEQ ID NO: 22189 - DNA, 22 bp, synthetic construct
  misc_feature 1..22: note = chemically synthesized
  source 1..22: mol_type = other DNA
ctggcttagaggtcttagttcc

SEQ ID NO: 22190 - DNA, 22 bp, synthetic construct
  misc_feature 1..22: note = chemically synthesized
  source 1..22: mol_type = other DNA
gcttagaggtcttagttccaga

SEQ ID NO: 22191 - DNA, 22 bp, synthetic construct
  misc_feature 1..22: note = chemically synthesized
  source 1..22: mol_type = other DNA
agaggtcttagttccagaggga

SEQ ID NO: 22192 - DNA, 22 bp, synthetic construct
  misc_feature 1..22: note = chemically synthesized
  source 1..22: mol_type = other DNA
gaggtcttagttccagagggag

SEQ ID NO: 22193 - DNA, 22 bp, synthetic construct
  misc_feature 1..22: note = chemically synthesized
  source 1..22: mol_type = other DNA
agttccagagggaggaacactg

SEQ ID NO: 22194 - DNA, 22 bp, synthetic construct
  misc_feature 1..22: note = chemically synthesized
  source 1..22: mol_type = other DNA
gttccagagggaggaacactgc

SEQ ID NO: 22195 - DNA, 22 bp, synthetic construct
  misc_feature 1..22: note = chemically synthesized
  source 1..22: mol_type = other DNA
cagagggaggaacactgccgcc

SEQ ID NO: 22196 - DNA, 22 bp, synthetic construct
  misc_feature 1..22: note = chemically synthesized
  source 1..22: mol_type = other DNA
ccgccaggtgacacaataatga

SEQ ID NO: 22197 - DNA, 22 bp, synthetic construct
  misc_feature 1..22: note = chemically synthesized
  source 1..22: mol_type = other DNA
cattaaactgcaaattaagatt

SEQ ID NO: 22198 - DNA, 22 bp, synthetic construct
  misc_feature 1..22: note = chemically synthesized
  source 1..22: mol_type = other DNA
aactgcaaattaagattgccac

SEQ ID NO: 22199 - DNA, 22 bp, synthetic construct
  misc_feature 1..22: note = chemically synthesized
  source 1..22: mol_type = other DNA
caaattaagattgccacctgga

SEQ ID NO: 22200 - DNA, 22 bp, synthetic construct
  misc_feature 1..22: note = chemically synthesized
  source 1..22: mol_type = other DNA
agattgccacctggacactttg

SEQ ID NO: 22201 - DNA, 22 bp, synthetic construct
  misc_feature 1..22: note = chemically synthesized
  source 1..22: mol_type = other DNA
ccacctggacactttgggctcc

SEQ ID NO: 22202 - DNA, 22 bp, synthetic construct
  misc_feature 1..22: note = chemically synthesized
  source 1..22: mol_type = other DNA
gacactttgggctcctcccacc

SEQ ID NO: 22203 - DNA, 22 bp, synthetic construct
  misc_feature 1..22: note = chemically synthesized
  source 1..22: mol_type = other DNA
tgggctcctcccacctttaagt

SEQ ID NO: 22204 - DNA, 22 bp, synthetic construct
  misc_feature 1..22: note = chemically synthesized
  source 1..22: mol_type = other DNA
gggctcctcccacctttaagtc

SEQ ID NO: 22205 - DNA, 22 bp, synthetic construct
  misc_feature 1..22: note = chemically synthesized
  source 1..22: mol_type = other DNA
ggctcctcccacctttaagtca

SEQ ID NO: 22206 - DNA, 22 bp, synthetic construct
  misc_feature 1..22: note = chemically synthesized
  source 1..22: mol_type = other DNA
ctcccacctttaagtcaacagg

SEQ ID NO: 22207 - DNA, 22 bp, synthetic construct
  misc_feature 1..22: note = chemically synthesized
  source 1..22: mol_type = other DNA
ccacctttaagtcaacaggcta

SEQ ID NO: 22208 - DNA, 22 bp, synthetic construct
  misc_feature 1..22: note = chemically synthesized
  source 1..22: mol_type = other DNA
taagtcaacaggctaagaagag

SEQ ID NO: 22209 - DNA, 22 bp, synthetic construct
  misc_feature 1..22: note = chemically synthesized
  source 1..22: mol_type = other DNA
aagtcaacaggctaagaagaga

SEQ ID NO: 22210 - DNA, 22 bp, synthetic construct
  misc_feature 1..22: note = chemically synthesized
  source 1..22: mol_type = other DNA
agtcaacaggctaagaagagag

SEQ ID NO: 22211 - DNA, 22 bp, synthetic construct
  misc_feature 1..22: note = chemically synthesized
  source 1..22: mol_type = other DNA
agaagagagttacagtgttggc

SEQ ID NO: 22212 - DNA, 22 bp, synthetic construct
  misc_feature 1..22: note = chemically synthesized
  source 1..22: mol_type = other DNA
cagtgttggctgcggtgattaa

SEQ ID NO: 22213 - DNA, 22 bp, synthetic construct
  misc_feature 1..22: note = chemically synthesized
  source 1..22: mol_type = other DNA
gctgcggtgattaacccagact

SEQ ID NO: 22214 - DNA, 22 bp, synthetic construct
  misc_feature 1..22: note = chemically synthesized
  source 1..22: mol_type = other DNA
cggtgattaacccagactatca

SEQ ID NO: 22215 - DNA, 22 bp, synthetic construct
  misc_feature 1..22: note = chemically synthesized
  source 1..22: mol_type = other DNA
acccagactatcaagatgaaat

SEQ ID NO: 22216 - DNA, 22 bp, synthetic construct
  misc_feature 1..22: note = chemically synthesized
  source 1..22: mol_type = other DNA
tcaagatgaaatcagtctacaa

SEQ ID NO: 22217 - DNA, 22 bp, synthetic construct
  misc_feature 1..22: note = chemically synthesized
  source 1..22: mol_type = other DNA
caactccacaatggaggtaagg

SEQ ID NO: 22218 - DNA, 22 bp, synthetic construct
  misc_feature 1..22: note = chemically synthesized
  source 1..22: mol_type = other DNA
cacaatggaggtaaggaagcgt

SEQ ID NO: 22219 - DNA, 22 bp, synthetic construct
  misc_feature 1..22: note = chemically synthesized
  source 1..22: mol_type = other DNA
gggtgtctcttagttttaccat

SEQ ID NO: 22220 - DNA, 22 bp, synthetic construct
  misc_feature 1..22: note = chemically synthesized
  source 1..22: mol_type = other DNA
ttagttttaccatgtcctggaa

SEQ ID NO: 22221 - DNA, 22 bp, synthetic construct
  misc_feature 1..22: note = chemically synthesized
  source 1..22: mol_type = other DNA
agttttaccatgtcctggaatt

SEQ ID NO: 22222 - DNA, 22 bp, synthetic construct
  misc_feature 1..22: note = chemically synthesized
  source 1..22: mol_type = other DNA
gttttaccatgtcctggaatta

SEQ ID NO: 22223 - DNA, 22 bp, synthetic construct
  misc_feature 1..22: note = chemically synthesized
  source 1..22: mol_type = other DNA
taccatgtcctggaattaaggt

SEQ ID NO: 22224 - DNA, 22 bp, synthetic construct
  misc_feature 1..22: note = chemically synthesized
  source 1..22: mol_type = other DNA
accatgtcctggaattaaggtc

SEQ ID NO: 22225 - DNA, 22 bp, synthetic construct
  misc_feature 1..22: note = chemically synthesized
  source 1..22: mol_type = other DNA
ccatgtcctggaattaaggtca

SEQ ID NO: 22226 - DNA, 22 bp, synthetic construct
  misc_feature 1..22: note = chemically synthesized
  source 1..22: mol_type = other DNA
gaattaaggtcagtgggaaact

SEQ ID NO: 22227 - DNA, 22 bp, synthetic construct
  misc_feature 1..22: note = chemically synthesized
  source 1..22: mol_type = other DNA
aggtcagtgggaaactactaca

SEQ ID NO: 22228 - DNA, 22 bp, synthetic construct
  misc_feature 1..22: note = chemically synthesized
  source 1..22: mol_type = other DNA
ctacaggccattccaggcagga

SEQ ID NO: 22229 - DNA, 22 bp, synthetic construct
  misc_feature 1..22: note = chemically synthesized
  source 1..22: mol_type = other DNA
caggccattccaggcaggacta

SEQ ID NO: 22230 - DNA, 22 bp, synthetic construct
  misc_feature 1..22: note = chemically synthesized
  source 1..22: mol_type = other DNA
caggcaggactacaaataaagg

SEQ ID NO: 22231 - DNA, 22 bp, synthetic construct
  misc_feature 1..22: note = chemically synthesized
  source 1..22: mol_type = other DNA
caaataaaggtttgggtcactc

SEQ ID NO: 22232 - DNA, 22 bp, synthetic construct
  misc_feature 1..22: note = chemically synthesized
  source 1..22: mol_type = other DNA
gggtcactccaccaggaaaaaa

SEQ ID NO: 22233 - DNA, 22 bp, synthetic construct
  misc_feature 1..22: note = chemically synthesized
  source 1..22: mol_type = other DNA
ggtcactccaccaggaaaaaaa

SEQ ID NO: 22234 - DNA, 22 bp, synthetic construct
  misc_feature 1..22: note = chemically synthesized
  source 1..22: mol_type = other DNA
caccaggaaaaaaaaaaaaaaa

SEQ ID NO: 22235 - DNA, 22 bp, synthetic construct
  misc_feature 1..22: note = chemically synthesized
  source 1..22: mol_type = other DNA
ctgaggtgcttgctgagggcaa

SEQ ID NO: 22236 - DNA, 22 bp, synthetic construct
  misc_feature 1..22: note = chemically synthesized
  source 1..22: mol_type = other DNA
aggtgcttgctgagggcaaagg

SEQ ID NO: 22237 - DNA, 22 bp, synthetic construct
  misc_feature 1..22: note = chemically synthesized
  source 1..22: mol_type = other DNA
gctgagggcaaagggaatacag

SEQ ID NO: 22238 - DNA, 22 bp, synthetic construct
  misc_feature 1..22: note = chemically synthesized
  source 1..22: mol_type = other DNA
ctgagggcaaagggaatacaga

SEQ ID NO: 22239 - DNA, 22 bp, synthetic construct
  misc_feature 1..22: note = chemically synthesized
  source 1..22: mol_type = other DNA
agggcaaagggaatacagaata

SEQ ID NO: 22240 - DNA, 22 bp, synthetic construct
  misc_feature 1..22: note = chemically synthesized
  source 1..22: mol_type = other DNA
cgatcacgtgaccaattgcaga

SEQ ID NO: 22241 - DNA, 22 bp, synthetic construct
  misc_feature 1..22: note = chemically synthesized
  source 1..22: mol_type = other DNA
cagatacaaggactgtaattgt

SEQ ID NO: 22242 - DNA, 22 bp, synthetic construct
  misc_feature 1..22: note = chemically synthesized
  source 1..22: mol_type = other DNA
taattgtcatgagtatttcctc

SEQ ID NO: 22243 - DNA, 22 bp, synthetic construct
  misc_feature 1..22: note = chemically synthesized
  source 1..22: mol_type = other DNA
tcatgagtatttcctccttctt

SEQ ID NO: 22244 - DNA, 22 bp, synthetic construct
  misc_feature 1..22: note = chemically synthesized
  source 1..22: mol_type = other DNA
cctccttcttttgttaaaaaca

SEQ ID NO: 22245 - DNA, 22 bp, synthetic construct
  misc_feature 1..22: note = chemically synthesized
  source 1..22: mol_type = other DNA
ctccttcttttgttaaaaacac

SEQ ID NO: 22246 - DNA, 22 bp, synthetic construct
  misc_feature 1..22: note = chemically synthesized
  source 1..22: mol_type = other DNA
cttcttttgttaaaaacacctt

SEQ ID NO: 22247 - DNA, 22 bp, synthetic construct
  misc_feature 1..22: note = chemically synthesized
  source 1..22: mol_type = other DNA
cttttgttaaaaacaccttcgt

SEQ ID NO: 22248 - DNA, 22 bp, synthetic construct
  misc_feature 1..22: note = chemically synthesized
  source 1..22: mol_type = other DNA
ttttgttaaaaacaccttcgtg

SEQ ID NO: 22249 - DNA, 22 bp, synthetic construct
  misc_feature 1..22: note = chemically synthesized
  source 1..22: mol_type = other DNA
ttgttaaaaacaccttcgtgtc

SEQ ID NO: 22250 - DNA, 22 bp, synthetic construct
  misc_feature 1..22: note = chemically synthesized
  source 1..22: mol_type = other DNA
tgttaaaaacaccttcgtgtct

SEQ ID NO: 22251 - DNA, 22 bp, synthetic construct
  misc_feature 1..22: note = chemically synthesized
  source 1..22: mol_type = other DNA
gttaaaaacaccttcgtgtctg

SEQ ID NO: 22252 - DNA, 22 bp, synthetic construct
  misc_feature 1..22: note = chemically synthesized
  source 1..22: mol_type = other DNA
ttaaaaacaccttcgtgtctgt

SEQ ID NO: 22253 - DNA, 22 bp, synthetic construct
  misc_feature 1..22: note = chemically synthesized
  source 1..22: mol_type = other DNA
aaaacaccttcgtgtctgtata

SEQ ID NO: 22254 - DNA, 22 bp, synthetic construct
  misc_feature 1..22: note = chemically synthesized
  source 1..22: mol_type = other DNA
cgtgtctgtatacacttgtact

SEQ ID NO: 22255 - DNA, 22 bp, synthetic construct
  misc_feature 1..22: note = chemically synthesized
  source 1..22: mol_type = other DNA
gtgtctgtatacacttgtacta

SEQ ID NO: 22256 - DNA, 22 bp, synthetic construct
  misc_feature 1..22: note = chemically synthesized
  source 1..22: mol_type = other DNA
tatacacttgtactaagaaaat

SEQ ID NO: 22257 - DNA, 22 bp, synthetic construct
  misc_feature 1..22: note = chemically synthesized
  source 1..22: mol_type = other DNA
gtactaagaaaatatatacatt

SEQ ID NO: 22258 - DNA, 22 bp, synthetic construct
  misc_feature 1..22: note = chemically synthesized
  source 1..22: mol_type = other DNA
tactaagaaaatatatacattt

SEQ ID NO: 22259 - DNA, 22 bp, synthetic construct
  misc_feature 1..22: note = chemically synthesized
  source 1..22: mol_type = other DNA
agaaaatatatacattttactt

SEQ ID NO: 22260 - DNA, 22 bp, synthetic construct
  misc_feature 1..22: note = chemically synthesized
  source 1..22: mol_type = other DNA
tacttcctttttcctttatcat

SEQ ID NO: 22261 - DNA, 22 bp, synthetic construct
  misc_feature 1..22: note = chemically synthesized
  source 1..22: mol_type = other DNA
acttcctttttcctttatcatg

SEQ ID NO: 22262 - DNA, 22 bp, synthetic construct
  misc_feature 1..22: note = chemically synthesized
  source 1..22: mol_type = other DNA
cttcctttttcctttatcatgt

SEQ ID NO: 22263 - DNA, 22 bp, synthetic construct
  misc_feature 1..22: note = chemically synthesized
  source 1..22: mol_type = other DNA
cctttttcctttatcatgtgac

SEQ ID NO: 22264 - DNA, 22 bp, synthetic construct
  misc_feature 1..22: note = chemically synthesized
  source 1..22: mol_type = other DNA
ctttttcctttatcatgtgaca

SEQ ID NO: 22265 - DNA, 22 bp, synthetic construct
  misc_feature 1..22: note = chemically synthesized
  source 1..22: mol_type = other DNA
tttcctttatcatgtgacataa

SEQ ID NO: 22266 - DNA, 22 bp, synthetic construct
  misc_feature 1..22: note = chemically synthesized
  source 1..22: mol_type = other DNA
ttcctttatcatgtgacataag

SEQ ID NO: 22267 - DNA, 22 bp, synthetic construct
  misc_feature 1..22: note = chemically synthesized
  source 1..22: mol_type = other DNA
tcctttatcatgtgacataaga

SEQ ID NO: 22268 - DNA, 22 bp, synthetic construct
  misc_feature 1..22: note = chemically synthesized
  source 1..22: mol_type = other DNA
cctttatcatgtgacataagat

SEQ ID NO: 22269 - DNA, 22 bp, synthetic construct
  misc_feature 1..22: note = chemically synthesized
  source 1..22: mol_type = other DNA
ctttatcatgtgacataagatt

SEQ ID NO: 22270 - DNA, 22 bp, synthetic construct
  misc_feature 1..22: note = chemically synthesized
  source 1..22: mol_type = other DNA
tatcatgtgacataagatttat

SEQ ID NO: 22271 - DNA, 22 bp, synthetic construct
  misc_feature 1..22: note = chemically synthesized
  source 1..22: mol_type = other DNA
atcatgtgacataagatttatt

SEQ ID NO: 22272 - DNA, 22 bp, synthetic construct
  misc_feature 1..22: note = chemically synthesized
  source 1..22: mol_type = other DNA
tcatgtgacataagatttattg

SEQ ID NO: 22273 - DNA, 22 bp, synthetic construct
  misc_feature 1..22: note = chemically synthesized
  source 1..22: mol_type = other DNA
attgacttcatatcagcattta

SEQ ID NO: 22274 - DNA, 22 bp, synthetic construct
  misc_feature 1..22: note = chemically synthesized
  source 1..22: mol_type = other DNA
ttgacttcatatcagcatttaa

SEQ ID NO: 22275 - DNA, 22 bp, synthetic construct
  misc_feature 1..22: note = chemically synthesized
  source 1..22: mol_type = other DNA
acttcatatcagcatttaagta

SEQ ID NO: 22276 - DNA, 22 bp, synthetic construct
  misc_feature 1..22: note = chemically synthesized
  source 1..22: mol_type = other DNA
catatcagcatttaagtattgt

SEQ ID NO: 22277 - DNA, 22 bp, synthetic construct
  misc_feature 1..22: note = chemically synthesized
  source 1..22: mol_type = other DNA
atatcagcatttaagtattgtt

SEQ ID NO: 22278 - DNA, 22 bp, synthetic construct
  misc_feature 1..22: note = chemically synthesized
  source 1..22: mol_type = other DNA
aagtattgttaagtttatgtaa

SEQ ID NO: 22279 - DNA, 22 bp, synthetic construct
  misc_feature 1..22: note = chemically synthesized
  source 1..22: mol_type = other DNA
agtattgttaagtttatgtaat

SEQ ID NO: 22280 - DNA, 22 bp, synthetic construct
  misc_feature 1..22: note = chemically synthesized
  source 1..22: mol_type = other DNA
ttaagtttatgtaatagcattt

SEQ ID NO: 22281 - DNA, 22 bp, synthetic construct
  misc_feature 1..22: note = chemically synthesized
  source 1..22: mol_type = other DNA
agtttatgtaatagcatttgca

SEQ ID NO: 22282 - DNA, 22 bp, synthetic construct
  misc_feature 1..22: note = chemically synthesized
  source 1..22: mol_type = other DNA
atgtaatagcatttgcaatggg

SEQ ID NO: 22283 - DNA, 22 bp, synthetic construct
  misc_feature 1..22: note = chemically synthesized
  source 1..22: mol_type = other DNA
tgtaatagcatttgcaatgggg

SEQ ID NO: 22284 - DNA, 22 bp, synthetic construct
  misc_feature 1..22: note = chemically synthesized
  source 1..22: mol_type = other DNA
gcaatggggattggtgcatttt

SEQ ID NO: 22285 - DNA, 22 bp, synthetic construct
  misc_feature 1..22: note = chemically synthesized
  source 1..22: mol_type = other DNA
caatggggattggtgcattttc

SEQ ID NO: 22286 - DNA, 22 bp, synthetic construct
  misc_feature 1..22: note = chemically synthesized
  source 1..22: mol_type = other DNA
gtgcattttcaattgcacgaag

SEQ ID NO: 22287 - DNA, 22 bp, synthetic construct
  misc_feature 1..22: note = chemically synthesized
  source 1..22: mol_type = other DNA
tcaattgcacgaaggatagttt

SEQ ID NO: 22288 - DNA, 22 bp, synthetic construct
  misc_feature 1..22: note = chemically synthesized
  source 1..22: mol_type = other DNA
caattgcacgaaggatagtttt

SEQ ID NO: 22289 - DNA, 22 bp, synthetic construct
  misc_feature 1..22: note = chemically synthesized
  source 1..22: mol_type = other DNA
aattgcacgaaggatagtttta

SEQ ID NO: 22290 - DNA, 22 bp, synthetic construct
  misc_feature 1..22: note = chemically synthesized
  source 1..22: mol_type = other DNA
cacgaaggatagttttagtatg

SEQ ID NO: 22291 - DNA, 22 bp, synthetic construct
  misc_feature 1..22: note = chemically synthesized
  source 1..22: mol_type = other DNA
tagtatgttaggcataattatg

SEQ ID NO: 22292 - DNA, 22 bp, synthetic construct
  misc_feature 1..22: note = chemically synthesized
  source 1..22: mol_type = other DNA
agtatgttaggcataattatga

SEQ ID NO: 22293 - DNA, 22 bp, synthetic construct
  misc_feature 1..22: note = chemically synthesized
  source 1..22: mol_type = other DNA
gtatgttaggcataattatgac

SEQ ID NO: 22294 - DNA, 22 bp, synthetic construct
  misc_feature 1..22: note = chemically synthesized
  source 1..22: mol_type = other DNA
ggcataattatgacttattgtt

SEQ ID NO: 22295 - DNA, 22 bp, synthetic construct
  misc_feature 1..22: note = chemically synthesized
  source 1..22: mol_type = other DNA
tgacttattgttgtctttattt

SEQ ID NO: 22296 - DNA, 22 bp, synthetic construct
  misc_feature 1..22: note = chemically synthesized
  source 1..22: mol_type = other DNA
attgttgtctttatttgaagat

SEQ ID NO: 22297 - DNA, 22 bp, synthetic construct
  misc_feature 1..22: note = chemically synthesized
  source 1..22: mol_type = other DNA
ttgttgtctttatttgaagata

SEQ ID NO: 22298 - DNA, 22 bp, synthetic construct
  misc_feature 1..22: note = chemically synthesized
  source 1..22: mol_type = other DNA
ttgtctttatttgaagataatg

SEQ ID NO: 22299 - DNA, 22 bp, synthetic construct
  misc_feature 1..22: note = chemically synthesized
  source 1..22: mol_type = other DNA
tctttatttgaagataatgtat

SEQ ID NO: 22300 - DNA, 22 bp, synthetic construct
  misc_feature 1..22: note = chemically synthesized
  source 1..22: mol_type = other DNA
tatttgaagataatgtatgacc

SEQ ID NO: 22301 - DNA, 22 bp, synthetic construct
  misc_feature 1..22: note = chemically synthesized
  source 1..22: mol_type = other DNA
atttgaagataatgtatgacct

SEQ ID NO: 22302 - DNA, 22 bp, synthetic construct
  misc_feature 1..22: note = chemically synthesized
  source 1..22: mol_type = other DNA
tttgaagataatgtatgacctc

SEQ ID NO: 22303 - DNA, 22 bp, synthetic construct
  misc_feature 1..22: note = chemically synthesized
  source 1..22: mol_type = other DNA
gaagataatgtatgacctcagg

SEQ ID NO: 22304 - DNA, 22 bp, synthetic construct
  misc_feature 1..22: note = chemically synthesized
  source 1..22: mol_type = other DNA
aagataatgtatgacctcaggg

SEQ ID NO: 22305 - DNA, 22 bp, synthetic construct
  misc_feature 1..22: note = chemically synthesized
  source 1..22: mol_type = other DNA
aggggatgtgtataggctcaag

SEQ ID NO: 22306 - DNA, 22 bp, synthetic construct
  misc_feature 1..22: note = chemically synthesized
  source 1..22: mol_type = other DNA
aagttgacaagcgatggacttg

SEQ ID NO: 22307 - DNA, 22 bp, synthetic construct
  misc_feature 1..22: note = chemically synthesized
  source 1..22: mol_type = other DNA
acaagcgatggacttgtgatgg

SEQ ID NO: 22308 - DNA, 22 bp, synthetic construct
  misc_feature 1..22: note = chemically synthesized
  source 1..22: mol_type = other DNA
gtgatggttaatactgagtgtc

SEQ ID NO: 22309 - DNA, 22 bp, synthetic construct
  misc_feature 1..22: note = chemically synthesized
  source 1..22: mol_type = other DNA
tgatggttaatactgagtgtca

SEQ ID NO: 22310 - DNA, 22 bp, synthetic construct
  misc_feature 1..22: note = chemically synthesized
  source 1..22: mol_type = other DNA
atactgagtgtcaacttgattg

SEQ ID NO: 22311 - DNA, 22 bp, synthetic construct
  misc_feature 1..22: note = chemically synthesized
  source 1..22: mol_type = other DNA
agtgtcaacttgattggattga

SEQ ID NO: 22312 - DNA, 22 bp, synthetic construct
  misc_feature 1..22: note = chemically synthesized
  source 1..22: mol_type = other DNA
gattggattgaagtgtgcaaag

SEQ ID NO: 22313 - DNA, 22 bp, synthetic construct
  misc_feature 1..22: note = chemically synthesized
  source 1..22: mol_type = other DNA
attggattgaagtgtgcaaagt

SEQ ID NO: 22314 - DNA, 22 bp, synthetic construct
  misc_feature 1..22: note = chemically synthesized
  source 1..22: mol_type = other DNA
gattgaagtgtgcaaagtattg

SEQ ID NO: 22315 - DNA, 22 bp, synthetic construct
  misc_feature 1..22: note = chemically synthesized
  source 1..22: mol_type = other DNA
aagtgtgcaaagtattgatcct

SEQ ID NO: 22316 - DNA, 22 bp, synthetic construct
  misc_feature 1..22: note = chemically synthesized
  source 1..22: mol_type = other DNA
atcctgagtgtgtctgtgaggg

SEQ ID NO: 22317 - DNA, 22 bp, synthetic construct
  misc_feature 1..22: note = chemically synthesized
  source 1..22: mol_type = other DNA
agtgtgtctgtgagggtattgc

SEQ ID NO: 22318 - DNA, 22 bp, synthetic construct
  misc_feature 1..22: note = chemically synthesized
  source 1..22: mol_type = other DNA
tgagggtattgccaaaggagat

SEQ ID NO: 22319 - DNA, 22 bp, synthetic construct
  misc_feature 1..22: note = chemically synthesized
  source 1..22: mol_type = other DNA
ccaaaggagattaacattttag

SEQ ID NO: 22320 - DNA, 22 bp, synthetic construct
  misc_feature 1..22: note = chemically synthesized
  source 1..22: mol_type = other DNA
acattttagtcagtgggctggg

SEQ ID NO: 22321 - DNA, 22 bp, synthetic construct
  misc_feature 1..22: note = chemically synthesized
  source 1..22: mol_type = other DNA
tagtcagtgggctgggaaaggc

SEQ ID NO: 22322 - DNA, 22 bp, synthetic construct
  misc_feature 1..22: note = chemically synthesized
  source 1..22: mol_type = other DNA
agtcagtgggctgggaaaggca

SEQ ID NO: 22323 - DNA, 22 bp, synthetic construct
  misc_feature 1..22: note = chemically synthesized
  source 1..22: mol_type = other DNA
gtcagtgggctgggaaaggcag

SEQ ID NO: 22324 - DNA, 22 bp, synthetic construct
  misc_feature 1..22: note = chemically synthesized
  source 1..22: mol_type = other DNA
ggaaaggcagacccacccttaa

SEQ ID NO: 22325 - DNA, 22 bp, synthetic construct
  misc_feature 1..22: note = chemically synthesized
  source 1..22: mol_type = other DNA
aatctgggtgggcaccatctaa

SEQ ID NO: 22326 - DNA, 22 bp, synthetic construct
  misc_feature 1..22: note = chemically synthesized
  source 1..22: mol_type = other DNA
atctgggtgggcaccatctaat

SEQ ID NO: 22327 - DNA, 22 bp, synthetic construct
  misc_feature 1..22: note = chemically synthesized
  source 1..22: mol_type = other DNA
ggtgggcaccatctaatcagtt

SEQ ID NO: 22328 - DNA, 22 bp, synthetic construct
  misc_feature 1..22: note = chemically synthesized
  source 1..22: mol_type = other DNA
atcagttgccagtgtggccagg

SEQ ID NO: 22329 - DNA, 22 bp, synthetic construct
  misc_feature 1..22: note = chemically synthesized
  source 1..22: mol_type = other DNA
ccagtgtggccaggatataaag

SEQ ID NO: 22330 - DNA, 22 bp, synthetic construct
  misc_feature 1..22: note = chemically synthesized
  source 1..22: mol_type = other DNA
gactggcttagcctccaagcct

SEQ ID NO: 22331 - DNA, 22 bp, synthetic construct
  misc_feature 1..22: note = chemically synthesized
  source 1..22: mol_type = other DNA
gcttagcctccaagcctacatc

SEQ ID NO: 22332 - DNA, 22 bp, synthetic construct
  misc_feature 1..22: note = chemically synthesized
  source 1..22: mol_type = other DNA
agcctccaagcctacatctttc

SEQ ID NO: 22333 - DNA, 22 bp, synthetic construct
  misc_feature 1..22: note = chemically synthesized
  source 1..22: mol_type = other DNA
gcctccaagcctacatctttct

SEQ ID NO: 22334 - DNA, 22 bp, synthetic construct
  misc_feature 1..22: note = chemically synthesized
  source 1..22: mol_type = other DNA
caagcctacatctttctcccat

SEQ ID NO: 22335 - DNA, 22 bp, synthetic construct
  misc_feature 1..22: note = chemically synthesized
  source 1..22: mol_type = other DNA
catctttctcccatgctggatg

SEQ ID NO: 22336 - DNA, 22 bp, synthetic construct
  misc_feature 1..22: note = chemically synthesized
  source 1..22: mol_type = other DNA
tctcccatgctggatgcttcct

SEQ ID NO: 22337 - DNA, 22 bp, synthetic construct
  misc_feature 1..22: note = chemically synthesized
  source 1..22: mol_type = other DNA
ctcccatgctggatgcttcctg

SEQ ID NO: 22338 - DNA, 22 bp, synthetic construct
  misc_feature 1..22: note = chemically synthesized
  source 1..22: mol_type = other DNA
tcccatgctggatgcttcctgc

SEQ ID NO: 22339 - DNA, 22 bp, synthetic construct
  misc_feature 1..22: note = chemically synthesized
  source 1..22: mol_type = other DNA
ccatgctggatgcttcctgccc

SEQ ID NO: 22340 - DNA, 22 bp, synthetic construct
  misc_feature 1..22: note = chemically synthesized
  source 1..22: mol_type = other DNA
gatgcttcctgccctcaaacat

SEQ ID NO: 22341 - DNA, 22 bp, synthetic construct
  misc_feature 1..22: note = chemically synthesized
  source 1..22: mol_type = other DNA
cctgccctcaaacattggactc

SEQ ID NO: 22342 - DNA, 22 bp, synthetic construct
  misc_feature 1..22: note = chemically synthesized
  source 1..22: mol_type = other DNA
ctgccctcaaacattggactcc

SEQ ID NO: 22343 - DNA, 22 bp, synthetic construct
  misc_feature 1..22: note = chemically synthesized
  source 1..22: mol_type = other DNA
ccctcaaacattggactccaag

SEQ ID NO: 22344 - DNA, 22 bp, synthetic construct
  misc_feature 1..22: note = chemically synthesized
  source 1..22: mol_type = other DNA
aaacattggactccaagtcctt

SEQ ID NO: 22345 - DNA, 22 bp, synthetic construct
  misc_feature 1..22: note = chemically synthesized
  source 1..22: mol_type = other DNA
gactccaagtccttcagctttg

SEQ ID NO: 22346 - DNA, 22 bp, synthetic construct
  misc_feature 1..22: note = chemically synthesized
  source 1..22: mol_type = other DNA
caagtccttcagctttgggact

SEQ ID NO: 22347 - DNA, 22 bp, synthetic construct
  misc_feature 1..22: note = chemically synthesized
  source 1..22: mol_type = other DNA
cagctttgggacttggactggc

SEQ ID NO: 22348 - DNA, 22 bp, synthetic construct
  misc_feature 1..22: note = chemically synthesized
  source 1..22: mol_type = other DNA
agctttgggacttggactggct

SEQ ID NO: 22349 - DNA, 22 bp, synthetic construct
  misc_feature 1..22: note = chemically synthesized
  source 1..22: mol_type = other DNA
tgggacttggactggcttcctt

SEQ ID NO: 22350 - DNA, 22 bp, synthetic construct
  misc_feature 1..22: note = chemically synthesized
  source 1..22: mol_type = other DNA
gggacttggactggcttccttg

SEQ ID NO: 22351 - DNA, 22 bp, synthetic construct
  misc_feature 1..22: note = chemically synthesized
  source 1..22: mol_type = other DNA
ggacttggactggcttccttgc

SEQ ID NO: 22352 - DNA, 22 bp, synthetic construct
  misc_feature 1..22: note = chemically synthesized
  source 1..22: mol_type = other DNA
ggactggcttccttgctcctct

SEQ ID NO: 22353 - DNA, 22 bp, synthetic construct
  misc_feature 1..22: note = chemically synthesized
  source 1..22: mol_type = other DNA
gactggcttccttgctcctctg

SEQ ID NO: 22354 - DNA, 22 bp, synthetic construct
  misc_feature 1..22: note = chemically synthesized
  source 1..22: mol_type = other DNA
gcttccttgctcctctgcttgc

SEQ ID NO: 22355 - DNA, 22 bp, synthetic construct
  misc_feature 1..22: note = chemically synthesized
  source 1..22: mol_type = other DNA
ccttgctcctctgcttgcagat

SEQ ID NO: 22356 - DNA, 22 bp, synthetic construct
  misc_feature 1..22: note = chemically synthesized
  source 1..22: mol_type = other DNA
cttgctcctctgcttgcagatg

SEQ ID NO: 22357 - DNA, 22 bp, synthetic construct
  misc_feature 1..22: note = chemically synthesized
  source 1..22: mol_type = other DNA
gctcctctgcttgcagatggcc

SEQ ID NO: 22358 - DNA, 22 bp, synthetic construct
  misc_feature 1..22: note = chemically synthesized
  source 1..22: mol_type = other DNA
ctcctctgcttgcagatggcct

SEQ ID NO: 22359 - DNA, 22 bp, synthetic construct
  misc_feature 1..22: note = chemically synthesized
  source 1..22: mol_type = other DNA
ctctgcttgcagatggcctatt

SEQ ID NO: 22360 - DNA, 22 bp, synthetic construct
  misc_feature 1..22: note = chemically synthesized
  source 1..22: mol_type = other DNA
tgcttgcagatggcctattgtg

SEQ ID NO: 22361 - DNA, 22 bp, synthetic construct
  misc_feature 1..22: note = chemically synthesized
  source 1..22: mol_type = other DNA
cttgcagatggcctattgtggg

SEQ ID NO: 22362 - DNA, 22 bp, synthetic construct
  misc_feature 1..22: note = chemically synthesized
  source 1..22: mol_type = other DNA
gcagatggcctattgtgggacc

SEQ ID NO: 22363 - DNA, 22 bp, synthetic construct
  misc_feature 1..22: note = chemically synthesized
  source 1..22: mol_type = other DNA
cagatggcctattgtgggacct

SEQ ID NO: 22364 - DNA, 22 bp, synthetic construct
  misc_feature 1..22: note = chemically synthesized
  source 1..22: mol_type = other DNA
ttgtgggaccttgtgattgtgt

SEQ ID NO: 22365 - DNA, 22 bp, synthetic construct
  misc_feature 1..22: note = chemically synthesized
  source 1..22: mol_type = other DNA
tgggaccttgtgattgtgtaag

SEQ ID NO: 22366 - DNA, 22 bp, synthetic construct
  misc_feature 1..22: note = chemically synthesized
  source 1..22: mol_type = other DNA
gtgattgtgtaagttaacacta

SEQ ID NO: 22367 - DNA, 22 bp, synthetic construct
  misc_feature 1..22: note = chemically synthesized
  source 1..22: mol_type = other DNA
tgattgtgtaagttaacactac

SEQ ID NO: 22368 - DNA, 22 bp, synthetic construct
  misc_feature 1..22: note = chemically synthesized
  source 1..22: mol_type = other DNA
tgtaagttaacactacttaata

SEQ ID NO: 22369 - DNA, 22 bp, synthetic construct
  misc_feature 1..22: note = chemically synthesized
  source 1..22: mol_type = other DNA
acactacttaataaactccctt

SEQ ID NO: 22370 - DNA, 22 bp, synthetic construct
  misc_feature 1..22: note = chemically synthesized
  source 1..22: mol_type = other DNA
cttaataaactcccttttatat

SEQ ID NO: 22371 - DNA, 22 bp, synthetic construct
  misc_feature 1..22: note = chemically synthesized
  source 1..22: mol_type = other DNA
aataaactcccttttatatcta

SEQ ID NO: 22372 - DNA, 22 bp, synthetic construct
  misc_feature 1..22: note = chemically synthesized
  source 1..22: mol_type = other DNA
ataaactcccttttatatctaa

SEQ ID NO: 22373 - DNA, 22 bp, synthetic construct
  misc_feature 1..22: note = chemically synthesized
  source 1..22: mol_type = other DNA
ccttttatatctaaatctatat

SEQ ID NO: 22374 - DNA, 22 bp, synthetic construct
  misc_feature 1..22: note = chemically synthesized
  source 1..22: mol_type = other DNA
ttatatctaaatctatatctat

SEQ ID NO: 22375 - DNA, 22 bp, synthetic construct
  misc_feature 1..22: note = chemically synthesized
  source 1..22: mol_type = other DNA
tatatctaaatctatatctatc

SEQ ID NO: 22376 - DNA, 22 bp, synthetic construct
  misc_feature 1..22: note = chemically synthesized
  source 1..22: mol_type = other DNA
atatctaaatctatatctatct

SEQ ID NO: 22377 - DNA, 22 bp, synthetic construct
  misc_feature 1..22: note = chemically synthesized
  source 1..22: mol_type = other DNA
tatctaaatctatatctatcta

SEQ ID NO: 22378 - DNA, 22 bp, synthetic construct
  misc_feature 1..22: note = chemically synthesized
  source 1..22: mol_type = other DNA
aatctatatctatctatctatc

SEQ ID NO: 22379 - DNA, 22 bp, synthetic construct
  misc_feature 1..22: note = chemically synthesized
  source 1..22: mol_type = other DNA
tatctatctatctatctatcta

SEQ ID NO: 22380 - DNA, 22 bp, synthetic construct
  misc_feature 1..22: note = chemically synthesized
  source 1..22: mol_type = other DNA
tctatctatctatctatctatc

SEQ ID NO: 22381 - DNA, 22 bp, synthetic construct
  misc_feature 1..22: note = chemically synthesized
  source 1..22: mol_type = other DNA
tctatctatctatctatctatc

SEQ ID NO: 22382 - DNA, 22 bp, synthetic construct
  misc_feature 1..22: note = chemically synthesized
  source 1..22: mol_type = other DNA
tctatctatctatctatctatc

SEQ ID NO: 22383 - DNA, 22 bp, synthetic construct
  misc_feature 1..22: note = chemically synthesized
  source 1..22: mol_type = other DNA
tctatctatctatctatctatc

SEQ ID NO: 22384 - DNA, 22 bp, synthetic construct
  misc_feature 1..22: note = chemically synthesized
  source 1..22: mol_type = other DNA
tctatctatctatctatctatc

SEQ ID NO: 22385 - DNA, 22 bp, synthetic construct
  misc_feature 1..22: note = chemically synthesized
  source 1..22: mol_type = other DNA
tctatctatctatctatctcct

SEQ ID NO: 22386 - DNA, 22 bp, synthetic construct
  misc_feature 1..22: note = chemically synthesized
  source 1..22: mol_type = other DNA
tctatctatctatctcctatta

SEQ ID NO: 22387 - DNA, 22 bp, synthetic construct
  misc_feature 1..22: note = chemically synthesized
  source 1..22: mol_type = other DNA
tctatctatctcctattagttc

SEQ ID NO: 22388 - DNA, 22 bp, synthetic construct
  misc_feature 1..22: note = chemically synthesized
  source 1..22: mol_type = other DNA
tctatctcctattagttctgtc

SEQ ID NO: 22389 - DNA, 22 bp, synthetic construct
  misc_feature 1..22: note = chemically synthesized
  source 1..22: mol_type = other DNA
tctcctattagttctgtctctc

SEQ ID NO: 22390 - DNA, 22 bp, synthetic construct
  misc_feature 1..22: note = chemically synthesized
  source 1..22: mol_type = other DNA
ctattagttctgtctctctagg

SEQ ID NO: 22391 - DNA, 22 bp, synthetic construct
  misc_feature 1..22: note = chemically synthesized
  source 1..22: mol_type = other DNA
ttagttctgtctctctagggaa

SEQ ID NO: 22392 - DNA, 22 bp, synthetic construct
  misc_feature 1..22: note = chemically synthesized
  source 1..22: mol_type = other DNA
gttctgtctctctagggaaccc

SEQ ID NO: 22393 - DNA, 22 bp, synthetic construct
  misc_feature 1..22: note = chemically synthesized
  source 1..22: mol_type = other DNA
tgtctctctagggaaccctgac

SEQ ID NO: 22394 - DNA, 22 bp, synthetic construct
  misc_feature 1..22: note = chemically synthesized
  source 1..22: mol_type = other DNA
tctctctagggaaccctgacaa

SEQ ID NO: 22395 - DNA, 22 bp, synthetic construct
  misc_feature 1..22: note = chemically synthesized
  source 1..22: mol_type = other DNA
tctagggaaccctgacaaatac

SEQ ID NO: 22396 - DNA, 22 bp, synthetic construct
  misc_feature 1..22: note = chemically synthesized
  source 1..22: mol_type = other DNA
tagggaaccctgacaaatacag

SEQ ID NO: 22397 - DNA, 22 bp, synthetic construct
  misc_feature 1..22: note = chemically synthesized
  source 1..22: mol_type = other DNA
gggaaccctgacaaatacagtg

SEQ ID NO: 22398 - DNA, 22 bp, synthetic construct
  misc_feature 1..22: note = chemically synthesized
  source 1..22: mol_type = other DNA
acaaatacagtgagctcaggtc

SEQ ID NO: 22399 - DNA, 22 bp, synthetic construct
  misc_feature 1..22: note = chemically synthesized
  source 1..22: mol_type = other DNA
aggtcctgagcagacattttcc

SEQ ID NO: 22400 - DNA, 22 bp, synthetic construct
  misc_feature 1..22: note = chemically synthesized
  source 1..22: mol_type = other DNA
agcagacattttccaaaagaag

SEQ ID NO: 22401 - DNA, 22 bp, synthetic construct
  misc_feature 1..22: note = chemically synthesized
  source 1..22: mol_type = other DNA
tccaaaagaagacatacaagtg

SEQ ID NO: 22402 - DNA, 22 bp, synthetic construct
  misc_feature 1..22: note = chemically synthesized
  source 1..22: mol_type = other DNA
ccaaaagaagacatacaagtgg

SEQ ID NO: 22403 - DNA, 22 bp, synthetic construct
  misc_feature 1..22: note = chemically synthesized
  source 1..22: mol_type = other DNA
caaaagaagacatacaagtggc

SEQ ID NO: 22404 - DNA, 22 bp, synthetic construct
  misc_feature 1..22: note = chemically synthesized
  source 1..22: mol_type = other DNA
aacatcactaataatcagagaa

SEQ ID NO: 22405 - DNA, 22 bp, synthetic construct
  misc_feature 1..22: note = chemically synthesized
  source 1..22: mol_type = other DNA
ataatcagagaatgcaaattaa

SEQ ID NO: 22406 - DNA, 22 bp, synthetic construct
  misc_feature 1..22: note = chemically synthesized
  source 1..22: mol_type = other DNA
aaaccaccatatgatacctcct

SEQ ID NO: 22407 - DNA, 22 bp, synthetic construct
  misc_feature 1..22: note = chemically synthesized
  source 1..22: mol_type = other DNA
cttatgccagtcagaatggcta

SEQ ID NO: 22408 - DNA, 22 bp, synthetic construct
  misc_feature 1..22: note = chemically synthesized
  source 1..22: mol_type = other DNA
atgccagtcagaatggctatca

SEQ ID NO: 22409 - DNA, 22 bp, synthetic construct
  misc_feature 1..22: note = chemically synthesized
  source 1..22: mol_type = other DNA
tgccagtcagaatggctatcat

SEQ ID NO: 22410 - DNA, 22 bp, synthetic construct
  misc_feature 1..22: note = chemically synthesized
  source 1..22: mol_type = other DNA
tcattataaagttcaaaaacag

SEQ ID NO: 22411 - DNA, 22 bp, synthetic construct
  misc_feature 1..22: note = chemically synthesized
  source 1..22: mol_type = other DNA
taaagttcaaaaacagcagatg

SEQ ID NO: 22412 - DNA, 22 bp, synthetic construct
  misc_feature 1..22: note = chemically synthesized
  source 1..22: mol_type = other DNA
aaaaacagcagatgttggtgag

SEQ ID NO: 22413 - DNA, 22 bp, synthetic construct
  misc_feature 1..22: note = chemically synthesized
  source 1..22: mol_type = other DNA
gtgaggatgtggagacaagaaa

SEQ ID NO: 22414 - DNA, 22 bp, synthetic construct
  misc_feature 1..22: note = chemically synthesized
  source 1..22: mol_type = other DNA
atacactgttggtaagaatgta

SEQ ID NO: 22415 - DNA, 22 bp, synthetic construct
  misc_feature 1..22: note = chemically synthesized
  source 1..22: mol_type = other DNA
tacactgttggtaagaatgtaa

SEQ ID NO: 22416 - DNA, 22 bp, synthetic construct
  misc_feature 1..22: note = chemically synthesized
  source 1..22: mol_type = other DNA
ttggtaagaatgtaaattagta

SEQ ID NO: 22417 - DNA, 22 bp, synthetic construct
  misc_feature 1..22: note = chemically synthesized
  source 1..22: mol_type = other DNA
gtaagaatgtaaattagtacaa

SEQ ID NO: 22418 - DNA, 22 bp, synthetic construct
  misc_feature 1..22: note = chemically synthesized
  source 1..22: mol_type = other DNA
gtacaaactttatggaagacag

SEQ ID NO: 22419 - DNA, 22 bp, synthetic construct
  misc_feature 1..22: note = chemically synthesized
  source 1..22: mol_type = other DNA
tatggaagacagcatgaagatt

SEQ ID NO: 22420 - DNA, 22 bp, synthetic construct
  misc_feature 1..22: note = chemically synthesized
  source 1..22: mol_type = other DNA
atggaagacagcatgaagattt

SEQ ID NO: 22421 - DNA, 22 bp, synthetic construct
  misc_feature 1..22: note = chemically synthesized
  source 1..22: mol_type = other DNA
tggaagacagcatgaagatttc

SEQ ID NO: 22422 - DNA, 22 bp, synthetic construct
  misc_feature 1..22: note = chemically synthesized
  source 1..22: mol_type = other DNA
cttaaagaactagaaacagaac

SEQ ID NO: 22423 - DNA, 22 bp, synthetic construct
  misc_feature 1..22: note = chemically synthesized
  source 1..22: mol_type = other DNA
ttaaagaactagaaacagaact

SEQ ID NO: 22424 - DNA, 22 bp, synthetic construct
  misc_feature 1..22: note = chemically synthesized
  source 1..22: mol_type = other DNA
aaagaactagaaacagaactac

SEQ ID NO: 22425 - DNA, 22 bp, synthetic construct
  misc_feature 1..22: note = chemically synthesized
  source 1..22: mol_type = other DNA
aagaactagaaacagaactacc

SEQ ID NO: 22426 - DNA, 22 bp, synthetic construct
  misc_feature 1..22: note = chemically synthesized
  source 1..22: mol_type = other DNA
gaaacagaactaccattcaatc

SEQ ID NO: 22427 - DNA, 22 bp, synthetic construct
  misc_feature 1..22: note = chemically synthesized
  source 1..22: mol_type = other DNA
ccattcaatcctgcaatcccac

SEQ ID NO: 22428 - DNA, 22 bp, synthetic construct
  misc_feature 1..22: note = chemically synthesized
  source 1..22: mol_type = other DNA
aatcctgcaatcccactactgg

SEQ ID NO: 22429 - DNA, 22 bp, synthetic construct
  misc_feature 1..22: note = chemically synthesized
  source 1..22: mol_type = other DNA
caatcccactactgggtatgga

SEQ ID NO: 22430 - DNA, 22 bp, synthetic construct
  misc_feature 1..22: note = chemically synthesized
  source 1..22: mol_type = other DNA
ctgggtatggacccaaagtgaa

SEQ ID NO: 22431 - DNA, 22 bp, synthetic construct
  misc_feature 1..22: note = chemically synthesized
  source 1..22: mol_type = other DNA
ggtatggacccaaagtgaaaga

SEQ ID NO: 22432 - DNA, 22 bp, synthetic construct
  misc_feature 1..22: note = chemically synthesized
  source 1..22: mol_type = other DNA
aaaaagatatctgcattagtat

SEQ ID NO: 22433 - DNA, 22 bp, synthetic construct
  misc_feature 1..22: note = chemically synthesized
  source 1..22: mol_type = other DNA
cattagtatgttcaaagtagca

SEQ ID NO: 22434 - DNA, 22 bp, synthetic construct
  misc_feature 1..22: note = chemically synthesized
  source 1..22: mol_type = other DNA
gtatgttcaaagtagcactgtt

SEQ ID NO: 22435 - DNA, 22 bp, synthetic construct
  misc_feature 1..22: note = chemically synthesized
  source 1..22: mol_type = other DNA
aaagtagcactgttcccaatag

SEQ ID NO: 22436 - DNA, 22 bp, synthetic construct
  misc_feature 1..22: note = chemically synthesized
  source 1..22: mol_type = other DNA
ttcccaatagcaaagatatgga

SEQ ID NO: 22437 - DNA, 22 bp, synthetic construct
  misc_feature 1..22: note = chemically synthesized
  source 1..22: mol_type = other DNA
ccaatagcaaagatatggaatc

SEQ ID NO: 22438 - DNA, 22 bp, synthetic construct
  misc_feature 1..22: note = chemically synthesized
  source 1..22: mol_type = other DNA
aatgtctaccaatggacgattg

SEQ ID NO: 22439 - DNA, 22 bp, synthetic construct
  misc_feature 1..22: note = chemically synthesized
  source 1..22: mol_type = other DNA
ccaatggacgattggataaaga

SEQ ID NO: 22440 - DNA, 22 bp, synthetic construct
  misc_feature 1..22: note = chemically synthesized
  source 1..22: mol_type = other DNA
gataaagaaaatgtggtgtata

SEQ ID NO: 22441 - DNA, 22 bp, synthetic construct
  misc_feature 1..22: note = chemically synthesized
  source 1..22: mol_type = other DNA
atatacatatatattactcagc

SEQ ID NO: 22442 - DNA, 22 bp, synthetic construct
  misc_feature 1..22: note = chemically synthesized
  source 1..22: mol_type = other DNA
tatacatatatattactcagcc

SEQ ID NO: 22443 - DNA, 22 bp, synthetic construct
  misc_feature 1..22: note = chemically synthesized
  source 1..22: mol_type = other DNA
ctcagccataaaaaagaatgaa

SEQ ID NO: 22444 - DNA, 22 bp, synthetic construct
  misc_feature 1..22: note = chemically synthesized
  source 1..22: mol_type = other DNA
agccataaaaaagaatgaaatc

SEQ ID NO: 22445 - DNA, 22 bp, synthetic construct
  misc_feature 1..22: note = chemically synthesized
  source 1..22: mol_type = other DNA
ctctagaaacatggttagaact

SEQ ID NO: 22446 - DNA, 22 bp, synthetic construct
  misc_feature 1..22: note = chemically synthesized
  source 1..22: mol_type = other DNA
tctagaaacatggttagaactg

SEQ ID NO: 22447 - DNA, 22 bp, synthetic construct
  misc_feature 1..22: note = chemically synthesized
  source 1..22: mol_type = other DNA
tagaaacatggttagaactgga

SEQ ID NO: 22448 - DNA, 22 bp, synthetic construct
  misc_feature 1..22: note = chemically synthesized
  source 1..22: mol_type = other DNA
gaaacatggttagaactggagg

SEQ ID NO: 22449 - DNA, 22 bp, synthetic construct
  misc_feature 1..22: note = chemically synthesized
  source 1..22: mol_type = other DNA
gaactggaggacattatcctca

SEQ ID NO: 22450 - DNA, 22 bp, synthetic construct
  misc_feature 1..22: note = chemically synthesized
  source 1..22: mol_type = other DNA
gaggacattatcctcagtgaaa

SEQ ID NO: 22451 - DNA, 22 bp, synthetic construct
  misc_feature 1..22: note = chemically synthesized
  source 1..22: mol_type = other DNA
tcctcagtgaaataactcagaa

SEQ ID NO: 22452 - DNA, 22 bp, synthetic construct
  misc_feature 1..22: note = chemically synthesized
  source 1..22: mol_type = other DNA
agtgaaataactcagaaacaga

SEQ ID NO: 22453 - DNA, 22 bp, synthetic construct
  misc_feature 1..22: note = chemically synthesized
  source 1..22: mol_type = other DNA
agaaacagaaagtcaaacacag

SEQ ID NO: 22454 - DNA, 22 bp, synthetic construct
  misc_feature 1..22: note = chemically synthesized
  source 1..22: mol_type = other DNA
tcatttagtgagagccaagtgg

SEQ ID NO: 22455 - DNA, 22 bp, synthetic construct
  misc_feature 1..22: note = chemically synthesized
  source 1..22: mol_type = other DNA
atttagtgagagccaagtggga

SEQ ID NO: 22456 - DNA, 22 bp, synthetic construct
  misc_feature 1..22: note = chemically synthesized
  source 1..22: mol_type = other DNA
agtgagagccaagtgggagcta

SEQ ID NO: 22457 - DNA, 22 bp, synthetic construct
  misc_feature 1..22: note = chemically synthesized
  source 1..22: mol_type = other DNA
gtgagagccaagtgggagctaa

SEQ ID NO: 22458 - DNA, 22 bp, synthetic construct
  misc_feature 1..22: note = chemically synthesized
  source 1..22: mol_type = other DNA
aacgatgagtaagcatagacat

SEQ ID NO: 22459 - DNA, 22 bp, synthetic construct
  misc_feature 1..22: note = chemically synthesized
  source 1..22: mol_type = other DNA
gagactagagaaaggtgggagg

SEQ ID NO: 22460 - DNA, 22 bp, synthetic construct
  misc_feature 1..22: note = chemically synthesized
  source 1..22: mol_type = other DNA
agactagagaaaggtgggagga

SEQ ID NO: 22461 - DNA, 22 bp, synthetic construct
  misc_feature 1..22: note = chemically synthesized
  source 1..22: mol_type = other DNA
gagaaaggtgggaggataggag

SEQ ID NO: 22462 - DNA, 22 bp, synthetic construct
  misc_feature 1..22: note = chemically synthesized
  source 1..22: mol_type = other DNA
aaaaactacggattggatacaa

SEQ ID NO: 22463 - DNA, 22 bp, synthetic construct
  misc_feature 1..22: note = chemically synthesized
  source 1..22: mol_type = other DNA
cggattggatacaacattcact

SEQ ID NO: 22464 - DNA, 22 bp, synthetic construct
  misc_feature 1..22: note = chemically synthesized
  source 1..22: mol_type = other DNA
gatacaacattcacttttcagg

SEQ ID NO: 22465 - DNA, 22 bp, synthetic construct
  misc_feature 1..22: note = chemically synthesized
  source 1..22: mol_type = other DNA
acttttcaggtgatggtccact

SEQ ID NO: 22466 - DNA, 22 bp, synthetic construct
  misc_feature 1..22: note = chemically synthesized
  source 1..22: mol_type = other DNA
ttcaggtgatggtccactaaaa

SEQ ID NO: 22467 - DNA, 22 bp, synthetic construct
  misc_feature 1..22: note = chemically synthesized
  source 1..22: mol_type = other DNA
tcaggtgatggtccactaaaag

SEQ ID NO: 22468 - DNA, 22 bp, synthetic construct
  misc_feature 1..22: note = chemically synthesized
  source 1..22: mol_type = other DNA
caggtgatggtccactaaaagc

SEQ ID NO: 22469 - DNA, 22 bp, synthetic construct
  misc_feature 1..22: note = chemically synthesized
  source 1..22: mol_type = other DNA
aggtgatggtccactaaaagct

SEQ ID NO: 22470 - DNA, 22 bp, synthetic construct
  misc_feature 1..22: note = chemically synthesized
  source 1..22: mol_type = other DNA
aaagctcagacttcaccactat

SEQ ID NO: 22471 - DNA, 22 bp, synthetic construct
  misc_feature 1..22: note = chemically synthesized
  source 1..22: mol_type = other DNA
agacttcaccactatgcaacat

SEQ ID NO: 22472 - DNA, 22 bp, synthetic construct
  misc_feature 1..22: note = chemically synthesized
  source 1..22: mol_type = other DNA
caccactatgcaacatacatat

SEQ ID NO: 22473 - DNA, 22 bp, synthetic construct
  misc_feature 1..22: note = chemically synthesized
  source 1..22: mol_type = other DNA
accactatgcaacatacatatg

SEQ ID NO: 22474 - DNA, 22 bp, synthetic construct
  misc_feature 1..22: note = chemically synthesized
  source 1..22: mol_type = other DNA
tgcaacatacatatgtaaggaa

SEQ ID NO: 22475 - DNA, 22 bp, synthetic construct
  misc_feature 1..22: note = chemically synthesized
  source 1..22: mol_type = other DNA
gtaccctgatacagcttgactg

SEQ ID NO: 22476 - DNA, 22 bp, synthetic construct
  misc_feature 1..22: note = chemically synthesized
  source 1..22: mol_type = other DNA
taccctgatacagcttgactgt

SEQ ID NO: 22477 - DNA, 22 bp, synthetic construct
  misc_feature 1..22: note = chemically synthesized
  source 1..22: mol_type = other DNA
atacagcttgactgtgtcccca

SEQ ID NO: 22478 - DNA, 22 bp, synthetic construct
  misc_feature 1..22: note = chemically synthesized
  source 1..22: mol_type = other DNA
gactgtgtccccacccaaatct

SEQ ID NO: 22479 - DNA, 22 bp, synthetic construct
  misc_feature 1..22: note = chemically synthesized
  source 1..22: mol_type = other DNA
actgtgtccccacccaaatctc

SEQ ID NO: 22480 - DNA, 22 bp, synthetic construct
  misc_feature 1..22: note = chemically synthesized
  source 1..22: mol_type = other DNA
tgtccccacccaaatctcatct

SEQ ID NO: 22481 - DNA, 22 bp, synthetic construct
  misc_feature 1..22: note = chemically synthesized
  source 1..22: mol_type = other DNA
atcttgaattgtagttcccata

SEQ ID NO: 22482 - DNA, 22 bp, synthetic construct
  misc_feature 1..22: note = chemically synthesized
  source 1..22: mol_type = other DNA
gaattgtagttcccataatcct

SEQ ID NO: 22483 - DNA, 22 bp, synthetic construct
  misc_feature 1..22: note = chemically synthesized
  source 1..22: mol_type = other DNA
aattgtagttcccataatcctc

SEQ ID NO: 22484 - DNA, 22 bp, synthetic construct
  misc_feature 1..22: note = chemically synthesized
  source 1..22: mol_type = other DNA
tagttcccataatcctcacgtg

SEQ ID NO: 22485 - DNA, 22 bp, synthetic construct
  misc_feature 1..22: note = chemically synthesized
  source 1..22: mol_type = other DNA
ccataatcctcacgtgttgtgg

SEQ ID NO: 22486 - DNA, 22 bp, synthetic construct
  misc_feature 1..22: note = chemically synthesized
  source 1..22: mol_type = other DNA
acgtgttgtgggagggatttgg

SEQ ID NO: 22487 - DNA, 22 bp, synthetic construct
  misc_feature 1..22: note = chemically synthesized
  source 1..22: mol_type = other DNA
tgggagggatttggagggaggt

SEQ ID NO: 22488 - DNA, 22 bp, synthetic construct
  misc_feature 1..22: note = chemically synthesized
  source 1..22: mol_type = other DNA
ggagggaggtaattgaatcata

SEQ ID NO: 22489 - DNA, 22 bp, synthetic construct
  misc_feature 1..22: note = chemically synthesized
  source 1..22: mol_type = other DNA
gagggaggtaattgaatcatag

SEQ ID NO: 22490 - DNA, 22 bp, synthetic construct
  misc_feature 1..22: note = chemically synthesized
  source 1..22: mol_type = other DNA
aatcatagaggaggttactctc

SEQ ID NO: 22491 - DNA, 22 bp, synthetic construct
  misc_feature 1..22: note = chemically synthesized
  source 1..22: mol_type = other DNA
ctctcatgctcttctcgtgata

SEQ ID NO: 22492 - DNA, 22 bp, synthetic construct
  misc_feature 1..22: note = chemically synthesized
  source 1..22: mol_type = other DNA
tcatgctcttctcgtgatagtg

SEQ ID NO: 22493 - DNA, 22 bp, synthetic construct
  misc_feature 1..22: note = chemically synthesized
  source 1..22: mol_type = other DNA
atgctcttctcgtgatagtgag

SEQ ID NO: 22494 - DNA, 22 bp, synthetic construct
  misc_feature 1..22: note = chemically synthesized
  source 1..22: mol_type = other DNA
ttctcgtgatagtgagttctta

SEQ ID NO: 22495 - DNA, 22 bp, synthetic construct
  misc_feature 1..22: note = chemically synthesized
  source 1..22: mol_type = other DNA
ctcgtgatagtgagttcttaca

SEQ ID NO: 22496 - DNA, 22 bp, synthetic construct
  misc_feature 1..22: note = chemically synthesized
  source 1..22: mol_type = other DNA
tcgtgatagtgagttcttacaa

SEQ ID NO: 22497 - DNA, 22 bp, synthetic construct
  misc_feature 1..22: note = chemically synthesized
  source 1..22: mol_type = other DNA
gtgatagtgagttcttacaaga

SEQ ID NO: 22498 - DNA, 22 bp, synthetic construct
  misc_feature 1..22: note = chemically synthesized
  source 1..22: mol_type = other DNA
ttacaagatctgatggttttat

SEQ ID NO: 22499 - DNA, 22 bp, synthetic construct
  misc_feature 1..22: note = chemically synthesized
  source 1..22: mol_type = other DNA
acaagatctgatggttttataa

SEQ ID NO: 22500 - DNA, 22 bp, synthetic construct
  misc_feature 1..22: note = chemically synthesized
  source 1..22: mol_type = other DNA
caagatctgatggttttataag

SEQ ID NO: 22501 - DNA, 22 bp, synthetic construct
  misc_feature 1..22: note = chemically synthesized
  source 1..22: mol_type = other DNA
atggttttataagcggcttttc

SEQ ID NO: 22502 - DNA, 22 bp, synthetic construct
  misc_feature 1..22: note = chemically synthesized
  source 1..22: mol_type = other DNA
tataagcggcttttcccccttt

SEQ ID NO: 22503 - DNA, 22 bp, synthetic construct
  misc_feature 1..22: note = chemically synthesized
  source 1..22: mol_type = other DNA
ataagcggcttttccccctttt

SEQ ID NO: 22504 - DNA, 22 bp, synthetic construct
  misc_feature 1..22: note = chemically synthesized
  source 1..22: mol_type = other DNA
taagcggcttttcccccttttg

SEQ ID NO: 22505 - DNA, 22 bp, synthetic construct
  misc_feature 1..22: note = chemically synthesized
  source 1..22: mol_type = other DNA
ttcccccttttgcttggcactt

SEQ ID NO: 22506 - DNA, 22 bp, synthetic construct
  misc_feature 1..22: note = chemically synthesized
  source 1..22: mol_type = other DNA
tcccccttttgcttggcacttc

SEQ ID NO: 22507 - DNA, 22 bp, synthetic construct
  misc_feature 1..22: note = chemically synthesized
  source 1..22: mol_type = other DNA
cccccttttgcttggcacttct

SEQ ID NO: 22508 - DNA, 22 bp, synthetic construct
  misc_feature 1..22: note = chemically synthesized
  source 1..22: mol_type = other DNA
ccccttttgcttggcacttcta

SEQ ID NO: 22509 - DNA, 22 bp, synthetic construct
  misc_feature 1..22: note = chemically synthesized
  source 1..22: mol_type = other DNA
ttgcttggcacttctacttgct

SEQ ID NO: 22510 - DNA, 22 bp, synthetic construct
  misc_feature 1..22: note = chemically synthesized
  source 1..22: mol_type = other DNA
tgcttggcacttctacttgctg

SEQ ID NO: 22511 - DNA, 22 bp, synthetic construct
  misc_feature 1..22: note = chemically synthesized
  source 1..22: mol_type = other DNA
gcttggcacttctacttgctgc

SEQ ID NO: 22512 - DNA, 22 bp, synthetic construct
  misc_feature 1..22: note = chemically synthesized
  source 1..22: mol_type = other DNA
cttggcacttctacttgctgct

SEQ ID NO: 22513 - DNA, 22 bp, synthetic construct
  misc_feature 1..22: note = chemically synthesized
  source 1..22: mol_type = other DNA
ggcacttctacttgctgctgcc

SEQ ID NO: 22514 - DNA, 22 bp, synthetic construct
  misc_feature 1..22: note = chemically synthesized
  source 1..22: mol_type = other DNA
gcacttctacttgctgctgcca

SEQ ID NO: 22515 - DNA, 22 bp, synthetic construct
  misc_feature 1..22: note = chemically synthesized
  source 1..22: mol_type = other DNA
ctacttgctgctgccatgtgaa

SEQ ID NO: 22516 - DNA, 22 bp, synthetic construct
  misc_feature 1..22: note = chemically synthesized
  source 1..22: mol_type = other DNA
tacttgctgctgccatgtgaag

SEQ ID NO: 22517 - DNA, 22 bp, synthetic construct
  misc_feature 1..22: note = chemically synthesized
  source 1..22: mol_type = other DNA
cttgctgctgccatgtgaagaa

SEQ ID NO: 22518 - DNA, 22 bp, synthetic construct
  misc_feature 1..22: note = chemically synthesized
  source 1..22: mol_type = other DNA
gctgctgccatgtgaagaagga

SEQ ID NO: 22519 - DNA, 22 bp, synthetic construct
  misc_feature 1..22: note = chemically synthesized
  source 1..22: mol_type = other DNA
ctgctgccatgtgaagaaggac

SEQ ID NO: 22520 - DNA, 22 bp, synthetic construct
  misc_feature 1..22: note = chemically synthesized
  source 1..22: mol_type = other DNA
ctgccatgtgaagaaggacatg

SEQ ID NO: 22521 - DNA, 22 bp, synthetic construct
  misc_feature 1..22: note = chemically synthesized
  source 1..22: mol_type = other DNA
ccatgtgaagaaggacatgttt

SEQ ID NO: 22522 - DNA, 22 bp, synthetic construct
  misc_feature 1..22: note = chemically synthesized
  source 1..22: mol_type = other DNA
gtttcttcttctgccatgattg

SEQ ID NO: 22523 - DNA, 22 bp, synthetic construct
  misc_feature 1..22: note = chemically synthesized
  source 1..22: mol_type = other DNA
tttcttcttctgccatgattgt

SEQ ID NO: 22524 - DNA, 22 bp, synthetic construct
  misc_feature 1..22: note = chemically synthesized
  source 1..22: mol_type = other DNA
cttcttctgccatgattgtaag

SEQ ID NO: 22525 - DNA, 22 bp, synthetic construct
  misc_feature 1..22: note = chemically synthesized
  source 1..22: mol_type = other DNA
ttcttctgccatgattgtaagt

SEQ ID NO: 22526 - DNA, 22 bp, synthetic construct
  misc_feature 1..22: note = chemically synthesized
  source 1..22: mol_type = other DNA
cttctgccatgattgtaagttt

SEQ ID NO: 22527 - DNA, 22 bp, synthetic construct
  misc_feature 1..22: note = chemically synthesized
  source 1..22: mol_type = other DNA
ttctgccatgattgtaagtttc

SEQ ID NO: 22528 - DNA, 22 bp, synthetic construct
  misc_feature 1..22: note = chemically synthesized
  source 1..22: mol_type = other DNA
ctgccatgattgtaagtttccc

SEQ ID NO: 22529 - DNA, 22 bp, synthetic construct
  misc_feature 1..22: note = chemically synthesized
  source 1..22: mol_type = other DNA
tgccatgattgtaagtttcccg

SEQ ID NO: 22530 - DNA, 22 bp, synthetic construct
  misc_feature 1..22: note = chemically synthesized
  source 1..22: mol_type = other DNA
ccatgattgtaagtttcccgag

SEQ ID NO: 22531 - DNA, 22 bp, synthetic construct
  misc_feature 1..22: note = chemically synthesized
  source 1..22: mol_type = other DNA
taagtttcccgaggcctcccca

SEQ ID NO: 22532 - DNA, 22 bp, synthetic construct
  misc_feature 1..22: note = chemically synthesized
  source 1..22: mol_type = other DNA
cccgaggcctccccagccctgt

SEQ ID NO: 22533 - DNA, 22 bp, synthetic construct
  misc_feature 1..22: note = chemically synthesized
  source 1..22: mol_type = other DNA
ccgaggcctccccagccctgtg

SEQ ID NO: 22534 - DNA, 22 bp, synthetic construct
  misc_feature 1..22: note = chemically synthesized
  source 1..22: mol_type = other DNA
cccagccctgtggaactgtgag

SEQ ID NO: 22535 - DNA, 22 bp, synthetic construct
  misc_feature 1..22: note = chemically synthesized
  source 1..22: mol_type = other DNA
tggaactgtgagacaattaaac

SEQ ID NO: 22536 - DNA, 22 bp, synthetic construct
  misc_feature 1..22: note = chemically synthesized
  source 1..22: mol_type = other DNA
tgagacaattaaacgttttttc

SEQ ID NO: 22537 - DNA, 22 bp, synthetic construct
  misc_feature 1..22: note = chemically synthesized
  source 1..22: mol_type = other DNA
aacgttttttccttataaatta

SEQ ID NO: 22538 - DNA, 22 bp, synthetic construct
  misc_feature 1..22: note = chemically synthesized
  source 1..22: mol_type = other DNA
tttccttataaattacccagtc

SEQ ID NO: 22539 - DNA, 22 bp, synthetic construct
  misc_feature 1..22: note = chemically synthesized
  source 1..22: mol_type = other DNA
ttccttataaattacccagtct

SEQ ID NO: 22540 - DNA, 22 bp, synthetic construct
  misc_feature 1..22: note = chemically synthesized
  source 1..22: mol_type = other DNA
tccttataaattacccagtctc

SEQ ID NO: 22541 - DNA, 22 bp, synthetic construct
  misc_feature 1..22: note = chemically synthesized
  source 1..22: mol_type = other DNA
ccttataaattacccagtctca

SEQ ID NO: 22542 - DNA, 22 bp, synthetic construct
  misc_feature 1..22: note = chemically synthesized
  source 1..22: mol_type = other DNA
cttataaattacccagtctcag

SEQ ID NO: 22543 - DNA, 22 bp, synthetic construct
  misc_feature 1..22: note = chemically synthesized
  source 1..22: mol_type = other DNA
ataaattacccagtctcaggta

SEQ ID NO: 22544 - DNA, 22 bp, synthetic construct
  misc_feature 1..22: note = chemically synthesized
  source 1..22: mol_type = other DNA
taaattacccagtctcaggtat

SEQ ID NO: 22545 - DNA, 22 bp, synthetic construct
  misc_feature 1..22: note = chemically synthesized
  source 1..22: mol_type = other DNA
cccagtctcaggtatgtcttta

SEQ ID NO: 22546 - DNA, 22 bp, synthetic construct
  misc_feature 1..22: note = chemically synthesized
  source 1..22: mol_type = other DNA
aggtatgtctttataagcagca

SEQ ID NO: 22547 - DNA, 22 bp, synthetic construct
  misc_feature 1..22: note = chemically synthesized
  source 1..22: mol_type = other DNA
tataagcagcatgataacgaac

SEQ ID NO: 22548 - DNA, 22 bp, synthetic construct
  misc_feature 1..22: note = chemically synthesized
  source 1..22: mol_type = other DNA
ataagcagcatgataacgaact

SEQ ID NO: 22549 - DNA, 22 bp, synthetic construct
  misc_feature 1..22: note = chemically synthesized
  source 1..22: mol_type = other DNA
taagcagcatgataacgaacta

SEQ ID NO: 22550 - DNA, 22 bp, synthetic construct
  misc_feature 1..22: note = chemically synthesized
  source 1..22: mol_type = other DNA
gtacataccttctaaatatata

SEQ ID NO: 22551 - DNA, 22 bp, synthetic construct
  misc_feature 1..22: note = chemically synthesized
  source 1..22: mol_type = other DNA
ctaaatatatataaataaattt

SEQ ID NO: 22552 - DNA, 22 bp, synthetic construct
  misc_feature 1..22: note = chemically synthesized
  source 1..22: mol_type = other DNA
taaatatatataaataaatttt

SEQ ID NO: 22553 - DNA, 22 bp, synthetic construct
  misc_feature 1..22: note = chemically synthesized
  source 1..22: mol_type = other DNA
aatatatataaataaattttaa

SEQ ID NO: 22554 - DNA, 22 bp, synthetic construct
  misc_feature 1..22: note = chemically synthesized
  source 1..22: mol_type = other DNA
taaaaatataaaataaattaga

SEQ ID NO: 22555 - DNA, 22 bp, synthetic construct
  misc_feature 1..22: note = chemically synthesized
  source 1..22: mol_type = other DNA
aaaaatataaaataaattagat

SEQ ID NO: 22556 - DNA, 22 bp, synthetic construct
  misc_feature 1..22: note = chemically synthesized
  source 1..22: mol_type = other DNA
aaaatataaaataaattagatc

SEQ ID NO: 22557 - DNA, 22 bp, synthetic construct
  misc_feature 1..22: note = chemically synthesized
  source 1..22: mol_type = other DNA
gatctgattgaaaaggcaaaaa

SEQ ID NO: 22558 - DNA, 22 bp, synthetic construct
  misc_feature 1..22: note = chemically synthesized
  source 1..22: mol_type = other DNA
attgaaaaggcaaaaattgagc

SEQ ID NO: 22559 - DNA, 22 bp, synthetic construct
  misc_feature 1..22: note = chemically synthesized
  source 1..22: mol_type = other DNA
aaaaggcaaaaattgagcaagc

SEQ ID NO: 22560 - DNA, 22 bp, synthetic construct
  misc_feature 1..22: note = chemically synthesized
  source 1..22: mol_type = other DNA
agcaagcaaaatatcacttaat

SEQ ID NO: 22561 - DNA, 22 bp, synthetic construct
  misc_feature 1..22: note = chemically synthesized
  source 1..22: mol_type = other DNA
aatggggtaattaaaagggtga

SEQ ID NO: 22562 - DNA, 22 bp, synthetic construct
  misc_feature 1..22: note = chemically synthesized
  source 1..22: mol_type = other DNA
atggggtaattaaaagggtgaa

SEQ ID NO: 22563 - DNA, 22 bp, synthetic construct
  misc_feature 1..22: note = chemically synthesized
  source 1..22: mol_type = other DNA
aaagggtgaagaaattgggcaa

SEQ ID NO: 22564 - DNA, 22 bp, synthetic construct
  misc_feature 1..22: note = chemically synthesized
  source 1..22: mol_type = other DNA
ggcaaatggatgtcatgaggag

SEQ ID NO: 22565 - DNA, 22 bp, synthetic construct
  misc_feature 1..22: note = chemically synthesized
  source 1..22: mol_type = other DNA
ttaggcagaggtaatggtcaga

SEQ ID NO: 22566 - DNA, 22 bp, synthetic construct
  misc_feature 1..22: note = chemically synthesized
  source 1..22: mol_type = other DNA
taggcagaggtaatggtcagag

SEQ ID NO: 22567 - DNA, 22 bp, synthetic construct
  misc_feature 1..22: note = chemically synthesized
  source 1..22: mol_type = other DNA
aggcagaggtaatggtcagagc

SEQ ID NO: 22568 - DNA, 22 bp, synthetic construct
  misc_feature 1..22: note = chemically synthesized
  source 1..22: mol_type = other DNA
ggcagaggtaatggtcagagcc

SEQ ID NO: 22569 - DNA, 22 bp, synthetic construct
  misc_feature 1..22: note = chemically synthesized
  source 1..22: mol_type = other DNA
agctggagtagagtgtgcaagg

SEQ ID NO: 22570 - DNA, 22 bp, synthetic construct
  misc_feature 1..22: note = chemically synthesized
  source 1..22: mol_type = other DNA
gagtagagtgtgcaaggaaaga

SEQ ID NO: 22571 - DNA, 22 bp, synthetic construct
  misc_feature 1..22: note = chemically synthesized
  source 1..22: mol_type = other DNA
aaaaggataaccaggtaggagg

SEQ ID NO: 22572 - DNA, 22 bp, synthetic construct
  misc_feature 1..22: note = chemically synthesized
  source 1..22: mol_type = other DNA
cagtaaacttaggcaggatatt

SEQ ID NO: 22573 - DNA, 22 bp, synthetic construct
  misc_feature 1..22: note = chemically synthesized
  source 1..22: mol_type = other DNA
aggcaggatatttcccgtgaca

SEQ ID NO: 22574 - DNA, 22 bp, synthetic construct
  misc_feature 1..22: note = chemically synthesized
  source 1..22: mol_type = other DNA
ggcaggatatttcccgtgacag

SEQ ID NO: 22575 - DNA, 22 bp, synthetic construct
  misc_feature 1..22: note = chemically synthesized
  source 1..22: mol_type = other DNA
cccgtgacagcactaaataata

SEQ ID NO: 22576 - DNA, 22 bp, synthetic construct
  misc_feature 1..22: note = chemically synthesized
  source 1..22: mol_type = other DNA
ccgtgacagcactaaataataa

SEQ ID NO: 22577 - DNA, 22 bp, synthetic construct
  misc_feature 1..22: note = chemically synthesized
  source 1..22: mol_type = other DNA
aataataatcacatgtgagaat

SEQ ID NO: 22578 - DNA, 22 bp, synthetic construct
  misc_feature 1..22: note = chemically synthesized
  source 1..22: mol_type = other DNA
tcgattacttgagcaatacttt

SEQ ID NO: 22579 - DNA, 22 bp, synthetic construct
  misc_feature 1..22: note = chemically synthesized
  source 1..22: mol_type = other DNA
cttgagcaatactttgttcatg

SEQ ID NO: 22580 - DNA, 22 bp, synthetic construct
  misc_feature 1..22: note = chemically synthesized
  source 1..22: mol_type = other DNA
gagcaatactttgttcatgagc

SEQ ID NO: 22581 - DNA, 22 bp, synthetic construct
  misc_feature 1..22: note = chemically synthesized
  source 1..22: mol_type = other DNA
agcaatactttgttcatgagct

SEQ ID NO: 22582 - DNA, 22 bp, synthetic construct
  misc_feature 1..22: note = chemically synthesized
  source 1..22: mol_type = other DNA
tgttcatgagctagagcaaggg

SEQ ID NO: 22583 - DNA, 22 bp, synthetic construct
  misc_feature 1..22: note = chemically synthesized
  source 1..22: mol_type = other DNA
gttcatgagctagagcaagggg

SEQ ID NO: 22584 - DNA, 22 bp, synthetic construct
  misc_feature 1..22: note = chemically synthesized
  source 1..22: mol_type = other DNA
ttcatgagctagagcaagggga

SEQ ID NO: 22585 - DNA, 22 bp, synthetic construct
  misc_feature 1..22: note = chemically synthesized
  source 1..22: mol_type = other DNA
atgagctagagcaaggggatga

SEQ ID NO: 22586 - DNA, 22 bp, synthetic construct
  misc_feature 1..22: note = chemically synthesized
  source 1..22: mol_type = other DNA
gagcaaggggatgactcaagaa

SEQ ID NO: 22587 - DNA, 22 bp, synthetic construct
  misc_feature 1..22: note = chemically synthesized
  source 1..22: mol_type = other DNA
aagaaatcctttgtgaaatcct

SEQ ID NO: 22588 - DNA, 22 bp, synthetic construct
  misc_feature 1..22: note = chemically synthesized
  source 1..22: mol_type = other DNA
tgtgaaatcctggaggtaataa

SEQ ID NO: 22589 - DNA, 22 bp, synthetic construct
  misc_feature 1..22: note = chemically synthesized
  source 1..22: mol_type = other DNA
gtgaaatcctggaggtaataag

SEQ ID NO: 22590 - DNA, 22 bp, synthetic construct
  misc_feature 1..22: note = chemically synthesized
  source 1..22: mol_type = other DNA
tgaaatcctggaggtaataaga

SEQ ID NO: 22591 - DNA, 22 bp, synthetic construct
  misc_feature 1..22: note = chemically synthesized
  source 1..22: mol_type = other DNA
gaggtaataagatcctggcatc

SEQ ID NO: 22592 - DNA, 22 bp, synthetic construct
  misc_feature 1..22: note = chemically synthesized
  source 1..22: mol_type = other DNA
gcatcaatcttcaactcaattg

SEQ ID NO: 22593 - DNA, 22 bp, synthetic construct
  misc_feature 1..22: note = chemically synthesized
  source 1..22: mol_type = other DNA
caactcaattgcaaaaagcaat

SEQ ID NO: 22594 - DNA, 22 bp, synthetic construct
  misc_feature 1..22: note = chemically synthesized
  source 1..22: mol_type = other DNA
aactcaattgcaaaaagcaatt

SEQ ID NO: 22595 - DNA, 22 bp, synthetic construct
  misc_feature 1..22: note = chemically synthesized
  source 1..22: mol_type = other DNA
aattgcaaaaagcaattttatt

SEQ ID NO: 22596 - DNA, 22 bp, synthetic construct
  misc_feature 1..22: note = chemically synthesized
  source 1..22: mol_type = other DNA
caaaaagcaattttattactta

SEQ ID NO: 22597 - DNA, 22 bp, synthetic construct
  misc_feature 1..22: note = chemically synthesized
  source 1..22: mol_type = other DNA
tattacttatatattacttctc

SEQ ID NO: 22598 - DNA, 22 bp, synthetic construct
  misc_feature 1..22: note = chemically synthesized
  source 1..22: mol_type = other DNA
attacttatatattacttctca

SEQ ID NO: 22599 - DNA, 22 bp, synthetic construct
  misc_feature 1..22: note = chemically synthesized
  source 1..22: mol_type = other DNA
ttacttatatattacttctcat

SEQ ID NO: 22600 - DNA, 22 bp, synthetic construct
  misc_feature 1..22: note = chemically synthesized
  source 1..22: mol_type = other DNA
cttatatattacttctcatttt

SEQ ID NO: 22601 - DNA, 22 bp, synthetic construct
  misc_feature 1..22: note = chemically synthesized
  source 1..22: mol_type = other DNA
atatattacttctcatttttca

SEQ ID NO: 22602 - DNA, 22 bp, synthetic construct
  misc_feature 1..22: note = chemically synthesized
  source 1..22: mol_type = other DNA
tatattacttctcatttttcac

SEQ ID NO: 22603 - DNA, 22 bp, synthetic construct
  misc_feature 1..22: note = chemically synthesized
  source 1..22: mol_type = other DNA
cttctcatttttcactgctgtc

SEQ ID NO: 22604 - DNA, 22 bp, synthetic construct
  misc_feature 1..22: note = chemically synthesized
  source 1..22: mol_type = other DNA
ctcatttttcactgctgtcttt

SEQ ID NO: 22605 - DNA, 22 bp, synthetic construct
  misc_feature 1..22: note = chemically synthesized
  source 1..22: mol_type = other DNA
tcatttttcactgctgtctttc

SEQ ID NO: 22606 - DNA, 22 bp, synthetic construct
  misc_feature 1..22: note = chemically synthesized
  source 1..22: mol_type = other DNA
atttttcactgctgtctttcaa

SEQ ID NO: 22607 - DNA, 22 bp, synthetic construct
  misc_feature 1..22: note = chemically synthesized
  source 1..22: mol_type = other DNA
ttcactgctgtctttcaaaaca

SEQ ID NO: 22608 - DNA, 22 bp, synthetic construct
  misc_feature 1..22: note = chemically synthesized
  source 1..22: mol_type = other DNA
tcactgctgtctttcaaaacat

SEQ ID NO: 22609 - DNA, 22 bp, synthetic construct
  misc_feature 1..22: note = chemically synthesized
  source 1..22: mol_type = other DNA
cactgctgtctttcaaaacata

SEQ ID NO: 22610 - DNA, 22 bp, synthetic construct
  misc_feature 1..22: note = chemically synthesized
  source 1..22: mol_type = other DNA
actgctgtctttcaaaacatat

SEQ ID NO: 22611 - DNA, 22 bp, synthetic construct
  misc_feature 1..22: note = chemically synthesized
  source 1..22: mol_type = other DNA
ctgtctttcaaaacatattcca

SEQ ID NO: 22612 - DNA, 22 bp, synthetic construct
  misc_feature 1..22: note = chemically synthesized
  source 1..22: mol_type = other DNA
tctttcaaaacatattccattt

SEQ ID NO: 22613 - DNA, 22 bp, synthetic construct
  misc_feature 1..22: note = chemically synthesized
  source 1..22: mol_type = other DNA
tcaaaacatattccatttcatc

SEQ ID NO: 22614 - DNA, 22 bp, synthetic construct
  misc_feature 1..22: note = chemically synthesized
  source 1..22: mol_type = other DNA
caaaacatattccatttcatca

SEQ ID NO: 22615 - DNA, 22 bp, synthetic construct
  misc_feature 1..22: note = chemically synthesized
  source 1..22: mol_type = other DNA
aaaacatattccatttcatcag

SEQ ID NO: 22616 - DNA, 22 bp, synthetic construct
  misc_feature 1..22: note = chemically synthesized
  source 1..22: mol_type = other DNA
catttcatcagactacaggttt

SEQ ID NO: 22617 - DNA, 22 bp, synthetic construct
  misc_feature 1..22: note = chemically synthesized
  source 1..22: mol_type = other DNA
catcagactacaggttttaata

SEQ ID NO: 22618 - DNA, 22 bp, synthetic construct
  misc_feature 1..22: note = chemically synthesized
  source 1..22: mol_type = other DNA
atcagactacaggttttaatag

SEQ ID NO: 22619 - DNA, 22 bp, synthetic construct
  misc_feature 1..22: note = chemically synthesized
  source 1..22: mol_type = other DNA
caggttttaatagctactatat

SEQ ID NO: 22620 - DNA, 22 bp, synthetic construct
  misc_feature 1..22: note = chemically synthesized
  source 1..22: mol_type = other DNA
taatagctactatatttcttaa

SEQ ID NO: 22621 - DNA, 22 bp, synthetic construct
  misc_feature 1..22: note = chemically synthesized
  source 1..22: mol_type = other DNA
aatagctactatatttcttaaa

SEQ ID NO: 22622 - DNA, 22 bp, synthetic construct
  misc_feature 1..22: note = chemically synthesized
  source 1..22: mol_type = other DNA
atagctactatatttcttaaat

SEQ ID NO: 22623 - DNA, 22 bp, synthetic construct
  misc_feature 1..22: note = chemically synthesized
  source 1..22: mol_type = other DNA
ctatatttcttaaatgtattat

SEQ ID NO: 22624 - DNA, 22 bp, synthetic construct
  misc_feature 1..22: note = chemically synthesized
  source 1..22: mol_type = other DNA
tatttcttaaatgtattattcc

SEQ ID NO: 22625 - DNA, 22 bp, synthetic construct
  misc_feature 1..22: note = chemically synthesized
  source 1..22: mol_type = other DNA
cttaaatgtattattccagtaa

SEQ ID NO: 22626 - DNA, 22 bp, synthetic construct
  misc_feature 1..22: note = chemically synthesized
  source 1..22: mol_type = other DNA
ttaaatgtattattccagtaac

SEQ ID NO: 22627 - DNA, 22 bp, synthetic construct
  misc_feature 1..22: note = chemically synthesized
  source 1..22: mol_type = other DNA
aaatgtattattccagtaactt

SEQ ID NO: 22628 - DNA, 22 bp, synthetic construct
  misc_feature 1..22: note = chemically synthesized
  source 1..22: mol_type = other DNA
aatgtattattccagtaactta

SEQ ID NO: 22629 - DNA, 22 bp, synthetic construct
  misc_feature 1..22: note = chemically synthesized
  source 1..22: mol_type = other DNA
ttccagtaacttatactttaca

SEQ ID NO: 22630 - DNA, 22 bp, synthetic construct
  misc_feature 1..22: note = chemically synthesized
  source 1..22: mol_type = other DNA
cagtaacttatactttacatag

SEQ ID NO: 22631 - DNA, 22 bp, synthetic construct
  misc_feature 1..22: note = chemically synthesized
  source 1..22: mol_type = other DNA
atactttacatagtaaatctta

SEQ ID NO: 22632 - DNA, 22 bp, synthetic construct
  misc_feature 1..22: note = chemically synthesized
  source 1..22: mol_type = other DNA
tactttacatagtaaatcttat

SEQ ID NO: 22633 - DNA, 22 bp, synthetic construct
  misc_feature 1..22: note = chemically synthesized
  source 1..22: mol_type = other DNA
tacatagtaaatcttatcaata

SEQ ID NO: 22634 - DNA, 22 bp, synthetic construct
  misc_feature 1..22: note = chemically synthesized
  source 1..22: mol_type = other DNA
acatagtaaatcttatcaatag

SEQ ID NO: 22635 - DNA, 22 bp, synthetic construct
  misc_feature 1..22: note = chemically synthesized
  source 1..22: mol_type = other DNA
catagtaaatcttatcaatagt

SEQ ID NO: 22636 - DNA, 22 bp, synthetic construct
  misc_feature 1..22: note = chemically synthesized
  source 1..22: mol_type = other DNA
atcaatagtcacaatcaatggt

SEQ ID NO: 22637 - DNA, 22 bp, synthetic construct
  misc_feature 1..22: note = chemically synthesized
  source 1..22: mol_type = other DNA
tcaatagtcacaatcaatggtc

SEQ ID NO: 22638 - DNA, 22 bp, synthetic construct
  misc_feature 1..22: note = chemically synthesized
  source 1..22: mol_type = other DNA
catctggagacattacttttag

SEQ ID NO: 22639 - DNA, 22 bp, synthetic construct
  misc_feature 1..22: note = chemically synthesized
  source 1..22: mol_type = other DNA
atctggagacattacttttagc

SEQ ID NO: 22640 - DNA, 22 bp, synthetic construct
  misc_feature 1..22: note = chemically synthesized
  source 1..22: mol_type = other DNA
gagacattacttttagcctgag

SEQ ID NO: 22641 - DNA, 22 bp, synthetic construct
  misc_feature 1..22: note = chemically synthesized
  source 1..22: mol_type = other DNA
cttttagcctgagccatgcaaa

SEQ ID NO: 22642 - DNA, 22 bp, synthetic construct
  misc_feature 1..22: note = chemically synthesized
  source 1..22: mol_type = other DNA
ttagcctgagccatgcaaaata

SEQ ID NO: 22643 - DNA, 22 bp, synthetic construct
  misc_feature 1..22: note = chemically synthesized
  source 1..22: mol_type = other DNA
tagcctgagccatgcaaaatat

SEQ ID NO: 22644 - DNA, 22 bp, synthetic construct
  misc_feature 1..22: note = chemically synthesized
  source 1..22: mol_type = other DNA
agcctgagccatgcaaaatata

SEQ ID NO: 22645 - DNA, 22 bp, synthetic construct
  misc_feature 1..22: note = chemically synthesized
  source 1..22: mol_type = other DNA
gcctgagccatgcaaaatatac

SEQ ID NO: 22646 - DNA, 22 bp, synthetic construct
  misc_feature 1..22: note = chemically synthesized
  source 1..22: mol_type = other DNA
agccatgcaaaatatacttttt

SEQ ID NO: 22647 - DNA, 22 bp, synthetic construct
  misc_feature 1..22: note = chemically synthesized
  source 1..22: mol_type = other DNA
tttggaaaattgccctttgaaa

SEQ ID NO: 22648 - DNA, 22 bp, synthetic construct
  misc_feature 1..22: note = chemically synthesized
  source 1..22: mol_type = other DNA
ttggaaaattgccctttgaaag

SEQ ID NO: 22649 - DNA, 22 bp, synthetic construct
  misc_feature 1..22: note = chemically synthesized
  source 1..22: mol_type = other DNA
tggaaaattgccctttgaaagg

SEQ ID NO: 22650 - DNA, 22 bp, synthetic construct
  misc_feature 1..22: note = chemically synthesized
  source 1..22: mol_type = other DNA
ggaaaattgccctttgaaaggc

SEQ ID NO: 22651 - DNA, 22 bp, synthetic construct
  misc_feature 1..22: note = chemically synthesized
  source 1..22: mol_type = other DNA
gaaaattgccctttgaaaggcg

SEQ ID NO: 22652 - DNA, 22 bp, synthetic construct
  misc_feature 1..22: note = chemically synthesized
  source 1..22: mol_type = other DNA
ccctttgaaaggcgagacacaa

SEQ ID NO: 22653 - DNA, 22 bp, synthetic construct
  misc_feature 1..22: note = chemically synthesized
  source 1..22: mol_type = other DNA
tgaaaggcgagacacaaaaggc

SEQ ID NO: 22654 - DNA, 22 bp, synthetic construct
  misc_feature 1..22: note = chemically synthesized
  source 1..22: mol_type = other DNA
gaaaggcgagacacaaaaggca

SEQ ID NO: 22655 - DNA, 22 bp, synthetic construct
  misc_feature 1..22: note = chemically synthesized
  source 1..22: mol_type = other DNA
aaaggcgagacacaaaaggcaa

SEQ ID NO: 22656 - DNA, 22 bp, synthetic construct
  misc_feature 1..22: note = chemically synthesized
  source 1..22: mol_type = other DNA
atgctattatatggtaccaata

SEQ ID NO: 22657 - DNA, 22 bp, synthetic construct
  misc_feature 1..22: note = chemically synthesized
  source 1..22: mol_type = other DNA
ttatatggtaccaataggattc

SEQ ID NO: 22658 - DNA, 22 bp, synthetic construct
  misc_feature 1..22: note = chemically synthesized
  source 1..22: mol_type = other DNA
tatggtaccaataggattcatt

SEQ ID NO: 22659 - DNA, 22 bp, synthetic construct
  misc_feature 1..22: note = chemically synthesized
  source 1..22: mol_type = other DNA
attaatttataaaggagaagag

SEQ ID NO: 22660 - DNA, 22 bp, synthetic construct
  misc_feature 1..22: note = chemically synthesized
  source 1..22: mol_type = other DNA
atttataaaggagaagagctaa

SEQ ID NO: 22661 - DNA, 22 bp, synthetic construct
  misc_feature 1..22: note = chemically synthesized
  source 1..22: mol_type = other DNA
ataaaggagaagagctaatgta

SEQ ID NO: 22662 - DNA, 22 bp, synthetic construct
  misc_feature 1..22: note = chemically synthesized
  source 1..22: mol_type = other DNA
taaaggagaagagctaatgtaa

SEQ ID NO: 22663 - DNA, 22 bp, synthetic construct
  misc_feature 1..22: note = chemically synthesized
  source 1..22: mol_type = other DNA
atgtaactccaaaatgcaagca

SEQ ID NO: 22664 - DNA, 22 bp, synthetic construct
  misc_feature 1..22: note = chemically synthesized
  source 1..22: mol_type = other DNA
caaaatgcaagcaattttcata

SEQ ID NO: 22665 - DNA, 22 bp, synthetic construct
  misc_feature 1..22: note = chemically synthesized
  source 1..22: mol_type = other DNA
tcatatgagtctacacaagcta

SEQ ID NO: 22666 - DNA, 22 bp, synthetic construct
  misc_feature 1..22: note = chemically synthesized
  source 1..22: mol_type = other DNA
catatgagtctacacaagctaa

SEQ ID NO: 22667 - DNA, 22 bp, synthetic construct
  misc_feature 1..22: note = chemically synthesized
  source 1..22: mol_type = other DNA
atatgagtctacacaagctaat

SEQ ID NO: 22668 - DNA, 22 bp, synthetic construct
  misc_feature 1..22: note = chemically synthesized
  source 1..22: mol_type = other DNA
cacaagctaattgtccttaaga

SEQ ID NO: 22669 - DNA, 22 bp, synthetic construct
  misc_feature 1..22: note = chemically synthesized
  source 1..22: mol_type = other DNA
attgtccttaagaatttcatct

SEQ ID NO: 22670 - DNA, 22 bp, synthetic construct
  misc_feature 1..22: note = chemically synthesized
  source 1..22: mol_type = other DNA
tccttaagaatttcatctttaa

SEQ ID NO: 22671 - DNA, 22 bp, synthetic construct
  misc_feature 1..22: note = chemically synthesized
  source 1..22: mol_type = other DNA
aagaatttcatctttaaggaaa

SEQ ID NO: 22672 - DNA, 22 bp, synthetic construct
  misc_feature 1..22: note = chemically synthesized
  source 1..22: mol_type = other DNA
agaatttcatctttaaggaaaa

SEQ ID NO: 22673 - DNA, 22 bp, synthetic construct
  misc_feature 1..22: note = chemically synthesized
  source 1..22: mol_type = other DNA
catctttaaggaaaagtttttt

SEQ ID NO: 22674 - DNA, 22 bp, synthetic construct
  misc_feature 1..22: note = chemically synthesized
  source 1..22: mol_type = other DNA
atctttaaggaaaagtttttta

SEQ ID NO: 22675 - DNA, 22 bp, synthetic construct
  misc_feature 1..22: note = chemically synthesized
  source 1..22: mol_type = other DNA
taaggaaaagttttttactgta

SEQ ID NO: 22676 - DNA, 22 bp, synthetic construct
  misc_feature 1..22: note = chemically synthesized
  source 1..22: mol_type = other DNA
aaggaaaagttttttactgtat

SEQ ID NO: 22677 - DNA, 22 bp, synthetic construct
  misc_feature 1..22: note = chemically synthesized
  source 1..22: mol_type = other DNA
aggaaaagttttttactgtatc

SEQ ID NO: 22678 - DNA, 22 bp, synthetic construct
  misc_feature 1..22: note = chemically synthesized
  source 1..22: mol_type = other DNA
tttactgtatcaaaaagaagtt

SEQ ID NO: 22679 - DNA, 22 bp, synthetic construct
  misc_feature 1..22: note = chemically synthesized
  source 1..22: mol_type = other DNA
ttactgtatcaaaaagaagttt

SEQ ID NO: 22680 - DNA, 22 bp, synthetic construct
  misc_feature 1..22: note = chemically synthesized
  source 1..22: mol_type = other DNA
tactgtatcaaaaagaagttta

SEQ ID NO: 22681 - DNA, 22 bp, synthetic construct
  misc_feature 1..22: note = chemically synthesized
  source 1..22: mol_type = other DNA
actgtatcaaaaagaagtttaa

SEQ ID NO: 22682 - DNA, 22 bp, synthetic construct
  misc_feature 1..22: note = chemically synthesized
  source 1..22: mol_type = other DNA
ctgtatcaaaaagaagtttaaa

SEQ ID NO: 22683 - DNA, 22 bp, synthetic construct
  misc_feature 1..22: note = chemically synthesized
  source 1..22: mol_type = other DNA
tatcaaaaagaagtttaaactg

SEQ ID NO: 22684 - DNA, 22 bp, synthetic construct
  misc_feature 1..22: note = chemically synthesized
  source 1..22: mol_type = other DNA
aaactgtcattgagcagagtct

SEQ ID NO: 22685 - DNA, 22 bp, synthetic construct
  misc_feature 1..22: note = chemically synthesized
  source 1..22: mol_type = other DNA
aactgtcattgagcagagtctg

SEQ ID NO: 22686 - DNA, 22 bp, synthetic construct
  misc_feature 1..22: note = chemically synthesized
  source 1..22: mol_type = other DNA
tcattgagcagagtctgataat

SEQ ID NO: 22687 - DNA, 22 bp, synthetic construct
  misc_feature 1..22: note = chemically synthesized
  source 1..22: mol_type = other DNA
agcagagtctgataataaggac

SEQ ID NO: 22688 - DNA, 22 bp, synthetic construct
  misc_feature 1..22: note = chemically synthesized
  source 1..22: mol_type = other DNA
ataataaggacactgtcaaatc

SEQ ID NO: 22689 - DNA, 22 bp, synthetic construct
  misc_feature 1..22: note = chemically synthesized
  source 1..22: mol_type = other DNA
tcaaatcacagttcagatgtta

SEQ ID NO: 22690 - DNA, 22 bp, synthetic construct
  misc_feature 1..22: note = chemically synthesized
  source 1..22: mol_type = other DNA
agatgttatgtgatgaggacag

SEQ ID NO: 22691 - DNA, 22 bp, synthetic construct
  misc_feature 1..22: note = chemically synthesized
  source 1..22: mol_type = other DNA
tgtgatgaggacagaatagaac

SEQ ID NO: 22692 - DNA, 22 bp, synthetic construct
  misc_feature 1..22: note = chemically synthesized
  source 1..22: mol_type = other DNA
ctagactggacaagaacagaca

SEQ ID NO: 22693 - DNA, 22 bp, synthetic construct
  misc_feature 1..22: note = chemically synthesized
  source 1..22: mol_type = other DNA
tagactggacaagaacagacat

SEQ ID NO: 22694 - DNA, 22 bp, synthetic construct
  misc_feature 1..22: note = chemically synthesized
  source 1..22: mol_type = other DNA
gactggacaagaacagacatga

SEQ ID NO: 22695 - DNA, 22 bp, synthetic construct
  misc_feature 1..22: note = chemically synthesized
  source 1..22: mol_type = other DNA
gacaagaacagacatgattaac

SEQ ID NO: 22696 - DNA, 22 bp, synthetic construct
  misc_feature 1..22: note = chemically synthesized
  source 1..22: mol_type = other DNA
acttaaccatccaacaataaat

SEQ ID NO: 22697 - DNA, 22 bp, synthetic construct
  misc_feature 1..22: note = chemically synthesized
  source 1..22: mol_type = other DNA
aaccatccaacaataaatctaa

SEQ ID NO: 22698 - DNA, 22 bp, synthetic construct
  misc_feature 1..22: note = chemically synthesized
  source 1..22: mol_type = other DNA
accatccaacaataaatctaag

SEQ ID NO: 22699 - DNA, 22 bp, synthetic construct
  misc_feature 1..22: note = chemically synthesized
  source 1..22: mol_type = other DNA
agttaacataaattgatgtcat

SEQ ID NO: 22700 - DNA, 22 bp, synthetic construct
  misc_feature 1..22: note = chemically synthesized
  source 1..22: mol_type = other DNA
acataaattgatgtcatctact

SEQ ID NO: 22701 - DNA, 22 bp, synthetic construct
  misc_feature 1..22: note = chemically synthesized
  source 1..22: mol_type = other DNA
atgtcatctactacatctaagt

SEQ ID NO: 22702 - DNA, 22 bp, synthetic construct
  misc_feature 1..22: note = chemically synthesized
  source 1..22: mol_type = other DNA
ctacatctaagtatttcctcaa

SEQ ID NO: 22703 - DNA, 22 bp, synthetic construct
  misc_feature 1..22: note = chemically synthesized
  source 1..22: mol_type = other DNA
catctaagtatttcctcaaatt

SEQ ID NO: 22704 - DNA, 22 bp, synthetic construct
  misc_feature 1..22: note = chemically synthesized
  source 1..22: mol_type = other DNA
agtatttcctcaaattctggac

SEQ ID NO: 22705 - DNA, 22 bp, synthetic construct
  misc_feature 1..22: note = chemically synthesized
  source 1..22: mol_type = other DNA
cctcaaattctggacaatttta

SEQ ID NO: 22706 - DNA, 22 bp, synthetic construct
  misc_feature 1..22: note = chemically synthesized
  source 1..22: mol_type = other DNA
ctcaaattctggacaattttag

SEQ ID NO: 22707 - DNA, 22 bp, synthetic construct
  misc_feature 1..22: note = chemically synthesized
  source 1..22: mol_type = other DNA
aaattctggacaattttagaaa

SEQ ID NO: 22708 - DNA, 22 bp, synthetic construct
  misc_feature 1..22: note = chemically synthesized
  source 1..22: mol_type = other DNA
tggacaattttagaaaccatca

SEQ ID NO: 22709 - DNA, 22 bp, synthetic construct
  misc_feature 1..22: note = chemically synthesized
  source 1..22: mol_type = other DNA
gacaattttagaaaccatcaaa

SEQ ID NO: 22710 - DNA, 22 bp, synthetic construct
  misc_feature 1..22: note = chemically synthesized
  source 1..22: mol_type = other DNA
tagaaaccatcaaaattatttg

SEQ ID NO: 22711 - DNA, 22 bp, synthetic construct
  misc_feature 1..22: note = chemically synthesized
  source 1..22: mol_type = other DNA
agaaaccatcaaaattatttgt

SEQ ID NO: 22712 - DNA, 22 bp, synthetic construct
  misc_feature 1..22: note = chemically synthesized
  source 1..22: mol_type = other DNA
gaaaccatcaaaattatttgtt

SEQ ID NO: 22713 - DNA, 22 bp, synthetic construct
  misc_feature 1..22: note = chemically synthesized
  source 1..22: mol_type = other DNA
tttgttgaggaaaaataaactt

SEQ ID NO: 22714 - DNA, 22 bp, synthetic construct
  misc_feature 1..22: note = chemically synthesized
  source 1..22: mol_type = other DNA
gttgaggaaaaataaacttagc

SEQ ID NO: 22715 - DNA, 22 bp, synthetic construct
  misc_feature 1..22: note = chemically synthesized
  source 1..22: mol_type = other DNA
ttgaggaaaaataaacttagcc

SEQ ID NO: 22716 - DNA, 22 bp, synthetic construct
  misc_feature 1..22: note = chemically synthesized
  source 1..22: mol_type = other DNA
aggaaaaataaacttagccaat

SEQ ID NO: 22717 - DNA, 22 bp, synthetic construct
  misc_feature 1..22: note = chemically synthesized
  source 1..22: mol_type = other DNA
agccaatttgcaagggcaacta

SEQ ID NO: 22718 - DNA, 22 bp, synthetic construct
  misc_feature 1..22: note = chemically synthesized
  source 1..22: mol_type = other DNA
gccaatttgcaagggcaactaa

SEQ ID NO: 22719 - DNA, 22 bp, synthetic construct
  misc_feature 1..22: note = chemically synthesized
  source 1..22: mol_type = other DNA
gcaagggcaactaaaatgaaga

SEQ ID NO: 22720 - DNA, 22 bp, synthetic construct
  misc_feature 1..22: note = chemically synthesized
  source 1..22: mol_type = other DNA
caagggcaactaaaatgaagaa

SEQ ID NO: 22721 - DNA, 22 bp, synthetic construct
  misc_feature 1..22: note = chemically synthesized
  source 1..22: mol_type = other DNA
aaatgaagaacttttctttaaa

SEQ ID NO: 22722 - DNA, 22 bp, synthetic construct
  misc_feature 1..22: note = chemically synthesized
  source 1..22: mol_type = other DNA
ttctttaaagtgtgggagtcac

SEQ ID NO: 22723 - DNA, 22 bp, synthetic construct
  misc_feature 1..22: note = chemically synthesized
  source 1..22: mol_type = other DNA
tctttaaagtgtgggagtcaca

SEQ ID NO: 22724 - DNA, 22 bp, synthetic construct
  misc_feature 1..22: note = chemically synthesized
  source 1..22: mol_type = other DNA
ctttaaagtgtgggagtcacat

SEQ ID NO: 22725 - DNA, 22 bp, synthetic construct
  misc_feature 1..22: note = chemically synthesized
  source 1..22: mol_type = other DNA
tttaaagtgtgggagtcacatc

SEQ ID NO: 22726 - DNA, 22 bp, synthetic construct
  misc_feature 1..22: note = chemically synthesized
  source 1..22: mol_type = other DNA
taaagtgtgggagtcacatctt

SEQ ID NO: 22727 - DNA, 22 bp, synthetic construct
  misc_feature 1..22: note = chemically synthesized
  source 1..22: mol_type = other DNA
aaagtgtgggagtcacatctta

SEQ ID NO: 22728 - DNA, 22 bp, synthetic construct
  misc_feature 1..22: note = chemically synthesized
  source 1..22: mol_type = other DNA
aagtgtgggagtcacatcttag

SEQ ID NO: 22729 - DNA, 22 bp, synthetic construct
  misc_feature 1..22: note = chemically synthesized
  source 1..22: mol_type = other DNA
agcaacatatttaaatatatct

SEQ ID NO: 22730 - DNA, 22 bp, synthetic construct
  misc_feature 1..22: note = chemically synthesized
  source 1..22: mol_type = other DNA
gcaacatatttaaatatatcta

SEQ ID NO: 22731 - DNA, 22 bp, synthetic construct
  misc_feature 1..22: note = chemically synthesized
  source 1..22: mol_type = other DNA
aaatatatctaagctttcttca

SEQ ID NO: 22732 - DNA, 22 bp, synthetic construct
  misc_feature 1..22: note = chemically synthesized
  source 1..22: mol_type = other DNA
aatatatctaagctttcttcaa

SEQ ID NO: 22733 - DNA, 22 bp, synthetic construct
  misc_feature 1..22: note = chemically synthesized
  source 1..22: mol_type = other DNA
agctttcttcaaaaccactatc

SEQ ID NO: 22734 - DNA, 22 bp, synthetic construct
  misc_feature 1..22: note = chemically synthesized
  source 1..22: mol_type = other DNA
tcttcaaaaccactatccacaa

SEQ ID NO: 22735 - DNA, 22 bp, synthetic construct
  misc_feature 1..22: note = chemically synthesized
  source 1..22: mol_type = other DNA
cttcaaaaccactatccacaaa

SEQ ID NO: 22736 - DNA, 22 bp, synthetic construct
  misc_feature 1..22: note = chemically synthesized
  source 1..22: mol_type = other DNA
ttcaaaaccactatccacaaaa

SEQ ID NO: 22737 - DNA, 22 bp, synthetic construct
  misc_feature 1..22: note = chemically synthesized
  source 1..22: mol_type = other DNA
caaaaccactatccacaaaaat

SEQ ID NO: 22738 - DNA, 22 bp, synthetic construct
  misc_feature 1..22: note = chemically synthesized
  source 1..22: mol_type = other DNA
aaaaccactatccacaaaaatg

SEQ ID NO: 22739 - DNA, 22 bp, synthetic construct
  misc_feature 1..22: note = chemically synthesized
  source 1..22: mol_type = other DNA
tccacaaaaatgcaaaatttcc

SEQ ID NO: 22740 - DNA, 22 bp, synthetic construct
  misc_feature 1..22: note = chemically synthesized
  source 1..22: mol_type = other DNA
ccaaagaatttctcctcttctg

SEQ ID NO: 22741 - DNA, 22 bp, synthetic construct
  misc_feature 1..22: note = chemically synthesized
  source 1..22: mol_type = other DNA
caaagaatttctcctcttctgt

SEQ ID NO: 22742 - DNA, 22 bp, synthetic construct
  misc_feature 1..22: note = chemically synthesized
  source 1..22: mol_type = other DNA
ctcctcttctgtagacttattt

SEQ ID NO: 22743 - DNA, 22 bp, synthetic construct
  misc_feature 1..22: note = chemically synthesized
  source 1..22: mol_type = other DNA
tcctcttctgtagacttatttt

SEQ ID NO: 22744 - DNA, 22 bp, synthetic construct
  misc_feature 1..22: note = chemically synthesized
  source 1..22: mol_type = other DNA
ctcttctgtagacttattttct

SEQ ID NO: 22745 - DNA, 22 bp, synthetic construct
  misc_feature 1..22: note = chemically synthesized
  source 1..22: mol_type = other DNA
ttctgtagacttattttcttca

SEQ ID NO: 22746 - DNA, 22 bp, synthetic construct
  misc_feature 1..22: note = chemically synthesized
  source 1..22: mol_type = other DNA
ctgtagacttattttcttcatc

SEQ ID NO: 22747 - DNA, 22 bp, synthetic construct
  misc_feature 1..22: note = chemically synthesized
  source 1..22: mol_type = other DNA
tgtagacttattttcttcatct

SEQ ID NO: 22748 - DNA, 22 bp, synthetic construct
  misc_feature 1..22: note = chemically synthesized
  source 1..22: mol_type = other DNA
tagacttattttcttcatcttc

SEQ ID NO: 22749 - DNA, 22 bp, synthetic construct
  misc_feature 1..22: note = chemically synthesized
  source 1..22: mol_type = other DNA
attttcttcatcttcatctttt

SEQ ID NO: 22750 - DNA, 22 bp, synthetic construct
  misc_feature 1..22: note = chemically synthesized
  source 1..22: mol_type = other DNA
ttttcttcatcttcatcttttc

SEQ ID NO: 22751 - DNA, 22 bp, synthetic construct
  misc_feature 1..22: note = chemically synthesized
  source 1..22: mol_type = other DNA
tcttcatcttcatcttttccag

SEQ ID NO: 22752 - DNA, 22 bp, synthetic construct
  misc_feature 1..22: note = chemically synthesized
  source 1..22: mol_type = other DNA
cttcatcttcatcttttccagg

SEQ ID NO: 22753 - DNA, 22 bp, synthetic construct
  misc_feature 1..22: note = chemically synthesized
  source 1..22: mol_type = other DNA
ttcatcttcatcttttccagga

SEQ ID NO: 22754 - DNA, 22 bp, synthetic construct
  misc_feature 1..22: note = chemically synthesized
  source 1..22: mol_type = other DNA
catcttcatcttttccaggaga

SEQ ID NO: 22755 - DNA, 22 bp, synthetic construct
  misc_feature 1..22: note = chemically synthesized
  source 1..22: mol_type = other DNA
atcttcatcttttccaggagaa

SEQ ID NO: 22756 - DNA, 22 bp, synthetic construct
  misc_feature 1..22: note = chemically synthesized
  source 1..22: mol_type = other DNA
catcttttccaggagaatatac

SEQ ID NO: 22757 - DNA, 22 bp, synthetic construct
  misc_feature 1..22: note = chemically synthesized
  source 1..22: mol_type = other DNA
atcttttccaggagaatatacc

SEQ ID NO: 22758 - DNA, 22 bp, synthetic construct
  misc_feature 1..22: note = chemically synthesized
  source 1..22: mol_type = other DNA
ttccaggagaatataccataag

SEQ ID NO: 22759 - DNA, 22 bp, synthetic construct
  misc_feature 1..22: note = chemically synthesized
  source 1..22: mol_type = other DNA
tccaggagaatataccataagt

SEQ ID NO: 22760 - DNA, 22 bp, synthetic construct
  misc_feature 1..22: note = chemically synthesized
  source 1..22: mol_type = other DNA
ccaggagaatataccataagtt

SEQ ID NO: 22761 - DNA, 22 bp, synthetic construct
  misc_feature 1..22: note = chemically synthesized
  source 1..22: mol_type = other DNA
caggagaatataccataagttt

SEQ ID NO: 22762 - DNA, 22 bp, synthetic construct
  misc_feature 1..22: note = chemically synthesized
  source 1..22: mol_type = other DNA
ctgatggtacacatttattaga

SEQ ID NO: 22763 - DNA, 22 bp, synthetic construct
  misc_feature 1..22: note = chemically synthesized
  source 1..22: mol_type = other DNA
tgatggtacacatttattagat

SEQ ID NO: 22764 - DNA, 22 bp, synthetic construct
  misc_feature 1..22: note = chemically synthesized
  source 1..22: mol_type = other DNA
atggtacacatttattagatgt

SEQ ID NO: 22765 - DNA, 22 bp, synthetic construct
  misc_feature 1..22: note = chemically synthesized
  source 1..22: mol_type = other DNA
attagatgttttatttacattt

SEQ ID NO: 22766 - DNA, 22 bp, synthetic construct
  misc_feature 1..22: note = chemically synthesized
  source 1..22: mol_type = other DNA
ttagatgttttatttacatttt

SEQ ID NO: 22767 - DNA, 22 bp, synthetic construct
  misc_feature 1..22: note = chemically synthesized
  source 1..22: mol_type = other DNA
gatgttttatttacatttttta

SEQ ID NO: 22768 - DNA, 22 bp, synthetic construct
  misc_feature 1..22: note = chemically synthesized
  source 1..22: mol_type = other DNA
tatttacattttttatccttga

SEQ ID NO: 22769 - DNA, 22 bp, synthetic construct
  misc_feature 1..22: note = chemically synthesized
  source 1..22: mol_type = other DNA
atttacattttttatccttgaa

SEQ ID NO: 22770 - DNA, 22 bp, synthetic construct
  misc_feature 1..22: note = chemically synthesized
  source 1..22: mol_type = other DNA
tttacattttttatccttgaaa

SEQ ID NO: 22771 - DNA, 22 bp, synthetic construct
  misc_feature 1..22: note = chemically synthesized
  source 1..22: mol_type = other DNA
acattttttatccttgaaaact

SEQ ID NO: 22772 - DNA, 22 bp, synthetic construct
  misc_feature 1..22: note = chemically synthesized
  source 1..22: mol_type = other DNA
cattttttatccttgaaaactc

SEQ ID NO: 22773 - DNA, 22 bp, synthetic construct
  misc_feature 1..22: note = chemically synthesized
  source 1..22: mol_type = other DNA
tttatccttgaaaactcctttt

SEQ ID NO: 22774 - DNA, 22 bp, synthetic construct
  misc_feature 1..22: note = chemically synthesized
  source 1..22: mol_type = other DNA
ttatccttgaaaactcctttta

SEQ ID NO: 22775 - DNA, 22 bp, synthetic construct
  misc_feature 1..22: note = chemically synthesized
  source 1..22: mol_type = other DNA
tatccttgaaaactccttttat

SEQ ID NO: 22776 - DNA, 22 bp, synthetic construct
  misc_feature 1..22: note = chemically synthesized
  source 1..22: mol_type = other DNA
atccttgaaaactccttttatt

SEQ ID NO: 22777 - DNA, 22 bp, synthetic construct
  misc_feature 1..22: note = chemically synthesized
  source 1..22: mol_type = other DNA
tccttgaaaactccttttattt

SEQ ID NO: 22778 - DNA, 22 bp, synthetic construct
  misc_feature 1..22: note = chemically synthesized
  source 1..22: mol_type = other DNA
gaaaactccttttatttgcaac

SEQ ID NO: 22779 - DNA, 22 bp, synthetic construct
  misc_feature 1..22: note = chemically synthesized
  source 1..22: mol_type = other DNA
aaaactccttttatttgcaact

SEQ ID NO: 22780 - DNA, 22 bp, synthetic construct
  misc_feature 1..22: note = chemically synthesized
  source 1..22: mol_type = other DNA
cttttatttgcaactatgcatc

SEQ ID NO: 22781 - DNA, 22 bp, synthetic construct
  misc_feature 1..22: note = chemically synthesized
  source 1..22: mol_type = other DNA
ttatttgcaactatgcatctta

SEQ ID NO: 22782 - DNA, 22 bp, synthetic construct
  misc_feature 1..22: note = chemically synthesized
  source 1..22: mol_type = other DNA
tatttgcaactatgcatcttac

SEQ ID NO: 22783 - DNA, 22 bp, synthetic construct
  misc_feature 1..22: note = chemically synthesized
  source 1..22: mol_type = other DNA
atttgcaactatgcatcttact

SEQ ID NO: 22784 - DNA, 22 bp, synthetic construct
  misc_feature 1..22: note = chemically synthesized
  source 1..22: mol_type = other DNA
tttgcaactatgcatcttactc

SEQ ID NO: 22785 - DNA, 22 bp, synthetic construct
  misc_feature 1..22: note = chemically synthesized
  source 1..22: mol_type = other DNA
gcaactatgcatcttactcaga

SEQ ID NO: 22786 - DNA, 22 bp, synthetic construct
  misc_feature 1..22: note = chemically synthesized
  source 1..22: mol_type = other DNA
caactatgcatcttactcagag

SEQ ID NO: 22787 - DNA, 22 bp, synthetic construct
  misc_feature 1..22: note = chemically synthesized
  source 1..22: mol_type = other DNA
tgcatcttactcagagatctta

SEQ ID NO: 22788 - DNA, 22 bp, synthetic construct
  misc_feature 1..22: note = chemically synthesized
  source 1..22: mol_type = other DNA
actcagagatcttaaaacatcc

SEQ ID NO: 22789 - DNA, 22 bp, synthetic construct
  misc_feature 1..22: note = chemically synthesized
  source 1..22: mol_type = other DNA
ctcagagatcttaaaacatcct

SEQ ID NO: 22790 - DNA, 22 bp, synthetic construct
  misc_feature 1..22: note = chemically synthesized
  source 1..22: mol_type = other DNA
agagatcttaaaacatccttgt

SEQ ID NO: 22791 - DNA, 22 bp, synthetic construct
  misc_feature 1..22: note = chemically synthesized
  source 1..22: mol_type = other DNA
aaaacatccttgtttgttagat

SEQ ID NO: 22792 - DNA, 22 bp, synthetic construct
  misc_feature 1..22: note = chemically synthesized
  source 1..22: mol_type = other DNA
aaacatccttgtttgttagatt

SEQ ID NO: 22793 - DNA, 22 bp, synthetic construct
  misc_feature 1..22: note = chemically synthesized
  source 1..22: mol_type = other DNA
gtttgttagattacgtatttca

SEQ ID NO: 22794 - DNA, 22 bp, synthetic construct
  misc_feature 1..22: note = chemically synthesized
  source 1..22: mol_type = other DNA
tttgttagattacgtatttcaa

SEQ ID NO: 22795 - DNA, 22 bp, synthetic construct
  misc_feature 1..22: note = chemically synthesized
  source 1..22: mol_type = other DNA
gttagattacgtatttcaaatt

SEQ ID NO: 22796 - DNA, 22 bp, synthetic construct
  misc_feature 1..22: note = chemically synthesized
  source 1..22: mol_type = other DNA
ttagattacgtatttcaaattc

SEQ ID NO: 22797 - DNA, 22 bp, synthetic construct
  misc_feature 1..22: note = chemically synthesized
  source 1..22: mol_type = other DNA
gattacgtatttcaaattcata

SEQ ID NO: 22798 - DNA, 22 bp, synthetic construct
  misc_feature 1..22: note = chemically synthesized
  source 1..22: mol_type = other DNA
cgtatttcaaattcatatacac

SEQ ID NO: 22799 - DNA, 22 bp, synthetic construct
  misc_feature 1..22: note = chemically synthesized
  source 1..22: mol_type = other DNA
caaattcatatacactttggta

SEQ ID NO: 22800 - DNA, 22 bp, synthetic construct
  misc_feature 1..22: note = chemically synthesized
  source 1..22: mol_type = other DNA
aaattcatatacactttggtag

SEQ ID NO: 22801 - DNA, 22 bp, synthetic construct
  misc_feature 1..22: note = chemically synthesized
  source 1..22: mol_type = other DNA
atatacactttggtagatgcaa

SEQ ID NO: 22802 - DNA, 22 bp, synthetic construct
  misc_feature 1..22: note = chemically synthesized
  source 1..22: mol_type = other DNA
tggtagatgcaaacatttttat

SEQ ID NO: 22803 - DNA, 22 bp, synthetic construct
  misc_feature 1..22: note = chemically synthesized
  source 1..22: mol_type = other DNA
ggtagatgcaaacatttttatt

SEQ ID NO: 22804 - DNA, 22 bp, synthetic construct
  misc_feature 1..22: note = chemically synthesized
  source 1..22: mol_type = other DNA
gtagatgcaaacatttttattt

SEQ ID NO: 22805 - DNA, 22 bp, synthetic construct
  misc_feature 1..22: note = chemically synthesized
  source 1..22: mol_type = other DNA
ttatttgctgaagaacataagg

SEQ ID NO: 22806 - DNA, 22 bp, synthetic construct
  misc_feature 1..22: note = chemically synthesized
  source 1..22: mol_type = other DNA
tatttgctgaagaacataaggg

SEQ ID NO: 22807 - DNA, 22 bp, synthetic construct
  misc_feature 1..22: note = chemically synthesized
  source 1..22: mol_type = other DNA
atttgctgaagaacataagggg

SEQ ID NO: 22808 - DNA, 22 bp, synthetic construct
  misc_feature 1..22: note = chemically synthesized
  source 1..22: mol_type = other DNA
tttgctgaagaacataaggggg

SEQ ID NO: 22809 - DNA, 22 bp, synthetic construct
  misc_feature 1..22: note = chemically synthesized
  source 1..22: mol_type = other DNA
gctgaagaacataagggggaaa

SEQ ID NO: 22810 - DNA, 22 bp, synthetic construct
  misc_feature 1..22: note = chemically synthesized
  source 1..22: mol_type = other DNA
ctgaagaacataagggggaaat

SEQ ID NO: 22811 - DNA, 22 bp, synthetic construct
  misc_feature 1..22: note = chemically synthesized
  source 1..22: mol_type = other DNA
aagaacataagggggaaataga

SEQ ID NO: 22812 - DNA, 22 bp, synthetic construct
  misc_feature 1..22: note = chemically synthesized
  source 1..22: mol_type = other DNA
tttatttgaagaaacaaatgat

SEQ ID NO: 22813 - DNA, 22 bp, synthetic construct
  misc_feature 1..22: note = chemically synthesized
  source 1..22: mol_type = other DNA
tatttgaagaaacaaatgattt

SEQ ID NO: 22814 - DNA, 22 bp, synthetic construct
  misc_feature 1..22: note = chemically synthesized
  source 1..22: mol_type = other DNA
atttgaagaaacaaatgatttg

SEQ ID NO: 22815 - DNA, 22 bp, synthetic construct
  misc_feature 1..22: note = chemically synthesized
  source 1..22: mol_type = other DNA
tttgaagaaacaaatgatttga

SEQ ID NO: 22816 - DNA, 22 bp, synthetic construct
  misc_feature 1..22: note = chemically synthesized
  source 1..22: mol_type = other DNA
gaagaaacaaatgatttgattt

SEQ ID NO: 22817 - DNA, 22 bp, synthetic construct
  misc_feature 1..22: note = chemically synthesized
  source 1..22: mol_type = other DNA
aagaaacaaatgatttgatttg

SEQ ID NO: 22818 - DNA, 22 bp, synthetic construct
  misc_feature 1..22: note = chemically synthesized
  source 1..22: mol_type = other DNA
gatttgggaaatgaaatgaaaa

SEQ ID NO: 22819 - DNA, 22 bp, synthetic construct
  misc_feature 1..22: note = chemically synthesized
  source 1..22: mol_type = other DNA
atttgggaaatgaaatgaaaag

SEQ ID NO: 22820 - DNA, 22 bp, synthetic construct
  misc_feature 1..22: note = chemically synthesized
  source 1..22: mol_type = other DNA
gggaaatgaaatgaaaagaaaa

SEQ ID NO: 22821 - DNA, 22 bp, synthetic construct
  misc_feature 1..22: note = chemically synthesized
  source 1..22: mol_type = other DNA
ggaaatgaaatgaaaagaaaaa

SEQ ID NO: 22822 - DNA, 22 bp, synthetic construct
  misc_feature 1..22: note = chemically synthesized
  source 1..22: mol_type = other DNA
actaattcgctacttcttttac

SEQ ID NO: 22823 - DNA, 22 bp, synthetic construct
  misc_feature 1..22: note = chemically synthesized
  source 1..22: mol_type = other DNA
attcgctacttcttttactcat

SEQ ID NO: 22824 - DNA, 22 bp, synthetic construct
  misc_feature 1..22: note = chemically synthesized
  source 1..22: mol_type = other DNA
gctacttcttttactcatctga

SEQ ID NO: 22825 - DNA, 22 bp, synthetic construct
  misc_feature 1..22: note = chemically synthesized
  source 1..22: mol_type = other DNA
cttcttttactcatctgaggcc

SEQ ID NO: 22826 - DNA, 22 bp, synthetic construct
  misc_feature 1..22: note = chemically synthesized
  source 1..22: mol_type = other DNA
cttttactcatctgaggccttc

SEQ ID NO: 22827 - DNA, 22 bp, synthetic construct
  misc_feature 1..22: note = chemically synthesized
  source 1..22: mol_type = other DNA
ttttactcatctgaggccttca

SEQ ID NO: 22828 - DNA, 22 bp, synthetic construct
  misc_feature 1..22: note = chemically synthesized
  source 1..22: mol_type = other DNA
ttactcatctgaggccttcaga

SEQ ID NO: 22829 - DNA, 22 bp, synthetic construct
  misc_feature 1..22: note = chemically synthesized
  source 1..22: mol_type = other DNA
tactcatctgaggccttcagat

SEQ ID NO: 22830 - DNA, 22 bp, synthetic construct
  misc_feature 1..22: note = chemically synthesized
  source 1..22: mol_type = other DNA
actcatctgaggccttcagata

SEQ ID NO: 22831 - DNA, 22 bp, synthetic construct
  misc_feature 1..22: note = chemically synthesized
  source 1..22: mol_type = other DNA
ctcatctgaggccttcagatag

SEQ ID NO: 22832 - DNA, 22 bp, synthetic construct
  misc_feature 1..22: note = chemically synthesized
  source 1..22: mol_type = other DNA
atctgaggccttcagatagtcc

SEQ ID NO: 22833 - DNA, 22 bp, synthetic construct
  misc_feature 1..22: note = chemically synthesized
  source 1..22: mol_type = other DNA
aggccttcagatagtcccccat

SEQ ID NO: 22834 - DNA, 22 bp, synthetic construct
  misc_feature 1..22: note = chemically synthesized
  source 1..22: mol_type = other DNA
cagatagtcccccatatagcct

SEQ ID NO: 22835 - DNA, 22 bp, synthetic construct
  misc_feature 1..22: note = chemically synthesized
  source 1..22: mol_type = other DNA
agatagtcccccatatagcctt

SEQ ID NO: 22836 - DNA, 22 bp, synthetic construct
  misc_feature 1..22: note = chemically synthesized
  source 1..22: mol_type = other DNA
agagtgtttaaaatatgattat

SEQ ID NO: 22837 - DNA, 22 bp, synthetic construct
  misc_feature 1..22: note = chemically synthesized
  source 1..22: mol_type = other DNA
gagtgtttaaaatatgattatg

SEQ ID NO: 22838 - DNA, 22 bp, synthetic construct
  misc_feature 1..22: note = chemically synthesized
  source 1..22: mol_type = other DNA
aaaatatgattatgctctttca

SEQ ID NO: 22839 - DNA, 22 bp, synthetic construct
  misc_feature 1..22: note = chemically synthesized
  source 1..22: mol_type = other DNA
aaatatgattatgctctttcag

SEQ ID NO: 22840 - DNA, 22 bp, synthetic construct
  misc_feature 1..22: note = chemically synthesized
  source 1..22: mol_type = other DNA
tgctctttcagtctattagaaa

SEQ ID NO: 22841 - DNA, 22 bp, synthetic construct
  misc_feature 1..22: note = chemically synthesized
  source 1..22: mol_type = other DNA
tttcagtctattagaaataaaa

SEQ ID NO: 22842 - DNA, 22 bp, synthetic construct
  misc_feature 1..22: note = chemically synthesized
  source 1..22: mol_type = other DNA
tcagtctattagaaataaaaac

SEQ ID NO: 22843 - DNA, 22 bp, synthetic construct
  misc_feature 1..22: note = chemically synthesized
  source 1..22: mol_type = other DNA
cagtctattagaaataaaaaca

SEQ ID NO: 22844 - DNA, 22 bp, synthetic construct
  misc_feature 1..22: note = chemically synthesized
  source 1..22: mol_type = other DNA
agtctattagaaataaaaacat

SEQ ID NO: 22845 - DNA, 22 bp, synthetic construct
  misc_feature 1..22: note = chemically synthesized
  source 1..22: mol_type = other DNA
ttagaaataaaaacataaagct

SEQ ID NO: 22846 - DNA, 22 bp, synthetic construct
  misc_feature 1..22: note = chemically synthesized
  source 1..22: mol_type = other DNA
gaaataaaaacataaagcttaa

SEQ ID NO: 22847 - DNA, 22 bp, synthetic construct
  misc_feature 1..22: note = chemically synthesized
  source 1..22: mol_type = other DNA
aaaaaatttcaagggaaggggc

SEQ ID NO: 22848 - DNA, 22 bp, synthetic construct
  misc_feature 1..22: note = chemically synthesized
  source 1..22: mol_type = other DNA
aaaaatttcaagggaaggggct

SEQ ID NO: 22849 - DNA, 22 bp, synthetic construct
  misc_feature 1..22: note = chemically synthesized
  source 1..22: mol_type = other DNA
caagggaaggggcttgaagatt

SEQ ID NO: 22850 - DNA, 22 bp, synthetic construct
  misc_feature 1..22: note = chemically synthesized
  source 1..22: mol_type = other DNA
aagggaaggggcttgaagatta

SEQ ID NO: 22851 - DNA, 22 bp, synthetic construct
  misc_feature 1..22: note = chemically synthesized
  source 1..22: mol_type = other DNA
gaagattactgactaagggcag

SEQ ID NO: 22852 - DNA, 22 bp, synthetic construct
  misc_feature 1..22: note = chemically synthesized
  source 1..22: mol_type = other DNA
aagattactgactaagggcagc

SEQ ID NO: 22853 - DNA, 22 bp, synthetic construct
  misc_feature 1..22: note = chemically synthesized
  source 1..22: mol_type = other DNA
ctgactaagggcagctgacact

SEQ ID NO: 22854 - DNA, 22 bp, synthetic construct
  misc_feature 1..22: note = chemically synthesized
  source 1..22: mol_type = other DNA
actaagggcagctgacactcac

SEQ ID NO: 22855 - DNA, 22 bp, synthetic construct
  misc_feature 1..22: note = chemically synthesized
  source 1..22: mol_type = other DNA
agggcagctgacactcacctcc

SEQ ID NO: 22856 - DNA, 22 bp, synthetic construct
  misc_feature 1..22: note = chemically synthesized
  source 1..22: mol_type = other DNA
acactcacctcctccacaaaga

SEQ ID NO: 22857 - DNA, 22 bp, synthetic construct
  misc_feature 1..22: note = chemically synthesized
  source 1..22: mol_type = other DNA
acctcctccacaaagaaccaaa

SEQ ID NO: 22858 - DNA, 22 bp, synthetic construct
  misc_feature 1..22: note = chemically synthesized
  source 1..22: mol_type = other DNA
ctccacaaagaaccaaaatagt

SEQ ID NO: 22859 - DNA, 22 bp, synthetic construct
  misc_feature 1..22: note = chemically synthesized
  source 1..22: mol_type = other DNA
cacaaagaaccaaaatagtaag

SEQ ID NO: 22860 - DNA, 22 bp, synthetic construct
  misc_feature 1..22: note = chemically synthesized
  source 1..22: mol_type = other DNA
tggaattcaacagagaagtgac

SEQ ID NO: 22861 - DNA, 22 bp, synthetic construct
  misc_feature 1..22: note = chemically synthesized
  source 1..22: mol_type = other DNA
gaattcaacagagaagtgacag

SEQ ID NO: 22862 - DNA, 22 bp, synthetic construct
  misc_feature 1..22: note = chemically synthesized
  source 1..22: mol_type = other DNA
aacagagaagtgacaggaagca

SEQ ID NO: 22863 - DNA, 22 bp, synthetic construct
  misc_feature 1..22: note = chemically synthesized
  source 1..22: mol_type = other DNA
aggcaatgaaggggagggaagc

SEQ ID NO: 22864 - DNA, 22 bp, synthetic construct
  misc_feature 1..22: note = chemically synthesized
  source 1..22: mol_type = other DNA
cccagtagggatcctctgtgag

SEQ ID NO: 22865 - DNA, 22 bp, synthetic construct
  misc_feature 1..22: note = chemically synthesized
  source 1..22: mol_type = other DNA
tgtgaggccagagaggctcccc

SEQ ID NO: 22866 - DNA, 22 bp, synthetic construct
  misc_feature 1..22: note = chemically synthesized
  source 1..22: mol_type = other DNA
tgaggccagagaggctccccag

SEQ ID NO: 22867 - DNA, 22 bp, synthetic construct
  misc_feature 1..22: note = chemically synthesized
  source 1..22: mol_type = other DNA
cccagtgcatcgaaagttaagt

SEQ ID NO: 22868 - DNA, 22 bp, synthetic construct
  misc_feature 1..22: note = chemically synthesized
  source 1..22: mol_type = other DNA
agtgactgactcccagtggtcc

SEQ ID NO: 22869 - DNA, 22 bp, synthetic construct
  misc_feature 1..22: note = chemically synthesized
  source 1..22: mol_type = other DNA
actcccagtggtccacatctgc

SEQ ID NO: 22870 - DNA, 22 bp, synthetic construct
  misc_feature 1..22: note = chemically synthesized
  source 1..22: mol_type = other DNA
ccagtggtccacatctgcatta

SEQ ID NO: 22871 - DNA, 22 bp, synthetic construct
  misc_feature 1..22: note = chemically synthesized
  source 1..22: mol_type = other DNA
cattatggactccaggaatcct

SEQ ID NO: 22872 - DNA, 22 bp, synthetic construct
  misc_feature 1..22: note = chemically synthesized
  source 1..22: mol_type = other DNA
tggactccaggaatcctagcca

SEQ ID NO: 22873 - DNA, 22 bp, synthetic construct
  misc_feature 1..22: note = chemically synthesized
  source 1..22: mol_type = other DNA
caggaatcctagccacaggaga

SEQ ID NO: 22874 - DNA, 22 bp, synthetic construct
  misc_feature 1..22: note = chemically synthesized
  source 1..22: mol_type = other DNA
gccacaggagagtcccttgacc

SEQ ID NO: 22875 - DNA, 22 bp, synthetic construct
  misc_feature 1..22: note = chemically synthesized
  source 1..22: mol_type = other DNA
gaccatgcaggccttgagacta

SEQ ID NO: 22876 - DNA, 22 bp, synthetic construct
  misc_feature 1..22: note = chemically synthesized
  source 1..22: mol_type = other DNA
accatgcaggccttgagactat

SEQ ID NO: 22877 - DNA, 22 bp, synthetic construct
  misc_feature 1..22: note = chemically synthesized
  source 1..22: mol_type = other DNA
gagactatcataaggaactgcc

SEQ ID NO: 22878 - DNA, 22 bp, synthetic construct
  misc_feature 1..22: note = chemically synthesized
  source 1..22: mol_type = other DNA
agactatcataaggaactgccc

SEQ ID NO: 22879 - DNA, 22 bp, synthetic construct
  misc_feature 1..22: note = chemically synthesized
  source 1..22: mol_type = other DNA
tcataaggaactgcccagcaat

SEQ ID NO: 22880 - DNA, 22 bp, synthetic construct
  misc_feature 1..22: note = chemically synthesized
  source 1..22: mol_type = other DNA
cccagcaatcgcacaaaggcat

SEQ ID NO: 22881 - DNA, 22 bp, synthetic construct
  misc_feature 1..22: note = chemically synthesized
  source 1..22: mol_type = other DNA
ctccagagaaggagctctcact

SEQ ID NO: 22882 - DNA, 22 bp, synthetic construct
  misc_feature 1..22: note = chemically synthesized
  source 1..22: mol_type = other DNA
cagagaaggagctctcactggg

SEQ ID NO: 22883 - DNA, 22 bp, synthetic construct
  misc_feature 1..22: note = chemically synthesized
  source 1..22: mol_type = other DNA
tcactgggtcccacccctgcca

SEQ ID NO: 22884 - DNA, 22 bp, synthetic construct
  misc_feature 1..22: note = chemically synthesized
  source 1..22: mol_type = other DNA
actgggtcccacccctgccatc

SEQ ID NO: 22885 - DNA, 22 bp, synthetic construct
  misc_feature 1..22: note = chemically synthesized
  source 1..22: mol_type = other DNA
ggtcccacccctgccatcccca

SEQ ID NO: 22886 - DNA, 22 bp, synthetic construct
  misc_feature 1..22: note = chemically synthesized
  source 1..22: mol_type = other DNA
ccatccccattactgagcagca

SEQ ID NO: 22887 - DNA, 22 bp, synthetic construct
  misc_feature 1..22: note = chemically synthesized
  source 1..22: mol_type = other DNA
ctgagcagcaaggtgccatttt

SEQ ID NO: 22888 - DNA, 22 bp, synthetic construct
  misc_feature 1..22: note = chemically synthesized
  source 1..22: mol_type = other DNA
agcagcaaggtgccattttgag

SEQ ID NO: 22889 - DNA, 22 bp, synthetic construct
  misc_feature 1..22: note = chemically synthesized
  source 1..22: mol_type = other DNA
tgagagcccaacacccaccaga

SEQ ID NO: 22890 - DNA, 22 bp, synthetic construct
  misc_feature 1..22: note = chemically synthesized
  source 1..22: mol_type = other DNA
gagagcccaacacccaccagat

SEQ ID NO: 22891 - DNA, 22 bp, synthetic construct
  misc_feature 1..22: note = chemically synthesized
  source 1..22: mol_type = other DNA
agagcccaacacccaccagatg

SEQ ID NO: 22892 - DNA, 22 bp, synthetic construct
  misc_feature 1..22: note = chemically synthesized
  source 1..22: mol_type = other DNA
ctcagaccccaacatcatctgc

SEQ ID NO: 22893 - DNA, 22 bp, synthetic construct
  misc_feature 1..22: note = chemically synthesized
  source 1..22: mol_type = other DNA
agaccccaacatcatctgcatc

SEQ ID NO: 22894 - DNA, 22 bp, synthetic construct
  misc_feature 1..22: note = chemically synthesized
  source 1..22: mol_type = other DNA
catctctacatccctgaagctc

SEQ ID NO: 22895 - DNA, 22 bp, synthetic construct
  misc_feature 1..22: note = chemically synthesized
  source 1..22: mol_type = other DNA
tacatccctgaagctctgctga

SEQ ID NO: 22896 - DNA, 22 bp, synthetic construct
  misc_feature 1..22: note = chemically synthesized
  source 1..22: mol_type = other DNA
catccctgaagctctgctgaca

SEQ ID NO: 22897 - DNA, 22 bp, synthetic construct
  misc_feature 1..22: note = chemically synthesized
  source 1..22: mol_type = other DNA
aagctctgctgacatcccccac

SEQ ID NO: 22898 - DNA, 22 bp, synthetic construct
  misc_feature 1..22: note = chemically synthesized
  source 1..22: mol_type = other DNA
tgctgacatcccccacccacag

SEQ ID NO: 22899 - DNA, 22 bp, synthetic construct
  misc_feature 1..22: note = chemically synthesized
  source 1..22: mol_type = other DNA
ctgacatcccccacccacagct

SEQ ID NO: 22900 - DNA, 22 bp, synthetic construct
  misc_feature 1..22: note = chemically synthesized
  source 1..22: mol_type = other DNA
acatcccccacccacagctgag

SEQ ID NO: 22901 - DNA, 22 bp, synthetic construct
  misc_feature 1..22: note = chemically synthesized
  source 1..22: mol_type = other DNA
agtgctactgctggctgctgtc

SEQ ID NO: 22902 - DNA, 22 bp, synthetic construct
  misc_feature 1..22: note = chemically synthesized
  source 1..22: mol_type = other DNA
ctgctggctgctgtcaccaggg

SEQ ID NO: 22903 - DNA, 22 bp, synthetic construct
  misc_feature 1..22: note = chemically synthesized
  source 1..22: mol_type = other DNA
ctggctgctgtcaccagggata

SEQ ID NO: 22904 - DNA, 22 bp, synthetic construct
  misc_feature 1..22: note = chemically synthesized
  source 1..22: mol_type = other DNA
gctgctgtcaccagggataaag

SEQ ID NO: 22905 - DNA, 22 bp, synthetic construct
  misc_feature 1..22: note = chemically synthesized
  source 1..22: mol_type = other DNA
ctgtcaccagggataaagtgtg

SEQ ID NO: 22906 - DNA, 22 bp, synthetic construct
  misc_feature 1..22: note = chemically synthesized
  source 1..22: mol_type = other DNA
tcaccagggataaagtgtgtca

SEQ ID NO: 22907 - DNA, 22 bp, synthetic construct
  misc_feature 1..22: note = chemically synthesized
  source 1..22: mol_type = other DNA
gaagtggactcccccaccccca

SEQ ID NO: 22908 - DNA, 22 bp, synthetic construct
  misc_feature 1..22: note = chemically synthesized
  source 1..22: mol_type = other DNA
ccccacccccagtagcagggct

SEQ ID NO: 22909 - DNA, 22 bp, synthetic construct
  misc_feature 1..22: note = chemically synthesized
  source 1..22: mol_type = other DNA
ctacacatttataagctcccta

SEQ ID NO: 22910 - DNA, 22 bp, synthetic construct
  misc_feature 1..22: note = chemically synthesized
  source 1..22: mol_type = other DNA
cacatttataagctccctaaga

SEQ ID NO: 22911 - DNA, 22 bp, synthetic construct
  misc_feature 1..22: note = chemically synthesized
  source 1..22: mol_type = other DNA
ataagctccctaagaaaatgct

SEQ ID NO: 22912 - DNA, 22 bp, synthetic construct
  misc_feature 1..22: note = chemically synthesized
  source 1..22: mol_type = other DNA
taagctccctaagaaaatgcta

SEQ ID NO: 22913 - DNA, 22 bp, synthetic construct
  misc_feature 1..22: note = chemically synthesized
  source 1..22: mol_type = other DNA
cctaagaaaatgctaccccact

SEQ ID NO: 22914 - DNA, 22 bp, synthetic construct
  misc_feature 1..22: note = chemically synthesized
  source 1..22: mol_type = other DNA
agaaaatgctaccccacttgca

SEQ ID NO: 22915 - DNA, 22 bp, synthetic construct
  misc_feature 1..22: note = chemically synthesized
  source 1..22: mol_type = other DNA
ccccacttgcagccaccatctg

SEQ ID NO: 22916 - DNA, 22 bp, synthetic construct
  misc_feature 1..22: note = chemically synthesized
  source 1..22: mol_type = other DNA
gcagccaccatctggggctgaa

SEQ ID NO: 22917 - DNA, 22 bp, synthetic construct
  misc_feature 1..22: note = chemically synthesized
  source 1..22: mol_type = other DNA
cagccaccatctggggctgaaa

SEQ ID NO: 22918 - DNA, 22 bp, synthetic construct
  misc_feature 1..22: note = chemically synthesized
  source 1..22: mol_type = other DNA
gggctgaaacacatgcccacca

SEQ ID NO: 22919 - DNA, 22 bp, synthetic construct
  misc_feature 1..22: note = chemically synthesized
  source 1..22: mol_type = other DNA
aaacacatgcccaccagcaacc

SEQ ID NO: 22920 - DNA, 22 bp, synthetic construct
  misc_feature 1..22: note = chemically synthesized
  source 1..22: mol_type = other DNA
atagctgctgccactgaaagca

SEQ ID NO: 22921 - DNA, 22 bp, synthetic construct
  misc_feature 1..22: note = chemically synthesized
  source 1..22: mol_type = other DNA
tagctgctgccactgaaagcaa

SEQ ID NO: 22922 - DNA, 22 bp, synthetic construct
  misc_feature 1..22: note = chemically synthesized
  source 1..22: mol_type = other DNA
ctgccactgaaagcaacacacc

SEQ ID NO: 22923 - DNA, 22 bp, synthetic construct
  misc_feature 1..22: note = chemically synthesized
  source 1..22: mol_type = other DNA
ccactgaaagcaacacaccccg

SEQ ID NO: 22924 - DNA, 22 bp, synthetic construct
  misc_feature 1..22: note = chemically synthesized
  source 1..22: mol_type = other DNA
aaagcaacacaccccgcacccc

SEQ ID NO: 22925 - DNA, 22 bp, synthetic construct
  misc_feature 1..22: note = chemically synthesized
  source 1..22: mol_type = other DNA
caagagcagggcaacaatgcag

SEQ ID NO: 22926 - DNA, 22 bp, synthetic construct
  misc_feature 1..22: note = chemically synthesized
  source 1..22: mol_type = other DNA
aagagcagggcaacaatgcagt

SEQ ID NO: 22927 - DNA, 22 bp, synthetic construct
  misc_feature 1..22: note = chemically synthesized
  source 1..22: mol_type = other DNA
ctaattcactcaggcattctgc

SEQ ID NO: 22928 - DNA, 22 bp, synthetic construct
  misc_feature 1..22: note = chemically synthesized
  source 1..22: mol_type = other DNA
attcactcaggcattctgctgg

SEQ ID NO: 22929 - DNA, 22 bp, synthetic construct
  misc_feature 1..22: note = chemically synthesized
  source 1..22: mol_type = other DNA
actcaggcattctgctgggggc

SEQ ID NO: 22930 - DNA, 22 bp, synthetic construct
  misc_feature 1..22: note = chemically synthesized
  source 1..22: mol_type = other DNA
aggcattctgctgggggcctga

SEQ ID NO: 22931 - DNA, 22 bp, synthetic construct
  misc_feature 1..22: note = chemically synthesized
  source 1..22: mol_type = other DNA
tgctgggggcctgaggatcact

SEQ ID NO: 22932 - DNA, 22 bp, synthetic construct
  misc_feature 1..22: note = chemically synthesized
  source 1..22: mol_type = other DNA
ctgggggcctgaggatcactcc

SEQ ID NO: 22933 - DNA, 22 bp, synthetic construct
  misc_feature 1..22: note = chemically synthesized
  source 1..22: mol_type = other DNA
ggggcctgaggatcactccact

SEQ ID NO: 22934 - DNA, 22 bp, synthetic construct
  misc_feature 1..22: note = chemically synthesized
  source 1..22: mol_type = other DNA
aggatcactccactccagccta

SEQ ID NO: 22935 - DNA, 22 bp, synthetic construct
  misc_feature 1..22: note = chemically synthesized
  source 1..22: mol_type = other DNA
cactccagcctatgatagccgg

SEQ ID NO: 22936 - DNA, 22 bp, synthetic construct
  misc_feature 1..22: note = chemically synthesized
  source 1..22: mol_type = other DNA
cagcctatgatagccggtgtcc

SEQ ID NO: 22937 - DNA, 22 bp, synthetic construct
  misc_feature 1..22: note = chemically synthesized
  source 1..22: mol_type = other DNA
tgatagccggtgtccacacaca

SEQ ID NO: 22938 - DNA, 22 bp, synthetic construct
  misc_feature 1..22: note = chemically synthesized
  source 1..22: mol_type = other DNA
agtggcctgaggtcaggaacac

SEQ ID NO: 22939 - DNA, 22 bp, synthetic construct
  misc_feature 1..22: note = chemically synthesized
  source 1..22: mol_type = other DNA
aggtcaggaacacccagcctgg

SEQ ID NO: 22940 - DNA, 22 bp, synthetic construct
  misc_feature 1..22: note = chemically synthesized
  source 1..22: mol_type = other DNA
gctttgccttcctcaatgccta

SEQ ID NO: 22941 - DNA, 22 bp, synthetic construct
  misc_feature 1..22: note = chemically synthesized
  source 1..22: mol_type = other DNA
tgccttcctcaatgcctaagca

SEQ ID NO: 22942 - DNA, 22 bp, synthetic construct
  misc_feature 1..22: note = chemically synthesized
  source 1..22: mol_type = other DNA
gccttcctcaatgcctaagcaa

SEQ ID NO: 22943 - DNA, 22 bp, synthetic construct
  misc_feature 1..22: note = chemically synthesized
  source 1..22: mol_type = other DNA
ccttcctcaatgcctaagcaag

SEQ ID NO: 22944 - DNA, 22 bp, synthetic construct
  misc_feature 1..22: note = chemically synthesized
  source 1..22: mol_type = other DNA
cctcaatgcctaagcaagttgt

SEQ ID NO: 22945 - DNA, 22 bp, synthetic construct
  misc_feature 1..22: note = chemically synthesized
  source 1..22: mol_type = other DNA
ctcaatgcctaagcaagttgtc

SEQ ID NO: 22946 - DNA, 22 bp, synthetic construct
  misc_feature 1..22: note = chemically synthesized
  source 1..22: mol_type = other DNA
aatgcctaagcaagttgtctgg

SEQ ID NO: 22947 - DNA, 22 bp, synthetic construct
  misc_feature 1..22: note = chemically synthesized
  source 1..22: mol_type = other DNA
agcaagttgtctgggaacccag

SEQ ID NO: 22948 - DNA, 22 bp, synthetic construct
  misc_feature 1..22: note = chemically synthesized
  source 1..22: mol_type = other DNA
tctgggaacccagagacagcct

SEQ ID NO: 22949 - DNA, 22 bp, synthetic construct
  misc_feature 1..22: note = chemically synthesized
  source 1..22: mol_type = other DNA
ggaacccagagacagccttgtg

SEQ ID NO: 22950 - DNA, 22 bp, synthetic construct
  misc_feature 1..22: note = chemically synthesized
  source 1..22: mol_type = other DNA
gtgccatccaccatgactggta

SEQ ID NO: 22951 - DNA, 22 bp, synthetic construct
  misc_feature 1..22: note = chemically synthesized
  source 1..22: mol_type = other DNA
tgccatccaccatgactggtac

SEQ ID NO: 22952 - DNA, 22 bp, synthetic construct
  misc_feature 1..22: note = chemically synthesized
  source 1..22: mol_type = other DNA
gtacctaagcaaccctcccaga

SEQ ID NO: 22953 - DNA, 22 bp, synthetic construct
  misc_feature 1..22: note = chemically synthesized
  source 1..22: mol_type = other DNA
agcaaccctcccagaagcctga

SEQ ID NO: 22954 - DNA, 22 bp, synthetic construct
  misc_feature 1..22: note = chemically synthesized
  source 1..22: mol_type = other DNA
ccagaagcctgatgatgggcct

SEQ ID NO: 22955 - DNA, 22 bp, synthetic construct
  misc_feature 1..22: note = chemically synthesized
  source 1..22: mol_type = other DNA
atgatgggcctacccaatctgc

SEQ ID NO: 22956 - DNA, 22 bp, synthetic construct
  misc_feature 1..22: note = chemically synthesized
  source 1..22: mol_type = other DNA
cccaatctgccactgccatcac

SEQ ID NO: 22957 - DNA, 22 bp, synthetic construct
  misc_feature 1..22: note = chemically synthesized
  source 1..22: mol_type = other DNA
ccactgccatcacaactggcac

SEQ ID NO: 22958 - DNA, 22 bp, synthetic construct
  misc_feature 1..22: note = chemically synthesized
  source 1..22: mol_type = other DNA
ccatcacaactggcacctcctg

SEQ ID NO: 22959 - DNA, 22 bp, synthetic construct
  misc_feature 1..22: note = chemically synthesized
  source 1..22: mol_type = other DNA
gcacctcctgcatgtgccacct

SEQ ID NO: 22960 - DNA, 22 bp, synthetic construct
  misc_feature 1..22: note = chemically synthesized
  source 1..22: mol_type = other DNA
ctgcatgtgccacctgtgggtc

SEQ ID NO: 22961 - DNA, 22 bp, synthetic construct
  misc_feature 1..22: note = chemically synthesized
  source 1..22: mol_type = other DNA
catgtgccacctgtgggtctga

SEQ ID NO: 22962 - DNA, 22 bp, synthetic construct
  misc_feature 1..22: note = chemically synthesized
  source 1..22: mol_type = other DNA
tgggtctgaagactggctcatt

SEQ ID NO: 22963 - DNA, 22 bp, synthetic construct
  misc_feature 1..22: note = chemically synthesized
  source 1..22: mol_type = other DNA
aagactggctcattcagccctt

SEQ ID NO: 22964 - DNA, 22 bp, synthetic construct
  misc_feature 1..22: note = chemically synthesized
  source 1..22: mol_type = other DNA
gctcattcagcccttgcagcca

SEQ ID NO: 22965 - DNA, 22 bp, synthetic construct
  misc_feature 1..22: note = chemically synthesized
  source 1..22: mol_type = other DNA
attcagcccttgcagccaccac

SEQ ID NO: 22966 - DNA, 22 bp, synthetic construct
  misc_feature 1..22: note = chemically synthesized
  source 1..22: mol_type = other DNA
agcccttgcagccaccaccaac

SEQ ID NO: 22967 - DNA, 22 bp, synthetic construct
  misc_feature 1..22: note = chemically synthesized
  source 1..22: mol_type = other DNA
gcagccaccaccaacaccagtg

SEQ ID NO: 22968 - DNA, 22 bp, synthetic construct
  misc_feature 1..22: note = chemically synthesized
  source 1..22: mol_type = other DNA
cagccaccaccaacaccagtgc

SEQ ID NO: 22969 - DNA, 22 bp, synthetic construct
  misc_feature 1..22: note = chemically synthesized
  source 1..22: mol_type = other DNA
cttgggagccagagggttgtcc

SEQ ID NO: 22970 - DNA, 22 bp, synthetic construct
  misc_feature 1..22: note = chemically synthesized
  source 1..22: mol_type = other DNA
gggagccagagggttgtcctgc

SEQ ID NO: 22971 - DNA, 22 bp, synthetic construct
  misc_feature 1..22: note = chemically synthesized
  source 1..22: mol_type = other DNA
ggagccagagggttgtcctgca

SEQ ID NO: 22972 - DNA, 22 bp, synthetic construct
  misc_feature 1..22: note = chemically synthesized
  source 1..22: mol_type = other DNA
tcctgcagttgctacagccatc

SEQ ID NO: 22973 - DNA, 22 bp, synthetic construct
  misc_feature 1..22: note = chemically synthesized
  source 1..22: mol_type = other DNA
cagttgctacagccatcaccca

SEQ ID NO: 22974 - DNA, 22 bp, synthetic construct
  misc_feature 1..22: note = chemically synthesized
  source 1..22: mol_type = other DNA
ctacagccatcacccacaccac

SEQ ID NO: 22975 - DNA, 22 bp, synthetic construct
  misc_feature 1..22: note = chemically synthesized
  source 1..22: mol_type = other DNA
cagccatcacccacaccacacc

SEQ ID NO: 22976 - DNA, 22 bp, synthetic construct
  misc_feature 1..22: note = chemically synthesized
  source 1..22: mol_type = other DNA
tccagaagcctgaggacccaca

SEQ ID NO: 22977 - DNA, 22 bp, synthetic construct
  misc_feature 1..22: note = chemically synthesized
  source 1..22: mol_type = other DNA
aggacccacacaccagcccagt

SEQ ID NO: 22978 - DNA, 22 bp, synthetic construct
  misc_feature 1..22: note = chemically synthesized
  source 1..22: mol_type = other DNA
ctatggccactactgacaccca

SEQ ID NO: 22979 - DNA, 22 bp, synthetic construct
  misc_feature 1..22: note = chemically synthesized
  source 1..22: mol_type = other DNA
tggccactactgacacccaagc

SEQ ID NO: 22980 - DNA, 22 bp, synthetic construct
  misc_feature 1..22: note = chemically synthesized
  source 1..22: mol_type = other DNA
ctgacacccaagcaaactgcct

SEQ ID NO: 22981 - DNA, 22 bp, synthetic construct
  misc_feature 1..22: note = chemically synthesized
  source 1..22: mol_type = other DNA
acacccaagcaaactgcctgaa

SEQ ID NO: 22982 - DNA, 22 bp, synthetic construct
  misc_feature 1..22: note = chemically synthesized
  source 1..22: mol_type = other DNA
cctgaaggccaaagaatcaacc

SEQ ID NO: 22983 - DNA, 22 bp, synthetic construct
  misc_feature 1..22: note = chemically synthesized
  source 1..22: mol_type = other DNA
aaggccaaagaatcaacccaac

SEQ ID NO: 22984 - DNA, 22 bp, synthetic construct
  misc_feature 1..22: note = chemically synthesized
  source 1..22: mol_type = other DNA
gactcattaccatcagtgccaa

SEQ ID NO: 22985 - DNA, 22 bp, synthetic construct
  misc_feature 1..22: note = chemically synthesized
  source 1..22: mol_type = other DNA
attaccatcagtgccaatgtac

SEQ ID NO: 22986 - DNA, 22 bp, synthetic construct
  misc_feature 1..22: note = chemically synthesized
  source 1..22: mol_type = other DNA
ccatcagtgccaatgtacacag

SEQ ID NO: 22987 - DNA, 22 bp, synthetic construct
  misc_feature 1..22: note = chemically synthesized
  source 1..22: mol_type = other DNA
ggcccaccaccaccactggggc

SEQ ID NO: 22988 - DNA, 22 bp, synthetic construct
  misc_feature 1..22: note = chemically synthesized
  source 1..22: mol_type = other DNA
gggccaaggactggcccacttg

SEQ ID NO: 22989 - DNA, 22 bp, synthetic construct
  misc_feature 1..22: note = chemically synthesized
  source 1..22: mol_type = other DNA
gcccacttgatattcttgtctc

SEQ ID NO: 22990 - DNA, 22 bp, synthetic construct
  misc_feature 1..22: note = chemically synthesized
  source 1..22: mol_type = other DNA
gatattcttgtctccagcacaa

SEQ ID NO: 22991 - DNA, 22 bp, synthetic construct
  misc_feature 1..22: note = chemically synthesized
  source 1..22: mol_type = other DNA
atattcttgtctccagcacaac

SEQ ID NO: 22992 - DNA, 22 bp, synthetic construct
  misc_feature 1..22: note = chemically synthesized
  source 1..22: mol_type = other DNA
ttgtctccagcacaacctcatc

SEQ ID NO: 22993 - DNA, 22 bp, synthetic construct
  misc_feature 1..22: note = chemically synthesized
  source 1..22: mol_type = other DNA
gtctccagcacaacctcatcac

SEQ ID NO: 22994 - DNA, 22 bp, synthetic construct
  misc_feature 1..22: note = chemically synthesized
  source 1..22: mol_type = other DNA
tctccagcacaacctcatcacc

SEQ ID NO: 22995 - DNA, 22 bp, synthetic construct
  misc_feature 1..22: note = chemically synthesized
  source 1..22: mol_type = other DNA
cagcacaacctcatcaccacct

SEQ ID NO: 22996 - DNA, 22 bp, synthetic construct
  misc_feature 1..22: note = chemically synthesized
  source 1..22: mol_type = other DNA
atcaccaccttcactaacaaat

SEQ ID NO: 22997 - DNA, 22 bp, synthetic construct
  misc_feature 1..22: note = chemically synthesized
  source 1..22: mol_type = other DNA
cactaacaaatgcaccctaagc

SEQ ID NO: 22998 - DNA, 22 bp, synthetic construct
  misc_feature 1..22: note = chemically synthesized
  source 1..22: mol_type = other DNA
actaacaaatgcaccctaagcc

SEQ ID NO: 22999 - DNA, 22 bp, synthetic construct
  misc_feature 1..22: note = chemically synthesized
  source 1..22: mol_type = other DNA
acaaatgcaccctaagccactg

SEQ ID NO: 23000 - DNA, 22 bp, synthetic construct
  misc_feature 1..22: note = chemically synthesized
  source 1..22: mol_type = other DNA
agccactgaaaaaatcacagac

SEQ ID NO: 23001 - DNA, 22 bp, synthetic construct
  misc_feature 1..22: note = chemically synthesized
  source 1..22: mol_type = other DNA
aaaaaatcacagacactgatga

SEQ ID NO: 23002 - DNA, 22 bp, synthetic construct
  misc_feature 1..22: note = chemically synthesized
  source 1..22: mol_type = other DNA
atgatactgttggcagctgaaa

SEQ ID NO: 23003 - DNA, 22 bp, synthetic construct
  misc_feature 1..22: note = chemically synthesized
  source 1..22: mol_type = other DNA
ttggcagctgaaaaaaaataat

SEQ ID NO: 23004 - DNA, 22 bp, synthetic construct
  misc_feature 1..22: note = chemically synthesized
  source 1..22: mol_type = other DNA
gcagctgaaaaaaaataatatg

SEQ ID NO: 23005 - DNA, 22 bp, synthetic construct
  misc_feature 1..22: note = chemically synthesized
  source 1..22: mol_type = other DNA
aaaaaaaataatatgaagacta

SEQ ID NO: 23006 - DNA, 22 bp, synthetic construct
  misc_feature 1..22: note = chemically synthesized
  source 1..22: mol_type = other DNA
tgctgctgtatgcacctagaaa

SEQ ID NO: 23007 - DNA, 22 bp, synthetic construct
  misc_feature 1..22: note = chemically synthesized
  source 1..22: mol_type = other DNA
ctgtatgcacctagaaatcaaa

SEQ ID NO: 23008 - DNA, 22 bp, synthetic construct
  misc_feature 1..22: note = chemically synthesized
  source 1..22: mol_type = other DNA
tatgcacctagaaatcaaaatc

SEQ ID NO: 23009 - DNA, 22 bp, synthetic construct
  misc_feature 1..22: note = chemically synthesized
  source 1..22: mol_type = other DNA
gaaatcaaaatcaaagtgccct

SEQ ID NO: 23010 - DNA, 22 bp, synthetic construct
  misc_feature 1..22: note = chemically synthesized
  source 1..22: mol_type = other DNA
ctcaatcaacaccaagatacat

SEQ ID NO: 23011 - DNA, 22 bp, synthetic construct
  misc_feature 1..22: note = chemically synthesized
  source 1..22: mol_type = other DNA
aatcaacaccaagatacatctt

SEQ ID NO: 23012 - DNA, 22 bp, synthetic construct
  misc_feature 1..22: note = chemically synthesized
  source 1..22: mol_type = other DNA
cagaaaaaagtcttcccctaca

SEQ ID NO: 23013 - DNA, 22 bp, synthetic construct
  misc_feature 1..22: note = chemically synthesized
  source 1..22: mol_type = other DNA
agaaaaaagtcttcccctacaa

SEQ ID NO: 23014 - DNA, 22 bp, synthetic construct
  misc_feature 1..22: note = chemically synthesized
  source 1..22: mol_type = other DNA
cccctacaaaaacaaatttaca

SEQ ID NO: 23015 - DNA, 22 bp, synthetic construct
  misc_feature 1..22: note = chemically synthesized
  source 1..22: mol_type = other DNA
ccctacaaaaacaaatttacaa

SEQ ID NO: 23016 - DNA, 22 bp, synthetic construct
  misc_feature 1..22: note = chemically synthesized
  source 1..22: mol_type = other DNA
caaaaacaaatttacaaaactg

SEQ ID NO: 23017 - DNA, 22 bp, synthetic construct
  misc_feature 1..22: note = chemically synthesized
  source 1..22: mol_type = other DNA
acaaaactggaagcagcaatca

SEQ ID NO: 23018 - DNA, 22 bp, synthetic construct
  misc_feature 1..22: note = chemically synthesized
  source 1..22: mol_type = other DNA
caaaactggaagcagcaatcat

SEQ ID NO: 23019 - DNA, 22 bp, synthetic construct
  misc_feature 1..22: note = chemically synthesized
  source 1..22: mol_type = other DNA
gaagcagcaatcattacaccag

SEQ ID NO: 23020 - DNA, 22 bp, synthetic construct
  misc_feature 1..22: note = chemically synthesized
  source 1..22: mol_type = other DNA
caccagatgcagagatatcaat

SEQ ID NO: 23021 - DNA, 22 bp, synthetic construct
  misc_feature 1..22: note = chemically synthesized
  source 1..22: mol_type = other DNA
ccaaaggaatttaataattctt

SEQ ID NO: 23022 - DNA, 22 bp, synthetic construct
  misc_feature 1..22: note = chemically synthesized
  source 1..22: mol_type = other DNA
caaaggaatttaataattcttc

SEQ ID NO: 23023 - DNA, 22 bp, synthetic construct
  misc_feature 1..22: note = chemically synthesized
  source 1..22: mol_type = other DNA
aataattcttcagcaacataag

SEQ ID NO: 23024 - DNA, 22 bp, synthetic construct
  misc_feature 1..22: note = chemically synthesized
  source 1..22: mol_type = other DNA
ataattcttcagcaacataagc

SEQ ID NO: 23025 - DNA, 22 bp, synthetic construct
  misc_feature 1..22: note = chemically synthesized
  source 1..22: mol_type = other DNA
ttcagcaacataagccagtgga

SEQ ID NO: 23026 - DNA, 22 bp, synthetic construct
  misc_feature 1..22: note = chemically synthesized
  source 1..22: mol_type = other DNA
cagcaacataagccagtggaaa

SEQ ID NO: 23027 - DNA, 22 bp, synthetic construct
  misc_feature 1..22: note = chemically synthesized
  source 1..22: mol_type = other DNA
agcaacataagccagtggaaaa

SEQ ID NO: 23028 - DNA, 22 bp, synthetic construct
  misc_feature 1..22: note = chemically synthesized
  source 1..22: mol_type = other DNA
ataaaattctggaaaaaagaat

SEQ ID NO: 23029 - DNA, 22 bp, synthetic construct
  misc_feature 1..22: note = chemically synthesized
  source 1..22: mol_type = other DNA
taaaattctggaaaaaagaatc

SEQ ID NO: 23030 - DNA, 22 bp, synthetic construct
  misc_feature 1..22: note = chemically synthesized
  source 1..22: mol_type = other DNA
tggaaaaaagaatccaaaatgt

SEQ ID NO: 23031 - DNA, 22 bp, synthetic construct
  misc_feature 1..22: note = chemically synthesized
  source 1..22: mol_type = other DNA
gaaaaaagaatccaaaatgttg

SEQ ID NO: 23032 - DNA, 22 bp, synthetic construct
  misc_feature 1..22: note = chemically synthesized
  source 1..22: mol_type = other DNA
atattaaggaagctcagtgaga

SEQ ID NO: 23033 - DNA, 22 bp, synthetic construct
  misc_feature 1..22: note = chemically synthesized
  source 1..22: mol_type = other DNA
aggaagctcagtgagacacaag

SEQ ID NO: 23034 - DNA, 22 bp, synthetic construct
  misc_feature 1..22: note = chemically synthesized
  source 1..22: mol_type = other DNA
agtgagacacaagagaactcag

SEQ ID NO: 23035 - DNA, 22 bp, synthetic construct
  misc_feature 1..22: note = chemically synthesized
  source 1..22: mol_type = other DNA
agataaacaataaaaagaaatc

SEQ ID NO: 23036 - DNA, 22 bp, synthetic construct
  misc_feature 1..22: note = chemically synthesized
  source 1..22: mol_type = other DNA
aggatatgaatgagaaatttac

SEQ ID NO: 23037 - DNA, 22 bp, synthetic construct
  misc_feature 1..22: note = chemically synthesized
  source 1..22: mol_type = other DNA
acccaagagatagatacaacaa

SEQ ID NO: 23038 - DNA, 22 bp, synthetic construct
  misc_feature 1..22: note = chemically synthesized
  source 1..22: mol_type = other DNA
cccaagagatagatacaacaag

SEQ ID NO: 23039 - DNA, 22 bp, synthetic construct
  misc_feature 1..22: note = chemically synthesized
  source 1..22: mol_type = other DNA
tgtaactgaagagtttattgaa

SEQ ID NO: 23040 - DNA, 22 bp, synthetic construct
  misc_feature 1..22: note = chemically synthesized
  source 1..22: mol_type = other DNA
taactgaagagtttattgaaag

SEQ ID NO: 23041 - DNA, 22 bp, synthetic construct
  misc_feature 1..22: note = chemically synthesized
  source 1..22: mol_type = other DNA
aagagtttattgaaagaaatac

SEQ ID NO: 23042 - DNA, 22 bp, synthetic construct
  misc_feature 1..22: note = chemically synthesized
  source 1..22: mol_type = other DNA
attgaaagaaatacaaaataca

SEQ ID NO: 23043 - DNA, 22 bp, synthetic construct
  misc_feature 1..22: note = chemically synthesized
  source 1..22: mol_type = other DNA
ttgaaagaaatacaaaatacat

SEQ ID NO: 23044 - DNA, 22 bp, synthetic construct
  misc_feature 1..22: note = chemically synthesized
  source 1..22: mol_type = other DNA
aaagaaatacaaaatacattca

SEQ ID NO: 23045 - DNA, 22 bp, synthetic construct
  misc_feature 1..22: note = chemically synthesized
  source 1..22: mol_type = other DNA
aaaaacttcaacaatagatcag

SEQ ID NO: 23046 - DNA, 22 bp, synthetic construct
  misc_feature 1..22: note = chemically synthesized
  source 1..22: mol_type = other DNA
caacaatagatcagatcaagca

SEQ ID NO: 23047 - DNA, 22 bp, synthetic construct
  misc_feature 1..22: note = chemically synthesized
  source 1..22: mol_type = other DNA
aacaatagatcagatcaagcag

SEQ ID NO: 23048 - DNA, 22 bp, synthetic construct
  misc_feature 1..22: note = chemically synthesized
  source 1..22: mol_type = other DNA
cagaacttgaagacaggtcttt

SEQ ID NO: 23049 - DNA, 22 bp, synthetic construct
  misc_feature 1..22: note = chemically synthesized
  source 1..22: mol_type = other DNA
agaacttgaagacaggtctttt

SEQ ID NO: 23050 - DNA, 22 bp, synthetic construct
  misc_feature 1..22: note = chemically synthesized
  source 1..22: mol_type = other DNA
gaagacaggtcttttaaaatta

SEQ ID NO: 23051 - DNA, 22 bp, synthetic construct
  misc_feature 1..22: note = chemically synthesized
  source 1..22: mol_type = other DNA
aagacaggtcttttaaaattag

SEQ ID NO: 23052 - DNA, 22 bp, synthetic construct
  misc_feature 1..22: note = chemically synthesized
  source 1..22: mol_type = other DNA
ttaaaattagctggtcaaatga

SEQ ID NO: 23053 - DNA, 22 bp, synthetic construct
  misc_feature 1..22: note = chemically synthesized
  source 1..22: mol_type = other DNA
taaaattagctggtcaaatgat

SEQ ID NO: 23054 - DNA, 22 bp, synthetic construct
  misc_feature 1..22: note = chemically synthesized
  source 1..22: mol_type = other DNA
aaaattagctggtcaaatgata

SEQ ID NO: 23055 - DNA, 22 bp, synthetic construct
  misc_feature 1..22: note = chemically synthesized
  source 1..22: mol_type = other DNA
aaattagctggtcaaatgatag

SEQ ID NO: 23056 - DNA, 22 bp, synthetic construct
  misc_feature 1..22: note = chemically synthesized
  source 1..22: mol_type = other DNA
gctggtcaaatgatagaaagga

SEQ ID NO: 23057 - DNA, 22 bp, synthetic construct
  misc_feature 1..22: note = chemically synthesized
  source 1..22: mol_type = other DNA
gtcaaatgatagaaaggaaaaa

SEQ ID NO: 23058 - DNA, 22 bp, synthetic construct
  misc_feature 1..22: note = chemically synthesized
  source 1..22: mol_type = other DNA
taaagtgaacaaatattcaaat

SEQ ID NO: 23059 - DNA, 22 bp, synthetic construct
  misc_feature 1..22: note = chemically synthesized
  source 1..22: mol_type = other DNA
aaatttgcagtttcccagaagg

SEQ ID NO: 23060 - DNA, 22 bp, synthetic construct
  misc_feature 1..22: note = chemically synthesized
  source 1..22: mol_type = other DNA
gcagtttcccagaaggtaaaga

SEQ ID NO: 23061 - DNA, 22 bp, synthetic construct
  misc_feature 1..22: note = chemically synthesized
  source 1..22: mol_type = other DNA
cagtttcccagaaggtaaagag

SEQ ID NO: 23062 - DNA, 22 bp, synthetic construct
  misc_feature 1..22: note = chemically synthesized
  source 1..22: mol_type = other DNA
cccagaaggtaaagagaacatg

SEQ ID NO: 23063 - DNA, 22 bp, synthetic construct
  misc_feature 1..22: note = chemically synthesized
  source 1..22: mol_type = other DNA
ccagaaggtaaagagaacatga

SEQ ID NO: 23064 - DNA, 22 bp, synthetic construct
  misc_feature 1..22: note = chemically synthesized
  source 1..22: mol_type = other DNA
cgtaacaacacaatagctgaaa

SEQ ID NO: 23065 - DNA, 22 bp, synthetic construct
  misc_feature 1..22: note = chemically synthesized
  source 1..22: mol_type = other DNA
aaaacttgtcaagtctagcaag

SEQ ID NO: 23066 - DNA, 22 bp, synthetic construct
  misc_feature 1..22: note = chemically synthesized
  source 1..22: mol_type = other DNA
gtcaagtctagcaagaaatgta

SEQ ID NO: 23067 - DNA, 22 bp, synthetic construct
  misc_feature 1..22: note = chemically synthesized
  source 1..22: mol_type = other DNA
tcaagtctagcaagaaatgtag

SEQ ID NO: 23068 - DNA, 22 bp, synthetic construct
  misc_feature 1..22: note = chemically synthesized
  source 1..22: mol_type = other DNA
gcaagaaatgtagacatccaga

SEQ ID NO: 23069 - DNA, 22 bp, synthetic construct
  misc_feature 1..22: note = chemically synthesized
  source 1..22: mol_type = other DNA
ccaaataatataatgcaaaaag

SEQ ID NO: 23070 - DNA, 22 bp, synthetic construct
  misc_feature 1..22: note = chemically synthesized
  source 1..22: mol_type = other DNA
ttctccacagcacattatagtc

SEQ ID NO: 23071 - DNA, 22 bp, synthetic construct
  misc_feature 1..22: note = chemically synthesized
  source 1..22: mol_type = other DNA
ctccacagcacattatagtcaa

SEQ ID NO: 23072 - DNA, 22 bp, synthetic construct
  misc_feature 1..22: note = chemically synthesized
  source 1..22: mol_type = other DNA
tccacagcacattatagtcaaa

SEQ ID NO: 23073 - DNA, 22 bp, synthetic construct
  misc_feature 1..22: note = chemically synthesized
  source 1..22: mol_type = other DNA
cacagcacattatagtcaaact

SEQ ID NO: 23074 - DNA, 22 bp, synthetic construct
  misc_feature 1..22: note = chemically synthesized
  source 1..22: mol_type = other DNA
tagtcaaactgtcaaaagccaa

SEQ ID NO: 23075 - DNA, 22 bp, synthetic construct
  misc_feature 1..22: note = chemically synthesized
  source 1..22: mol_type = other DNA
tcaaaagccaaagagtaagaac

SEQ ID NO: 23076 - DNA, 22 bp, synthetic construct
  misc_feature 1..22: note = chemically synthesized
  source 1..22: mol_type = other DNA
taaaacagcaagcaaaatgtct

SEQ ID NO: 23077 - DNA, 22 bp, synthetic construct
  misc_feature 1..22: note = chemically synthesized
  source 1..22: mol_type = other DNA
aaacagcaagcaaaatgtctag

SEQ ID NO: 23078 - DNA, 22 bp, synthetic construct
  misc_feature 1..22: note = chemically synthesized
  source 1..22: mol_type = other DNA
gtcacttataagggaacttcca

SEQ ID NO: 23079 - DNA, 22 bp, synthetic construct
  misc_feature 1..22: note = chemically synthesized
  source 1..22: mol_type = other DNA
ataagggaacttccacaagatt

SEQ ID NO: 23080 - DNA, 22 bp, synthetic construct
  misc_feature 1..22: note = chemically synthesized
  source 1..22: mol_type = other DNA
taagggaacttccacaagatta

SEQ ID NO: 23081 - DNA, 22 bp, synthetic construct
  misc_feature 1..22: note = chemically synthesized
  source 1..22: mol_type = other DNA
ccacaagattaacagattaaca

SEQ ID NO: 23082 - DNA, 22 bp, synthetic construct
  misc_feature 1..22: note = chemically synthesized
  source 1..22: mol_type = other DNA
cacaagattaacagattaacag

SEQ ID NO: 23083 - DNA, 22 bp, synthetic construct
  misc_feature 1..22: note = chemically synthesized
  source 1..22: mol_type = other DNA
acagattaacagcagatttctc

SEQ ID NO: 23084 - DNA, 22 bp, synthetic construct
  misc_feature 1..22: note = chemically synthesized
  source 1..22: mol_type = other DNA
acagcagatttctcagcagaaa

SEQ ID NO: 23085 - DNA, 22 bp, synthetic construct
  misc_feature 1..22: note = chemically synthesized
  source 1..22: mol_type = other DNA
ctcagcagaaacctcacaggcc

SEQ ID NO: 23086 - DNA, 22 bp, synthetic construct
  misc_feature 1..22: note = chemically synthesized
  source 1..22: mol_type = other DNA
tcagcagaaacctcacaggcca

SEQ ID NO: 23087 - DNA, 22 bp, synthetic construct
  misc_feature 1..22: note = chemically synthesized
  source 1..22: mol_type = other DNA
agcagaaacctcacaggccagg

SEQ ID NO: 23088 - DNA, 22 bp, synthetic construct
  misc_feature 1..22: note = chemically synthesized
  source 1..22: mol_type = other DNA
acaggccaggagaagatgggat

SEQ ID NO: 23089 - DNA, 22 bp, synthetic construct
  misc_feature 1..22: note = chemically synthesized
  source 1..22: mol_type = other DNA
aaaatagtgaaagaaaaaaatg

SEQ ID NO: 23090 - DNA, 22 bp, synthetic construct
  misc_feature 1..22: note = chemically synthesized
  source 1..22: mol_type = other DNA
tacccagcaacattgttcttca

SEQ ID NO: 23091 - DNA, 22 bp, synthetic construct
  misc_feature 1..22: note = chemically synthesized
  source 1..22: mol_type = other DNA
ttcttcaaaaatgaaggataaa

SEQ ID NO: 23092 - DNA, 22 bp, synthetic construct
  misc_feature 1..22: note = chemically synthesized
  source 1..22: mol_type = other DNA
ttcaaaaatgaaggataaataa

SEQ ID NO: 23093 - DNA, 22 bp, synthetic construct
  misc_feature 1..22: note = chemically synthesized
  source 1..22: mol_type = other DNA
caaaaatgaaggataaataaaa

SEQ ID NO: 23094 - DNA, 22 bp, synthetic construct
  misc_feature 1..22: note = chemically synthesized
  source 1..22: mol_type = other DNA
aaaaatgaaggataaataaaat

SEQ ID NO: 23095 - DNA, 22 bp, synthetic construct
  misc_feature 1..22: note = chemically synthesized
  source 1..22: mol_type = other DNA
ttctgggcaagaaaaatttgaa

SEQ ID NO: 23096 - DNA, 22 bp, synthetic construct
  misc_feature 1..22: note = chemically synthesized
  source 1..22: mol_type = other DNA
tctgggcaagaaaaatttgaag

SEQ ID NO: 23097 - DNA, 22 bp, synthetic construct
  misc_feature 1..22: note = chemically synthesized
  source 1..22: mol_type = other DNA
ctgggcaagaaaaatttgaagg

SEQ ID NO: 23098 - DNA, 22 bp, synthetic construct
  misc_feature 1..22: note = chemically synthesized
  source 1..22: mol_type = other DNA
tgggcaagaaaaatttgaagga

SEQ ID NO: 23099 - DNA, 22 bp, synthetic construct
  misc_feature 1..22: note = chemically synthesized
  source 1..22: mol_type = other DNA
ggcaagaaaaatttgaaggaat

SEQ ID NO: 23100 - DNA, 22 bp, synthetic construct
  misc_feature 1..22: note = chemically synthesized
  source 1..22: mol_type = other DNA
gaaggaattcactatcactaga

SEQ ID NO: 23101 - DNA, 22 bp, synthetic construct
  misc_feature 1..22: note = chemically synthesized
  source 1..22: mol_type = other DNA
aaggaattcactatcactagac

SEQ ID NO: 23102 - DNA, 22 bp, synthetic construct
  misc_feature 1..22: note = chemically synthesized
  source 1..22: mol_type = other DNA
actatcactagactggctttac

SEQ ID NO: 23103 - DNA, 22 bp, synthetic construct
  misc_feature 1..22: note = chemically synthesized
  source 1..22: mol_type = other DNA
tcactagactggctttacaaga

SEQ ID NO: 23104 - DNA, 22 bp, synthetic construct
  misc_feature 1..22: note = chemically synthesized
  source 1..22: mol_type = other DNA
gactggctttacaagaaatatt

SEQ ID NO: 23105 - DNA, 22 bp, synthetic construct
  misc_feature 1..22: note = chemically synthesized
  source 1..22: mol_type = other DNA
gctttacaagaaatatttaagg

SEQ ID NO: 23106 - DNA, 22 bp, synthetic construct
  misc_feature 1..22: note = chemically synthesized
  source 1..22: mol_type = other DNA
tacaagaaatatttaagggagt

SEQ ID NO: 23107 - DNA, 22 bp, synthetic construct
  misc_feature 1..22: note = chemically synthesized
  source 1..22: mol_type = other DNA
acaagaaatatttaagggagtc

SEQ ID NO: 23108 - DNA, 22 bp, synthetic construct
  misc_feature 1..22: note = chemically synthesized
  source 1..22: mol_type = other DNA
caagaaatatttaagggagtcc

SEQ ID NO: 23109 - DNA, 22 bp, synthetic construct
  misc_feature 1..22: note = chemically synthesized
  source 1..22: mol_type = other DNA
aagggagtcctacacatgaaag

SEQ ID NO: 23110 - DNA, 22 bp, synthetic construct
  misc_feature 1..22: note = chemically synthesized
  source 1..22: mol_type = other DNA
agggagtcctacacatgaaagt

SEQ ID NO: 23111 - DNA, 22 bp, synthetic construct
  misc_feature 1..22: note = chemically synthesized
  source 1..22: mol_type = other DNA
cacatgaaagtgacaggacact

SEQ ID NO: 23112 - DNA, 22 bp, synthetic construct
  misc_feature 1..22: note = chemically synthesized
  source 1..22: mol_type = other DNA
ccattatgaagacacacaaagg

SEQ ID NO: 23113 - DNA, 22 bp, synthetic construct
  misc_feature 1..22: note = chemically synthesized
  source 1..22: mol_type = other DNA
tgaagacacacaaaggtataca

SEQ ID NO: 23114 - DNA, 22 bp, synthetic construct
  misc_feature 1..22: note = chemically synthesized
  source 1..22: mol_type = other DNA
actggtagagcaaaacacaaat

SEQ ID NO: 23115 - DNA, 22 bp, synthetic construct
  misc_feature 1..22: note = chemically synthesized
  source 1..22: mol_type = other DNA
gtagagcaaaacacaaataaag

SEQ ID NO: 23116 - DNA, 22 bp, synthetic construct
  misc_feature 1..22: note = chemically synthesized
  source 1..22: mol_type = other DNA
aaacgttaccactacagaaaat

SEQ ID NO: 23117 - DNA, 22 bp, synthetic construct
  misc_feature 1..22: note = chemically synthesized
  source 1..22: mol_type = other DNA
ccactacagaaaatcaccaaac

SEQ ID NO: 23118 - DNA, 22 bp, synthetic construct
  misc_feature 1..22: note = chemically synthesized
  source 1..22: mol_type = other DNA
cagaaaatcaccaaaccacaat

SEQ ID NO: 23119 - DNA, 22 bp, synthetic construct
  misc_feature 1..22: note = chemically synthesized
  source 1..22: mol_type = other DNA
aaaaaaaaacaaaacaaccagg

SEQ ID NO: 23120 - DNA, 22 bp, synthetic construct
  misc_feature 1..22: note = chemically synthesized
  source 1..22: mol_type = other DNA
acaaaatggcaggaataagctc

SEQ ID NO: 23121 - DNA, 22 bp, synthetic construct
  misc_feature 1..22: note = chemically synthesized
  source 1..22: mol_type = other DNA
tcacatgtcaataatagccttg

SEQ ID NO: 23122 - DNA, 22 bp, synthetic construct
  misc_feature 1..22: note = chemically synthesized
  source 1..22: mol_type = other DNA
acatgtcaataatagccttgca

SEQ ID NO: 23123 - DNA, 22 bp, synthetic construct
  misc_feature 1..22: note = chemically synthesized
  source 1..22: mol_type = other DNA
gcatgtaaatggattaaattgt

SEQ ID NO: 23124 - DNA, 22 bp, synthetic construct
  misc_feature 1..22: note = chemically synthesized
  source 1..22: mol_type = other DNA
catgtaaatggattaaattgtt

SEQ ID NO: 23125 - DNA, 22 bp, synthetic construct
  misc_feature 1..22: note = chemically synthesized
  source 1..22: mol_type = other DNA
aattgttacttgaaagatatag

SEQ ID NO: 23126 - DNA, 22 bp, synthetic construct
  misc_feature 1..22: note = chemically synthesized
  source 1..22: mol_type = other DNA
ttacttgaaagatatagactgg

SEQ ID NO: 23127 - DNA, 22 bp, synthetic construct
  misc_feature 1..22: note = chemically synthesized
  source 1..22: mol_type = other DNA
cttgaaagatatagactggcta

SEQ ID NO: 23128 - DNA, 22 bp, synthetic construct
  misc_feature 1..22: note = chemically synthesized
  source 1..22: mol_type = other DNA
gaaagatatagactggctaaat

SEQ ID NO: 23129 - DNA, 22 bp, synthetic construct
  misc_feature 1..22: note = chemically synthesized
  source 1..22: mol_type = other DNA
aaagatatagactggctaaata

SEQ ID NO: 23130 - DNA, 22 bp, synthetic construct
  misc_feature 1..22: note = chemically synthesized
  source 1..22: mol_type = other DNA
gctaaatagatttaaaacaaaa

SEQ ID NO: 23131 - DNA, 22 bp, synthetic construct
  misc_feature 1..22: note = chemically synthesized
  source 1..22: mol_type = other DNA
aatagatttaaaacaaaaatat

SEQ ID NO: 23132 - DNA, 22 bp, synthetic construct
  misc_feature 1..22: note = chemically synthesized
  source 1..22: mol_type = other DNA
aaaacaaaaatatgacccagtt

SEQ ID NO: 23133 - DNA, 22 bp, synthetic construct
  misc_feature 1..22: note = chemically synthesized
  source 1..22: mol_type = other DNA
aaacaaaaatatgacccagttg

SEQ ID NO: 23134 - DNA, 22 bp, synthetic construct
  misc_feature 1..22: note = chemically synthesized
  source 1..22: mol_type = other DNA
taagctgcctataagaaactta

SEQ ID NO: 23135 - DNA, 22 bp, synthetic construct
  misc_feature 1..22: note = chemically synthesized
  source 1..22: mol_type = other DNA
cctataagaaacttatctcact

SEQ ID NO: 23136 - DNA, 22 bp, synthetic construct
  misc_feature 1..22: note = chemically synthesized
  source 1..22: mol_type = other DNA
taagaaacttatctcacttgta

SEQ ID NO: 23137 - DNA, 22 bp, synthetic construct
  misc_feature 1..22: note = chemically synthesized
  source 1..22: mol_type = other DNA
atctcacttgtaaagataaata

SEQ ID NO: 23138 - DNA, 22 bp, synthetic construct
  misc_feature 1..22: note = chemically synthesized
  source 1..22: mol_type = other DNA
tctcacttgtaaagataaatat

SEQ ID NO: 23139 - DNA, 22 bp, synthetic construct
  misc_feature 1..22: note = chemically synthesized
  source 1..22: mol_type = other DNA
acttgtaaagataaatatagac

SEQ ID NO: 23140 - DNA, 22 bp, synthetic construct
  misc_feature 1..22: note = chemically synthesized
  source 1..22: mol_type = other DNA
gtaaagataaatatagactgaa

SEQ ID NO: 23141 - DNA, 22 bp, synthetic construct
  misc_feature 1..22: note = chemically synthesized
  source 1..22: mol_type = other DNA
taaagataaatatagactgaaa

SEQ ID NO: 23142 - DNA, 22 bp, synthetic construct
  misc_feature 1..22: note = chemically synthesized
  source 1..22: mol_type = other DNA
aaagtaaaaagatgaaagatct

SEQ ID NO: 23143 - DNA, 22 bp, synthetic construct
  misc_feature 1..22: note = chemically synthesized
  source 1..22: mol_type = other DNA
ccatacaaagagaaaccaaaaa

SEQ ID NO: 23144 - DNA, 22 bp, synthetic construct
  misc_feature 1..22: note = chemically synthesized
  source 1..22: mol_type = other DNA
catacaaagagaaaccaaaaat

SEQ ID NO: 23145 - DNA, 22 bp, synthetic construct
  misc_feature 1..22: note = chemically synthesized
  source 1..22: mol_type = other DNA
tacctataacagataaaattga

SEQ ID NO: 23146 - DNA, 22 bp, synthetic construct
  misc_feature 1..22: note = chemically synthesized
  source 1..22: mol_type = other DNA
taacagataaaattgactttaa

SEQ ID NO: 23147 - DNA, 22 bp, synthetic construct
  misc_feature 1..22: note = chemically synthesized
  source 1..22: mol_type = other DNA
actttaaataaaaaacactaag

SEQ ID NO: 23148 - DNA, 22 bp, synthetic construct
  misc_feature 1..22: note = chemically synthesized
  source 1..22: mol_type = other DNA
taaataaaaaacactaagagac

SEQ ID NO: 23149 - DNA, 22 bp, synthetic construct
  misc_feature 1..22: note = chemically synthesized
  source 1..22: mol_type = other DNA
aaataaaaaacactaagagaca

SEQ ID NO: 23150 - DNA, 22 bp, synthetic construct
  misc_feature 1..22: note = chemically synthesized
  source 1..22: mol_type = other DNA
aataaaaaacactaagagacaa

SEQ ID NO: 23151 - DNA, 22 bp, synthetic construct
  misc_feature 1..22: note = chemically synthesized
  source 1..22: mol_type = other DNA
agagacaaaagtcattacataa

SEQ ID NO: 23152 - DNA, 22 bp, synthetic construct
  misc_feature 1..22: note = chemically synthesized
  source 1..22: mol_type = other DNA
cataatgataaaaggaacaatt

SEQ ID NO: 23153 - DNA, 22 bp, synthetic construct
  misc_feature 1..22: note = chemically synthesized
  source 1..22: mol_type = other DNA
agcaagagtatataacaattct

SEQ ID NO: 23154 - DNA, 22 bp, synthetic construct
  misc_feature 1..22: note = chemically synthesized
  source 1..22: mol_type = other DNA
taaacattcacactcaacacca

SEQ ID NO: 23155 - DNA, 22 bp, synthetic construct
  misc_feature 1..22: note = chemically synthesized
  source 1..22: mol_type = other DNA
aacattcacactcaacaccaga

SEQ ID NO: 23156 - DNA, 22 bp, synthetic construct
  misc_feature 1..22: note = chemically synthesized
  source 1..22: mol_type = other DNA
acactcaacaccagagcatcca

SEQ ID NO: 23157 - DNA, 22 bp, synthetic construct
  misc_feature 1..22: note = chemically synthesized
  source 1..22: mol_type = other DNA
aacaccagagcatccagatatg

SEQ ID NO: 23158 - DNA, 22 bp, synthetic construct
  misc_feature 1..22: note = chemically synthesized
  source 1..22: mol_type = other DNA
ttagatataaagggtgaaatag

SEQ ID NO: 23159 - DNA, 22 bp, synthetic construct
  misc_feature 1..22: note = chemically synthesized
  source 1..22: mol_type = other DNA
gatataaagggtgaaatagaat

SEQ ID NO: 23160 - DNA, 22 bp, synthetic construct
  misc_feature 1..22: note = chemically synthesized
  source 1..22: mol_type = other DNA
gggatttcaacattctaatctc

SEQ ID NO: 23161 - DNA, 22 bp, synthetic construct
  misc_feature 1..22: note = chemically synthesized
  source 1..22: mol_type = other DNA
caacattctaatctcagcatca

SEQ ID NO: 23162 - DNA, 22 bp, synthetic construct
  misc_feature 1..22: note = chemically synthesized
  source 1..22: mol_type = other DNA
aacattctaatctcagcatcag

SEQ ID NO: 23163 - DNA, 22 bp, synthetic construct
  misc_feature 1..22: note = chemically synthesized
  source 1..22: mol_type = other DNA
taatctcagcatcagatagatc

SEQ ID NO: 23164 - DNA, 22 bp, synthetic construct
  misc_feature 1..22: note = chemically synthesized
  source 1..22: mol_type = other DNA
atctcagcatcagatagatcat

SEQ ID NO: 23165 - DNA, 22 bp, synthetic construct
  misc_feature 1..22: note = chemically synthesized
  source 1..22: mol_type = other DNA
agcatcagatagatcatctaga

SEQ ID NO: 23166 - DNA, 22 bp, synthetic construct
  misc_feature 1..22: note = chemically synthesized
  source 1..22: mol_type = other DNA
gacagaaaattaacaaagaaac

SEQ ID NO: 23167 - DNA, 22 bp, synthetic construct
  misc_feature 1..22: note = chemically synthesized
  source 1..22: mol_type = other DNA
acaaagaaacattggatttaaa

SEQ ID NO: 23168 - DNA, 22 bp, synthetic construct
  misc_feature 1..22: note = chemically synthesized
  source 1..22: mol_type = other DNA
gatttaaacttgactttagacc

SEQ ID NO: 23169 - DNA, 22 bp, synthetic construct
  misc_feature 1..22: note = chemically synthesized
  source 1..22: mol_type = other DNA
aaacttgactttagaccaaatg

SEQ ID NO: 23170 - DNA, 22 bp, synthetic construct
  misc_feature 1..22: note = chemically synthesized
  source 1..22: mol_type = other DNA
aacttgactttagaccaaatgg

SEQ ID NO: 23171 - DNA, 22 bp, synthetic construct
  misc_feature 1..22: note = chemically synthesized
  source 1..22: mol_type = other DNA
gactttagaccaaatggatcta

SEQ ID NO: 23172 - DNA, 22 bp, synthetic construct
  misc_feature 1..22: note = chemically synthesized
  source 1..22: mol_type = other DNA
actttagaccaaatggatctaa

SEQ ID NO: 23173 - DNA, 22 bp, synthetic construct
  misc_feature 1..22: note = chemically synthesized
  source 1..22: mol_type = other DNA
tagaccaaatggatctaacatt

SEQ ID NO: 23174 - DNA, 22 bp, synthetic construct
  misc_feature 1..22: note = chemically synthesized
  source 1..22: mol_type = other DNA
agaccaaatggatctaacattt

SEQ ID NO: 23175 - DNA, 22 bp, synthetic construct
  misc_feature 1..22: note = chemically synthesized
  source 1..22: mol_type = other DNA
gaccaaatggatctaacattta

SEQ ID NO: 23176 - DNA, 22 bp, synthetic construct
  misc_feature 1..22: note = chemically synthesized
  source 1..22: mol_type = other DNA
acatttacacaatatttcatcc

SEQ ID NO: 23177 - DNA, 22 bp, synthetic construct
  misc_feature 1..22: note = chemically synthesized
  source 1..22: mol_type = other DNA
acacaatatttcatccaacagc

SEQ ID NO: 23178 - DNA, 22 bp, synthetic construct
  misc_feature 1..22: note = chemically synthesized
  source 1..22: mol_type = other DNA
cacaatatttcatccaacagct

SEQ ID NO: 23179 - DNA, 22 bp, synthetic construct
  misc_feature 1..22: note = chemically synthesized
  source 1..22: mol_type = other DNA
catccaacagctacagaatata

SEQ ID NO: 23180 - DNA, 22 bp, synthetic construct
  misc_feature 1..22: note = chemically synthesized
  source 1..22: mol_type = other DNA
atccaacagctacagaatatat

SEQ ID NO: 23181 - DNA, 22 bp, synthetic construct
  misc_feature 1..22: note = chemically synthesized
  source 1..22: mol_type = other DNA
cagaatatatttatctcatcag

SEQ ID NO: 23182 - DNA, 22 bp, synthetic construct
  misc_feature 1..22: note = chemically synthesized
  source 1..22: mol_type = other DNA
atctcatcagcacatgacgcat

SEQ ID NO: 23183 - DNA, 22 bp, synthetic construct
  misc_feature 1..22: note = chemically synthesized
  source 1..22: mol_type = other DNA
tctcatcagcacatgacgcatt

SEQ ID NO: 23184 - DNA, 22 bp, synthetic construct
  misc_feature 1..22: note = chemically synthesized
  source 1..22: mol_type = other DNA
atcagcacatgacgcattcccc

SEQ ID NO: 23185 - DNA, 22 bp, synthetic construct
  misc_feature 1..22: note = chemically synthesized
  source 1..22: mol_type = other DNA
cccaggatacaccatatgttag

SEQ ID NO: 23186 - DNA, 22 bp, synthetic construct
  misc_feature 1..22: note = chemically synthesized
  source 1..22: mol_type = other DNA
gaacacaaaagaagtctcaact

SEQ ID NO: 23187 - DNA, 22 bp, synthetic construct
  misc_feature 1..22: note = chemically synthesized
  source 1..22: mol_type = other DNA
aactaatttgaaatatttgaaa

SEQ ID NO: 23188 - DNA, 22 bp, synthetic construct
  misc_feature 1..22: note = chemically synthesized
  source 1..22: mol_type = other DNA
atttgaaatatttgaaatcata

SEQ ID NO: 23189 - DNA, 22 bp, synthetic construct
  misc_feature 1..22: note = chemically synthesized
  source 1..22: mol_type = other DNA
gaaatatttgaaatcatattaa

SEQ ID NO: 23190 - DNA, 22 bp, synthetic construct
  misc_feature 1..22: note = chemically synthesized
  source 1..22: mol_type = other DNA
aaatatttgaaatcatattaag

SEQ ID NO: 23191 - DNA, 22 bp, synthetic construct
  misc_feature 1..22: note = chemically synthesized
  source 1..22: mol_type = other DNA
gaaatcatattaagcatcttct

SEQ ID NO: 23192 - DNA, 22 bp, synthetic construct
  misc_feature 1..22: note = chemically synthesized
  source 1..22: mol_type = other DNA
aaatcatattaagcatcttctc

SEQ ID NO: 23193 - DNA, 22 bp, synthetic construct
  misc_feature 1..22: note = chemically synthesized
  source 1..22: mol_type = other DNA
agcatcttctcagaccacaatg

SEQ ID NO: 23194 - DNA, 22 bp, synthetic construct
  misc_feature 1..22: note = chemically synthesized
  source 1..22: mol_type = other DNA
ctcagaccacaatggaataaaa

SEQ ID NO: 23195 - DNA, 22 bp, synthetic construct
  misc_feature 1..22: note = chemically synthesized
  source 1..22: mol_type = other DNA
tcagaccacaatggaataaaac

SEQ ID NO: 23196 - DNA, 22 bp, synthetic construct
  misc_feature 1..22: note = chemically synthesized
  source 1..22: mol_type = other DNA
agaccacaatggaataaaacta

SEQ ID NO: 23197 - DNA, 22 bp, synthetic construct
  misc_feature 1..22: note = chemically synthesized
  source 1..22: mol_type = other DNA
gaaatcaataacaagaaaaact

SEQ ID NO: 23198 - DNA, 22 bp, synthetic construct
  misc_feature 1..22: note = chemically synthesized
  source 1..22: mol_type = other DNA
taaaacctatacaaatacatgg

SEQ ID NO: 23199 - DNA, 22 bp, synthetic construct
  misc_feature 1..22: note = chemically synthesized
  source 1..22: mol_type = other DNA
aaaacctatacaaatacatgga

SEQ ID NO: 23200 - DNA, 22 bp, synthetic construct
  misc_feature 1..22: note = chemically synthesized
  source 1..22: mol_type = other DNA
aaacctatacaaatacatggaa

SEQ ID NO: 23201 - DNA, 22 bp, synthetic construct
  misc_feature 1..22: note = chemically synthesized
  source 1..22: mol_type = other DNA
tacaaatacatggaaattaaac

SEQ ID NO: 23202 - DNA, 22 bp, synthetic construct
  misc_feature 1..22: note = chemically synthesized
  source 1..22: mol_type = other DNA
aacaacatgctcctgaatgaac

SEQ ID NO: 23203 - DNA, 22 bp, synthetic construct
  misc_feature 1..22: note = chemically synthesized
  source 1..22: mol_type = other DNA
ctgaatgaacgttatgtcaaga

SEQ ID NO: 23204 - DNA, 22 bp, synthetic construct
  misc_feature 1..22: note = chemically synthesized
  source 1..22: mol_type = other DNA
aatgaacgttatgtcaagaaga

SEQ ID NO: 23205 - DNA, 22 bp, synthetic construct
  misc_feature 1..22: note = chemically synthesized
  source 1..22: mol_type = other DNA
tgtcaagaagaaaattaagaag

SEQ ID NO: 23206 - DNA, 22 bp, synthetic construct
  misc_feature 1..22: note = chemically synthesized
  source 1..22: mol_type = other DNA
agaaggaaatcaaaaatttttt

SEQ ID NO: 23207 - DNA, 22 bp, synthetic construct
  misc_feature 1..22: note = chemically synthesized
  source 1..22: mol_type = other DNA
tttgaaacaaatgaaaattgaa

SEQ ID NO: 23208 - DNA, 22 bp, synthetic construct
  misc_feature 1..22: note = chemically synthesized
  source 1..22: mol_type = other DNA
ttgaaacaaatgaaaattgaaa

SEQ ID NO: 23209 - DNA, 22 bp, synthetic construct
  misc_feature 1..22: note = chemically synthesized
  source 1..22: mol_type = other DNA
tgaaacaaatgaaaattgaaat

SEQ ID NO: 23210 - DNA, 22 bp, synthetic construct
  misc_feature 1..22: note = chemically synthesized
  source 1..22: mol_type = other DNA
gaaacaaatgaaaattgaaata

SEQ ID NO: 23211 - DNA, 22 bp, synthetic construct
  misc_feature 1..22: note = chemically synthesized
  source 1..22: mol_type = other DNA
aaacaaatgaaaattgaaatac

SEQ ID NO: 23212 - DNA, 22 bp, synthetic construct
  misc_feature 1..22: note = chemically synthesized
  source 1..22: mol_type = other DNA
aaatacaacataggaaaagcca

SEQ ID NO: 23213 - DNA, 22 bp, synthetic construct
  misc_feature 1..22: note = chemically synthesized
  source 1..22: mol_type = other DNA
agagagaagcttatcaataaac

SEQ ID NO: 23214 - DNA, 22 bp, synthetic construct
  misc_feature 1..22: note = chemically synthesized
  source 1..22: mol_type = other DNA
atcaataaacacttaaattaaa

SEQ ID NO: 23215 - DNA, 22 bp, synthetic construct
  misc_feature 1..22: note = chemically synthesized
  source 1..22: mol_type = other DNA
tcaataaacacttaaattaaaa

SEQ ID NO: 23216 - DNA, 22 bp, synthetic construct
  misc_feature 1..22: note = chemically synthesized
  source 1..22: mol_type = other DNA
aaattaaaaacatagaaagatt

SEQ ID NO: 23217 - DNA, 22 bp, synthetic construct
  misc_feature 1..22: note = chemically synthesized
  source 1..22: mol_type = other DNA
aattaaaaacatagaaagattt

SEQ ID NO: 23218 - DNA, 22 bp, synthetic construct
  misc_feature 1..22: note = chemically synthesized
  source 1..22: mol_type = other DNA
aaaacatagaaagatttcaaat

SEQ ID NO: 23219 - DNA, 22 bp, synthetic construct
  misc_feature 1..22: note = chemically synthesized
  source 1..22: mol_type = other DNA
caaatatataatctaatcatgt

SEQ ID NO: 23220 - DNA, 22 bp, synthetic construct
  misc_feature 1..22: note = chemically synthesized
  source 1..22: mol_type = other DNA
aaatatataatctaatcatgta

SEQ ID NO: 23221 - DNA, 22 bp, synthetic construct
  misc_feature 1..22: note = chemically synthesized
  source 1..22: mol_type = other DNA
atcatgtacctcaacaagctag

SEQ ID NO: 23222 - DNA, 22 bp, synthetic construct
  misc_feature 1..22: note = chemically synthesized
  source 1..22: mol_type = other DNA
aacaagctagaaaagcaagaac

SEQ ID NO: 23223 - DNA, 22 bp, synthetic construct
  misc_feature 1..22: note = chemically synthesized
  source 1..22: mol_type = other DNA
gaaaagcaagaacaaaacccaa

SEQ ID NO: 23224 - DNA, 22 bp, synthetic construct
  misc_feature 1..22: note = chemically synthesized
  source 1..22: mol_type = other DNA
gcagaaggaaagaaaaaatgaa

SEQ ID NO: 23225 - DNA, 22 bp, synthetic construct
  misc_feature 1..22: note = chemically synthesized
  source 1..22: mol_type = other DNA
aatgaaatagagaaaaacaaca

SEQ ID NO: 23226 - DNA, 22 bp, synthetic construct
  misc_feature 1..22: note = chemically synthesized
  source 1..22: mol_type = other DNA
atgaaatagagaaaaacaacaa

SEQ ID NO: 23227 - DNA, 22 bp, synthetic construct
  misc_feature 1..22: note = chemically synthesized
  source 1..22: mol_type = other DNA
gcaaaatgaaaagttgttattt

SEQ ID NO: 23228 - DNA, 22 bp, synthetic construct
  misc_feature 1..22: note = chemically synthesized
  source 1..22: mol_type = other DNA
ttatttaaaaaagataaaatgg

SEQ ID NO: 23229 - DNA, 22 bp, synthetic construct
  misc_feature 1..22: note = chemically synthesized
  source 1..22: mol_type = other DNA
tttaaaaaagataaaatggata

SEQ ID NO: 23230 - DNA, 22 bp, synthetic construct
  misc_feature 1..22: note = chemically synthesized
  source 1..22: mol_type = other DNA
aaaaaagataaaatggatatag

SEQ ID NO: 23231 - DNA, 22 bp, synthetic construct
  misc_feature 1..22: note = chemically synthesized
  source 1..22: mol_type = other DNA
aaaaagataaaatggatatagc

SEQ ID NO: 23232 - DNA, 22 bp, synthetic construct
  misc_feature 1..22: note = chemically synthesized
  source 1..22: mol_type = other DNA
tagctagactaaccaagaaaaa

SEQ ID NO: 23233 - DNA, 22 bp, synthetic construct
  misc_feature 1..22: note = chemically synthesized
  source 1..22: mol_type = other DNA
gctagactaaccaagaaaaaga

SEQ ID NO: 23234 - DNA, 22 bp, synthetic construct
  misc_feature 1..22: note = chemically synthesized
  source 1..22: mol_type = other DNA
gactaaccaagaaaaagagaag

SEQ ID NO: 23235 - DNA, 22 bp, synthetic construct
  misc_feature 1..22: note = chemically synthesized
  source 1..22: mol_type = other DNA
accaagaaaaagagaagagact

SEQ ID NO: 23236 - DNA, 22 bp, synthetic construct
  misc_feature 1..22: note = chemically synthesized
  source 1..22: mol_type = other DNA
aaataaagaaaatcagaaataa

SEQ ID NO: 23237 - DNA, 22 bp, synthetic construct
  misc_feature 1..22: note = chemically synthesized
  source 1..22: mol_type = other DNA
caaccgataccacagaaataga

SEQ ID NO: 23238 - DNA, 22 bp, synthetic construct
  misc_feature 1..22: note = chemically synthesized
  source 1..22: mol_type = other DNA
tcagagactattatgaacaacc

SEQ ID NO: 23239 - DNA, 22 bp, synthetic construct
  misc_feature 1..22: note = chemically synthesized
  source 1..22: mol_type = other DNA
ttatgaacaaccatacactaaa

SEQ ID NO: 23240 - DNA, 22 bp, synthetic construct
  misc_feature 1..22: note = chemically synthesized
  source 1..22: mol_type = other DNA
tgaacaaccatacactaaaaaa

SEQ ID NO: 23241 - DNA, 22 bp, synthetic construct
  misc_feature 1..22: note = chemically synthesized
  source 1..22: mol_type = other DNA
aaaaactgaaaaatctagagga

SEQ ID NO: 23242 - DNA, 22 bp, synthetic construct
  misc_feature 1..22: note = chemically synthesized
  source 1..22: mol_type = other DNA
aaaaatctagaggaaattaata

SEQ ID NO: 23243 - DNA, 22 bp, synthetic construct
  misc_feature 1..22: note = chemically synthesized
  source 1..22: mol_type = other DNA
gaggaaattaataaatttctgg

SEQ ID NO: 23244 - DNA, 22 bp, synthetic construct
  misc_feature 1..22: note = chemically synthesized
  source 1..22: mol_type = other DNA
ataaatttctggacacatacca

SEQ ID NO: 23245 - DNA, 22 bp, synthetic construct
  misc_feature 1..22: note = chemically synthesized
  source 1..22: mol_type = other DNA
ctggacacataccacctaccaa

SEQ ID NO: 23246 - DNA, 22 bp, synthetic construct
  misc_feature 1..22: note = chemically synthesized
  source 1..22: mol_type = other DNA
tggacacataccacctaccaag

SEQ ID NO: 23247 - DNA, 22 bp, synthetic construct
  misc_feature 1..22: note = chemically synthesized
  source 1..22: mol_type = other DNA
gacacataccacctaccaagat

SEQ ID NO: 23248 - DNA, 22 bp, synthetic construct
  misc_feature 1..22: note = chemically synthesized
  source 1..22: mol_type = other DNA
ccaagattgaattaagaaagaa

SEQ ID NO: 23249 - DNA, 22 bp, synthetic construct
  misc_feature 1..22: note = chemically synthesized
  source 1..22: mol_type = other DNA
aattaagaaagaatagaaaacc

SEQ ID NO: 23250 - DNA, 22 bp, synthetic construct
  misc_feature 1..22: note = chemically synthesized
  source 1..22: mol_type = other DNA
agaaagaatagaaaacctgaac

SEQ ID NO: 23251 - DNA, 22 bp, synthetic construct
  misc_feature 1..22: note = chemically synthesized
  source 1..22: mol_type = other DNA
aacagaccagtaatgaataatg

SEQ ID NO: 23252 - DNA, 22 bp, synthetic construct
  misc_feature 1..22: note = chemically synthesized
  source 1..22: mol_type = other DNA
aatcagtagtaaaaagtctccc

SEQ ID NO: 23253 - DNA, 22 bp, synthetic construct
  misc_feature 1..22: note = chemically synthesized
  source 1..22: mol_type = other DNA
ccaaaaaagaaaatttcaagac

SEQ ID NO: 23254 - DNA, 22 bp, synthetic construct
  misc_feature 1..22: note = chemically synthesized
  source 1..22: mol_type = other DNA
caagaccagatggctttactgt

SEQ ID NO: 23255 - DNA, 22 bp, synthetic construct
  misc_feature 1..22: note = chemically synthesized
  source 1..22: mol_type = other DNA
aagaccagatggctttactgtc

SEQ ID NO: 23256 - DNA, 22 bp, synthetic construct
  misc_feature 1..22: note = chemically synthesized
  source 1..22: mol_type = other DNA
tactgtcaaattttaccaaact

SEQ ID NO: 23257 - DNA, 22 bp, synthetic construct
  misc_feature 1..22: note = chemically synthesized
  source 1..22: mol_type = other DNA
actgtcaaattttaccaaactt

SEQ ID NO: 23258 - DNA, 22 bp, synthetic construct
  misc_feature 1..22: note = chemically synthesized
  source 1..22: mol_type = other DNA
ctgtcaaattttaccaaacttt

SEQ ID NO: 23259 - DNA, 22 bp, synthetic construct
  misc_feature 1..22: note = chemically synthesized
  source 1..22: mol_type = other DNA
tcaaattttaccaaactttcaa

SEQ ID NO: 23260 - DNA, 22 bp, synthetic construct
  misc_feature 1..22: note = chemically synthesized
  source 1..22: mol_type = other DNA
taccaaactttcaaagaaaact

SEQ ID NO: 23261 - DNA, 22 bp, synthetic construct
  misc_feature 1..22: note = chemically synthesized
  source 1..22: mol_type = other DNA
accaaactttcaaagaaaacta

SEQ ID NO: 23262 - DNA, 22 bp, synthetic construct
  misc_feature 1..22: note = chemically synthesized
  source 1..22: mol_type = other DNA
ccaaactttcaaagaaaactaa

SEQ ID NO: 23263 - DNA, 22 bp, synthetic construct
  misc_feature 1..22: note = chemically synthesized
  source 1..22: mol_type = other DNA
tcaaagaaaactaacaagtctc

SEQ ID NO: 23264 - DNA, 22 bp, synthetic construct
  misc_feature 1..22: note = chemically synthesized
  source 1..22: mol_type = other DNA
caaagaaaactaacaagtctcc

SEQ ID NO: 23265 - DNA, 22 bp, synthetic construct
  misc_feature 1..22: note = chemically synthesized
  source 1..22: mol_type = other DNA
aaagaaaactaacaagtctcct

SEQ ID NO: 23266 - DNA, 22 bp, synthetic construct
  misc_feature 1..22: note = chemically synthesized
  source 1..22: mol_type = other DNA
acaagtctccttaaattctttt

SEQ ID NO: 23267 - DNA, 22 bp, synthetic construct
  misc_feature 1..22: note = chemically synthesized
  source 1..22: mol_type = other DNA
cttaaattcttttaaaaattaa

SEQ ID NO: 23268 - DNA, 22 bp, synthetic construct
  misc_feature 1..22: note = chemically synthesized
  source 1..22: mol_type = other DNA
aaattcttttaaaaattaaaca

SEQ ID NO: 23269 - DNA, 22 bp, synthetic construct
  misc_feature 1..22: note = chemically synthesized
  source 1..22: mol_type = other DNA
aattcttttaaaaattaaacag

SEQ ID NO: 23270 - DNA, 22 bp, synthetic construct
  misc_feature 1..22: note = chemically synthesized
  source 1..22: mol_type = other DNA
ttttaaaaattaaacaggaagg

SEQ ID NO: 23271 - DNA, 22 bp, synthetic construct
  misc_feature 1..22: note = chemically synthesized
  source 1..22: mol_type = other DNA
ttaaaaattaaacaggaaggaa

SEQ ID NO: 23272 - DNA, 22 bp, synthetic construct
  misc_feature 1..22: note = chemically synthesized
  source 1..22: mol_type = other DNA
taaaaattaaacaggaaggaat

SEQ ID NO: 23273 - DNA, 22 bp, synthetic construct
  misc_feature 1..22: note = chemically synthesized
  source 1..22: mol_type = other DNA
aaaaattaaacaggaaggaatt

SEQ ID NO: 23274 - DNA, 22 bp, synthetic construct
  misc_feature 1..22: note = chemically synthesized
  source 1..22: mol_type = other DNA
aaaattaaacaggaaggaattc

SEQ ID NO: 23275 - DNA, 22 bp, synthetic construct
  misc_feature 1..22: note = chemically synthesized
  source 1..22: mol_type = other DNA
aacaggaaggaattctccctaa

SEQ ID NO: 23276 - DNA, 22 bp, synthetic construct
  misc_feature 1..22: note = chemically synthesized
  source 1..22: mol_type = other DNA
tccctaactcattctctgaggc

SEQ ID NO: 23277 - DNA, 22 bp, synthetic construct
  misc_feature 1..22: note = chemically synthesized
  source 1..22: mol_type = other DNA
cctaactcattctctgaggcca

SEQ ID NO: 23278 - DNA, 22 bp, synthetic construct
  misc_feature 1..22: note = chemically synthesized
  source 1..22: mol_type = other DNA
actcattctctgaggccagtat

SEQ ID NO: 23279 - DNA, 22 bp, synthetic construct
  misc_feature 1..22: note = chemically synthesized
  source 1..22: mol_type = other DNA
attctctgaggccagtattatc

SEQ ID NO: 23280 - DNA, 22 bp, synthetic construct
  misc_feature 1..22: note = chemically synthesized
  source 1..22: mol_type = other DNA
tctgaggccagtattatcctga

SEQ ID NO: 23281 - DNA, 22 bp, synthetic construct
  misc_feature 1..22: note = chemically synthesized
  source 1..22: mol_type = other DNA
tgaggccagtattatcctgatt

SEQ ID NO: 23282 - DNA, 22 bp, synthetic construct
  misc_feature 1..22: note = chemically synthesized
  source 1..22: mol_type = other DNA
aggccagtattatcctgattcc

SEQ ID NO: 23283 - DNA, 22 bp, synthetic construct
  misc_feature 1..22: note = chemically synthesized
  source 1..22: mol_type = other DNA
tcctgattccataaccagacaa

SEQ ID NO: 23284 - DNA, 22 bp, synthetic construct
  misc_feature 1..22: note = chemically synthesized
  source 1..22: mol_type = other DNA
attccataaccagacaaggatg

SEQ ID NO: 23285 - DNA, 22 bp, synthetic construct
  misc_feature 1..22: note = chemically synthesized
  source 1..22: mol_type = other DNA
cataaccagacaaggatgcaag

SEQ ID NO: 23286 - DNA, 22 bp, synthetic construct
  misc_feature 1..22: note = chemically synthesized
  source 1..22: mol_type = other DNA
caggtcaatatccctgatggaa

SEQ ID NO: 23287 - DNA, 22 bp, synthetic construct
  misc_feature 1..22: note = chemically synthesized
  source 1..22: mol_type = other DNA
atggaacataggtgtgaaaatc

SEQ ID NO: 23288 - DNA, 22 bp, synthetic construct
  misc_feature 1..22: note = chemically synthesized
  source 1..22: mol_type = other DNA
aacaaaatactagcaaactgaa

SEQ ID NO: 23289 - DNA, 22 bp, synthetic construct
  misc_feature 1..22: note = chemically synthesized
  source 1..22: mol_type = other DNA
gcaaactgaatccaacagtaca

SEQ ID NO: 23290 - DNA, 22 bp, synthetic construct
  misc_feature 1..22: note = chemically synthesized
  source 1..22: mol_type = other DNA
aatccaacagtacatccaaaag

SEQ ID NO: 23291 - DNA, 22 bp, synthetic construct
  misc_feature 1..22: note = chemically synthesized
  source 1..22: mol_type = other DNA
atactagggttgcaagaacagt

SEQ ID NO: 23292 - DNA, 22 bp, synthetic construct
  misc_feature 1..22: note = chemically synthesized
  source 1..22: mol_type = other DNA
tactagggttgcaagaacagtt

SEQ ID NO: 23293 - DNA, 22 bp, synthetic construct
  misc_feature 1..22: note = chemically synthesized
  source 1..22: mol_type = other DNA
gggttgcaagaacagttcaaat

SEQ ID NO: 23294 - DNA, 22 bp, synthetic construct
  misc_feature 1..22: note = chemically synthesized
  source 1..22: mol_type = other DNA
caagaacagttcaaatcaataa

SEQ ID NO: 23295 - DNA, 22 bp, synthetic construct
  misc_feature 1..22: note = chemically synthesized
  source 1..22: mol_type = other DNA
aaatcaataaatgtgatacatc

SEQ ID NO: 23296 - DNA, 22 bp, synthetic construct
  misc_feature 1..22: note = chemically synthesized
  source 1..22: mol_type = other DNA
aatagatacagaaaaagtattt

SEQ ID NO: 23297 - DNA, 22 bp, synthetic construct
  misc_feature 1..22: note = chemically synthesized
  source 1..22: mol_type = other DNA
gataaaatttaacattccttca

SEQ ID NO: 23298 - DNA, 22 bp, synthetic construct
  misc_feature 1..22: note = chemically synthesized
  source 1..22: mol_type = other DNA
ataaaatttaacattccttcat

SEQ ID NO: 23299 - DNA, 22 bp, synthetic construct
  misc_feature 1..22: note = chemically synthesized
  source 1..22: mol_type = other DNA
aacattccttcatgataaaaac

SEQ ID NO: 23300 - DNA, 22 bp, synthetic construct
  misc_feature 1..22: note = chemically synthesized
  source 1..22: mol_type = other DNA
acattccttcatgataaaaact

SEQ ID NO: 23301 - DNA, 22 bp, synthetic construct
  misc_feature 1..22: note = chemically synthesized
  source 1..22: mol_type = other DNA
cttcatgataaaaactatctgc

SEQ ID NO: 23302 - DNA, 22 bp, synthetic construct
  misc_feature 1..22: note = chemically synthesized
  source 1..22: mol_type = other DNA
catgataaaaactatctgcagc

SEQ ID NO: 23303 - DNA, 22 bp, synthetic construct
  misc_feature 1..22: note = chemically synthesized
  source 1..22: mol_type = other DNA
atgataaaaactatctgcagcc

SEQ ID NO: 23304 - DNA, 22 bp, synthetic construct
  misc_feature 1..22: note = chemically synthesized
  source 1..22: mol_type = other DNA
tctgcagccaatcatagaagga

SEQ ID NO: 23305 - DNA, 22 bp, synthetic construct
  misc_feature 1..22: note = chemically synthesized
  source 1..22: mol_type = other DNA
cagccaatcatagaaggaacat

SEQ ID NO: 23306 - DNA, 22 bp, synthetic construct
  misc_feature 1..22: note = chemically synthesized
  source 1..22: mol_type = other DNA
aatataataaaagtcatatatg

SEQ ID NO: 23307 - DNA, 22 bp, synthetic construct
  misc_feature 1..22: note = chemically synthesized
  source 1..22: mol_type = other DNA
acatcatactgaattgggaaaa

SEQ ID NO: 23308 - DNA, 22 bp, synthetic construct
  misc_feature 1..22: note = chemically synthesized
  source 1..22: mol_type = other DNA
aattgggaaaagctggaagcct

SEQ ID NO: 23309 - DNA, 22 bp, synthetic construct
  misc_feature 1..22: note = chemically synthesized
  source 1..22: mol_type = other DNA
ggaaaagctggaagcctttcct

SEQ ID NO: 23310 - DNA, 22 bp, synthetic construct
  misc_feature 1..22: note = chemically synthesized
  source 1..22: mol_type = other DNA
gaagcctttcctctaagaactg

SEQ ID NO: 23311 - DNA, 22 bp, synthetic construct
  misc_feature 1..22: note = chemically synthesized
  source 1..22: mol_type = other DNA
tcctctaagaactgaaacaaaa

SEQ ID NO: 23312 - DNA, 22 bp, synthetic construct
  misc_feature 1..22: note = chemically synthesized
  source 1..22: mol_type = other DNA
cctctaagaactgaaacaaaat

SEQ ID NO: 23313 - DNA, 22 bp, synthetic construct
  misc_feature 1..22: note = chemically synthesized
  source 1..22: mol_type = other DNA
ctctaagaactgaaacaaaata

SEQ ID NO: 23314 - DNA, 22 bp, synthetic construct
  misc_feature 1..22: note = chemically synthesized
  source 1..22: mol_type = other DNA
taagaactgaaacaaaataagg

SEQ ID NO: 23315 - DNA, 22 bp, synthetic construct
  misc_feature 1..22: note = chemically synthesized
  source 1..22: mol_type = other DNA
agaactgaaacaaaataaggat

SEQ ID NO: 23316 - DNA, 22 bp, synthetic construct
  misc_feature 1..22: note = chemically synthesized
  source 1..22: mol_type = other DNA
aaacaaaataaggatgcccact

SEQ ID NO: 23317 - DNA, 22 bp, synthetic construct
  misc_feature 1..22: note = chemically synthesized
  source 1..22: mol_type = other DNA
ccatcactcctattcaatataa

SEQ ID NO: 23318 - DNA, 22 bp, synthetic construct
  misc_feature 1..22: note = chemically synthesized
  source 1..22: mol_type = other DNA
catcactcctattcaatataat

SEQ ID NO: 23319 - DNA, 22 bp, synthetic construct
  misc_feature 1..22: note = chemically synthesized
  source 1..22: mol_type = other DNA
ctattcaatataatactggaag

SEQ ID NO: 23320 - DNA, 22 bp, synthetic construct
  misc_feature 1..22: note = chemically synthesized
  source 1..22: mol_type = other DNA
ttcaatataatactggaagtcc

SEQ ID NO: 23321 - DNA, 22 bp, synthetic construct
  misc_feature 1..22: note = chemically synthesized
  source 1..22: mol_type = other DNA
aatataatactggaagtcctag

SEQ ID NO: 23322 - DNA, 22 bp, synthetic construct
  misc_feature 1..22: note = chemically synthesized
  source 1..22: mol_type = other DNA
gaagtcctagccacagctttca

SEQ ID NO: 23323 - DNA, 22 bp, synthetic construct
  misc_feature 1..22: note = chemically synthesized
  source 1..22: mol_type = other DNA
gccacagctttcaggtcagaga

SEQ ID NO: 23324 - DNA, 22 bp, synthetic construct
  misc_feature 1..22: note = chemically synthesized
  source 1..22: mol_type = other DNA
tcaggtcagagaaagaaagaaa

SEQ ID NO: 23325 - DNA, 22 bp, synthetic construct
  misc_feature 1..22: note = chemically synthesized
  source 1..22: mol_type = other DNA
caggtcagagaaagaaagaaag

SEQ ID NO: 23326 - DNA, 22 bp, synthetic construct
  misc_feature 1..22: note = chemically synthesized
  source 1..22: mol_type = other DNA
aggtcagagaaagaaagaaaga

SEQ ID NO: 23327 - DNA, 22 bp, synthetic construct
  misc_feature 1..22: note = chemically synthesized
  source 1..22: mol_type = other DNA
tccatctttccagatgacatga

SEQ ID NO: 23328 - DNA, 22 bp, synthetic construct
  misc_feature 1..22: note = chemically synthesized
  source 1..22: mol_type = other DNA
tccagatgacatgattttatac

SEQ ID NO: 23329 - DNA, 22 bp, synthetic construct
  misc_feature 1..22: note = chemically synthesized
  source 1..22: mol_type = other DNA
ccagatgacatgattttatacc

SEQ ID NO: 23330 - DNA, 22 bp, synthetic construct
  misc_feature 1..22: note = chemically synthesized
  source 1..22: mol_type = other DNA
cagatgacatgattttatacct

SEQ ID NO: 23331 - DNA, 22 bp, synthetic construct
  misc_feature 1..22: note = chemically synthesized
  source 1..22: mol_type = other DNA
tatacctagaaaaaccaagact

SEQ ID NO: 23332 - DNA, 22 bp, synthetic construct
  misc_feature 1..22: note = chemically synthesized
  source 1..22: mol_type = other DNA
atacctagaaaaaccaagactc

SEQ ID NO: 23333 - DNA, 22 bp, synthetic construct
  misc_feature 1..22: note = chemically synthesized
  source 1..22: mol_type = other DNA
tacctagaaaaaccaagactcc

SEQ ID NO: 23334 - DNA, 22 bp, synthetic construct
  misc_feature 1..22: note = chemically synthesized
  source 1..22: mol_type = other DNA
gaaaaaccaagactccaccaaa

SEQ ID NO: 23335 - DNA, 22 bp, synthetic construct
  misc_feature 1..22: note = chemically synthesized
  source 1..22: mol_type = other DNA
caccaaagcactcttagcgctg

SEQ ID NO: 23336 - DNA, 22 bp, synthetic construct
  misc_feature 1..22: note = chemically synthesized
  source 1..22: mol_type = other DNA
ttagcgctgaaaaataaattca

SEQ ID NO: 23337 - DNA, 22 bp, synthetic construct
  misc_feature 1..22: note = chemically synthesized
  source 1..22: mol_type = other DNA
agcgctgaaaaataaattcagt

SEQ ID NO: 23338 - DNA, 22 bp, synthetic construct
  misc_feature 1..22: note = chemically synthesized
  source 1..22: mol_type = other DNA
gcgctgaaaaataaattcagta

SEQ ID NO: 23339 - DNA, 22 bp, synthetic construct
  misc_feature 1..22: note = chemically synthesized
  source 1..22: mol_type = other DNA
aaaaataaattcagtaaagtta

SEQ ID NO: 23340 - DNA, 22 bp, synthetic construct
  misc_feature 1..22: note = chemically synthesized
  source 1..22: mol_type = other DNA
agtaaagttacaggagacaaaa

SEQ ID NO: 23341 - DNA, 22 bp, synthetic construct
  misc_feature 1..22: note = chemically synthesized
  source 1..22: mol_type = other DNA
caggagacaaaatcagcatatg

SEQ ID NO: 23342 - DNA, 22 bp, synthetic construct
  misc_feature 1..22: note = chemically synthesized
  source 1..22: mol_type = other DNA
ctacacaccaataataaactag

SEQ ID NO: 23343 - DNA, 22 bp, synthetic construct
  misc_feature 1..22: note = chemically synthesized
  source 1..22: mol_type = other DNA
tacacaccaataataaactagc

SEQ ID NO: 23344 - DNA, 22 bp, synthetic construct
  misc_feature 1..22: note = chemically synthesized
  source 1..22: mol_type = other DNA
cacaccaataataaactagctg

SEQ ID NO: 23345 - DNA, 22 bp, synthetic construct
  misc_feature 1..22: note = chemically synthesized
  source 1..22: mol_type = other DNA
gctgagaaggaaattaagaagg

SEQ ID NO: 23346 - DNA, 22 bp, synthetic construct
  misc_feature 1..22: note = chemically synthesized
  source 1..22: mol_type = other DNA
agaaggaaattaagaaggcaat

SEQ ID NO: 23347 - DNA, 22 bp, synthetic construct
  misc_feature 1..22: note = chemically synthesized
  source 1..22: mol_type = other DNA
agaaggcaatcccatttacaat

SEQ ID NO: 23348 - DNA, 22 bp, synthetic construct
  misc_feature 1..22: note = chemically synthesized
  source 1..22: mol_type = other DNA
acaatagctaaaaaataaaata

SEQ ID NO: 23349 - DNA, 22 bp, synthetic construct
  misc_feature 1..22: note = chemically synthesized
  source 1..22: mol_type = other DNA
caatagctaaaaaataaaatat

SEQ ID NO: 23350 - DNA, 22 bp, synthetic construct
  misc_feature 1..22: note = chemically synthesized
  source 1..22: mol_type = other DNA
aaaaataaaatatttagggata

SEQ ID NO: 23351 - DNA, 22 bp, synthetic construct
  misc_feature 1..22: note = chemically synthesized
  source 1..22: mol_type = other DNA
agggataaatttaaccaaggaa

SEQ ID NO: 23352 - DNA, 22 bp, synthetic construct
  misc_feature 1..22: note = chemically synthesized
  source 1..22: mol_type = other DNA
gggataaatttaaccaaggaac

SEQ ID NO: 23353 - DNA, 22 bp, synthetic construct
  misc_feature 1..22: note = chemically synthesized
  source 1..22: mol_type = other DNA
aaccaaggaaccgaaaaacctc

SEQ ID NO: 23354 - DNA, 22 bp, synthetic construct
  misc_feature 1..22: note = chemically synthesized
  source 1..22: mol_type = other DNA
accaaggaaccgaaaaacctct

SEQ ID NO: 23355 - DNA, 22 bp, synthetic construct
  misc_feature 1..22: note = chemically synthesized
  source 1..22: mol_type = other DNA
tattcggaaaactacaaaacac

SEQ ID NO: 23356 - DNA, 22 bp, synthetic construct
  misc_feature 1..22: note = chemically synthesized
  source 1..22: mol_type = other DNA
ttcggaaaactacaaaacactg

SEQ ID NO: 23357 - DNA, 22 bp, synthetic construct
  misc_feature 1..22: note = chemically synthesized
  source 1..22: mol_type = other DNA
ggaaaactacaaaacactgata

SEQ ID NO: 23358 - DNA, 22 bp, synthetic construct
  misc_feature 1..22: note = chemically synthesized
  source 1..22: mol_type = other DNA
caaaacactgataaaagaattg

SEQ ID NO: 23359 - DNA, 22 bp, synthetic construct
  misc_feature 1..22: note = chemically synthesized
  source 1..22: mol_type = other DNA
ataaaagaattgaaaaggacag

SEQ ID NO: 23360 - DNA, 22 bp, synthetic construct
  misc_feature 1..22: note = chemically synthesized
  source 1..22: mol_type = other DNA
aaaaggacagaaacaaatggag

SEQ ID NO: 23361 - DNA, 22 bp, synthetic construct
  misc_feature 1..22: note = chemically synthesized
  source 1..22: mol_type = other DNA
tgttcatggatcagaaaaatta

SEQ ID NO: 23362 - DNA, 22 bp, synthetic construct
  misc_feature 1..22: note = chemically synthesized
  source 1..22: mol_type = other DNA
atggatcagaaaaattaatatt

SEQ ID NO: 23363 - DNA, 22 bp, synthetic construct
  misc_feature 1..22: note = chemically synthesized
  source 1..22: mol_type = other DNA
atattgttaaaatggccatact

SEQ ID NO: 23364 - DNA, 22 bp, synthetic construct
  misc_feature 1..22: note = chemically synthesized
  source 1..22: mol_type = other DNA
ttaaaatggccatactacccaa

SEQ ID NO: 23365 - DNA, 22 bp, synthetic construct
  misc_feature 1..22: note = chemically synthesized
  source 1..22: mol_type = other DNA
aaatggccatactacccaaagc

SEQ ID NO: 23366 - DNA, 22 bp, synthetic construct
  misc_feature 1..22: note = chemically synthesized
  source 1..22: mol_type = other DNA
cccaaagcaatctacagattct

SEQ ID NO: 23367 - DNA, 22 bp, synthetic construct
  misc_feature 1..22: note = chemically synthesized
  source 1..22: mol_type = other DNA
cagattctatatgaccgctatc

SEQ ID NO: 23368 - DNA, 22 bp, synthetic construct
  misc_feature 1..22: note = chemically synthesized
  source 1..22: mol_type = other DNA
tatatgaccgctatcaaaatag

SEQ ID NO: 23369 - DNA, 22 bp, synthetic construct
  misc_feature 1..22: note = chemically synthesized
  source 1..22: mol_type = other DNA
tatgaccgctatcaaaatagca

SEQ ID NO: 23370 - DNA, 22 bp, synthetic construct
  misc_feature 1..22: note = chemically synthesized
  source 1..22: mol_type = other DNA
tcaaaatagcaatgtcattttt

SEQ ID NO: 23371 - DNA, 22 bp, synthetic construct
  misc_feature 1..22: note = chemically synthesized
  source 1..22: mol_type = other DNA
ttcacagaaatggaaaaaccaa

SEQ ID NO: 23372 - DNA, 22 bp, synthetic construct
  misc_feature 1..22: note = chemically synthesized
  source 1..22: mol_type = other DNA
tcacagaaatggaaaaaccaat

SEQ ID NO: 23373 - DNA, 22 bp, synthetic construct
  misc_feature 1..22: note = chemically synthesized
  source 1..22: mol_type = other DNA
cacagaaatggaaaaaccaatc

SEQ ID NO: 23374 - DNA, 22 bp, synthetic construct
  misc_feature 1..22: note = chemically synthesized
  source 1..22: mol_type = other DNA
acagaaatggaaaaaccaatct

SEQ ID NO: 23375 - DNA, 22 bp, synthetic construct
  misc_feature 1..22: note = chemically synthesized
  source 1..22: mol_type = other DNA
aaatttgtatgaaattaaaaaa

SEQ ID NO: 23376 - DNA, 22 bp, synthetic construct
  misc_feature 1..22: note = chemically synthesized
  source 1..22: mol_type = other DNA
gtatgaaattaaaaaatagctc

SEQ ID NO: 23377 - DNA, 22 bp, synthetic construct
  misc_feature 1..22: note = chemically synthesized
  source 1..22: mol_type = other DNA
tatgaaattaaaaaatagctcc

SEQ ID NO: 23378 - DNA, 22 bp, synthetic construct
  misc_feature 1..22: note = chemically synthesized
  source 1..22: mol_type = other DNA
aaaaatagctccagtagccaaa

SEQ ID NO: 23379 - DNA, 22 bp, synthetic construct
  misc_feature 1..22: note = chemically synthesized
  source 1..22: mol_type = other DNA
cagtagccaaagtcatcctgtg

SEQ ID NO: 23380 - DNA, 22 bp, synthetic construct
  misc_feature 1..22: note = chemically synthesized
  source 1..22: mol_type = other DNA
tgaaaaaagaacaatgctagag

SEQ ID NO: 23381 - DNA, 22 bp, synthetic construct
  misc_feature 1..22: note = chemically synthesized
  source 1..22: mol_type = other DNA
gaggtatcatactacctgattt

SEQ ID NO: 23382 - DNA, 22 bp, synthetic construct
  misc_feature 1..22: note = chemically synthesized
  source 1..22: mol_type = other DNA
cctgatttcaaagtatattaca

SEQ ID NO: 23383 - DNA, 22 bp, synthetic construct
  misc_feature 1..22: note = chemically synthesized
  source 1..22: mol_type = other DNA
atttcaaagtatattacaaaag

SEQ ID NO: 23384 - DNA, 22 bp, synthetic construct
  misc_feature 1..22: note = chemically synthesized
  source 1..22: mol_type = other DNA
caaagtatattacaaaagtata

SEQ ID NO: 23385 - DNA, 22 bp, synthetic construct
  misc_feature 1..22: note = chemically synthesized
  source 1..22: mol_type = other DNA
aaagtatattacaaaagtatag

SEQ ID NO: 23386 - DNA, 22 bp, synthetic construct
  misc_feature 1..22: note = chemically synthesized
  source 1..22: mol_type = other DNA
caaaagtataggaacctaaaca

SEQ ID NO: 23387 - DNA, 22 bp, synthetic construct
  misc_feature 1..22: note = chemically synthesized
  source 1..22: mol_type = other DNA
aacagcatgatactgacattag

SEQ ID NO: 23388 - DNA, 22 bp, synthetic construct
  misc_feature 1..22: note = chemically synthesized
  source 1..22: mol_type = other DNA
acattagaacagacacttagac

SEQ ID NO: 23389 - DNA, 22 bp, synthetic construct
  misc_feature 1..22: note = chemically synthesized
  source 1..22: mol_type = other DNA
gaacagacacttagaccaatgg

SEQ ID NO: 23390 - DNA, 22 bp, synthetic construct
  misc_feature 1..22: note = chemically synthesized
  source 1..22: mol_type = other DNA
agaccaatggaagagaatagag

SEQ ID NO: 23391 - DNA, 22 bp, synthetic construct
  misc_feature 1..22: note = chemically synthesized
  source 1..22: mol_type = other DNA
gaccaatggaagagaatagaga

SEQ ID NO: 23392 - DNA, 22 bp, synthetic construct
  misc_feature 1..22: note = chemically synthesized
  source 1..22: mol_type = other DNA
gaaatgcatccacatatttata

SEQ ID NO: 23393 - DNA, 22 bp, synthetic construct
  misc_feature 1..22: note = chemically synthesized
  source 1..22: mol_type = other DNA
atagccaacagattttcaacaa

SEQ ID NO: 23394 - DNA, 22 bp, synthetic construct
  misc_feature 1..22: note = chemically synthesized
  source 1..22: mol_type = other DNA
tagccaacagattttcaacaaa

SEQ ID NO: 23395 - DNA, 22 bp, synthetic construct
  misc_feature 1..22: note = chemically synthesized
  source 1..22: mol_type = other DNA
tcaacaaaggtgacaagaatat

SEQ ID NO: 23396 - DNA, 22 bp, synthetic construct
  misc_feature 1..22: note = chemically synthesized
  source 1..22: mol_type = other DNA
caacaaaggtgacaagaatata

SEQ ID NO: 23397 - DNA, 22 bp, synthetic construct
  misc_feature 1..22: note = chemically synthesized
  source 1..22: mol_type = other DNA
aacaaaggtgacaagaatatac

SEQ ID NO: 23398 - DNA, 22 bp, synthetic construct
  misc_feature 1..22: note = chemically synthesized
  source 1..22: mol_type = other DNA
aggaaaggacacagtgttcaag

SEQ ID NO: 23399 - DNA, 22 bp, synthetic construct
  misc_feature 1..22: note = chemically synthesized
  source 1..22: mol_type = other DNA
aagaaatggtgctgaaaaaatt

SEQ ID NO: 23400 - DNA, 22 bp, synthetic construct
  misc_feature 1..22: note = chemically synthesized
  source 1..22: mol_type = other DNA
aaaaaattggatatccattgga

SEQ ID NO: 23401 - DNA, 22 bp, synthetic construct
  misc_feature 1..22: note = chemically synthesized
  source 1..22: mol_type = other DNA
gatatccattggatatccatgt

SEQ ID NO: 23402 - DNA, 22 bp, synthetic construct
  misc_feature 1..22: note = chemically synthesized
  source 1..22: mol_type = other DNA
gatatccatgtgcaaaagaata

SEQ ID NO: 23403 - DNA, 22 bp, synthetic construct
  misc_feature 1..22: note = chemically synthesized
  source 1..22: mol_type = other DNA
gactgctgatatggtttggatg

SEQ ID NO: 23404 - DNA, 22 bp, synthetic construct
  misc_feature 1..22: note = chemically synthesized
  source 1..22: mol_type = other DNA
ctgatatggtttggatgtttgt

SEQ ID NO: 23405 - DNA, 22 bp, synthetic construct
  misc_feature 1..22: note = chemically synthesized
  source 1..22: mol_type = other DNA
atatggtttggatgtttgttcc

SEQ ID NO: 23406 - DNA, 22 bp, synthetic construct
  misc_feature 1..22: note = chemically synthesized
  source 1..22: mol_type = other DNA
ggatgtttgttccctccaaatc

SEQ ID NO: 23407 - DNA, 22 bp, synthetic construct
  misc_feature 1..22: note = chemically synthesized
  source 1..22: mol_type = other DNA
gatgtttgttccctccaaatct

SEQ ID NO: 23408 - DNA, 22 bp, synthetic construct
  misc_feature 1..22: note = chemically synthesized
  source 1..22: mol_type = other DNA
gttccctccaaatctcatgttg

SEQ ID NO: 23409 - DNA, 22 bp, synthetic construct
  misc_feature 1..22: note = chemically synthesized
  source 1..22: mol_type = other DNA
ttccctccaaatctcatgttga

SEQ ID NO: 23410 - DNA, 22 bp, synthetic construct
  misc_feature 1..22: note = chemically synthesized
  source 1..22: mol_type = other DNA
cctccaaatctcatgttgaaat

SEQ ID NO: 23411 - DNA, 22 bp, synthetic construct
  misc_feature 1..22: note = chemically synthesized
  source 1..22: mol_type = other DNA
caaatctcatgttgaaatataa

SEQ ID NO: 23412 - DNA, 22 bp, synthetic construct
  misc_feature 1..22: note = chemically synthesized
  source 1..22: mol_type = other DNA
atgttgaaatataatccccaac

SEQ ID NO: 23413 - DNA, 22 bp, synthetic construct
  misc_feature 1..22: note = chemically synthesized
  source 1..22: mol_type = other DNA
aaatataatccccaacttctca

SEQ ID NO: 23414 - DNA, 22 bp, synthetic construct
  misc_feature 1..22: note = chemically synthesized
  source 1..22: mol_type = other DNA
ctcaggatcttggcggatggga

SEQ ID NO: 23415 - DNA, 22 bp, synthetic construct
  misc_feature 1..22: note = chemically synthesized
  source 1..22: mol_type = other DNA
tcaggatcttggcggatgggag

SEQ ID NO: 23416 - DNA, 22 bp, synthetic construct
  misc_feature 1..22: note = chemically synthesized
  source 1..22: mol_type = other DNA
aggatcttggcggatgggaggt

SEQ ID NO: 23417 - DNA, 22 bp, synthetic construct
  misc_feature 1..22: note = chemically synthesized
  source 1..22: mol_type = other DNA
ggcggatgggaggtaggcctag

SEQ ID NO: 23418 - DNA, 22 bp, synthetic construct
  misc_feature 1..22: note = chemically synthesized
  source 1..22: mol_type = other DNA
gcggatgggaggtaggcctaga

SEQ ID NO: 23419 - DNA, 22 bp, synthetic construct
  misc_feature 1..22: note = chemically synthesized
  source 1..22: mol_type = other DNA
gattgcagctccaactcagatg

SEQ ID NO: 23420 - DNA, 22 bp, synthetic construct
  misc_feature 1..22: note = chemically synthesized
  source 1..22: mol_type = other DNA
cagctccaactcagatggacag

SEQ ID NO: 23421 - DNA, 22 bp, synthetic construct
  misc_feature 1..22: note = chemically synthesized
  source 1..22: mol_type = other DNA
caactcagatggacagagcagc

SEQ ID NO: 23422 - DNA, 22 bp, synthetic construct
  misc_feature 1..22: note = chemically synthesized
  source 1..22: mol_type = other DNA
agatggacagagcagcatgtgg

SEQ ID NO: 23423 - DNA, 22 bp, synthetic construct
  misc_feature 1..22: note = chemically synthesized
  source 1..22: mol_type = other DNA
gcattgtgaattttagctgcag

SEQ ID NO: 23424 - DNA, 22 bp, synthetic construct
  misc_feature 1..22: note = chemically synthesized
  source 1..22: mol_type = other DNA
tgaattttagctgcagatagac

SEQ ID NO: 23425 - DNA, 22 bp, synthetic construct
  misc_feature 1..22: note = chemically synthesized
  source 1..22: mol_type = other DNA
tagctgcagatagactgcaaga

SEQ ID NO: 23426 - DNA, 22 bp, synthetic construct
  misc_feature 1..22: note = chemically synthesized
  source 1..22: mol_type = other DNA
agctgcagatagactgcaagaa

SEQ ID NO: 23427 - DNA, 22 bp, synthetic construct
  misc_feature 1..22: note = chemically synthesized
  source 1..22: mol_type = other DNA
gctgcagatagactgcaagaac

SEQ ID NO: 23428 - DNA, 22 bp, synthetic construct
  misc_feature 1..22: note = chemically synthesized
  source 1..22: mol_type = other DNA
cagatagactgcaagaacaaac

SEQ ID NO: 23429 - DNA, 22 bp, synthetic construct
  misc_feature 1..22: note = chemically synthesized
  source 1..22: mol_type = other DNA
caagaacaaaccagcaatcctg

SEQ ID NO: 23430 - DNA, 22 bp, synthetic construct
  misc_feature 1..22: note = chemically synthesized
  source 1..22: mol_type = other DNA
agaggacccacagaccctctga

SEQ ID NO: 23431 - DNA, 22 bp, synthetic construct
  misc_feature 1..22: note = chemically synthesized
  source 1..22: mol_type = other DNA
tgaaggaagtagattgctcctg

SEQ ID NO: 23432 - DNA, 22 bp, synthetic construct
  misc_feature 1..22: note = chemically synthesized
  source 1..22: mol_type = other DNA
aaggaagtagattgctcctgca

SEQ ID NO: 23433 - DNA, 22 bp, synthetic construct
  misc_feature 1..22: note = chemically synthesized
  source 1..22: mol_type = other DNA
ctcctgcaggacccaggagaca

SEQ ID NO: 23434 - DNA, 22 bp, synthetic construct
  misc_feature 1..22: note = chemically synthesized
  source 1..22: mol_type = other DNA
ctgcaggacccaggagacaccc

SEQ ID NO: 23435 - DNA, 22 bp, synthetic construct
  misc_feature 1..22: note = chemically synthesized
  source 1..22: mol_type = other DNA
caggacccaggagacaccccaa

SEQ ID NO: 23436 - DNA, 22 bp, synthetic construct
  misc_feature 1..22: note = chemically synthesized
  source 1..22: mol_type = other DNA
tgagtgccccaactgcggaagt

SEQ ID NO: 23437 - DNA, 22 bp, synthetic construct
  misc_feature 1..22: note = chemically synthesized
  source 1..22: mol_type = other DNA
cggaagtgggaaagggagatcc

SEQ ID NO: 23438 - DNA, 22 bp, synthetic construct
  misc_feature 1..22: note = chemically synthesized
  source 1..22: mol_type = other DNA
ctctcctaaacacacactccca

SEQ ID NO: 23439 - DNA, 22 bp, synthetic construct
  misc_feature 1..22: note = chemically synthesized
  source 1..22: mol_type = other DNA
tcctaaacacacactcccactg

SEQ ID NO: 23440 - DNA, 22 bp, synthetic construct
  misc_feature 1..22: note = chemically synthesized
  source 1..22: mol_type = other DNA
ctaaacacacactcccactgga

SEQ ID NO: 23441 - DNA, 22 bp, synthetic construct
  misc_feature 1..22: note = chemically synthesized
  source 1..22: mol_type = other DNA
aacacacactcccactggagaa

SEQ ID NO: 23442 - DNA, 22 bp, synthetic construct
  misc_feature 1..22: note = chemically synthesized
  source 1..22: mol_type = other DNA
ccactggagaaactgaaggtct

SEQ ID NO: 23443 - DNA, 22 bp, synthetic construct
  misc_feature 1..22: note = chemically synthesized
  source 1..22: mol_type = other DNA
gagaaactgaaggtctgtttgt

SEQ ID NO: 23444 - DNA, 22 bp, synthetic construct
  misc_feature 1..22: note = chemically synthesized
  source 1..22: mol_type = other DNA
aaggtctgtttgtgggagaagt

SEQ ID NO: 23445 - DNA, 22 bp, synthetic construct
  misc_feature 1..22: note = chemically synthesized
  source 1..22: mol_type = other DNA
tttgtgggagaagtttctgacc

SEQ ID NO: 23446 - DNA, 22 bp, synthetic construct
  misc_feature 1..22: note = chemically synthesized
  source 1..22: mol_type = other DNA
gtgggagaagtttctgacctta

SEQ ID NO: 23447 - DNA, 22 bp, synthetic construct
  misc_feature 1..22: note = chemically synthesized
  source 1..22: mol_type = other DNA
tgggagaagtttctgaccttac

SEQ ID NO: 23448 - DNA, 22 bp, synthetic construct
  misc_feature 1..22: note = chemically synthesized
  source 1..22: mol_type = other DNA
ctgaccttacctggagttgagt

SEQ ID NO: 23449 - DNA, 22 bp, synthetic construct
  misc_feature 1..22: note = chemically synthesized
  source 1..22: mol_type = other DNA
tgaccttacctggagttgagtt

SEQ ID NO: 23450 - DNA, 22 bp, synthetic construct
  misc_feature 1..22: note = chemically synthesized
  source 1..22: mol_type = other DNA
accttacctggagttgagttaa

SEQ ID NO: 23451 - DNA, 22 bp, synthetic construct
  misc_feature 1..22: note = chemically synthesized
  source 1..22: mol_type = other DNA
acctggagttgagttaacttag

SEQ ID NO: 23452 - DNA, 22 bp, synthetic construct
  misc_feature 1..22: note = chemically synthesized
  source 1..22: mol_type = other DNA
cctggagttgagttaacttaga

SEQ ID NO: 23453 - DNA, 22 bp, synthetic construct
  misc_feature 1..22: note = chemically synthesized
  source 1..22: mol_type = other DNA
gagttgagttaacttagagagc

SEQ ID NO: 23454 - DNA, 22 bp, synthetic construct
  misc_feature 1..22: note = chemically synthesized
  source 1..22: mol_type = other DNA
agttaacttagagagctgagca

SEQ ID NO: 23455 - DNA, 22 bp, synthetic construct
  misc_feature 1..22: note = chemically synthesized
  source 1..22: mol_type = other DNA
acttagagagctgagcaaaata

SEQ ID NO: 23456 - DNA, 22 bp, synthetic construct
  misc_feature 1..22: note = chemically synthesized
  source 1..22: mol_type = other DNA
agagagctgagcaaaatacagg

SEQ ID NO: 23457 - DNA, 22 bp, synthetic construct
  misc_feature 1..22: note = chemically synthesized
  source 1..22: mol_type = other DNA
gagagctgagcaaaatacaggt

SEQ ID NO: 23458 - DNA, 22 bp, synthetic construct
  misc_feature 1..22: note = chemically synthesized
  source 1..22: mol_type = other DNA
agcaaaatacaggtgtagagga

SEQ ID NO: 23459 - DNA, 22 bp, synthetic construct
  misc_feature 1..22: note = chemically synthesized
  source 1..22: mol_type = other DNA
ggagctcactgggtccctgagc

SEQ ID NO: 23460 - DNA, 22 bp, synthetic construct
  misc_feature 1..22: note = chemically synthesized
  source 1..22: mol_type = other DNA
actgggtccctgagcaggccat

SEQ ID NO: 23461 - DNA, 22 bp, synthetic construct
  misc_feature 1..22: note = chemically synthesized
  source 1..22: mol_type = other DNA
ggtccctgagcaggccattcct

SEQ ID NO: 23462 - DNA, 22 bp, synthetic construct
  misc_feature 1..22: note = chemically synthesized
  source 1..22: mol_type = other DNA
agcaggccattcctgcctggca

SEQ ID NO: 23463 - DNA, 22 bp, synthetic construct
  misc_feature 1..22: note = chemically synthesized
  source 1..22: mol_type = other DNA
ctgcctggcatagccaggcatt

SEQ ID NO: 23464 - DNA, 22 bp, synthetic construct
  misc_feature 1..22: note = chemically synthesized
  source 1..22: mol_type = other DNA
cctggcatagccaggcatttac

SEQ ID NO: 23465 - DNA, 22 bp, synthetic construct
  misc_feature 1..22: note = chemically synthesized
  source 1..22: mol_type = other DNA
gcatagccaggcatttacatta

SEQ ID NO: 23466 - DNA, 22 bp, synthetic construct
  misc_feature 1..22: note = chemically synthesized
  source 1..22: mol_type = other DNA
acattactaacattgaatgtaa

SEQ ID NO: 23467 - DNA, 22 bp, synthetic construct
  misc_feature 1..22: note = chemically synthesized
  source 1..22: mol_type = other DNA
cattactaacattgaatgtaaa

SEQ ID NO: 23468 - DNA, 22 bp, synthetic construct
  misc_feature 1..22: note = chemically synthesized
  source 1..22: mol_type = other DNA
ctaacattgaatgtaaatggcc

SEQ ID NO: 23469 - DNA, 22 bp, synthetic construct
  misc_feature 1..22: note = chemically synthesized
  source 1..22: mol_type = other DNA
acattgaatgtaaatggcctaa

SEQ ID NO: 23470 - DNA, 22 bp, synthetic construct
  misc_feature 1..22: note = chemically synthesized
  source 1..22: mol_type = other DNA
aatgtaaatggcctaaatgctc

SEQ ID NO: 23471 - DNA, 22 bp, synthetic construct
  misc_feature 1..22: note = chemically synthesized
  source 1..22: mol_type = other DNA
aatgctccacttaaaagggtga

SEQ ID NO: 23472 - DNA, 22 bp, synthetic construct
  misc_feature 1..22: note = chemically synthesized
  source 1..22: mol_type = other DNA
cacttaaaagggtgaaaaaggt

SEQ ID NO: 23473 - DNA, 22 bp, synthetic construct
  misc_feature 1..22: note = chemically synthesized
  source 1..22: mol_type = other DNA
aaaagggtgaaaaaggtatttc

SEQ ID NO: 23474 - DNA, 22 bp, synthetic construct
  misc_feature 1..22: note = chemically synthesized
  source 1..22: mol_type = other DNA
aaagggtgaaaaaggtatttca

SEQ ID NO: 23475 - DNA, 22 bp, synthetic construct
  misc_feature 1..22: note = chemically synthesized
  source 1..22: mol_type = other DNA
catgcaaatggccaccaaaagt

SEQ ID NO: 23476 - DNA, 22 bp, synthetic construct
  misc_feature 1..22: note = chemically synthesized
  source 1..22: mol_type = other DNA
atgcaaatggccaccaaaagtg

SEQ ID NO: 23477 - DNA, 22 bp, synthetic construct
  misc_feature 1..22: note = chemically synthesized
  source 1..22: mol_type = other DNA
taaagcaacagcagttaaaaga

SEQ ID NO: 23478 - DNA, 22 bp, synthetic construct
  misc_feature 1..22: note = chemically synthesized
  source 1..22: mol_type = other DNA
aaagcaacagcagttaaaagag

SEQ ID NO: 23479 - DNA, 22 bp, synthetic construct
  misc_feature 1..22: note = chemically synthesized
  source 1..22: mol_type = other DNA
aagcaacagcagttaaaagaga

SEQ ID NO: 23480 - DNA, 22 bp, synthetic construct
  misc_feature 1..22: note = chemically synthesized
  source 1..22: mol_type = other DNA
aaagagacaaagagggacatta

SEQ ID NO: 23481 - DNA, 22 bp, synthetic construct
  misc_feature 1..22: note = chemically synthesized
  source 1..22: mol_type = other DNA
tataatggtaaaaggccttgtc

SEQ ID NO: 23482 - DNA, 22 bp, synthetic construct
  misc_feature 1..22: note = chemically synthesized
  source 1..22: mol_type = other DNA
gtccaacaggaaaatatcacaa

SEQ ID NO: 23483 - DNA, 22 bp, synthetic construct
  misc_feature 1..22: note = chemically synthesized
  source 1..22: mol_type = other DNA
tccaacaggaaaatatcacaat

SEQ ID NO: 23484 - DNA, 22 bp, synthetic construct
  misc_feature 1..22: note = chemically synthesized
  source 1..22: mol_type = other DNA
aaacatatatgcacctaacact

SEQ ID NO: 23485 - DNA, 22 bp, synthetic construct
  misc_feature 1..22: note = chemically synthesized
  source 1..22: mol_type = other DNA
aacatatatgcacctaacactg

SEQ ID NO: 23486 - DNA, 22 bp, synthetic construct
  misc_feature 1..22: note = chemically synthesized
  source 1..22: mol_type = other DNA
acactggagctcccaaatttat

SEQ ID NO: 23487 - DNA, 22 bp, synthetic construct
  misc_feature 1..22: note = chemically synthesized
  source 1..22: mol_type = other DNA
gagctcccaaatttatagaaca

SEQ ID NO: 23488 - DNA, 22 bp, synthetic construct
  misc_feature 1..22: note = chemically synthesized
  source 1..22: mol_type = other DNA
ccaaatttatagaacaattact

SEQ ID NO: 23489 - DNA, 22 bp, synthetic construct
  misc_feature 1..22: note = chemically synthesized
  source 1..22: mol_type = other DNA
atagaacaattactaatagacc

SEQ ID NO: 23490 - DNA, 22 bp, synthetic construct
  misc_feature 1..22: note = chemically synthesized
  source 1..22: mol_type = other DNA
tagaacaattactaatagacct

SEQ ID NO: 23491 - DNA, 22 bp, synthetic construct
  misc_feature 1..22: note = chemically synthesized
  source 1..22: mol_type = other DNA
ctaatagacctaagaaatgaga

SEQ ID NO: 23492 - DNA, 22 bp, synthetic construct
  misc_feature 1..22: note = chemically synthesized
  source 1..22: mol_type = other DNA
atagacctaagaaatgagatag

SEQ ID NO: 23493 - DNA, 22 bp, synthetic construct
  misc_feature 1..22: note = chemically synthesized
  source 1..22: mol_type = other DNA
agaaatgagatagacagcaaca

SEQ ID NO: 23494 - DNA, 22 bp, synthetic construct
  misc_feature 1..22: note = chemically synthesized
  source 1..22: mol_type = other DNA
caatacttcattgacagcacta

SEQ ID NO: 23495 - DNA, 22 bp, synthetic construct
  misc_feature 1..22: note = chemically synthesized
  source 1..22: mol_type = other DNA
aatacttcattgacagcactag

SEQ ID NO: 23496 - DNA, 22 bp, synthetic construct
  misc_feature 1..22: note = chemically synthesized
  source 1..22: mol_type = other DNA
cattgacagcactagacagttc

SEQ ID NO: 23497 - DNA, 22 bp, synthetic construct
  misc_feature 1..22: note = chemically synthesized
  source 1..22: mol_type = other DNA
attgacagcactagacagttca

SEQ ID NO: 23498 - DNA, 22 bp, synthetic construct
  misc_feature 1..22: note = chemically synthesized
  source 1..22: mol_type = other DNA
acagcactagacagttcatcaa

SEQ ID NO: 23499 - DNA, 22 bp, synthetic construct
  misc_feature 1..22: note = chemically synthesized
  source 1..22: mol_type = other DNA
gacagttcatcaagacagaaag

SEQ ID NO: 23500 - DNA, 22 bp, synthetic construct
  misc_feature 1..22: note = chemically synthesized
  source 1..22: mol_type = other DNA
atcaagacagaaagtcaacaaa

SEQ ID NO: 23501 - DNA, 22 bp, synthetic construct
  misc_feature 1..22: note = chemically synthesized
  source 1..22: mol_type = other DNA
aaattataccttagaacaaatg

SEQ ID NO: 23502 - DNA, 22 bp, synthetic construct
  misc_feature 1..22: note = chemically synthesized
  source 1..22: mol_type = other DNA
aattataccttagaacaaatgg

SEQ ID NO: 23503 - DNA, 22 bp, synthetic construct
  misc_feature 1..22: note = chemically synthesized
  source 1..22: mol_type = other DNA
taccttagaacaaatggactta

SEQ ID NO: 23504 - DNA, 22 bp, synthetic construct
  misc_feature 1..22: note = chemically synthesized
  source 1..22: mol_type = other DNA
agaacaaatggacttaacagtt

SEQ ID NO: 23505 - DNA, 22 bp, synthetic construct
  misc_feature 1..22: note = chemically synthesized
  source 1..22: mol_type = other DNA
gaacaaatggacttaacagtta

SEQ ID NO: 23506 - DNA, 22 bp, synthetic construct
  misc_feature 1..22: note = chemically synthesized
  source 1..22: mol_type = other DNA
aacagttatatacagaacattt

SEQ ID NO: 23507 - DNA, 22 bp, synthetic construct
  misc_feature 1..22: note = chemically synthesized
  source 1..22: mol_type = other DNA
acagttatatacagaacatttc

SEQ ID NO: 23508 - DNA, 22 bp, synthetic construct
  misc_feature 1..22: note = chemically synthesized
  source 1..22: mol_type = other DNA
tatacagaacatttcatccaat

SEQ ID NO: 23509 - DNA, 22 bp, synthetic construct
  misc_feature 1..22: note = chemically synthesized
  source 1..22: mol_type = other DNA
catccaataaccacagaacaca

SEQ ID NO: 23510 - DNA, 22 bp, synthetic construct
  misc_feature 1..22: note = chemically synthesized
  source 1..22: mol_type = other DNA
atccaataaccacagaacacac

SEQ ID NO: 23511 - DNA, 22 bp, synthetic construct
  misc_feature 1..22: note = chemically synthesized
  source 1..22: mol_type = other DNA
tattcaacagcgcgtggaaatt

SEQ ID NO: 23512 - DNA, 22 bp, synthetic construct
  misc_feature 1..22: note = chemically synthesized
  source 1..22: mol_type = other DNA
ttcaacagcgcgtggaaatttc

SEQ ID NO: 23513 - DNA, 22 bp, synthetic construct
  misc_feature 1..22: note = chemically synthesized
  source 1..22: mol_type = other DNA
aacagcgcgtggaaatttctcc

SEQ ID NO: 23514 - DNA, 22 bp, synthetic construct
  misc_feature 1..22: note = chemically synthesized
  source 1..22: mol_type = other DNA
ctccaaggtagaccatatgata

SEQ ID NO: 23515 - DNA, 22 bp, synthetic construct
  misc_feature 1..22: note = chemically synthesized
  source 1..22: mol_type = other DNA
tccaaggtagaccatatgatag

SEQ ID NO: 23516 - DNA, 22 bp, synthetic construct
  misc_feature 1..22: note = chemically synthesized
  source 1..22: mol_type = other DNA
caaggtagaccatatgataggc

SEQ ID NO: 23517 - DNA, 22 bp, synthetic construct
  misc_feature 1..22: note = chemically synthesized
  source 1..22: mol_type = other DNA
aataaatttactaacagaccaa

SEQ ID NO: 23518 - DNA, 22 bp, synthetic construct
  misc_feature 1..22: note = chemically synthesized
  source 1..22: mol_type = other DNA
actaacagaccaataacaagca

SEQ ID NO: 23519 - DNA, 22 bp, synthetic construct
  misc_feature 1..22: note = chemically synthesized
  source 1..22: mol_type = other DNA
ctaacagaccaataacaagcag

SEQ ID NO: 23520 - DNA, 22 bp, synthetic construct
  misc_feature 1..22: note = chemically synthesized
  source 1..22: mol_type = other DNA
acagaccaataacaagcagtga

SEQ ID NO: 23521 - DNA, 22 bp, synthetic construct
  misc_feature 1..22: note = chemically synthesized
  source 1..22: mol_type = other DNA
aattggtaattaaaaaattacc

SEQ ID NO: 23522 - DNA, 22 bp, synthetic construct
  misc_feature 1..22: note = chemically synthesized
  source 1..22: mol_type = other DNA
attggtaattaaaaaattacca

SEQ ID NO: 23523 - DNA, 22 bp, synthetic construct
  misc_feature 1..22: note = chemically synthesized
  source 1..22: mol_type = other DNA
gtaattaaaaaattaccaacca

SEQ ID NO: 23524 - DNA, 22 bp, synthetic construct
  misc_feature 1..22: note = chemically synthesized
  source 1..22: mol_type = other DNA
aaaaattaccaaccaaaaaaaa

SEQ ID NO: 23525 - DNA, 22 bp, synthetic construct
  misc_feature 1..22: note = chemically synthesized
  source 1..22: mol_type = other DNA
ccaaccaaaaaaaagttcagga

SEQ ID NO: 23526 - DNA, 22 bp, synthetic construct
  misc_feature 1..22: note = chemically synthesized
  source 1..22: mol_type = other DNA
aggaccagatggattcacaaca

SEQ ID NO: 23527 - DNA, 22 bp, synthetic construct
  misc_feature 1..22: note = chemically synthesized
  source 1..22: mol_type = other DNA
acaacagaattctactagacat

SEQ ID NO: 23528 - DNA, 22 bp, synthetic construct
  misc_feature 1..22: note = chemically synthesized
  source 1..22: mol_type = other DNA
tactagacattcaaagaggaat

SEQ ID NO: 23529 - DNA, 22 bp, synthetic construct
  misc_feature 1..22: note = chemically synthesized
  source 1..22: mol_type = other DNA
ctagacattcaaagaggaattg

SEQ ID NO: 23530 - DNA, 22 bp, synthetic construct
  misc_feature 1..22: note = chemically synthesized
  source 1..22: mol_type = other DNA
gacattcaaagaggaattggtc

SEQ ID NO: 23531 - DNA, 22 bp, synthetic construct
  misc_feature 1..22: note = chemically synthesized
  source 1..22: mol_type = other DNA
aaagaggaattggtccccatct

SEQ ID NO: 23532 - DNA, 22 bp, synthetic construct
  misc_feature 1..22: note = chemically synthesized
  source 1..22: mol_type = other DNA
gtccccatctttttgacactat

SEQ ID NO: 23533 - DNA, 22 bp, synthetic construct
  misc_feature 1..22: note = chemically synthesized
  source 1..22: mol_type = other DNA
tttgacactattctacaagaca

SEQ ID NO: 23534 - DNA, 22 bp, synthetic construct
  misc_feature 1..22: note = chemically synthesized
  source 1..22: mol_type = other DNA
ttgacactattctacaagacag

SEQ ID NO: 23535 - DNA, 22 bp, synthetic construct
  misc_feature 1..22: note = chemically synthesized
  source 1..22: mol_type = other DNA
tgacactattctacaagacaga

SEQ ID NO: 23536 - DNA, 22 bp, synthetic construct
  misc_feature 1..22: note = chemically synthesized
  source 1..22: mol_type = other DNA
gacactattctacaagacagat

SEQ ID NO: 23537 - DNA, 22 bp, synthetic construct
  misc_feature 1..22: note = chemically synthesized
  source 1..22: mol_type = other DNA
acactattctacaagacagata

SEQ ID NO: 23538 - DNA, 22 bp, synthetic construct
  misc_feature 1..22: note = chemically synthesized
  source 1..22: mol_type = other DNA
ttctacaagacagataaagaag

SEQ ID NO: 23539 - DNA, 22 bp, synthetic construct
  misc_feature 1..22: note = chemically synthesized
  source 1..22: mol_type = other DNA
tacaagacagataaagaaggaa

SEQ ID NO: 23540 - DNA, 22 bp, synthetic construct
  misc_feature 1..22: note = chemically synthesized
  source 1..22: mol_type = other DNA
caagacagataaagaaggaacc

SEQ ID NO: 23541 - DNA, 22 bp, synthetic construct
  misc_feature 1..22: note = chemically synthesized
  source 1..22: mol_type = other DNA
ccctaattcattctatgaagcc

SEQ ID NO: 23542 - DNA, 22 bp, synthetic construct
  misc_feature 1..22: note = chemically synthesized
  source 1..22: mol_type = other DNA
attcattctatgaagccagcat

SEQ ID NO: 23543 - DNA, 22 bp, synthetic construct
  misc_feature 1..22: note = chemically synthesized
  source 1..22: mol_type = other DNA
attctatgaagccagcatcaca

SEQ ID NO: 23544 - DNA, 22 bp, synthetic construct
  misc_feature 1..22: note = chemically synthesized
  source 1..22: mol_type = other DNA
tatgaagccagcatcacaccaa

SEQ ID NO: 23545 - DNA, 22 bp, synthetic construct
  misc_feature 1..22: note = chemically synthesized
  source 1..22: mol_type = other DNA
tgaagccagcatcacaccaaaa

SEQ ID NO: 23546 - DNA, 22 bp, synthetic construct
  misc_feature 1..22: note = chemically synthesized
  source 1..22: mol_type = other DNA
cagactgatagccttgatgaac

SEQ ID NO: 23547 - DNA, 22 bp, synthetic construct
  misc_feature 1..22: note = chemically synthesized
  source 1..22: mol_type = other DNA
atagccttgatgaacatagatg

SEQ ID NO: 23548 - DNA, 22 bp, synthetic construct
  misc_feature 1..22: note = chemically synthesized
  source 1..22: mol_type = other DNA
gatgaacatagatgctaaaatc

SEQ ID NO: 23549 - DNA, 22 bp, synthetic construct
  misc_feature 1..22: note = chemically synthesized
  source 1..22: mol_type = other DNA
atgaacatagatgctaaaatcc

SEQ ID NO: 23550 - DNA, 22 bp, synthetic construct
  misc_feature 1..22: note = chemically synthesized
  source 1..22: mol_type = other DNA
aaatccttaacaaaatactaga

SEQ ID NO: 23551 - DNA, 22 bp, synthetic construct
  misc_feature 1..22: note = chemically synthesized
  source 1..22: mol_type = other DNA
aacaaaatactagataaccaaa

SEQ ID NO: 23552 - DNA, 22 bp, synthetic construct
  misc_feature 1..22: note = chemically synthesized
  source 1..22: mol_type = other DNA
acaaaatactagataaccaaat

SEQ ID NO: 23553 - DNA, 22 bp, synthetic construct
  misc_feature 1..22: note = chemically synthesized
  source 1..22: mol_type = other DNA
gataaccaaattcaacaacata

SEQ ID NO: 23554 - DNA, 22 bp, synthetic construct
  misc_feature 1..22: note = chemically synthesized
  source 1..22: mol_type = other DNA
aacaacataacaaaaagataat

SEQ ID NO: 23555 - DNA, 22 bp, synthetic construct
  misc_feature 1..22: note = chemically synthesized
  source 1..22: mol_type = other DNA
catgccagggatgcagggttgg

SEQ ID NO: 23556 - DNA, 22 bp, synthetic construct
  misc_feature 1..22: note = chemically synthesized
  source 1..22: mol_type = other DNA
gtttgacatctgcaagtcaata

SEQ ID NO: 23557 - DNA, 22 bp, synthetic construct
  misc_feature 1..22: note = chemically synthesized
  source 1..22: mol_type = other DNA
gacatctgcaagtcaataagtg

SEQ ID NO: 23558 - DNA, 22 bp, synthetic construct
  misc_feature 1..22: note = chemically synthesized
  source 1..22: mol_type = other DNA
acatctgcaagtcaataagtgt

SEQ ID NO: 23559 - DNA, 22 bp, synthetic construct
  misc_feature 1..22: note = chemically synthesized
  source 1..22: mol_type = other DNA
caagtcaataagtgtgatacac

SEQ ID NO: 23560 - DNA, 22 bp, synthetic construct
  misc_feature 1..22: note = chemically synthesized
  source 1..22: mol_type = other DNA
aaaaacaaaaattacatgatca

SEQ ID NO: 23561 - DNA, 22 bp, synthetic construct
  misc_feature 1..22: note = chemically synthesized
  source 1..22: mol_type = other DNA
aaaacaaaaattacatgatcat

SEQ ID NO: 23562 - DNA, 22 bp, synthetic construct
  misc_feature 1..22: note = chemically synthesized
  source 1..22: mol_type = other DNA
catgatcatctcaatagatgca

SEQ ID NO: 23563 - DNA, 22 bp, synthetic construct
  misc_feature 1..22: note = chemically synthesized
  source 1..22: mol_type = other DNA
aatagatgcagaaaaagcattc

SEQ ID NO: 23564 - DNA, 22 bp, synthetic construct
  misc_feature 1..22: note = chemically synthesized
  source 1..22: mol_type = other DNA
aacaaaatccagcatacattta

SEQ ID NO: 23565 - DNA, 22 bp, synthetic construct
  misc_feature 1..22: note = chemically synthesized
  source 1..22: mol_type = other DNA
atgattaaaatgctcagcaaaa

SEQ ID NO: 23566 - DNA, 22 bp, synthetic construct
  misc_feature 1..22: note = chemically synthesized
  source 1..22: mol_type = other DNA
tgattaaaatgctcagcaaaat

SEQ ID NO: 23567 - DNA, 22 bp, synthetic construct
  misc_feature 1..22: note = chemically synthesized
  source 1..22: mol_type = other DNA
aaatgctcagcaaaatcagcat

SEQ ID NO: 23568 - DNA, 22 bp, synthetic construct
  misc_feature 1..22: note = chemically synthesized
  source 1..22: mol_type = other DNA
agcaaaatcagcatacaagaga

SEQ ID NO: 23569 - DNA, 22 bp, synthetic construct
  misc_feature 1..22: note = chemically synthesized
  source 1..22: mol_type = other DNA
agtgtaataaaagccatctgtg

SEQ ID NO: 23570 - DNA, 22 bp, synthetic construct
  misc_feature 1..22: note = chemically synthesized
  source 1..22: mol_type = other DNA
tgacaaacccacagccaacata

SEQ ID NO: 23571 - DNA, 22 bp, synthetic construct
  misc_feature 1..22: note = chemically synthesized
  source 1..22: mol_type = other DNA
aatggggaaaagttgaaagcat

SEQ ID NO: 23572 - DNA, 22 bp, synthetic construct
  misc_feature 1..22: note = chemically synthesized
  source 1..22: mol_type = other DNA
aaagcattccctctgagaactg

SEQ ID NO: 23573 - DNA, 22 bp, synthetic construct
  misc_feature 1..22: note = chemically synthesized
  source 1..22: mol_type = other DNA
cctctgagaactggaacaagac

SEQ ID NO: 23574 - DNA, 22 bp, synthetic construct
  misc_feature 1..22: note = chemically synthesized
  source 1..22: mol_type = other DNA
tgagaactggaacaagacaagg

SEQ ID NO: 23575 - DNA, 22 bp, synthetic construct
  misc_feature 1..22: note = chemically synthesized
  source 1..22: mol_type = other DNA
agaactggaacaagacaaggat

SEQ ID NO: 23576 - DNA, 22 bp, synthetic construct
  misc_feature 1..22: note = chemically synthesized
  source 1..22: mol_type = other DNA
gaacaagacaaggatgcccact

SEQ ID NO: 23577 - DNA, 22 bp, synthetic construct
  misc_feature 1..22: note = chemically synthesized
  source 1..22: mol_type = other DNA
tcaccactcctcttcaacatag

SEQ ID NO: 23578 - DNA, 22 bp, synthetic construct
  misc_feature 1..22: note = chemically synthesized
  source 1..22: mol_type = other DNA
accactcctcttcaacatagta

SEQ ID NO: 23579 - DNA, 22 bp, synthetic construct
  misc_feature 1..22: note = chemically synthesized
  source 1..22: mol_type = other DNA
ctcttcaacatagtactggaag

SEQ ID NO: 23580 - DNA, 22 bp, synthetic construct
  misc_feature 1..22: note = chemically synthesized
  source 1..22: mol_type = other DNA
ttcaacatagtactggaagtcc

SEQ ID NO: 23581 - DNA, 22 bp, synthetic construct
  misc_feature 1..22: note = chemically synthesized
  source 1..22: mol_type = other DNA
caacatagtactggaagtccta

SEQ ID NO: 23582 - DNA, 22 bp, synthetic construct
  misc_feature 1..22: note = chemically synthesized
  source 1..22: mol_type = other DNA
aacatagtactggaagtcctag

SEQ ID NO: 23583 - DNA, 22 bp, synthetic construct
  misc_feature 1..22: note = chemically synthesized
  source 1..22: mol_type = other DNA
gaagtcctagccagggcaatca

SEQ ID NO: 23584 - DNA, 22 bp, synthetic construct
  misc_feature 1..22: note = chemically synthesized
  source 1..22: mol_type = other DNA
gccagggcaatcagacaaaaca

SEQ ID NO: 23585 - DNA, 22 bp, synthetic construct
  misc_feature 1..22: note = chemically synthesized
  source 1..22: mol_type = other DNA
aaatcagtaaagaggaagtcaa

SEQ ID NO: 23586 - DNA, 22 bp, synthetic construct
  misc_feature 1..22: note = chemically synthesized
  source 1..22: mol_type = other DNA
tcactgtttgctgatgatatga

SEQ ID NO: 23587 - DNA, 22 bp, synthetic construct
  misc_feature 1..22: note = chemically synthesized
  source 1..22: mol_type = other DNA
tttgctgatgatatgatcattt

SEQ ID NO: 23588 - DNA, 22 bp, synthetic construct
  misc_feature 1..22: note = chemically synthesized
  source 1..22: mol_type = other DNA
gctgatgatatgatcatttacc

SEQ ID NO: 23589 - DNA, 22 bp, synthetic construct
  misc_feature 1..22: note = chemically synthesized
  source 1..22: mol_type = other DNA
ctgatgatatgatcatttacct

SEQ ID NO: 23590 - DNA, 22 bp, synthetic construct
  misc_feature 1..22: note = chemically synthesized
  source 1..22: mol_type = other DNA
atgatatgatcatttaccttta

SEQ ID NO: 23591 - DNA, 22 bp, synthetic construct
  misc_feature 1..22: note = chemically synthesized
  source 1..22: mol_type = other DNA
acctttaaaaccctaaagactc

SEQ ID NO: 23592 - DNA, 22 bp, synthetic construct
  misc_feature 1..22: note = chemically synthesized
  source 1..22: mol_type = other DNA
cctttaaaaccctaaagactcc

SEQ ID NO: 23593 - DNA, 22 bp, synthetic construct
  misc_feature 1..22: note = chemically synthesized
  source 1..22: mol_type = other DNA
taaaaccctaaagactcctcca

SEQ ID NO: 23594 - DNA, 22 bp, synthetic construct
  misc_feature 1..22: note = chemically synthesized
  source 1..22: mol_type = other DNA
aaaaccctaaagactcctccag

SEQ ID NO: 23595 - DNA, 22 bp, synthetic construct
  misc_feature 1..22: note = chemically synthesized
  source 1..22: mol_type = other DNA
aaaccctaaagactcctccaga

SEQ ID NO: 23596 - DNA, 22 bp, synthetic construct
  misc_feature 1..22: note = chemically synthesized
  source 1..22: mol_type = other DNA
aagactcctccagaaagctcct

SEQ ID NO: 23597 - DNA, 22 bp, synthetic construct
  misc_feature 1..22: note = chemically synthesized
  source 1..22: mol_type = other DNA
ctccagaaagctcctagaactg

SEQ ID NO: 23598 - DNA, 22 bp, synthetic construct
  misc_feature 1..22: note = chemically synthesized
  source 1..22: mol_type = other DNA
cagaaagctcctagaactgata

SEQ ID NO: 23599 - DNA, 22 bp, synthetic construct
  misc_feature 1..22: note = chemically synthesized
  source 1..22: mol_type = other DNA
ctagaactgataaaataattca

SEQ ID NO: 23600 - DNA, 22 bp, synthetic construct
  misc_feature 1..22: note = chemically synthesized
  source 1..22: mol_type = other DNA
gaactgataaaataattcagca

SEQ ID NO: 23601 - DNA, 22 bp, synthetic construct
  misc_feature 1..22: note = chemically synthesized
  source 1..22: mol_type = other DNA
ataaaataattcagcaaagttt

SEQ ID NO: 23602 - DNA, 22 bp, synthetic construct
  misc_feature 1..22: note = chemically synthesized
  source 1..22: mol_type = other DNA
agcaaagtttccagatacaaga

SEQ ID NO: 23603 - DNA, 22 bp, synthetic construct
  misc_feature 1..22: note = chemically synthesized
  source 1..22: mol_type = other DNA
ccagatacaagatgaatgcaca

SEQ ID NO: 23604 - DNA, 22 bp, synthetic construct
  misc_feature 1..22: note = chemically synthesized
  source 1..22: mol_type = other DNA
cagatacaagatgaatgcacac

SEQ ID NO: 23605 - DNA, 22 bp, synthetic construct
  misc_feature 1..22: note = chemically synthesized
  source 1..22: mol_type = other DNA
ttctatacaccaacagcaacca

SEQ ID NO: 23606 - DNA, 22 bp, synthetic construct
  misc_feature 1..22: note = chemically synthesized
  source 1..22: mol_type = other DNA
ctatacaccaacagcaaccaaa

SEQ ID NO: 23607 - DNA, 22 bp, synthetic construct
  misc_feature 1..22: note = chemically synthesized
  source 1..22: mol_type = other DNA
tatacaccaacagcaaccaaat

SEQ ID NO: 23608 - DNA, 22 bp, synthetic construct
  misc_feature 1..22: note = chemically synthesized
  source 1..22: mol_type = other DNA
tacaccaacagcaaccaaatgg

SEQ ID NO: 23609 - DNA, 22 bp, synthetic construct
  misc_feature 1..22: note = chemically synthesized
  source 1..22: mol_type = other DNA
aaccccttgtacaatagatgca

SEQ ID NO: 23610 - DNA, 22 bp, synthetic construct
  misc_feature 1..22: note = chemically synthesized
  source 1..22: mol_type = other DNA
gtacaatagatgcaaaaatggc

SEQ ID NO: 23611 - DNA, 22 bp, synthetic construct
  misc_feature 1..22: note = chemically synthesized
  source 1..22: mol_type = other DNA
tacaatagatgcaaaaatggcc

SEQ ID NO: 23612 - DNA, 22 bp, synthetic construct
  misc_feature 1..22: note = chemically synthesized
  source 1..22: mol_type = other DNA
atacaacccctatttattgcca

SEQ ID NO: 23613 - DNA, 22 bp, synthetic construct
  misc_feature 1..22: note = chemically synthesized
  source 1..22: mol_type = other DNA
tttattgccatataaaacgtac

SEQ ID NO: 23614 - DNA, 22 bp, synthetic construct
  misc_feature 1..22: note = chemically synthesized
  source 1..22: mol_type = other DNA
attgccatataaaacgtactct

SEQ ID NO: 23615 - DNA, 22 bp, synthetic construct
  misc_feature 1..22: note = chemically synthesized
  source 1..22: mol_type = other DNA
ttgccatataaaacgtactctc

SEQ ID NO: 23616 - DNA, 22 bp, synthetic construct
  misc_feature 1..22: note = chemically synthesized
  source 1..22: mol_type = other DNA
ccatataaaacgtactctcaag

SEQ ID NO: 23617 - DNA, 22 bp, synthetic construct
  misc_feature 1..22: note = chemically synthesized
  source 1..22: mol_type = other DNA
tcaagatggattaaagacttaa

SEQ ID NO: 23618 - DNA, 22 bp, synthetic construct
  misc_feature 1..22: note = chemically synthesized
  source 1..22: mol_type = other DNA
aagatggattaaagacttaaat

SEQ ID NO: 23619 - DNA, 22 bp, synthetic construct
  misc_feature 1..22: note = chemically synthesized
  source 1..22: mol_type = other DNA
aagacttaaatataaaacttaa

SEQ ID NO: 23620 - DNA, 22 bp, synthetic construct
  misc_feature 1..22: note = chemically synthesized
  source 1..22: mol_type = other DNA
aaatataaaacttaaaactata

SEQ ID NO: 23621 - DNA, 22 bp, synthetic construct
  misc_feature 1..22: note = chemically synthesized
  source 1..22: mol_type = other DNA
aatataaaacttaaaactataa

SEQ ID NO: 23622 - DNA, 22 bp, synthetic construct
  misc_feature 1..22: note = chemically synthesized
  source 1..22: mol_type = other DNA
aaaactataaaactactaaaag

SEQ ID NO: 23623 - DNA, 22 bp, synthetic construct
  misc_feature 1..22: note = chemically synthesized
  source 1..22: mol_type = other DNA
aaactataaaactactaaaaga

SEQ ID NO: 23624 - DNA, 22 bp, synthetic construct
  misc_feature 1..22: note = chemically synthesized
  source 1..22: mol_type = other DNA
taaaactactaaaagaaaacat

SEQ ID NO: 23625 - DNA, 22 bp, synthetic construct
  misc_feature 1..22: note = chemically synthesized
  source 1..22: mol_type = other DNA
ctaaaagaaaacataagggaga

SEQ ID NO: 23626 - DNA, 22 bp, synthetic construct
  misc_feature 1..22: note = chemically synthesized
  source 1..22: mol_type = other DNA
aaagaaaacataagggagacac

SEQ ID NO: 23627 - DNA, 22 bp, synthetic construct
  misc_feature 1..22: note = chemically synthesized
  source 1..22: mol_type = other DNA
caagacatggctttgggcaaag

SEQ ID NO: 23628 - DNA, 22 bp, synthetic construct
  misc_feature 1..22: note = chemically synthesized
  source 1..22: mol_type = other DNA
aagacatggctttgggcaaaga

SEQ ID NO: 23629 - DNA, 22 bp, synthetic construct
  misc_feature 1..22: note = chemically synthesized
  source 1..22: mol_type = other DNA
tgggcaaagattttatggccaa

SEQ ID NO: 23630 - DNA, 22 bp, synthetic construct
  misc_feature 1..22: note = chemically synthesized
  source 1..22: mol_type = other DNA
gggcaaagattttatggccaag

SEQ ID NO: 23631 - DNA, 22 bp, synthetic construct
  misc_feature 1..22: note = chemically synthesized
  source 1..22: mol_type = other DNA
ggcaaagattttatggccaaga

SEQ ID NO: 23632 - DNA, 22 bp, synthetic construct
  misc_feature 1..22: note = chemically synthesized
  source 1..22: mol_type = other DNA
tatggccaagacctcaaaagca

SEQ ID NO: 23633 - DNA, 22 bp, synthetic construct
  misc_feature 1..22: note = chemically synthesized
  source 1..22: mol_type = other DNA
atggccaagacctcaaaagcac

SEQ ID NO: 23634 - DNA, 22 bp, synthetic construct
  misc_feature 1..22: note = chemically synthesized
  source 1..22: mol_type = other DNA
tggccaagacctcaaaagcaca

SEQ ID NO: 23635 - DNA, 22 bp, synthetic construct
  misc_feature 1..22: note = chemically synthesized
  source 1..22: mol_type = other DNA
aaaagcacaggcaacaaaagca

SEQ ID NO: 23636 - DNA, 22 bp, synthetic construct
  misc_feature 1..22: note = chemically synthesized
  source 1..22: mol_type = other DNA
tattaagctaaaatacatctgc

SEQ ID NO: 23637 - DNA, 22 bp, synthetic construct
  misc_feature 1..22: note = chemically synthesized
  source 1..22: mol_type = other DNA
agctaaaatacatctgcacagt

SEQ ID NO: 23638 - DNA, 22 bp, synthetic construct
  misc_feature 1..22: note = chemically synthesized
  source 1..22: mol_type = other DNA
aaatacatctgcacagtaaagg

SEQ ID NO: 23639 - DNA, 22 bp, synthetic construct
  misc_feature 1..22: note = chemically synthesized
  source 1..22: mol_type = other DNA
cacagtaaaggaaacaatcaac

SEQ ID NO: 23640 - DNA, 22 bp, synthetic construct
  misc_feature 1..22: note = chemically synthesized
  source 1..22: mol_type = other DNA
ttgaatgcgagaaaatatttgc

SEQ ID NO: 23641 - DNA, 22 bp, synthetic construct
  misc_feature 1..22: note = chemically synthesized
  source 1..22: mol_type = other DNA
aatgcgagaaaatatttgcata

SEQ ID NO: 23642 - DNA, 22 bp, synthetic construct
  misc_feature 1..22: note = chemically synthesized
  source 1..22: mol_type = other DNA
gcatacatttgacaaggaatta

SEQ ID NO: 23643 - DNA, 22 bp, synthetic construct
  misc_feature 1..22: note = chemically synthesized
  source 1..22: mol_type = other DNA
catacatttgacaaggaattaa

SEQ ID NO: 23644 - DNA, 22 bp, synthetic construct
  misc_feature 1..22: note = chemically synthesized
  source 1..22: mol_type = other DNA
gacaaggaattaatctccagaa

SEQ ID NO: 23645 - DNA, 22 bp, synthetic construct
  misc_feature 1..22: note = chemically synthesized
  source 1..22: mol_type = other DNA
acaaggaattaatctccagaat

SEQ ID NO: 23646 - DNA, 22 bp, synthetic construct
  misc_feature 1..22: note = chemically synthesized
  source 1..22: mol_type = other DNA
atctccagaatatataagaaac

SEQ ID NO: 23647 - DNA, 22 bp, synthetic construct
  misc_feature 1..22: note = chemically synthesized
  source 1..22: mol_type = other DNA
cagaatatataagaaactcaaa

SEQ ID NO: 23648 - DNA, 22 bp, synthetic construct
  misc_feature 1..22: note = chemically synthesized
  source 1..22: mol_type = other DNA
aaacaactcaacagtggaaaaa

SEQ ID NO: 23649 - DNA, 22 bp, synthetic construct
  misc_feature 1..22: note = chemically synthesized
  source 1..22: mol_type = other DNA
aacagtggaaaaacaaataatc

SEQ ID NO: 23650 - DNA, 22 bp, synthetic construct
  misc_feature 1..22: note = chemically synthesized
  source 1..22: mol_type = other DNA
attaaaaaattggcaaaggata

SEQ ID NO: 23651 - DNA, 22 bp, synthetic construct
  misc_feature 1..22: note = chemically synthesized
  source 1..22: mol_type = other DNA
aaaaattggcaaaggatatttt

SEQ ID NO: 23652 - DNA, 22 bp, synthetic construct
  misc_feature 1..22: note = chemically synthesized
  source 1..22: mol_type = other DNA
gcaaaggatatttttcaaaaga

SEQ ID NO: 23653 - DNA, 22 bp, synthetic construct
  misc_feature 1..22: note = chemically synthesized
  source 1..22: mol_type = other DNA
ttcaaaagaagacatacaaatg

SEQ ID NO: 23654 - DNA, 22 bp, synthetic construct
  misc_feature 1..22: note = chemically synthesized
  source 1..22: mol_type = other DNA
tcaaaagaagacatacaaatgc

SEQ ID NO: 23655 - DNA, 22 bp, synthetic construct
  misc_feature 1..22: note = chemically synthesized
  source 1..22: mol_type = other DNA
caaaagaagacatacaaatgca

SEQ ID NO: 23656 - DNA, 22 bp, synthetic construct
  misc_feature 1..22: note = chemically synthesized
  source 1..22: mol_type = other DNA
aaaagaagacatacaaatgcac

SEQ ID NO: 23657 - DNA, 22 bp, synthetic construct
  misc_feature 1..22: note = chemically synthesized
  source 1..22: mol_type = other DNA
ctcaacattactaatcatcaga

SEQ ID NO: 23658 - DNA, 22 bp, synthetic construct
  misc_feature 1..22: note = chemically synthesized
  source 1..22: mol_type = other DNA
aacattactaatcatcagagaa

SEQ ID NO: 23659 - DNA, 22 bp, synthetic construct
  misc_feature 1..22: note = chemically synthesized
  source 1..22: mol_type = other DNA
ctaatcatcagagaaatgcaaa

SEQ ID NO: 23660 - DNA, 22 bp, synthetic construct
  misc_feature 1..22: note = chemically synthesized
  source 1..22: mol_type = other DNA
atcatcagagaaatgcaaatca

SEQ ID NO: 23661 - DNA, 22 bp, synthetic construct
  misc_feature 1..22: note = chemically synthesized
  source 1..22: mol_type = other DNA
atgccagttagaatcatcatga

SEQ ID NO: 23662 - DNA, 22 bp, synthetic construct
  misc_feature 1..22: note = chemically synthesized
  source 1..22: mol_type = other DNA
tgccagttagaatcatcatgat

SEQ ID NO: 23663 - DNA, 22 bp, synthetic construct
  misc_feature 1..22: note = chemically synthesized
  source 1..22: mol_type = other DNA
gaatcatcatgatttaaataaa

SEQ ID NO: 23664 - DNA, 22 bp, synthetic construct
  misc_feature 1..22: note = chemically synthesized
  source 1..22: mol_type = other DNA
aaataaattaataaataaataa

SEQ ID NO: 23665 - DNA, 22 bp, synthetic construct
  misc_feature 1..22: note = chemically synthesized
  source 1..22: mol_type = other DNA
aataaattaataaataaataac

SEQ ID NO: 23666 - DNA, 22 bp, synthetic construct
  misc_feature 1..22: note = chemically synthesized
  source 1..22: mol_type = other DNA
ataaataaataacacatgctgg

SEQ ID NO: 23667 - DNA, 22 bp, synthetic construct
  misc_feature 1..22: note = chemically synthesized
  source 1..22: mol_type = other DNA
gcaaggatgtgaaggaaaaggc

SEQ ID NO: 23668 - DNA, 22 bp, synthetic construct
  misc_feature 1..22: note = chemically synthesized
  source 1..22: mol_type = other DNA
gtaggcactattggtaagcatg

SEQ ID NO: 23669 - DNA, 22 bp, synthetic construct
  misc_feature 1..22: note = chemically synthesized
  source 1..22: mol_type = other DNA
ttggtaagcatgcaaattagta

SEQ ID NO: 23670 - DNA, 22 bp, synthetic construct
  misc_feature 1..22: note = chemically synthesized
  source 1..22: mol_type = other DNA
gtaagcatgcaaattagtatag

SEQ ID NO: 23671 - DNA, 22 bp, synthetic construct
  misc_feature 1..22: note = chemically synthesized
  source 1..22: mol_type = other DNA
gtatagccactatggaaaacaa

SEQ ID NO: 23672 - DNA, 22 bp, synthetic construct
  misc_feature 1..22: note = chemically synthesized
  source 1..22: mol_type = other DNA
tggaaaacaatatgtagattta

SEQ ID NO: 23673 - DNA, 22 bp, synthetic construct
  misc_feature 1..22: note = chemically synthesized
  source 1..22: mol_type = other DNA
accaaaaagctaaaaattgaac

SEQ ID NO: 23674 - DNA, 22 bp, synthetic construct
  misc_feature 1..22: note = chemically synthesized
  source 1..22: mol_type = other DNA
ccaaaaagctaaaaattgaact

SEQ ID NO: 23675 - DNA, 22 bp, synthetic construct
  misc_feature 1..22: note = chemically synthesized
  source 1..22: mol_type = other DNA
aaaattgaactatcataagatc

SEQ ID NO: 23676 - DNA, 22 bp, synthetic construct
  misc_feature 1..22: note = chemically synthesized
  source 1..22: mol_type = other DNA
aactatcataagatccagcaat

SEQ ID NO: 23677 - DNA, 22 bp, synthetic construct
  misc_feature 1..22: note = chemically synthesized
  source 1..22: mol_type = other DNA
tcataagatccagcaatcttat

SEQ ID NO: 23678 - DNA, 22 bp, synthetic construct
  misc_feature 1..22: note = chemically synthesized
  source 1..22: mol_type = other DNA
attactgggtatttatccaaag

SEQ ID NO: 23679 - DNA, 22 bp, synthetic construct
  misc_feature 1..22: note = chemically synthesized
  source 1..22: mol_type = other DNA
ttactgggtatttatccaaagg

SEQ ID NO: 23680 - DNA, 22 bp, synthetic construct
  misc_feature 1..22: note = chemically synthesized
  source 1..22: mol_type = other DNA
ctgggtatttatccaaaggaaa

SEQ ID NO: 23681 - DNA, 22 bp, synthetic construct
  misc_feature 1..22: note = chemically synthesized
  source 1..22: mol_type = other DNA
ggtatttatccaaaggaaaaga

SEQ ID NO: 23682 - DNA, 22 bp, synthetic construct
  misc_feature 1..22: note = chemically synthesized
  source 1..22: mol_type = other DNA
atccaaaggaaaagaattcaga

SEQ ID NO: 23683 - DNA, 22 bp, synthetic construct
  misc_feature 1..22: note = chemically synthesized
  source 1..22: mol_type = other DNA
tccaaaggaaaagaattcagaa

SEQ ID NO: 23684 - DNA, 22 bp, synthetic construct
  misc_feature 1..22: note = chemically synthesized
  source 1..22: mol_type = other DNA
agaataataaacagatactggt

SEQ ID NO: 23685 - DNA, 22 bp, synthetic construct
  misc_feature 1..22: note = chemically synthesized
  source 1..22: mol_type = other DNA
gtaccacactgtttattgcagc

SEQ ID NO: 23686 - DNA, 22 bp, synthetic construct
  misc_feature 1..22: note = chemically synthesized
  source 1..22: mol_type = other DNA
tttattgcagcacgattcacat

SEQ ID NO: 23687 - DNA, 22 bp, synthetic construct
  misc_feature 1..22: note = chemically synthesized
  source 1..22: mol_type = other DNA
attgcagcacgattcacattag

SEQ ID NO: 23688 - DNA, 22 bp, synthetic construct
  misc_feature 1..22: note = chemically synthesized
  source 1..22: mol_type = other DNA
ttgcagcacgattcacattagc

SEQ ID NO: 23689 - DNA, 22 bp, synthetic construct
  misc_feature 1..22: note = chemically synthesized
  source 1..22: mol_type = other DNA
cagcacgattcacattagcaaa

SEQ ID NO: 23690 - DNA, 22 bp, synthetic construct
  misc_feature 1..22: note = chemically synthesized
  source 1..22: mol_type = other DNA
acattagcaaagatatggaatc

SEQ ID NO: 23691 - DNA, 22 bp, synthetic construct
  misc_feature 1..22: note = chemically synthesized
  source 1..22: mol_type = other DNA
gcaaagatatggaatcaaccta

SEQ ID NO: 23692 - DNA, 22 bp, synthetic construct
  misc_feature 1..22: note = chemically synthesized
  source 1..22: mol_type = other DNA
agtgtccatcaatggatgaatg

SEQ ID NO: 23693 - DNA, 22 bp, synthetic construct
  misc_feature 1..22: note = chemically synthesized
  source 1..22: mol_type = other DNA
aatattattcaaccatacaaat

SEQ ID NO: 23694 - DNA, 22 bp, synthetic construct
  misc_feature 1..22: note = chemically synthesized
  source 1..22: mol_type = other DNA
ttcaaccatacaaatataaaat

SEQ ID NO: 23695 - DNA, 22 bp, synthetic construct
  misc_feature 1..22: note = chemically synthesized
  source 1..22: mol_type = other DNA
aaccatacaaatataaaatcat

SEQ ID NO: 23696 - DNA, 22 bp, synthetic construct
  misc_feature 1..22: note = chemically synthesized
  source 1..22: mol_type = other DNA
catttgcagcaacatggatgaa

SEQ ID NO: 23697 - DNA, 22 bp, synthetic construct
  misc_feature 1..22: note = chemically synthesized
  source 1..22: mol_type = other DNA
atttgcagcaacatggatgaaa

SEQ ID NO: 23698 - DNA, 22 bp, synthetic construct
  misc_feature 1..22: note = chemically synthesized
  source 1..22: mol_type = other DNA
gcagcaacatggatgaaactgg

SEQ ID NO: 23699 - DNA, 22 bp, synthetic construct
  misc_feature 1..22: note = chemically synthesized
  source 1..22: mol_type = other DNA
cagcaacatggatgaaactgga

SEQ ID NO: 23700 - DNA, 22 bp, synthetic construct
  misc_feature 1..22: note = chemically synthesized
  source 1..22: mol_type = other DNA
gaagtcattatgttaaacgaaa

SEQ ID NO: 23701 - DNA, 22 bp, synthetic construct
  misc_feature 1..22: note = chemically synthesized
  source 1..22: mol_type = other DNA
tgttaaacgaaataagccaggc

SEQ ID NO: 23702 - DNA, 22 bp, synthetic construct
  misc_feature 1..22: note = chemically synthesized
  source 1..22: mol_type = other DNA
aacgaaataagccaggcataga

SEQ ID NO: 23703 - DNA, 22 bp, synthetic construct
  misc_feature 1..22: note = chemically synthesized
  source 1..22: mol_type = other DNA
tgcatgttctcactgatatgtg

SEQ ID NO: 23704 - DNA, 22 bp, synthetic construct
  misc_feature 1..22: note = chemically synthesized
  source 1..22: mol_type = other DNA
gcatgttctcactgatatgtgg

SEQ ID NO: 23705 - DNA, 22 bp, synthetic construct
  misc_feature 1..22: note = chemically synthesized
  source 1..22: mol_type = other DNA
catgttctcactgatatgtggg

SEQ ID NO: 23706 - DNA, 22 bp, synthetic construct
  misc_feature 1..22: note = chemically synthesized
  source 1..22: mol_type = other DNA
tcactgatatgtgggagctaaa

SEQ ID NO: 23707 - DNA, 22 bp, synthetic construct
  misc_feature 1..22: note = chemically synthesized
  source 1..22: mol_type = other DNA
actgatatgtgggagctaaaaa

SEQ ID NO: 23708 - DNA, 22 bp, synthetic construct
  misc_feature 1..22: note = chemically synthesized
  source 1..22: mol_type = other DNA
atatgtgggagctaaaaaagtt

SEQ ID NO: 23709 - DNA, 22 bp, synthetic construct
  misc_feature 1..22: note = chemically synthesized
  source 1..22: mol_type = other DNA
aaaaagttaatatcatgtaggt

SEQ ID NO: 23710 - DNA, 22 bp, synthetic construct
  misc_feature 1..22: note = chemically synthesized
  source 1..22: mol_type = other DNA
atatcatgtaggtagagagtag

SEQ ID NO: 23711 - DNA, 22 bp, synthetic construct
  misc_feature 1..22: note = chemically synthesized
  source 1..22: mol_type = other DNA
tgggaggaagggagacgaagag

SEQ ID NO: 23712 - DNA, 22 bp, synthetic construct
  misc_feature 1..22: note = chemically synthesized
  source 1..22: mol_type = other DNA
gttaatggaaacaggcagttag

SEQ ID NO: 23713 - DNA, 22 bp, synthetic construct
  misc_feature 1..22: note = chemically synthesized
  source 1..22: mol_type = other DNA
atggaaacaggcagttagatag

SEQ ID NO: 23714 - DNA, 22 bp, synthetic construct
  misc_feature 1..22: note = chemically synthesized
  source 1..22: mol_type = other DNA
gatagaaggaatatgttctgat

SEQ ID NO: 23715 - DNA, 22 bp, synthetic construct
  misc_feature 1..22: note = chemically synthesized
  source 1..22: mol_type = other DNA
tgatgttcaatagcaaagtagg

SEQ ID NO: 23716 - DNA, 22 bp, synthetic construct
  misc_feature 1..22: note = chemically synthesized
  source 1..22: mol_type = other DNA
atgttcaatagcaaagtagggt

SEQ ID NO: 23717 - DNA, 22 bp, synthetic construct
  misc_feature 1..22: note = chemically synthesized
  source 1..22: mol_type = other DNA
aatagcaaagtagggtgattat

SEQ ID NO: 23718 - DNA, 22 bp, synthetic construct
  misc_feature 1..22: note = chemically synthesized
  source 1..22: mol_type = other DNA
tagttaaaaacaatatattgta

SEQ ID NO: 23719 - DNA, 22 bp, synthetic construct
  misc_feature 1..22: note = chemically synthesized
  source 1..22: mol_type = other DNA
aaaacaatatattgtatatttc

SEQ ID NO: 23720 - DNA, 22 bp, synthetic construct
  misc_feature 1..22: note = chemically synthesized
  source 1..22: mol_type = other DNA
tatatttcaaaatagtagaaga

SEQ ID NO: 23721 - DNA, 22 bp, synthetic construct
  misc_feature 1..22: note = chemically synthesized
  source 1..22: mol_type = other DNA
caaaatagtagaagaaaggtct

SEQ ID NO: 23722 - DNA, 22 bp, synthetic construct
  misc_feature 1..22: note = chemically synthesized
  source 1..22: mol_type = other DNA
aaaatagtagaagaaaggtctt

SEQ ID NO: 23723 - DNA, 22 bp, synthetic construct
  misc_feature 1..22: note = chemically synthesized
  source 1..22: mol_type = other DNA
gaaatgttcctaacacatagaa

SEQ ID NO: 23724 - DNA, 22 bp, synthetic construct
  misc_feature 1..22: note = chemically synthesized
  source 1..22: mol_type = other DNA
aaatgttcctaacacatagaaa

SEQ ID NO: 23725 - DNA, 22 bp, synthetic construct
  misc_feature 1..22: note = chemically synthesized
  source 1..22: mol_type = other DNA
ctaacacatagaaacgataaat

SEQ ID NO: 23726 - DNA, 22 bp, synthetic construct
  misc_feature 1..22: note = chemically synthesized
  source 1..22: mol_type = other DNA
acacatagaaacgataaatact

SEQ ID NO: 23727 - DNA, 22 bp, synthetic construct
  misc_feature 1..22: note = chemically synthesized
  source 1..22: mol_type = other DNA
gaggtgatgaataccccaaata

SEQ ID NO: 23728 - DNA, 22 bp, synthetic construct
  misc_feature 1..22: note = chemically synthesized
  source 1..22: mol_type = other DNA
aggtgatgaataccccaaatac

SEQ ID NO: 23729 - DNA, 22 bp, synthetic construct
  misc_feature 1..22: note = chemically synthesized
  source 1..22: mol_type = other DNA
acttgatcattatacattatat

SEQ ID NO: 23730 - DNA, 22 bp, synthetic construct
  misc_feature 1..22: note = chemically synthesized
  source 1..22: mol_type = other DNA
gatcattatacattatatgcat

SEQ ID NO: 23731 - DNA, 22 bp, synthetic construct
  misc_feature 1..22: note = chemically synthesized
  source 1..22: mol_type = other DNA
atcattatacattatatgcatg

SEQ ID NO: 23732 - DNA, 22 bp, synthetic construct
  misc_feature 1..22: note = chemically synthesized
  source 1..22: mol_type = other DNA
tacattatatgcatgtaacaaa

SEQ ID NO: 23733 - DNA, 22 bp, synthetic construct
  misc_feature 1..22: note = chemically synthesized
  source 1..22: mol_type = other DNA
tatgcatgtaacaaaatgtcac

SEQ ID NO: 23734 - DNA, 22 bp, synthetic construct
  misc_feature 1..22: note = chemically synthesized
  source 1..22: mol_type = other DNA
atacatataaacacgtcatata

SEQ ID NO: 23735 - DNA, 22 bp, synthetic construct
  misc_feature 1..22: note = chemically synthesized
  source 1..22: mol_type = other DNA
atattggttgaggcctgattgt

SEQ ID NO: 23736 - DNA, 22 bp, synthetic construct
  misc_feature 1..22: note = chemically synthesized
  source 1..22: mol_type = other DNA
gttgaggcctgattgtaagtaa

SEQ ID NO: 23737 - DNA, 22 bp, synthetic construct
  misc_feature 1..22: note = chemically synthesized
  source 1..22: mol_type = other DNA
aggcctgattgtaagtaaatct

SEQ ID NO: 23738 - DNA, 22 bp, synthetic construct
  misc_feature 1..22: note = chemically synthesized
  source 1..22: mol_type = other DNA
attgtaagtaaatctttgtccc

SEQ ID NO: 23739 - DNA, 22 bp, synthetic construct
  misc_feature 1..22: note = chemically synthesized
  source 1..22: mol_type = other DNA
taagtaaatctttgtccctcca

SEQ ID NO: 23740 - DNA, 22 bp, synthetic construct
  misc_feature 1..22: note = chemically synthesized
  source 1..22: mol_type = other DNA
tgtccctccagacatttccctg

SEQ ID NO: 23741 - DNA, 22 bp, synthetic construct
  misc_feature 1..22: note = chemically synthesized
  source 1..22: mol_type = other DNA
gtccctccagacatttccctgt

SEQ ID NO: 23742 - DNA, 22 bp, synthetic construct
  misc_feature 1..22: note = chemically synthesized
  source 1..22: mol_type = other DNA
tccctccagacatttccctgta

SEQ ID NO: 23743 - DNA, 22 bp, synthetic construct
  misc_feature 1..22: note = chemically synthesized
  source 1..22: mol_type = other DNA
cagacatttccctgtactgtct

SEQ ID NO: 23744 - DNA, 22 bp, synthetic construct
  misc_feature 1..22: note = chemically synthesized
  source 1..22: mol_type = other DNA
ccctgtactgtcttgctgtgag

SEQ ID NO: 23745 - DNA, 22 bp, synthetic construct
  misc_feature 1..22: note = chemically synthesized
  source 1..22: mol_type = other DNA
cctgtactgtcttgctgtgagg

SEQ ID NO: 23746 - DNA, 22 bp, synthetic construct
  misc_feature 1..22: note = chemically synthesized
  source 1..22: mol_type = other DNA
tactgtcttgctgtgaggagct

SEQ ID NO: 23747 - DNA, 22 bp, synthetic construct
  misc_feature 1..22: note = chemically synthesized
  source 1..22: mol_type = other DNA
tcttgctgtgaggagcttcttt

SEQ ID NO: 23748 - DNA, 22 bp, synthetic construct
  misc_feature 1..22: note = chemically synthesized
  source 1..22: mol_type = other DNA
gctgtgaggagcttcttttact

SEQ ID NO: 23749 - DNA, 22 bp, synthetic construct
  misc_feature 1..22: note = chemically synthesized
  source 1..22: mol_type = other DNA
ctgtgaggagcttcttttactg

SEQ ID NO: 23750 - DNA, 22 bp, synthetic construct
  misc_feature 1..22: note = chemically synthesized
  source 1..22: mol_type = other DNA
tgaggagcttcttttactgcta

SEQ ID NO: 23751 - DNA, 22 bp, synthetic construct
  misc_feature 1..22: note = chemically synthesized
  source 1..22: mol_type = other DNA
cttttactgctatttcttatat

SEQ ID NO: 23752 - DNA, 22 bp, synthetic construct
  misc_feature 1..22: note = chemically synthesized
  source 1..22: mol_type = other DNA
ttttactgctatttcttatatt

SEQ ID NO: 23753 - DNA, 22 bp, synthetic construct
  misc_feature 1..22: note = chemically synthesized
  source 1..22: mol_type = other DNA
ttactgctatttcttatattcc

SEQ ID NO: 23754 - DNA, 22 bp, synthetic construct
  misc_feature 1..22: note = chemically synthesized
  source 1..22: mol_type = other DNA
tactgctatttcttatattcca

SEQ ID NO: 23755 - DNA, 22 bp, synthetic construct
  misc_feature 1..22: note = chemically synthesized
  source 1..22: mol_type = other DNA
actgctatttcttatattccaa

SEQ ID NO: 23756 - DNA, 22 bp, synthetic construct
  misc_feature 1..22: note = chemically synthesized
  source 1..22: mol_type = other DNA
ctgctatttcttatattccaac

SEQ ID NO: 23757 - DNA, 22 bp, synthetic construct
  misc_feature 1..22: note = chemically synthesized
  source 1..22: mol_type = other DNA
ctatttcttatattccaacacc

SEQ ID NO: 23758 - DNA, 22 bp, synthetic construct
  misc_feature 1..22: note = chemically synthesized
  source 1..22: mol_type = other DNA
tttcttatattccaacaccatt

SEQ ID NO: 23759 - DNA, 22 bp, synthetic construct
  misc_feature 1..22: note = chemically synthesized
  source 1..22: mol_type = other DNA
cttatattccaacaccatttta

SEQ ID NO: 23760 - DNA, 22 bp, synthetic construct
  misc_feature 1..22: note = chemically synthesized
  source 1..22: mol_type = other DNA
ttatattccaacaccattttag

SEQ ID NO: 23761 - DNA, 22 bp, synthetic construct
  misc_feature 1..22: note = chemically synthesized
  source 1..22: mol_type = other DNA
atattccaacaccattttagcc

SEQ ID NO: 23762 - DNA, 22 bp, synthetic construct
  misc_feature 1..22: note = chemically synthesized
  source 1..22: mol_type = other DNA
tattccaacaccattttagccc

SEQ ID NO: 23763 - DNA, 22 bp, synthetic construct
  misc_feature 1..22: note = chemically synthesized
  source 1..22: mol_type = other DNA
caacaccattttagcccttttt

SEQ ID NO: 23764 - DNA, 22 bp, synthetic construct
  misc_feature 1..22: note = chemically synthesized
  source 1..22: mol_type = other DNA
tagcccttttttgtcctcccca

SEQ ID NO: 23765 - DNA, 22 bp, synthetic construct
  misc_feature 1..22: note = chemically synthesized
  source 1..22: mol_type = other DNA
agcccttttttgtcctccccat

SEQ ID NO: 23766 - DNA, 22 bp, synthetic construct
  misc_feature 1..22: note = chemically synthesized
  source 1..22: mol_type = other DNA
gcccttttttgtcctccccata

SEQ ID NO: 23767 - DNA, 22 bp, synthetic construct
  misc_feature 1..22: note = chemically synthesized
  source 1..22: mol_type = other DNA
ttttgtcctccccatattttta

SEQ ID NO: 23768 - DNA, 22 bp, synthetic construct
  misc_feature 1..22: note = chemically synthesized
  source 1..22: mol_type = other DNA
tttgtcctccccatatttttac

SEQ ID NO: 23769 - DNA, 22 bp, synthetic construct
  misc_feature 1..22: note = chemically synthesized
  source 1..22: mol_type = other DNA
ttgtcctccccatatttttacc

SEQ ID NO: 23770 - DNA, 22 bp, synthetic construct
  misc_feature 1..22: note = chemically synthesized
  source 1..22: mol_type = other DNA
tgtcctccccatatttttacct

SEQ ID NO: 23771 - DNA, 22 bp, synthetic construct
  misc_feature 1..22: note = chemically synthesized
  source 1..22: mol_type = other DNA
gtcctccccatatttttacctc

SEQ ID NO: 23772 - DNA, 22 bp, synthetic construct
  misc_feature 1..22: note = chemically synthesized
  source 1..22: mol_type = other DNA
tcctccccatatttttacctcg

SEQ ID NO: 23773 - DNA, 22 bp, synthetic construct
  misc_feature 1..22: note = chemically synthesized
  source 1..22: mol_type = other DNA
cccatatttttacctcggtttt

SEQ ID NO: 23774 - DNA, 22 bp, synthetic construct
  misc_feature 1..22: note = chemically synthesized
  source 1..22: mol_type = other DNA
ttacctcggtttttactgttta

SEQ ID NO: 23775 - DNA, 22 bp, synthetic construct
  misc_feature 1..22: note = chemically synthesized
  source 1..22: mol_type = other DNA
tacctcggtttttactgtttat

SEQ ID NO: 23776 - DNA, 22 bp, synthetic construct
  misc_feature 1..22: note = chemically synthesized
  source 1..22: mol_type = other DNA
acctcggtttttactgtttata

SEQ ID NO: 23777 - DNA, 22 bp, synthetic construct
  misc_feature 1..22: note = chemically synthesized
  source 1..22: mol_type = other DNA
cctcggtttttactgtttatat

SEQ ID NO: 23778 - DNA, 22 bp, synthetic construct
  misc_feature 1..22: note = chemically synthesized
  source 1..22: mol_type = other DNA
ggtttttactgtttatatagca

SEQ ID NO: 23779 - DNA, 22 bp, synthetic construct
  misc_feature 1..22: note = chemically synthesized
  source 1..22: mol_type = other DNA
ttactgtttatatagcacactt

SEQ ID NO: 23780 - DNA, 22 bp, synthetic construct
  misc_feature 1..22: note = chemically synthesized
  source 1..22: mol_type = other DNA
tactgtttatatagcacacttt

SEQ ID NO: 23781 - DNA, 22 bp, synthetic construct
  misc_feature 1..22: note = chemically synthesized
  source 1..22: mol_type = other DNA
actgtttatatagcacactttg

SEQ ID NO: 23782 - DNA, 22 bp, synthetic construct
  misc_feature 1..22: note = chemically synthesized
  source 1..22: mol_type = other DNA
ctgtttatatagcacactttgt

SEQ ID NO: 23783 - DNA, 22 bp, synthetic construct
  misc_feature 1..22: note = chemically synthesized
  source 1..22: mol_type = other DNA
tttatatagcacactttgtgct

SEQ ID NO: 23784 - DNA, 22 bp, synthetic construct
  misc_feature 1..22: note = chemically synthesized
  source 1..22: mol_type = other DNA
atatagcacactttgtgctata

SEQ ID NO: 23785 - DNA, 22 bp, synthetic construct
  misc_feature 1..22: note = chemically synthesized
  source 1..22: mol_type = other DNA
tatagcacactttgtgctatag

SEQ ID NO: 23786 - DNA, 22 bp, synthetic construct
  misc_feature 1..22: note = chemically synthesized
  source 1..22: mol_type = other DNA
tgtgctatagtttacctcagtt

SEQ ID NO: 23787 - DNA, 22 bp, synthetic construct
  misc_feature 1..22: note = chemically synthesized
  source 1..22: mol_type = other DNA
gtgctatagtttacctcagttt

SEQ ID NO: 23788 - DNA, 22 bp, synthetic construct
  misc_feature 1..22: note = chemically synthesized
  source 1..22: mol_type = other DNA
tgctatagtttacctcagtttt

SEQ ID NO: 23789 - DNA, 22 bp, synthetic construct
  misc_feature 1..22: note = chemically synthesized
  source 1..22: mol_type = other DNA
tagtttacctcagtttttacta

SEQ ID NO: 23790 - DNA, 22 bp, synthetic construct
  misc_feature 1..22: note = chemically synthesized
  source 1..22: mol_type = other DNA
acctcagtttttactatttata

SEQ ID NO: 23791 - DNA, 22 bp, synthetic construct
  misc_feature 1..22: note = chemically synthesized
  source 1..22: mol_type = other DNA
cctcagtttttactatttataa

SEQ ID NO: 23792 - DNA, 22 bp, synthetic construct
  misc_feature 1..22: note = chemically synthesized
  source 1..22: mol_type = other DNA
agtttttactatttataaagca

SEQ ID NO: 23793 - DNA, 22 bp, synthetic construct
  misc_feature 1..22: note = chemically synthesized
  source 1..22: mol_type = other DNA
ttactatttataaagcacattt

SEQ ID NO: 23794 - DNA, 22 bp, synthetic construct
  misc_feature 1..22: note = chemically synthesized
  source 1..22: mol_type = other DNA
tactatttataaagcacatttt

SEQ ID NO: 23795 - DNA, 22 bp, synthetic construct
  misc_feature 1..22: note = chemically synthesized
  source 1..22: mol_type = other DNA
actatttataaagcacattttg

SEQ ID NO: 23796 - DNA, 22 bp, synthetic construct
  misc_feature 1..22: note = chemically synthesized
  source 1..22: mol_type = other DNA
ctatttataaagcacattttgc

SEQ ID NO: 23797 - DNA, 22 bp, synthetic construct
  misc_feature 1..22: note = chemically synthesized
  source 1..22: mol_type = other DNA
tttataaagcacattttgcccc

SEQ ID NO: 23798 - DNA, 22 bp, synthetic construct
  misc_feature 1..22: note = chemically synthesized
  source 1..22: mol_type = other DNA
ataaagcacattttgccccaaa

SEQ ID NO: 23799 - DNA, 22 bp, synthetic construct
  misc_feature 1..22: note = chemically synthesized
  source 1..22: mol_type = other DNA
taaagcacattttgccccaaac

SEQ ID NO: 23800 - DNA, 22 bp, synthetic construct
  misc_feature 1..22: note = chemically synthesized
  source 1..22: mol_type = other DNA
tgccccaaacttctctcttaac

SEQ ID NO: 23801 - DNA, 22 bp, synthetic construct
  misc_feature 1..22: note = chemically synthesized
  source 1..22: mol_type = other DNA
gccccaaacttctctcttaaca

SEQ ID NO: 23802 - DNA, 22 bp, synthetic construct
  misc_feature 1..22: note = chemically synthesized
  source 1..22: mol_type = other DNA
ccccaaacttctctcttaacaa

SEQ ID NO: 23803 - DNA, 22 bp, synthetic construct
  misc_feature 1..22: note = chemically synthesized
  source 1..22: mol_type = other DNA
ctctcttaacaagctagaatat

SEQ ID NO: 23804 - DNA, 22 bp, synthetic construct
  misc_feature 1..22: note = chemically synthesized
  source 1..22: mol_type = other DNA
tctcttaacaagctagaatata

SEQ ID NO: 23805 - DNA, 22 bp, synthetic construct
  misc_feature 1..22: note = chemically synthesized
  source 1..22: mol_type = other DNA
tcttaacaagctagaatataag

SEQ ID NO: 23806 - DNA, 22 bp, synthetic construct
  misc_feature 1..22: note = chemically synthesized
  source 1..22: mol_type = other DNA
ttaacaagctagaatataagtg

SEQ ID NO: 23807 - DNA, 22 bp, synthetic construct
  misc_feature 1..22: note = chemically synthesized
  source 1..22: mol_type = other DNA
aacaagctagaatataagtgaa

SEQ ID NO: 23808 - DNA, 22 bp, synthetic construct
  misc_feature 1..22: note = chemically synthesized
  source 1..22: mol_type = other DNA
acaagctagaatataagtgaat

SEQ ID NO: 23809 - DNA, 22 bp, synthetic construct
  misc_feature 1..22: note = chemically synthesized
  source 1..22: mol_type = other DNA
gaatataagtgaatgcaagagc

SEQ ID NO: 23810 - DNA, 22 bp, synthetic construct
  misc_feature 1..22: note = chemically synthesized
  source 1..22: mol_type = other DNA
ctattttcatatttgaggtata

SEQ ID NO: 23811 - DNA, 22 bp, synthetic construct
  misc_feature 1..22: note = chemically synthesized
  source 1..22: mol_type = other DNA
ttttcatatttgaggtataaac

SEQ ID NO: 23812 - DNA, 22 bp, synthetic construct
  misc_feature 1..22: note = chemically synthesized
  source 1..22: mol_type = other DNA
tcatatttgaggtataaaccaa

SEQ ID NO: 23813 - DNA, 22 bp, synthetic construct
  misc_feature 1..22: note = chemically synthesized
  source 1..22: mol_type = other DNA
catatttgaggtataaaccaag

SEQ ID NO: 23814 - DNA, 22 bp, synthetic construct
  misc_feature 1..22: note = chemically synthesized
  source 1..22: mol_type = other DNA
atatttgaggtataaaccaagg

SEQ ID NO: 23815 - DNA, 22 bp, synthetic construct
  misc_feature 1..22: note = chemically synthesized
  source 1..22: mol_type = other DNA
gaggtataaaccaaggagattt

SEQ ID NO: 23816 - DNA, 22 bp, synthetic construct
  misc_feature 1..22: note = chemically synthesized
  source 1..22: mol_type = other DNA
aggtataaaccaaggagattta

SEQ ID NO: 23817 - DNA, 22 bp, synthetic construct
  misc_feature 1..22: note = chemically synthesized
  source 1..22: mol_type = other DNA
acatacacatatatatttttaa

SEQ ID NO: 23818 - DNA, 22 bp, synthetic construct
  misc_feature 1..22: note = chemically synthesized
  source 1..22: mol_type = other DNA
catacacatatatatttttaaa

SEQ ID NO: 23819 - DNA, 22 bp, synthetic construct
  misc_feature 1..22: note = chemically synthesized
  source 1..22: mol_type = other DNA
ttaaatctgcaaataaatggtt

SEQ ID NO: 23820 - DNA, 22 bp, synthetic construct
  misc_feature 1..22: note = chemically synthesized
  source 1..22: mol_type = other DNA
taaatctgcaaataaatggttt

SEQ ID NO: 23821 - DNA, 22 bp, synthetic construct
  misc_feature 1..22: note = chemically synthesized
  source 1..22: mol_type = other DNA
aaatctgcaaataaatggtttt

SEQ ID NO: 23822 - DNA, 22 bp, synthetic construct
  misc_feature 1..22: note = chemically synthesized
  source 1..22: mol_type = other DNA
aatctgcaaataaatggtttta

SEQ ID NO: 23823 - DNA, 22 bp, synthetic construct
  misc_feature 1..22: note = chemically synthesized
  source 1..22: mol_type = other DNA
caaataaatggttttattctga

SEQ ID NO: 23824 - DNA, 22 bp, synthetic construct
  misc_feature 1..22: note = chemically synthesized
  source 1..22: mol_type = other DNA
tattctgacattaaaaaagaaa

SEQ ID NO: 23825 - DNA, 22 bp, synthetic construct
  misc_feature 1..22: note = chemically synthesized
  source 1..22: mol_type = other DNA
attctgacattaaaaaagaaaa

SEQ ID NO: 23826 - DNA, 22 bp, synthetic construct
  misc_feature 1..22: note = chemically synthesized
  source 1..22: mol_type = other DNA
ttctgacattaaaaaagaaaat

SEQ ID NO: 23827 - DNA, 22 bp, synthetic construct
  misc_feature 1..22: note = chemically synthesized
  source 1..22: mol_type = other DNA
tgacattaaaaaagaaaatact

SEQ ID NO: 23828 - DNA, 22 bp, synthetic construct
  misc_feature 1..22: note = chemically synthesized
  source 1..22: mol_type = other DNA
acattaaaaaagaaaatactta

SEQ ID NO: 23829 - DNA, 22 bp, synthetic construct
  misc_feature 1..22: note = chemically synthesized
  source 1..22: mol_type = other DNA
aaaaagaaaatacttaatatca

SEQ ID NO: 23830 - DNA, 22 bp, synthetic construct
  misc_feature 1..22: note = chemically synthesized
  source 1..22: mol_type = other DNA
aatatcattaatgaatgatcgt

SEQ ID NO: 23831 - DNA, 22 bp, synthetic construct
  misc_feature 1..22: note = chemically synthesized
  source 1..22: mol_type = other DNA
atatcattaatgaatgatcgtt

SEQ ID NO: 23832 - DNA, 22 bp, synthetic construct
  misc_feature 1..22: note = chemically synthesized
  source 1..22: mol_type = other DNA
atgaatgatcgttttaccacag

SEQ ID NO: 23833 - DNA, 22 bp, synthetic construct
  misc_feature 1..22: note = chemically synthesized
  source 1..22: mol_type = other DNA
taccacagcgtaggtcattgaa

SEQ ID NO: 23834 - DNA, 22 bp, synthetic construct
  misc_feature 1..22: note = chemically synthesized
  source 1..22: mol_type = other DNA
accacagcgtaggtcattgaat

SEQ ID NO: 23835 - DNA, 22 bp, synthetic construct
  misc_feature 1..22: note = chemically synthesized
  source 1..22: mol_type = other DNA
ccacagcgtaggtcattgaatt

SEQ ID NO: 23836 - DNA, 22 bp, synthetic construct
  misc_feature 1..22: note = chemically synthesized
  source 1..22: mol_type = other DNA
aatttgaacttaaccttcactt

SEQ ID NO: 23837 - DNA, 22 bp, synthetic construct
  misc_feature 1..22: note = chemically synthesized
  source 1..22: mol_type = other DNA
gaacttaaccttcactttcaaa

SEQ ID NO: 23838 - DNA, 22 bp, synthetic construct
  misc_feature 1..22: note = chemically synthesized
  source 1..22: mol_type = other DNA
aacttaaccttcactttcaaac

SEQ ID NO: 23839 - DNA, 22 bp, synthetic construct
  misc_feature 1..22: note = chemically synthesized
  source 1..22: mol_type = other DNA
aaccttcactttcaaacaagta

SEQ ID NO: 23840 - DNA, 22 bp, synthetic construct
  misc_feature 1..22: note = chemically synthesized
  source 1..22: mol_type = other DNA
accttcactttcaaacaagtac

SEQ ID NO: 23841 - DNA, 22 bp, synthetic construct
  misc_feature 1..22: note = chemically synthesized
  source 1..22: mol_type = other DNA
cactttcaaacaagtactttgt

SEQ ID NO: 23842 - DNA, 22 bp, synthetic construct
  misc_feature 1..22: note = chemically synthesized
  source 1..22: mol_type = other DNA
actttcaaacaagtactttgta

SEQ ID NO: 23843 - DNA, 22 bp, synthetic construct
  misc_feature 1..22: note = chemically synthesized
  source 1..22: mol_type = other DNA
tcaaacaagtactttgtatttt

SEQ ID NO: 23844 - DNA, 22 bp, synthetic construct
  misc_feature 1..22: note = chemically synthesized
  source 1..22: mol_type = other DNA
caaacaagtactttgtatttta

SEQ ID NO: 23845 - DNA, 22 bp, synthetic construct
  misc_feature 1..22: note = chemically synthesized
  source 1..22: mol_type = other DNA
aaacaagtactttgtattttat

SEQ ID NO: 23846 - DNA, 22 bp, synthetic construct
  misc_feature 1..22: note = chemically synthesized
  source 1..22: mol_type = other DNA
tgtattttattgatctctattt

SEQ ID NO: 23847 - DNA, 22 bp, synthetic construct
  misc_feature 1..22: note = chemically synthesized
  source 1..22: mol_type = other DNA
gtattttattgatctctatttt

SEQ ID NO: 23848 - DNA, 22 bp, synthetic construct
  misc_feature 1..22: note = chemically synthesized
  source 1..22: mol_type = other DNA
tattttattgatctctattttc

SEQ ID NO: 23849 - DNA, 22 bp, synthetic construct
  misc_feature 1..22: note = chemically synthesized
  source 1..22: mol_type = other DNA
tattgatctctattttcctgga

SEQ ID NO: 23850 - DNA, 22 bp, synthetic construct
  misc_feature 1..22: note = chemically synthesized
  source 1..22: mol_type = other DNA
attgatctctattttcctggaa

SEQ ID NO: 23851 - DNA, 22 bp, synthetic construct
  misc_feature 1..22: note = chemically synthesized
  source 1..22: mol_type = other DNA
ttgatctctattttcctggaac

SEQ ID NO: 23852 - DNA, 22 bp, synthetic construct
  misc_feature 1..22: note = chemically synthesized
  source 1..22: mol_type = other DNA
atctctattttcctggaacaac

SEQ ID NO: 23853 - DNA, 22 bp, synthetic construct
  misc_feature 1..22: note = chemically synthesized
  source 1..22: mol_type = other DNA
tattttcctggaacaacatggg

SEQ ID NO: 23854 - DNA, 22 bp, synthetic construct
  misc_feature 1..22: note = chemically synthesized
  source 1..22: mol_type = other DNA
ttttcctggaacaacatggggg

SEQ ID NO: 23855 - DNA, 22 bp, synthetic construct
  misc_feature 1..22: note = chemically synthesized
  source 1..22: mol_type = other DNA
tcctggaacaacatgggggcta

SEQ ID NO: 23856 - DNA, 22 bp, synthetic construct
  misc_feature 1..22: note = chemically synthesized
  source 1..22: mol_type = other DNA
cctggaacaacatgggggctat

SEQ ID NO: 23857 - DNA, 22 bp, synthetic construct
  misc_feature 1..22: note = chemically synthesized
  source 1..22: mol_type = other DNA
ctggaacaacatgggggctatg

SEQ ID NO: 23858 - DNA, 22 bp, synthetic construct
  misc_feature 1..22: note = chemically synthesized
  source 1..22: mol_type = other DNA
gaacaacatgggggctatgttt

SEQ ID NO: 23859 - DNA, 22 bp, synthetic construct
  misc_feature 1..22: note = chemically synthesized
  source 1..22: mol_type = other DNA
tgtttagcgtgaggacaaagta

SEQ ID NO: 23860 - DNA, 22 bp, synthetic construct
  misc_feature 1..22: note = chemically synthesized
  source 1..22: mol_type = other DNA
agcgtgaggacaaagtatcaca

SEQ ID NO: 23861 - DNA, 22 bp, synthetic construct
  misc_feature 1..22: note = chemically synthesized
  source 1..22: mol_type = other DNA
gcgtgaggacaaagtatcacaa

SEQ ID NO: 23862 - DNA, 22 bp, synthetic construct
  misc_feature 1..22: note = chemically synthesized
  source 1..22: mol_type = other DNA
tcacctgaaagaaaagatgagc

SEQ ID NO: 23863 - DNA, 22 bp, synthetic construct
  misc_feature 1..22: note = chemically synthesized
  source 1..22: mol_type = other DNA
cacctgaaagaaaagatgagct

SEQ ID NO: 23864 - DNA, 22 bp, synthetic construct
  misc_feature 1..22: note = chemically synthesized
  source 1..22: mol_type = other DNA
acctgaaagaaaagatgagcta

SEQ ID NO: 23865 - DNA, 22 bp, synthetic construct
  misc_feature 1..22: note = chemically synthesized
  source 1..22: mol_type = other DNA
aaagaaaagatgagctaccatg

SEQ ID NO: 23866 - DNA, 22 bp, synthetic construct
  misc_feature 1..22: note = chemically synthesized
  source 1..22: mol_type = other DNA
ccatggtacatataacaatgag

SEQ ID NO: 23867 - DNA, 22 bp, synthetic construct
  misc_feature 1..22: note = chemically synthesized
  source 1..22: mol_type = other DNA
aaactctaagtcgtcatctggc

SEQ ID NO: 23868 - DNA, 22 bp, synthetic construct
  misc_feature 1..22: note = chemically synthesized
  source 1..22: mol_type = other DNA
taagtcgtcatctggcaacact

SEQ ID NO: 23869 - DNA, 22 bp, synthetic construct
  misc_feature 1..22: note = chemically synthesized
  source 1..22: mol_type = other DNA
agtcgtcatctggcaacactgc

SEQ ID NO: 23870 - DNA, 22 bp, synthetic construct
  misc_feature 1..22: note = chemically synthesized
  source 1..22: mol_type = other DNA
gcaacactgccaatttactaaa

SEQ ID NO: 23871 - DNA, 22 bp, synthetic construct
  misc_feature 1..22: note = chemically synthesized
  source 1..22: mol_type = other DNA
ccaatttactaaaaatcactat

SEQ ID NO: 23872 - DNA, 22 bp, synthetic construct
  misc_feature 1..22: note = chemically synthesized
  source 1..22: mol_type = other DNA
actaaaaatcactatttcaaag

SEQ ID NO: 23873 - DNA, 22 bp, synthetic construct
  misc_feature 1..22: note = chemically synthesized
  source 1..22: mol_type = other DNA
ctaaaaatcactatttcaaaga

SEQ ID NO: 23874 - DNA, 22 bp, synthetic construct
  misc_feature 1..22: note = chemically synthesized
  source 1..22: mol_type = other DNA
aaaatcactatttcaaagaagt

SEQ ID NO: 23875 - DNA, 22 bp, synthetic construct
  misc_feature 1..22: note = chemically synthesized
  source 1..22: mol_type = other DNA
tttcaaagaagtatagaataga

SEQ ID NO: 23876 - DNA, 22 bp, synthetic construct
  misc_feature 1..22: note = chemically synthesized
  source 1..22: mol_type = other DNA
caaagaagtatagaatagatat

SEQ ID NO: 23877 - DNA, 22 bp, synthetic construct
  misc_feature 1..22: note = chemically synthesized
  source 1..22: mol_type = other DNA
aaagaagtatagaatagatatc

SEQ ID NO: 23878 - DNA, 22 bp, synthetic construct
  misc_feature 1..22: note = chemically synthesized
  source 1..22: mol_type = other DNA
tttctctgcctctctctcgctc

SEQ ID NO: 23879 - DNA, 22 bp, synthetic construct
  misc_feature 1..22: note = chemically synthesized
  source 1..22: mol_type = other DNA
tctctgcctctctctcgctctc

SEQ ID NO: 23880 - DNA, 22 bp, synthetic construct
  misc_feature 1..22: note = chemically synthesized
  source 1..22: mol_type = other DNA
ctctgcctctctctcgctctct

SEQ ID NO: 23881 - DNA, 22 bp, synthetic construct
  misc_feature 1..22: note = chemically synthesized
  source 1..22: mol_type = other DNA
tctgcctctctctcgctctctc

SEQ ID NO: 23882 - DNA, 22 bp, synthetic construct
  misc_feature 1..22: note = chemically synthesized
  source 1..22: mol_type = other DNA
tgcctctctctcgctctctctc

SEQ ID NO: 23883 - DNA, 22 bp, synthetic construct
  misc_feature 1..22: note = chemically synthesized
  source 1..22: mol_type = other DNA
cctctctctcgctctctctctc

SEQ ID NO: 23884 - DNA, 22 bp, synthetic construct
  misc_feature 1..22: note = chemically synthesized
  source 1..22: mol_type = other DNA
tctctcgctctctctctctctc

SEQ ID NO: 23885 - DNA, 22 bp, synthetic construct
  misc_feature 1..22: note = chemically synthesized
  source 1..22: mol_type = other DNA
tctcgctctctctctctctctc

SEQ ID NO: 23886 - DNA, 22 bp, synthetic construct
  misc_feature 1..22: note = chemically synthesized
  source 1..22: mol_type = other DNA
tcgctctctctctctctctccc

SEQ ID NO: 23887 - DNA, 22 bp, synthetic construct
  misc_feature 1..22: note = chemically synthesized
  source 1..22: mol_type = other DNA
gctctctctctctctctccccc

SEQ ID NO: 23888 - DNA, 22 bp, synthetic construct
  misc_feature 1..22: note = chemically synthesized
  source 1..22: mol_type = other DNA
tctctctctctctcccccatct

SEQ ID NO: 23889 - DNA, 22 bp, synthetic construct
  misc_feature 1..22: note = chemically synthesized
  source 1..22: mol_type = other DNA
tctctctctctcccccatctct

SEQ ID NO: 23890 - DNA, 22 bp, synthetic construct
  misc_feature 1..22: note = chemically synthesized
  source 1..22: mol_type = other DNA
tctctctctcccccatctctct

SEQ ID NO: 23891 - DNA, 22 bp, synthetic construct
  misc_feature 1..22: note = chemically synthesized
  source 1..22: mol_type = other DNA
tctctctcccccatctctctct

SEQ ID NO: 23892 - DNA, 22 bp, synthetic construct
  misc_feature 1..22: note = chemically synthesized
  source 1..22: mol_type = other DNA
tctctcccccatctctctctgt

SEQ ID NO: 23893 - DNA, 22 bp, synthetic construct
  misc_feature 1..22: note = chemically synthesized
  source 1..22: mol_type = other DNA
tctcccccatctctctctgtct

SEQ ID NO: 23894 - DNA, 22 bp, synthetic construct
  misc_feature 1..22: note = chemically synthesized
  source 1..22: mol_type = other DNA
tcccccatctctctctgtctct

SEQ ID NO: 23895 - DNA, 22 bp, synthetic construct
  misc_feature 1..22: note = chemically synthesized
  source 1..22: mol_type = other DNA
ccccatctctctctgtctctct

SEQ ID NO: 23896 - DNA, 22 bp, synthetic construct
  misc_feature 1..22: note = chemically synthesized
  source 1..22: mol_type = other DNA
tctctgtctctctctctatata

SEQ ID NO: 23897 - DNA, 22 bp, synthetic construct
  misc_feature 1..22: note = chemically synthesized
  source 1..22: mol_type = other DNA
tctgtctctctctctatatata

SEQ ID NO: 23898 - DNA, 22 bp, synthetic construct
  misc_feature 1..22: note = chemically synthesized
  source 1..22: mol_type = other DNA
tgtctctctctctatatatatg

SEQ ID NO: 23899 - DNA, 22 bp, synthetic construct
  misc_feature 1..22: note = chemically synthesized
  source 1..22: mol_type = other DNA
tctctctctctatatatatgta

SEQ ID NO: 23900 - DNA, 22 bp, synthetic construct
  misc_feature 1..22: note = chemically synthesized
  source 1..22: mol_type = other DNA
tctctctatatatatgtataca

SEQ ID NO: 23901 - DNA, 22 bp, synthetic construct
  misc_feature 1..22: note = chemically synthesized
  source 1..22: mol_type = other DNA
tctctatatatatgtatacaca

SEQ ID NO: 23902 - DNA, 22 bp, synthetic construct
  misc_feature 1..22: note = chemically synthesized
  source 1..22: mol_type = other DNA
tctatatatatgtatacacaca

SEQ ID NO: 23903 - DNA, 22 bp, synthetic construct
  misc_feature 1..22: note = chemically synthesized
  source 1..22: mol_type = other DNA
tatatatatgtatacacacata

SEQ ID NO: 23904 - DNA, 22 bp, synthetic construct
  misc_feature 1..22: note = chemically synthesized
  source 1..22: mol_type = other DNA
tatatatgtatacacacatata

SEQ ID NO: 23905 - DNA, 22 bp, synthetic construct
  misc_feature 1..22: note = chemically synthesized
  source 1..22: mol_type = other DNA
tacacatatggagaaatttcac

SEQ ID NO: 23906 - DNA, 22 bp, synthetic construct
  misc_feature 1..22: note = chemically synthesized
  source 1..22: mol_type = other DNA
cactattttgtatatgcttaaa

SEQ ID NO: 23907 - DNA, 22 bp, synthetic construct
  misc_feature 1..22: note = chemically synthesized
  source 1..22: mol_type = other DNA
actattttgtatatgcttaaaa

SEQ ID NO: 23908 - DNA, 22 bp, synthetic construct
  misc_feature 1..22: note = chemically synthesized
  source 1..22: mol_type = other DNA
ttttgtatatgcttaaaaatta

SEQ ID NO: 23909 - DNA, 22 bp, synthetic construct
  misc_feature 1..22: note = chemically synthesized
  source 1..22: mol_type = other DNA
tgtatatgcttaaaaattacag

SEQ ID NO: 23910 - DNA, 22 bp, synthetic construct
  misc_feature 1..22: note = chemically synthesized
  source 1..22: mol_type = other DNA
gtatatgcttaaaaattacaga

SEQ ID NO: 23911 - DNA, 22 bp, synthetic construct
  misc_feature 1..22: note = chemically synthesized
  source 1..22: mol_type = other DNA
tatatgcttaaaaattacagac

SEQ ID NO: 23912 - DNA, 22 bp, synthetic construct
  misc_feature 1..22: note = chemically synthesized
  source 1..22: mol_type = other DNA
aaaaattacagactttggaagt

SEQ ID NO: 23913 - DNA, 22 bp, synthetic construct
  misc_feature 1..22: note = chemically synthesized
  source 1..22: mol_type = other DNA
aaaattacagactttggaagtc

SEQ ID NO: 23914 - DNA, 22 bp, synthetic construct
  misc_feature 1..22: note = chemically synthesized
  source 1..22: mol_type = other DNA
cagactttggaagtcatatgac

SEQ ID NO: 23915 - DNA, 22 bp, synthetic construct
  misc_feature 1..22: note = chemically synthesized
  source 1..22: mol_type = other DNA
tggaagtcatatgactatttca

SEQ ID NO: 23916 - DNA, 22 bp, synthetic construct
  misc_feature 1..22: note = chemically synthesized
  source 1..22: mol_type = other DNA
ggaagtcatatgactatttcag

SEQ ID NO: 23917 - DNA, 22 bp, synthetic construct
  misc_feature 1..22: note = chemically synthesized
  source 1..22: mol_type = other DNA
gaagtcatatgactatttcagt

SEQ ID NO: 23918 - DNA, 22 bp, synthetic construct
  misc_feature 1..22: note = chemically synthesized
  source 1..22: mol_type = other DNA
tttcagtgtgtgtggctactaa

SEQ ID NO: 23919 - DNA, 22 bp, synthetic construct
  misc_feature 1..22: note = chemically synthesized
  source 1..22: mol_type = other DNA
cagtgtgtgtggctactaatct

SEQ ID NO: 23920 - DNA, 22 bp, synthetic construct
  misc_feature 1..22: note = chemically synthesized
  source 1..22: mol_type = other DNA
agtgtgtgtggctactaatctc

SEQ ID NO: 23921 - DNA, 22 bp, synthetic construct
  misc_feature 1..22: note = chemically synthesized
  source 1..22: mol_type = other DNA
ctaatctcaccctcctgttcca

SEQ ID NO: 23922 - DNA, 22 bp, synthetic construct
  misc_feature 1..22: note = chemically synthesized
  source 1..22: mol_type = other DNA
atctcaccctcctgttccaaaa

SEQ ID NO: 23923 - DNA, 22 bp, synthetic construct
  misc_feature 1..22: note = chemically synthesized
  source 1..22: mol_type = other DNA
accctcctgttccaaaacacag

SEQ ID NO: 23924 - DNA, 22 bp, synthetic construct
  misc_feature 1..22: note = chemically synthesized
  source 1..22: mol_type = other DNA
ctgttccaaaacacagttgcag

SEQ ID NO: 23925 - DNA, 22 bp, synthetic construct
  misc_feature 1..22: note = chemically synthesized
  source 1..22: mol_type = other DNA
ttccaaaacacagttgcagaag

SEQ ID NO: 23926 - DNA, 22 bp, synthetic construct
  misc_feature 1..22: note = chemically synthesized
  source 1..22: mol_type = other DNA
caaaacacagttgcagaagcag

SEQ ID NO: 23927 - DNA, 22 bp, synthetic construct
  misc_feature 1..22: note = chemically synthesized
  source 1..22: mol_type = other DNA
cagaagcagaggaagtcattat

SEQ ID NO: 23928 - DNA, 22 bp, synthetic construct
  misc_feature 1..22: note = chemically synthesized
  source 1..22: mol_type = other DNA
tacacttagaacatcattttat

SEQ ID NO: 23929 - DNA, 22 bp, synthetic construct
  misc_feature 1..22: note = chemically synthesized
  source 1..22: mol_type = other DNA
agaacatcattttataaggcag

SEQ ID NO: 23930 - DNA, 22 bp, synthetic construct
  misc_feature 1..22: note = chemically synthesized
  source 1..22: mol_type = other DNA
gaacatcattttataaggcagc

SEQ ID NO: 23931 - DNA, 22 bp, synthetic construct
  misc_feature 1..22: note = chemically synthesized
  source 1..22: mol_type = other DNA
tataaggcagcaggtctggtag

SEQ ID NO: 23932 - DNA, 22 bp, synthetic construct
  misc_feature 1..22: note = chemically synthesized
  source 1..22: mol_type = other DNA
ataaggcagcaggtctggtagg

SEQ ID NO: 23933 - DNA, 22 bp, synthetic construct
  misc_feature 1..22: note = chemically synthesized
  source 1..22: mol_type = other DNA
taaggcagcaggtctggtagga

SEQ ID NO: 23934 - DNA, 22 bp, synthetic construct
  misc_feature 1..22: note = chemically synthesized
  source 1..22: mol_type = other DNA
gtaggaaggagattaggtgcta

SEQ ID NO: 23935 - DNA, 22 bp, synthetic construct
  misc_feature 1..22: note = chemically synthesized
  source 1..22: mol_type = other DNA
ggtgctacttgtgacaaaggtc

SEQ ID NO: 23936 - DNA, 22 bp, synthetic construct
  misc_feature 1..22: note = chemically synthesized
  source 1..22: mol_type = other DNA
cttgtgacaaaggtcagcaaat

SEQ ID NO: 23937 - DNA, 22 bp, synthetic construct
  misc_feature 1..22: note = chemically synthesized
  source 1..22: mol_type = other DNA
gtgacaaaggtcagcaaatatt

SEQ ID NO: 23938 - DNA, 22 bp, synthetic construct
  misc_feature 1..22: note = chemically synthesized
  source 1..22: mol_type = other DNA
tgacaaaggtcagcaaatattt

SEQ ID NO: 23939 - DNA, 22 bp, synthetic construct
  misc_feature 1..22: note = chemically synthesized
  source 1..22: mol_type = other DNA
gtgttcccagcacttttctaga

SEQ ID NO: 23940 - DNA, 22 bp, synthetic construct
  misc_feature 1..22: note = chemically synthesized
  source 1..22: mol_type = other DNA
tgttcccagcacttttctagat

SEQ ID NO: 23941 - DNA, 22 bp, synthetic construct
  misc_feature 1..22: note = chemically synthesized
  source 1..22: mol_type = other DNA
ccagcacttttctagatcctca

SEQ ID NO: 23942 - DNA, 22 bp, synthetic construct
  misc_feature 1..22: note = chemically synthesized
  source 1..22: mol_type = other DNA
ttctagatcctcagttaaaatc

SEQ ID NO: 23943 - DNA, 22 bp, synthetic construct
  misc_feature 1..22: note = chemically synthesized
  source 1..22: mol_type = other DNA
tctagatcctcagttaaaatca

SEQ ID NO: 23944 - DNA, 22 bp, synthetic construct
  misc_feature 1..22: note = chemically synthesized
  source 1..22: mol_type = other DNA
ctagatcctcagttaaaatcaa

SEQ ID NO: 23945 - DNA, 22 bp, synthetic construct
  misc_feature 1..22: note = chemically synthesized
  source 1..22: mol_type = other DNA
tagatcctcagttaaaatcaaa

SEQ ID NO: 23946 - DNA, 22 bp, synthetic construct
  misc_feature 1..22: note = chemically synthesized
  source 1..22: mol_type = other DNA
gatcctcagttaaaatcaaagc

SEQ ID NO: 23947 - DNA, 22 bp, synthetic construct
  misc_feature 1..22: note = chemically synthesized
  source 1..22: mol_type = other DNA
agttaaaatcaaagcagctgca

SEQ ID NO: 23948 - DNA, 22 bp, synthetic construct
  misc_feature 1..22: note = chemically synthesized
  source 1..22: mol_type = other DNA
aaatcaaagcagctgcagtctt

SEQ ID NO: 23949 - DNA, 22 bp, synthetic construct
  misc_feature 1..22: note = chemically synthesized
  source 1..22: mol_type = other DNA
cagtcttggcagtgggaggtga

SEQ ID NO: 23950 - DNA, 22 bp, synthetic construct
  misc_feature 1..22: note = chemically synthesized
  source 1..22: mol_type = other DNA
ggcagtgggaggtgatactcac

SEQ ID NO: 23951 - DNA, 22 bp, synthetic construct
  misc_feature 1..22: note = chemically synthesized
  source 1..22: mol_type = other DNA
gcagtgggaggtgatactcaca

SEQ ID NO: 23952 - DNA, 22 bp, synthetic construct
  misc_feature 1..22: note = chemically synthesized
  source 1..22: mol_type = other DNA
acactttgaacaagaccacctg

SEQ ID NO: 23953 - DNA, 22 bp, synthetic construct
  misc_feature 1..22: note = chemically synthesized
  source 1..22: mol_type = other DNA
tgaacaagaccacctgcactac

SEQ ID NO: 23954 - DNA, 22 bp, synthetic construct
  misc_feature 1..22: note = chemically synthesized
  source 1..22: mol_type = other DNA
gaacaagaccacctgcactacc

SEQ ID NO: 23955 - DNA, 22 bp, synthetic construct
  misc_feature 1..22: note = chemically synthesized
  source 1..22: mol_type = other DNA
aacaagaccacctgcactacct

SEQ ID NO: 23956 - DNA, 22 bp, synthetic construct
  misc_feature 1..22: note = chemically synthesized
  source 1..22: mol_type = other DNA
cactacctacaatggcagctcc

SEQ ID NO: 23957 - DNA, 22 bp, synthetic construct
  misc_feature 1..22: note = chemically synthesized
  source 1..22: mol_type = other DNA
cctacaatggcagctccaaata

SEQ ID NO: 23958 - DNA, 22 bp, synthetic construct
  misc_feature 1..22: note = chemically synthesized
  source 1..22: mol_type = other DNA
caatggcagctccaaatatttt

SEQ ID NO: 23959 - DNA, 22 bp, synthetic construct
  misc_feature 1..22: note = chemically synthesized
  source 1..22: mol_type = other DNA
caaatattttatatgaaagggg

SEQ ID NO: 23960 - DNA, 22 bp, synthetic construct
  misc_feature 1..22: note = chemically synthesized
  source 1..22: mol_type = other DNA
tatatgaaaggggcctagacat

SEQ ID NO: 23961 - DNA, 22 bp, synthetic construct
  misc_feature 1..22: note = chemically synthesized
  source 1..22: mol_type = other DNA
atatgaaaggggcctagacata

SEQ ID NO: 23962 - DNA, 22 bp, synthetic construct
  misc_feature 1..22: note = chemically synthesized
  source 1..22: mol_type = other DNA
tatgaaaggggcctagacatag

SEQ ID NO: 23963 - DNA, 22 bp, synthetic construct
  misc_feature 1..22: note = chemically synthesized
  source 1..22: mol_type = other DNA
gacatagcatgctgaatgaaaa

SEQ ID NO: 23964 - DNA, 22 bp, synthetic construct
  misc_feature 1..22: note = chemically synthesized
  source 1..22: mol_type = other DNA
aatgaaaaggaagtgagtagac

SEQ ID NO: 23965 - DNA, 22 bp, synthetic construct
  misc_feature 1..22: note = chemically synthesized
  source 1..22: mol_type = other DNA
gtgctttccttgaagctgtgca

SEQ ID NO: 23966 - DNA, 22 bp, synthetic construct
  misc_feature 1..22: note = chemically synthesized
  source 1..22: mol_type = other DNA
tccttgaagctgtgcaaccaag

SEQ ID NO: 23967 - DNA, 22 bp, synthetic construct
  misc_feature 1..22: note = chemically synthesized
  source 1..22: mol_type = other DNA
ccttgaagctgtgcaaccaagc

SEQ ID NO: 23968 - DNA, 22 bp, synthetic construct
  misc_feature 1..22: note = chemically synthesized
  source 1..22: mol_type = other DNA
cttgaagctgtgcaaccaagca

SEQ ID NO: 23969 - DNA, 22 bp, synthetic construct
  misc_feature 1..22: note = chemically synthesized
  source 1..22: mol_type = other DNA
gaagctgtgcaaccaagcatag

SEQ ID NO: 23970 - DNA, 22 bp, synthetic construct
  misc_feature 1..22: note = chemically synthesized
  source 1..22: mol_type = other DNA
aagctgtgcaaccaagcatagt

SEQ ID NO: 23971 - DNA, 22 bp, synthetic construct
  misc_feature 1..22: note = chemically synthesized
  source 1..22: mol_type = other DNA
tgcaaccaagcatagtttttac

SEQ ID NO: 23972 - DNA, 22 bp, synthetic construct
  misc_feature 1..22: note = chemically synthesized
  source 1..22: mol_type = other DNA
ttacatagatcgtgtgtttcac

SEQ ID NO: 23973 - DNA, 22 bp, synthetic construct
  misc_feature 1..22: note = chemically synthesized
  source 1..22: mol_type = other DNA
tacatagatcgtgtgtttcaca

SEQ ID NO: 23974 - DNA, 22 bp, synthetic construct
  misc_feature 1..22: note = chemically synthesized
  source 1..22: mol_type = other DNA
acatagatcgtgtgtttcacat

SEQ ID NO: 23975 - DNA, 22 bp, synthetic construct
  misc_feature 1..22: note = chemically synthesized
  source 1..22: mol_type = other DNA
catagatcgtgtgtttcacatg

SEQ ID NO: 23976 - DNA, 22 bp, synthetic construct
  misc_feature 1..22: note = chemically synthesized
  source 1..22: mol_type = other DNA
cacatggtgtgataacagcttg

SEQ ID NO: 23977 - DNA, 22 bp, synthetic construct
  misc_feature 1..22: note = chemically synthesized
  source 1..22: mol_type = other DNA
acatggtgtgataacagcttga

SEQ ID NO: 23978 - DNA, 22 bp, synthetic construct
  misc_feature 1..22: note = chemically synthesized
  source 1..22: mol_type = other DNA
gagatgccattgacatggccca

SEQ ID NO: 23979 - DNA, 22 bp, synthetic construct
  misc_feature 1..22: note = chemically synthesized
  source 1..22: mol_type = other DNA
agatgccattgacatggcccac

SEQ ID NO: 23980 - DNA, 22 bp, synthetic construct
  misc_feature 1..22: note = chemically synthesized
  source 1..22: mol_type = other DNA
acatggcccaccggcttatcca

SEQ ID NO: 23981 - DNA, 22 bp, synthetic construct
  misc_feature 1..22: note = chemically synthesized
  source 1..22: mol_type = other DNA
atccacatcagtaattagggca

SEQ ID NO: 23982 - DNA, 22 bp, synthetic construct
  misc_feature 1..22: note = chemically synthesized
  source 1..22: mol_type = other DNA
tccacatcagtaattagggcaa

SEQ ID NO: 23983 - DNA, 22 bp, synthetic construct
  misc_feature 1..22: note = chemically synthesized
  source 1..22: mol_type = other DNA
gggcaaagaaatcctaattact

SEQ ID NO: 23984 - DNA, 22 bp, synthetic construct
  misc_feature 1..22: note = chemically synthesized
  source 1..22: mol_type = other DNA
attactatgcatcccgtgattg

SEQ ID NO: 23985 - DNA, 22 bp, synthetic construct
  misc_feature 1..22: note = chemically synthesized
  source 1..22: mol_type = other DNA
ctatgcatcccgtgattgaagt

SEQ ID NO: 23986 - DNA, 22 bp, synthetic construct
  misc_feature 1..22: note = chemically synthesized
  source 1..22: mol_type = other DNA
tgcatcccgtgattgaagtaac

SEQ ID NO: 23987 - DNA, 22 bp, synthetic construct
  misc_feature 1..22: note = chemically synthesized
  source 1..22: mol_type = other DNA
aagtaacattgatgtatacata

SEQ ID NO: 23988 - DNA, 22 bp, synthetic construct
  misc_feature 1..22: note = chemically synthesized
  source 1..22: mol_type = other DNA
atgtatacatattttttcctat

SEQ ID NO: 23989 - DNA, 22 bp, synthetic construct
  misc_feature 1..22: note = chemically synthesized
  source 1..22: mol_type = other DNA
tttcctattatttctctttttg

SEQ ID NO: 23990 - DNA, 22 bp, synthetic construct
  misc_feature 1..22: note = chemically synthesized
  source 1..22: mol_type = other DNA
ttcctattatttctctttttgt

SEQ ID NO: 23991 - DNA, 22 bp, synthetic construct
  misc_feature 1..22: note = chemically synthesized
  source 1..22: mol_type = other DNA
tcctattatttctctttttgtg

SEQ ID NO: 23992 - DNA, 22 bp, synthetic construct
  misc_feature 1..22: note = chemically synthesized
  source 1..22: mol_type = other DNA
cctattatttctctttttgtgt

SEQ ID NO: 23993 - DNA, 22 bp, synthetic construct
  misc_feature 1..22: note = chemically synthesized
  source 1..22: mol_type = other DNA
ctattatttctctttttgtgtt

SEQ ID NO: 23994 - DNA, 22 bp, synthetic construct
  misc_feature 1..22: note = chemically synthesized
  source 1..22: mol_type = other DNA
ttatttctctttttgtgtttaa

SEQ ID NO: 23995 - DNA, 22 bp, synthetic construct
  misc_feature 1..22: note = chemically synthesized
  source 1..22: mol_type = other DNA
tttctctttttgtgtttaaaaa

SEQ ID NO: 23996 - DNA, 22 bp, synthetic construct
  misc_feature 1..22: note = chemically synthesized
  source 1..22: mol_type = other DNA
ctctttttgtgtttaaaaatgc

SEQ ID NO: 23997 - DNA, 22 bp, synthetic construct
  misc_feature 1..22: note = chemically synthesized
  source 1..22: mol_type = other DNA
tctttttgtgtttaaaaatgca

SEQ ID NO: 23998 - DNA, 22 bp, synthetic construct
  misc_feature 1..22: note = chemically synthesized
  source 1..22: mol_type = other DNA
tttttgtgtttaaaaatgcaat

SEQ ID NO: 23999 - DNA, 22 bp, synthetic construct
  misc_feature 1..22: note = chemically synthesized
  source 1..22: mol_type = other DNA
tttgtgtttaaaaatgcaatta

SEQ ID NO: 24000 - DNA, 22 bp, synthetic construct
  misc_feature 1..22: note = chemically synthesized
  source 1..22: mol_type = other DNA
ttgtgtttaaaaatgcaattat

SEQ ID NO: 24001 - DNA, 22 bp, synthetic construct
  misc_feature 1..22: note = chemically synthesized
  source 1..22: mol_type = other DNA
tgtgtttaaaaatgcaattatg

SEQ ID NO: 24002 - DNA, 22 bp, synthetic construct
  misc_feature 1..22: note = chemically synthesized
  source 1..22: mol_type = other DNA
gtgtttaaaaatgcaattatgg

SEQ ID NO: 24003 - DNA, 22 bp, synthetic construct
  misc_feature 1..22: note = chemically synthesized
  source 1..22: mol_type = other DNA
tgtttaaaaatgcaattatgga

SEQ ID NO: 24004 - DNA, 22 bp, synthetic construct
  misc_feature 1..22: note = chemically synthesized
  source 1..22: mol_type = other DNA
aaaaatgcaattatggactcat

SEQ ID NO: 24005 - DNA, 22 bp, synthetic construct
  misc_feature 1..22: note = chemically synthesized
  source 1..22: mol_type = other DNA
aaaatgcaattatggactcatt

SEQ ID NO: 24006 - DNA, 22 bp, synthetic construct
  misc_feature 1..22: note = chemically synthesized
  source 1..22: mol_type = other DNA
tggactcattcaaagtgaaagc

SEQ ID NO: 24007 - DNA, 22 bp, synthetic construct
  misc_feature 1..22: note = chemically synthesized
  source 1..22: mol_type = other DNA
attcaaagtgaaagctggtatg

SEQ ID NO: 24008 - DNA, 22 bp, synthetic construct
  misc_feature 1..22: note = chemically synthesized
  source 1..22: mol_type = other DNA
aaagtgaaagctggtatgacaa

SEQ ID NO: 24009 - DNA, 22 bp, synthetic construct
  misc_feature 1..22: note = chemically synthesized
  source 1..22: mol_type = other DNA
gtatgacaatacatgagctaac

SEQ ID NO: 24010 - DNA, 22 bp, synthetic construct
  misc_feature 1..22: note = chemically synthesized
  source 1..22: mol_type = other DNA
acttcctcattttatgaataaa

SEQ ID NO: 24011 - DNA, 22 bp, synthetic construct
  misc_feature 1..22: note = chemically synthesized
  source 1..22: mol_type = other DNA
cctcattttatgaataaatttt

SEQ ID NO: 24012 - DNA, 22 bp, synthetic construct
  misc_feature 1..22: note = chemically synthesized
  source 1..22: mol_type = other DNA
ctcattttatgaataaatttta

SEQ ID NO: 24013 - DNA, 22 bp, synthetic construct
  misc_feature 1..22: note = chemically synthesized
  source 1..22: mol_type = other DNA
attttatgaataaattttataa

SEQ ID NO: 24014 - DNA, 22 bp, synthetic construct
  misc_feature 1..22: note = chemically synthesized
  source 1..22: mol_type = other DNA
tatgaataaattttataaagaa

SEQ ID NO: 24015 - DNA, 22 bp, synthetic construct
  misc_feature 1..22: note = chemically synthesized
  source 1..22: mol_type = other DNA
atgaataaattttataaagaaa

SEQ ID NO: 24016 - DNA, 22 bp, synthetic construct
  misc_feature 1..22: note = chemically synthesized
  source 1..22: mol_type = other DNA
tgaataaattttataaagaaat

SEQ ID NO: 24017 - DNA, 22 bp, synthetic construct
  misc_feature 1..22: note = chemically synthesized
  source 1..22: mol_type = other DNA
tataaagaaataagctaatacc

SEQ ID NO: 24018 - DNA, 22 bp, synthetic construct
  misc_feature 1..22: note = chemically synthesized
  source 1..22: mol_type = other DNA
ataaagaaataagctaatacct

SEQ ID NO: 24019 - DNA, 22 bp, synthetic construct
  misc_feature 1..22: note = chemically synthesized
  source 1..22: mol_type = other DNA
taaagaaataagctaataccta

SEQ ID NO: 24020 - DNA, 22 bp, synthetic construct
  misc_feature 1..22: note = chemically synthesized
  source 1..22: mol_type = other DNA
atacctacagagtgtttattaa

SEQ ID NO: 24021 - DNA, 22 bp, synthetic construct
  misc_feature 1..22: note = chemically synthesized
  source 1..22: mol_type = other DNA
cagagtgtttattaaatgctag

SEQ ID NO: 24022 - DNA, 22 bp, synthetic construct
  misc_feature 1..22: note = chemically synthesized
  source 1..22: mol_type = other DNA
attaaatgctaggcacagttct

SEQ ID NO: 24023 - DNA, 22 bp, synthetic construct
  misc_feature 1..22: note = chemically synthesized
  source 1..22: mol_type = other DNA
ttaaatgctaggcacagttctg

SEQ ID NO: 24024 - DNA, 22 bp, synthetic construct
  misc_feature 1..22: note = chemically synthesized
  source 1..22: mol_type = other DNA
aatgctaggcacagttctgagt

SEQ ID NO: 24025 - DNA, 22 bp, synthetic construct
  misc_feature 1..22: note = chemically synthesized
  source 1..22: mol_type = other DNA
ggcacagttctgagtgatttac

SEQ ID NO: 24026 - DNA, 22 bp, synthetic construct
  misc_feature 1..22: note = chemically synthesized
  source 1..22: mol_type = other DNA
tgagtgatttacaactggtatt

SEQ ID NO: 24027 - DNA, 22 bp, synthetic construct
  misc_feature 1..22: note = chemically synthesized
  source 1..22: mol_type = other DNA
agtgatttacaactggtatttc

SEQ ID NO: 24028 - DNA, 22 bp, synthetic construct
  misc_feature 1..22: note = chemically synthesized
  source 1..22: mol_type = other DNA
acaactggtatttcttttaatt

SEQ ID NO: 24029 - DNA, 22 bp, synthetic construct
  misc_feature 1..22: note = chemically synthesized
  source 1..22: mol_type = other DNA
caactggtatttcttttaattt

SEQ ID NO: 24030 - DNA, 22 bp, synthetic construct
  misc_feature 1..22: note = chemically synthesized
  source 1..22: mol_type = other DNA
gtatttcttttaattttcacaa

SEQ ID NO: 24031 - DNA, 22 bp, synthetic construct
  misc_feature 1..22: note = chemically synthesized
  source 1..22: mol_type = other DNA
cttttaattttcacaacattat

SEQ ID NO: 24032 - DNA, 22 bp, synthetic construct
  misc_feature 1..22: note = chemically synthesized
  source 1..22: mol_type = other DNA
ttttaattttcacaacattatt

SEQ ID NO: 24033 - DNA, 22 bp, synthetic construct
  misc_feature 1..22: note = chemically synthesized
  source 1..22: mol_type = other DNA
ttaattttcacaacattattac

SEQ ID NO: 24034 - DNA, 22 bp, synthetic construct
  misc_feature 1..22: note = chemically synthesized
  source 1..22: mol_type = other DNA
taattttcacaacattattaca

SEQ ID NO: 24035 - DNA, 22 bp, synthetic construct
  misc_feature 1..22: note = chemically synthesized
  source 1..22: mol_type = other DNA
aattttcacaacattattacag

SEQ ID NO: 24036 - DNA, 22 bp, synthetic construct
  misc_feature 1..22: note = chemically synthesized
  source 1..22: mol_type = other DNA
attttcacaacattattacagg

SEQ ID NO: 24037 - DNA, 22 bp, synthetic construct
  misc_feature 1..22: note = chemically synthesized
  source 1..22: mol_type = other DNA
tcacaacattattacaggtaga

SEQ ID NO: 24038 - DNA, 22 bp, synthetic construct
  misc_feature 1..22: note = chemically synthesized
  source 1..22: mol_type = other DNA
cacaacattattacaggtagat

SEQ ID NO: 24039 - DNA, 22 bp, synthetic construct
  misc_feature 1..22: note = chemically synthesized
  source 1..22: mol_type = other DNA
acaacattattacaggtagatt

SEQ ID NO: 24040 - DNA, 22 bp, synthetic construct
  misc_feature 1..22: note = chemically synthesized
  source 1..22: mol_type = other DNA
ttacaggtagattttatatatg

SEQ ID NO: 24041 - DNA, 22 bp, synthetic construct
  misc_feature 1..22: note = chemically synthesized
  source 1..22: mol_type = other DNA
caggtagattttatatatggag

SEQ ID NO: 24042 - DNA, 22 bp, synthetic construct
  misc_feature 1..22: note = chemically synthesized
  source 1..22: mol_type = other DNA
tatatatggagaaactgaggca

SEQ ID NO: 24043 - DNA, 22 bp, synthetic construct
  misc_feature 1..22: note = chemically synthesized
  source 1..22: mol_type = other DNA
atatatggagaaactgaggcac

SEQ ID NO: 24044 - DNA, 22 bp, synthetic construct
  misc_feature 1..22: note = chemically synthesized
  source 1..22: mol_type = other DNA
tatatggagaaactgaggcaca

SEQ ID NO: 24045 - DNA, 22 bp, synthetic construct
  misc_feature 1..22: note = chemically synthesized
  source 1..22: mol_type = other DNA
aggcacagagatgctatgtaat

SEQ ID NO: 24046 - DNA, 22 bp, synthetic construct
  misc_feature 1..22: note = chemically synthesized
  source 1..22: mol_type = other DNA
tgtaataaatctcaacattacc

SEQ ID NO: 24047 - DNA, 22 bp, synthetic construct
  misc_feature 1..22: note = chemically synthesized
  source 1..22: mol_type = other DNA
aacattacccaggtgatggtgg

SEQ ID NO: 24048 - DNA, 22 bp, synthetic construct
  misc_feature 1..22: note = chemically synthesized
  source 1..22: mol_type = other DNA
cccaggtgatggtggagttgga

SEQ ID NO: 24049 - DNA, 22 bp, synthetic construct
  misc_feature 1..22: note = chemically synthesized
  source 1..22: mol_type = other DNA
gaattccaaatcatgcagtctg

SEQ ID NO: 24050 - DNA, 22 bp, synthetic construct
  misc_feature 1..22: note = chemically synthesized
  source 1..22: mol_type = other DNA
caaatcatgcagtctgacttta

SEQ ID NO: 24051 - DNA, 22 bp, synthetic construct
  misc_feature 1..22: note = chemically synthesized
  source 1..22: mol_type = other DNA
actttagctgtagacagcaaga

SEQ ID NO: 24052 - DNA, 22 bp, synthetic construct
  misc_feature 1..22: note = chemically synthesized
  source 1..22: mol_type = other DNA
tagctgtagacagcaagatagt

SEQ ID NO: 24053 - DNA, 22 bp, synthetic construct
  misc_feature 1..22: note = chemically synthesized
  source 1..22: mol_type = other DNA
agctgtagacagcaagatagta

SEQ ID NO: 24054 - DNA, 22 bp, synthetic construct
  misc_feature 1..22: note = chemically synthesized
  source 1..22: mol_type = other DNA
gctgtagacagcaagatagtaa

SEQ ID NO: 24055 - DNA, 22 bp, synthetic construct
  misc_feature 1..22: note = chemically synthesized
  source 1..22: mol_type = other DNA
tagacagcaagatagtaagtaa

SEQ ID NO: 24056 - DNA, 22 bp, synthetic construct
  misc_feature 1..22: note = chemically synthesized
  source 1..22: mol_type = other DNA
atggatctttttgcttttgctt

SEQ ID NO: 24057 - DNA, 22 bp, synthetic construct
  misc_feature 1..22: note = chemically synthesized
  source 1..22: mol_type = other DNA
tttgcttttgcttgtttgtttg

SEQ ID NO: 24058 - DNA, 22 bp, synthetic construct
  misc_feature 1..22: note = chemically synthesized
  source 1..22: mol_type = other DNA
ttgcttttgcttgtttgtttga

SEQ ID NO: 24059 - DNA, 22 bp, synthetic construct
  misc_feature 1..22: note = chemically synthesized
  source 1..22: mol_type = other DNA
tgcttttgcttgtttgtttgaa

SEQ ID NO: 24060 - DNA, 22 bp, synthetic construct
  misc_feature 1..22: note = chemically synthesized
  source 1..22: mol_type = other DNA
gcttttgcttgtttgtttgaaa

SEQ ID NO: 24061 - DNA, 22 bp, synthetic construct
  misc_feature 1..22: note = chemically synthesized
  source 1..22: mol_type = other DNA
cttttgcttgtttgtttgaaac

SEQ ID NO: 24062 - DNA, 22 bp, synthetic construct
  misc_feature 1..22: note = chemically synthesized
  source 1..22: mol_type = other DNA
ttgcttgtttgtttgaaacagg

SEQ ID NO: 24063 - DNA, 22 bp, synthetic construct
  misc_feature 1..22: note = chemically synthesized
  source 1..22: mol_type = other DNA
tgcttgtttgtttgaaacaggg

SEQ ID NO: 24064 - DNA, 22 bp, synthetic construct
  misc_feature 1..22: note = chemically synthesized
  source 1..22: mol_type = other DNA
gcttgtttgtttgaaacagggt

SEQ ID NO: 24065 - DNA, 22 bp, synthetic construct
  misc_feature 1..22: note = chemically synthesized
  source 1..22: mol_type = other DNA
cttgtttgtttgaaacagggtc

SEQ ID NO: 24066 - DNA, 22 bp, synthetic construct
  misc_feature 1..22: note = chemically synthesized
  source 1..22: mol_type = other DNA
gtttgtttgaaacagggtctca

SEQ ID NO: 24067 - DNA, 22 bp, synthetic construct
  misc_feature 1..22: note = chemically synthesized
  source 1..22: mol_type = other DNA
tttgtttgaaacagggtctcac

SEQ ID NO: 24068 - DNA, 22 bp, synthetic construct
  misc_feature 1..22: note = chemically synthesized
  source 1..22: mol_type = other DNA
gtttgaaacagggtctcactct

SEQ ID NO: 24069 - DNA, 22 bp, synthetic construct
  misc_feature 1..22: note = chemically synthesized
  source 1..22: mol_type = other DNA
tttgaaacagggtctcactctg

SEQ ID NO: 24070 - DNA, 22 bp, synthetic construct
  misc_feature 1..22: note = chemically synthesized
  source 1..22: mol_type = other DNA
gaaacagggtctcactctgtca

SEQ ID NO: 24071 - DNA, 22 bp, synthetic construct
  misc_feature 1..22: note = chemically synthesized
  source 1..22: mol_type = other DNA
aaacagggtctcactctgtcac

SEQ ID NO: 24072 - DNA, 22 bp, synthetic construct
  misc_feature 1..22: note = chemically synthesized
  source 1..22: mol_type = other DNA
actctgtcaccccggctggagt

SEQ ID NO: 24073 - DNA, 22 bp, synthetic construct
  misc_feature 1..22: note = chemically synthesized
  source 1..22: mol_type = other DNA
tgtcaccccggctggagtgcaa

SEQ ID NO: 24074 - DNA, 22 bp, synthetic construct
  misc_feature 1..22: note = chemically synthesized
  source 1..22: mol_type = other DNA
tcaccccggctggagtgcaatg

SEQ ID NO: 24075 - DNA, 22 bp, synthetic construct
  misc_feature 1..22: note = chemically synthesized
  source 1..22: mol_type = other DNA
gagtgcaatggtgcaatcttgc

SEQ ID NO: 24076 - DNA, 22 bp, synthetic construct
  misc_feature 1..22: note = chemically synthesized
  source 1..22: mol_type = other DNA
gctcactgaagcctcactagaa

SEQ ID NO: 24077 - DNA, 22 bp, synthetic construct
  misc_feature 1..22: note = chemically synthesized
  source 1..22: mol_type = other DNA
ctcactgaagcctcactagaac

SEQ ID NO: 24078 - DNA, 22 bp, synthetic construct
  misc_feature 1..22: note = chemically synthesized
  source 1..22: mol_type = other DNA
actgaagcctcactagaacgcc

SEQ ID NO: 24079 - DNA, 22 bp, synthetic construct
  misc_feature 1..22: note = chemically synthesized
  source 1..22: mol_type = other DNA
aagcctcactagaacgcctgga

SEQ ID NO: 24080 - DNA, 22 bp, synthetic construct
  misc_feature 1..22: note = chemically synthesized
  source 1..22: mol_type = other DNA
actagaacgcctggattcaatt

SEQ ID NO: 24081 - DNA, 22 bp, synthetic construct
  misc_feature 1..22: note = chemically synthesized
  source 1..22: mol_type = other DNA
gaacgcctggattcaattgatc

SEQ ID NO: 24082 - DNA, 22 bp, synthetic construct
  misc_feature 1..22: note = chemically synthesized
  source 1..22: mol_type = other DNA
gattcaattgatcctcctgctt

SEQ ID NO: 24083 - DNA, 22 bp, synthetic construct
  misc_feature 1..22: note = chemically synthesized
  source 1..22: mol_type = other DNA
aattgatcctcctgctttagcc

SEQ ID NO: 24084 - DNA, 22 bp, synthetic construct
  misc_feature 1..22: note = chemically synthesized
  source 1..22: mol_type = other DNA
atcctcctgctttagcctctca

SEQ ID NO: 24085 - DNA, 22 bp, synthetic construct
  misc_feature 1..22: note = chemically synthesized
  source 1..22: mol_type = other DNA
ctgctttagcctctcaggtagc

SEQ ID NO: 24086 - DNA, 22 bp, synthetic construct
  misc_feature 1..22: note = chemically synthesized
  source 1..22: mol_type = other DNA
ctttagcctctcaggtagctag

SEQ ID NO: 24087 - DNA, 22 bp, synthetic construct
  misc_feature 1..22: note = chemically synthesized
  source 1..22: mol_type = other DNA
tagcctctcaggtagctaggac

SEQ ID NO: 24088 - DNA, 22 bp, synthetic construct
  misc_feature 1..22: note = chemically synthesized
  source 1..22: mol_type = other DNA
agcctctcaggtagctaggact

SEQ ID NO: 24089 - DNA, 22 bp, synthetic construct
  misc_feature 1..22: note = chemically synthesized
  source 1..22: mol_type = other DNA
gcctctcaggtagctaggacta

SEQ ID NO: 24090 - DNA, 22 bp, synthetic construct
  misc_feature 1..22: note = chemically synthesized
  source 1..22: mol_type = other DNA
tcaggtagctaggactacaggt

SEQ ID NO: 24091 - DNA, 22 bp, synthetic construct
  misc_feature 1..22: note = chemically synthesized
  source 1..22: mol_type = other DNA
aggtagctaggactacaggtgt

SEQ ID NO: 24092 - DNA, 22 bp, synthetic construct
  misc_feature 1..22: note = chemically synthesized
  source 1..22: mol_type = other DNA
ggactacaggtgtgagcctcca

SEQ ID NO: 24093 - DNA, 22 bp, synthetic construct
  misc_feature 1..22: note = chemically synthesized
  source 1..22: mol_type = other DNA
caggtgtgagcctccatggcca

SEQ ID NO: 24094 - DNA, 22 bp, synthetic construct
  misc_feature 1..22: note = chemically synthesized
  source 1..22: mol_type = other DNA
catggccagctagagaaatttt

SEQ ID NO: 24095 - DNA, 22 bp, synthetic construct
  misc_feature 1..22: note = chemically synthesized
  source 1..22: mol_type = other DNA
gagaaattttttaaatttctgt

SEQ ID NO: 24096 - DNA, 22 bp, synthetic construct
  misc_feature 1..22: note = chemically synthesized
  source 1..22: mol_type = other DNA
tttaaatttctgtagaaacagg

SEQ ID NO: 24097 - DNA, 22 bp, synthetic construct
  misc_feature 1..22: note = chemically synthesized
  source 1..22: mol_type = other DNA
ttaaatttctgtagaaacaggg

SEQ ID NO: 24098 - DNA, 22 bp, synthetic construct
  misc_feature 1..22: note = chemically synthesized
  source 1..22: mol_type = other DNA
taaatttctgtagaaacagggt

SEQ ID NO: 24099 - DNA, 22 bp, synthetic construct
  misc_feature 1..22: note = chemically synthesized
  source 1..22: mol_type = other DNA
aaatttctgtagaaacagggtc

SEQ ID NO: 24100 - DNA, 22 bp, synthetic construct
  misc_feature 1..22: note = chemically synthesized
  source 1..22: mol_type = other DNA
aatttctgtagaaacagggtct

SEQ ID NO: 24101 - DNA, 22 bp, synthetic construct
  misc_feature 1..22: note = chemically synthesized
  source 1..22: mol_type = other DNA
ctgtagaaacagggtctcccta

SEQ ID NO: 24102 - DNA, 22 bp, synthetic construct
  misc_feature 1..22: note = chemically synthesized
  source 1..22: mol_type = other DNA
tgtagaaacagggtctccctat

SEQ ID NO: 24103 - DNA, 22 bp, synthetic construct
  misc_feature 1..22: note = chemically synthesized
  source 1..22: mol_type = other DNA
tagaaacagggtctccctatgt

SEQ ID NO: 24104 - DNA, 22 bp, synthetic construct
  misc_feature 1..22: note = chemically synthesized
  source 1..22: mol_type = other DNA
cctatgttccccaggctggtat

SEQ ID NO: 24105 - DNA, 22 bp, synthetic construct
  misc_feature 1..22: note = chemically synthesized
  source 1..22: mol_type = other DNA
tgttccccaggctggtatccaa

SEQ ID NO: 24106 - DNA, 22 bp, synthetic construct
  misc_feature 1..22: note = chemically synthesized
  source 1..22: mol_type = other DNA
cccaggctggtatccaactctt

SEQ ID NO: 24107 - DNA, 22 bp, synthetic construct
  misc_feature 1..22: note = chemically synthesized
  source 1..22: mol_type = other DNA
gtatccaactcttggtctcaaa

SEQ ID NO: 24108 - DNA, 22 bp, synthetic construct
  misc_feature 1..22: note = chemically synthesized
  source 1..22: mol_type = other DNA
ttggtctcaaacaattctccca

SEQ ID NO: 24109 - DNA, 22 bp, synthetic construct
  misc_feature 1..22: note = chemically synthesized
  source 1..22: mol_type = other DNA
ggtctcaaacaattctcccacc

SEQ ID NO: 24110 - DNA, 22 bp, synthetic construct
  misc_feature 1..22: note = chemically synthesized
  source 1..22: mol_type = other DNA
gtctcaaacaattctcccacct

SEQ ID NO: 24111 - DNA, 22 bp, synthetic construct
  misc_feature 1..22: note = chemically synthesized
  source 1..22: mol_type = other DNA
aaacaattctcccacctcagcc

SEQ ID NO: 24112 - DNA, 22 bp, synthetic construct
  misc_feature 1..22: note = chemically synthesized
  source 1..22: mol_type = other DNA
tcccacctcagccttgaaaagt

SEQ ID NO: 24113 - DNA, 22 bp, synthetic construct
  misc_feature 1..22: note = chemically synthesized
  source 1..22: mol_type = other DNA
ccacctcagccttgaaaagtgt

SEQ ID NO: 24114 - DNA, 22 bp, synthetic construct
  misc_feature 1..22: note = chemically synthesized
  source 1..22: mol_type = other DNA
agccttgaaaagtgttgagatt

SEQ ID NO: 24115 - DNA, 22 bp, synthetic construct
  misc_feature 1..22: note = chemically synthesized
  source 1..22: mol_type = other DNA
gaaaagtgttgagattacaggt

SEQ ID NO: 24116 - DNA, 22 bp, synthetic construct
  misc_feature 1..22: note = chemically synthesized
  source 1..22: mol_type = other DNA
aaaagtgttgagattacaggtg

SEQ ID NO: 24117 - DNA, 22 bp, synthetic construct
  misc_feature 1..22: note = chemically synthesized
  source 1..22: mol_type = other DNA
agattacaggtgtgaatcacca

SEQ ID NO: 24118 - DNA, 22 bp, synthetic construct
  misc_feature 1..22: note = chemically synthesized
  source 1..22: mol_type = other DNA
caggtgtgaatcaccatgctgg

SEQ ID NO: 24119 - DNA, 22 bp, synthetic construct
  misc_feature 1..22: note = chemically synthesized
  source 1..22: mol_type = other DNA
ggccttgatggatctttaaaag

SEQ ID NO: 24120 - DNA, 22 bp, synthetic construct
  misc_feature 1..22: note = chemically synthesized
  source 1..22: mol_type = other DNA
gatggatctttaaaagtggtgg

SEQ ID NO: 24121 - DNA, 22 bp, synthetic construct
  misc_feature 1..22: note = chemically synthesized
  source 1..22: mol_type = other DNA
atggatctttaaaagtggtggg

SEQ ID NO: 24122 - DNA, 22 bp, synthetic construct
  misc_feature 1..22: note = chemically synthesized
  source 1..22: mol_type = other DNA
taaaagtggtggggggtaggag

SEQ ID NO: 24123 - DNA, 22 bp, synthetic construct
  misc_feature 1..22: note = chemically synthesized
  source 1..22: mol_type = other DNA
aaaagtggtggggggtaggaga

SEQ ID NO: 24124 - DNA, 22 bp, synthetic construct
  misc_feature 1..22: note = chemically synthesized
  source 1..22: mol_type = other DNA
aaagtggtggggggtaggagaa

SEQ ID NO: 24125 - DNA, 22 bp, synthetic construct
  misc_feature 1..22: note = chemically synthesized
  source 1..22: mol_type = other DNA
ggtctcgggaaggatgggatcc

SEQ ID NO: 24126 - DNA, 22 bp, synthetic construct
  misc_feature 1..22: note = chemically synthesized
  source 1..22: mol_type = other DNA
gggaaggatgggatccttttca

SEQ ID NO: 24127 - DNA, 22 bp, synthetic construct
  misc_feature 1..22: note = chemically synthesized
  source 1..22: mol_type = other DNA
ttcattttgctctagagaaaag

SEQ ID NO: 24128 - DNA, 22 bp, synthetic construct
  misc_feature 1..22: note = chemically synthesized
  source 1..22: mol_type = other DNA
tcattttgctctagagaaaagc

SEQ ID NO: 24129 - DNA, 22 bp, synthetic construct
  misc_feature 1..22: note = chemically synthesized
  source 1..22: mol_type = other DNA
cattttgctctagagaaaagcc

SEQ ID NO: 24130 - DNA, 22 bp, synthetic construct
  misc_feature 1..22: note = chemically synthesized
  source 1..22: mol_type = other DNA
attttgctctagagaaaagcca

SEQ ID NO: 24131 - DNA, 22 bp, synthetic construct
  misc_feature 1..22: note = chemically synthesized
  source 1..22: mol_type = other DNA
tgctctagagaaaagccatttg

SEQ ID NO: 24132 - DNA, 22 bp, synthetic construct
  misc_feature 1..22: note = chemically synthesized
  source 1..22: mol_type = other DNA
gctctagagaaaagccatttgg

SEQ ID NO: 24133 - DNA, 22 bp, synthetic construct
  misc_feature 1..22: note = chemically synthesized
  source 1..22: mol_type = other DNA
ctctagagaaaagccatttgga

SEQ ID NO: 24134 - DNA, 22 bp, synthetic construct
  misc_feature 1..22: note = chemically synthesized
  source 1..22: mol_type = other DNA
tagagaaaagccatttggaaaa

SEQ ID NO: 24135 - DNA, 22 bp, synthetic construct
  misc_feature 1..22: note = chemically synthesized
  source 1..22: mol_type = other DNA
gagaaaagccatttggaaaact

SEQ ID NO: 24136 - DNA, 22 bp, synthetic construct
  misc_feature 1..22: note = chemically synthesized
  source 1..22: mol_type = other DNA
ggaaaacttctgtgttaacaaa

SEQ ID NO: 24137 - DNA, 22 bp, synthetic construct
  misc_feature 1..22: note = chemically synthesized
  source 1..22: mol_type = other DNA
gaaaacttctgtgttaacaaaa

SEQ ID NO: 24138 - DNA, 22 bp, synthetic construct
  misc_feature 1..22: note = chemically synthesized
  source 1..22: mol_type = other DNA
ctgtgttaacaaaaaacagccg

SEQ ID NO: 24139 - DNA, 22 bp, synthetic construct
  misc_feature 1..22: note = chemically synthesized
  source 1..22: mol_type = other DNA
tgtgttaacaaaaaacagccga

SEQ ID NO: 24140 - DNA, 22 bp, synthetic construct
  misc_feature 1..22: note = chemically synthesized
  source 1..22: mol_type = other DNA
tgttaacaaaaaacagccgagt

SEQ ID NO: 24141 - DNA, 22 bp, synthetic construct
  misc_feature 1..22: note = chemically synthesized
  source 1..22: mol_type = other DNA
acaaaaaacagccgagtagcct

SEQ ID NO: 24142 - DNA, 22 bp, synthetic construct
  misc_feature 1..22: note = chemically synthesized
  source 1..22: mol_type = other DNA
gtattaaactttagagcagttg

SEQ ID NO: 24143 - DNA, 22 bp, synthetic construct
  misc_feature 1..22: note = chemically synthesized
  source 1..22: mol_type = other DNA
aactttagagcagttgttcttt

SEQ ID NO: 24144 - DNA, 22 bp, synthetic construct
  misc_feature 1..22: note = chemically synthesized
  source 1..22: mol_type = other DNA
tagagcagttgttctttacggc

SEQ ID NO: 24145 - DNA, 22 bp, synthetic construct
  misc_feature 1..22: note = chemically synthesized
  source 1..22: mol_type = other DNA
agagcagttgttctttacggca

SEQ ID NO: 24146 - DNA, 22 bp, synthetic construct
  misc_feature 1..22: note = chemically synthesized
  source 1..22: mol_type = other DNA
gagcagttgttctttacggcaa

SEQ ID NO: 24147 - DNA, 22 bp, synthetic construct
  misc_feature 1..22: note = chemically synthesized
  source 1..22: mol_type = other DNA
ttctttacggcaattacagggg

SEQ ID NO: 24148 - DNA, 22 bp, synthetic construct
  misc_feature 1..22: note = chemically synthesized
  source 1..22: mol_type = other DNA
tttacggcaattacaggggcct

SEQ ID NO: 24149 - DNA, 22 bp, synthetic construct
  misc_feature 1..22: note = chemically synthesized
  source 1..22: mol_type = other DNA
tacggcaattacaggggccttc

SEQ ID NO: 24150 - DNA, 22 bp, synthetic construct
  misc_feature 1..22: note = chemically synthesized
  source 1..22: mol_type = other DNA
acggcaattacaggggccttca

SEQ ID NO: 24151 - DNA, 22 bp, synthetic construct
  misc_feature 1..22: note = chemically synthesized
  source 1..22: mol_type = other DNA
cggcaattacaggggccttcag

SEQ ID NO: 24152 - DNA, 22 bp, synthetic construct
  misc_feature 1..22: note = chemically synthesized
  source 1..22: mol_type = other DNA
caggggccttcaggaagctgat

SEQ ID NO: 24153 - DNA, 22 bp, synthetic construct
  misc_feature 1..22: note = chemically synthesized
  source 1..22: mol_type = other DNA
caggaagctgatggaagtgtga

SEQ ID NO: 24154 - DNA, 22 bp, synthetic construct
  misc_feature 1..22: note = chemically synthesized
  source 1..22: mol_type = other DNA
aggaagctgatggaagtgtgaa

SEQ ID NO: 24155 - DNA, 22 bp, synthetic construct
  misc_feature 1..22: note = chemically synthesized
  source 1..22: mol_type = other DNA
atggaagtgtgaagtcctcttc

SEQ ID NO: 24156 - DNA, 22 bp, synthetic construct
  misc_feature 1..22: note = chemically synthesized
  source 1..22: mol_type = other DNA
ttctcagagaaaagtacttcta

SEQ ID NO: 24157 - DNA, 22 bp, synthetic construct
  misc_feature 1..22: note = chemically synthesized
  source 1..22: mol_type = other DNA
ctcagagaaaagtacttctata

SEQ ID NO: 24158 - DNA, 22 bp, synthetic construct
  misc_feature 1..22: note = chemically synthesized
  source 1..22: mol_type = other DNA
tcagagaaaagtacttctatat

SEQ ID NO: 24159 - DNA, 22 bp, synthetic construct
  misc_feature 1..22: note = chemically synthesized
  source 1..22: mol_type = other DNA
agagaaaagtacttctatatac

SEQ ID NO: 24160 - DNA, 22 bp, synthetic construct
  misc_feature 1..22: note = chemically synthesized
  source 1..22: mol_type = other DNA
ctatatacgtgcacctaatttt

SEQ ID NO: 24161 - DNA, 22 bp, synthetic construct
  misc_feature 1..22: note = chemically synthesized
  source 1..22: mol_type = other DNA
tatatacgtgcacctaattttt

SEQ ID NO: 24162 - DNA, 22 bp, synthetic construct
  misc_feature 1..22: note = chemically synthesized
  source 1..22: mol_type = other DNA
tatacgtgcacctaatttttag

SEQ ID NO: 24163 - DNA, 22 bp, synthetic construct
  misc_feature 1..22: note = chemically synthesized
  source 1..22: mol_type = other DNA
atttttagatataatttctgaa

SEQ ID NO: 24164 - DNA, 22 bp, synthetic construct
  misc_feature 1..22: note = chemically synthesized
  source 1..22: mol_type = other DNA
ttagatataatttctgaaggtt

SEQ ID NO: 24165 - DNA, 22 bp, synthetic construct
  misc_feature 1..22: note = chemically synthesized
  source 1..22: mol_type = other DNA
tagatataatttctgaaggttt

SEQ ID NO: 24166 - DNA, 22 bp, synthetic construct
  misc_feature 1..22: note = chemically synthesized
  source 1..22: mol_type = other DNA
agatataatttctgaaggttta

SEQ ID NO: 24167 - DNA, 22 bp, synthetic construct
  misc_feature 1..22: note = chemically synthesized
  source 1..22: mol_type = other DNA
gatataatttctgaaggtttag

SEQ ID NO: 24168 - DNA, 22 bp, synthetic construct
  misc_feature 1..22: note = chemically synthesized
  source 1..22: mol_type = other DNA
ctgaaggtttagaaactccttg

SEQ ID NO: 24169 - DNA, 22 bp, synthetic construct
  misc_feature 1..22: note = chemically synthesized
  source 1..22: mol_type = other DNA
tgaaggtttagaaactccttga

SEQ ID NO: 24170 - DNA, 22 bp, synthetic construct
  misc_feature 1..22: note = chemically synthesized
  source 1..22: mol_type = other DNA
aaggtttagaaactccttgagt

SEQ ID NO: 24171 - DNA, 22 bp, synthetic construct
  misc_feature 1..22: note = chemically synthesized
  source 1..22: mol_type = other DNA
agaaactccttgagttcactta

SEQ ID NO: 24172 - DNA, 22 bp, synthetic construct
  misc_feature 1..22: note = chemically synthesized
  source 1..22: mol_type = other DNA
gaaactccttgagttcacttat

SEQ ID NO: 24173 - DNA, 22 bp, synthetic construct
  misc_feature 1..22: note = chemically synthesized
  source 1..22: mol_type = other DNA
cttgagttcacttatatcaaag

SEQ ID NO: 24174 - DNA, 22 bp, synthetic construct
  misc_feature 1..22: note = chemically synthesized
  source 1..22: mol_type = other DNA
gagttcacttatatcaaagtcc

SEQ ID NO: 24175 - DNA, 22 bp, synthetic construct
  misc_feature 1..22: note = chemically synthesized
  source 1..22: mol_type = other DNA
agttcacttatatcaaagtcct

SEQ ID NO: 24176 - DNA, 22 bp, synthetic construct
  misc_feature 1..22: note = chemically synthesized
  source 1..22: mol_type = other DNA
acttatatcaaagtcctcacct

SEQ ID NO: 24177 - DNA, 22 bp, synthetic construct
  misc_feature 1..22: note = chemically synthesized
  source 1..22: mol_type = other DNA
atatcaaagtcctcacctttag

SEQ ID NO: 24178 - DNA, 22 bp, synthetic construct
  misc_feature 1..22: note = chemically synthesized
  source 1..22: mol_type = other DNA
tatcaaagtcctcacctttaga

SEQ ID NO: 24179 - DNA, 22 bp, synthetic construct
  misc_feature 1..22: note = chemically synthesized
  source 1..22: mol_type = other DNA
acctttagaactcctgtcctag

SEQ ID NO: 24180 - DNA, 22 bp, synthetic construct
  misc_feature 1..22: note = chemically synthesized
  source 1..22: mol_type = other DNA
tagaactcctgtcctagaagag

SEQ ID NO: 24181 - DNA, 22 bp, synthetic construct
  misc_feature 1..22: note = chemically synthesized
  source 1..22: mol_type = other DNA
agaactcctgtcctagaagagt

SEQ ID NO: 24182 - DNA, 22 bp, synthetic construct
  misc_feature 1..22: note = chemically synthesized
  source 1..22: mol_type = other DNA
gaactcctgtcctagaagagtg

SEQ ID NO: 24183 - DNA, 22 bp, synthetic construct
  misc_feature 1..22: note = chemically synthesized
  source 1..22: mol_type = other DNA
ctgtcctagaagagtggactca

SEQ ID NO: 24184 - DNA, 22 bp, synthetic construct
  misc_feature 1..22: note = chemically synthesized
  source 1..22: mol_type = other DNA
tcctagaagagtggactcatta

SEQ ID NO: 24185 - DNA, 22 bp, synthetic construct
  misc_feature 1..22: note = chemically synthesized
  source 1..22: mol_type = other DNA
gaagagtggactcattattata

SEQ ID NO: 24186 - DNA, 22 bp, synthetic construct
  misc_feature 1..22: note = chemically synthesized
  source 1..22: mol_type = other DNA
attattataatttcttccataa

SEQ ID NO: 24187 - DNA, 22 bp, synthetic construct
  misc_feature 1..22: note = chemically synthesized
  source 1..22: mol_type = other DNA
ttataatttcttccataaccac

SEQ ID NO: 24188 - DNA, 22 bp, synthetic construct
  misc_feature 1..22: note = chemically synthesized
  source 1..22: mol_type = other DNA
taatttcttccataaccacttt

SEQ ID NO: 24189 - DNA, 22 bp, synthetic construct
  misc_feature 1..22: note = chemically synthesized
  source 1..22: mol_type = other DNA
cttccataaccactttgactct

SEQ ID NO: 24190 - DNA, 22 bp, synthetic construct
  misc_feature 1..22: note = chemically synthesized
  source 1..22: mol_type = other DNA
ttccataaccactttgactcta

SEQ ID NO: 24191 - DNA, 22 bp, synthetic construct
  misc_feature 1..22: note = chemically synthesized
  source 1..22: mol_type = other DNA
ccataaccactttgactctagt

SEQ ID NO: 24192 - DNA, 22 bp, synthetic construct
  misc_feature 1..22: note = chemically synthesized
  source 1..22: mol_type = other DNA
cataaccactttgactctagtt

SEQ ID NO: 24193 - DNA, 22 bp, synthetic construct
  misc_feature 1..22: note = chemically synthesized
  source 1..22: mol_type = other DNA
tgactctagttttctgaattct

SEQ ID NO: 24194 - DNA, 22 bp, synthetic construct
  misc_feature 1..22: note = chemically synthesized
  source 1..22: mol_type = other DNA
gactctagttttctgaattctt

SEQ ID NO: 24195 - DNA, 22 bp, synthetic construct
  misc_feature 1..22: note = chemically synthesized
  source 1..22: mol_type = other DNA
actctagttttctgaattcttc

SEQ ID NO: 24196 - DNA, 22 bp, synthetic construct
  misc_feature 1..22: note = chemically synthesized
  source 1..22: mol_type = other DNA
tagttttctgaattcttccctg

SEQ ID NO: 24197 - DNA, 22 bp, synthetic construct
  misc_feature 1..22: note = chemically synthesized
  source 1..22: mol_type = other DNA
gttttctgaattcttccctgtg

SEQ ID NO: 24198 - DNA, 22 bp, synthetic construct
  misc_feature 1..22: note = chemically synthesized
  source 1..22: mol_type = other DNA
tctgaattcttccctgtgccac

SEQ ID NO: 24199 - DNA, 22 bp, synthetic construct
  misc_feature 1..22: note = chemically synthesized
  source 1..22: mol_type = other DNA
ctgaattcttccctgtgccact

SEQ ID NO: 24200 - DNA, 22 bp, synthetic construct
  misc_feature 1..22: note = chemically synthesized
  source 1..22: mol_type = other DNA
tgaattcttccctgtgccactt

SEQ ID NO: 24201 - DNA, 22 bp, synthetic construct
  misc_feature 1..22: note = chemically synthesized
  source 1..22: mol_type = other DNA
aattcttccctgtgccacttgt

SEQ ID NO: 24202 - DNA, 22 bp, synthetic construct
  misc_feature 1..22: note = chemically synthesized
  source 1..22: mol_type = other DNA
ttccctgtgccacttgtaccat

SEQ ID NO: 24203 - DNA, 22 bp, synthetic construct
  misc_feature 1..22: note = chemically synthesized
  source 1..22: mol_type = other DNA
ccctgtgccacttgtaccatgt

SEQ ID NO: 24204 - DNA, 22 bp, synthetic construct
  misc_feature 1..22: note = chemically synthesized
  source 1..22: mol_type = other DNA
cctgtgccacttgtaccatgta

SEQ ID NO: 24205 - DNA, 22 bp, synthetic construct
  misc_feature 1..22: note = chemically synthesized
  source 1..22: mol_type = other DNA
tgccacttgtaccatgtaattc

SEQ ID NO: 24206 - DNA, 22 bp, synthetic construct
  misc_feature 1..22: note = chemically synthesized
  source 1..22: mol_type = other DNA
gtaccatgtaattcagaggtgt

SEQ ID NO: 24207 - DNA, 22 bp, synthetic construct
  misc_feature 1..22: note = chemically synthesized
  source 1..22: mol_type = other DNA
taccatgtaattcagaggtgta

SEQ ID NO: 24208 - DNA, 22 bp, synthetic construct
  misc_feature 1..22: note = chemically synthesized
  source 1..22: mol_type = other DNA
agaggtgtagtgtcaagactga

SEQ ID NO: 24209 - DNA, 22 bp, synthetic construct
  misc_feature 1..22: note = chemically synthesized
  source 1..22: mol_type = other DNA
aggaggaagcaggtaaattatg

SEQ ID NO: 24210 - DNA, 22 bp, synthetic construct
  misc_feature 1..22: note = chemically synthesized
  source 1..22: mol_type = other DNA
tgtccagcaatacgttggctta

SEQ ID NO: 24211 - DNA, 22 bp, synthetic construct
  misc_feature 1..22: note = chemically synthesized
  source 1..22: mol_type = other DNA
gcttaggcaaaaacaaattgtt

SEQ ID NO: 24212 - DNA, 22 bp, synthetic construct
  misc_feature 1..22: note = chemically synthesized
  source 1..22: mol_type = other DNA
aggcaaaaacaaattgtttcta

SEQ ID NO: 24213 - DNA, 22 bp, synthetic construct
  misc_feature 1..22: note = chemically synthesized
  source 1..22: mol_type = other DNA
ggcaaaaacaaattgtttctag

SEQ ID NO: 24214 - DNA, 22 bp, synthetic construct
  misc_feature 1..22: note = chemically synthesized
  source 1..22: mol_type = other DNA
tttctagtccattttaagaggg

SEQ ID NO: 24215 - DNA, 22 bp, synthetic construct
  misc_feature 1..22: note = chemically synthesized
  source 1..22: mol_type = other DNA
ctagtccattttaagagggaag

SEQ ID NO: 24216 - DNA, 22 bp, synthetic construct
  misc_feature 1..22: note = chemically synthesized
  source 1..22: mol_type = other DNA
tagtccattttaagagggaagc

SEQ ID NO: 24217 - DNA, 22 bp, synthetic construct
  misc_feature 1..22: note = chemically synthesized
  source 1..22: mol_type = other DNA
gtccattttaagagggaagcat

SEQ ID NO: 24218 - DNA, 22 bp, synthetic construct
  misc_feature 1..22: note = chemically synthesized
  source 1..22: mol_type = other DNA
taagagggaagcatttatttag

SEQ ID NO: 24219 - DNA, 22 bp, synthetic construct
  misc_feature 1..22: note = chemically synthesized
  source 1..22: mol_type = other DNA
aagagggaagcatttatttagg

SEQ ID NO: 24220 - DNA, 22 bp, synthetic construct
  misc_feature 1..22: note = chemically synthesized
  source 1..22: mol_type = other DNA
agagggaagcatttatttaggg

SEQ ID NO: 24221 - DNA, 22 bp, synthetic construct
  misc_feature 1..22: note = chemically synthesized
  source 1..22: mol_type = other DNA
atttagggactacatcgctcaa

SEQ ID NO: 24222 - DNA, 22 bp, synthetic construct
  misc_feature 1..22: note = chemically synthesized
  source 1..22: mol_type = other DNA
tttagggactacatcgctcaag

SEQ ID NO: 24223 - DNA, 22 bp, synthetic construct
  misc_feature 1..22: note = chemically synthesized
  source 1..22: mol_type = other DNA
agggactacatcgctcaagtct

SEQ ID NO: 24224 - DNA, 22 bp, synthetic construct
  misc_feature 1..22: note = chemically synthesized
  source 1..22: mol_type = other DNA
gggactacatcgctcaagtctt

SEQ ID NO: 24225 - DNA, 22 bp, synthetic construct
  misc_feature 1..22: note = chemically synthesized
  source 1..22: mol_type = other DNA
catcgctcaagtctttacaatt

SEQ ID NO: 24226 - DNA, 22 bp, synthetic construct
  misc_feature 1..22: note = chemically synthesized
  source 1..22: mol_type = other DNA
aagtctttacaattcttaaatt

SEQ ID NO: 24227 - DNA, 22 bp, synthetic construct
  misc_feature 1..22: note = chemically synthesized
  source 1..22: mol_type = other DNA
tacaattcttaaattaactttc

SEQ ID NO: 24228 - DNA, 22 bp, synthetic construct
  misc_feature 1..22: note = chemically synthesized
  source 1..22: mol_type = other DNA
acaattcttaaattaactttca

SEQ ID NO: 24229 - DNA, 22 bp, synthetic construct
  misc_feature 1..22: note = chemically synthesized
  source 1..22: mol_type = other DNA
caattcttaaattaactttcat

SEQ ID NO: 24230 - DNA, 22 bp, synthetic construct
  misc_feature 1..22: note = chemically synthesized
  source 1..22: mol_type = other DNA
ttaaattaactttcattatgtg

SEQ ID NO: 24231 - DNA, 22 bp, synthetic construct
  misc_feature 1..22: note = chemically synthesized
  source 1..22: mol_type = other DNA
aaattaactttcattatgtgtg

SEQ ID NO: 24232 - DNA, 22 bp, synthetic construct
  misc_feature 1..22: note = chemically synthesized
  source 1..22: mol_type = other DNA
aattaactttcattatgtgtga

SEQ ID NO: 24233 - DNA, 22 bp, synthetic construct
  misc_feature 1..22: note = chemically synthesized
  source 1..22: mol_type = other DNA
actttcattatgtgtgacaaca

SEQ ID NO: 24234 - DNA, 22 bp, synthetic construct
  misc_feature 1..22: note = chemically synthesized
  source 1..22: mol_type = other DNA
tcattatgtgtgacaacattta

SEQ ID NO: 24235 - DNA, 22 bp, synthetic construct
  misc_feature 1..22: note = chemically synthesized
  source 1..22: mol_type = other DNA
cattatgtgtgacaacatttat

SEQ ID NO: 24236 - DNA, 22 bp, synthetic construct
  misc_feature 1..22: note = chemically synthesized
  source 1..22: mol_type = other DNA
attatgtgtgacaacatttatt

SEQ ID NO: 24237 - DNA, 22 bp, synthetic construct
  misc_feature 1..22: note = chemically synthesized
  source 1..22: mol_type = other DNA
tgtgtgacaacatttattaaac

SEQ ID NO: 24238 - DNA, 22 bp, synthetic construct
  misc_feature 1..22: note = chemically synthesized
  source 1..22: mol_type = other DNA
attaaacttttttaatgatcct

SEQ ID NO: 24239 - DNA, 22 bp, synthetic construct
  misc_feature 1..22: note = chemically synthesized
  source 1..22: mol_type = other DNA
ttaaacttttttaatgatccta

SEQ ID NO: 24240 - DNA, 22 bp, synthetic construct
  misc_feature 1..22: note = chemically synthesized
  source 1..22: mol_type = other DNA
aacttttttaatgatcctaaat

SEQ ID NO: 24241 - DNA, 22 bp, synthetic construct
  misc_feature 1..22: note = chemically synthesized
  source 1..22: mol_type = other DNA
ttttaatgatcctaaatatcct

SEQ ID NO: 24242 - DNA, 22 bp, synthetic construct
  misc_feature 1..22: note = chemically synthesized
  source 1..22: mol_type = other DNA
tttaatgatcctaaatatcctt

SEQ ID NO: 24243 - DNA, 22 bp, synthetic construct
  misc_feature 1..22: note = chemically synthesized
  source 1..22: mol_type = other DNA
ttaatgatcctaaatatcctta

SEQ ID NO: 24244 - DNA, 22 bp, synthetic construct
  misc_feature 1..22: note = chemically synthesized
  source 1..22: mol_type = other DNA
taatgatcctaaatatccttaa

SEQ ID NO: 24245 - DNA, 22 bp, synthetic construct
  misc_feature 1..22: note = chemically synthesized
  source 1..22: mol_type = other DNA
aatgatcctaaatatccttaac

SEQ ID NO: 24246 - DNA, 22 bp, synthetic construct
  misc_feature 1..22: note = chemically synthesized
  source 1..22: mol_type = other DNA
atgatcctaaatatccttaaca

SEQ ID NO: 24247 - DNA, 22 bp, synthetic construct
  misc_feature 1..22: note = chemically synthesized
  source 1..22: mol_type = other DNA
aatatccttaacatgttaattt

SEQ ID NO: 24248 - DNA, 22 bp, synthetic construct
  misc_feature 1..22: note = chemically synthesized
  source 1..22: mol_type = other DNA
aacatgttaatttctccagagt

SEQ ID NO: 24249 - DNA, 22 bp, synthetic construct
  misc_feature 1..22: note = chemically synthesized
  source 1..22: mol_type = other DNA
acatgttaatttctccagagtt

SEQ ID NO: 24250 - DNA, 22 bp, synthetic construct
  misc_feature 1..22: note = chemically synthesized
  source 1..22: mol_type = other DNA
atttctccagagtttgtaatgt

SEQ ID NO: 24251 - DNA, 22 bp, synthetic construct
  misc_feature 1..22: note = chemically synthesized
  source 1..22: mol_type = other DNA
ctccagagtttgtaatgttctg

SEQ ID NO: 24252 - DNA, 22 bp, synthetic construct
  misc_feature 1..22: note = chemically synthesized
  source 1..22: mol_type = other DNA
tccagagtttgtaatgttctga

SEQ ID NO: 24253 - DNA, 22 bp, synthetic construct
  misc_feature 1..22: note = chemically synthesized
  source 1..22: mol_type = other DNA
cagagtttgtaatgttctgagc

SEQ ID NO: 24254 - DNA, 22 bp, synthetic construct
  misc_feature 1..22: note = chemically synthesized
  source 1..22: mol_type = other DNA
gtaatgttctgagcaagtgtgt

SEQ ID NO: 24255 - DNA, 22 bp, synthetic construct
  misc_feature 1..22: note = chemically synthesized
  source 1..22: mol_type = other DNA
taatgttctgagcaagtgtgtg

SEQ ID NO: 24256 - DNA, 22 bp, synthetic construct
  misc_feature 1..22: note = chemically synthesized
  source 1..22: mol_type = other DNA
tgagcaagtgtgtgcagaagaa

SEQ ID NO: 24257 - DNA, 22 bp, synthetic construct
  misc_feature 1..22: note = chemically synthesized
  source 1..22: mol_type = other DNA
agcaagtgtgtgcagaagaaat

SEQ ID NO: 24258 - DNA, 22 bp, synthetic construct
  misc_feature 1..22: note = chemically synthesized
  source 1..22: mol_type = other DNA
tagtaagacctgggcaaaggag

SEQ ID NO: 24259 - DNA, 22 bp, synthetic construct
  misc_feature 1..22: note = chemically synthesized
  source 1..22: mol_type = other DNA
ggcaaaggagagagtaaacatt

SEQ ID NO: 24260 - DNA, 22 bp, synthetic construct
  misc_feature 1..22: note = chemically synthesized
  source 1..22: mol_type = other DNA
ttcccccacatttgggcaaaac

SEQ ID NO: 24261 - DNA, 22 bp, synthetic construct
  misc_feature 1..22: note = chemically synthesized
  source 1..22: mol_type = other DNA
tcccccacatttgggcaaaact

SEQ ID NO: 24262 - DNA, 22 bp, synthetic construct
  misc_feature 1..22: note = chemically synthesized
  source 1..22: mol_type = other DNA
cccccacatttgggcaaaactt

SEQ ID NO: 24263 - DNA, 22 bp, synthetic construct
  misc_feature 1..22: note = chemically synthesized
  source 1..22: mol_type = other DNA
ccccacatttgggcaaaacttt

SEQ ID NO: 24264 - DNA, 22 bp, synthetic construct
  misc_feature 1..22: note = chemically synthesized
  source 1..22: mol_type = other DNA
gggcaaaactttccatcctggg

SEQ ID NO: 24265 - DNA, 22 bp, synthetic construct
  misc_feature 1..22: note = chemically synthesized
  source 1..22: mol_type = other DNA
ggcaaaactttccatcctgggt

SEQ ID NO: 24266 - DNA, 22 bp, synthetic construct
  misc_feature 1..22: note = chemically synthesized
  source 1..22: mol_type = other DNA
tccatcctgggtcacaccacag

SEQ ID NO: 24267 - DNA, 22 bp, synthetic construct
  misc_feature 1..22: note = chemically synthesized
  source 1..22: mol_type = other DNA
ccatcctgggtcacaccacagt

SEQ ID NO: 24268 - DNA, 22 bp, synthetic construct
  misc_feature 1..22: note = chemically synthesized
  source 1..22: mol_type = other DNA
catcctgggtcacaccacagtc

SEQ ID NO: 24269 - DNA, 22 bp, synthetic construct
  misc_feature 1..22: note = chemically synthesized
  source 1..22: mol_type = other DNA
ggtcacaccacagtctaatttc

SEQ ID NO: 24270 - DNA, 22 bp, synthetic construct
  misc_feature 1..22: note = chemically synthesized
  source 1..22: mol_type = other DNA
atttccctcctctcctctccct

SEQ ID NO: 24271 - DNA, 22 bp, synthetic construct
  misc_feature 1..22: note = chemically synthesized
  source 1..22: mol_type = other DNA
ccctcctctcctctccctcaac

SEQ ID NO: 24272 - DNA, 22 bp, synthetic construct
  misc_feature 1..22: note = chemically synthesized
  source 1..22: mol_type = other DNA
cctcctctcctctccctcaact

SEQ ID NO: 24273 - DNA, 22 bp, synthetic construct
  misc_feature 1..22: note = chemically synthesized
  source 1..22: mol_type = other DNA
ctctcctctccctcaactggta

SEQ ID NO: 24274 - DNA, 22 bp, synthetic construct
  misc_feature 1..22: note = chemically synthesized
  source 1..22: mol_type = other DNA
tcctctccctcaactggtaaca

SEQ ID NO: 24275 - DNA, 22 bp, synthetic construct
  misc_feature 1..22: note = chemically synthesized
  source 1..22: mol_type = other DNA
ctctccctcaactggtaacagt

SEQ ID NO: 24276 - DNA, 22 bp, synthetic construct
  misc_feature 1..22: note = chemically synthesized
  source 1..22: mol_type = other DNA
tccctcaactggtaacagtgct

SEQ ID NO: 24277 - DNA, 22 bp, synthetic construct
  misc_feature 1..22: note = chemically synthesized
  source 1..22: mol_type = other DNA
cctcaactggtaacagtgcttc

SEQ ID NO: 24278 - DNA, 22 bp, synthetic construct
  misc_feature 1..22: note = chemically synthesized
  source 1..22: mol_type = other DNA
aactggtaacagtgcttcttcc

SEQ ID NO: 24279 - DNA, 22 bp, synthetic construct
  misc_feature 1..22: note = chemically synthesized
  source 1..22: mol_type = other DNA
gtaacagtgcttcttccaaaac

SEQ ID NO: 24280 - DNA, 22 bp, synthetic construct
  misc_feature 1..22: note = chemically synthesized
  source 1..22: mol_type = other DNA
cttccaaaacatacctgactac

SEQ ID NO: 24281 - DNA, 22 bp, synthetic construct
  misc_feature 1..22: note = chemically synthesized
  source 1..22: mol_type = other DNA
ttccaaaacatacctgactact

SEQ ID NO: 24282 - DNA, 22 bp, synthetic construct
  misc_feature 1..22: note = chemically synthesized
  source 1..22: mol_type = other DNA
ccaaaacatacctgactactta

SEQ ID NO: 24283 - DNA, 22 bp, synthetic construct
  misc_feature 1..22: note = chemically synthesized
  source 1..22: mol_type = other DNA
caaaacatacctgactacttag

SEQ ID NO: 24284 - DNA, 22 bp, synthetic construct
  misc_feature 1..22: note = chemically synthesized
  source 1..22: mol_type = other DNA
actacttagtacttcccactac

SEQ ID NO: 24285 - DNA, 22 bp, synthetic construct
  misc_feature 1..22: note = chemically synthesized
  source 1..22: mol_type = other DNA
cttagtacttcccactactgtg

SEQ ID NO: 24286 - DNA, 22 bp, synthetic construct
  misc_feature 1..22: note = chemically synthesized
  source 1..22: mol_type = other DNA
agtacttcccactactgtggat

SEQ ID NO: 24287 - DNA, 22 bp, synthetic construct
  misc_feature 1..22: note = chemically synthesized
  source 1..22: mol_type = other DNA
gtacttcccactactgtggata

SEQ ID NO: 24288 - DNA, 22 bp, synthetic construct
  misc_feature 1..22: note = chemically synthesized
  source 1..22: mol_type = other DNA
cccactactgtggatagaattt

SEQ ID NO: 24289 - DNA, 22 bp, synthetic construct
  misc_feature 1..22: note = chemically synthesized
  source 1..22: mol_type = other DNA
ccactactgtggatagaatttc

SEQ ID NO: 24290 - DNA, 22 bp, synthetic construct
  misc_feature 1..22: note = chemically synthesized
  source 1..22: mol_type = other DNA
ctgtggatagaatttcagtgac

SEQ ID NO: 24291 - DNA, 22 bp, synthetic construct
  misc_feature 1..22: note = chemically synthesized
  source 1..22: mol_type = other DNA
tggatagaatttcagtgactcc

SEQ ID NO: 24292 - DNA, 22 bp, synthetic construct
  misc_feature 1..22: note = chemically synthesized
  source 1..22: mol_type = other DNA
cagtgactcctcattcattgtt

SEQ ID NO: 24293 - DNA, 22 bp, synthetic construct
  misc_feature 1..22: note = chemically synthesized
  source 1..22: mol_type = other DNA
agtgactcctcattcattgttc

SEQ ID NO: 24294 - DNA, 22 bp, synthetic construct
  misc_feature 1..22: note = chemically synthesized
  source 1..22: mol_type = other DNA
ctcattcattgttcataccctg

SEQ ID NO: 24295 - DNA, 22 bp, synthetic construct
  misc_feature 1..22: note = chemically synthesized
  source 1..22: mol_type = other DNA
attcattgttcataccctggag

SEQ ID NO: 24296 - DNA, 22 bp, synthetic construct
  misc_feature 1..22: note = chemically synthesized
  source 1..22: mol_type = other DNA
attgttcataccctggagacaa

SEQ ID NO: 24297 - DNA, 22 bp, synthetic construct
  misc_feature 1..22: note = chemically synthesized
  source 1..22: mol_type = other DNA
ttcataccctggagacaaaact

SEQ ID NO: 24298 - DNA, 22 bp, synthetic construct
  misc_feature 1..22: note = chemically synthesized
  source 1..22: mol_type = other DNA
ataccctggagacaaaactcct

SEQ ID NO: 24299 - DNA, 22 bp, synthetic construct
  misc_feature 1..22: note = chemically synthesized
  source 1..22: mol_type = other DNA
gagacaaaactccttaaggcta

SEQ ID NO: 24300 - DNA, 22 bp, synthetic construct
  misc_feature 1..22: note = chemically synthesized
  source 1..22: mol_type = other DNA
cttaaggctattaactccccct

SEQ ID NO: 24301 - DNA, 22 bp, synthetic construct
  misc_feature 1..22: note = chemically synthesized
  source 1..22: mol_type = other DNA
aaggctattaactccccctgag

SEQ ID NO: 24302 - DNA, 22 bp, synthetic construct
  misc_feature 1..22: note = chemically synthesized
  source 1..22: mol_type = other DNA
aggctattaactccccctgagc

SEQ ID NO: 24303 - DNA, 22 bp, synthetic construct
  misc_feature 1..22: note = chemically synthesized
  source 1..22: mol_type = other DNA
ttaactccccctgagcttcaca

SEQ ID NO: 24304 - DNA, 22 bp, synthetic construct
  misc_feature 1..22: note = chemically synthesized
  source 1..22: mol_type = other DNA
actccccctgagcttcacaatc

SEQ ID NO: 24305 - DNA, 22 bp, synthetic construct
  misc_feature 1..22: note = chemically synthesized
  source 1..22: mol_type = other DNA
cccctgagcttcacaatctagt

SEQ ID NO: 24306 - DNA, 22 bp, synthetic construct
  misc_feature 1..22: note = chemically synthesized
  source 1..22: mol_type = other DNA
agcttcacaatctagtccctgc

SEQ ID NO: 24307 - DNA, 22 bp, synthetic construct
  misc_feature 1..22: note = chemically synthesized
  source 1..22: mol_type = other DNA
cacaatctagtccctgcaggtc

SEQ ID NO: 24308 - DNA, 22 bp, synthetic construct
  misc_feature 1..22: note = chemically synthesized
  source 1..22: mol_type = other DNA
acaatctagtccctgcaggtct

SEQ ID NO: 24309 - DNA, 22 bp, synthetic construct
  misc_feature 1..22: note = chemically synthesized
  source 1..22: mol_type = other DNA
gtccctgcaggtctctcccatc

SEQ ID NO: 24310 - DNA, 22 bp, synthetic construct
  misc_feature 1..22: note = chemically synthesized
  source 1..22: mol_type = other DNA
caggtctctcccatcttctctc

SEQ ID NO: 24311 - DNA, 22 bp, synthetic construct
  misc_feature 1..22: note = chemically synthesized
  source 1..22: mol_type = other DNA
tcccatcttctctcatactcct

SEQ ID NO: 24312 - DNA, 22 bp, synthetic construct
  misc_feature 1..22: note = chemically synthesized
  source 1..22: mol_type = other DNA
ccatcttctctcatactcctct

SEQ ID NO: 24313 - DNA, 22 bp, synthetic construct
  misc_feature 1..22: note = chemically synthesized
  source 1..22: mol_type = other DNA
ctctcatactcctctccttttc

SEQ ID NO: 24314 - DNA, 22 bp, synthetic construct
  misc_feature 1..22: note = chemically synthesized
  source 1..22: mol_type = other DNA
tctcatactcctctccttttcc

SEQ ID NO: 24315 - DNA, 22 bp, synthetic construct
  misc_feature 1..22: note = chemically synthesized
  source 1..22: mol_type = other DNA
tcatactcctctccttttccct

SEQ ID NO: 24316 - DNA, 22 bp, synthetic construct
  misc_feature 1..22: note = chemically synthesized
  source 1..22: mol_type = other DNA
atactcctctccttttccctct

SEQ ID NO: 24317 - DNA, 22 bp, synthetic construct
  misc_feature 1..22: note = chemically synthesized
  source 1..22: mol_type = other DNA
ctctccttttccctctctgagc

SEQ ID NO: 24318 - DNA, 22 bp, synthetic construct
  misc_feature 1..22: note = chemically synthesized
  source 1..22: mol_type = other DNA
tccttttccctctctgagcccc

SEQ ID NO: 24319 - DNA, 22 bp, synthetic construct
  misc_feature 1..22: note = chemically synthesized
  source 1..22: mol_type = other DNA
cttttccctctctgagccccgc

SEQ ID NO: 24320 - DNA, 22 bp, synthetic construct
  misc_feature 1..22: note = chemically synthesized
  source 1..22: mol_type = other DNA
ttccctctctgagccccgctca

SEQ ID NO: 24321 - DNA, 22 bp, synthetic construct
  misc_feature 1..22: note = chemically synthesized
  source 1..22: mol_type = other DNA
tccctctctgagccccgctcag

SEQ ID NO: 24322 - DNA, 22 bp, synthetic construct
  misc_feature 1..22: note = chemically synthesized
  source 1..22: mol_type = other DNA
ccctctctgagccccgctcaga

SEQ ID NO: 24323 - DNA, 22 bp, synthetic construct
  misc_feature 1..22: note = chemically synthesized
  source 1..22: mol_type = other DNA
cctctctgagccccgctcagat

SEQ ID NO: 24324 - DNA, 22 bp, synthetic construct
  misc_feature 1..22: note = chemically synthesized
  source 1..22: mol_type = other DNA
tctgagccccgctcagatcttc

SEQ ID NO: 24325 - DNA, 22 bp, synthetic construct
  misc_feature 1..22: note = chemically synthesized
  source 1..22: mol_type = other DNA
tgagccccgctcagatcttcga

SEQ ID NO: 24326 - DNA, 22 bp, synthetic construct
  misc_feature 1..22: note = chemically synthesized
  source 1..22: mol_type = other DNA
agccccgctcagatcttcgaac

SEQ ID NO: 24327 - DNA, 22 bp, synthetic construct
  misc_feature 1..22: note = chemically synthesized
  source 1..22: mol_type = other DNA
agatcttcgaacagagaacact

SEQ ID NO: 24328 - DNA, 22 bp, synthetic construct
  misc_feature 1..22: note = chemically synthesized
  source 1..22: mol_type = other DNA
cgaacagagaacacttctgcat

SEQ ID NO: 24329 - DNA, 22 bp, synthetic construct
  misc_feature 1..22: note = chemically synthesized
  source 1..22: mol_type = other DNA
gaacagagaacacttctgcatc

SEQ ID NO: 24330 - DNA, 22 bp, synthetic construct
  misc_feature 1..22: note = chemically synthesized
  source 1..22: mol_type = other DNA
ctgcatcttggcatatatagtt

SEQ ID NO: 24331 - DNA, 22 bp, synthetic construct
  misc_feature 1..22: note = chemically synthesized
  source 1..22: mol_type = other DNA
tgcatcttggcatatatagttc

SEQ ID NO: 24332 - DNA, 22 bp, synthetic construct
  misc_feature 1..22: note = chemically synthesized
  source 1..22: mol_type = other DNA
catcttggcatatatagttctc

SEQ ID NO: 24333 - DNA, 22 bp, synthetic construct
  misc_feature 1..22: note = chemically synthesized
  source 1..22: mol_type = other DNA
ggcatatatagttctctcacat

SEQ ID NO: 24334 - DNA, 22 bp, synthetic construct
  misc_feature 1..22: note = chemically synthesized
  source 1..22: mol_type = other DNA
gcatatatagttctctcacata

SEQ ID NO: 24335 - DNA, 22 bp, synthetic construct
  misc_feature 1..22: note = chemically synthesized
  source 1..22: mol_type = other DNA
tctcacatagaacgctttctcc

SEQ ID NO: 24336 - DNA, 22 bp, synthetic construct
  misc_feature 1..22: note = chemically synthesized
  source 1..22: mol_type = other DNA
tcacatagaacgctttctcccc

SEQ ID NO: 24337 - DNA, 22 bp, synthetic construct
  misc_feature 1..22: note = chemically synthesized
  source 1..22: mol_type = other DNA
acatagaacgctttctcccctt

SEQ ID NO: 24338 - DNA, 22 bp, synthetic construct
  misc_feature 1..22: note = chemically synthesized
  source 1..22: mol_type = other DNA
tctcccctttagctatttatcc

SEQ ID NO: 24339 - DNA, 22 bp, synthetic construct
  misc_feature 1..22: note = chemically synthesized
  source 1..22: mol_type = other DNA
ctcccctttagctatttatcct

SEQ ID NO: 24340 - DNA, 22 bp, synthetic construct
  misc_feature 1..22: note = chemically synthesized
  source 1..22: mol_type = other DNA
tcccctttagctatttatcctt

SEQ ID NO: 24341 - DNA, 22 bp, synthetic construct
  misc_feature 1..22: note = chemically synthesized
  source 1..22: mol_type = other DNA
ccctttagctatttatccttca

SEQ ID NO: 24342 - DNA, 22 bp, synthetic construct
  misc_feature 1..22: note = chemically synthesized
  source 1..22: mol_type = other DNA
tagctatttatccttcaagtgt

SEQ ID NO: 24343 - DNA, 22 bp, synthetic construct
  misc_feature 1..22: note = chemically synthesized
  source 1..22: mol_type = other DNA
agctatttatccttcaagtgtc

SEQ ID NO: 24344 - DNA, 22 bp, synthetic construct
  misc_feature 1..22: note = chemically synthesized
  source 1..22: mol_type = other DNA
gctatttatccttcaagtgtca

SEQ ID NO: 24345 - DNA, 22 bp, synthetic construct
  misc_feature 1..22: note = chemically synthesized
  source 1..22: mol_type = other DNA
tttatccttcaagtgtcagctc

SEQ ID NO: 24346 - DNA, 22 bp, synthetic construct
  misc_feature 1..22: note = chemically synthesized
  source 1..22: mol_type = other DNA
atccttcaagtgtcagctcaaa

SEQ ID NO: 24347 - DNA, 22 bp, synthetic construct
  misc_feature 1..22: note = chemically synthesized
  source 1..22: mol_type = other DNA
tccttcaagtgtcagctcaaac

SEQ ID NO: 24348 - DNA, 22 bp, synthetic construct
  misc_feature 1..22: note = chemically synthesized
  source 1..22: mol_type = other DNA
caagtgtcagctcaaacatctc

SEQ ID NO: 24349 - DNA, 22 bp, synthetic construct
  misc_feature 1..22: note = chemically synthesized
  source 1..22: mol_type = other DNA
aagtgtcagctcaaacatctca

SEQ ID NO: 24350 - DNA, 22 bp, synthetic construct
  misc_feature 1..22: note = chemically synthesized
  source 1..22: mol_type = other DNA
aaacatctcatcattagagagg

SEQ ID NO: 24351 - DNA, 22 bp, synthetic construct
  misc_feature 1..22: note = chemically synthesized
  source 1..22: mol_type = other DNA
atcattagagaggtttttccca

SEQ ID NO: 24352 - DNA, 22 bp, synthetic construct
  misc_feature 1..22: note = chemically synthesized
  source 1..22: mol_type = other DNA
gagaggtttttcccaaacctct

SEQ ID NO: 24353 - DNA, 22 bp, synthetic construct
  misc_feature 1..22: note = chemically synthesized
  source 1..22: mol_type = other DNA
ttcccaaacctctaggtaacta

SEQ ID NO: 24354 - DNA, 22 bp, synthetic construct
  misc_feature 1..22: note = chemically synthesized
  source 1..22: mol_type = other DNA
tcccaaacctctaggtaactag

SEQ ID NO: 24355 - DNA, 22 bp, synthetic construct
  misc_feature 1..22: note = chemically synthesized
  source 1..22: mol_type = other DNA
cccaaacctctaggtaactagg

SEQ ID NO: 24356 - DNA, 22 bp, synthetic construct
  misc_feature 1..22: note = chemically synthesized
  source 1..22: mol_type = other DNA
ccaaacctctaggtaactaggt

SEQ ID NO: 24357 - DNA, 22 bp, synthetic construct
  misc_feature 1..22: note = chemically synthesized
  source 1..22: mol_type = other DNA
taggtaactaggttagaaacca

SEQ ID NO: 24358 - DNA, 22 bp, synthetic construct
  misc_feature 1..22: note = chemically synthesized
  source 1..22: mol_type = other DNA
ggtaactaggttagaaaccact

SEQ ID NO: 24359 - DNA, 22 bp, synthetic construct
  misc_feature 1..22: note = chemically synthesized
  source 1..22: mol_type = other DNA
ggttagaaaccactccccattc

SEQ ID NO: 24360 - DNA, 22 bp, synthetic construct
  misc_feature 1..22: note = chemically synthesized
  source 1..22: mol_type = other DNA
gaaaccactccccattccacgg

SEQ ID NO: 24361 - DNA, 22 bp, synthetic construct
  misc_feature 1..22: note = chemically synthesized
  source 1..22: mol_type = other DNA
cccattccacggtacactgtat

SEQ ID NO: 24362 - DNA, 22 bp, synthetic construct
  misc_feature 1..22: note = chemically synthesized
  source 1..22: mol_type = other DNA
cacggtacactgtatagtctta

SEQ ID NO: 24363 - DNA, 22 bp, synthetic construct
  misc_feature 1..22: note = chemically synthesized
  source 1..22: mol_type = other DNA
tatagtcttaggacacctggtt

SEQ ID NO: 24364 - DNA, 22 bp, synthetic construct
  misc_feature 1..22: note = chemically synthesized
  source 1..22: mol_type = other DNA
aggacacctggttcccttagtc

SEQ ID NO: 24365 - DNA, 22 bp, synthetic construct
  misc_feature 1..22: note = chemically synthesized
  source 1..22: mol_type = other DNA
ggacacctggttcccttagtct

SEQ ID NO: 24366 - DNA, 22 bp, synthetic construct
  misc_feature 1..22: note = chemically synthesized
  source 1..22: mol_type = other DNA
gttcccttagtctcacactcat

SEQ ID NO: 24367 - DNA, 22 bp, synthetic construct
  misc_feature 1..22: note = chemically synthesized
  source 1..22: mol_type = other DNA
ccttagtctcacactcatcaca

SEQ ID NO: 24368 - DNA, 22 bp, synthetic construct
  misc_feature 1..22: note = chemically synthesized
  source 1..22: mol_type = other DNA
agtctcacactcatcacatttg

SEQ ID NO: 24369 - DNA, 22 bp, synthetic construct
  misc_feature 1..22: note = chemically synthesized
  source 1..22: mol_type = other DNA
gtctcacactcatcacatttga

SEQ ID NO: 24370 - DNA, 22 bp, synthetic construct
  misc_feature 1..22: note = chemically synthesized
  source 1..22: mol_type = other DNA
acactcatcacatttgactgta

SEQ ID NO: 24371 - DNA, 22 bp, synthetic construct
  misc_feature 1..22: note = chemically synthesized
  source 1..22: mol_type = other DNA
atcacatttgactgtattgtat

SEQ ID NO: 24372 - DNA, 22 bp, synthetic construct
  misc_feature 1..22: note = chemically synthesized
  source 1..22: mol_type = other DNA
gactgtattgtatgttcaatgt

SEQ ID NO: 24373 - DNA, 22 bp, synthetic construct
  misc_feature 1..22: note = chemically synthesized
  source 1..22: mol_type = other DNA
actgtattgtatgttcaatgtc

SEQ ID NO: 24374 - DNA, 22 bp, synthetic construct
  misc_feature 1..22: note = chemically synthesized
  source 1..22: mol_type = other DNA
tattgtatgttcaatgtctacc

SEQ ID NO: 24375 - DNA, 22 bp, synthetic construct
  misc_feature 1..22: note = chemically synthesized
  source 1..22: mol_type = other DNA
tatgttcaatgtctaccttcta

SEQ ID NO: 24376 - DNA, 22 bp, synthetic construct
  misc_feature 1..22: note = chemically synthesized
  source 1..22: mol_type = other DNA
aatgtctaccttctacaaattt

SEQ ID NO: 24377 - DNA, 22 bp, synthetic construct
  misc_feature 1..22: note = chemically synthesized
  source 1..22: mol_type = other DNA
ccttctacaaatttgtcaattc

SEQ ID NO: 24378 - DNA, 22 bp, synthetic construct
  misc_feature 1..22: note = chemically synthesized
  source 1..22: mol_type = other DNA
ctacaaatttgtcaattcttga

SEQ ID NO: 24379 - DNA, 22 bp, synthetic construct
  misc_feature 1..22: note = chemically synthesized
  source 1..22: mol_type = other DNA
tacaaatttgtcaattcttgaa

SEQ ID NO: 24380 - DNA, 22 bp, synthetic construct
  misc_feature 1..22: note = chemically synthesized
  source 1..22: mol_type = other DNA
caaatttgtcaattcttgaaga

SEQ ID NO: 24381 - DNA, 22 bp, synthetic construct
  misc_feature 1..22: note = chemically synthesized
  source 1..22: mol_type = other DNA
gtcaattcttgaagattaagaa

SEQ ID NO: 24382 - DNA, 22 bp, synthetic construct
  misc_feature 1..22: note = chemically synthesized
  source 1..22: mol_type = other DNA
tcaattcttgaagattaagaat

SEQ ID NO: 24383 - DNA, 22 bp, synthetic construct
  misc_feature 1..22: note = chemically synthesized
  source 1..22: mol_type = other DNA
ttgaagattaagaatcagttct

SEQ ID NO: 24384 - DNA, 22 bp, synthetic construct
  misc_feature 1..22: note = chemically synthesized
  source 1..22: mol_type = other DNA
gaagattaagaatcagttctgt

SEQ ID NO: 24385 - DNA, 22 bp, synthetic construct
  misc_feature 1..22: note = chemically synthesized
  source 1..22: mol_type = other DNA
aagattaagaatcagttctgta

SEQ ID NO: 24386 - DNA, 22 bp, synthetic construct
  misc_feature 1..22: note = chemically synthesized
  source 1..22: mol_type = other DNA
agaatcagttctgtattcttaa

SEQ ID NO: 24387 - DNA, 22 bp, synthetic construct
  misc_feature 1..22: note = chemically synthesized
  source 1..22: mol_type = other DNA
tgtattcttaactctatctccc

SEQ ID NO: 24388 - DNA, 22 bp, synthetic construct
  misc_feature 1..22: note = chemically synthesized
  source 1..22: mol_type = other DNA
tattcttaactctatctccctc

SEQ ID NO: 24389 - DNA, 22 bp, synthetic construct
  misc_feature 1..22: note = chemically synthesized
  source 1..22: mol_type = other DNA
ttaactctatctccctcgcctc

SEQ ID NO: 24390 - DNA, 22 bp, synthetic construct
  misc_feature 1..22: note = chemically synthesized
  source 1..22: mol_type = other DNA
aactctatctccctcgcctctc

SEQ ID NO: 24391 - DNA, 22 bp, synthetic construct
  misc_feature 1..22: note = chemically synthesized
  source 1..22: mol_type = other DNA
actctatctccctcgcctctca

SEQ ID NO: 24392 - DNA, 22 bp, synthetic construct
  misc_feature 1..22: note = chemically synthesized
  source 1..22: mol_type = other DNA
tatctccctcgcctctcagtgc

SEQ ID NO: 24393 - DNA, 22 bp, synthetic construct
  misc_feature 1..22: note = chemically synthesized
  source 1..22: mol_type = other DNA
tctccctcgcctctcagtgcct

SEQ ID NO: 24394 - DNA, 22 bp, synthetic construct
  misc_feature 1..22: note = chemically synthesized
  source 1..22: mol_type = other DNA
cctcgcctctcagtgcctgata

SEQ ID NO: 24395 - DNA, 22 bp, synthetic construct
  misc_feature 1..22: note = chemically synthesized
  source 1..22: mol_type = other DNA
gcctctcagtgcctgataccta

SEQ ID NO: 24396 - DNA, 22 bp, synthetic construct
  misc_feature 1..22: note = chemically synthesized
  source 1..22: mol_type = other DNA
tcagtgcctgatacctaataga

SEQ ID NO: 24397 - DNA, 22 bp, synthetic construct
  misc_feature 1..22: note = chemically synthesized
  source 1..22: mol_type = other DNA
agtgcctgatacctaatagaca

SEQ ID NO: 24398 - DNA, 22 bp, synthetic construct
  misc_feature 1..22: note = chemically synthesized
  source 1..22: mol_type = other DNA
atacctaatagacacttgatga

SEQ ID NO: 24399 - DNA, 22 bp, synthetic construct
  misc_feature 1..22: note = chemically synthesized
  source 1..22: mol_type = other DNA
atagacacttgatgaatcctta

SEQ ID NO: 24400 - DNA, 22 bp, synthetic construct
  misc_feature 1..22: note = chemically synthesized
  source 1..22: mol_type = other DNA
gatgaatccttactgaataata

SEQ ID NO: 24401 - DNA, 22 bp, synthetic construct
  misc_feature 1..22: note = chemically synthesized
  source 1..22: mol_type = other DNA
atgaatccttactgaataataa

SEQ ID NO: 24402 - DNA, 22 bp, synthetic construct
  misc_feature 1..22: note = chemically synthesized
  source 1..22: mol_type = other DNA
actgaataataaaatggattaa

SEQ ID NO: 24403 - DNA, 22 bp, synthetic construct
  misc_feature 1..22: note = chemically synthesized
  source 1..22: mol_type = other DNA
ctgaataataaaatggattaat

SEQ ID NO: 24404 - DNA, 22 bp, synthetic construct
  misc_feature 1..22: note = chemically synthesized
  source 1..22: mol_type = other DNA
aataataaaatggattaatgaa

SEQ ID NO: 24405 - DNA, 22 bp, synthetic construct
  misc_feature 1..22: note = chemically synthesized
  source 1..22: mol_type = other DNA
atgaataaaagcaataaatttc

SEQ ID NO: 24406 - DNA, 22 bp, synthetic construct
  misc_feature 1..22: note = chemically synthesized
  source 1..22: mol_type = other DNA
caaggttaatattaataaatta

SEQ ID NO: 24407 - DNA, 22 bp, synthetic construct
  misc_feature 1..22: note = chemically synthesized
  source 1..22: mol_type = other DNA
aaggttaatattaataaattaa

SEQ ID NO: 24408 - DNA, 22 bp, synthetic construct
  misc_feature 1..22: note = chemically synthesized
  source 1..22: mol_type = other DNA
atattaataaattaaaaaggtt

SEQ ID NO: 24409 - DNA, 22 bp, synthetic construct
  misc_feature 1..22: note = chemically synthesized
  source 1..22: mol_type = other DNA
ataaattaaaaaggttattttg

SEQ ID NO: 24410 - DNA, 22 bp, synthetic construct
  misc_feature 1..22: note = chemically synthesized
  source 1..22: mol_type = other DNA
aaaaggttattttgaagtctga

SEQ ID NO: 24411 - DNA, 22 bp, synthetic construct
  misc_feature 1..22: note = chemically synthesized
  source 1..22: mol_type = other DNA
ttttgaagtctgagaattagta

SEQ ID NO: 24412 - DNA, 22 bp, synthetic construct
  misc_feature 1..22: note = chemically synthesized
  source 1..22: mol_type = other DNA
tgaagtctgagaattagtaccc

SEQ ID NO: 24413 - DNA, 22 bp, synthetic construct
  misc_feature 1..22: note = chemically synthesized
  source 1..22: mol_type = other DNA
gaagtctgagaattagtaccca

SEQ ID NO: 24414 - DNA, 22 bp, synthetic construct
  misc_feature 1..22: note = chemically synthesized
  source 1..22: mol_type = other DNA
aagtctgagaattagtacccaa

SEQ ID NO: 24415 - DNA, 22 bp, synthetic construct
  misc_feature 1..22: note = chemically synthesized
  source 1..22: mol_type = other DNA
agaattagtacccaaaactaac

SEQ ID NO: 24416 - DNA, 22 bp, synthetic construct
  misc_feature 1..22: note = chemically synthesized
  source 1..22: mol_type = other DNA
gtacccaaaactaactgtgact

SEQ ID NO: 24417 - DNA, 22 bp, synthetic construct
  misc_feature 1..22: note = chemically synthesized
  source 1..22: mol_type = other DNA
actgtgactctctcatctgtta

SEQ ID NO: 24418 - DNA, 22 bp, synthetic construct
  misc_feature 1..22: note = chemically synthesized
  source 1..22: mol_type = other DNA
tgactctctcatctgttatgtt

SEQ ID NO: 24419 - DNA, 22 bp, synthetic construct
  misc_feature 1..22: note = chemically synthesized
  source 1..22: mol_type = other DNA
tctcatctgttatgtttttcac

SEQ ID NO: 24420 - DNA, 22 bp, synthetic construct
  misc_feature 1..22: note = chemically synthesized
  source 1..22: mol_type = other DNA
tcatctgttatgtttttcacgt

SEQ ID NO: 24421 - DNA, 22 bp, synthetic construct
  misc_feature 1..22: note = chemically synthesized
  source 1..22: mol_type = other DNA
atctgttatgtttttcacgttt

SEQ ID NO: 24422 - DNA, 22 bp, synthetic construct
  misc_feature 1..22: note = chemically synthesized
  source 1..22: mol_type = other DNA
ttatgtttttcacgtttccatt

SEQ ID NO: 24423 - DNA, 22 bp, synthetic construct
  misc_feature 1..22: note = chemically synthesized
  source 1..22: mol_type = other DNA
tgtttttcacgtttccattgtt

SEQ ID NO: 24424 - DNA, 22 bp, synthetic construct
  misc_feature 1..22: note = chemically synthesized
  source 1..22: mol_type = other DNA
ttcacgtttccattgttcatgg

SEQ ID NO: 24425 - DNA, 22 bp, synthetic construct
  misc_feature 1..22: note = chemically synthesized
  source 1..22: mol_type = other DNA
tcacgtttccattgttcatggg

SEQ ID NO: 24426 - DNA, 22 bp, synthetic construct
  misc_feature 1..22: note = chemically synthesized
  source 1..22: mol_type = other DNA
cacgtttccattgttcatgggc

SEQ ID NO: 24427 - DNA, 22 bp, synthetic construct
  misc_feature 1..22: note = chemically synthesized
  source 1..22: mol_type = other DNA
acgtttccattgttcatgggca

SEQ ID NO: 24428 - DNA, 22 bp, synthetic construct
  misc_feature 1..22: note = chemically synthesized
  source 1..22: mol_type = other DNA
ccattgttcatgggcaaaattc

SEQ ID NO: 24429 - DNA, 22 bp, synthetic construct
  misc_feature 1..22: note = chemically synthesized
  source 1..22: mol_type = other DNA
cattgttcatgggcaaaattct

SEQ ID NO: 24430 - DNA, 22 bp, synthetic construct
  misc_feature 1..22: note = chemically synthesized
  source 1..22: mol_type = other DNA
ttcatgggcaaaattctggcag

SEQ ID NO: 24431 - DNA, 22 bp, synthetic construct
  misc_feature 1..22: note = chemically synthesized
  source 1..22: mol_type = other DNA
atgggcaaaattctggcagcaa

SEQ ID NO: 24432 - DNA, 22 bp, synthetic construct
  misc_feature 1..22: note = chemically synthesized
  source 1..22: mol_type = other DNA
tggcagcaagggattcttctcc

SEQ ID NO: 24433 - DNA, 22 bp, synthetic construct
  misc_feature 1..22: note = chemically synthesized
  source 1..22: mol_type = other DNA
gcagcaagggattcttctccta

SEQ ID NO: 24434 - DNA, 22 bp, synthetic construct
  misc_feature 1..22: note = chemically synthesized
  source 1..22: mol_type = other DNA
ttctcctaagaaaccttttgtt

SEQ ID NO: 24435 - DNA, 22 bp, synthetic construct
  misc_feature 1..22: note = chemically synthesized
  source 1..22: mol_type = other DNA
ctcctaagaaaccttttgtttt

SEQ ID NO: 24436 - DNA, 22 bp, synthetic construct
  misc_feature 1..22: note = chemically synthesized
  source 1..22: mol_type = other DNA
tcctaagaaaccttttgttttc

SEQ ID NO: 24437 - DNA, 22 bp, synthetic construct
  misc_feature 1..22: note = chemically synthesized
  source 1..22: mol_type = other DNA
ctaagaaaccttttgttttctt

SEQ ID NO: 24438 - DNA, 22 bp, synthetic construct
  misc_feature 1..22: note = chemically synthesized
  source 1..22: mol_type = other DNA
agaaaccttttgttttcttgga

SEQ ID NO: 24439 - DNA, 22 bp, synthetic construct
  misc_feature 1..22: note = chemically synthesized
  source 1..22: mol_type = other DNA
ttgttttcttggatgtgaatac

SEQ ID NO: 24440 - DNA, 22 bp, synthetic construct
  misc_feature 1..22: note = chemically synthesized
  source 1..22: mol_type = other DNA
tgttttcttggatgtgaataca

SEQ ID NO: 24441 - DNA, 22 bp, synthetic construct
  misc_feature 1..22: note = chemically synthesized
  source 1..22: mol_type = other DNA
gttttcttggatgtgaatacat

SEQ ID NO: 24442 - DNA, 22 bp, synthetic construct
  misc_feature 1..22: note = chemically synthesized
  source 1..22: mol_type = other DNA
ttttcttggatgtgaatacatt

SEQ ID NO: 24443 - DNA, 22 bp, synthetic construct
  misc_feature 1..22: note = chemically synthesized
  source 1..22: mol_type = other DNA
tcttggatgtgaatacatttcc

SEQ ID NO: 24444 - DNA, 22 bp, synthetic construct
  misc_feature 1..22: note = chemically synthesized
  source 1..22: mol_type = other DNA
cttggatgtgaatacatttcct

SEQ ID NO: 24445 - DNA, 22 bp, synthetic construct
  misc_feature 1..22: note = chemically synthesized
  source 1..22: mol_type = other DNA
ttggatgtgaatacatttcctt

SEQ ID NO: 24446 - DNA, 22 bp, synthetic construct
  misc_feature 1..22: note = chemically synthesized
  source 1..22: mol_type = other DNA
ggatgtgaatacatttccttgt

SEQ ID NO: 24447 - DNA, 22 bp, synthetic construct
  misc_feature 1..22: note = chemically synthesized
  source 1..22: mol_type = other DNA
gatgtgaatacatttccttgtt

SEQ ID NO: 24448 - DNA, 22 bp, synthetic construct
  misc_feature 1..22: note = chemically synthesized
  source 1..22: mol_type = other DNA
ccttgtttgccagaaaacatgg

SEQ ID NO: 24449 - DNA, 22 bp, synthetic construct
  misc_feature 1..22: note = chemically synthesized
  source 1..22: mol_type = other DNA
cttgtttgccagaaaacatggt

SEQ ID NO: 24450 - DNA, 22 bp, synthetic construct
  misc_feature 1..22: note = chemically synthesized
  source 1..22: mol_type = other DNA
gtttgccagaaaacatggtaag

SEQ ID NO: 24451 - DNA, 22 bp, synthetic construct
  misc_feature 1..22: note = chemically synthesized
  source 1..22: mol_type = other DNA
tttgccagaaaacatggtaaga

SEQ ID NO: 24452 - DNA, 22 bp, synthetic construct
  misc_feature 1..22: note = chemically synthesized
  source 1..22: mol_type = other DNA
gccagaaaacatggtaagataa

SEQ ID NO: 24453 - DNA, 22 bp, synthetic construct
  misc_feature 1..22: note = chemically synthesized
  source 1..22: mol_type = other DNA
ccagaaaacatggtaagataac

SEQ ID NO: 24454 - DNA, 22 bp, synthetic construct
  misc_feature 1..22: note = chemically synthesized
  source 1..22: mol_type = other DNA
gagagtataacattcattttat

SEQ ID NO: 24455 - DNA, 22 bp, synthetic construct
  misc_feature 1..22: note = chemically synthesized
  source 1..22: mol_type = other DNA
attttattcatgaagaaactgt

SEQ ID NO: 24456 - DNA, 22 bp, synthetic construct
  misc_feature 1..22: note = chemically synthesized
  source 1..22: mol_type = other DNA
tattcatgaagaaactgttatt

SEQ ID NO: 24457 - DNA, 22 bp, synthetic construct
  misc_feature 1..22: note = chemically synthesized
  source 1..22: mol_type = other DNA
attcatgaagaaactgttattc

SEQ ID NO: 24458 - DNA, 22 bp, synthetic construct
  misc_feature 1..22: note = chemically synthesized
  source 1..22: mol_type = other DNA
ttcatgaagaaactgttattca

SEQ ID NO: 24459 - DNA, 22 bp, synthetic construct
  misc_feature 1..22: note = chemically synthesized
  source 1..22: mol_type = other DNA
atgaagaaactgttattcagtt

SEQ ID NO: 24460 - DNA, 22 bp, synthetic construct
  misc_feature 1..22: note = chemically synthesized
  source 1..22: mol_type = other DNA
ttattcagtttaaggggttctt

SEQ ID NO: 24461 - DNA, 22 bp, synthetic construct
  misc_feature 1..22: note = chemically synthesized
  source 1..22: mol_type = other DNA
ttcagtttaaggggttcttttt

SEQ ID NO: 24462 - DNA, 22 bp, synthetic construct
  misc_feature 1..22: note = chemically synthesized
  source 1..22: mol_type = other DNA
agtttaaggggttctttttcag

SEQ ID NO: 24463 - DNA, 22 bp, synthetic construct
  misc_feature 1..22: note = chemically synthesized
  source 1..22: mol_type = other DNA
aaggggttctttttcagaaagt

SEQ ID NO: 24464 - DNA, 22 bp, synthetic construct
  misc_feature 1..22: note = chemically synthesized
  source 1..22: mol_type = other DNA
aggggttctttttcagaaagtt

SEQ ID NO: 24465 - DNA, 22 bp, synthetic construct
  misc_feature 1..22: note = chemically synthesized
  source 1..22: mol_type = other DNA
tttttcagaaagtttcagaaat

SEQ ID NO: 24466 - DNA, 22 bp, synthetic construct
  misc_feature 1..22: note = chemically synthesized
  source 1..22: mol_type = other DNA
tttcagaaagtttcagaaatcc

SEQ ID NO: 24467 - DNA, 22 bp, synthetic construct
  misc_feature 1..22: note = chemically synthesized
  source 1..22: mol_type = other DNA
ttcagaaagtttcagaaatcca

SEQ ID NO: 24468 - DNA, 22 bp, synthetic construct
  misc_feature 1..22: note = chemically synthesized
  source 1..22: mol_type = other DNA
tcagaaagtttcagaaatccaa

SEQ ID NO: 24469 - DNA, 22 bp, synthetic construct
  misc_feature 1..22: note = chemically synthesized
  source 1..22: mol_type = other DNA
cagaaagtttcagaaatccaag

SEQ ID NO: 24470 - DNA, 22 bp, synthetic construct
  misc_feature 1..22: note = chemically synthesized
  source 1..22: mol_type = other DNA
agaaagtttcagaaatccaaga

SEQ ID NO: 24471 - DNA, 22 bp, synthetic construct
  misc_feature 1..22: note = chemically synthesized
  source 1..22: mol_type = other DNA
cagaaatccaagacctttgact

SEQ ID NO: 24472 - DNA, 22 bp, synthetic construct
  misc_feature 1..22: note = chemically synthesized
  source 1..22: mol_type = other DNA
agaaatccaagacctttgactg

SEQ ID NO: 24473 - DNA, 22 bp, synthetic construct
  misc_feature 1..22: note = chemically synthesized
  source 1..22: mol_type = other DNA
tgactgcaagtactgtgttctt

SEQ ID NO: 24474 - DNA, 22 bp, synthetic construct
  misc_feature 1..22: note = chemically synthesized
  source 1..22: mol_type = other DNA
gactgcaagtactgtgttcttt

SEQ ID NO: 24475 - DNA, 22 bp, synthetic construct
  misc_feature 1..22: note = chemically synthesized
  source 1..22: mol_type = other DNA
actgcaagtactgtgttctttc

SEQ ID NO: 24476 - DNA, 22 bp, synthetic construct
  misc_feature 1..22: note = chemically synthesized
  source 1..22: mol_type = other DNA
caagtactgtgttctttcatct

SEQ ID NO: 24477 - DNA, 22 bp, synthetic construct
  misc_feature 1..22: note = chemically synthesized
  source 1..22: mol_type = other DNA
tgttctttcatctataggacat

SEQ ID NO: 24478 - DNA, 22 bp, synthetic construct
  misc_feature 1..22: note = chemically synthesized
  source 1..22: mol_type = other DNA
tttcatctataggacatttcct

SEQ ID NO: 24479 - DNA, 22 bp, synthetic construct
  misc_feature 1..22: note = chemically synthesized
  source 1..22: mol_type = other DNA
tcatctataggacatttccttt

SEQ ID NO: 24480 - DNA, 22 bp, synthetic construct
  misc_feature 1..22: note = chemically synthesized
  source 1..22: mol_type = other DNA
catctataggacatttcctttg

SEQ ID NO: 24481 - DNA, 22 bp, synthetic construct
  misc_feature 1..22: note = chemically synthesized
  source 1..22: mol_type = other DNA
atctataggacatttcctttga

SEQ ID NO: 24482 - DNA, 22 bp, synthetic construct
  misc_feature 1..22: note = chemically synthesized
  source 1..22: mol_type = other DNA
taggacatttcctttgaaaact

SEQ ID NO: 24483 - DNA, 22 bp, synthetic construct
  misc_feature 1..22: note = chemically synthesized
  source 1..22: mol_type = other DNA
cctttgaaaactgaggttttaa

SEQ ID NO: 24484 - DNA, 22 bp, synthetic construct
  misc_feature 1..22: note = chemically synthesized
  source 1..22: mol_type = other DNA
ctttgaaaactgaggttttaat

SEQ ID NO: 24485 - DNA, 22 bp, synthetic construct
  misc_feature 1..22: note = chemically synthesized
  source 1..22: mol_type = other DNA
tgaaaactgaggttttaatatt

SEQ ID NO: 24486 - DNA, 22 bp, synthetic construct
  misc_feature 1..22: note = chemically synthesized
  source 1..22: mol_type = other DNA
gaaaactgaggttttaatattt

SEQ ID NO: 24487 - DNA, 22 bp, synthetic construct
  misc_feature 1..22: note = chemically synthesized
  source 1..22: mol_type = other DNA
aaaactgaggttttaatattta

SEQ ID NO: 24488 - DNA, 22 bp, synthetic construct
  misc_feature 1..22: note = chemically synthesized
  source 1..22: mol_type = other DNA
aggttttaatatttaattctta

SEQ ID NO: 24489 - DNA, 22 bp, synthetic construct
  misc_feature 1..22: note = chemically synthesized
  source 1..22: mol_type = other DNA
taatatttaattcttacataat

SEQ ID NO: 24490 - DNA, 22 bp, synthetic construct
  misc_feature 1..22: note = chemically synthesized
  source 1..22: mol_type = other DNA
aatatttaattcttacataata

SEQ ID NO: 24491 - DNA, 22 bp, synthetic construct
  misc_feature 1..22: note = chemically synthesized
  source 1..22: mol_type = other DNA
atatttaattcttacataatag

SEQ ID NO: 24492 - DNA, 22 bp, synthetic construct
  misc_feature 1..22: note = chemically synthesized
  source 1..22: mol_type = other DNA
aattcttacataatagtaaaaa

SEQ ID NO: 24493 - DNA, 22 bp, synthetic construct
  misc_feature 1..22: note = chemically synthesized
  source 1..22: mol_type = other DNA
attcttacataatagtaaaaaa

SEQ ID NO: 24494 - DNA, 22 bp, synthetic construct
  misc_feature 1..22: note = chemically synthesized
  source 1..22: mol_type = other DNA
ttacataatagtaaaaaagtga

SEQ ID NO: 24495 - DNA, 22 bp, synthetic construct
  misc_feature 1..22: note = chemically synthesized
  source 1..22: mol_type = other DNA
acataatagtaaaaaagtgaat

SEQ ID NO: 24496 - DNA, 22 bp, synthetic construct
  misc_feature 1..22: note = chemically synthesized
  source 1..22: mol_type = other DNA
cataatagtaaaaaagtgaatt

SEQ ID NO: 24497 - DNA, 22 bp, synthetic construct
  misc_feature 1..22: note = chemically synthesized
  source 1..22: mol_type = other DNA
gccttggaaaagacctaaatcc

SEQ ID NO: 24498 - DNA, 22 bp, synthetic construct
  misc_feature 1..22: note = chemically synthesized
  source 1..22: mol_type = other DNA
ggaaaagacctaaatcctggtc

SEQ ID NO: 24499 - DNA, 22 bp, synthetic construct
  misc_feature 1..22: note = chemically synthesized
  source 1..22: mol_type = other DNA
gaaaagacctaaatcctggtcc

SEQ ID NO: 24500 - DNA, 22 bp, synthetic construct
  misc_feature 1..22: note = chemically synthesized
  source 1..22: mol_type = other DNA
aatcctggtcctaactctgcca

SEQ ID NO: 24501 - DNA, 22 bp, synthetic construct
  misc_feature 1..22: note = chemically synthesized
  source 1..22: mol_type = other DNA
gtcctaactctgccatttgctt

SEQ ID NO: 24502 - DNA, 22 bp, synthetic construct
  misc_feature 1..22: note = chemically synthesized
  source 1..22: mol_type = other DNA
actctgccatttgcttgatcat

SEQ ID NO: 24503 - DNA, 22 bp, synthetic construct
  misc_feature 1..22: note = chemically synthesized
  source 1..22: mol_type = other DNA
tgccatttgcttgatcattaaa

SEQ ID NO: 24504 - DNA, 22 bp, synthetic construct
  misc_feature 1..22: note = chemically synthesized
  source 1..22: mol_type = other DNA
ccatttgcttgatcattaaata

SEQ ID NO: 24505 - DNA, 22 bp, synthetic construct
  misc_feature 1..22: note = chemically synthesized
  source 1..22: mol_type = other DNA
gcttgatcattaaatacctcta

SEQ ID NO: 24506 - DNA, 22 bp, synthetic construct
  misc_feature 1..22: note = chemically synthesized
  source 1..22: mol_type = other DNA
cttgatcattaaatacctctac

SEQ ID NO: 24507 - DNA, 22 bp, synthetic construct
  misc_feature 1..22: note = chemically synthesized
  source 1..22: mol_type = other DNA
gatcattaaatacctctacgaa

SEQ ID NO: 24508 - DNA, 22 bp, synthetic construct
  misc_feature 1..22: note = chemically synthesized
  source 1..22: mol_type = other DNA
atcattaaatacctctacgaat

SEQ ID NO: 24509 - DNA, 22 bp, synthetic construct
  misc_feature 1..22: note = chemically synthesized
  source 1..22: mol_type = other DNA
aatacctctacgaatcaatttg

SEQ ID NO: 24510 - DNA, 22 bp, synthetic construct
  misc_feature 1..22: note = chemically synthesized
  source 1..22: mol_type = other DNA
tacgaatcaatttgctctatga

SEQ ID NO: 24511 - DNA, 22 bp, synthetic construct
  misc_feature 1..22: note = chemically synthesized
  source 1..22: mol_type = other DNA
cgaatcaatttgctctatgaac

SEQ ID NO: 24512 - DNA, 22 bp, synthetic construct
  misc_feature 1..22: note = chemically synthesized
  source 1..22: mol_type = other DNA
gctctatgaactggaggagtgg

SEQ ID NO: 24513 - DNA, 22 bp, synthetic construct
  misc_feature 1..22: note = chemically synthesized
  source 1..22: mol_type = other DNA
ctctatgaactggaggagtggg

SEQ ID NO: 24514 - DNA, 22 bp, synthetic construct
  misc_feature 1..22: note = chemically synthesized
  source 1..22: mol_type = other DNA
tatgaactggaggagtgggatt

SEQ ID NO: 24515 - DNA, 22 bp, synthetic construct
  misc_feature 1..22: note = chemically synthesized
  source 1..22: mol_type = other DNA
tgaactggaggagtgggattca

SEQ ID NO: 24516 - DNA, 22 bp, synthetic construct
  misc_feature 1..22: note = chemically synthesized
  source 1..22: mol_type = other DNA
gaggagtgggattcatgatctc

SEQ ID NO: 24517 - DNA, 22 bp, synthetic construct
  misc_feature 1..22: note = chemically synthesized
  source 1..22: mol_type = other DNA
atgatctctaagatacctcata

SEQ ID NO: 24518 - DNA, 22 bp, synthetic construct
  misc_feature 1..22: note = chemically synthesized
  source 1..22: mol_type = other DNA
taagatacctcatatcactact

SEQ ID NO: 24519 - DNA, 22 bp, synthetic construct
  misc_feature 1..22: note = chemically synthesized
  source 1..22: mol_type = other DNA
agatacctcatatcactactat

SEQ ID NO: 24520 - DNA, 22 bp, synthetic construct
  misc_feature 1..22: note = chemically synthesized
  source 1..22: mol_type = other DNA
atatcactactatgaaatgcag

SEQ ID NO: 24521 - DNA, 22 bp, synthetic construct
  misc_feature 1..22: note = chemically synthesized
  source 1..22: mol_type = other DNA
ctatgaaatgcagggaagtaaa

SEQ ID NO: 24522 - DNA, 22 bp, synthetic construct
  misc_feature 1..22: note = chemically synthesized
  source 1..22: mol_type = other DNA
tgaaatgcagggaagtaaaaat

SEQ ID NO: 24523 - DNA, 22 bp, synthetic construct
  misc_feature 1..22: note = chemically synthesized
  source 1..22: mol_type = other DNA
aaatcattaaatttaaagaaac

SEQ ID NO: 24524 - DNA, 22 bp, synthetic construct
  misc_feature 1..22: note = chemically synthesized
  source 1..22: mol_type = other DNA
aatttaaagaaactatagtggc

SEQ ID NO: 24525 - DNA, 22 bp, synthetic construct
  misc_feature 1..22: note = chemically synthesized
  source 1..22: mol_type = other DNA
aaagaaactatagtggcaatgt

SEQ ID NO: 24526 - DNA, 22 bp, synthetic construct
  misc_feature 1..22: note = chemically synthesized
  source 1..22: mol_type = other DNA
aagaaactatagtggcaatgta

SEQ ID NO: 24527 - DNA, 22 bp, synthetic construct
  misc_feature 1..22: note = chemically synthesized
  source 1..22: mol_type = other DNA
tagtggcaatgtattattagga

SEQ ID NO: 24528 - DNA, 22 bp, synthetic construct
  misc_feature 1..22: note = chemically synthesized
  source 1..22: mol_type = other DNA
ttaggaataaacacaataatta

SEQ ID NO: 24529 - DNA, 22 bp, synthetic construct
  misc_feature 1..22: note = chemically synthesized
  source 1..22: mol_type = other DNA
ggaataaacacaataattatcc

SEQ ID NO: 24530 - DNA, 22 bp, synthetic construct
  misc_feature 1..22: note = chemically synthesized
  source 1..22: mol_type = other DNA
tccatctatatgaaaatctcaa

SEQ ID NO: 24531 - DNA, 22 bp, synthetic construct
  misc_feature 1..22: note = chemically synthesized
  source 1..22: mol_type = other DNA
tatgaaaatctcaaaccatacc

SEQ ID NO: 24532 - DNA, 22 bp, synthetic construct
  misc_feature 1..22: note = chemically synthesized
  source 1..22: mol_type = other DNA
aaaccataccaggctatgataa

SEQ ID NO: 24533 - DNA, 22 bp, synthetic construct
  misc_feature 1..22: note = chemically synthesized
  source 1..22: mol_type = other DNA
tgataatattaaaataaagata

SEQ ID NO: 24534 - DNA, 22 bp, synthetic construct
  misc_feature 1..22: note = chemically synthesized
  source 1..22: mol_type = other DNA
aaataaagatacattgaagatg

SEQ ID NO: 24535 - DNA, 22 bp, synthetic construct
  misc_feature 1..22: note = chemically synthesized
  source 1..22: mol_type = other DNA
aagatgatatcaacttgtgtaa

SEQ ID NO: 24536 - DNA, 22 bp, synthetic construct
  misc_feature 1..22: note = chemically synthesized
  source 1..22: mol_type = other DNA
gtgtaaatcacattgtggggac

SEQ ID NO: 24537 - DNA, 22 bp, synthetic construct
  misc_feature 1..22: note = chemically synthesized
  source 1..22: mol_type = other DNA
tgtaaatcacattgtggggacc

SEQ ID NO: 24538 - DNA, 22 bp, synthetic construct
  misc_feature 1..22: note = chemically synthesized
  source 1..22: mol_type = other DNA
tggggacctctccacaaaaaca

SEQ ID NO: 24539 - DNA, 22 bp, synthetic construct
  misc_feature 1..22: note = chemically synthesized
  source 1..22: mol_type = other DNA
tccacaaaaacacttcccttcc

SEQ ID NO: 24540 - DNA, 22 bp, synthetic construct
  misc_feature 1..22: note = chemically synthesized
  source 1..22: mol_type = other DNA
cacaaaaacacttcccttcccc

SEQ ID NO: 24541 - DNA, 22 bp, synthetic construct
  misc_feature 1..22: note = chemically synthesized
  source 1..22: mol_type = other DNA
cccttccccttgaaagggaaat

SEQ ID NO: 24542 - DNA, 22 bp, synthetic construct
  misc_feature 1..22: note = chemically synthesized
  source 1..22: mol_type = other DNA
ccttccccttgaaagggaaatg

SEQ ID NO: 24543 - DNA, 22 bp, synthetic construct
  misc_feature 1..22: note = chemically synthesized
  source 1..22: mol_type = other DNA
ccccttgaaagggaaatgatag

SEQ ID NO: 24544 - DNA, 22 bp, synthetic construct
  misc_feature 1..22: note = chemically synthesized
  source 1..22: mol_type = other DNA
cccttgaaagggaaatgataga

SEQ ID NO: 24545 - DNA, 22 bp, synthetic construct
  misc_feature 1..22: note = chemically synthesized
  source 1..22: mol_type = other DNA
gaaagggaaatgatagaaaata

SEQ ID NO: 24546 - DNA, 22 bp, synthetic construct
  misc_feature 1..22: note = chemically synthesized
  source 1..22: mol_type = other DNA
aaagggaaatgatagaaaataa

SEQ ID NO: 24547 - DNA, 22 bp, synthetic construct
  misc_feature 1..22: note = chemically synthesized
  source 1..22: mol_type = other DNA
aaggcagcttaggggttgaaaa

SEQ ID NO: 24548 - DNA, 22 bp, synthetic construct
  misc_feature 1..22: note = chemically synthesized
  source 1..22: mol_type = other DNA
aggggttgaaaaacaaattttt

SEQ ID NO: 24549 - DNA, 22 bp, synthetic construct
  misc_feature 1..22: note = chemically synthesized
  source 1..22: mol_type = other DNA
ggggttgaaaaacaaatttttt

SEQ ID NO: 24550 - DNA, 22 bp, synthetic construct
  misc_feature 1..22: note = chemically synthesized
  source 1..22: mol_type = other DNA
aaaaacaaattttttcaaaaaa

SEQ ID NO: 24551 - DNA, 22 bp, synthetic construct
  misc_feature 1..22: note = chemically synthesized
  source 1..22: mol_type = other DNA
tttcaaaaaaaaatccattgag

SEQ ID NO: 24552 - DNA, 22 bp, synthetic construct
  misc_feature 1..22: note = chemically synthesized
  source 1..22: mol_type = other DNA
ttcaaaaaaaaatccattgagc

SEQ ID NO: 24553 - DNA, 22 bp, synthetic construct
  misc_feature 1..22: note = chemically synthesized
  source 1..22: mol_type = other DNA
tcaaaaaaaaatccattgagca

SEQ ID NO: 24554 - DNA, 22 bp, synthetic construct
  misc_feature 1..22: note = chemically synthesized
  source 1..22: mol_type = other DNA
caaaaaaaaatccattgagcat

SEQ ID NO: 24555 - DNA, 22 bp, synthetic construct
  misc_feature 1..22: note = chemically synthesized
  source 1..22: mol_type = other DNA
aaaaaaaaatccattgagcatt

SEQ ID NO: 24556 - DNA, 22 bp, synthetic construct
  misc_feature 1..22: note = chemically synthesized
  source 1..22: mol_type = other DNA
agcattttctatgtaccaggca

SEQ ID NO: 24557 - DNA, 22 bp, synthetic construct
  misc_feature 1..22: note = chemically synthesized
  source 1..22: mol_type = other DNA
tctatgtaccaggcactgttct

SEQ ID NO: 24558 - DNA, 22 bp, synthetic construct
  misc_feature 1..22: note = chemically synthesized
  source 1..22: mol_type = other DNA
ctatgtaccaggcactgttcta

SEQ ID NO: 24559 - DNA, 22 bp, synthetic construct
  misc_feature 1..22: note = chemically synthesized
  source 1..22: mol_type = other DNA
tatgtaccaggcactgttctag

SEQ ID NO: 24560 - DNA, 22 bp, synthetic construct
  misc_feature 1..22: note = chemically synthesized
  source 1..22: mol_type = other DNA
tgtaccaggcactgttctagac

SEQ ID NO: 24561 - DNA, 22 bp, synthetic construct
  misc_feature 1..22: note = chemically synthesized
  source 1..22: mol_type = other DNA
ttctagaccctgagatcaacac

SEQ ID NO: 24562 - DNA, 22 bp, synthetic construct
  misc_feature 1..22: note = chemically synthesized
  source 1..22: mol_type = other DNA
tagaccctgagatcaacacaca

SEQ ID NO: 24563 - DNA, 22 bp, synthetic construct
  misc_feature 1..22: note = chemically synthesized
  source 1..22: mol_type = other DNA
gaccctgagatcaacacacatg

SEQ ID NO: 24564 - DNA, 22 bp, synthetic construct
  misc_feature 1..22: note = chemically synthesized
  source 1..22: mol_type = other DNA
agatcaacacacatgctactga

SEQ ID NO: 24565 - DNA, 22 bp, synthetic construct
  misc_feature 1..22: note = chemically synthesized
  source 1..22: mol_type = other DNA
ctgattataagatccataaaat

SEQ ID NO: 24566 - DNA, 22 bp, synthetic construct
  misc_feature 1..22: note = chemically synthesized
  source 1..22: mol_type = other DNA
attataagatccataaaataac

SEQ ID NO: 24567 - DNA, 22 bp, synthetic construct
  misc_feature 1..22: note = chemically synthesized
  source 1..22: mol_type = other DNA
taagatccataaaataacttag

SEQ ID NO: 24568 - DNA, 22 bp, synthetic construct
  misc_feature 1..22: note = chemically synthesized
  source 1..22: mol_type = other DNA
agtttcactggcgtgttcccag

SEQ ID NO: 24569 - DNA, 22 bp, synthetic construct
  misc_feature 1..22: note = chemically synthesized
  source 1..22: mol_type = other DNA
gtttcactggcgtgttcccagt

SEQ ID NO: 24570 - DNA, 22 bp, synthetic construct
  misc_feature 1..22: note = chemically synthesized
  source 1..22: mol_type = other DNA
cactggcgtgttcccagtgccc

SEQ ID NO: 24571 - DNA, 22 bp, synthetic construct
  misc_feature 1..22: note = chemically synthesized
  source 1..22: mol_type = other DNA
actggcgtgttcccagtgccca

SEQ ID NO: 24572 - DNA, 22 bp, synthetic construct
  misc_feature 1..22: note = chemically synthesized
  source 1..22: mol_type = other DNA
gcgtgttcccagtgcccaggta

SEQ ID NO: 24573 - DNA, 22 bp, synthetic construct
  misc_feature 1..22: note = chemically synthesized
  source 1..22: mol_type = other DNA
ccagtgcccaggtaacagtgct

SEQ ID NO: 24574 - DNA, 22 bp, synthetic construct
  misc_feature 1..22: note = chemically synthesized
  source 1..22: mol_type = other DNA
cattaatgtttgttaaatgatg

SEQ ID NO: 24575 - DNA, 22 bp, synthetic construct
  misc_feature 1..22: note = chemically synthesized
  source 1..22: mol_type = other DNA
atgtttgttaaatgatgagaaa

SEQ ID NO: 24576 - DNA, 22 bp, synthetic construct
  misc_feature 1..22: note = chemically synthesized
  source 1..22: mol_type = other DNA
gttaaatgatgagaaaagagga

SEQ ID NO: 24577 - DNA, 22 bp, synthetic construct
  misc_feature 1..22: note = chemically synthesized
  source 1..22: mol_type = other DNA
ttaaatgatgagaaaagaggaa

SEQ ID NO: 24578 - DNA, 22 bp, synthetic construct
  misc_feature 1..22: note = chemically synthesized
  source 1..22: mol_type = other DNA
aatgatgagaaaagaggaaagc

SEQ ID NO: 24579 - DNA, 22 bp, synthetic construct
  misc_feature 1..22: note = chemically synthesized
  source 1..22: mol_type = other DNA
tgctcaggtgcaggaacttgtg

SEQ ID NO: 24580 - DNA, 22 bp, synthetic construct
  misc_feature 1..22: note = chemically synthesized
  source 1..22: mol_type = other DNA
ctcaggtgcaggaacttgtgca

SEQ ID NO: 24581 - DNA, 22 bp, synthetic construct
  misc_feature 1..22: note = chemically synthesized
  source 1..22: mol_type = other DNA
aggtgcaggaacttgtgcagag

SEQ ID NO: 24582 - DNA, 22 bp, synthetic construct
  misc_feature 1..22: note = chemically synthesized
  source 1..22: mol_type = other DNA
gtgcagagatcttctggactga

SEQ ID NO: 24583 - DNA, 22 bp, synthetic construct
  misc_feature 1..22: note = chemically synthesized
  source 1..22: mol_type = other DNA
tgcagagatcttctggactgat

SEQ ID NO: 24584 - DNA, 22 bp, synthetic construct
  misc_feature 1..22: note = chemically synthesized
  source 1..22: mol_type = other DNA
ctggactgattcccagtgctaa

SEQ ID NO: 24585 - DNA, 22 bp, synthetic construct
  misc_feature 1..22: note = chemically synthesized
  source 1..22: mol_type = other DNA
tggactgattcccagtgctaac

SEQ ID NO: 24586 - DNA, 22 bp, synthetic construct
  misc_feature 1..22: note = chemically synthesized
  source 1..22: mol_type = other DNA
gactgattcccagtgctaacaa

SEQ ID NO: 24587 - DNA, 22 bp, synthetic construct
  misc_feature 1..22: note = chemically synthesized
  source 1..22: mol_type = other DNA
attcccagtgctaacaagtccc

SEQ ID NO: 24588 - DNA, 22 bp, synthetic construct
  misc_feature 1..22: note = chemically synthesized
  source 1..22: mol_type = other DNA
ccagtgctaacaagtcccttcc

SEQ ID NO: 24589 - DNA, 22 bp, synthetic construct
  misc_feature 1..22: note = chemically synthesized
  source 1..22: mol_type = other DNA
acaagtcccttccagttttatc

SEQ ID NO: 24590 - DNA, 22 bp, synthetic construct
  misc_feature 1..22: note = chemically synthesized
  source 1..22: mol_type = other DNA
ccagttttatccaccaataagc

SEQ ID NO: 24591 - DNA, 22 bp, synthetic construct
  misc_feature 1..22: note = chemically synthesized
  source 1..22: mol_type = other DNA
cagttttatccaccaataagct

SEQ ID NO: 24592 - DNA, 22 bp, synthetic construct
  misc_feature 1..22: note = chemically synthesized
  source 1..22: mol_type = other DNA
tatccaccaataagctatgtcc

SEQ ID NO: 24593 - DNA, 22 bp, synthetic construct
  misc_feature 1..22: note = chemically synthesized
  source 1..22: mol_type = other DNA
atccaccaataagctatgtcct

SEQ ID NO: 24594 - DNA, 22 bp, synthetic construct
  misc_feature 1..22: note = chemically synthesized
  source 1..22: mol_type = other DNA
tccaccaataagctatgtcctt

SEQ ID NO: 24595 - DNA, 22 bp, synthetic construct
  misc_feature 1..22: note = chemically synthesized
  source 1..22: mol_type = other DNA
tgtccttgagctcctgcccact

SEQ ID NO: 24596 - DNA, 22 bp, synthetic construct
  misc_feature 1..22: note = chemically synthesized
  source 1..22: mol_type = other DNA
gagctcctgcccactctctaga

SEQ ID NO: 24597 - DNA, 22 bp, synthetic construct
  misc_feature 1..22: note = chemically synthesized
  source 1..22: mol_type = other DNA
agctcctgcccactctctagag

SEQ ID NO: 24598 - DNA, 22 bp, synthetic construct
  misc_feature 1..22: note = chemically synthesized
  source 1..22: mol_type = other DNA
ctgcccactctctagagaaaac

SEQ ID NO: 24599 - DNA, 22 bp, synthetic construct
  misc_feature 1..22: note = chemically synthesized
  source 1..22: mol_type = other DNA
cccactctctagagaaaacttt

SEQ ID NO: 24600 - DNA, 22 bp, synthetic construct
  misc_feature 1..22: note = chemically synthesized
  source 1..22: mol_type = other DNA
tctagagaaaacttttatttca

SEQ ID NO: 24601 - DNA, 22 bp, synthetic construct
  misc_feature 1..22: note = chemically synthesized
  source 1..22: mol_type = other DNA
tagagaaaacttttatttcaag

SEQ ID NO: 24602 - DNA, 22 bp, synthetic construct
  misc_feature 1..22: note = chemically synthesized
  source 1..22: mol_type = other DNA
gagaaaacttttatttcaaggc

SEQ ID NO: 24603 - DNA, 22 bp, synthetic construct
  misc_feature 1..22: note = chemically synthesized
  source 1..22: mol_type = other DNA
ttatttcaaggcatactccggg

SEQ ID NO: 24604 - DNA, 22 bp, synthetic construct
  misc_feature 1..22: note = chemically synthesized
  source 1..22: mol_type = other DNA
tatttcaaggcatactccggga

SEQ ID NO: 24605 - DNA, 22 bp, synthetic construct
  misc_feature 1..22: note = chemically synthesized
  source 1..22: mol_type = other DNA
atttcaaggcatactccgggat

SEQ ID NO: 24606 - DNA, 22 bp, synthetic construct
  misc_feature 1..22: note = chemically synthesized
  source 1..22: mol_type = other DNA
tttcaaggcatactccgggatt

SEQ ID NO: 24607 - DNA, 22 bp, synthetic construct
  misc_feature 1..22: note = chemically synthesized
  source 1..22: mol_type = other DNA
caaggcatactccgggattcac

SEQ ID NO: 24608 - DNA, 22 bp, synthetic construct
  misc_feature 1..22: note = chemically synthesized
  source 1..22: mol_type = other DNA
aaggcatactccgggattcaca

SEQ ID NO: 24609 - DNA, 22 bp, synthetic construct
  misc_feature 1..22: note = chemically synthesized
  source 1..22: mol_type = other DNA
cgggattcacatgtgatagaga

SEQ ID NO: 24610 - DNA, 22 bp, synthetic construct
  misc_feature 1..22: note = chemically synthesized
  source 1..22: mol_type = other DNA
acatgtgatagagatggttctg

SEQ ID NO: 24611 - DNA, 22 bp, synthetic construct
  misc_feature 1..22: note = chemically synthesized
  source 1..22: mol_type = other DNA
tgttcccaggaactttgggcat

SEQ ID NO: 24612 - DNA, 22 bp, synthetic construct
  misc_feature 1..22: note = chemically synthesized
  source 1..22: mol_type = other DNA
ttcccaggaactttgggcatat

SEQ ID NO: 24613 - DNA, 22 bp, synthetic construct
  misc_feature 1..22: note = chemically synthesized
  source 1..22: mol_type = other DNA
ccaggaactttgggcatattta

SEQ ID NO: 24614 - DNA, 22 bp, synthetic construct
  misc_feature 1..22: note = chemically synthesized
  source 1..22: mol_type = other DNA
tgggcatatttaaaaactggac

SEQ ID NO: 24615 - DNA, 22 bp, synthetic construct
  misc_feature 1..22: note = chemically synthesized
  source 1..22: mol_type = other DNA
gggcatatttaaaaactggact

SEQ ID NO: 24616 - DNA, 22 bp, synthetic construct
  misc_feature 1..22: note = chemically synthesized
  source 1..22: mol_type = other DNA
ggcatatttaaaaactggactg

SEQ ID NO: 24617 - DNA, 22 bp, synthetic construct
  misc_feature 1..22: note = chemically synthesized
  source 1..22: mol_type = other DNA
aaaaactggactggaaaaattt

SEQ ID NO: 24618 - DNA, 22 bp, synthetic construct
  misc_feature 1..22: note = chemically synthesized
  source 1..22: mol_type = other DNA
aaaactggactggaaaaatttg

SEQ ID NO: 24619 - DNA, 22 bp, synthetic construct
  misc_feature 1..22: note = chemically synthesized
  source 1..22: mol_type = other DNA
gactggaaaaatttgtgactag

SEQ ID NO: 24620 - DNA, 22 bp, synthetic construct
  misc_feature 1..22: note = chemically synthesized
  source 1..22: mol_type = other DNA
gaaaaatttgtgactagaaaaa

SEQ ID NO: 24621 - DNA, 22 bp, synthetic construct
  misc_feature 1..22: note = chemically synthesized
  source 1..22: mol_type = other DNA
gtgactagaaaaaggacattaa

SEQ ID NO: 24622 - DNA, 22 bp, synthetic construct
  misc_feature 1..22: note = chemically synthesized
  source 1..22: mol_type = other DNA
tgactagaaaaaggacattaaa

SEQ ID NO: 24623 - DNA, 22 bp, synthetic construct
  misc_feature 1..22: note = chemically synthesized
  source 1..22: mol_type = other DNA
gaaaaaggacattaaaaacaca

SEQ ID NO: 24624 - DNA, 22 bp, synthetic construct
  misc_feature 1..22: note = chemically synthesized
  source 1..22: mol_type = other DNA
aaaacacatgctcatttcagga

SEQ ID NO: 24625 - DNA, 22 bp, synthetic construct
  misc_feature 1..22: note = chemically synthesized
  source 1..22: mol_type = other DNA
atttcaggataaagatctctga

SEQ ID NO: 24626 - DNA, 22 bp, synthetic construct
  misc_feature 1..22: note = chemically synthesized
  source 1..22: mol_type = other DNA
caggataaagatctctgaggaa

SEQ ID NO: 24627 - DNA, 22 bp, synthetic construct
  misc_feature 1..22: note = chemically synthesized
  source 1..22: mol_type = other DNA
aggataaagatctctgaggaaa

SEQ ID NO: 24628 - DNA, 22 bp, synthetic construct
  misc_feature 1..22: note = chemically synthesized
  source 1..22: mol_type = other DNA
tgaggaaaagaatacaaaataa

SEQ ID NO: 24629 - DNA, 22 bp, synthetic construct
  misc_feature 1..22: note = chemically synthesized
  source 1..22: mol_type = other DNA
aggaaaagaatacaaaataatt

SEQ ID NO: 24630 - DNA, 22 bp, synthetic construct
  misc_feature 1..22: note = chemically synthesized
  source 1..22: mol_type = other DNA
aaaaagaaacaacagaaacagg

SEQ ID NO: 24631 - DNA, 22 bp, synthetic construct
  misc_feature 1..22: note = chemically synthesized
  source 1..22: mol_type = other DNA
aaaagaaacaacagaaacaggt

SEQ ID NO: 24632 - DNA, 22 bp, synthetic construct
  misc_feature 1..22: note = chemically synthesized
  source 1..22: mol_type = other DNA
cacttctctgtaataaggtttc

SEQ ID NO: 24633 - DNA, 22 bp, synthetic construct
  misc_feature 1..22: note = chemically synthesized
  source 1..22: mol_type = other DNA
acttctctgtaataaggtttct

SEQ ID NO: 24634 - DNA, 22 bp, synthetic construct
  misc_feature 1..22: note = chemically synthesized
  source 1..22: mol_type = other DNA
ctctgtaataaggtttctgtcc

SEQ ID NO: 24635 - DNA, 22 bp, synthetic construct
  misc_feature 1..22: note = chemically synthesized
  source 1..22: mol_type = other DNA
tctgtaataaggtttctgtcct

SEQ ID NO: 24636 - DNA, 22 bp, synthetic construct
  misc_feature 1..22: note = chemically synthesized
  source 1..22: mol_type = other DNA
tgtaataaggtttctgtcctcc

SEQ ID NO: 24637 - DNA, 22 bp, synthetic construct
  misc_feature 1..22: note = chemically synthesized
  source 1..22: mol_type = other DNA
taataaggtttctgtcctccta

SEQ ID NO: 24638 - DNA, 22 bp, synthetic construct
  misc_feature 1..22: note = chemically synthesized
  source 1..22: mol_type = other DNA
ctgtcctcctagattctttctc

SEQ ID NO: 24639 - DNA, 22 bp, synthetic construct
  misc_feature 1..22: note = chemically synthesized
  source 1..22: mol_type = other DNA
tgtcctcctagattctttctca

SEQ ID NO: 24640 - DNA, 22 bp, synthetic construct
  misc_feature 1..22: note = chemically synthesized
  source 1..22: mol_type = other DNA
tcctcctagattctttctcact

SEQ ID NO: 24641 - DNA, 22 bp, synthetic construct
  misc_feature 1..22: note = chemically synthesized
  source 1..22: mol_type = other DNA
ctagattctttctcactaaact

SEQ ID NO: 24642 - DNA, 22 bp, synthetic construct
  misc_feature 1..22: note = chemically synthesized
  source 1..22: mol_type = other DNA
gattctttctcactaaactaca

SEQ ID NO: 24643 - DNA, 22 bp, synthetic construct
  misc_feature 1..22: note = chemically synthesized
  source 1..22: mol_type = other DNA
tttctcactaaactacagagaa

SEQ ID NO: 24644 - DNA, 22 bp, synthetic construct
  misc_feature 1..22: note = chemically synthesized
  source 1..22: mol_type = other DNA
tctcactaaactacagagaata

SEQ ID NO: 24645 - DNA, 22 bp, synthetic construct
  misc_feature 1..22: note = chemically synthesized
  source 1..22: mol_type = other DNA
ctcactaaactacagagaataa

SEQ ID NO: 24646 - DNA, 22 bp, synthetic construct
  misc_feature 1..22: note = chemically synthesized
  source 1..22: mol_type = other DNA
tcactaaactacagagaataag

SEQ ID NO: 24647 - DNA, 22 bp, synthetic construct
  misc_feature 1..22: note = chemically synthesized
  source 1..22: mol_type = other DNA
actaaactacagagaataagac

SEQ ID NO: 24648 - DNA, 22 bp, synthetic construct
  misc_feature 1..22: note = chemically synthesized
  source 1..22: mol_type = other DNA
aactacagagaataagaccgtg

SEQ ID NO: 24649 - DNA, 22 bp, synthetic construct
  misc_feature 1..22: note = chemically synthesized
  source 1..22: mol_type = other DNA
cagagaataagaccgtgctttg

SEQ ID NO: 24650 - DNA, 22 bp, synthetic construct
  misc_feature 1..22: note = chemically synthesized
  source 1..22: mol_type = other DNA
tgttctcttatatgcattctgt

SEQ ID NO: 24651 - DNA, 22 bp, synthetic construct
  misc_feature 1..22: note = chemically synthesized
  source 1..22: mol_type = other DNA
gttctcttatatgcattctgtc

SEQ ID NO: 24652 - DNA, 22 bp, synthetic construct
  misc_feature 1..22: note = chemically synthesized
  source 1..22: mol_type = other DNA
ttctcttatatgcattctgtcc

SEQ ID NO: 24653 - DNA, 22 bp, synthetic construct
  misc_feature 1..22: note = chemically synthesized
  source 1..22: mol_type = other DNA
tcttatatgcattctgtccact

SEQ ID NO: 24654 - DNA, 22 bp, synthetic construct
  misc_feature 1..22: note = chemically synthesized
  source 1..22: mol_type = other DNA
ttatatgcattctgtccacttc

SEQ ID NO: 24655 - DNA, 22 bp, synthetic construct
  misc_feature 1..22: note = chemically synthesized
  source 1..22: mol_type = other DNA
atatgcattctgtccacttcta

SEQ ID NO: 24656 - DNA, 22 bp, synthetic construct
  misc_feature 1..22: note = chemically synthesized
  source 1..22: mol_type = other DNA
tatgcattctgtccacttctac

SEQ ID NO: 24657 - DNA, 22 bp, synthetic construct
  misc_feature 1..22: note = chemically synthesized
  source 1..22: mol_type = other DNA
tgtccacttctacataggcaaa

SEQ ID NO: 24658 - DNA, 22 bp, synthetic construct
  misc_feature 1..22: note = chemically synthesized
  source 1..22: mol_type = other DNA
tccacttctacataggcaaaat

SEQ ID NO: 24659 - DNA, 22 bp, synthetic construct
  misc_feature 1..22: note = chemically synthesized
  source 1..22: mol_type = other DNA
ctacataggcaaaattgacttt

SEQ ID NO: 24660 - DNA, 22 bp, synthetic construct
  misc_feature 1..22: note = chemically synthesized
  source 1..22: mol_type = other DNA
tacataggcaaaattgactttt

SEQ ID NO: 24661 - DNA, 22 bp, synthetic construct
  misc_feature 1..22: note = chemically synthesized
  source 1..22: mol_type = other DNA
cataggcaaaattgacttttaa

SEQ ID NO: 24662 - DNA, 22 bp, synthetic construct
  misc_feature 1..22: note = chemically synthesized
  source 1..22: mol_type = other DNA
acttttaattttgattttatga

SEQ ID NO: 24663 - DNA, 22 bp, synthetic construct
  misc_feature 1..22: note = chemically synthesized
  source 1..22: mol_type = other DNA
ttaattttgattttatgaatgc

SEQ ID NO: 24664 - DNA, 22 bp, synthetic construct
  misc_feature 1..22: note = chemically synthesized
  source 1..22: mol_type = other DNA
taattttgattttatgaatgca

SEQ ID NO: 24665 - DNA, 22 bp, synthetic construct
  misc_feature 1..22: note = chemically synthesized
  source 1..22: mol_type = other DNA
aattttgattttatgaatgcat

SEQ ID NO: 24666 - DNA, 22 bp, synthetic construct
  misc_feature 1..22: note = chemically synthesized
  source 1..22: mol_type = other DNA
attttgattttatgaatgcata

SEQ ID NO: 24667 - DNA, 22 bp, synthetic construct
  misc_feature 1..22: note = chemically synthesized
  source 1..22: mol_type = other DNA
tgattttatgaatgcatacaca

SEQ ID NO: 24668 - DNA, 22 bp, synthetic construct
  misc_feature 1..22: note = chemically synthesized
  source 1..22: mol_type = other DNA
gattttatgaatgcatacacac

SEQ ID NO: 24669 - DNA, 22 bp, synthetic construct
  misc_feature 1..22: note = chemically synthesized
  source 1..22: mol_type = other DNA
attttatgaatgcatacacacg

SEQ ID NO: 24670 - DNA, 22 bp, synthetic construct
  misc_feature 1..22: note = chemically synthesized
  source 1..22: mol_type = other DNA
tatgaatgcatacacacgagaa

SEQ ID NO: 24671 - DNA, 22 bp, synthetic construct
  misc_feature 1..22: note = chemically synthesized
  source 1..22: mol_type = other DNA
atgaatgcatacacacgagaac

SEQ ID NO: 24672 - DNA, 22 bp, synthetic construct
  misc_feature 1..22: note = chemically synthesized
  source 1..22: mol_type = other DNA
tgaatgcatacacacgagaact

SEQ ID NO: 24673 - DNA, 22 bp, synthetic construct
  misc_feature 1..22: note = chemically synthesized
  source 1..22: mol_type = other DNA
tgaacagttagtataaggtgaa

SEQ ID NO: 24674 - DNA, 22 bp, synthetic construct
  misc_feature 1..22: note = chemically synthesized
  source 1..22: mol_type = other DNA
gaacagttagtataaggtgaat

SEQ ID NO: 24675 - DNA, 22 bp, synthetic construct
  misc_feature 1..22: note = chemically synthesized
  source 1..22: mol_type = other DNA
aacagttagtataaggtgaatt

SEQ ID NO: 24676 - DNA, 22 bp, synthetic construct
  misc_feature 1..22: note = chemically synthesized
  source 1..22: mol_type = other DNA
gtataaggtgaattctgatttt

SEQ ID NO: 24677 - DNA, 22 bp, synthetic construct
  misc_feature 1..22: note = chemically synthesized
  source 1..22: mol_type = other DNA
tgatttttcagaatgcatgcca

SEQ ID NO: 24678 - DNA, 22 bp, synthetic construct
  misc_feature 1..22: note = chemically synthesized
  source 1..22: mol_type = other DNA
atttttcagaatgcatgccata

SEQ ID NO: 24679 - DNA, 22 bp, synthetic construct
  misc_feature 1..22: note = chemically synthesized
  source 1..22: mol_type = other DNA
ttcagaatgcatgccatatata

SEQ ID NO: 24680 - DNA, 22 bp, synthetic construct
  misc_feature 1..22: note = chemically synthesized
  source 1..22: mol_type = other DNA
tcagaatgcatgccatatataa

SEQ ID NO: 24681 - DNA, 22 bp, synthetic construct
  misc_feature 1..22: note = chemically synthesized
  source 1..22: mol_type = other DNA
cagaatgcatgccatatataat

SEQ ID NO: 24682 - DNA, 22 bp, synthetic construct
  misc_feature 1..22: note = chemically synthesized
  source 1..22: mol_type = other DNA
agaatgcatgccatatataatg

SEQ ID NO: 24683 - DNA, 22 bp, synthetic construct
  misc_feature 1..22: note = chemically synthesized
  source 1..22: mol_type = other DNA
aattttgagattatgctggctc

SEQ ID NO: 24684 - DNA, 22 bp, synthetic construct
  misc_feature 1..22: note = chemically synthesized
  source 1..22: mol_type = other DNA
attttgagattatgctggctct

SEQ ID NO: 24685 - DNA, 22 bp, synthetic construct
  misc_feature 1..22: note = chemically synthesized
  source 1..22: mol_type = other DNA
tgagattatgctggctctgatt

SEQ ID NO: 24686 - DNA, 22 bp, synthetic construct
  misc_feature 1..22: note = chemically synthesized
  source 1..22: mol_type = other DNA
gagattatgctggctctgatta

SEQ ID NO: 24687 - DNA, 22 bp, synthetic construct
  misc_feature 1..22: note = chemically synthesized
  source 1..22: mol_type = other DNA
agattatgctggctctgattag

SEQ ID NO: 24688 - DNA, 22 bp, synthetic construct
  misc_feature 1..22: note = chemically synthesized
  source 1..22: mol_type = other DNA
tgctggctctgattagccaaaa

SEQ ID NO: 24689 - DNA, 22 bp, synthetic construct
  misc_feature 1..22: note = chemically synthesized
  source 1..22: mol_type = other DNA
gctctgattagccaaaagaagg

SEQ ID NO: 24690 - DNA, 22 bp, synthetic construct
  misc_feature 1..22: note = chemically synthesized
  source 1..22: mol_type = other DNA
tgattagccaaaagaaggaagt

SEQ ID NO: 24691 - DNA, 22 bp, synthetic construct
  misc_feature 1..22: note = chemically synthesized
  source 1..22: mol_type = other DNA
attagccaaaagaaggaagtaa

SEQ ID NO: 24692 - DNA, 22 bp, synthetic construct
  misc_feature 1..22: note = chemically synthesized
  source 1..22: mol_type = other DNA
gccaaaagaaggaagtaatata

SEQ ID NO: 24693 - DNA, 22 bp, synthetic construct
  misc_feature 1..22: note = chemically synthesized
  source 1..22: mol_type = other DNA
tggttattatttcagatccttt

SEQ ID NO: 24694 - DNA, 22 bp, synthetic construct
  misc_feature 1..22: note = chemically synthesized
  source 1..22: mol_type = other DNA
gttattatttcagatcctttag

SEQ ID NO: 24695 - DNA, 22 bp, synthetic construct
  misc_feature 1..22: note = chemically synthesized
  source 1..22: mol_type = other DNA
ttatttcagatcctttagatta

SEQ ID NO: 24696 - DNA, 22 bp, synthetic construct
  misc_feature 1..22: note = chemically synthesized
  source 1..22: mol_type = other DNA
tttcagatcctttagattactg

SEQ ID NO: 24697 - DNA, 22 bp, synthetic construct
  misc_feature 1..22: note = chemically synthesized
  source 1..22: mol_type = other DNA
cagatcctttagattactgtaa

SEQ ID NO: 24698 - DNA, 22 bp, synthetic construct
  misc_feature 1..22: note = chemically synthesized
  source 1..22: mol_type = other DNA
agatcctttagattactgtaat

SEQ ID NO: 24699 - DNA, 22 bp, synthetic construct
  misc_feature 1..22: note = chemically synthesized
  source 1..22: mol_type = other DNA
tagattactgtaatagacatga

SEQ ID NO: 24700 - DNA, 22 bp, synthetic construct
  misc_feature 1..22: note = chemically synthesized
  source 1..22: mol_type = other DNA
agattactgtaatagacatgaa

SEQ ID NO: 24701 - DNA, 22 bp, synthetic construct
  misc_feature 1..22: note = chemically synthesized
  source 1..22: mol_type = other DNA
gattactgtaatagacatgaaa

SEQ ID NO: 24702 - DNA, 22 bp, synthetic construct
  misc_feature 1..22: note = chemically synthesized
  source 1..22: mol_type = other DNA
ctgtaatagacatgaaatagta

SEQ ID NO: 24703 - DNA, 22 bp, synthetic construct
  misc_feature 1..22: note = chemically synthesized
  source 1..22: mol_type = other DNA
taatagacatgaaatagtaaac

SEQ ID NO: 24704 - DNA, 22 bp, synthetic construct
  misc_feature 1..22: note = chemically synthesized
  source 1..22: mol_type = other DNA
tatatcacaacacatgacataa

SEQ ID NO: 24705 - DNA, 22 bp, synthetic construct
  misc_feature 1..22: note = chemically synthesized
  source 1..22: mol_type = other DNA
cagatcgtttaaatcacacaag

SEQ ID NO: 24706 - DNA, 22 bp, synthetic construct
  misc_feature 1..22: note = chemically synthesized
  source 1..22: mol_type = other DNA
agatcgtttaaatcacacaagt

SEQ ID NO: 24707 - DNA, 22 bp, synthetic construct
  misc_feature 1..22: note = chemically synthesized
  source 1..22: mol_type = other DNA
aaatcacacaagtcatcactgc

SEQ ID NO: 24708 - DNA, 22 bp, synthetic construct
  misc_feature 1..22: note = chemically synthesized
  source 1..22: mol_type = other DNA
aatcacacaagtcatcactgcc

SEQ ID NO: 24709 - DNA, 22 bp, synthetic construct
  misc_feature 1..22: note = chemically synthesized
  source 1..22: mol_type = other DNA
ccatttacccagcaatcagttg

SEQ ID NO: 24710 - DNA, 22 bp, synthetic construct
  misc_feature 1..22: note = chemically synthesized
  source 1..22: mol_type = other DNA
acccagcaatcagttggcttga

SEQ ID NO: 24711 - DNA, 22 bp, synthetic construct
  misc_feature 1..22: note = chemically synthesized
  source 1..22: mol_type = other DNA
cccagcaatcagttggcttgat

SEQ ID NO: 24712 - DNA, 22 bp, synthetic construct
  misc_feature 1..22: note = chemically synthesized
  source 1..22: mol_type = other DNA
gcttgattcttcaagatcttga

SEQ ID NO: 24713 - DNA, 22 bp, synthetic construct
  misc_feature 1..22: note = chemically synthesized
  source 1..22: mol_type = other DNA
gattcttcaagatcttgaggaa

SEQ ID NO: 24714 - DNA, 22 bp, synthetic construct
  misc_feature 1..22: note = chemically synthesized
  source 1..22: mol_type = other DNA
attcttcaagatcttgaggaac

SEQ ID NO: 24715 - DNA, 22 bp, synthetic construct
  misc_feature 1..22: note = chemically synthesized
  source 1..22: mol_type = other DNA
ttcaagatcttgaggaactcag

SEQ ID NO: 24716 - DNA, 22 bp, synthetic construct
  misc_feature 1..22: note = chemically synthesized
  source 1..22: mol_type = other DNA
caagatcttgaggaactcagcc

SEQ ID NO: 24717 - DNA, 22 bp, synthetic construct
  misc_feature 1..22: note = chemically synthesized
  source 1..22: mol_type = other DNA
aagatcttgaggaactcagcct

SEQ ID NO: 24718 - DNA, 22 bp, synthetic construct
  misc_feature 1..22: note = chemically synthesized
  source 1..22: mol_type = other DNA
gaggaactcagccttcaaaacc

SEQ ID NO: 24719 - DNA, 22 bp, synthetic construct
  misc_feature 1..22: note = chemically synthesized
  source 1..22: mol_type = other DNA
aggaactcagccttcaaaacca

SEQ ID NO: 24720 - DNA, 22 bp, synthetic construct
  misc_feature 1..22: note = chemically synthesized
  source 1..22: mol_type = other DNA
agccttcaaaaccatgactttt

SEQ ID NO: 24721 - DNA, 22 bp, synthetic construct
  misc_feature 1..22: note = chemically synthesized
  source 1..22: mol_type = other DNA
caaaaccatgactttttctttg

SEQ ID NO: 24722 - DNA, 22 bp, synthetic construct
  misc_feature 1..22: note = chemically synthesized
  source 1..22: mol_type = other DNA
aaaaccatgactttttctttgc

SEQ ID NO: 24723 - DNA, 22 bp, synthetic construct
  misc_feature 1..22: note = chemically synthesized
  source 1..22: mol_type = other DNA
tttctttgctaatgttccttca

SEQ ID NO: 24724 - DNA, 22 bp, synthetic construct
  misc_feature 1..22: note = chemically synthesized
  source 1..22: mol_type = other DNA
ttctttgctaatgttccttcaa

SEQ ID NO: 24725 - DNA, 22 bp, synthetic construct
  misc_feature 1..22: note = chemically synthesized
  source 1..22: mol_type = other DNA
tctttgctaatgttccttcaat

SEQ ID NO: 24726 - DNA, 22 bp, synthetic construct
  misc_feature 1..22: note = chemically synthesized
  source 1..22: mol_type = other DNA
ctttgctaatgttccttcaata

SEQ ID NO: 24727 - DNA, 22 bp, synthetic construct
  misc_feature 1..22: note = chemically synthesized
  source 1..22: mol_type = other DNA
tttgctaatgttccttcaatag

SEQ ID NO: 24728 - DNA, 22 bp, synthetic construct
  misc_feature 1..22: note = chemically synthesized
  source 1..22: mol_type = other DNA
tgctaatgttccttcaatagtc

SEQ ID NO: 24729 - DNA, 22 bp, synthetic construct
  misc_feature 1..22: note = chemically synthesized
  source 1..22: mol_type = other DNA
gctaatgttccttcaatagtct

SEQ ID NO: 24730 - DNA, 22 bp, synthetic construct
  misc_feature 1..22: note = chemically synthesized
  source 1..22: mol_type = other DNA
ctaatgttccttcaatagtctt

SEQ ID NO: 24731 - DNA, 22 bp, synthetic construct
  misc_feature 1..22: note = chemically synthesized
  source 1..22: mol_type = other DNA
atgttccttcaatagtcttgac

SEQ ID NO: 24732 - DNA, 22 bp, synthetic construct
  misc_feature 1..22: note = chemically synthesized
  source 1..22: mol_type = other DNA
cttcaatagtcttgacactttt

SEQ ID NO: 24733 - DNA, 22 bp, synthetic construct
  misc_feature 1..22: note = chemically synthesized
  source 1..22: mol_type = other DNA
caatagtcttgacacttttaaa

SEQ ID NO: 24734 - DNA, 22 bp, synthetic construct
  misc_feature 1..22: note = chemically synthesized
  source 1..22: mol_type = other DNA
aatagtcttgacacttttaaac

SEQ ID NO: 24735 - DNA, 22 bp, synthetic construct
  misc_feature 1..22: note = chemically synthesized
  source 1..22: mol_type = other DNA
gacacttttaaactagagagta

SEQ ID NO: 24736 - DNA, 22 bp, synthetic construct
  misc_feature 1..22: note = chemically synthesized
  source 1..22: mol_type = other DNA
acacttttaaactagagagtat

SEQ ID NO: 24737 - DNA, 22 bp, synthetic construct
  misc_feature 1..22: note = chemically synthesized
  source 1..22: mol_type = other DNA
ttaaactagagagtataaaccc

SEQ ID NO: 24738 - DNA, 22 bp, synthetic construct
  misc_feature 1..22: note = chemically synthesized
  source 1..22: mol_type = other DNA
taaactagagagtataaaccca

SEQ ID NO: 24739 - DNA, 22 bp, synthetic construct
  misc_feature 1..22: note = chemically synthesized
  source 1..22: mol_type = other DNA
aaactagagagtataaacccac

SEQ ID NO: 24740 - DNA, 22 bp, synthetic construct
  misc_feature 1..22: note = chemically synthesized
  source 1..22: mol_type = other DNA
aactagagagtataaacccaca

SEQ ID NO: 24741 - DNA, 22 bp, synthetic construct
  misc_feature 1..22: note = chemically synthesized
  source 1..22: mol_type = other DNA
gagagtataaacccacaaggaa

SEQ ID NO: 24742 - DNA, 22 bp, synthetic construct
  misc_feature 1..22: note = chemically synthesized
  source 1..22: mol_type = other DNA
ttttataattttacagatgtct

SEQ ID NO: 24743 - DNA, 22 bp, synthetic construct
  misc_feature 1..22: note = chemically synthesized
  source 1..22: mol_type = other DNA
tataattttacagatgtcttta

SEQ ID NO: 24744 - DNA, 22 bp, synthetic construct
  misc_feature 1..22: note = chemically synthesized
  source 1..22: mol_type = other DNA
ataattttacagatgtctttat

SEQ ID NO: 24745 - DNA, 22 bp, synthetic construct
  misc_feature 1..22: note = chemically synthesized
  source 1..22: mol_type = other DNA
taattttacagatgtctttatt

SEQ ID NO: 24746 - DNA, 22 bp, synthetic construct
  misc_feature 1..22: note = chemically synthesized
  source 1..22: mol_type = other DNA
tacagatgtctttattttcaaa

SEQ ID NO: 24747 - DNA, 22 bp, synthetic construct
  misc_feature 1..22: note = chemically synthesized
  source 1..22: mol_type = other DNA
acagatgtctttattttcaaaa

SEQ ID NO: 24748 - DNA, 22 bp, synthetic construct
  misc_feature 1..22: note = chemically synthesized
  source 1..22: mol_type = other DNA
cagatgtctttattttcaaaat

SEQ ID NO: 24749 - DNA, 22 bp, synthetic construct
  misc_feature 1..22: note = chemically synthesized
  source 1..22: mol_type = other DNA
tattttcaaaatcatttacatt

SEQ ID NO: 24750 - DNA, 22 bp, synthetic construct
  misc_feature 1..22: note = chemically synthesized
  source 1..22: mol_type = other DNA
attttcaaaatcatttacattg

SEQ ID NO: 24751 - DNA, 22 bp, synthetic construct
  misc_feature 1..22: note = chemically synthesized
  source 1..22: mol_type = other DNA
ttttcaaaatcatttacattgt

SEQ ID NO: 24752 - DNA, 22 bp, synthetic construct
  misc_feature 1..22: note = chemically synthesized
  source 1..22: mol_type = other DNA
tcaaaatcatttacattgtggt

SEQ ID NO: 24753 - DNA, 22 bp, synthetic construct
  misc_feature 1..22: note = chemically synthesized
  source 1..22: mol_type = other DNA
caaaatcatttacattgtggtt

SEQ ID NO: 24754 - DNA, 22 bp, synthetic construct
  misc_feature 1..22: note = chemically synthesized
  source 1..22: mol_type = other DNA
aaaatcatttacattgtggttc

SEQ ID NO: 24755 - DNA, 22 bp, synthetic construct
  misc_feature 1..22: note = chemically synthesized
  source 1..22: mol_type = other DNA
acattgtggttctctaccttgc

SEQ ID NO: 24756 - DNA, 22 bp, synthetic construct
  misc_feature 1..22: note = chemically synthesized
  source 1..22: mol_type = other DNA
cattgtggttctctaccttgcc

SEQ ID NO: 24757 - DNA, 22 bp, synthetic construct
  misc_feature 1..22: note = chemically synthesized
  source 1..22: mol_type = other DNA
tggttctctaccttgccttctc

SEQ ID NO: 24758 - DNA, 22 bp, synthetic construct
  misc_feature 1..22: note = chemically synthesized
  source 1..22: mol_type = other DNA
tctaccttgccttctcttaccc

SEQ ID NO: 24759 - DNA, 22 bp, synthetic construct
  misc_feature 1..22: note = chemically synthesized
  source 1..22: mol_type = other DNA
taccttgccttctcttacccag

SEQ ID NO: 24760 - DNA, 22 bp, synthetic construct
  misc_feature 1..22: note = chemically synthesized
  source 1..22: mol_type = other DNA
ccttgccttctcttacccagca

SEQ ID NO: 24761 - DNA, 22 bp, synthetic construct
  misc_feature 1..22: note = chemically synthesized
  source 1..22: mol_type = other DNA
gccttctcttacccagcacaga

SEQ ID NO: 24762 - DNA, 22 bp, synthetic construct
  misc_feature 1..22: note = chemically synthesized
  source 1..22: mol_type = other DNA
ccttctcttacccagcacagat

SEQ ID NO: 24763 - DNA, 22 bp, synthetic construct
  misc_feature 1..22: note = chemically synthesized
  source 1..22: mol_type = other DNA
ctcttacccagcacagatgagg

SEQ ID NO: 24764 - DNA, 22 bp, synthetic construct
  misc_feature 1..22: note = chemically synthesized
  source 1..22: mol_type = other DNA
tcttacccagcacagatgaggt

SEQ ID NO: 24765 - DNA, 22 bp, synthetic construct
  misc_feature 1..22: note = chemically synthesized
  source 1..22: mol_type = other DNA
ttacccagcacagatgaggtta

SEQ ID NO: 24766 - DNA, 22 bp, synthetic construct
  misc_feature 1..22: note = chemically synthesized
  source 1..22: mol_type = other DNA
acccagcacagatgaggttata

SEQ ID NO: 24767 - DNA, 22 bp, synthetic construct
  misc_feature 1..22: note = chemically synthesized
  source 1..22: mol_type = other DNA
cccagcacagatgaggttatac

SEQ ID NO: 24768 - DNA, 22 bp, synthetic construct
  misc_feature 1..22: note = chemically synthesized
  source 1..22: mol_type = other DNA
tacctcactcgcaaattgtttt

SEQ ID NO: 24769 - DNA, 22 bp, synthetic construct
  misc_feature 1..22: note = chemically synthesized
  source 1..22: mol_type = other DNA
actcgcaaattgttttatcaat

SEQ ID NO: 24770 - DNA, 22 bp, synthetic construct
  misc_feature 1..22: note = chemically synthesized
  source 1..22: mol_type = other DNA
gcaaattgttttatcaatttga

SEQ ID NO: 24771 - DNA, 22 bp, synthetic construct
  misc_feature 1..22: note = chemically synthesized
  source 1..22: mol_type = other DNA
ttttatcaatttgattttcttt

SEQ ID NO: 24772 - DNA, 22 bp, synthetic construct
  misc_feature 1..22: note = chemically synthesized
  source 1..22: mol_type = other DNA
tatcaatttgattttctttatt

SEQ ID NO: 24773 - DNA, 22 bp, synthetic construct
  misc_feature 1..22: note = chemically synthesized
  source 1..22: mol_type = other DNA
atcaatttgattttctttattt

SEQ ID NO: 24774 - DNA, 22 bp, synthetic construct
  misc_feature 1..22: note = chemically synthesized
  source 1..22: mol_type = other DNA
tcaatttgattttctttatttt

SEQ ID NO: 24775 - DNA, 22 bp, synthetic construct
  misc_feature 1..22: note = chemically synthesized
  source 1..22: mol_type = other DNA
gattttctttattttataattc

SEQ ID NO: 24776 - DNA, 22 bp, synthetic construct
  misc_feature 1..22: note = chemically synthesized
  source 1..22: mol_type = other DNA
attttctttattttataattcc

SEQ ID NO: 24777 - DNA, 22 bp, synthetic construct
  misc_feature 1..22: note = chemically synthesized
  source 1..22: mol_type = other DNA
tctttattttataattcctaca

SEQ ID NO: 24778 - DNA, 22 bp, synthetic construct
  misc_feature 1..22: note = chemically synthesized
  source 1..22: mol_type = other DNA
ctttattttataattcctacat

SEQ ID NO: 24779 - DNA, 22 bp, synthetic construct
  misc_feature 1..22: note = chemically synthesized
  source 1..22: mol_type = other DNA
tttattttataattcctacata

SEQ ID NO: 24780 - DNA, 22 bp, synthetic construct
  misc_feature 1..22: note = chemically synthesized
  source 1..22: mol_type = other DNA
tattttataattcctacataag

SEQ ID NO: 24781 - DNA, 22 bp, synthetic construct
  misc_feature 1..22: note = chemically synthesized
  source 1..22: mol_type = other DNA
attttataattcctacataagc

SEQ ID NO: 24782 - DNA, 22 bp, synthetic construct
  misc_feature 1..22: note = chemically synthesized
  source 1..22: mol_type = other DNA
ttttataattcctacataagca

SEQ ID NO: 24783 - DNA, 22 bp, synthetic construct
  misc_feature 1..22: note = chemically synthesized
  source 1..22: mol_type = other DNA
tataattcctacataagcatag

SEQ ID NO: 24784 - DNA, 22 bp, synthetic construct
  misc_feature 1..22: note = chemically synthesized
  source 1..22: mol_type = other DNA
ataattcctacataagcatagc

SEQ ID NO: 24785 - DNA, 22 bp, synthetic construct
  misc_feature 1..22: note = chemically synthesized
  source 1..22: mol_type = other DNA
taattcctacataagcatagca

SEQ ID NO: 24786 - DNA, 22 bp, synthetic construct
  misc_feature 1..22: note = chemically synthesized
  source 1..22: mol_type = other DNA
ctacataagcatagcattgaag

SEQ ID NO: 24787 - DNA, 22 bp, synthetic construct
  misc_feature 1..22: note = chemically synthesized
  source 1..22: mol_type = other DNA
cataagcatagcattgaagaaa

SEQ ID NO: 24788 - DNA, 22 bp, synthetic construct
  misc_feature 1..22: note = chemically synthesized
  source 1..22: mol_type = other DNA
aagaaaaaaattactttcattc

SEQ ID NO: 24789 - DNA, 22 bp, synthetic construct
  misc_feature 1..22: note = chemically synthesized
  source 1..22: mol_type = other DNA
ctttcattctgaaaggagcaca

SEQ ID NO: 24790 - DNA, 22 bp, synthetic construct
  misc_feature 1..22: note = chemically synthesized
  source 1..22: mol_type = other DNA
tcattctgaaaggagcacagta

SEQ ID NO: 24791 - DNA, 22 bp, synthetic construct
  misc_feature 1..22: note = chemically synthesized
  source 1..22: mol_type = other DNA
cattctgaaaggagcacagtat

SEQ ID NO: 24792 - DNA, 22 bp, synthetic construct
  misc_feature 1..22: note = chemically synthesized
  source 1..22: mol_type = other DNA
attctgaaaggagcacagtatt

SEQ ID NO: 24793 - DNA, 22 bp, synthetic construct
  misc_feature 1..22: note = chemically synthesized
  source 1..22: mol_type = other DNA
tgaaaggagcacagtattttgc

SEQ ID NO: 24794 - DNA, 22 bp, synthetic construct
  misc_feature 1..22: note = chemically synthesized
  source 1..22: mol_type = other DNA
aaaggagcacagtattttgcct

SEQ ID NO: 24795 - DNA, 22 bp, synthetic construct
  misc_feature 1..22: note = chemically synthesized
  source 1..22: mol_type = other DNA
tgccttttgagaagctcctgaa

SEQ ID NO: 24796 - DNA, 22 bp, synthetic construct
  misc_feature 1..22: note = chemically synthesized
  source 1..22: mol_type = other DNA
gccttttgagaagctcctgaat

SEQ ID NO: 24797 - DNA, 22 bp, synthetic construct
  misc_feature 1..22: note = chemically synthesized
  source 1..22: mol_type = other DNA
ccttttgagaagctcctgaatt

SEQ ID NO: 24798 - DNA, 22 bp, synthetic construct
  misc_feature 1..22: note = chemically synthesized
  source 1..22: mol_type = other DNA
ttgagaagctcctgaattaaaa

SEQ ID NO: 24799 - DNA, 22 bp, synthetic construct
  misc_feature 1..22: note = chemically synthesized
  source 1..22: mol_type = other DNA
tgagaagctcctgaattaaaac

SEQ ID NO: 24800 - DNA, 22 bp, synthetic construct
  misc_feature 1..22: note = chemically synthesized
  source 1..22: mol_type = other DNA
gagaagctcctgaattaaaaca

SEQ ID NO: 24801 - DNA, 22 bp, synthetic construct
  misc_feature 1..22: note = chemically synthesized
  source 1..22: mol_type = other DNA
agaagctcctgaattaaaacat

SEQ ID NO: 24802 - DNA, 22 bp, synthetic construct
  misc_feature 1..22: note = chemically synthesized
  source 1..22: mol_type = other DNA
ctgaattaaaacattaattcca

SEQ ID NO: 24803 - DNA, 22 bp, synthetic construct
  misc_feature 1..22: note = chemically synthesized
  source 1..22: mol_type = other DNA
aattaaaacattaattccaagc

SEQ ID NO: 24804 - DNA, 22 bp, synthetic construct
  misc_feature 1..22: note = chemically synthesized
  source 1..22: mol_type = other DNA
aaacattaattccaagctaatt

SEQ ID NO: 24805 - DNA, 22 bp, synthetic construct
  misc_feature 1..22: note = chemically synthesized
  source 1..22: mol_type = other DNA
attccaagctaattgtgaatat

SEQ ID NO: 24806 - DNA, 22 bp, synthetic construct
  misc_feature 1..22: note = chemically synthesized
  source 1..22: mol_type = other DNA
caagctaattgtgaatatgaaa

SEQ ID NO: 24807 - DNA, 22 bp, synthetic construct
  misc_feature 1..22: note = chemically synthesized
  source 1..22: mol_type = other DNA
attgtgaatatgaaacattctt

SEQ ID NO: 24808 - DNA, 22 bp, synthetic construct
  misc_feature 1..22: note = chemically synthesized
  source 1..22: mol_type = other DNA
tgaatatgaaacattcttaagc

SEQ ID NO: 24809 - DNA, 22 bp, synthetic construct
  misc_feature 1..22: note = chemically synthesized
  source 1..22: mol_type = other DNA
ttaagcatttcatataattact

SEQ ID NO: 24810 - DNA, 22 bp, synthetic construct
  misc_feature 1..22: note = chemically synthesized
  source 1..22: mol_type = other DNA
aagcatttcatataattactaa

SEQ ID NO: 24811 - DNA, 22 bp, synthetic construct
  misc_feature 1..22: note = chemically synthesized
  source 1..22: mol_type = other DNA
agcatttcatataattactaac

SEQ ID NO: 24812 - DNA, 22 bp, synthetic construct
  misc_feature 1..22: note = chemically synthesized
  source 1..22: mol_type = other DNA
catataattactaacagaatgt

SEQ ID NO: 24813 - DNA, 22 bp, synthetic construct
  misc_feature 1..22: note = chemically synthesized
  source 1..22: mol_type = other DNA
atataattactaacagaatgta

SEQ ID NO: 24814 - DNA, 22 bp, synthetic construct
  misc_feature 1..22: note = chemically synthesized
  source 1..22: mol_type = other DNA
ctaacagaatgtagagttgagg

SEQ ID NO: 24815 - DNA, 22 bp, synthetic construct
  misc_feature 1..22: note = chemically synthesized
  source 1..22: mol_type = other DNA
acagaatgtagagttgaggttt

SEQ ID NO: 24816 - DNA, 22 bp, synthetic construct
  misc_feature 1..22: note = chemically synthesized
  source 1..22: mol_type = other DNA
aggtttccaactggttctaatc

SEQ ID NO: 24817 - DNA, 22 bp, synthetic construct
  misc_feature 1..22: note = chemically synthesized
  source 1..22: mol_type = other DNA
ccaactggttctaatcacatat

SEQ ID NO: 24818 - DNA, 22 bp, synthetic construct
  misc_feature 1..22: note = chemically synthesized
  source 1..22: mol_type = other DNA
caactggttctaatcacatata

SEQ ID NO: 24819 - DNA, 22 bp, synthetic construct
  misc_feature 1..22: note = chemically synthesized
  source 1..22: mol_type = other DNA
gttctaatcacatatacatctt

SEQ ID NO: 24820 - DNA, 22 bp, synthetic construct
  misc_feature 1..22: note = chemically synthesized
  source 1..22: mol_type = other DNA
taatcacatatacatcttccta

SEQ ID NO: 24821 - DNA, 22 bp, synthetic construct
  misc_feature 1..22: note = chemically synthesized
  source 1..22: mol_type = other DNA
atcacatatacatcttcctaaa

SEQ ID NO: 24822 - DNA, 22 bp, synthetic construct
  misc_feature 1..22: note = chemically synthesized
  source 1..22: mol_type = other DNA
cctaaaataaaatgtttaatta

SEQ ID NO: 24823 - DNA, 22 bp, synthetic construct
  misc_feature 1..22: note = chemically synthesized
  source 1..22: mol_type = other DNA
ctaaaataaaatgtttaattat

SEQ ID NO: 24824 - DNA, 22 bp, synthetic construct
  misc_feature 1..22: note = chemically synthesized
  source 1..22: mol_type = other DNA
aaataaaatgtttaattatact

SEQ ID NO: 24825 - DNA, 22 bp, synthetic construct
  misc_feature 1..22: note = chemically synthesized
  source 1..22: mol_type = other DNA
aattatactattttgctgagaa

SEQ ID NO: 24826 - DNA, 22 bp, synthetic construct
  misc_feature 1..22: note = chemically synthesized
  source 1..22: mol_type = other DNA
attatactattttgctgagaaa

SEQ ID NO: 24827 - DNA, 22 bp, synthetic construct
  misc_feature 1..22: note = chemically synthesized
  source 1..22: mol_type = other DNA
tactattttgctgagaaaaatt

SEQ ID NO: 24828 - DNA, 22 bp, synthetic construct
  misc_feature 1..22: note = chemically synthesized
  source 1..22: mol_type = other DNA
ttttgctgagaaaaattttaaa

SEQ ID NO: 24829 - DNA, 22 bp, synthetic construct
  misc_feature 1..22: note = chemically synthesized
  source 1..22: mol_type = other DNA
tgctgagaaaaattttaaaaca

SEQ ID NO: 24830 - DNA, 22 bp, synthetic construct
  misc_feature 1..22: note = chemically synthesized
  source 1..22: mol_type = other DNA
gctgagaaaaattttaaaacaa

SEQ ID NO: 24831 - DNA, 22 bp, synthetic construct
  misc_feature 1..22: note = chemically synthesized
  source 1..22: mol_type = other DNA
ctgagaaaaattttaaaacaaa

SEQ ID NO: 24832 - DNA, 22 bp, synthetic construct
  misc_feature 1..22: note = chemically synthesized
  source 1..22: mol_type = other DNA
agaaaaattttaaaacaaaaaa

SEQ ID NO: 24833 - DNA, 22 bp, synthetic construct
  misc_feature 1..22: note = chemically synthesized
  source 1..22: mol_type = other DNA
taaaacaaaaaatgtaaatatt

SEQ ID NO: 24834 - DNA, 22 bp, synthetic construct
  misc_feature 1..22: note = chemically synthesized
  source 1..22: mol_type = other DNA
aaaacaaaaaatgtaaatatta

SEQ ID NO: 24835 - DNA, 22 bp, synthetic construct
  misc_feature 1..22: note = chemically synthesized
  source 1..22: mol_type = other DNA
aaacaaaaaatgtaaatattaa

SEQ ID NO: 24836 - DNA, 22 bp, synthetic construct
  misc_feature 1..22: note = chemically synthesized
  source 1..22: mol_type = other DNA
actttttatttctatgttgtca

SEQ ID NO: 24837 - DNA, 22 bp, synthetic construct
  misc_feature 1..22: note = chemically synthesized
  source 1..22: mol_type = other DNA
tttatttctatgttgtcataat

SEQ ID NO: 24838 - DNA, 22 bp, synthetic construct
  misc_feature 1..22: note = chemically synthesized
  source 1..22: mol_type = other DNA
ttatttctatgttgtcataata

SEQ ID NO: 24839 - DNA, 22 bp, synthetic construct
  misc_feature 1..22: note = chemically synthesized
  source 1..22: mol_type = other DNA
tatttctatgttgtcataatat

SEQ ID NO: 24840 - DNA, 22 bp, synthetic construct
  misc_feature 1..22: note = chemically synthesized
  source 1..22: mol_type = other DNA
atttctatgttgtcataatatg

SEQ ID NO: 24841 - DNA, 22 bp, synthetic construct
  misc_feature 1..22: note = chemically synthesized
  source 1..22: mol_type = other DNA
tttctatgttgtcataatatgg

SEQ ID NO: 24842 - DNA, 22 bp, synthetic construct
  misc_feature 1..22: note = chemically synthesized
  source 1..22: mol_type = other DNA
ctatgttgtcataatatggatt

SEQ ID NO: 24843 - DNA, 22 bp, synthetic construct
  misc_feature 1..22: note = chemically synthesized
  source 1..22: mol_type = other DNA
tatgttgtcataatatggattt

SEQ ID NO: 24844 - DNA, 22 bp, synthetic construct
  misc_feature 1..22: note = chemically synthesized
  source 1..22: mol_type = other DNA
tgttgtcataatatggatttta

SEQ ID NO: 24845 - DNA, 22 bp, synthetic construct
  misc_feature 1..22: note = chemically synthesized
  source 1..22: mol_type = other DNA
tcataatatggattttaaattt

SEQ ID NO: 24846 - DNA, 22 bp, synthetic construct
  misc_feature 1..22: note = chemically synthesized
  source 1..22: mol_type = other DNA
taaattttaatttaaatgcaca

SEQ ID NO: 24847 - DNA, 22 bp, synthetic construct
  misc_feature 1..22: note = chemically synthesized
  source 1..22: mol_type = other DNA
aaattttaatttaaatgcacat

SEQ ID NO: 24848 - DNA, 22 bp, synthetic construct
  misc_feature 1..22: note = chemically synthesized
  source 1..22: mol_type = other DNA
aattttaatttaaatgcacatt

SEQ ID NO: 24849 - DNA, 22 bp, synthetic construct
  misc_feature 1..22: note = chemically synthesized
  source 1..22: mol_type = other DNA
taatttaaatgcacattccatg

SEQ ID NO: 24850 - DNA, 22 bp, synthetic construct
  misc_feature 1..22: note = chemically synthesized
  source 1..22: mol_type = other DNA
aatttaaatgcacattccatgg

SEQ ID NO: 24851 - DNA, 22 bp, synthetic construct
  misc_feature 1..22: note = chemically synthesized
  source 1..22: mol_type = other DNA
atttaaatgcacattccatggc

SEQ ID NO: 24852 - DNA, 22 bp, synthetic construct
  misc_feature 1..22: note = chemically synthesized
  source 1..22: mol_type = other DNA
aaatgcacattccatggcaatg

SEQ ID NO: 24853 - DNA, 22 bp, synthetic construct
  misc_feature 1..22: note = chemically synthesized
  source 1..22: mol_type = other DNA
aatgcacattccatggcaatgg

SEQ ID NO: 24854 - DNA, 22 bp, synthetic construct
  misc_feature 1..22: note = chemically synthesized
  source 1..22: mol_type = other DNA
catggcaatggctaatattttc

SEQ ID NO: 24855 - DNA, 22 bp, synthetic construct
  misc_feature 1..22: note = chemically synthesized
  source 1..22: mol_type = other DNA
atattttcaactttctccctct

SEQ ID NO: 24856 - DNA, 22 bp, synthetic construct
  misc_feature 1..22: note = chemically synthesized
  source 1..22: mol_type = other DNA
tcaactttctccctcttcaaca

SEQ ID NO: 24857 - DNA, 22 bp, synthetic construct
  misc_feature 1..22: note = chemically synthesized
  source 1..22: mol_type = other DNA
caactttctccctcttcaacac

SEQ ID NO: 24858 - DNA, 22 bp, synthetic construct
  misc_feature 1..22: note = chemically synthesized
  source 1..22: mol_type = other DNA
aactttctccctcttcaacaca

SEQ ID NO: 24859 - DNA, 22 bp, synthetic construct
  misc_feature 1..22: note = chemically synthesized
  source 1..22: mol_type = other DNA
tctccctcttcaacacatacac

SEQ ID NO: 24860 - DNA, 22 bp, synthetic construct
  misc_feature 1..22: note = chemically synthesized
  source 1..22: mol_type = other DNA
ctccctcttcaacacatacaca

SEQ ID NO: 24861 - DNA, 22 bp, synthetic construct
  misc_feature 1..22: note = chemically synthesized
  source 1..22: mol_type = other DNA
tccctcttcaacacatacacaa

SEQ ID NO: 24862 - DNA, 22 bp, synthetic construct
  misc_feature 1..22: note = chemically synthesized
  source 1..22: mol_type = other DNA
cctcttcaacacatacacaagt

SEQ ID NO: 24863 - DNA, 22 bp, synthetic construct
  misc_feature 1..22: note = chemically synthesized
  source 1..22: mol_type = other DNA
ttcaacacatacacaagtctgt

SEQ ID NO: 24864 - DNA, 22 bp, synthetic construct
  misc_feature 1..22: note = chemically synthesized
  source 1..22: mol_type = other DNA
caacacatacacaagtctgtat

SEQ ID NO: 24865 - DNA, 22 bp, synthetic construct
  misc_feature 1..22: note = chemically synthesized
  source 1..22: mol_type = other DNA
aacacatacacaagtctgtatt

SEQ ID NO: 24866 - DNA, 22 bp, synthetic construct
  misc_feature 1..22: note = chemically synthesized
  source 1..22: mol_type = other DNA
tattcatagcctgttgtaatag

SEQ ID NO: 24867 - DNA, 22 bp, synthetic construct
  misc_feature 1..22: note = chemically synthesized
  source 1..22: mol_type = other DNA
atagcctgttgtaatagacaag

SEQ ID NO: 24868 - DNA, 22 bp, synthetic construct
  misc_feature 1..22: note = chemically synthesized
  source 1..22: mol_type = other DNA
ttgtaatagacaaggttaaatg

SEQ ID NO: 24869 - DNA, 22 bp, synthetic construct
  misc_feature 1..22: note = chemically synthesized
  source 1..22: mol_type = other DNA
taatagacaaggttaaatgtag

SEQ ID NO: 24870 - DNA, 22 bp, synthetic construct
  misc_feature 1..22: note = chemically synthesized
  source 1..22: mol_type = other DNA
aatgtagcctaaatatatattc

SEQ ID NO: 24871 - DNA, 22 bp, synthetic construct
  misc_feature 1..22: note = chemically synthesized
  source 1..22: mol_type = other DNA
aatatatattccgtttaaatgc

SEQ ID NO: 24872 - DNA, 22 bp, synthetic construct
  misc_feature 1..22: note = chemically synthesized
  source 1..22: mol_type = other DNA
cgtttaaatgctttcctcactc

SEQ ID NO: 24873 - DNA, 22 bp, synthetic construct
  misc_feature 1..22: note = chemically synthesized
  source 1..22: mol_type = other DNA
aaatgctttcctcactcactag

SEQ ID NO: 24874 - DNA, 22 bp, synthetic construct
  misc_feature 1..22: note = chemically synthesized
  source 1..22: mol_type = other DNA
aatgctttcctcactcactagc

SEQ ID NO: 24875 - DNA, 22 bp, synthetic construct
  misc_feature 1..22: note = chemically synthesized
  source 1..22: mol_type = other DNA
tcctcactcactagcaattggt

SEQ ID NO: 24876 - DNA, 22 bp, synthetic construct
  misc_feature 1..22: note = chemically synthesized
  source 1..22: mol_type = other DNA
cctcactcactagcaattggtt

SEQ ID NO: 24877 - DNA, 22 bp, synthetic construct
  misc_feature 1..22: note = chemically synthesized
  source 1..22: mol_type = other DNA
ctcactcactagcaattggtta

SEQ ID NO: 24878 - DNA, 22 bp, synthetic construct
  misc_feature 1..22: note = chemically synthesized
  source 1..22: mol_type = other DNA
actcactagcaattggttatca

SEQ ID NO: 24879 - DNA, 22 bp, synthetic construct
  misc_feature 1..22: note = chemically synthesized
  source 1..22: mol_type = other DNA
actagcaattggttatcactag

SEQ ID NO: 24880 - DNA, 22 bp, synthetic construct
  misc_feature 1..22: note = chemically synthesized
  source 1..22: mol_type = other DNA
gcaattggttatcactagagag

SEQ ID NO: 24881 - DNA, 22 bp, synthetic construct
  misc_feature 1..22: note = chemically synthesized
  source 1..22: mol_type = other DNA
gttatcactagagagttatctg

SEQ ID NO: 24882 - DNA, 22 bp, synthetic construct
  misc_feature 1..22: note = chemically synthesized
  source 1..22: mol_type = other DNA
tcactagagagttatctgtgaa

SEQ ID NO: 24883 - DNA, 22 bp, synthetic construct
  misc_feature 1..22: note = chemically synthesized
  source 1..22: mol_type = other DNA
gagagttatctgtgaaatctta

SEQ ID NO: 24884 - DNA, 22 bp, synthetic construct
  misc_feature 1..22: note = chemically synthesized
  source 1..22: mol_type = other DNA
tctgtgaaatcttactctacat

SEQ ID NO: 24885 - DNA, 22 bp, synthetic construct
  misc_feature 1..22: note = chemically synthesized
  source 1..22: mol_type = other DNA
tgaaatcttactctacattcct

SEQ ID NO: 24886 - DNA, 22 bp, synthetic construct
  misc_feature 1..22: note = chemically synthesized
  source 1..22: mol_type = other DNA
actctacattcctcagtcacct

SEQ ID NO: 24887 - DNA, 22 bp, synthetic construct
  misc_feature 1..22: note = chemically synthesized
  source 1..22: mol_type = other DNA
ctctacattcctcagtcaccta

SEQ ID NO: 24888 - DNA, 22 bp, synthetic construct
  misc_feature 1..22: note = chemically synthesized
  source 1..22: mol_type = other DNA
tacattcctcagtcacctagtg

SEQ ID NO: 24889 - DNA, 22 bp, synthetic construct
  misc_feature 1..22: note = chemically synthesized
  source 1..22: mol_type = other DNA
cattcctcagtcacctagtgaa

SEQ ID NO: 24890 - DNA, 22 bp, synthetic construct
  misc_feature 1..22: note = chemically synthesized
  source 1..22: mol_type = other DNA
ctcagtcacctagtgaaggtgt

SEQ ID NO: 24891 - DNA, 22 bp, synthetic construct
  misc_feature 1..22: note = chemically synthesized
  source 1..22: mol_type = other DNA
agtcacctagtgaaggtgtact

SEQ ID NO: 24892 - DNA, 22 bp, synthetic construct
  misc_feature 1..22: note = chemically synthesized
  source 1..22: mol_type = other DNA
gtgaaggtgtactgatccacct

SEQ ID NO: 24893 - DNA, 22 bp, synthetic construct
  misc_feature 1..22: note = chemically synthesized
  source 1..22: mol_type = other DNA
atccaccttcaggagcagtaca

SEQ ID NO: 24894 - DNA, 22 bp, synthetic construct
  misc_feature 1..22: note = chemically synthesized
  source 1..22: mol_type = other DNA
caggagcagtacaaacctttat

SEQ ID NO: 24895 - DNA, 22 bp, synthetic construct
  misc_feature 1..22: note = chemically synthesized
  source 1..22: mol_type = other DNA
aggagcagtacaaacctttatt

SEQ ID NO: 24896 - DNA, 22 bp, synthetic construct
  misc_feature 1..22: note = chemically synthesized
  source 1..22: mol_type = other DNA
tattggtcacttcccaagcaac

SEQ ID NO: 24897 - DNA, 22 bp, synthetic construct
  misc_feature 1..22: note = chemically synthesized
  source 1..22: mol_type = other DNA
attggtcacttcccaagcaact

SEQ ID NO: 24898 - DNA, 22 bp, synthetic construct
  misc_feature 1..22: note = chemically synthesized
  source 1..22: mol_type = other DNA
ttggtcacttcccaagcaactt

SEQ ID NO: 24899 - DNA, 22 bp, synthetic construct
  misc_feature 1..22: note = chemically synthesized
  source 1..22: mol_type = other DNA
gtcacttcccaagcaacttcaa

SEQ ID NO: 24900 - DNA, 22 bp, synthetic construct
  misc_feature 1..22: note = chemically synthesized
  source 1..22: mol_type = other DNA
cccaagcaacttcaaagagcag

SEQ ID NO: 24901 - DNA, 22 bp, synthetic construct
  misc_feature 1..22: note = chemically synthesized
  source 1..22: mol_type = other DNA
ccaagcaacttcaaagagcagt

SEQ ID NO: 24902 - DNA, 22 bp, synthetic construct
  misc_feature 1..22: note = chemically synthesized
  source 1..22: mol_type = other DNA
caaagagcagtaactcctccac

SEQ ID NO: 24903 - DNA, 22 bp, synthetic construct
  misc_feature 1..22: note = chemically synthesized
  source 1..22: mol_type = other DNA
aaagagcagtaactcctccaca

SEQ ID NO: 24904 - DNA, 22 bp, synthetic construct
  misc_feature 1..22: note = chemically synthesized
  source 1..22: mol_type = other DNA
ctccacaggaagttcttcgact

SEQ ID NO: 24905 - DNA, 22 bp, synthetic construct
  misc_feature 1..22: note = chemically synthesized
  source 1..22: mol_type = other DNA
cacaggaagttcttcgacttcc

SEQ ID NO: 24906 - DNA, 22 bp, synthetic construct
  misc_feature 1..22: note = chemically synthesized
  source 1..22: mol_type = other DNA
ttcgacttcccactggggaagc

SEQ ID NO: 24907 - DNA, 22 bp, synthetic construct
  misc_feature 1..22: note = chemically synthesized
  source 1..22: mol_type = other DNA
cgacttcccactggggaagccc

SEQ ID NO: 24908 - DNA, 22 bp, synthetic construct
  misc_feature 1..22: note = chemically synthesized
  source 1..22: mol_type = other DNA
gacttcccactggggaagccca

SEQ ID NO: 24909 - DNA, 22 bp, synthetic construct
  misc_feature 1..22: note = chemically synthesized
  source 1..22: mol_type = other DNA
cccactggggaagcccacccag

SEQ ID NO: 24910 - DNA, 22 bp, synthetic construct
  misc_feature 1..22: note = chemically synthesized
  source 1..22: mol_type = other DNA
ccactggggaagcccacccagg

SEQ ID NO: 24911 - DNA, 22 bp, synthetic construct
  misc_feature 1..22: note = chemically synthesized
  source 1..22: mol_type = other DNA
gggaagcccacccagggatgtt

SEQ ID NO: 24912 - DNA, 22 bp, synthetic construct
  misc_feature 1..22: note = chemically synthesized
  source 1..22: mol_type = other DNA
cagagagggatcggcctcgaag

SEQ ID NO: 24913 - DNA, 22 bp, synthetic construct
  misc_feature 1..22: note = chemically synthesized
  source 1..22: mol_type = other DNA
gaagcattcttcttacagtcct

SEQ ID NO: 24914 - DNA, 22 bp, synthetic construct
  misc_feature 1..22: note = chemically synthesized
  source 1..22: mol_type = other DNA
ttcttacagtcctccgagactc

SEQ ID NO: 24915 - DNA, 22 bp, synthetic construct
  misc_feature 1..22: note = chemically synthesized
  source 1..22: mol_type = other DNA
cttacagtcctccgagactcct

SEQ ID NO: 24916 - DNA, 22 bp, synthetic construct
  misc_feature 1..22: note = chemically synthesized
  source 1..22: mol_type = other DNA
ttacagtcctccgagactcctt

SEQ ID NO: 24917 - DNA, 22 bp, synthetic construct
  misc_feature 1..22: note = chemically synthesized
  source 1..22: mol_type = other DNA
acagtcctccgagactcctttg

SEQ ID NO: 24918 - DNA, 22 bp, synthetic construct
  misc_feature 1..22: note = chemically synthesized
  source 1..22: mol_type = other DNA
cagtcctccgagactcctttga

SEQ ID NO: 24919 - DNA, 22 bp, synthetic construct
  misc_feature 1..22: note = chemically synthesized
  source 1..22: mol_type = other DNA
cgagactcctttgaattcctgt

SEQ ID NO: 24920 - DNA, 22 bp, synthetic construct
  misc_feature 1..22: note = chemically synthesized
  source 1..22: mol_type = other DNA
ctttgaattcctgtttcaatta

SEQ ID NO: 24921 - DNA, 22 bp, synthetic construct
  misc_feature 1..22: note = chemically synthesized
  source 1..22: mol_type = other DNA
tgaattcctgtttcaattagtt

SEQ ID NO: 24922 - DNA, 22 bp, synthetic construct
  misc_feature 1..22: note = chemically synthesized
  source 1..22: mol_type = other DNA
gaattcctgtttcaattagttg

SEQ ID NO: 24923 - DNA, 22 bp, synthetic construct
  misc_feature 1..22: note = chemically synthesized
  source 1..22: mol_type = other DNA
aattcctgtttcaattagttgt

SEQ ID NO: 24924 - DNA, 22 bp, synthetic construct
  misc_feature 1..22: note = chemically synthesized
  source 1..22: mol_type = other DNA
ctgtttcaattagttgtaatcc

SEQ ID NO: 24925 - DNA, 22 bp, synthetic construct
  misc_feature 1..22: note = chemically synthesized
  source 1..22: mol_type = other DNA
tttcaattagttgtaatcccag

SEQ ID NO: 24926 - DNA, 22 bp, synthetic construct
  misc_feature 1..22: note = chemically synthesized
  source 1..22: mol_type = other DNA
caattagttgtaatcccaggag

SEQ ID NO: 24927 - DNA, 22 bp, synthetic construct
  misc_feature 1..22: note = chemically synthesized
  source 1..22: mol_type = other DNA
aattagttgtaatcccaggaga

SEQ ID NO: 24928 - DNA, 22 bp, synthetic construct
  misc_feature 1..22: note = chemically synthesized
  source 1..22: mol_type = other DNA
gttgtaatcccaggagaagaga

SEQ ID NO: 24929 - DNA, 22 bp, synthetic construct
  misc_feature 1..22: note = chemically synthesized
  source 1..22: mol_type = other DNA
taatcccaggagaagagaactt

SEQ ID NO: 24930 - DNA, 22 bp, synthetic construct
  misc_feature 1..22: note = chemically synthesized
  source 1..22: mol_type = other DNA
acaggcacaaaagttagagttg

SEQ ID NO: 24931 - DNA, 22 bp, synthetic construct
  misc_feature 1..22: note = chemically synthesized
  source 1..22: mol_type = other DNA
caggcacaaaagttagagttgg

SEQ ID NO: 24932 - DNA, 22 bp, synthetic construct
  misc_feature 1..22: note = chemically synthesized
  source 1..22: mol_type = other DNA
gagttggtagagttaccaggct

SEQ ID NO: 24933 - DNA, 22 bp, synthetic construct
  misc_feature 1..22: note = chemically synthesized
  source 1..22: mol_type = other DNA
gtagagttaccaggctttggta

SEQ ID NO: 24934 - DNA, 22 bp, synthetic construct
  misc_feature 1..22: note = chemically synthesized
  source 1..22: mol_type = other DNA
ccaggctttggtagcttctctt

SEQ ID NO: 24935 - DNA, 22 bp, synthetic construct
  misc_feature 1..22: note = chemically synthesized
  source 1..22: mol_type = other DNA
tggtagcttctcttgggaataa

SEQ ID NO: 24936 - DNA, 22 bp, synthetic construct
  misc_feature 1..22: note = chemically synthesized
  source 1..22: mol_type = other DNA
ggtagcttctcttgggaataaa

SEQ ID NO: 24937 - DNA, 22 bp, synthetic construct
  misc_feature 1..22: note = chemically synthesized
  source 1..22: mol_type = other DNA
gtagcttctcttgggaataaac

SEQ ID NO: 24938 - DNA, 22 bp, synthetic construct
  misc_feature 1..22: note = chemically synthesized
  source 1..22: mol_type = other DNA
ctcttgggaataaactagtagc

SEQ ID NO: 24939 - DNA, 22 bp, synthetic construct
  misc_feature 1..22: note = chemically synthesized
  source 1..22: mol_type = other DNA
tcttgggaataaactagtagca

SEQ ID NO: 24940 - DNA, 22 bp, synthetic construct
  misc_feature 1..22: note = chemically synthesized
  source 1..22: mol_type = other DNA
ttgggaataaactagtagcatg

SEQ ID NO: 24941 - DNA, 22 bp, synthetic construct
  misc_feature 1..22: note = chemically synthesized
  source 1..22: mol_type = other DNA
gggaataaactagtagcatgaa

SEQ ID NO: 24942 - DNA, 22 bp, synthetic construct
  misc_feature 1..22: note = chemically synthesized
  source 1..22: mol_type = other DNA
ggaataaactagtagcatgaaa

SEQ ID NO: 24943 - DNA, 22 bp, synthetic construct
  misc_feature 1..22: note = chemically synthesized
  source 1..22: mol_type = other DNA
gtagcatgaaatcttatgtgct

SEQ ID NO: 24944 - DNA, 22 bp, synthetic construct
  misc_feature 1..22: note = chemically synthesized
  source 1..22: mol_type = other DNA
atgtgcttcccacagaattcct

SEQ ID NO: 24945 - DNA, 22 bp, synthetic construct
  misc_feature 1..22: note = chemically synthesized
  source 1..22: mol_type = other DNA
tgtgcttcccacagaattcctg

SEQ ID NO: 24946 - DNA, 22 bp, synthetic construct
  misc_feature 1..22: note = chemically synthesized
  source 1..22: mol_type = other DNA
cccacagaattcctggtggaag

SEQ ID NO: 24947 - DNA, 22 bp, synthetic construct
  misc_feature 1..22: note = chemically synthesized
  source 1..22: mol_type = other DNA
ccacagaattcctggtggaagg

SEQ ID NO: 24948 - DNA, 22 bp, synthetic construct
  misc_feature 1..22: note = chemically synthesized
  source 1..22: mol_type = other DNA
ctggtggaaggaggaattcttc

SEQ ID NO: 24949 - DNA, 22 bp, synthetic construct
  misc_feature 1..22: note = chemically synthesized
  source 1..22: mol_type = other DNA
gtggaaggaggaattcttcctc

SEQ ID NO: 24950 - DNA, 22 bp, synthetic construct
  misc_feature 1..22: note = chemically synthesized
  source 1..22: mol_type = other DNA
ttcctcctctttctcgtctttc

SEQ ID NO: 24951 - DNA, 22 bp, synthetic construct
  misc_feature 1..22: note = chemically synthesized
  source 1..22: mol_type = other DNA
cctcctctttctcgtctttctg

SEQ ID NO: 24952 - DNA, 22 bp, synthetic construct
  misc_feature 1..22: note = chemically synthesized
  source 1..22: mol_type = other DNA
ctcctctttctcgtctttctgg

SEQ ID NO: 24953 - DNA, 22 bp, synthetic construct
  misc_feature 1..22: note = chemically synthesized
  source 1..22: mol_type = other DNA
ctctttctcgtctttctgggca

SEQ ID NO: 24954 - DNA, 22 bp, synthetic construct
  misc_feature 1..22: note = chemically synthesized
  source 1..22: mol_type = other DNA
tttctcgtctttctgggcaggt

SEQ ID NO: 24955 - DNA, 22 bp, synthetic construct
  misc_feature 1..22: note = chemically synthesized
  source 1..22: mol_type = other DNA
tctcgtctttctgggcaggtat

SEQ ID NO: 24956 - DNA, 22 bp, synthetic construct
  misc_feature 1..22: note = chemically synthesized
  source 1..22: mol_type = other DNA
ctcgtctttctgggcaggtatt

SEQ ID NO: 24957 - DNA, 22 bp, synthetic construct
  misc_feature 1..22: note = chemically synthesized
  source 1..22: mol_type = other DNA
tcgtctttctgggcaggtattg

SEQ ID NO: 24958 - DNA, 22 bp, synthetic construct
  misc_feature 1..22: note = chemically synthesized
  source 1..22: mol_type = other DNA
gtctttctgggcaggtattgtg

SEQ ID NO: 24959 - DNA, 22 bp, synthetic construct
  misc_feature 1..22: note = chemically synthesized
  source 1..22: mol_type = other DNA
tctgggcaggtattgtgaggac

SEQ ID NO: 24960 - DNA, 22 bp, synthetic construct
  misc_feature 1..22: note = chemically synthesized
  source 1..22: mol_type = other DNA
ctgggcaggtattgtgaggacg

SEQ ID NO: 24961 - DNA, 22 bp, synthetic construct
  misc_feature 1..22: note = chemically synthesized
  source 1..22: mol_type = other DNA
tgggcaggtattgtgaggacgg

SEQ ID NO: 24962 - DNA, 22 bp, synthetic construct
  misc_feature 1..22: note = chemically synthesized
  source 1..22: mol_type = other DNA
ggcaggtattgtgaggacggta

SEQ ID NO: 24963 - DNA, 22 bp, synthetic construct
  misc_feature 1..22: note = chemically synthesized
  source 1..22: mol_type = other DNA
tgaggacggtatctgccctgtc

SEQ ID NO: 24964 - DNA, 22 bp, synthetic construct
  misc_feature 1..22: note = chemically synthesized
  source 1..22: mol_type = other DNA
acagggcagataccgtcctcac

SEQ ID NO: 24965 - DNA, 22 bp, synthetic construct
  misc_feature 1..22: note = chemically synthesized
  source 1..22: mol_type = other DNA
acaatacctgcccagaaagacg

SEQ ID NO: 24966 - DNA, 22 bp, synthetic construct
  misc_feature 1..22: note = chemically synthesized
  source 1..22: mol_type = other DNA
cccagaaagacgagaaagagga

SEQ ID NO: 24967 - DNA, 22 bp, synthetic construct
  misc_feature 1..22: note = chemically synthesized
  source 1..22: mol_type = other DNA
ctccttccaccaggaattctgt

SEQ ID NO: 24968 - DNA, 22 bp, synthetic construct
  misc_feature 1..22: note = chemically synthesized
  source 1..22: mol_type = other DNA
cttccaccaggaattctgtggg

SEQ ID NO: 24969 - DNA, 22 bp, synthetic construct
  misc_feature 1..22: note = chemically synthesized
  source 1..22: mol_type = other DNA
ccaccaggaattctgtgggaag

SEQ ID NO: 24970 - DNA, 22 bp, synthetic construct
  misc_feature 1..22: note = chemically synthesized
  source 1..22: mol_type = other DNA
caccaggaattctgtgggaagc

SEQ ID NO: 24971 - DNA, 22 bp, synthetic construct
  misc_feature 1..22: note = chemically synthesized
  source 1..22: mol_type = other DNA
tgtgggaagcacataagatttc

SEQ ID NO: 24972 - DNA, 22 bp, synthetic construct
  misc_feature 1..22: note = chemically synthesized
  source 1..22: mol_type = other DNA
tgggaagcacataagatttcat

SEQ ID NO: 24973 - DNA, 22 bp, synthetic construct
  misc_feature 1..22: note = chemically synthesized
  source 1..22: mol_type = other DNA
catgctactagtttattcccaa

SEQ ID NO: 24974 - DNA, 22 bp, synthetic construct
  misc_feature 1..22: note = chemically synthesized
  source 1..22: mol_type = other DNA
atgctactagtttattcccaag

SEQ ID NO: 24975 - DNA, 22 bp, synthetic construct
  misc_feature 1..22: note = chemically synthesized
  source 1..22: mol_type = other DNA
ctagtttattcccaagagaagc

SEQ ID NO: 24976 - DNA, 22 bp, synthetic construct
  misc_feature 1..22: note = chemically synthesized
  source 1..22: mol_type = other DNA
gtttattcccaagagaagctac

SEQ ID NO: 24977 - DNA, 22 bp, synthetic construct
  misc_feature 1..22: note = chemically synthesized
  source 1..22: mol_type = other DNA
attcccaagagaagctaccaaa

SEQ ID NO: 24978 - DNA, 22 bp, synthetic construct
  misc_feature 1..22: note = chemically synthesized
  source 1..22: mol_type = other DNA
ttcccaagagaagctaccaaag

SEQ ID NO: 24979 - DNA, 22 bp, synthetic construct
  misc_feature 1..22: note = chemically synthesized
  source 1..22: mol_type = other DNA
ccaagagaagctaccaaagcct

SEQ ID NO: 24980 - DNA, 22 bp, synthetic construct
  misc_feature 1..22: note = chemically synthesized
  source 1..22: mol_type = other DNA
ccaaagcctggtaactctacca

SEQ ID NO: 24981 - DNA, 22 bp, synthetic construct
  misc_feature 1..22: note = chemically synthesized
  source 1..22: mol_type = other DNA
gtaactctaccaactctaactt

SEQ ID NO: 24982 - DNA, 22 bp, synthetic construct
  misc_feature 1..22: note = chemically synthesized
  source 1..22: mol_type = other DNA
taccaactctaacttttgtgcc

SEQ ID NO: 24983 - DNA, 22 bp, synthetic construct
  misc_feature 1..22: note = chemically synthesized
  source 1..22: mol_type = other DNA
ccaactctaacttttgtgcctg

SEQ ID NO: 24984 - DNA, 22 bp, synthetic construct
  misc_feature 1..22: note = chemically synthesized
  source 1..22: mol_type = other DNA
taacttttgtgcctgtaagttc

SEQ ID NO: 24985 - DNA, 22 bp, synthetic construct
  misc_feature 1..22: note = chemically synthesized
  source 1..22: mol_type = other DNA
acttttgtgcctgtaagttctc

SEQ ID NO: 24986 - DNA, 22 bp, synthetic construct
  misc_feature 1..22: note = chemically synthesized
  source 1..22: mol_type = other DNA
ttgtgcctgtaagttctcttct

SEQ ID NO: 24987 - DNA, 22 bp, synthetic construct
  misc_feature 1..22: note = chemically synthesized
  source 1..22: mol_type = other DNA
tgtgcctgtaagttctcttctc

SEQ ID NO: 24988 - DNA, 22 bp, synthetic construct
  misc_feature 1..22: note = chemically synthesized
  source 1..22: mol_type = other DNA
gtgcctgtaagttctcttctcc

SEQ ID NO: 24989 - DNA, 22 bp, synthetic construct
  misc_feature 1..22: note = chemically synthesized
  source 1..22: mol_type = other DNA
tgcctgtaagttctcttctcct

SEQ ID NO: 24990 - DNA, 22 bp, synthetic construct
  misc_feature 1..22: note = chemically synthesized
  source 1..22: mol_type = other DNA
taagttctcttctcctgggatt

SEQ ID NO: 24991 - DNA, 22 bp, synthetic construct
  misc_feature 1..22: note = chemically synthesized
  source 1..22: mol_type = other DNA
tcttctcctgggattacaacta

SEQ ID NO: 24992 - DNA, 22 bp, synthetic construct
  misc_feature 1..22: note = chemically synthesized
  source 1..22: mol_type = other DNA
ttctcctgggattacaactaat

SEQ ID NO: 24993 - DNA, 22 bp, synthetic construct
  misc_feature 1..22: note = chemically synthesized
  source 1..22: mol_type = other DNA
ctcctgggattacaactaattg

SEQ ID NO: 24994 - DNA, 22 bp, synthetic construct
  misc_feature 1..22: note = chemically synthesized
  source 1..22: mol_type = other DNA
tcctgggattacaactaattga

SEQ ID NO: 24995 - DNA, 22 bp, synthetic construct
  misc_feature 1..22: note = chemically synthesized
  source 1..22: mol_type = other DNA
ctgggattacaactaattgaaa

SEQ ID NO: 24996 - DNA, 22 bp, synthetic construct
  misc_feature 1..22: note = chemically synthesized
  source 1..22: mol_type = other DNA
ggattacaactaattgaaacag

SEQ ID NO: 24997 - DNA, 22 bp, synthetic construct
  misc_feature 1..22: note = chemically synthesized
  source 1..22: mol_type = other DNA
caactaattgaaacaggaattc

SEQ ID NO: 24998 - DNA, 22 bp, synthetic construct
  misc_feature 1..22: note = chemically synthesized
  source 1..22: mol_type = other DNA
attgaaacaggaattcaaagga

SEQ ID NO: 24999 - DNA, 22 bp, synthetic construct
  misc_feature 1..22: note = chemically synthesized
  source 1..22: mol_type = other DNA
aaacaggaattcaaaggagtct

SEQ ID NO: 25000 - DNA, 22 bp, synthetic construct
  misc_feature 1..22: note = chemically synthesized
  source 1..22: mol_type = other DNA
aaaggagtctcggaggactgta

SEQ ID NO: 25001 - DNA, 22 bp, synthetic construct
  misc_feature 1..22: note = chemically synthesized
  source 1..22: mol_type = other DNA
ggaggactgtaagaagaatgct

SEQ ID NO: 25002 - DNA, 22 bp, synthetic construct
  misc_feature 1..22: note = chemically synthesized
  source 1..22: mol_type = other DNA
taagaagaatgcttcgaggccg

SEQ ID NO: 25003 - DNA, 22 bp, synthetic construct
  misc_feature 1..22: note = chemically synthesized
  source 1..22: mol_type = other DNA
cgaggccgatccctctctgtaa

SEQ ID NO: 25004 - DNA, 22 bp, synthetic construct
  misc_feature 1..22: note = chemically synthesized
  source 1..22: mol_type = other DNA
gaggccgatccctctctgtaac

SEQ ID NO: 25005 - DNA, 22 bp, synthetic construct
  misc_feature 1..22: note = chemically synthesized
  source 1..22: mol_type = other DNA
tctgtaacatccctgggtgggc

SEQ ID NO: 25006 - DNA, 22 bp, synthetic construct
  misc_feature 1..22: note = chemically synthesized
  source 1..22: mol_type = other DNA
tgtaacatccctgggtgggctt

SEQ ID NO: 25007 - DNA, 22 bp, synthetic construct
  misc_feature 1..22: note = chemically synthesized
  source 1..22: mol_type = other DNA
taacatccctgggtgggcttcc

SEQ ID NO: 25008 - DNA, 22 bp, synthetic construct
  misc_feature 1..22: note = chemically synthesized
  source 1..22: mol_type = other DNA
ggtgggcttccccagtgggaag

SEQ ID NO: 25009 - DNA, 22 bp, synthetic construct
  misc_feature 1..22: note = chemically synthesized
  source 1..22: mol_type = other DNA
ccccagtgggaagtcgaagaac

SEQ ID NO: 25010 - DNA, 22 bp, synthetic construct
  misc_feature 1..22: note = chemically synthesized
  source 1..22: mol_type = other DNA
cccagtgggaagtcgaagaact

SEQ ID NO: 25011 - DNA, 22 bp, synthetic construct
  misc_feature 1..22: note = chemically synthesized
  source 1..22: mol_type = other DNA
cctgtggaggagttactgctct

SEQ ID NO: 25012 - DNA, 22 bp, synthetic construct
  misc_feature 1..22: note = chemically synthesized
  source 1..22: mol_type = other DNA
ctgtggaggagttactgctctt

SEQ ID NO: 25013 - DNA, 22 bp, synthetic construct
  misc_feature 1..22: note = chemically synthesized
  source 1..22: mol_type = other DNA
tggaggagttactgctctttga

SEQ ID NO: 25014 - DNA, 22 bp, synthetic construct
  misc_feature 1..22: note = chemically synthesized
  source 1..22: mol_type = other DNA
ctgctctttgaagttgcttggg

SEQ ID NO: 25015 - DNA, 22 bp, synthetic construct
  misc_feature 1..22: note = chemically synthesized
  source 1..22: mol_type = other DNA
ctctttgaagttgcttgggaag

SEQ ID NO: 25016 - DNA, 22 bp, synthetic construct
  misc_feature 1..22: note = chemically synthesized
  source 1..22: mol_type = other DNA
tttgaagttgcttgggaagtga

SEQ ID NO: 25017 - DNA, 22 bp, synthetic construct
  misc_feature 1..22: note = chemically synthesized
  source 1..22: mol_type = other DNA
tgaagttgcttgggaagtgacc

SEQ ID NO: 25018 - DNA, 22 bp, synthetic construct
  misc_feature 1..22: note = chemically synthesized
  source 1..22: mol_type = other DNA
gaagttgcttgggaagtgacca

SEQ ID NO: 25019 - DNA, 22 bp, synthetic construct
  misc_feature 1..22: note = chemically synthesized
  source 1..22: mol_type = other DNA
aagttgcttgggaagtgaccaa

SEQ ID NO: 25020 - DNA, 22 bp, synthetic construct
  misc_feature 1..22: note = chemically synthesized
  source 1..22: mol_type = other DNA
cttgggaagtgaccaataaagg

SEQ ID NO: 25021 - DNA, 22 bp, synthetic construct
  misc_feature 1..22: note = chemically synthesized
  source 1..22: mol_type = other DNA
gggaagtgaccaataaaggttt

SEQ ID NO: 25022 - DNA, 22 bp, synthetic construct
  misc_feature 1..22: note = chemically synthesized
  source 1..22: mol_type = other DNA
ggaagtgaccaataaaggtttg

SEQ ID NO: 25023 - DNA, 22 bp, synthetic construct
  misc_feature 1..22: note = chemically synthesized
  source 1..22: mol_type = other DNA
gtactgctcctgaaggtggatc

SEQ ID NO: 25024 - DNA, 22 bp, synthetic construct
  misc_feature 1..22: note = chemically synthesized
  source 1..22: mol_type = other DNA
tactgctcctgaaggtggatca

SEQ ID NO: 25025 - DNA, 22 bp, synthetic construct
  misc_feature 1..22: note = chemically synthesized
  source 1..22: mol_type = other DNA
ctcctgaaggtggatcagtaca

SEQ ID NO: 25026 - DNA, 22 bp, synthetic construct
  misc_feature 1..22: note = chemically synthesized
  source 1..22: mol_type = other DNA
ctgaaggtggatcagtacacct

SEQ ID NO: 25027 - DNA, 22 bp, synthetic construct
  misc_feature 1..22: note = chemically synthesized
  source 1..22: mol_type = other DNA
aaggtggatcagtacaccttca

SEQ ID NO: 25028 - DNA, 22 bp, synthetic construct
  misc_feature 1..22: note = chemically synthesized
  source 1..22: mol_type = other DNA
cactaggtgactgaggaatgta

SEQ ID NO: 25029 - DNA, 22 bp, synthetic construct
  misc_feature 1..22: note = chemically synthesized
  source 1..22: mol_type = other DNA
actaggtgactgaggaatgtag

SEQ ID NO: 25030 - DNA, 22 bp, synthetic construct
  misc_feature 1..22: note = chemically synthesized
  source 1..22: mol_type = other DNA
ggtgactgaggaatgtagagta

SEQ ID NO: 25031 - DNA, 22 bp, synthetic construct
  misc_feature 1..22: note = chemically synthesized
  source 1..22: mol_type = other DNA
aggaatgtagagtaagatttca

SEQ ID NO: 25032 - DNA, 22 bp, synthetic construct
  misc_feature 1..22: note = chemically synthesized
  source 1..22: mol_type = other DNA
cacagataactctctagtgata

SEQ ID NO: 25033 - DNA, 22 bp, synthetic construct
  misc_feature 1..22: note = chemically synthesized
  source 1..22: mol_type = other DNA
acagataactctctagtgataa

SEQ ID NO: 25034 - DNA, 22 bp, synthetic construct
  misc_feature 1..22: note = chemically synthesized
  source 1..22: mol_type = other DNA
tctagtgataaccaattgctag

SEQ ID NO: 25035 - DNA, 22 bp, synthetic construct
  misc_feature 1..22: note = chemically synthesized
  source 1..22: mol_type = other DNA
tagtgataaccaattgctagtg

SEQ ID NO: 25036 - DNA, 22 bp, synthetic construct
  misc_feature 1..22: note = chemically synthesized
  source 1..22: mol_type = other DNA
gtgataaccaattgctagtgag

SEQ ID NO: 25037 - DNA, 22 bp, synthetic construct
  misc_feature 1..22: note = chemically synthesized
  source 1..22: mol_type = other DNA
ctagtgagtgaggaaagcattt

SEQ ID NO: 25038 - DNA, 22 bp, synthetic construct
  misc_feature 1..22: note = chemically synthesized
  source 1..22: mol_type = other DNA
gtgagtgaggaaagcatttaaa

SEQ ID NO: 25039 - DNA, 22 bp, synthetic construct
  misc_feature 1..22: note = chemically synthesized
  source 1..22: mol_type = other DNA
aaacggaatatatatttaggct

SEQ ID NO: 25040 - DNA, 22 bp, synthetic construct
  misc_feature 1..22: note = chemically synthesized
  source 1..22: mol_type = other DNA
aacggaatatatatttaggcta

SEQ ID NO: 25041 - DNA, 22 bp, synthetic construct
  misc_feature 1..22: note = chemically synthesized
  source 1..22: mol_type = other DNA
aggctacatttaaccttgtcta

SEQ ID NO: 25042 - DNA, 22 bp, synthetic construct
  misc_feature 1..22: note = chemically synthesized
  source 1..22: mol_type = other DNA
ggctacatttaaccttgtctat

SEQ ID NO: 25043 - DNA, 22 bp, synthetic construct
  misc_feature 1..22: note = chemically synthesized
  source 1..22: mol_type = other DNA
catttaaccttgtctattacaa

SEQ ID NO: 25044 - DNA, 22 bp, synthetic construct
  misc_feature 1..22: note = chemically synthesized
  source 1..22: mol_type = other DNA
aaccttgtctattacaacaggc

SEQ ID NO: 25045 - DNA, 22 bp, synthetic construct
  misc_feature 1..22: note = chemically synthesized
  source 1..22: mol_type = other DNA
accttgtctattacaacaggct

SEQ ID NO: 25046 - DNA, 22 bp, synthetic construct
  misc_feature 1..22: note = chemically synthesized
  source 1..22: mol_type = other DNA
gtctattacaacaggctatgaa

SEQ ID NO: 25047 - DNA, 22 bp, synthetic construct
  misc_feature 1..22: note = chemically synthesized
  source 1..22: mol_type = other DNA
tctattacaacaggctatgaat

SEQ ID NO: 25048 - DNA, 22 bp, synthetic construct
  misc_feature 1..22: note = chemically synthesized
  source 1..22: mol_type = other DNA
ttacaacaggctatgaatacag

SEQ ID NO: 25049 - DNA, 22 bp, synthetic construct
  misc_feature 1..22: note = chemically synthesized
  source 1..22: mol_type = other DNA
caacaggctatgaatacagact

SEQ ID NO: 25050 - DNA, 22 bp, synthetic construct
  misc_feature 1..22: note = chemically synthesized
  source 1..22: mol_type = other DNA
tgaatacagacttgtgtatgtg

SEQ ID NO: 25051 - DNA, 22 bp, synthetic construct
  misc_feature 1..22: note = chemically synthesized
  source 1..22: mol_type = other DNA
gtgtatgtgttgaagagggaga

SEQ ID NO: 25052 - DNA, 22 bp, synthetic construct
  misc_feature 1..22: note = chemically synthesized
  source 1..22: mol_type = other DNA
tgtatgtgttgaagagggagaa

SEQ ID NO: 25053 - DNA, 22 bp, synthetic construct
  misc_feature 1..22: note = chemically synthesized
  source 1..22: mol_type = other DNA
aagagggagaaagttgaaaata

SEQ ID NO: 25054 - DNA, 22 bp, synthetic construct
  misc_feature 1..22: note = chemically synthesized
  source 1..22: mol_type = other DNA
aaaatattagccattgccatgg

SEQ ID NO: 25055 - DNA, 22 bp, synthetic construct
  misc_feature 1..22: note = chemically synthesized
  source 1..22: mol_type = other DNA
gccattgccatggaatgtgcat

SEQ ID NO: 25056 - DNA, 22 bp, synthetic construct
  misc_feature 1..22: note = chemically synthesized
  source 1..22: mol_type = other DNA
ccatggaatgtgcatttaaatt

SEQ ID NO: 25057 - DNA, 22 bp, synthetic construct
  misc_feature 1..22: note = chemically synthesized
  source 1..22: mol_type = other DNA
aaattaaaatttaaaatccata

SEQ ID NO: 25058 - DNA, 22 bp, synthetic construct
  misc_feature 1..22: note = chemically synthesized
  source 1..22: mol_type = other DNA
aattaaaatttaaaatccatat

SEQ ID NO: 25059 - DNA, 22 bp, synthetic construct
  misc_feature 1..22: note = chemically synthesized
  source 1..22: mol_type = other DNA
aaatttaaaatccatattatga

SEQ ID NO: 25060 - DNA, 22 bp, synthetic construct
  misc_feature 1..22: note = chemically synthesized
  source 1..22: mol_type = other DNA
aaaatccatattatgacaacat

SEQ ID NO: 25061 - DNA, 22 bp, synthetic construct
  misc_feature 1..22: note = chemically synthesized
  source 1..22: mol_type = other DNA
aaatccatattatgacaacata

SEQ ID NO: 25062 - DNA, 22 bp, synthetic construct
  misc_feature 1..22: note = chemically synthesized
  source 1..22: mol_type = other DNA
tgacaacatagaaataaaaagt

SEQ ID NO: 25063 - DNA, 22 bp, synthetic construct
  misc_feature 1..22: note = chemically synthesized
  source 1..22: mol_type = other DNA
atatttacattttttgttttaa

SEQ ID NO: 25064 - DNA, 22 bp, synthetic construct
  misc_feature 1..22: note = chemically synthesized
  source 1..22: mol_type = other DNA
acattttttgttttaaaatttt

SEQ ID NO: 25065 - DNA, 22 bp, synthetic construct
  misc_feature 1..22: note = chemically synthesized
  source 1..22: mol_type = other DNA
cattttttgttttaaaattttt

SEQ ID NO: 25066 - DNA, 22 bp, synthetic construct
  misc_feature 1..22: note = chemically synthesized
  source 1..22: mol_type = other DNA
tttgttttaaaatttttctcag

SEQ ID NO: 25067 - DNA, 22 bp, synthetic construct
  misc_feature 1..22: note = chemically synthesized
  source 1..22: mol_type = other DNA
ttgttttaaaatttttctcagc

SEQ ID NO: 25068 - DNA, 22 bp, synthetic construct
  misc_feature 1..22: note = chemically synthesized
  source 1..22: mol_type = other DNA
tgttttaaaatttttctcagca

SEQ ID NO: 25069 - DNA, 22 bp, synthetic construct
  misc_feature 1..22: note = chemically synthesized
  source 1..22: mol_type = other DNA
gttttaaaatttttctcagcaa

SEQ ID NO: 25070 - DNA, 22 bp, synthetic construct
  misc_feature 1..22: note = chemically synthesized
  source 1..22: mol_type = other DNA
ttttaaaatttttctcagcaaa

SEQ ID NO: 25071 - DNA, 22 bp, synthetic construct
  misc_feature 1..22: note = chemically synthesized
  source 1..22: mol_type = other DNA
taaaatttttctcagcaaaata

SEQ ID NO: 25072 - DNA, 22 bp, synthetic construct
  misc_feature 1..22: note = chemically synthesized
  source 1..22: mol_type = other DNA
aaaatttttctcagcaaaatag

SEQ ID NO: 25073 - DNA, 22 bp, synthetic construct
  misc_feature 1..22: note = chemically synthesized
  source 1..22: mol_type = other DNA
aaatttttctcagcaaaatagt

SEQ ID NO: 25074 - DNA, 22 bp, synthetic construct
  misc_feature 1..22: note = chemically synthesized
  source 1..22: mol_type = other DNA
ttctcagcaaaatagtataatt

SEQ ID NO: 25075 - DNA, 22 bp, synthetic construct
  misc_feature 1..22: note = chemically synthesized
  source 1..22: mol_type = other DNA
tctcagcaaaatagtataatta

SEQ ID NO: 25076 - DNA, 22 bp, synthetic construct
  misc_feature 1..22: note = chemically synthesized
  source 1..22: mol_type = other DNA
ctcagcaaaatagtataattaa

SEQ ID NO: 25077 - DNA, 22 bp, synthetic construct
  misc_feature 1..22: note = chemically synthesized
  source 1..22: mol_type = other DNA
tcagcaaaatagtataattaaa

SEQ ID NO: 25078 - DNA, 22 bp, synthetic construct
  misc_feature 1..22: note = chemically synthesized
  source 1..22: mol_type = other DNA
agcaaaatagtataattaaaca

SEQ ID NO: 25079 - DNA, 22 bp, synthetic construct
  misc_feature 1..22: note = chemically synthesized
  source 1..22: mol_type = other DNA
aacattttattttaggaagatg

SEQ ID NO: 25080 - DNA, 22 bp, synthetic construct
  misc_feature 1..22: note = chemically synthesized
  source 1..22: mol_type = other DNA
tattttaggaagatgtatatgt

SEQ ID NO: 25081 - DNA, 22 bp, synthetic construct
  misc_feature 1..22: note = chemically synthesized
  source 1..22: mol_type = other DNA
attttaggaagatgtatatgtg

SEQ ID NO: 25082 - DNA, 22 bp, synthetic construct
  misc_feature 1..22: note = chemically synthesized
  source 1..22: mol_type = other DNA
ttttaggaagatgtatatgtga

SEQ ID NO: 25083 - DNA, 22 bp, synthetic construct
  misc_feature 1..22: note = chemically synthesized
  source 1..22: mol_type = other DNA
taggaagatgtatatgtgatta

SEQ ID NO: 25084 - DNA, 22 bp, synthetic construct
  misc_feature 1..22: note = chemically synthesized
  source 1..22: mol_type = other DNA
aggaagatgtatatgtgattag

SEQ ID NO: 25085 - DNA, 22 bp, synthetic construct
  misc_feature 1..22: note = chemically synthesized
  source 1..22: mol_type = other DNA
ggaagatgtatatgtgattaga

SEQ ID NO: 25086 - DNA, 22 bp, synthetic construct
  misc_feature 1..22: note = chemically synthesized
  source 1..22: mol_type = other DNA
gaaccagttggaaacctcaact

SEQ ID NO: 25087 - DNA, 22 bp, synthetic construct
  misc_feature 1..22: note = chemically synthesized
  source 1..22: mol_type = other DNA
gaaacctcaactctacattctg

SEQ ID NO: 25088 - DNA, 22 bp, synthetic construct
  misc_feature 1..22: note = chemically synthesized
  source 1..22: mol_type = other DNA
aactctacattctgttagtaat

SEQ ID NO: 25089 - DNA, 22 bp, synthetic construct
  misc_feature 1..22: note = chemically synthesized
  source 1..22: mol_type = other DNA
tacattctgttagtaattatat

SEQ ID NO: 25090 - DNA, 22 bp, synthetic construct
  misc_feature 1..22: note = chemically synthesized
  source 1..22: mol_type = other DNA
cattctgttagtaattatatga

SEQ ID NO: 25091 - DNA, 22 bp, synthetic construct
  misc_feature 1..22: note = chemically synthesized
  source 1..22: mol_type = other DNA
tgttagtaattatatgaaatgc

SEQ ID NO: 25092 - DNA, 22 bp, synthetic construct
  misc_feature 1..22: note = chemically synthesized
  source 1..22: mol_type = other DNA
ttagtaattatatgaaatgctt

SEQ ID NO: 25093 - DNA, 22 bp, synthetic construct
  misc_feature 1..22: note = chemically synthesized
  source 1..22: mol_type = other DNA
gtaattatatgaaatgcttaag

SEQ ID NO: 25094 - DNA, 22 bp, synthetic construct
  misc_feature 1..22: note = chemically synthesized
  source 1..22: mol_type = other DNA
tatgaaatgcttaagaatgttt

SEQ ID NO: 25095 - DNA, 22 bp, synthetic construct
  misc_feature 1..22: note = chemically synthesized
  source 1..22: mol_type = other DNA
aagaatgtttcatattcacaat

SEQ ID NO: 25096 - DNA, 22 bp, synthetic construct
  misc_feature 1..22: note = chemically synthesized
  source 1..22: mol_type = other DNA
agaatgtttcatattcacaatt

SEQ ID NO: 25097 - DNA, 22 bp, synthetic construct
  misc_feature 1..22: note = chemically synthesized
  source 1..22: mol_type = other DNA
catattcacaattagcttggaa

SEQ ID NO: 25098 - DNA, 22 bp, synthetic construct
  misc_feature 1..22: note = chemically synthesized
  source 1..22: mol_type = other DNA
atattcacaattagcttggaat

SEQ ID NO: 25099 - DNA, 22 bp, synthetic construct
  misc_feature 1..22: note = chemically synthesized
  source 1..22: mol_type = other DNA
acaattagcttggaattaatgt

SEQ ID NO: 25100 - DNA, 22 bp, synthetic construct
  misc_feature 1..22: note = chemically synthesized
  source 1..22: mol_type = other DNA
gcttggaattaatgttttaatt

SEQ ID NO: 25101 - DNA, 22 bp, synthetic construct
  misc_feature 1..22: note = chemically synthesized
  source 1..22: mol_type = other DNA
ggaattaatgttttaattcagg

SEQ ID NO: 25102 - DNA, 22 bp, synthetic construct
  misc_feature 1..22: note = chemically synthesized
  source 1..22: mol_type = other DNA
gaattaatgttttaattcagga

SEQ ID NO: 25103 - DNA, 22 bp, synthetic construct
  misc_feature 1..22: note = chemically synthesized
  source 1..22: mol_type = other DNA
atgttttaattcaggagcttct

SEQ ID NO: 25104 - DNA, 22 bp, synthetic construct
  misc_feature 1..22: note = chemically synthesized
  source 1..22: mol_type = other DNA
taattcaggagcttctcaaaag

SEQ ID NO: 25105 - DNA, 22 bp, synthetic construct
  misc_feature 1..22: note = chemically synthesized
  source 1..22: mol_type = other DNA
aattcaggagcttctcaaaagg

SEQ ID NO: 25106 - DNA, 22 bp, synthetic construct
  misc_feature 1..22: note = chemically synthesized
  source 1..22: mol_type = other DNA
attcaggagcttctcaaaaggc

SEQ ID NO: 25107 - DNA, 22 bp, synthetic construct
  misc_feature 1..22: note = chemically synthesized
  source 1..22: mol_type = other DNA
aggagcttctcaaaaggcaaaa

SEQ ID NO: 25108 - DNA, 22 bp, synthetic construct
  misc_feature 1..22: note = chemically synthesized
  source 1..22: mol_type = other DNA
ctcaaaaggcaaaatactgtgc

SEQ ID NO: 25109 - DNA, 22 bp, synthetic construct
  misc_feature 1..22: note = chemically synthesized
  source 1..22: mol_type = other DNA
tcaaaaggcaaaatactgtgct

SEQ ID NO: 25110 - DNA, 22 bp, synthetic construct
  misc_feature 1..22: note = chemically synthesized
  source 1..22: mol_type = other DNA
aaaaggcaaaatactgtgctcc

SEQ ID NO: 25111 - DNA, 22 bp, synthetic construct
  misc_feature 1..22: note = chemically synthesized
  source 1..22: mol_type = other DNA
tgctcctttcagaatgaaagta

SEQ ID NO: 25112 - DNA, 22 bp, synthetic construct
  misc_feature 1..22: note = chemically synthesized
  source 1..22: mol_type = other DNA
ctttcagaatgaaagtaatttt

SEQ ID NO: 25113 - DNA, 22 bp, synthetic construct
  misc_feature 1..22: note = chemically synthesized
  source 1..22: mol_type = other DNA
tcagaatgaaagtaattttttt

SEQ ID NO: 25114 - DNA, 22 bp, synthetic construct
  misc_feature 1..22: note = chemically synthesized
  source 1..22: mol_type = other DNA
cagaatgaaagtaatttttttc

SEQ ID NO: 25115 - DNA, 22 bp, synthetic construct
  misc_feature 1..22: note = chemically synthesized
  source 1..22: mol_type = other DNA
agaatgaaagtaatttttttct

SEQ ID NO: 25116 - DNA, 22 bp, synthetic construct
  misc_feature 1..22: note = chemically synthesized
  source 1..22: mol_type = other DNA
ttttcttcaatgctatgcttat

SEQ ID NO: 25117 - DNA, 22 bp, synthetic construct
  misc_feature 1..22: note = chemically synthesized
  source 1..22: mol_type = other DNA
tttcttcaatgctatgcttatg

SEQ ID NO: 25118 - DNA, 22 bp, synthetic construct
  misc_feature 1..22: note = chemically synthesized
  source 1..22: mol_type = other DNA
ttcttcaatgctatgcttatgt

SEQ ID NO: 25119 - DNA, 22 bp, synthetic construct
  misc_feature 1..22: note = chemically synthesized
  source 1..22: mol_type = other DNA
tcttcaatgctatgcttatgta

SEQ ID NO: 25120 - DNA, 22 bp, synthetic construct
  misc_feature 1..22: note = chemically synthesized
  source 1..22: mol_type = other DNA
cttcaatgctatgcttatgtag

SEQ ID NO: 25121 - DNA, 22 bp, synthetic construct
  misc_feature 1..22: note = chemically synthesized
  source 1..22: mol_type = other DNA
ttcaatgctatgcttatgtagg

SEQ ID NO: 25122 - DNA, 22 bp, synthetic construct
  misc_feature 1..22: note = chemically synthesized
  source 1..22: mol_type = other DNA
caatgctatgcttatgtaggaa

SEQ ID NO: 25123 - DNA, 22 bp, synthetic construct
  misc_feature 1..22: note = chemically synthesized
  source 1..22: mol_type = other DNA
aatgctatgcttatgtaggaat

SEQ ID NO: 25124 - DNA, 22 bp, synthetic construct
  misc_feature 1..22: note = chemically synthesized
  source 1..22: mol_type = other DNA
tgcttatgtaggaattataaaa

SEQ ID NO: 25125 - DNA, 22 bp, synthetic construct
  misc_feature 1..22: note = chemically synthesized
  source 1..22: mol_type = other DNA
atgtaggaattataaaataaag

SEQ ID NO: 25126 - DNA, 22 bp, synthetic construct
  misc_feature 1..22: note = chemically synthesized
  source 1..22: mol_type = other DNA
tgtaggaattataaaataaaga

SEQ ID NO: 25127 - DNA, 22 bp, synthetic construct
  misc_feature 1..22: note = chemically synthesized
  source 1..22: mol_type = other DNA
taaaataaagaaaatcaaattg

SEQ ID NO: 25128 - DNA, 22 bp, synthetic construct
  misc_feature 1..22: note = chemically synthesized
  source 1..22: mol_type = other DNA
ataaaacaatttgcgagtgagg

SEQ ID NO: 25129 - DNA, 22 bp, synthetic construct
  misc_feature 1..22: note = chemically synthesized
  source 1..22: mol_type = other DNA
gcgagtgaggtataacctcatc

SEQ ID NO: 25130 - DNA, 22 bp, synthetic construct
  misc_feature 1..22: note = chemically synthesized
  source 1..22: mol_type = other DNA
cgagtgaggtataacctcatct

SEQ ID NO: 25131 - DNA, 22 bp, synthetic construct
  misc_feature 1..22: note = chemically synthesized
  source 1..22: mol_type = other DNA
atctgtgctgggtaagagaagg

SEQ ID NO: 25132 - DNA, 22 bp, synthetic construct
  misc_feature 1..22: note = chemically synthesized
  source 1..22: mol_type = other DNA
tgctgggtaagagaaggcaagg

SEQ ID NO: 25133 - DNA, 22 bp, synthetic construct
  misc_feature 1..22: note = chemically synthesized
  source 1..22: mol_type = other DNA
ggtaagagaaggcaaggtagag

SEQ ID NO: 25134 - DNA, 22 bp, synthetic construct
  misc_feature 1..22: note = chemically synthesized
  source 1..22: mol_type = other DNA
tgaaaataaagacatctgtaaa

SEQ ID NO: 25135 - DNA, 22 bp, synthetic construct
  misc_feature 1..22: note = chemically synthesized
  source 1..22: mol_type = other DNA
gaaaataaagacatctgtaaaa

SEQ ID NO: 25136 - DNA, 22 bp, synthetic construct
  misc_feature 1..22: note = chemically synthesized
  source 1..22: mol_type = other DNA
aaaataaagacatctgtaaaat

SEQ ID NO: 25137 - DNA, 22 bp, synthetic construct
  misc_feature 1..22: note = chemically synthesized
  source 1..22: mol_type = other DNA
taaaattataaaacaattcctt

SEQ ID NO: 25138 - DNA, 22 bp, synthetic construct
  misc_feature 1..22: note = chemically synthesized
  source 1..22: mol_type = other DNA
taaaacaattccttgtgggttt

SEQ ID NO: 25139 - DNA, 22 bp, synthetic construct
  misc_feature 1..22: note = chemically synthesized
  source 1..22: mol_type = other DNA
cttgtgggtttatactctctag

SEQ ID NO: 25140 - DNA, 22 bp, synthetic construct
  misc_feature 1..22: note = chemically synthesized
  source 1..22: mol_type = other DNA
gtgggtttatactctctagttt

SEQ ID NO: 25141 - DNA, 22 bp, synthetic construct
  misc_feature 1..22: note = chemically synthesized
  source 1..22: mol_type = other DNA
tgggtttatactctctagttta

SEQ ID NO: 25142 - DNA, 22 bp, synthetic construct
  misc_feature 1..22: note = chemically synthesized
  source 1..22: mol_type = other DNA
atactctctagtttaaaagtgt

SEQ ID NO: 25143 - DNA, 22 bp, synthetic construct
  misc_feature 1..22: note = chemically synthesized
  source 1..22: mol_type = other DNA
tactctctagtttaaaagtgtc

SEQ ID NO: 25144 - DNA, 22 bp, synthetic construct
  misc_feature 1..22: note = chemically synthesized
  source 1..22: mol_type = other DNA
tctagtttaaaagtgtcaagac

SEQ ID NO: 25145 - DNA, 22 bp, synthetic construct
  misc_feature 1..22: note = chemically synthesized
  source 1..22: mol_type = other DNA
tagtttaaaagtgtcaagacta

SEQ ID NO: 25146 - DNA, 22 bp, synthetic construct
  misc_feature 1..22: note = chemically synthesized
  source 1..22: mol_type = other DNA
gtttaaaagtgtcaagactatt

SEQ ID NO: 25147 - DNA, 22 bp, synthetic construct
  misc_feature 1..22: note = chemically synthesized
  source 1..22: mol_type = other DNA
aaaagtgtcaagactattgaag

SEQ ID NO: 25148 - DNA, 22 bp, synthetic construct
  misc_feature 1..22: note = chemically synthesized
  source 1..22: mol_type = other DNA
aaagtgtcaagactattgaagg

SEQ ID NO: 25149 - DNA, 22 bp, synthetic construct
  misc_feature 1..22: note = chemically synthesized
  source 1..22: mol_type = other DNA
ttgaaggaacattagcaaagaa

SEQ ID NO: 25150 - DNA, 22 bp, synthetic construct
  misc_feature 1..22: note = chemically synthesized
  source 1..22: mol_type = other DNA
aaggaacattagcaaagaaaaa

SEQ ID NO: 25151 - DNA, 22 bp, synthetic construct
  misc_feature 1..22: note = chemically synthesized
  source 1..22: mol_type = other DNA
gcaaagaaaaagtcatggtttt

SEQ ID NO: 25152 - DNA, 22 bp, synthetic construct
  misc_feature 1..22: note = chemically synthesized
  source 1..22: mol_type = other DNA
tgaaggctgagttcctcaagat

SEQ ID NO: 25153 - DNA, 22 bp, synthetic construct
  misc_feature 1..22: note = chemically synthesized
  source 1..22: mol_type = other DNA
gaaggctgagttcctcaagatc

SEQ ID NO: 25154 - DNA, 22 bp, synthetic construct
  misc_feature 1..22: note = chemically synthesized
  source 1..22: mol_type = other DNA
aaggctgagttcctcaagatct

SEQ ID NO: 25155 - DNA, 22 bp, synthetic construct
  misc_feature 1..22: note = chemically synthesized
  source 1..22: mol_type = other DNA
agttcctcaagatcttgaagaa

SEQ ID NO: 25156 - DNA, 22 bp, synthetic construct
  misc_feature 1..22: note = chemically synthesized
  source 1..22: mol_type = other DNA
ctcaagatcttgaagaatcaag

SEQ ID NO: 25157 - DNA, 22 bp, synthetic construct
  misc_feature 1..22: note = chemically synthesized
  source 1..22: mol_type = other DNA
aagatcttgaagaatcaagcca

SEQ ID NO: 25158 - DNA, 22 bp, synthetic construct
  misc_feature 1..22: note = chemically synthesized
  source 1..22: mol_type = other DNA
gaagaatcaagccaactgattg

SEQ ID NO: 25159 - DNA, 22 bp, synthetic construct
  misc_feature 1..22: note = chemically synthesized
  source 1..22: mol_type = other DNA
aagaatcaagccaactgattgc

SEQ ID NO: 25160 - DNA, 22 bp, synthetic construct
  misc_feature 1..22: note = chemically synthesized
  source 1..22: mol_type = other DNA
attgctgggtaaatggcagtga

SEQ ID NO: 25161 - DNA, 22 bp, synthetic construct
  misc_feature 1..22: note = chemically synthesized
  source 1..22: mol_type = other DNA
ctgggtaaatggcagtgatgac

SEQ ID NO: 25162 - DNA, 22 bp, synthetic construct
  misc_feature 1..22: note = chemically synthesized
  source 1..22: mol_type = other DNA
ggtaaatggcagtgatgacttg

SEQ ID NO: 25163 - DNA, 22 bp, synthetic construct
  misc_feature 1..22: note = chemically synthesized
  source 1..22: mol_type = other DNA
gtgtgatttaaacgatctgaaa

SEQ ID NO: 25164 - DNA, 22 bp, synthetic construct
  misc_feature 1..22: note = chemically synthesized
  source 1..22: mol_type = other DNA
tgtgatttaaacgatctgaaat

SEQ ID NO: 25165 - DNA, 22 bp, synthetic construct
  misc_feature 1..22: note = chemically synthesized
  source 1..22: mol_type = other DNA
aaacgatctgaaattatgtcat

SEQ ID NO: 25166 - DNA, 22 bp, synthetic construct
  misc_feature 1..22: note = chemically synthesized
  source 1..22: mol_type = other DNA
aacgatctgaaattatgtcatg

SEQ ID NO: 25167 - DNA, 22 bp, synthetic construct
  misc_feature 1..22: note = chemically synthesized
  source 1..22: mol_type = other DNA
aaattatgtcatgtgttgtgat

SEQ ID NO: 25168 - DNA, 22 bp, synthetic construct
  misc_feature 1..22: note = chemically synthesized
  source 1..22: mol_type = other DNA
tgtcatgtgttgtgatatataa

SEQ ID NO: 25169 - DNA, 22 bp, synthetic construct
  misc_feature 1..22: note = chemically synthesized
  source 1..22: mol_type = other DNA
tgatatataacacatttatttt

SEQ ID NO: 25170 - DNA, 22 bp, synthetic construct
  misc_feature 1..22: note = chemically synthesized
  source 1..22: mol_type = other DNA
atttttcattttgtgtttacta

SEQ ID NO: 25171 - DNA, 22 bp, synthetic construct
  misc_feature 1..22: note = chemically synthesized
  source 1..22: mol_type = other DNA
tttttcattttgtgtttactat

SEQ ID NO: 25172 - DNA, 22 bp, synthetic construct
  misc_feature 1..22: note = chemically synthesized
  source 1..22: mol_type = other DNA
ttcattttgtgtttactatttc

SEQ ID NO: 25173 - DNA, 22 bp, synthetic construct
  misc_feature 1..22: note = chemically synthesized
  source 1..22: mol_type = other DNA
tcattttgtgtttactatttca

SEQ ID NO: 25174 - DNA, 22 bp, synthetic construct
  misc_feature 1..22: note = chemically synthesized
  source 1..22: mol_type = other DNA
cattttgtgtttactatttcat

SEQ ID NO: 25175 - DNA, 22 bp, synthetic construct
  misc_feature 1..22: note = chemically synthesized
  source 1..22: mol_type = other DNA
attttgtgtttactatttcatg

SEQ ID NO: 25176 - DNA, 22 bp, synthetic construct
  misc_feature 1..22: note = chemically synthesized
  source 1..22: mol_type = other DNA
tgtgtttactatttcatgtcta

SEQ ID NO: 25177 - DNA, 22 bp, synthetic construct
  misc_feature 1..22: note = chemically synthesized
  source 1..22: mol_type = other DNA
gtgtttactatttcatgtctat

SEQ ID NO: 25178 - DNA, 22 bp, synthetic construct
  misc_feature 1..22: note = chemically synthesized
  source 1..22: mol_type = other DNA
tgtttactatttcatgtctatt

SEQ ID NO: 25179 - DNA, 22 bp, synthetic construct
  misc_feature 1..22: note = chemically synthesized
  source 1..22: mol_type = other DNA
actatttcatgtctattacagt

SEQ ID NO: 25180 - DNA, 22 bp, synthetic construct
  misc_feature 1..22: note = chemically synthesized
  source 1..22: mol_type = other DNA
ctatttcatgtctattacagta

SEQ ID NO: 25181 - DNA, 22 bp, synthetic construct
  misc_feature 1..22: note = chemically synthesized
  source 1..22: mol_type = other DNA
tttcatgtctattacagtaatc

SEQ ID NO: 25182 - DNA, 22 bp, synthetic construct
  misc_feature 1..22: note = chemically synthesized
  source 1..22: mol_type = other DNA
catgtctattacagtaatctaa

SEQ ID NO: 25183 - DNA, 22 bp, synthetic construct
  misc_feature 1..22: note = chemically synthesized
  source 1..22: mol_type = other DNA
atgtctattacagtaatctaaa

SEQ ID NO: 25184 - DNA, 22 bp, synthetic construct
  misc_feature 1..22: note = chemically synthesized
  source 1..22: mol_type = other DNA
ttacagtaatctaaaggatctg

SEQ ID NO: 25185 - DNA, 22 bp, synthetic construct
  misc_feature 1..22: note = chemically synthesized
  source 1..22: mol_type = other DNA
cagtaatctaaaggatctgaaa

SEQ ID NO: 25186 - DNA, 22 bp, synthetic construct
  misc_feature 1..22: note = chemically synthesized
  source 1..22: mol_type = other DNA
aaggatctgaaataataaccag

SEQ ID NO: 25187 - DNA, 22 bp, synthetic construct
  misc_feature 1..22: note = chemically synthesized
  source 1..22: mol_type = other DNA
aaataataaccagaatgtgata

SEQ ID NO: 25188 - DNA, 22 bp, synthetic construct
  misc_feature 1..22: note = chemically synthesized
  source 1..22: mol_type = other DNA
cttccttcttttggctaatcag

SEQ ID NO: 25189 - DNA, 22 bp, synthetic construct
  misc_feature 1..22: note = chemically synthesized
  source 1..22: mol_type = other DNA
ccttcttttggctaatcagagc

SEQ ID NO: 25190 - DNA, 22 bp, synthetic construct
  misc_feature 1..22: note = chemically synthesized
  source 1..22: mol_type = other DNA
cttcttttggctaatcagagcc

SEQ ID NO: 25191 - DNA, 22 bp, synthetic construct
  misc_feature 1..22: note = chemically synthesized
  source 1..22: mol_type = other DNA
cttttggctaatcagagccagc

SEQ ID NO: 25192 - DNA, 22 bp, synthetic construct
  misc_feature 1..22: note = chemically synthesized
  source 1..22: mol_type = other DNA
ttttggctaatcagagccagca

SEQ ID NO: 25193 - DNA, 22 bp, synthetic construct
  misc_feature 1..22: note = chemically synthesized
  source 1..22: mol_type = other DNA
ttggctaatcagagccagcata

SEQ ID NO: 25194 - DNA, 22 bp, synthetic construct
  misc_feature 1..22: note = chemically synthesized
  source 1..22: mol_type = other DNA
tggctaatcagagccagcataa

SEQ ID NO: 25195 - DNA, 22 bp, synthetic construct
  misc_feature 1..22: note = chemically synthesized
  source 1..22: mol_type = other DNA
ggctaatcagagccagcataat

SEQ ID NO: 25196 - DNA, 22 bp, synthetic construct
  misc_feature 1..22: note = chemically synthesized
  source 1..22: mol_type = other DNA
gctaatcagagccagcataatc

SEQ ID NO: 25197 - DNA, 22 bp, synthetic construct
  misc_feature 1..22: note = chemically synthesized
  source 1..22: mol_type = other DNA
atcagagccagcataatctcaa

SEQ ID NO: 25198 - DNA, 22 bp, synthetic construct
  misc_feature 1..22: note = chemically synthesized
  source 1..22: mol_type = other DNA
aaaattaaatgcattatatatg

SEQ ID NO: 25199 - DNA, 22 bp, synthetic construct
  misc_feature 1..22: note = chemically synthesized
  source 1..22: mol_type = other DNA
aatgcattatatatggcatgca

SEQ ID NO: 25200 - DNA, 22 bp, synthetic construct
  misc_feature 1..22: note = chemically synthesized
  source 1..22: mol_type = other DNA
tatatggcatgcattctgaaaa

SEQ ID NO: 25201 - DNA, 22 bp, synthetic construct
  misc_feature 1..22: note = chemically synthesized
  source 1..22: mol_type = other DNA
tgaaaaatcagaattcacctta

SEQ ID NO: 25202 - DNA, 22 bp, synthetic construct
  misc_feature 1..22: note = chemically synthesized
  source 1..22: mol_type = other DNA
aaaaatcagaattcaccttata

SEQ ID NO: 25203 - DNA, 22 bp, synthetic construct
  misc_feature 1..22: note = chemically synthesized
  source 1..22: mol_type = other DNA
accttatactaactgttcaaag

SEQ ID NO: 25204 - DNA, 22 bp, synthetic construct
  misc_feature 1..22: note = chemically synthesized
  source 1..22: mol_type = other DNA
atactaactgttcaaagttctc

SEQ ID NO: 25205 - DNA, 22 bp, synthetic construct
  misc_feature 1..22: note = chemically synthesized
  source 1..22: mol_type = other DNA
tactaactgttcaaagttctcg

SEQ ID NO: 25206 - DNA, 22 bp, synthetic construct
  misc_feature 1..22: note = chemically synthesized
  source 1..22: mol_type = other DNA
actgttcaaagttctcgtgtgt

SEQ ID NO: 25207 - DNA, 22 bp, synthetic construct
  misc_feature 1..22: note = chemically synthesized
  source 1..22: mol_type = other DNA
ttcaaagttctcgtgtgtatgc

SEQ ID NO: 25208 - DNA, 22 bp, synthetic construct
  misc_feature 1..22: note = chemically synthesized
  source 1..22: mol_type = other DNA
aaagttctcgtgtgtatgcatt

SEQ ID NO: 25209 - DNA, 22 bp, synthetic construct
  misc_feature 1..22: note = chemically synthesized
  source 1..22: mol_type = other DNA
tcgtgtgtatgcattcataaaa

SEQ ID NO: 25210 - DNA, 22 bp, synthetic construct
  misc_feature 1..22: note = chemically synthesized
  source 1..22: mol_type = other DNA
gtgtgtatgcattcataaaatc

SEQ ID NO: 25211 - DNA, 22 bp, synthetic construct
  misc_feature 1..22: note = chemically synthesized
  source 1..22: mol_type = other DNA
ataaaatcaaaattaaaagtca

SEQ ID NO: 25212 - DNA, 22 bp, synthetic construct
  misc_feature 1..22: note = chemically synthesized
  source 1..22: mol_type = other DNA
aaagtcaattttgcctatgtag

SEQ ID NO: 25213 - DNA, 22 bp, synthetic construct
  misc_feature 1..22: note = chemically synthesized
  source 1..22: mol_type = other DNA
tgcctatgtagaagtggacaga

SEQ ID NO: 25214 - DNA, 22 bp, synthetic construct
  misc_feature 1..22: note = chemically synthesized
  source 1..22: mol_type = other DNA
gcctatgtagaagtggacagaa

SEQ ID NO: 25215 - DNA, 22 bp, synthetic construct
  misc_feature 1..22: note = chemically synthesized
  source 1..22: mol_type = other DNA
cctatgtagaagtggacagaat

SEQ ID NO: 25216 - DNA, 22 bp, synthetic construct
  misc_feature 1..22: note = chemically synthesized
  source 1..22: mol_type = other DNA
tgtagaagtggacagaatgcat

SEQ ID NO: 25217 - DNA, 22 bp, synthetic construct
  misc_feature 1..22: note = chemically synthesized
  source 1..22: mol_type = other DNA
attctctgtagtttagtgagaa

SEQ ID NO: 25218 - DNA, 22 bp, synthetic construct
  misc_feature 1..22: note = chemically synthesized
  source 1..22: mol_type = other DNA
ttctctgtagtttagtgagaaa

SEQ ID NO: 25219 - DNA, 22 bp, synthetic construct
  misc_feature 1..22: note = chemically synthesized
  source 1..22: mol_type = other DNA
tctgtagtttagtgagaaagaa

SEQ ID NO: 25220 - DNA, 22 bp, synthetic construct
  misc_feature 1..22: note = chemically synthesized
  source 1..22: mol_type = other DNA
tgtagtttagtgagaaagaatc

SEQ ID NO: 25221 - DNA, 22 bp, synthetic construct
  misc_feature 1..22: note = chemically synthesized
  source 1..22: mol_type = other DNA
tagtttagtgagaaagaatcta

SEQ ID NO: 25222 - DNA, 22 bp, synthetic construct
  misc_feature 1..22: note = chemically synthesized
  source 1..22: mol_type = other DNA
agtgagaaagaatctaggagga

SEQ ID NO: 25223 - DNA, 22 bp, synthetic construct
  misc_feature 1..22: note = chemically synthesized
  source 1..22: mol_type = other DNA
gtgagaaagaatctaggaggac

SEQ ID NO: 25224 - DNA, 22 bp, synthetic construct
  misc_feature 1..22: note = chemically synthesized
  source 1..22: mol_type = other DNA
ggaggacagaaaccttattaca

SEQ ID NO: 25225 - DNA, 22 bp, synthetic construct
  misc_feature 1..22: note = chemically synthesized
  source 1..22: mol_type = other DNA
attacagagaagtgaagtattt

SEQ ID NO: 25226 - DNA, 22 bp, synthetic construct
  misc_feature 1..22: note = chemically synthesized
  source 1..22: mol_type = other DNA
ttacagagaagtgaagtatttt

SEQ ID NO: 25227 - DNA, 22 bp, synthetic construct
  misc_feature 1..22: note = chemically synthesized
  source 1..22: mol_type = other DNA
cagagaagtgaagtattttatg

SEQ ID NO: 25228 - DNA, 22 bp, synthetic construct
  misc_feature 1..22: note = chemically synthesized
  source 1..22: mol_type = other DNA
tatgtgtacctgtttctgttgt

SEQ ID NO: 25229 - DNA, 22 bp, synthetic construct
  misc_feature 1..22: note = chemically synthesized
  source 1..22: mol_type = other DNA
atgtgtacctgtttctgttgtt

SEQ ID NO: 25230 - DNA, 22 bp, synthetic construct
  misc_feature 1..22: note = chemically synthesized
  source 1..22: mol_type = other DNA
tgtgtacctgtttctgttgttt

SEQ ID NO: 25231 - DNA, 22 bp, synthetic construct
  misc_feature 1..22: note = chemically synthesized
  source 1..22: mol_type = other DNA
tttctgttgtttctttttaaat

SEQ ID NO: 25232 - DNA, 22 bp, synthetic construct
  misc_feature 1..22: note = chemically synthesized
  source 1..22: mol_type = other DNA
ctgttgtttctttttaaattat

SEQ ID NO: 25233 - DNA, 22 bp, synthetic construct
  misc_feature 1..22: note = chemically synthesized
  source 1..22: mol_type = other DNA
tgttgtttctttttaaattatt

SEQ ID NO: 25234 - DNA, 22 bp, synthetic construct
  misc_feature 1..22: note = chemically synthesized
  source 1..22: mol_type = other DNA
ttgtttctttttaaattatttt

SEQ ID NO: 25235 - DNA, 22 bp, synthetic construct
  misc_feature 1..22: note = chemically synthesized
  source 1..22: mol_type = other DNA
tttctttttaaattattttgta

SEQ ID NO: 25236 - DNA, 22 bp, synthetic construct
  misc_feature 1..22: note = chemically synthesized
  source 1..22: mol_type = other DNA
ctttttaaattattttgtattc

SEQ ID NO: 25237 - DNA, 22 bp, synthetic construct
  misc_feature 1..22: note = chemically synthesized
  source 1..22: mol_type = other DNA
tttttaaattattttgtattct

SEQ ID NO: 25238 - DNA, 22 bp, synthetic construct
  misc_feature 1..22: note = chemically synthesized
  source 1..22: mol_type = other DNA
tttaaattattttgtattcttt

SEQ ID NO: 25239 - DNA, 22 bp, synthetic construct
  misc_feature 1..22: note = chemically synthesized
  source 1..22: mol_type = other DNA
ttaaattattttgtattctttt

SEQ ID NO: 25240 - DNA, 22 bp, synthetic construct
  misc_feature 1..22: note = chemically synthesized
  source 1..22: mol_type = other DNA
taaattattttgtattcttttc

SEQ ID NO: 25241 - DNA, 22 bp, synthetic construct
  misc_feature 1..22: note = chemically synthesized
  source 1..22: mol_type = other DNA
aaattattttgtattcttttcc

SEQ ID NO: 25242 - DNA, 22 bp, synthetic construct
  misc_feature 1..22: note = chemically synthesized
  source 1..22: mol_type = other DNA
aattattttgtattcttttcct

SEQ ID NO: 25243 - DNA, 22 bp, synthetic construct
  misc_feature 1..22: note = chemically synthesized
  source 1..22: mol_type = other DNA
ttttgtattcttttcctcagag

SEQ ID NO: 25244 - DNA, 22 bp, synthetic construct
  misc_feature 1..22: note = chemically synthesized
  source 1..22: mol_type = other DNA
tgtattcttttcctcagagatc

SEQ ID NO: 25245 - DNA, 22 bp, synthetic construct
  misc_feature 1..22: note = chemically synthesized
  source 1..22: mol_type = other DNA
gtattcttttcctcagagatct

SEQ ID NO: 25246 - DNA, 22 bp, synthetic construct
  misc_feature 1..22: note = chemically synthesized
  source 1..22: mol_type = other DNA
tattcttttcctcagagatctt

SEQ ID NO: 25247 - DNA, 22 bp, synthetic construct
  misc_feature 1..22: note = chemically synthesized
  source 1..22: mol_type = other DNA
ttttcctcagagatctttatcc

SEQ ID NO: 25248 - DNA, 22 bp, synthetic construct
  misc_feature 1..22: note = chemically synthesized
  source 1..22: mol_type = other DNA
ttcctcagagatctttatcctg

SEQ ID NO: 25249 - DNA, 22 bp, synthetic construct
  misc_feature 1..22: note = chemically synthesized
  source 1..22: mol_type = other DNA
tcctcagagatctttatcctga

SEQ ID NO: 25250 - DNA, 22 bp, synthetic construct
  misc_feature 1..22: note = chemically synthesized
  source 1..22: mol_type = other DNA
cctcagagatctttatcctgaa

SEQ ID NO: 25251 - DNA, 22 bp, synthetic construct
  misc_feature 1..22: note = chemically synthesized
  source 1..22: mol_type = other DNA
ctcagagatctttatcctgaaa

SEQ ID NO: 25252 - DNA, 22 bp, synthetic construct
  misc_feature 1..22: note = chemically synthesized
  source 1..22: mol_type = other DNA
agagatctttatcctgaaatga

SEQ ID NO: 25253 - DNA, 22 bp, synthetic construct
  misc_feature 1..22: note = chemically synthesized
  source 1..22: mol_type = other DNA
tatcctgaaatgagcatgtgtt

SEQ ID NO: 25254 - DNA, 22 bp, synthetic construct
  misc_feature 1..22: note = chemically synthesized
  source 1..22: mol_type = other DNA
atcctgaaatgagcatgtgttt

SEQ ID NO: 25255 - DNA, 22 bp, synthetic construct
  misc_feature 1..22: note = chemically synthesized
  source 1..22: mol_type = other DNA
tcctgaaatgagcatgtgtttt

SEQ ID NO: 25256 - DNA, 22 bp, synthetic construct
  misc_feature 1..22: note = chemically synthesized
  source 1..22: mol_type = other DNA
aaatgagcatgtgtttttaatg

SEQ ID NO: 25257 - DNA, 22 bp, synthetic construct
  misc_feature 1..22: note = chemically synthesized
  source 1..22: mol_type = other DNA
ttaatgtcctttttctagtcac

SEQ ID NO: 25258 - DNA, 22 bp, synthetic construct
  misc_feature 1..22: note = chemically synthesized
  source 1..22: mol_type = other DNA
taatgtcctttttctagtcaca

SEQ ID NO: 25259 - DNA, 22 bp, synthetic construct
  misc_feature 1..22: note = chemically synthesized
  source 1..22: mol_type = other DNA
aatgtcctttttctagtcacaa

SEQ ID NO: 25260 - DNA, 22 bp, synthetic construct
  misc_feature 1..22: note = chemically synthesized
  source 1..22: mol_type = other DNA
atgtcctttttctagtcacaaa

SEQ ID NO: 25261 - DNA, 22 bp, synthetic construct
  misc_feature 1..22: note = chemically synthesized
  source 1..22: mol_type = other DNA
tttctagtcacaaatttttcca

SEQ ID NO: 25262 - DNA, 22 bp, synthetic construct
  misc_feature 1..22: note = chemically synthesized
  source 1..22: mol_type = other DNA
ttctagtcacaaatttttccag

SEQ ID NO: 25263 - DNA, 22 bp, synthetic construct
  misc_feature 1..22: note = chemically synthesized
  source 1..22: mol_type = other DNA
tctagtcacaaatttttccagt

SEQ ID NO: 25264 - DNA, 22 bp, synthetic construct
  misc_feature 1..22: note = chemically synthesized
  source 1..22: mol_type = other DNA
ctagtcacaaatttttccagtc

SEQ ID NO: 25265 - DNA, 22 bp, synthetic construct
  misc_feature 1..22: note = chemically synthesized
  source 1..22: mol_type = other DNA
tagtcacaaatttttccagtcc

SEQ ID NO: 25266 - DNA, 22 bp, synthetic construct
  misc_feature 1..22: note = chemically synthesized
  source 1..22: mol_type = other DNA
gtcacaaatttttccagtccag

SEQ ID NO: 25267 - DNA, 22 bp, synthetic construct
  misc_feature 1..22: note = chemically synthesized
  source 1..22: mol_type = other DNA
ttccagtccagtttttaaatat

SEQ ID NO: 25268 - DNA, 22 bp, synthetic construct
  misc_feature 1..22: note = chemically synthesized
  source 1..22: mol_type = other DNA
tccagtccagtttttaaatatg

SEQ ID NO: 25269 - DNA, 22 bp, synthetic construct
  misc_feature 1..22: note = chemically synthesized
  source 1..22: mol_type = other DNA
ccagtccagtttttaaatatgc

SEQ ID NO: 25270 - DNA, 22 bp, synthetic construct
  misc_feature 1..22: note = chemically synthesized
  source 1..22: mol_type = other DNA
cagtccagtttttaaatatgcc

SEQ ID NO: 25271 - DNA, 22 bp, synthetic construct
  misc_feature 1..22: note = chemically synthesized
  source 1..22: mol_type = other DNA
ttaaatatgcccaaagttcctg

SEQ ID NO: 25272 - DNA, 22 bp, synthetic construct
  misc_feature 1..22: note = chemically synthesized
  source 1..22: mol_type = other DNA
taaatatgcccaaagttcctgg

SEQ ID NO: 25273 - DNA, 22 bp, synthetic construct
  misc_feature 1..22: note = chemically synthesized
  source 1..22: mol_type = other DNA
aaatatgcccaaagttcctggg

SEQ ID NO: 25274 - DNA, 22 bp, synthetic construct
  misc_feature 1..22: note = chemically synthesized
  source 1..22: mol_type = other DNA
aatatgcccaaagttcctggga

SEQ ID NO: 25275 - DNA, 22 bp, synthetic construct
  misc_feature 1..22: note = chemically synthesized
  source 1..22: mol_type = other DNA
ctgggaacagaaccatctctat

SEQ ID NO: 25276 - DNA, 22 bp, synthetic construct
  misc_feature 1..22: note = chemically synthesized
  source 1..22: mol_type = other DNA
ggaacagaaccatctctatcac

SEQ ID NO: 25277 - DNA, 22 bp, synthetic construct
  misc_feature 1..22: note = chemically synthesized
  source 1..22: mol_type = other DNA
tatcacatgtgaatcccggagt

SEQ ID NO: 25278 - DNA, 22 bp, synthetic construct
  misc_feature 1..22: note = chemically synthesized
  source 1..22: mol_type = other DNA
tcacatgtgaatcccggagtat

SEQ ID NO: 25279 - DNA, 22 bp, synthetic construct
  misc_feature 1..22: note = chemically synthesized
  source 1..22: mol_type = other DNA
gaaataaaagttttctctagag

SEQ ID NO: 25280 - DNA, 22 bp, synthetic construct
  misc_feature 1..22: note = chemically synthesized
  source 1..22: mol_type = other DNA
aaataaaagttttctctagaga

SEQ ID NO: 25281 - DNA, 22 bp, synthetic construct
  misc_feature 1..22: note = chemically synthesized
  source 1..22: mol_type = other DNA
tctctagagagtgggcaggagc

SEQ ID NO: 25282 - DNA, 22 bp, synthetic construct
  misc_feature 1..22: note = chemically synthesized
  source 1..22: mol_type = other DNA
ctctagagagtgggcaggagct

SEQ ID NO: 25283 - DNA, 22 bp, synthetic construct
  misc_feature 1..22: note = chemically synthesized
  source 1..22: mol_type = other DNA
tctagagagtgggcaggagctc

SEQ ID NO: 25284 - DNA, 22 bp, synthetic construct
  misc_feature 1..22: note = chemically synthesized
  source 1..22: mol_type = other DNA
tagagagtgggcaggagctcaa

SEQ ID NO: 25285 - DNA, 22 bp, synthetic construct
  misc_feature 1..22: note = chemically synthesized
  source 1..22: mol_type = other DNA
gagagtgggcaggagctcaagg

SEQ ID NO: 25286 - DNA, 22 bp, synthetic construct
  misc_feature 1..22: note = chemically synthesized
  source 1..22: mol_type = other DNA
aaggacatagcttattggtgga

SEQ ID NO: 25287 - DNA, 22 bp, synthetic construct
  misc_feature 1..22: note = chemically synthesized
  source 1..22: mol_type = other DNA
attggtggataaaactggaagg

SEQ ID NO: 25288 - DNA, 22 bp, synthetic construct
  misc_feature 1..22: note = chemically synthesized
  source 1..22: mol_type = other DNA
ttggtggataaaactggaaggg

SEQ ID NO: 25289 - DNA, 22 bp, synthetic construct
  misc_feature 1..22: note = chemically synthesized
  source 1..22: mol_type = other DNA
gtggataaaactggaagggact

SEQ ID NO: 25290 - DNA, 22 bp, synthetic construct
  misc_feature 1..22: note = chemically synthesized
  source 1..22: mol_type = other DNA
gaagggacttgttagcactggg

SEQ ID NO: 25291 - DNA, 22 bp, synthetic construct
  misc_feature 1..22: note = chemically synthesized
  source 1..22: mol_type = other DNA
gttagcactgggaatcagtcca

SEQ ID NO: 25292 - DNA, 22 bp, synthetic construct
  misc_feature 1..22: note = chemically synthesized
  source 1..22: mol_type = other DNA
ttagcactgggaatcagtccag

SEQ ID NO: 25293 - DNA, 22 bp, synthetic construct
  misc_feature 1..22: note = chemically synthesized
  source 1..22: mol_type = other DNA
gcactgggaatcagtccagaag

SEQ ID NO: 25294 - DNA, 22 bp, synthetic construct
  misc_feature 1..22: note = chemically synthesized
  source 1..22: mol_type = other DNA
ggaatcagtccagaagatctct

SEQ ID NO: 25295 - DNA, 22 bp, synthetic construct
  misc_feature 1..22: note = chemically synthesized
  source 1..22: mol_type = other DNA
tgcacaagttcctgcacctgag

SEQ ID NO: 25296 - DNA, 22 bp, synthetic construct
  misc_feature 1..22: note = chemically synthesized
  source 1..22: mol_type = other DNA
cacaagttcctgcacctgagca

SEQ ID NO: 25297 - DNA, 22 bp, synthetic construct
  misc_feature 1..22: note = chemically synthesized
  source 1..22: mol_type = other DNA
ctgcacctgagcagagcccctt

SEQ ID NO: 25298 - DNA, 22 bp, synthetic construct
  misc_feature 1..22: note = chemically synthesized
  source 1..22: mol_type = other DNA
cacctgagcagagccccttctg

SEQ ID NO: 25299 - DNA, 22 bp, synthetic construct
  misc_feature 1..22: note = chemically synthesized
  source 1..22: mol_type = other DNA
agcagagccccttctgctttcc

SEQ ID NO: 25300 - DNA, 22 bp, synthetic construct
  misc_feature 1..22: note = chemically synthesized
  source 1..22: mol_type = other DNA
ctgctttcctcttttctcatca

SEQ ID NO: 25301 - DNA, 22 bp, synthetic construct
  misc_feature 1..22: note = chemically synthesized
  source 1..22: mol_type = other DNA
tgctttcctcttttctcatcat

SEQ ID NO: 25302 - DNA, 22 bp, synthetic construct
  misc_feature 1..22: note = chemically synthesized
  source 1..22: mol_type = other DNA
ctttcctcttttctcatcattt

SEQ ID NO: 25303 - DNA, 22 bp, synthetic construct
  misc_feature 1..22: note = chemically synthesized
  source 1..22: mol_type = other DNA
tcctcttttctcatcatttaac

SEQ ID NO: 25304 - DNA, 22 bp, synthetic construct
  misc_feature 1..22: note = chemically synthesized
  source 1..22: mol_type = other DNA
cctcttttctcatcatttaaca

SEQ ID NO: 25305 - DNA, 22 bp, synthetic construct
  misc_feature 1..22: note = chemically synthesized
  source 1..22: mol_type = other DNA
ctcttttctcatcatttaacaa

SEQ ID NO: 25306 - DNA, 22 bp, synthetic construct
  misc_feature 1..22: note = chemically synthesized
  source 1..22: mol_type = other DNA
ttttctcatcatttaacaaaca

SEQ ID NO: 25307 - DNA, 22 bp, synthetic construct
  misc_feature 1..22: note = chemically synthesized
  source 1..22: mol_type = other DNA
ttctcatcatttaacaaacatt

SEQ ID NO: 25308 - DNA, 22 bp, synthetic construct
  misc_feature 1..22: note = chemically synthesized
  source 1..22: mol_type = other DNA
tctcatcatttaacaaacatta

SEQ ID NO: 25309 - DNA, 22 bp, synthetic construct
  misc_feature 1..22: note = chemically synthesized
  source 1..22: mol_type = other DNA
ctcatcatttaacaaacattaa

SEQ ID NO: 25310 - DNA, 22 bp, synthetic construct
  misc_feature 1..22: note = chemically synthesized
  source 1..22: mol_type = other DNA
tcatcatttaacaaacattaat

SEQ ID NO: 25311 - DNA, 22 bp, synthetic construct
  misc_feature 1..22: note = chemically synthesized
  source 1..22: mol_type = other DNA
atcatttaacaaacattaatgg

SEQ ID NO: 25312 - DNA, 22 bp, synthetic construct
  misc_feature 1..22: note = chemically synthesized
  source 1..22: mol_type = other DNA
aacaaacattaatggagcactg

SEQ ID NO: 25313 - DNA, 22 bp, synthetic construct
  misc_feature 1..22: note = chemically synthesized
  source 1..22: mol_type = other DNA
acaaacattaatggagcactgt

SEQ ID NO: 25314 - DNA, 22 bp, synthetic construct
  misc_feature 1..22: note = chemically synthesized
  source 1..22: mol_type = other DNA
atggagcactgttacctgggca

SEQ ID NO: 25315 - DNA, 22 bp, synthetic construct
  misc_feature 1..22: note = chemically synthesized
  source 1..22: mol_type = other DNA
ttacctgggcactgggaacacg

SEQ ID NO: 25316 - DNA, 22 bp, synthetic construct
  misc_feature 1..22: note = chemically synthesized
  source 1..22: mol_type = other DNA
cctgggcactgggaacacgcca

SEQ ID NO: 25317 - DNA, 22 bp, synthetic construct
  misc_feature 1..22: note = chemically synthesized
  source 1..22: mol_type = other DNA
ggcactgggaacacgccagtga

SEQ ID NO: 25318 - DNA, 22 bp, synthetic construct
  misc_feature 1..22: note = chemically synthesized
  source 1..22: mol_type = other DNA
ggaacacgccagtgaaactaag

SEQ ID NO: 25319 - DNA, 22 bp, synthetic construct
  misc_feature 1..22: note = chemically synthesized
  source 1..22: mol_type = other DNA
agttattttatggatcttataa

SEQ ID NO: 25320 - DNA, 22 bp, synthetic construct
  misc_feature 1..22: note = chemically synthesized
  source 1..22: mol_type = other DNA
ttttatggatcttataatcagt

SEQ ID NO: 25321 - DNA, 22 bp, synthetic construct
  misc_feature 1..22: note = chemically synthesized
  source 1..22: mol_type = other DNA
tatggatcttataatcagtagc

SEQ ID NO: 25322 - DNA, 22 bp, synthetic construct
  misc_feature 1..22: note = chemically synthesized
  source 1..22: mol_type = other DNA
atggatcttataatcagtagca

SEQ ID NO: 25323 - DNA, 22 bp, synthetic construct
  misc_feature 1..22: note = chemically synthesized
  source 1..22: mol_type = other DNA
tggatcttataatcagtagcat

SEQ ID NO: 25324 - DNA, 22 bp, synthetic construct
  misc_feature 1..22: note = chemically synthesized
  source 1..22: mol_type = other DNA
ataatcagtagcatgtgtgttg

SEQ ID NO: 25325 - DNA, 22 bp, synthetic construct
  misc_feature 1..22: note = chemically synthesized
  source 1..22: mol_type = other DNA
taatcagtagcatgtgtgttga

SEQ ID NO: 25326 - DNA, 22 bp, synthetic construct
  misc_feature 1..22: note = chemically synthesized
  source 1..22: mol_type = other DNA
atctcagggtctagaacagtgc

SEQ ID NO: 25327 - DNA, 22 bp, synthetic construct
  misc_feature 1..22: note = chemically synthesized
  source 1..22: mol_type = other DNA
agggtctagaacagtgcctggt

SEQ ID NO: 25328 - DNA, 22 bp, synthetic construct
  misc_feature 1..22: note = chemically synthesized
  source 1..22: mol_type = other DNA
gaacagtgcctggtacatagaa

SEQ ID NO: 25329 - DNA, 22 bp, synthetic construct
  misc_feature 1..22: note = chemically synthesized
  source 1..22: mol_type = other DNA
gtacatagaaaatgctcaatgg

SEQ ID NO: 25330 - DNA, 22 bp, synthetic construct
  misc_feature 1..22: note = chemically synthesized
  source 1..22: mol_type = other DNA
aatggatttttttttgaaaaaa

SEQ ID NO: 25331 - DNA, 22 bp, synthetic construct
  misc_feature 1..22: note = chemically synthesized
  source 1..22: mol_type = other DNA
ttttttgaaaaaatttgttttt

SEQ ID NO: 25332 - DNA, 22 bp, synthetic construct
  misc_feature 1..22: note = chemically synthesized
  source 1..22: mol_type = other DNA
tttttgaaaaaatttgtttttc

SEQ ID NO: 25333 - DNA, 22 bp, synthetic construct
  misc_feature 1..22: note = chemically synthesized
  source 1..22: mol_type = other DNA
ttttgaaaaaatttgtttttca

SEQ ID NO: 25334 - DNA, 22 bp, synthetic construct
  misc_feature 1..22: note = chemically synthesized
  source 1..22: mol_type = other DNA
tttgaaaaaatttgtttttcaa

SEQ ID NO: 25335 - DNA, 22 bp, synthetic construct
  misc_feature 1..22: note = chemically synthesized
  source 1..22: mol_type = other DNA
ttgaaaaaatttgtttttcaac

SEQ ID NO: 25336 - DNA, 22 bp, synthetic construct
  misc_feature 1..22: note = chemically synthesized
  source 1..22: mol_type = other DNA
tgaaaaaatttgtttttcaacc

SEQ ID NO: 25337 - DNA, 22 bp, synthetic construct
  misc_feature 1..22: note = chemically synthesized
  source 1..22: mol_type = other DNA
gaaaaaatttgtttttcaaccc

SEQ ID NO: 25338 - DNA, 22 bp, synthetic construct
  misc_feature 1..22: note = chemically synthesized
  source 1..22: mol_type = other DNA
aaaaaatttgtttttcaacccc

SEQ ID NO: 25339 - DNA, 22 bp, synthetic construct
  misc_feature 1..22: note = chemically synthesized
  source 1..22: mol_type = other DNA
gtttttcaacccctaagctgcc

SEQ ID NO: 25340 - DNA, 22 bp, synthetic construct
  misc_feature 1..22: note = chemically synthesized
  source 1..22: mol_type = other DNA
tttttcaacccctaagctgcct

SEQ ID NO: 25341 - DNA, 22 bp, synthetic construct
  misc_feature 1..22: note = chemically synthesized
  source 1..22: mol_type = other DNA
ttcaacccctaagctgccttta

SEQ ID NO: 25342 - DNA, 22 bp, synthetic construct
  misc_feature 1..22: note = chemically synthesized
  source 1..22: mol_type = other DNA
tcaacccctaagctgcctttaa

SEQ ID NO: 25343 - DNA, 22 bp, synthetic construct
  misc_feature 1..22: note = chemically synthesized
  source 1..22: mol_type = other DNA
caacccctaagctgcctttaat

SEQ ID NO: 25344 - DNA, 22 bp, synthetic construct
  misc_feature 1..22: note = chemically synthesized
  source 1..22: mol_type = other DNA
aacccctaagctgcctttaata

SEQ ID NO: 25345 - DNA, 22 bp, synthetic construct
  misc_feature 1..22: note = chemically synthesized
  source 1..22: mol_type = other DNA
agctgcctttaatacttatttt

SEQ ID NO: 25346 - DNA, 22 bp, synthetic construct
  misc_feature 1..22: note = chemically synthesized
  source 1..22: mol_type = other DNA
cctttaatacttattttctatc

SEQ ID NO: 25347 - DNA, 22 bp, synthetic construct
  misc_feature 1..22: note = chemically synthesized
  source 1..22: mol_type = other DNA
taatacttattttctatcattt

SEQ ID NO: 25348 - DNA, 22 bp, synthetic construct
  misc_feature 1..22: note = chemically synthesized
  source 1..22: mol_type = other DNA
aatacttattttctatcatttc

SEQ ID NO: 25349 - DNA, 22 bp, synthetic construct
  misc_feature 1..22: note = chemically synthesized
  source 1..22: mol_type = other DNA
atacttattttctatcatttcc

SEQ ID NO: 25350 - DNA, 22 bp, synthetic construct
  misc_feature 1..22: note = chemically synthesized
  source 1..22: mol_type = other DNA
attttctatcatttccctttca

SEQ ID NO: 25351 - DNA, 22 bp, synthetic construct
  misc_feature 1..22: note = chemically synthesized
  source 1..22: mol_type = other DNA
ttttctatcatttccctttcaa

SEQ ID NO: 25352 - DNA, 22 bp, synthetic construct
  misc_feature 1..22: note = chemically synthesized
  source 1..22: mol_type = other DNA
tctatcatttccctttcaaggg

SEQ ID NO: 25353 - DNA, 22 bp, synthetic construct
  misc_feature 1..22: note = chemically synthesized
  source 1..22: mol_type = other DNA
ctatcatttccctttcaagggg

SEQ ID NO: 25354 - DNA, 22 bp, synthetic construct
  misc_feature 1..22: note = chemically synthesized
  source 1..22: mol_type = other DNA
tatcatttccctttcaagggga

SEQ ID NO: 25355 - DNA, 22 bp, synthetic construct
  misc_feature 1..22: note = chemically synthesized
  source 1..22: mol_type = other DNA
tcatttccctttcaaggggaag

SEQ ID NO: 25356 - DNA, 22 bp, synthetic construct
  misc_feature 1..22: note = chemically synthesized
  source 1..22: mol_type = other DNA
ccctttcaaggggaagggaagt

SEQ ID NO: 25357 - DNA, 22 bp, synthetic construct
  misc_feature 1..22: note = chemically synthesized
  source 1..22: mol_type = other DNA
cctttcaaggggaagggaagtg

SEQ ID NO: 25358 - DNA, 22 bp, synthetic construct
  misc_feature 1..22: note = chemically synthesized
  source 1..22: mol_type = other DNA
tcaaggggaagggaagtgtttt

SEQ ID NO: 25359 - DNA, 22 bp, synthetic construct
  misc_feature 1..22: note = chemically synthesized
  source 1..22: mol_type = other DNA
caaggggaagggaagtgttttt

SEQ ID NO: 25360 - DNA, 22 bp, synthetic construct
  misc_feature 1..22: note = chemically synthesized
  source 1..22: mol_type = other DNA
aaggggaagggaagtgtttttg

SEQ ID NO: 25361 - DNA, 22 bp, synthetic construct
  misc_feature 1..22: note = chemically synthesized
  source 1..22: mol_type = other DNA
ttgtggagaggtccccacaatg

SEQ ID NO: 25362 - DNA, 22 bp, synthetic construct
  misc_feature 1..22: note = chemically synthesized
  source 1..22: mol_type = other DNA
tgtggagaggtccccacaatgt

SEQ ID NO: 25363 - DNA, 22 bp, synthetic construct
  misc_feature 1..22: note = chemically synthesized
  source 1..22: mol_type = other DNA
gtggagaggtccccacaatgtg

SEQ ID NO: 25364 - DNA, 22 bp, synthetic construct
  misc_feature 1..22: note = chemically synthesized
  source 1..22: mol_type = other DNA
tggagaggtccccacaatgtga

SEQ ID NO: 25365 - DNA, 22 bp, synthetic construct
  misc_feature 1..22: note = chemically synthesized
  source 1..22: mol_type = other DNA
acacaagttgatatcatcttca

SEQ ID NO: 25366 - DNA, 22 bp, synthetic construct
  misc_feature 1..22: note = chemically synthesized
  source 1..22: mol_type = other DNA
cacaagttgatatcatcttcaa

SEQ ID NO: 25367 - DNA, 22 bp, synthetic construct
  misc_feature 1..22: note = chemically synthesized
  source 1..22: mol_type = other DNA
atatcatcttcaatgtatcttt

SEQ ID NO: 25368 - DNA, 22 bp, synthetic construct
  misc_feature 1..22: note = chemically synthesized
  source 1..22: mol_type = other DNA
caatgtatctttattttaatat

SEQ ID NO: 25369 - DNA, 22 bp, synthetic construct
  misc_feature 1..22: note = chemically synthesized
  source 1..22: mol_type = other DNA
aatgtatctttattttaatatt

SEQ ID NO: 25370 - DNA, 22 bp, synthetic construct
  misc_feature 1..22: note = chemically synthesized
  source 1..22: mol_type = other DNA
tattttaatattatcatagcct

SEQ ID NO: 25371 - DNA, 22 bp, synthetic construct
  misc_feature 1..22: note = chemically synthesized
  source 1..22: mol_type = other DNA
attttaatattatcatagcctg

SEQ ID NO: 25372 - DNA, 22 bp, synthetic construct
  misc_feature 1..22: note = chemically synthesized
  source 1..22: mol_type = other DNA
ttttaatattatcatagcctgg

SEQ ID NO: 25373 - DNA, 22 bp, synthetic construct
  misc_feature 1..22: note = chemically synthesized
  source 1..22: mol_type = other DNA
taatattatcatagcctggtat

SEQ ID NO: 25374 - DNA, 22 bp, synthetic construct
  misc_feature 1..22: note = chemically synthesized
  source 1..22: mol_type = other DNA
aatattatcatagcctggtatg

SEQ ID NO: 25375 - DNA, 22 bp, synthetic construct
  misc_feature 1..22: note = chemically synthesized
  source 1..22: mol_type = other DNA
atattatcatagcctggtatgg

SEQ ID NO: 25376 - DNA, 22 bp, synthetic construct
  misc_feature 1..22: note = chemically synthesized
  source 1..22: mol_type = other DNA
tcatagcctggtatggtttgag

SEQ ID NO: 25377 - DNA, 22 bp, synthetic construct
  misc_feature 1..22: note = chemically synthesized
  source 1..22: mol_type = other DNA
gtatggtttgagattttcatat

SEQ ID NO: 25378 - DNA, 22 bp, synthetic construct
  misc_feature 1..22: note = chemically synthesized
  source 1..22: mol_type = other DNA
gagattttcatatagatggata

SEQ ID NO: 25379 - DNA, 22 bp, synthetic construct
  misc_feature 1..22: note = chemically synthesized
  source 1..22: mol_type = other DNA
agattttcatatagatggataa

SEQ ID NO: 25380 - DNA, 22 bp, synthetic construct
  misc_feature 1..22: note = chemically synthesized
  source 1..22: mol_type = other DNA
tcatatagatggataattattg

SEQ ID NO: 25381 - DNA, 22 bp, synthetic construct
  misc_feature 1..22: note = chemically synthesized
  source 1..22: mol_type = other DNA
catatagatggataattattgt

SEQ ID NO: 25382 - DNA, 22 bp, synthetic construct
  misc_feature 1..22: note = chemically synthesized
  source 1..22: mol_type = other DNA
atatagatggataattattgtg

SEQ ID NO: 25383 - DNA, 22 bp, synthetic construct
  misc_feature 1..22: note = chemically synthesized
  source 1..22: mol_type = other DNA
ttgtgtttattcctaataatac

SEQ ID NO: 25384 - DNA, 22 bp, synthetic construct
  misc_feature 1..22: note = chemically synthesized
  source 1..22: mol_type = other DNA
tgtttattcctaataatacatt

SEQ ID NO: 25385 - DNA, 22 bp, synthetic construct
  misc_feature 1..22: note = chemically synthesized
  source 1..22: mol_type = other DNA
attcctaataatacattgccac

SEQ ID NO: 25386 - DNA, 22 bp, synthetic construct
  misc_feature 1..22: note = chemically synthesized
  source 1..22: mol_type = other DNA
ttcctaataatacattgccact

SEQ ID NO: 25387 - DNA, 22 bp, synthetic construct
  misc_feature 1..22: note = chemically synthesized
  source 1..22: mol_type = other DNA
ctaataatacattgccactata

SEQ ID NO: 25388 - DNA, 22 bp, synthetic construct
  misc_feature 1..22: note = chemically synthesized
  source 1..22: mol_type = other DNA
ataatacattgccactatagtt

SEQ ID NO: 25389 - DNA, 22 bp, synthetic construct
  misc_feature 1..22: note = chemically synthesized
  source 1..22: mol_type = other DNA
ccactatagtttctttaaattt

SEQ ID NO: 25390 - DNA, 22 bp, synthetic construct
  misc_feature 1..22: note = chemically synthesized
  source 1..22: mol_type = other DNA
tagtttctttaaatttaatgat

SEQ ID NO: 25391 - DNA, 22 bp, synthetic construct
  misc_feature 1..22: note = chemically synthesized
  source 1..22: mol_type = other DNA
ctttaaatttaatgatttgaat

SEQ ID NO: 25392 - DNA, 22 bp, synthetic construct
  misc_feature 1..22: note = chemically synthesized
  source 1..22: mol_type = other DNA
tttaaatttaatgatttgaatt

SEQ ID NO: 25393 - DNA, 22 bp, synthetic construct
  misc_feature 1..22: note = chemically synthesized
  source 1..22: mol_type = other DNA
taaatttaatgatttgaatttt

SEQ ID NO: 25394 - DNA, 22 bp, synthetic construct
  misc_feature 1..22: note = chemically synthesized
  source 1..22: mol_type = other DNA
aaatttaatgatttgaattttt

SEQ ID NO: 25395 - DNA, 22 bp, synthetic construct
  misc_feature 1..22: note = chemically synthesized
  source 1..22: mol_type = other DNA
aatttaatgatttgaattttta

SEQ ID NO: 25396 - DNA, 22 bp, synthetic construct
  misc_feature 1..22: note = chemically synthesized
  source 1..22: mol_type = other DNA
aatgatttgaatttttacttcc

SEQ ID NO: 25397 - DNA, 22 bp, synthetic construct
  misc_feature 1..22: note = chemically synthesized
  source 1..22: mol_type = other DNA
atgatttgaatttttacttccc

SEQ ID NO: 25398 - DNA, 22 bp, synthetic construct
  misc_feature 1..22: note = chemically synthesized
  source 1..22: mol_type = other DNA
gaatttttacttccctgcattt

SEQ ID NO: 25399 - DNA, 22 bp, synthetic construct
  misc_feature 1..22: note = chemically synthesized
  source 1..22: mol_type = other DNA
aatttttacttccctgcatttc

SEQ ID NO: 25400 - DNA, 22 bp, synthetic construct
  misc_feature 1..22: note = chemically synthesized
  source 1..22: mol_type = other DNA
ttacttccctgcatttcatagt

SEQ ID NO: 25401 - DNA, 22 bp, synthetic construct
  misc_feature 1..22: note = chemically synthesized
  source 1..22: mol_type = other DNA
tacttccctgcatttcatagta

SEQ ID NO: 25402 - DNA, 22 bp, synthetic construct
  misc_feature 1..22: note = chemically synthesized
  source 1..22: mol_type = other DNA
acttccctgcatttcatagtag

SEQ ID NO: 25403 - DNA, 22 bp, synthetic construct
  misc_feature 1..22: note = chemically synthesized
  source 1..22: mol_type = other DNA
cttccctgcatttcatagtagt

SEQ ID NO: 25404 - DNA, 22 bp, synthetic construct
  misc_feature 1..22: note = chemically synthesized
  source 1..22: mol_type = other DNA
ccctgcatttcatagtagtgat

SEQ ID NO: 25405 - DNA, 22 bp, synthetic construct
  misc_feature 1..22: note = chemically synthesized
  source 1..22: mol_type = other DNA
cctgcatttcatagtagtgata

SEQ ID NO: 25406 - DNA, 22 bp, synthetic construct
  misc_feature 1..22: note = chemically synthesized
  source 1..22: mol_type = other DNA
catttcatagtagtgatatgag

SEQ ID NO: 25407 - DNA, 22 bp, synthetic construct
  misc_feature 1..22: note = chemically synthesized
  source 1..22: mol_type = other DNA
catagtagtgatatgaggtatc

SEQ ID NO: 25408 - DNA, 22 bp, synthetic construct
  misc_feature 1..22: note = chemically synthesized
  source 1..22: mol_type = other DNA
atagtagtgatatgaggtatct

SEQ ID NO: 25409 - DNA, 22 bp, synthetic construct
  misc_feature 1..22: note = chemically synthesized
  source 1..22: mol_type = other DNA
agagatcatgaatcccactcct

SEQ ID NO: 25410 - DNA, 22 bp, synthetic construct
  misc_feature 1..22: note = chemically synthesized
  source 1..22: mol_type = other DNA
gagatcatgaatcccactcctc

SEQ ID NO: 25411 - DNA, 22 bp, synthetic construct
  misc_feature 1..22: note = chemically synthesized
  source 1..22: mol_type = other DNA
ctccagttcatagagcaaattg

SEQ ID NO: 25412 - DNA, 22 bp, synthetic construct
  misc_feature 1..22: note = chemically synthesized
  source 1..22: mol_type = other DNA
cagttcatagagcaaattgatt

SEQ ID NO: 25413 - DNA, 22 bp, synthetic construct
  misc_feature 1..22: note = chemically synthesized
  source 1..22: mol_type = other DNA
atagagcaaattgattcgtaga

SEQ ID NO: 25414 - DNA, 22 bp, synthetic construct
  misc_feature 1..22: note = chemically synthesized
  source 1..22: mol_type = other DNA
attcgtagaggtatttaatgat

SEQ ID NO: 25415 - DNA, 22 bp, synthetic construct
  misc_feature 1..22: note = chemically synthesized
  source 1..22: mol_type = other DNA
gtagaggtatttaatgatcaag

SEQ ID NO: 25416 - DNA, 22 bp, synthetic construct
  misc_feature 1..22: note = chemically synthesized
  source 1..22: mol_type = other DNA
aatgatcaagcaaatggcagag

SEQ ID NO: 25417 - DNA, 22 bp, synthetic construct
  misc_feature 1..22: note = chemically synthesized
  source 1..22: mol_type = other DNA
atgatcaagcaaatggcagagt

SEQ ID NO: 25418 - DNA, 22 bp, synthetic construct
  misc_feature 1..22: note = chemically synthesized
  source 1..22: mol_type = other DNA
ggaccaggatttaggtcttttc

SEQ ID NO: 25419 - DNA, 22 bp, synthetic construct
  misc_feature 1..22: note = chemically synthesized
  source 1..22: mol_type = other DNA
aggtcttttccaaggccaattc

SEQ ID NO: 25420 - DNA, 22 bp, synthetic construct
  misc_feature 1..22: note = chemically synthesized
  source 1..22: mol_type = other DNA
ggtcttttccaaggccaattca

SEQ ID NO: 25421 - DNA, 22 bp, synthetic construct
  misc_feature 1..22: note = chemically synthesized
  source 1..22: mol_type = other DNA
ttccaaggccaattcacttttt

SEQ ID NO: 25422 - DNA, 22 bp, synthetic construct
  misc_feature 1..22: note = chemically synthesized
  source 1..22: mol_type = other DNA
tccaaggccaattcactttttt

SEQ ID NO: 25423 - DNA, 22 bp, synthetic construct
  misc_feature 1..22: note = chemically synthesized
  source 1..22: mol_type = other DNA
ccaaggccaattcactttttta

SEQ ID NO: 25424 - DNA, 22 bp, synthetic construct
  misc_feature 1..22: note = chemically synthesized
  source 1..22: mol_type = other DNA
caaggccaattcacttttttac

SEQ ID NO: 25425 - DNA, 22 bp, synthetic construct
  misc_feature 1..22: note = chemically synthesized
  source 1..22: mol_type = other DNA
acttttttactattatgtaaga

SEQ ID NO: 25426 - DNA, 22 bp, synthetic construct
  misc_feature 1..22: note = chemically synthesized
  source 1..22: mol_type = other DNA
ttttactattatgtaagaatta

SEQ ID NO: 25427 - DNA, 22 bp, synthetic construct
  misc_feature 1..22: note = chemically synthesized
  source 1..22: mol_type = other DNA
tttactattatgtaagaattaa

SEQ ID NO: 25428 - DNA, 22 bp, synthetic construct
  misc_feature 1..22: note = chemically synthesized
  source 1..22: mol_type = other DNA
ttactattatgtaagaattaaa

SEQ ID NO: 25429 - DNA, 22 bp, synthetic construct
  misc_feature 1..22: note = chemically synthesized
  source 1..22: mol_type = other DNA
tactattatgtaagaattaaat

SEQ ID NO: 25430 - DNA, 22 bp, synthetic construct
  misc_feature 1..22: note = chemically synthesized
  source 1..22: mol_type = other DNA
actattatgtaagaattaaata

SEQ ID NO: 25431 - DNA, 22 bp, synthetic construct
  misc_feature 1..22: note = chemically synthesized
  source 1..22: mol_type = other DNA
ctattatgtaagaattaaatat

SEQ ID NO: 25432 - DNA, 22 bp, synthetic construct
  misc_feature 1..22: note = chemically synthesized
  source 1..22: mol_type = other DNA
ttatgtaagaattaaatattaa

SEQ ID NO: 25433 - DNA, 22 bp, synthetic construct
  misc_feature 1..22: note = chemically synthesized
  source 1..22: mol_type = other DNA
tgtaagaattaaatattaaaac

SEQ ID NO: 25434 - DNA, 22 bp, synthetic construct
  misc_feature 1..22: note = chemically synthesized
  source 1..22: mol_type = other DNA
aatattaaaacctcagttttca

SEQ ID NO: 25435 - DNA, 22 bp, synthetic construct
  misc_feature 1..22: note = chemically synthesized
  source 1..22: mol_type = other DNA
aaacctcagttttcaaaggaaa

SEQ ID NO: 25436 - DNA, 22 bp, synthetic construct
  misc_feature 1..22: note = chemically synthesized
  source 1..22: mol_type = other DNA
agttttcaaaggaaatgtccta

SEQ ID NO: 25437 - DNA, 22 bp, synthetic construct
  misc_feature 1..22: note = chemically synthesized
  source 1..22: mol_type = other DNA
tcaaaggaaatgtcctatagat

SEQ ID NO: 25438 - DNA, 22 bp, synthetic construct
  misc_feature 1..22: note = chemically synthesized
  source 1..22: mol_type = other DNA
caaaggaaatgtcctatagatg

SEQ ID NO: 25439 - DNA, 22 bp, synthetic construct
  misc_feature 1..22: note = chemically synthesized
  source 1..22: mol_type = other DNA
aaaggaaatgtcctatagatga

SEQ ID NO: 25440 - DNA, 22 bp, synthetic construct
  misc_feature 1..22: note = chemically synthesized
  source 1..22: mol_type = other DNA
tagatgaaagaacacagtactt

SEQ ID NO: 25441 - DNA, 22 bp, synthetic construct
  misc_feature 1..22: note = chemically synthesized
  source 1..22: mol_type = other DNA
gcagtcaaaggtcttggatttc

SEQ ID NO: 25442 - DNA, 22 bp, synthetic construct
  misc_feature 1..22: note = chemically synthesized
  source 1..22: mol_type = other DNA
cagtcaaaggtcttggatttct

SEQ ID NO: 25443 - DNA, 22 bp, synthetic construct
  misc_feature 1..22: note = chemically synthesized
  source 1..22: mol_type = other DNA
ggatttctgaaactttctgaaa

SEQ ID NO: 25444 - DNA, 22 bp, synthetic construct
  misc_feature 1..22: note = chemically synthesized
  source 1..22: mol_type = other DNA
gatttctgaaactttctgaaaa

SEQ ID NO: 25445 - DNA, 22 bp, synthetic construct
  misc_feature 1..22: note = chemically synthesized
  source 1..22: mol_type = other DNA
ctgaaactttctgaaaaagaac

SEQ ID NO: 25446 - DNA, 22 bp, synthetic construct
  misc_feature 1..22: note = chemically synthesized
  source 1..22: mol_type = other DNA
tgaaactttctgaaaaagaacc

SEQ ID NO: 25447 - DNA, 22 bp, synthetic construct
  misc_feature 1..22: note = chemically synthesized
  source 1..22: mol_type = other DNA
aaactttctgaaaaagaacccc

SEQ ID NO: 25448 - DNA, 22 bp, synthetic construct
  misc_feature 1..22: note = chemically synthesized
  source 1..22: mol_type = other DNA
tctgaaaaagaaccccttaaac

SEQ ID NO: 25449 - DNA, 22 bp, synthetic construct
  misc_feature 1..22: note = chemically synthesized
  source 1..22: mol_type = other DNA
ctgaaaaagaaccccttaaact

SEQ ID NO: 25450 - DNA, 22 bp, synthetic construct
  misc_feature 1..22: note = chemically synthesized
  source 1..22: mol_type = other DNA
tgaaaaagaaccccttaaactg

SEQ ID NO: 25451 - DNA, 22 bp, synthetic construct
  misc_feature 1..22: note = chemically synthesized
  source 1..22: mol_type = other DNA
aaaaagaaccccttaaactgaa

SEQ ID NO: 25452 - DNA, 22 bp, synthetic construct
  misc_feature 1..22: note = chemically synthesized
  source 1..22: mol_type = other DNA
aaactgaataacagtttcttca

SEQ ID NO: 25453 - DNA, 22 bp, synthetic construct
  misc_feature 1..22: note = chemically synthesized
  source 1..22: mol_type = other DNA
aactgaataacagtttcttcat

SEQ ID NO: 25454 - DNA, 22 bp, synthetic construct
  misc_feature 1..22: note = chemically synthesized
  source 1..22: mol_type = other DNA
aataacagtttcttcatgaata

SEQ ID NO: 25455 - DNA, 22 bp, synthetic construct
  misc_feature 1..22: note = chemically synthesized
  source 1..22: mol_type = other DNA
cttcatgaataaaatgaatgtt

SEQ ID NO: 25456 - DNA, 22 bp, synthetic construct
  misc_feature 1..22: note = chemically synthesized
  source 1..22: mol_type = other DNA
ttcatgaataaaatgaatgtta

SEQ ID NO: 25457 - DNA, 22 bp, synthetic construct
  misc_feature 1..22: note = chemically synthesized
  source 1..22: mol_type = other DNA
catgaataaaatgaatgttata

SEQ ID NO: 25458 - DNA, 22 bp, synthetic construct
  misc_feature 1..22: note = chemically synthesized
  source 1..22: mol_type = other DNA
atgaataaaatgaatgttatac

SEQ ID NO: 25459 - DNA, 22 bp, synthetic construct
  misc_feature 1..22: note = chemically synthesized
  source 1..22: mol_type = other DNA
tactctccagttatcttaccat

SEQ ID NO: 25460 - DNA, 22 bp, synthetic construct
  misc_feature 1..22: note = chemically synthesized
  source 1..22: mol_type = other DNA
tccagttatcttaccatgtttt

SEQ ID NO: 25461 - DNA, 22 bp, synthetic construct
  misc_feature 1..22: note = chemically synthesized
  source 1..22: mol_type = other DNA
cagttatcttaccatgttttct

SEQ ID NO: 25462 - DNA, 22 bp, synthetic construct
  misc_feature 1..22: note = chemically synthesized
  source 1..22: mol_type = other DNA
tcttaccatgttttctggcaaa

SEQ ID NO: 25463 - DNA, 22 bp, synthetic construct
  misc_feature 1..22: note = chemically synthesized
  source 1..22: mol_type = other DNA
accatgttttctggcaaacaag

SEQ ID NO: 25464 - DNA, 22 bp, synthetic construct
  misc_feature 1..22: note = chemically synthesized
  source 1..22: mol_type = other DNA
ccatgttttctggcaaacaagg

SEQ ID NO: 25465 - DNA, 22 bp, synthetic construct
  misc_feature 1..22: note = chemically synthesized
  source 1..22: mol_type = other DNA
tctggcaaacaaggaaatgtat

SEQ ID NO: 25466 - DNA, 22 bp, synthetic construct
  misc_feature 1..22: note = chemically synthesized
  source 1..22: mol_type = other DNA
ctggcaaacaaggaaatgtatt

SEQ ID NO: 25467 - DNA, 22 bp, synthetic construct
  misc_feature 1..22: note = chemically synthesized
  source 1..22: mol_type = other DNA
tggcaaacaaggaaatgtattc

SEQ ID NO: 25468 - DNA, 22 bp, synthetic construct
  misc_feature 1..22: note = chemically synthesized
  source 1..22: mol_type = other DNA
gcaaacaaggaaatgtattcac

SEQ ID NO: 25469 - DNA, 22 bp, synthetic construct
  misc_feature 1..22: note = chemically synthesized
  source 1..22: mol_type = other DNA
acatccaagaaaacaaaaggtt

SEQ ID NO: 25470 - DNA, 22 bp, synthetic construct
  misc_feature 1..22: note = chemically synthesized
  source 1..22: mol_type = other DNA
cttaggagaagaatcccttgct

SEQ ID NO: 25471 - DNA, 22 bp, synthetic construct
  misc_feature 1..22: note = chemically synthesized
  source 1..22: mol_type = other DNA
ttaggagaagaatcccttgctg

SEQ ID NO: 25472 - DNA, 22 bp, synthetic construct
  misc_feature 1..22: note = chemically synthesized
  source 1..22: mol_type = other DNA
aggagaagaatcccttgctgcc

SEQ ID NO: 25473 - DNA, 22 bp, synthetic construct
  misc_feature 1..22: note = chemically synthesized
  source 1..22: mol_type = other DNA
ggagaagaatcccttgctgcca

SEQ ID NO: 25474 - DNA, 22 bp, synthetic construct
  misc_feature 1..22: note = chemically synthesized
  source 1..22: mol_type = other DNA
gctgccagaattttgcccatga

SEQ ID NO: 25475 - DNA, 22 bp, synthetic construct
  misc_feature 1..22: note = chemically synthesized
  source 1..22: mol_type = other DNA
ctgccagaattttgcccatgaa

SEQ ID NO: 25476 - DNA, 22 bp, synthetic construct
  misc_feature 1..22: note = chemically synthesized
  source 1..22: mol_type = other DNA
ccagaattttgcccatgaacaa

SEQ ID NO: 25477 - DNA, 22 bp, synthetic construct
  misc_feature 1..22: note = chemically synthesized
  source 1..22: mol_type = other DNA
tgcccatgaacaatggaaacgt

SEQ ID NO: 25478 - DNA, 22 bp, synthetic construct
  misc_feature 1..22: note = chemically synthesized
  source 1..22: mol_type = other DNA
gcccatgaacaatggaaacgtg

SEQ ID NO: 25479 - DNA, 22 bp, synthetic construct
  misc_feature 1..22: note = chemically synthesized
  source 1..22: mol_type = other DNA
cccatgaacaatggaaacgtga

SEQ ID NO: 25480 - DNA, 22 bp, synthetic construct
  misc_feature 1..22: note = chemically synthesized
  source 1..22: mol_type = other DNA
gttttgggtactaattctcaga

SEQ ID NO: 25481 - DNA, 22 bp, synthetic construct
  misc_feature 1..22: note = chemically synthesized
  source 1..22: mol_type = other DNA
tgggtactaattctcagacttc

SEQ ID NO: 25482 - DNA, 22 bp, synthetic construct
  misc_feature 1..22: note = chemically synthesized
  source 1..22: mol_type = other DNA
gggtactaattctcagacttca

SEQ ID NO: 25483 - DNA, 22 bp, synthetic construct
  misc_feature 1..22: note = chemically synthesized
  source 1..22: mol_type = other DNA
ggtactaattctcagacttcaa

SEQ ID NO: 25484 - DNA, 22 bp, synthetic construct
  misc_feature 1..22: note = chemically synthesized
  source 1..22: mol_type = other DNA
attctcagacttcaaaataacc

SEQ ID NO: 25485 - DNA, 22 bp, synthetic construct
  misc_feature 1..22: note = chemically synthesized
  source 1..22: mol_type = other DNA
tcagacttcaaaataacctttt

SEQ ID NO: 25486 - DNA, 22 bp, synthetic construct
  misc_feature 1..22: note = chemically synthesized
  source 1..22: mol_type = other DNA
agacttcaaaataaccttttta

SEQ ID NO: 25487 - DNA, 22 bp, synthetic construct
  misc_feature 1..22: note = chemically synthesized
  source 1..22: mol_type = other DNA
caaaataacctttttaatttat

SEQ ID NO: 25488 - DNA, 22 bp, synthetic construct
  misc_feature 1..22: note = chemically synthesized
  source 1..22: mol_type = other DNA
aaaataacctttttaatttatt

SEQ ID NO: 25489 - DNA, 22 bp, synthetic construct
  misc_feature 1..22: note = chemically synthesized
  source 1..22: mol_type = other DNA
tttaatttattaatattaacct

SEQ ID NO: 25490 - DNA, 22 bp, synthetic construct
  misc_feature 1..22: note = chemically synthesized
  source 1..22: mol_type = other DNA
ttaatttattaatattaacctt

SEQ ID NO: 25491 - DNA, 22 bp, synthetic construct
  misc_feature 1..22: note = chemically synthesized
  source 1..22: mol_type = other DNA
taatttattaatattaaccttg

SEQ ID NO: 25492 - DNA, 22 bp, synthetic construct
  misc_feature 1..22: note = chemically synthesized
  source 1..22: mol_type = other DNA
aatttattaatattaaccttga

SEQ ID NO: 25493 - DNA, 22 bp, synthetic construct
  misc_feature 1..22: note = chemically synthesized
  source 1..22: mol_type = other DNA
atttattaatattaaccttgaa

SEQ ID NO: 25494 - DNA, 22 bp, synthetic construct
  misc_feature 1..22: note = chemically synthesized
  source 1..22: mol_type = other DNA
attaatattaaccttgaaattt

SEQ ID NO: 25495 - DNA, 22 bp, synthetic construct
  misc_feature 1..22: note = chemically synthesized
  source 1..22: mol_type = other DNA
ttaatattaaccttgaaattta

SEQ ID NO: 25496 - DNA, 22 bp, synthetic construct
  misc_feature 1..22: note = chemically synthesized
  source 1..22: mol_type = other DNA
atattaaccttgaaatttattg

SEQ ID NO: 25497 - DNA, 22 bp, synthetic construct
  misc_feature 1..22: note = chemically synthesized
  source 1..22: mol_type = other DNA
accttgaaatttattgctttta

SEQ ID NO: 25498 - DNA, 22 bp, synthetic construct
  misc_feature 1..22: note = chemically synthesized
  source 1..22: mol_type = other DNA
gaaatttattgcttttattcat

SEQ ID NO: 25499 - DNA, 22 bp, synthetic construct
  misc_feature 1..22: note = chemically synthesized
  source 1..22: mol_type = other DNA
aaatttattgcttttattcatt

SEQ ID NO: 25500 - DNA, 22 bp, synthetic construct
  misc_feature 1..22: note = chemically synthesized
  source 1..22: mol_type = other DNA
attgcttttattcattaatcca

SEQ ID NO: 25501 - DNA, 22 bp, synthetic construct
  misc_feature 1..22: note = chemically synthesized
  source 1..22: mol_type = other DNA
ttgcttttattcattaatccat

SEQ ID NO: 25502 - DNA, 22 bp, synthetic construct
  misc_feature 1..22: note = chemically synthesized
  source 1..22: mol_type = other DNA
cttttattcattaatccatttt

SEQ ID NO: 25503 - DNA, 22 bp, synthetic construct
  misc_feature 1..22: note = chemically synthesized
  source 1..22: mol_type = other DNA
ttattcattaatccattttatt

SEQ ID NO: 25504 - DNA, 22 bp, synthetic construct
  misc_feature 1..22: note = chemically synthesized
  source 1..22: mol_type = other DNA
tattcattaatccattttatta

SEQ ID NO: 25505 - DNA, 22 bp, synthetic construct
  misc_feature 1..22: note = chemically synthesized
  source 1..22: mol_type = other DNA
attcattaatccattttattat

SEQ ID NO: 25506 - DNA, 22 bp, synthetic construct
  misc_feature 1..22: note = chemically synthesized
  source 1..22: mol_type = other DNA
ttcattaatccattttattatt

SEQ ID NO: 25507 - DNA, 22 bp, synthetic construct
  misc_feature 1..22: note = chemically synthesized
  source 1..22: mol_type = other DNA
attaatccattttattattcag

SEQ ID NO: 25508 - DNA, 22 bp, synthetic construct
  misc_feature 1..22: note = chemically synthesized
  source 1..22: mol_type = other DNA
atccattttattattcagtaag

SEQ ID NO: 25509 - DNA, 22 bp, synthetic construct
  misc_feature 1..22: note = chemically synthesized
  source 1..22: mol_type = other DNA
tattattcagtaaggattcatc

SEQ ID NO: 25510 - DNA, 22 bp, synthetic construct
  misc_feature 1..22: note = chemically synthesized
  source 1..22: mol_type = other DNA
attattcagtaaggattcatca

SEQ ID NO: 25511 - DNA, 22 bp, synthetic construct
  misc_feature 1..22: note = chemically synthesized
  source 1..22: mol_type = other DNA
ttattcagtaaggattcatcaa

SEQ ID NO: 25512 - DNA, 22 bp, synthetic construct
  misc_feature 1..22: note = chemically synthesized
  source 1..22: mol_type = other DNA
ttcagtaaggattcatcaagtg

SEQ ID NO: 25513 - DNA, 22 bp, synthetic construct
  misc_feature 1..22: note = chemically synthesized
  source 1..22: mol_type = other DNA
agtaaggattcatcaagtgtct

SEQ ID NO: 25514 - DNA, 22 bp, synthetic construct
  misc_feature 1..22: note = chemically synthesized
  source 1..22: mol_type = other DNA
atcaagtgtctattaggtatca

SEQ ID NO: 25515 - DNA, 22 bp, synthetic construct
  misc_feature 1..22: note = chemically synthesized
  source 1..22: mol_type = other DNA
ttaggtatcaggcactgagagg

SEQ ID NO: 25516 - DNA, 22 bp, synthetic construct
  misc_feature 1..22: note = chemically synthesized
  source 1..22: mol_type = other DNA
ggtatcaggcactgagaggcga

SEQ ID NO: 25517 - DNA, 22 bp, synthetic construct
  misc_feature 1..22: note = chemically synthesized
  source 1..22: mol_type = other DNA
agaggcgagggagatagagtta

SEQ ID NO: 25518 - DNA, 22 bp, synthetic construct
  misc_feature 1..22: note = chemically synthesized
  source 1..22: mol_type = other DNA
agaatacagaactgattcttaa

SEQ ID NO: 25519 - DNA, 22 bp, synthetic construct
  misc_feature 1..22: note = chemically synthesized
  source 1..22: mol_type = other DNA
attcttaatcttcaagaattga

SEQ ID NO: 25520 - DNA, 22 bp, synthetic construct
  misc_feature 1..22: note = chemically synthesized
  source 1..22: mol_type = other DNA
ttaatcttcaagaattgacaaa

SEQ ID NO: 25521 - DNA, 22 bp, synthetic construct
  misc_feature 1..22: note = chemically synthesized
  source 1..22: mol_type = other DNA
aatcttcaagaattgacaaatt

SEQ ID NO: 25522 - DNA, 22 bp, synthetic construct
  misc_feature 1..22: note = chemically synthesized
  source 1..22: mol_type = other DNA
atcttcaagaattgacaaattt

SEQ ID NO: 25523 - DNA, 22 bp, synthetic construct
  misc_feature 1..22: note = chemically synthesized
  source 1..22: mol_type = other DNA
caagaattgacaaatttgtaga

SEQ ID NO: 25524 - DNA, 22 bp, synthetic construct
  misc_feature 1..22: note = chemically synthesized
  source 1..22: mol_type = other DNA
aagaattgacaaatttgtagaa

SEQ ID NO: 25525 - DNA, 22 bp, synthetic construct
  misc_feature 1..22: note = chemically synthesized
  source 1..22: mol_type = other DNA
acaaatttgtagaaggtagaca

SEQ ID NO: 25526 - DNA, 22 bp, synthetic construct
  misc_feature 1..22: note = chemically synthesized
  source 1..22: mol_type = other DNA
gtagaaggtagacattgaacat

SEQ ID NO: 25527 - DNA, 22 bp, synthetic construct
  misc_feature 1..22: note = chemically synthesized
  source 1..22: mol_type = other DNA
tagaaggtagacattgaacata

SEQ ID NO: 25528 - DNA, 22 bp, synthetic construct
  misc_feature 1..22: note = chemically synthesized
  source 1..22: mol_type = other DNA
aacatacaatacagtcaaatgt

SEQ ID NO: 25529 - DNA, 22 bp, synthetic construct
  misc_feature 1..22: note = chemically synthesized
  source 1..22: mol_type = other DNA
agggaaccaggtgtcctaagac

SEQ ID NO: 25530 - DNA, 22 bp, synthetic construct
  misc_feature 1..22: note = chemically synthesized
  source 1..22: mol_type = other DNA
agactatacagtgtaccgtgga

SEQ ID NO: 25531 - DNA, 22 bp, synthetic construct
  misc_feature 1..22: note = chemically synthesized
  source 1..22: mol_type = other DNA
tacagtgtaccgtggaatgggg

SEQ ID NO: 25532 - DNA, 22 bp, synthetic construct
  misc_feature 1..22: note = chemically synthesized
  source 1..22: mol_type = other DNA
ctaacctagttacctagaggtt

SEQ ID NO: 25533 - DNA, 22 bp, synthetic construct
  misc_feature 1..22: note = chemically synthesized
  source 1..22: mol_type = other DNA
taacctagttacctagaggttt

SEQ ID NO: 25534 - DNA, 22 bp, synthetic construct
  misc_feature 1..22: note = chemically synthesized
  source 1..22: mol_type = other DNA
acctagttacctagaggtttgg

SEQ ID NO: 25535 - DNA, 22 bp, synthetic construct
  misc_feature 1..22: note = chemically synthesized
  source 1..22: mol_type = other DNA
gttacctagaggtttgggaaaa

SEQ ID NO: 25536 - DNA, 22 bp, synthetic construct
  misc_feature 1..22: note = chemically synthesized
  source 1..22: mol_type = other DNA
cctagaggtttgggaaaaacct

SEQ ID NO: 25537 - DNA, 22 bp, synthetic construct
  misc_feature 1..22: note = chemically synthesized
  source 1..22: mol_type = other DNA
gaggtttgggaaaaacctctct

SEQ ID NO: 25538 - DNA, 22 bp, synthetic construct
  misc_feature 1..22: note = chemically synthesized
  source 1..22: mol_type = other DNA
gggaaaaacctctctaatgatg

SEQ ID NO: 25539 - DNA, 22 bp, synthetic construct
  misc_feature 1..22: note = chemically synthesized
  source 1..22: mol_type = other DNA
ggaaaaacctctctaatgatga

SEQ ID NO: 25540 - DNA, 22 bp, synthetic construct
  misc_feature 1..22: note = chemically synthesized
  source 1..22: mol_type = other DNA
tctaatgatgagatgtttgagc

SEQ ID NO: 25541 - DNA, 22 bp, synthetic construct
  misc_feature 1..22: note = chemically synthesized
  source 1..22: mol_type = other DNA
taatgatgagatgtttgagctg

SEQ ID NO: 25542 - DNA, 22 bp, synthetic construct
  misc_feature 1..22: note = chemically synthesized
  source 1..22: mol_type = other DNA
atgatgagatgtttgagctgac

SEQ ID NO: 25543 - DNA, 22 bp, synthetic construct
  misc_feature 1..22: note = chemically synthesized
  source 1..22: mol_type = other DNA
gagctgacacttgaaggataaa

SEQ ID NO: 25544 - DNA, 22 bp, synthetic construct
  misc_feature 1..22: note = chemically synthesized
  source 1..22: mol_type = other DNA
agctgacacttgaaggataaat

SEQ ID NO: 25545 - DNA, 22 bp, synthetic construct
  misc_feature 1..22: note = chemically synthesized
  source 1..22: mol_type = other DNA
acacttgaaggataaatagcta

SEQ ID NO: 25546 - DNA, 22 bp, synthetic construct
  misc_feature 1..22: note = chemically synthesized
  source 1..22: mol_type = other DNA
gaaggataaatagctaaagggg

SEQ ID NO: 25547 - DNA, 22 bp, synthetic construct
  misc_feature 1..22: note = chemically synthesized
  source 1..22: mol_type = other DNA
aaggataaatagctaaagggga

SEQ ID NO: 25548 - DNA, 22 bp, synthetic construct
  misc_feature 1..22: note = chemically synthesized
  source 1..22: mol_type = other DNA
aaggggagaaagcgttctatgt

SEQ ID NO: 25549 - DNA, 22 bp, synthetic construct
  misc_feature 1..22: note = chemically synthesized
  source 1..22: mol_type = other DNA
tatgtgagagaactatatatgc

SEQ ID NO: 25550 - DNA, 22 bp, synthetic construct
  misc_feature 1..22: note = chemically synthesized
  source 1..22: mol_type = other DNA
tgtgagagaactatatatgcca

SEQ ID NO: 25551 - DNA, 22 bp, synthetic construct
  misc_feature 1..22: note = chemically synthesized
  source 1..22: mol_type = other DNA
tatatgccaagatgcagaagtg

SEQ ID NO: 25552 - DNA, 22 bp, synthetic construct
  misc_feature 1..22: note = chemically synthesized
  source 1..22: mol_type = other DNA
tctgttcgaagatctgagcggg

SEQ ID NO: 25553 - DNA, 22 bp, synthetic construct
  misc_feature 1..22: note = chemically synthesized
  source 1..22: mol_type = other DNA
tgttcgaagatctgagcggggc

SEQ ID NO: 25554 - DNA, 22 bp, synthetic construct
  misc_feature 1..22: note = chemically synthesized
  source 1..22: mol_type = other DNA
ttcgaagatctgagcggggctc

SEQ ID NO: 25555 - DNA, 22 bp, synthetic construct
  misc_feature 1..22: note = chemically synthesized
  source 1..22: mol_type = other DNA
gaagatctgagcggggctcaga

SEQ ID NO: 25556 - DNA, 22 bp, synthetic construct
  misc_feature 1..22: note = chemically synthesized
  source 1..22: mol_type = other DNA
agcggggctcagagagggaaaa

SEQ ID NO: 25557 - DNA, 22 bp, synthetic construct
  misc_feature 1..22: note = chemically synthesized
  source 1..22: mol_type = other DNA
agagagggaaaaggagaggagt

SEQ ID NO: 25558 - DNA, 22 bp, synthetic construct
  misc_feature 1..22: note = chemically synthesized
  source 1..22: mol_type = other DNA
cagggactagattgtgaagctc

SEQ ID NO: 25559 - DNA, 22 bp, synthetic construct
  misc_feature 1..22: note = chemically synthesized
  source 1..22: mol_type = other DNA
gattgtgaagctcagggggagt

SEQ ID NO: 25560 - DNA, 22 bp, synthetic construct
  misc_feature 1..22: note = chemically synthesized
  source 1..22: mol_type = other DNA
tgaagctcagggggagttaata

SEQ ID NO: 25561 - DNA, 22 bp, synthetic construct
  misc_feature 1..22: note = chemically synthesized
  source 1..22: mol_type = other DNA
agggggagttaatagccttaag

SEQ ID NO: 25562 - DNA, 22 bp, synthetic construct
  misc_feature 1..22: note = chemically synthesized
  source 1..22: mol_type = other DNA
atagccttaaggagttttgtct

SEQ ID NO: 25563 - DNA, 22 bp, synthetic construct
  misc_feature 1..22: note = chemically synthesized
  source 1..22: mol_type = other DNA
aaggagttttgtctccagggta

SEQ ID NO: 25564 - DNA, 22 bp, synthetic construct
  misc_feature 1..22: note = chemically synthesized
  source 1..22: mol_type = other DNA
aggagttttgtctccagggtat

SEQ ID NO: 25565 - DNA, 22 bp, synthetic construct
  misc_feature 1..22: note = chemically synthesized
  source 1..22: mol_type = other DNA
tgtctccagggtatgaacaatg

SEQ ID NO: 25566 - DNA, 22 bp, synthetic construct
  misc_feature 1..22: note = chemically synthesized
  source 1..22: mol_type = other DNA
gtctccagggtatgaacaatga

SEQ ID NO: 25567 - DNA, 22 bp, synthetic construct
  misc_feature 1..22: note = chemically synthesized
  source 1..22: mol_type = other DNA
tctccagggtatgaacaatgaa

SEQ ID NO: 25568 - DNA, 22 bp, synthetic construct
  misc_feature 1..22: note = chemically synthesized
  source 1..22: mol_type = other DNA
cagggtatgaacaatgaatgag

SEQ ID NO: 25569 - DNA, 22 bp, synthetic construct
  misc_feature 1..22: note = chemically synthesized
  source 1..22: mol_type = other DNA
aaattctatccacagtagtggg

SEQ ID NO: 25570 - DNA, 22 bp, synthetic construct
  misc_feature 1..22: note = chemically synthesized
  source 1..22: mol_type = other DNA
tatccacagtagtgggaagtac

SEQ ID NO: 25571 - DNA, 22 bp, synthetic construct
  misc_feature 1..22: note = chemically synthesized
  source 1..22: mol_type = other DNA
tccacagtagtgggaagtacta

SEQ ID NO: 25572 - DNA, 22 bp, synthetic construct
  misc_feature 1..22: note = chemically synthesized
  source 1..22: mol_type = other DNA
agtagtcaggtatgttttggaa

SEQ ID NO: 25573 - DNA, 22 bp, synthetic construct
  misc_feature 1..22: note = chemically synthesized
  source 1..22: mol_type = other DNA
tggaagaagcactgttaccagt

SEQ ID NO: 25574 - DNA, 22 bp, synthetic construct
  misc_feature 1..22: note = chemically synthesized
  source 1..22: mol_type = other DNA
ggaagaagcactgttaccagtt

SEQ ID NO: 25575 - DNA, 22 bp, synthetic construct
  misc_feature 1..22: note = chemically synthesized
  source 1..22: mol_type = other DNA
gaagaagcactgttaccagttg

SEQ ID NO: 25576 - DNA, 22 bp, synthetic construct
  misc_feature 1..22: note = chemically synthesized
  source 1..22: mol_type = other DNA
ttaccagttgagggagaggaga

SEQ ID NO: 25577 - DNA, 22 bp, synthetic construct
  misc_feature 1..22: note = chemically synthesized
  source 1..22: mol_type = other DNA
ccagttgagggagaggagagga

SEQ ID NO: 25578 - DNA, 22 bp, synthetic construct
  misc_feature 1..22: note = chemically synthesized
  source 1..22: mol_type = other DNA
agggagaggagaggagggaaat

SEQ ID NO: 25579 - DNA, 22 bp, synthetic construct
  misc_feature 1..22: note = chemically synthesized
  source 1..22: mol_type = other DNA
gactgtggtgtgacccaggatg

SEQ ID NO: 25580 - DNA, 22 bp, synthetic construct
  misc_feature 1..22: note = chemically synthesized
  source 1..22: mol_type = other DNA
tggtgtgacccaggatggaaag

SEQ ID NO: 25581 - DNA, 22 bp, synthetic construct
  misc_feature 1..22: note = chemically synthesized
  source 1..22: mol_type = other DNA
tgcccaaatgtgggggaaaaat

SEQ ID NO: 25582 - DNA, 22 bp, synthetic construct
  misc_feature 1..22: note = chemically synthesized
  source 1..22: mol_type = other DNA
gcccaaatgtgggggaaaaatg

SEQ ID NO: 25583 - DNA, 22 bp, synthetic construct
  misc_feature 1..22: note = chemically synthesized
  source 1..22: mol_type = other DNA
cccaaatgtgggggaaaaatgt

SEQ ID NO: 25584 - DNA, 22 bp, synthetic construct
  misc_feature 1..22: note = chemically synthesized
  source 1..22: mol_type = other DNA
actctctcctttgcccaggtct

SEQ ID NO: 25585 - DNA, 22 bp, synthetic construct
  misc_feature 1..22: note = chemically synthesized
  source 1..22: mol_type = other DNA
ctctctcctttgcccaggtctt

SEQ ID NO: 25586 - DNA, 22 bp, synthetic construct
  misc_feature 1..22: note = chemically synthesized
  source 1..22: mol_type = other DNA
tctcctttgcccaggtcttact

SEQ ID NO: 25587 - DNA, 22 bp, synthetic construct
  misc_feature 1..22: note = chemically synthesized
  source 1..22: mol_type = other DNA
tcctttgcccaggtcttactac

SEQ ID NO: 25588 - DNA, 22 bp, synthetic construct
  misc_feature 1..22: note = chemically synthesized
  source 1..22: mol_type = other DNA
ctttgcccaggtcttactacaa

SEQ ID NO: 25589 - DNA, 22 bp, synthetic construct
  misc_feature 1..22: note = chemically synthesized
  source 1..22: mol_type = other DNA
tgcccaggtcttactacaatca

SEQ ID NO: 25590 - DNA, 22 bp, synthetic construct
  misc_feature 1..22: note = chemically synthesized
  source 1..22: mol_type = other DNA
gcccaggtcttactacaatcat

SEQ ID NO: 25591 - DNA, 22 bp, synthetic construct
  misc_feature 1..22: note = chemically synthesized
  source 1..22: mol_type = other DNA
cccaggtcttactacaatcatt

SEQ ID NO: 25592 - DNA, 22 bp, synthetic construct
  misc_feature 1..22: note = chemically synthesized
  source 1..22: mol_type = other DNA
actacaatcatttcttctgcac

SEQ ID NO: 25593 - DNA, 22 bp, synthetic construct
  misc_feature 1..22: note = chemically synthesized
  source 1..22: mol_type = other DNA
ctacaatcatttcttctgcaca

SEQ ID NO: 25594 - DNA, 22 bp, synthetic construct
  misc_feature 1..22: note = chemically synthesized
  source 1..22: mol_type = other DNA
caatcatttcttctgcacacac

SEQ ID NO: 25595 - DNA, 22 bp, synthetic construct
  misc_feature 1..22: note = chemically synthesized
  source 1..22: mol_type = other DNA
cttctgcacacacttgctcaga

SEQ ID NO: 25596 - DNA, 22 bp, synthetic construct
  misc_feature 1..22: note = chemically synthesized
  source 1..22: mol_type = other DNA
ttctgcacacacttgctcagaa

SEQ ID NO: 25597 - DNA, 22 bp, synthetic construct
  misc_feature 1..22: note = chemically synthesized
  source 1..22: mol_type = other DNA
ctgcacacacttgctcagaaca

SEQ ID NO: 25598 - DNA, 22 bp, synthetic construct
  misc_feature 1..22: note = chemically synthesized
  source 1..22: mol_type = other DNA
tgcacacacttgctcagaacat

SEQ ID NO: 25599 - DNA, 22 bp, synthetic construct
  misc_feature 1..22: note = chemically synthesized
  source 1..22: mol_type = other DNA
cacacacttgctcagaacatta

SEQ ID NO: 25600 - DNA, 22 bp, synthetic construct
  misc_feature 1..22: note = chemically synthesized
  source 1..22: mol_type = other DNA
gctcagaacattacaaactctg

SEQ ID NO: 25601 - DNA, 22 bp, synthetic construct
  misc_feature 1..22: note = chemically synthesized
  source 1..22: mol_type = other DNA
ctcagaacattacaaactctgg

SEQ ID NO: 25602 - DNA, 22 bp, synthetic construct
  misc_feature 1..22: note = chemically synthesized
  source 1..22: mol_type = other DNA
agaacattacaaactctggaga

SEQ ID NO: 25603 - DNA, 22 bp, synthetic construct
  misc_feature 1..22: note = chemically synthesized
  source 1..22: mol_type = other DNA
caaactctggagaaattaacat

SEQ ID NO: 25604 - DNA, 22 bp, synthetic construct
  misc_feature 1..22: note = chemically synthesized
  source 1..22: mol_type = other DNA
tggagaaattaacatgttaagg

SEQ ID NO: 25605 - DNA, 22 bp, synthetic construct
  misc_feature 1..22: note = chemically synthesized
  source 1..22: mol_type = other DNA
gagaaattaacatgttaaggat

SEQ ID NO: 25606 - DNA, 22 bp, synthetic construct
  misc_feature 1..22: note = chemically synthesized
  source 1..22: mol_type = other DNA
acatgttaaggatatttaggat

SEQ ID NO: 25607 - DNA, 22 bp, synthetic construct
  misc_feature 1..22: note = chemically synthesized
  source 1..22: mol_type = other DNA
aggatatttaggatcattaaaa

SEQ ID NO: 25608 - DNA, 22 bp, synthetic construct
  misc_feature 1..22: note = chemically synthesized
  source 1..22: mol_type = other DNA
aggatcattaaaaaagtttaat

SEQ ID NO: 25609 - DNA, 22 bp, synthetic construct
  misc_feature 1..22: note = chemically synthesized
  source 1..22: mol_type = other DNA
ggatcattaaaaaagtttaata

SEQ ID NO: 25610 - DNA, 22 bp, synthetic construct
  misc_feature 1..22: note = chemically synthesized
  source 1..22: mol_type = other DNA
aaaaagtttaataaatgttgtc

SEQ ID NO: 25611 - DNA, 22 bp, synthetic construct
  misc_feature 1..22: note = chemically synthesized
  source 1..22: mol_type = other DNA
aataaatgttgtcacacataat

SEQ ID NO: 25612 - DNA, 22 bp, synthetic construct
  misc_feature 1..22: note = chemically synthesized
  source 1..22: mol_type = other DNA
ataaatgttgtcacacataatg

SEQ ID NO: 25613 - DNA, 22 bp, synthetic construct
  misc_feature 1..22: note = chemically synthesized
  source 1..22: mol_type = other DNA
tcacacataatgaaagttaatt

SEQ ID NO: 25614 - DNA, 22 bp, synthetic construct
  misc_feature 1..22: note = chemically synthesized
  source 1..22: mol_type = other DNA
atttaagaattgtaaagacttg

SEQ ID NO: 25615 - DNA, 22 bp, synthetic construct
  misc_feature 1..22: note = chemically synthesized
  source 1..22: mol_type = other DNA
aagaattgtaaagacttgagcg

SEQ ID NO: 25616 - DNA, 22 bp, synthetic construct
  misc_feature 1..22: note = chemically synthesized
  source 1..22: mol_type = other DNA
agaattgtaaagacttgagcga

SEQ ID NO: 25617 - DNA, 22 bp, synthetic construct
  misc_feature 1..22: note = chemically synthesized
  source 1..22: mol_type = other DNA
taaagacttgagcgatgtagtc

SEQ ID NO: 25618 - DNA, 22 bp, synthetic construct
  misc_feature 1..22: note = chemically synthesized
  source 1..22: mol_type = other DNA
gagcgatgtagtccctaaataa

SEQ ID NO: 25619 - DNA, 22 bp, synthetic construct
  misc_feature 1..22: note = chemically synthesized
  source 1..22: mol_type = other DNA
agcgatgtagtccctaaataaa

SEQ ID NO: 25620 - DNA, 22 bp, synthetic construct
  misc_feature 1..22: note = chemically synthesized
  source 1..22: mol_type = other DNA
aataaatgcttccctcttaaaa

SEQ ID NO: 25621 - DNA, 22 bp, synthetic construct
  misc_feature 1..22: note = chemically synthesized
  source 1..22: mol_type = other DNA
ccctcttaaaatggactagaaa

SEQ ID NO: 25622 - DNA, 22 bp, synthetic construct
  misc_feature 1..22: note = chemically synthesized
  source 1..22: mol_type = other DNA
cctcttaaaatggactagaaac

SEQ ID NO: 25623 - DNA, 22 bp, synthetic construct
  misc_feature 1..22: note = chemically synthesized
  source 1..22: mol_type = other DNA
ttaaaatggactagaaacaatt

SEQ ID NO: 25624 - DNA, 22 bp, synthetic construct
  misc_feature 1..22: note = chemically synthesized
  source 1..22: mol_type = other DNA
aaaatggactagaaacaatttg

SEQ ID NO: 25625 - DNA, 22 bp, synthetic construct
  misc_feature 1..22: note = chemically synthesized
  source 1..22: mol_type = other DNA
aaatggactagaaacaatttgt

SEQ ID NO: 25626 - DNA, 22 bp, synthetic construct
  misc_feature 1..22: note = chemically synthesized
  source 1..22: mol_type = other DNA
gaaacaatttgtttttgcctaa

SEQ ID NO: 25627 - DNA, 22 bp, synthetic construct
  misc_feature 1..22: note = chemically synthesized
  source 1..22: mol_type = other DNA
gtttttgcctaagccaacgtat

SEQ ID NO: 25628 - DNA, 22 bp, synthetic construct
  misc_feature 1..22: note = chemically synthesized
  source 1..22: mol_type = other DNA
tttttgcctaagccaacgtatt

SEQ ID NO: 25629 - DNA, 22 bp, synthetic construct
  misc_feature 1..22: note = chemically synthesized
  source 1..22: mol_type = other DNA
ttgcctaagccaacgtattgct

SEQ ID NO: 25630 - DNA, 22 bp, synthetic construct
  misc_feature 1..22: note = chemically synthesized
  source 1..22: mol_type = other DNA
tgcctaagccaacgtattgctg

SEQ ID NO: 25631 - DNA, 22 bp, synthetic construct
  misc_feature 1..22: note = chemically synthesized
  source 1..22: mol_type = other DNA
gcctaagccaacgtattgctgg

SEQ ID NO: 25632 - DNA, 22 bp, synthetic construct
  misc_feature 1..22: note = chemically synthesized
  source 1..22: mol_type = other DNA
cctaagccaacgtattgctgga

SEQ ID NO: 25633 - DNA, 22 bp, synthetic construct
  misc_feature 1..22: note = chemically synthesized
  source 1..22: mol_type = other DNA
agccaacgtattgctggacata

SEQ ID NO: 25634 - DNA, 22 bp, synthetic construct
  misc_feature 1..22: note = chemically synthesized
  source 1..22: mol_type = other DNA
ctggacataatttacctgcttc

SEQ ID NO: 25635 - DNA, 22 bp, synthetic construct
  misc_feature 1..22: note = chemically synthesized
  source 1..22: mol_type = other DNA
gacataatttacctgcttcctc

SEQ ID NO: 25636 - DNA, 22 bp, synthetic construct
  misc_feature 1..22: note = chemically synthesized
  source 1..22: mol_type = other DNA
acctgcttcctcctcagtcttg

SEQ ID NO: 25637 - DNA, 22 bp, synthetic construct
  misc_feature 1..22: note = chemically synthesized
  source 1..22: mol_type = other DNA
cctgcttcctcctcagtcttga

SEQ ID NO: 25638 - DNA, 22 bp, synthetic construct
  misc_feature 1..22: note = chemically synthesized
  source 1..22: mol_type = other DNA
cttcctcctcagtcttgacact

SEQ ID NO: 25639 - DNA, 22 bp, synthetic construct
  misc_feature 1..22: note = chemically synthesized
  source 1..22: mol_type = other DNA
cctcctcagtcttgacactaca

SEQ ID NO: 25640 - DNA, 22 bp, synthetic construct
  misc_feature 1..22: note = chemically synthesized
  source 1..22: mol_type = other DNA
ctcctcagtcttgacactacac

SEQ ID NO: 25641 - DNA, 22 bp, synthetic construct
  misc_feature 1..22: note = chemically synthesized
  source 1..22: mol_type = other DNA
ctcagtcttgacactacacctc

SEQ ID NO: 25642 - DNA, 22 bp, synthetic construct
  misc_feature 1..22: note = chemically synthesized
  source 1..22: mol_type = other DNA
agtcttgacactacacctctga

SEQ ID NO: 25643 - DNA, 22 bp, synthetic construct
  misc_feature 1..22: note = chemically synthesized
  source 1..22: mol_type = other DNA
gacactacacctctgaattaca

SEQ ID NO: 25644 - DNA, 22 bp, synthetic construct
  misc_feature 1..22: note = chemically synthesized
  source 1..22: mol_type = other DNA
acactacacctctgaattacat

SEQ ID NO: 25645 - DNA, 22 bp, synthetic construct
  misc_feature 1..22: note = chemically synthesized
  source 1..22: mol_type = other DNA
cacctctgaattacatggtaca

SEQ ID NO: 25646 - DNA, 22 bp, synthetic construct
  misc_feature 1..22: note = chemically synthesized
  source 1..22: mol_type = other DNA
tgaattacatggtacaagtggc

SEQ ID NO: 25647 - DNA, 22 bp, synthetic construct
  misc_feature 1..22: note = chemically synthesized
  source 1..22: mol_type = other DNA
aattacatggtacaagtggcac

SEQ ID NO: 25648 - DNA, 22 bp, synthetic construct
  misc_feature 1..22: note = chemically synthesized
  source 1..22: mol_type = other DNA
catggtacaagtggcacaggga

SEQ ID NO: 25649 - DNA, 22 bp, synthetic construct
  misc_feature 1..22: note = chemically synthesized
  source 1..22: mol_type = other DNA
agaaaactagagtcaaagtggt

SEQ ID NO: 25650 - DNA, 22 bp, synthetic construct
  misc_feature 1..22: note = chemically synthesized
  source 1..22: mol_type = other DNA
gagtcaaagtggttatggaaga

SEQ ID NO: 25651 - DNA, 22 bp, synthetic construct
  misc_feature 1..22: note = chemically synthesized
  source 1..22: mol_type = other DNA
tggaagaaattataataatgag

SEQ ID NO: 25652 - DNA, 22 bp, synthetic construct
  misc_feature 1..22: note = chemically synthesized
  source 1..22: mol_type = other DNA
taataatgagtccactcttcta

SEQ ID NO: 25653 - DNA, 22 bp, synthetic construct
  misc_feature 1..22: note = chemically synthesized
  source 1..22: mol_type = other DNA
ttctaggacaggagttctaaag

SEQ ID NO: 25654 - DNA, 22 bp, synthetic construct
  misc_feature 1..22: note = chemically synthesized
  source 1..22: mol_type = other DNA
ctaggacaggagttctaaaggt

SEQ ID NO: 25655 - DNA, 22 bp, synthetic construct
  misc_feature 1..22: note = chemically synthesized
  source 1..22: mol_type = other DNA
taggacaggagttctaaaggtg

SEQ ID NO: 25656 - DNA, 22 bp, synthetic construct
  misc_feature 1..22: note = chemically synthesized
  source 1..22: mol_type = other DNA
ggacaggagttctaaaggtgag

SEQ ID NO: 25657 - DNA, 22 bp, synthetic construct
  misc_feature 1..22: note = chemically synthesized
  source 1..22: mol_type = other DNA
taaaggtgaggactttgatata

SEQ ID NO: 25658 - DNA, 22 bp, synthetic construct
  misc_feature 1..22: note = chemically synthesized
  source 1..22: mol_type = other DNA
aaggtgaggactttgatataag

SEQ ID NO: 25659 - DNA, 22 bp, synthetic construct
  misc_feature 1..22: note = chemically synthesized
  source 1..22: mol_type = other DNA
tgatataagtgaactcaaggag

SEQ ID NO: 25660 - DNA, 22 bp, synthetic construct
  misc_feature 1..22: note = chemically synthesized
  source 1..22: mol_type = other DNA
gatataagtgaactcaaggagt

SEQ ID NO: 25661 - DNA, 22 bp, synthetic construct
  misc_feature 1..22: note = chemically synthesized
  source 1..22: mol_type = other DNA
atataagtgaactcaaggagtt

SEQ ID NO: 25662 - DNA, 22 bp, synthetic construct
  misc_feature 1..22: note = chemically synthesized
  source 1..22: mol_type = other DNA
aaggagtttctaaaccttcaga

SEQ ID NO: 25663 - DNA, 22 bp, synthetic construct
  misc_feature 1..22: note = chemically synthesized
  source 1..22: mol_type = other DNA
ctaaaccttcagaaattatatc

SEQ ID NO: 25664 - DNA, 22 bp, synthetic construct
  misc_feature 1..22: note = chemically synthesized
  source 1..22: mol_type = other DNA
taaaccttcagaaattatatct

SEQ ID NO: 25665 - DNA, 22 bp, synthetic construct
  misc_feature 1..22: note = chemically synthesized
  source 1..22: mol_type = other DNA
aaccttcagaaattatatctaa

SEQ ID NO: 25666 - DNA, 22 bp, synthetic construct
  misc_feature 1..22: note = chemically synthesized
  source 1..22: mol_type = other DNA
cagaaattatatctaaaaatta

SEQ ID NO: 25667 - DNA, 22 bp, synthetic construct
  misc_feature 1..22: note = chemically synthesized
  source 1..22: mol_type = other DNA
agaaattatatctaaaaattag

SEQ ID NO: 25668 - DNA, 22 bp, synthetic construct
  misc_feature 1..22: note = chemically synthesized
  source 1..22: mol_type = other DNA
tatctaaaaattaggtgcacgt

SEQ ID NO: 25669 - DNA, 22 bp, synthetic construct
  misc_feature 1..22: note = chemically synthesized
  source 1..22: mol_type = other DNA
aaaattaggtgcacgtatatag

SEQ ID NO: 25670 - DNA, 22 bp, synthetic construct
  misc_feature 1..22: note = chemically synthesized
  source 1..22: mol_type = other DNA
ggtgcacgtatatagaagtact

SEQ ID NO: 25671 - DNA, 22 bp, synthetic construct
  misc_feature 1..22: note = chemically synthesized
  source 1..22: mol_type = other DNA
ttctctgagaagaggacttcac

SEQ ID NO: 25672 - DNA, 22 bp, synthetic construct
  misc_feature 1..22: note = chemically synthesized
  source 1..22: mol_type = other DNA
tctctgagaagaggacttcaca

SEQ ID NO: 25673 - DNA, 22 bp, synthetic construct
  misc_feature 1..22: note = chemically synthesized
  source 1..22: mol_type = other DNA
ctctgagaagaggacttcacac

SEQ ID NO: 25674 - DNA, 22 bp, synthetic construct
  misc_feature 1..22: note = chemically synthesized
  source 1..22: mol_type = other DNA
tctgagaagaggacttcacact

SEQ ID NO: 25675 - DNA, 22 bp, synthetic construct
  misc_feature 1..22: note = chemically synthesized
  source 1..22: mol_type = other DNA
tgagaagaggacttcacacttc

SEQ ID NO: 25676 - DNA, 22 bp, synthetic construct
  misc_feature 1..22: note = chemically synthesized
  source 1..22: mol_type = other DNA
agaagaggacttcacacttcca

SEQ ID NO: 25677 - DNA, 22 bp, synthetic construct
  misc_feature 1..22: note = chemically synthesized
  source 1..22: mol_type = other DNA
cacacttccatcagcttcctga

SEQ ID NO: 25678 - DNA, 22 bp, synthetic construct
  misc_feature 1..22: note = chemically synthesized
  source 1..22: mol_type = other DNA
acacttccatcagcttcctgaa

SEQ ID NO: 25679 - DNA, 22 bp, synthetic construct
  misc_feature 1..22: note = chemically synthesized
  source 1..22: mol_type = other DNA
ccatcagcttcctgaaggcccc

SEQ ID NO: 25680 - DNA, 22 bp, synthetic construct
  misc_feature 1..22: note = chemically synthesized
  source 1..22: mol_type = other DNA
catcagcttcctgaaggcccct

SEQ ID NO: 25681 - DNA, 22 bp, synthetic construct
  misc_feature 1..22: note = chemically synthesized
  source 1..22: mol_type = other DNA
cctgaaggcccctgtaattgcc

SEQ ID NO: 25682 - DNA, 22 bp, synthetic construct
  misc_feature 1..22: note = chemically synthesized
  source 1..22: mol_type = other DNA
ctgaaggcccctgtaattgccg

SEQ ID NO: 25683 - DNA, 22 bp, synthetic construct
  misc_feature 1..22: note = chemically synthesized
  source 1..22: mol_type = other DNA
aaggcccctgtaattgccgtaa

SEQ ID NO: 25684 - DNA, 22 bp, synthetic construct
  misc_feature 1..22: note = chemically synthesized
  source 1..22: mol_type = other DNA
taattgccgtaaagaacaactg

SEQ ID NO: 25685 - DNA, 22 bp, synthetic construct
  misc_feature 1..22: note = chemically synthesized
  source 1..22: mol_type = other DNA
ccgtaaagaacaactgctctaa

SEQ ID NO: 25686 - DNA, 22 bp, synthetic construct
  misc_feature 1..22: note = chemically synthesized
  source 1..22: mol_type = other DNA
ctctaaagtttaatactaggct

SEQ ID NO: 25687 - DNA, 22 bp, synthetic construct
  misc_feature 1..22: note = chemically synthesized
  source 1..22: mol_type = other DNA
taaagtttaatactaggctact

SEQ ID NO: 25688 - DNA, 22 bp, synthetic construct
  misc_feature 1..22: note = chemically synthesized
  source 1..22: mol_type = other DNA
aagtttaatactaggctactcg

SEQ ID NO: 25689 - DNA, 22 bp, synthetic construct
  misc_feature 1..22: note = chemically synthesized
  source 1..22: mol_type = other DNA
aatactaggctactcggctgtt

SEQ ID NO: 25690 - DNA, 22 bp, synthetic construct
  misc_feature 1..22: note = chemically synthesized
  source 1..22: mol_type = other DNA
atactaggctactcggctgttt

SEQ ID NO: 25691 - DNA, 22 bp, synthetic construct
  misc_feature 1..22: note = chemically synthesized
  source 1..22: mol_type = other DNA
ggctactcggctgttttttgtt

SEQ ID NO: 25692 - DNA, 22 bp, synthetic construct
  misc_feature 1..22: note = chemically synthesized
  source 1..22: mol_type = other DNA
ctcggctgttttttgttaacac

SEQ ID NO: 25693 - DNA, 22 bp, synthetic construct
  misc_feature 1..22: note = chemically synthesized
  source 1..22: mol_type = other DNA
ggctgttttttgttaacacaga

SEQ ID NO: 25694 - DNA, 22 bp, synthetic construct
  misc_feature 1..22: note = chemically synthesized
  source 1..22: mol_type = other DNA
ttttttgttaacacagaagttt

SEQ ID NO: 25695 - DNA, 22 bp, synthetic construct
  misc_feature 1..22: note = chemically synthesized
  source 1..22: mol_type = other DNA
tttgttaacacagaagttttcc

SEQ ID NO: 25696 - DNA, 22 bp, synthetic construct
  misc_feature 1..22: note = chemically synthesized
  source 1..22: mol_type = other DNA
ttgttaacacagaagttttcca

SEQ ID NO: 25697 - DNA, 22 bp, synthetic construct
  misc_feature 1..22: note = chemically synthesized
  source 1..22: mol_type = other DNA
tgttaacacagaagttttccaa

SEQ ID NO: 25698 - DNA, 22 bp, synthetic construct
  misc_feature 1..22: note = chemically synthesized
  source 1..22: mol_type = other DNA
gttaacacagaagttttccaaa

SEQ ID NO: 25699 - DNA, 22 bp, synthetic construct
  misc_feature 1..22: note = chemically synthesized
  source 1..22: mol_type = other DNA
ttaacacagaagttttccaaat

SEQ ID NO: 25700 - DNA, 22 bp, synthetic construct
  misc_feature 1..22: note = chemically synthesized
  source 1..22: mol_type = other DNA
acacagaagttttccaaatggc

SEQ ID NO: 25701 - DNA, 22 bp, synthetic construct
  misc_feature 1..22: note = chemically synthesized
  source 1..22: mol_type = other DNA
tccaaatggcttttctctagag

SEQ ID NO: 25702 - DNA, 22 bp, synthetic construct
  misc_feature 1..22: note = chemically synthesized
  source 1..22: mol_type = other DNA
ccaaatggcttttctctagagc

SEQ ID NO: 25703 - DNA, 22 bp, synthetic construct
  misc_feature 1..22: note = chemically synthesized
  source 1..22: mol_type = other DNA
caaatggcttttctctagagca

SEQ ID NO: 25704 - DNA, 22 bp, synthetic construct
  misc_feature 1..22: note = chemically synthesized
  source 1..22: mol_type = other DNA
ttctctagagcaaaatgaaaag

SEQ ID NO: 25705 - DNA, 22 bp, synthetic construct
  misc_feature 1..22: note = chemically synthesized
  source 1..22: mol_type = other DNA
tctctagagcaaaatgaaaagg

SEQ ID NO: 25706 - DNA, 22 bp, synthetic construct
  misc_feature 1..22: note = chemically synthesized
  source 1..22: mol_type = other DNA
ctctagagcaaaatgaaaagga

SEQ ID NO: 25707 - DNA, 22 bp, synthetic construct
  misc_feature 1..22: note = chemically synthesized
  source 1..22: mol_type = other DNA
tctagagcaaaatgaaaaggat

SEQ ID NO: 25708 - DNA, 22 bp, synthetic construct
  misc_feature 1..22: note = chemically synthesized
  source 1..22: mol_type = other DNA
tagagcaaaatgaaaaggatcc

SEQ ID NO: 25709 - DNA, 22 bp, synthetic construct
  misc_feature 1..22: note = chemically synthesized
  source 1..22: mol_type = other DNA
gagcaaaatgaaaaggatccca

SEQ ID NO: 25710 - DNA, 22 bp, synthetic construct
  misc_feature 1..22: note = chemically synthesized
  source 1..22: mol_type = other DNA
cccgagacctaacgatgtttat

SEQ ID NO: 25711 - DNA, 22 bp, synthetic construct
  misc_feature 1..22: note = chemically synthesized
  source 1..22: mol_type = other DNA
ccgagacctaacgatgtttatc

SEQ ID NO: 25712 - DNA, 22 bp, synthetic construct
  misc_feature 1..22: note = chemically synthesized
  source 1..22: mol_type = other DNA
acgatgtttatctttcgtgata

SEQ ID NO: 25713 - DNA, 22 bp, synthetic construct
  misc_feature 1..22: note = chemically synthesized
  source 1..22: mol_type = other DNA
atctttcgtgatactgtttttg

SEQ ID NO: 25714 - DNA, 22 bp, synthetic construct
  misc_feature 1..22: note = chemically synthesized
  source 1..22: mol_type = other DNA
tctttcgtgatactgtttttgt

SEQ ID NO: 25715 - DNA, 22 bp, synthetic construct
  misc_feature 1..22: note = chemically synthesized
  source 1..22: mol_type = other DNA
tcgtgatactgtttttgttctt

SEQ ID NO: 25716 - DNA, 22 bp, synthetic construct
  misc_feature 1..22: note = chemically synthesized
  source 1..22: mol_type = other DNA
cgtgatactgtttttgttcttc

SEQ ID NO: 25717 - DNA, 22 bp, synthetic construct
  misc_feature 1..22: note = chemically synthesized
  source 1..22: mol_type = other DNA
gtgatactgtttttgttcttcc

SEQ ID NO: 25718 - DNA, 22 bp, synthetic construct
  misc_feature 1..22: note = chemically synthesized
  source 1..22: mol_type = other DNA
tttttgttcttcctctttttct

SEQ ID NO: 25719 - DNA, 22 bp, synthetic construct
  misc_feature 1..22: note = chemically synthesized
  source 1..22: mol_type = other DNA
ttgttcttcctctttttctcct

SEQ ID NO: 25720 - DNA, 22 bp, synthetic construct
  misc_feature 1..22: note = chemically synthesized
  source 1..22: mol_type = other DNA
tgttcttcctctttttctccta

SEQ ID NO: 25721 - DNA, 22 bp, synthetic construct
  misc_feature 1..22: note = chemically synthesized
  source 1..22: mol_type = other DNA
gttcttcctctttttctcctac

SEQ ID NO: 25722 - DNA, 22 bp, synthetic construct
  misc_feature 1..22: note = chemically synthesized
  source 1..22: mol_type = other DNA
ttcttcctctttttctcctacc

SEQ ID NO: 25723 - DNA, 22 bp, synthetic construct
  misc_feature 1..22: note = chemically synthesized
  source 1..22: mol_type = other DNA
ttcctctttttctcctaccccc

SEQ ID NO: 25724 - DNA, 22 bp, synthetic construct
  misc_feature 1..22: note = chemically synthesized
  source 1..22: mol_type = other DNA
cctctttttctcctacccccca

SEQ ID NO: 25725 - DNA, 22 bp, synthetic construct
  misc_feature 1..22: note = chemically synthesized
  source 1..22: mol_type = other DNA
ctctttttctcctaccccccac

SEQ ID NO: 25726 - DNA, 22 bp, synthetic construct
  misc_feature 1..22: note = chemically synthesized
  source 1..22: mol_type = other DNA
tttttctcctaccccccaccac

SEQ ID NO: 25727 - DNA, 22 bp, synthetic construct
  misc_feature 1..22: note = chemically synthesized
  source 1..22: mol_type = other DNA
tttctcctaccccccaccactt

SEQ ID NO: 25728 - DNA, 22 bp, synthetic construct
  misc_feature 1..22: note = chemically synthesized
  source 1..22: mol_type = other DNA
ttctcctaccccccaccacttt

SEQ ID NO: 25729 - DNA, 22 bp, synthetic construct
  misc_feature 1..22: note = chemically synthesized
  source 1..22: mol_type = other DNA
tctcctaccccccaccactttt

SEQ ID NO: 25730 - DNA, 22 bp, synthetic construct
  misc_feature 1..22: note = chemically synthesized
  source 1..22: mol_type = other DNA
ctcctaccccccaccactttta

SEQ ID NO: 25731 - DNA, 22 bp, synthetic construct
  misc_feature 1..22: note = chemically synthesized
  source 1..22: mol_type = other DNA
tcctaccccccaccacttttaa

SEQ ID NO: 25732 - DNA, 22 bp, synthetic construct
  misc_feature 1..22: note = chemically synthesized
  source 1..22: mol_type = other DNA
ctaccccccaccacttttaaag

SEQ ID NO: 25733 - DNA, 22 bp, synthetic construct
  misc_feature 1..22: note = chemically synthesized
  source 1..22: mol_type = other DNA
ccccccaccacttttaaagatc

SEQ ID NO: 25734 - DNA, 22 bp, synthetic construct
  misc_feature 1..22: note = chemically synthesized
  source 1..22: mol_type = other DNA
ttaaagatccatcaaggcccag

SEQ ID NO: 25735 - DNA, 22 bp, synthetic construct
  misc_feature 1..22: note = chemically synthesized
  source 1..22: mol_type = other DNA
taaagatccatcaaggcccagc

SEQ ID NO: 25736 - DNA, 22 bp, synthetic construct
  misc_feature 1..22: note = chemically synthesized
  source 1..22: mol_type = other DNA
aaagatccatcaaggcccagca

SEQ ID NO: 25737 - DNA, 22 bp, synthetic construct
  misc_feature 1..22: note = chemically synthesized
  source 1..22: mol_type = other DNA
aagatccatcaaggcccagcat

SEQ ID NO: 25738 - DNA, 22 bp, synthetic construct
  misc_feature 1..22: note = chemically synthesized
  source 1..22: mol_type = other DNA
acacctgtaatctcaacacttt

SEQ ID NO: 25739 - DNA, 22 bp, synthetic construct
  misc_feature 1..22: note = chemically synthesized
  source 1..22: mol_type = other DNA
taatctcaacacttttcaaggc

SEQ ID NO: 25740 - DNA, 22 bp, synthetic construct
  misc_feature 1..22: note = chemically synthesized
  source 1..22: mol_type = other DNA
aacacttttcaaggctgaggtg

SEQ ID NO: 25741 - DNA, 22 bp, synthetic construct
  misc_feature 1..22: note = chemically synthesized
  source 1..22: mol_type = other DNA
ttcaaggctgaggtgggagaat

SEQ ID NO: 25742 - DNA, 22 bp, synthetic construct
  misc_feature 1..22: note = chemically synthesized
  source 1..22: mol_type = other DNA
tcaaggctgaggtgggagaatt

SEQ ID NO: 25743 - DNA, 22 bp, synthetic construct
  misc_feature 1..22: note = chemically synthesized
  source 1..22: mol_type = other DNA
caaggctgaggtgggagaattg

SEQ ID NO: 25744 - DNA, 22 bp, synthetic construct
  misc_feature 1..22: note = chemically synthesized
  source 1..22: mol_type = other DNA
aaggctgaggtgggagaattgt

SEQ ID NO: 25745 - DNA, 22 bp, synthetic construct
  misc_feature 1..22: note = chemically synthesized
  source 1..22: mol_type = other DNA
aggtgggagaattgtttgagac

SEQ ID NO: 25746 - DNA, 22 bp, synthetic construct
  misc_feature 1..22: note = chemically synthesized
  source 1..22: mol_type = other DNA
tttgagaccaagagttggatac

SEQ ID NO: 25747 - DNA, 22 bp, synthetic construct
  misc_feature 1..22: note = chemically synthesized
  source 1..22: mol_type = other DNA
gagaccaagagttggataccag

SEQ ID NO: 25748 - DNA, 22 bp, synthetic construct
  misc_feature 1..22: note = chemically synthesized
  source 1..22: mol_type = other DNA
agaccaagagttggataccagc

SEQ ID NO: 25749 - DNA, 22 bp, synthetic construct
  misc_feature 1..22: note = chemically synthesized
  source 1..22: mol_type = other DNA
gataccagcctggggaacatag

SEQ ID NO: 25750 - DNA, 22 bp, synthetic construct
  misc_feature 1..22: note = chemically synthesized
  source 1..22: mol_type = other DNA
gggaacatagggagaccctgtt

SEQ ID NO: 25751 - DNA, 22 bp, synthetic construct
  misc_feature 1..22: note = chemically synthesized
  source 1..22: mol_type = other DNA
tttctacagaaatttaaaaaat

SEQ ID NO: 25752 - DNA, 22 bp, synthetic construct
  misc_feature 1..22: note = chemically synthesized
  source 1..22: mol_type = other DNA
ctacagaaatttaaaaaatttc

SEQ ID NO: 25753 - DNA, 22 bp, synthetic construct
  misc_feature 1..22: note = chemically synthesized
  source 1..22: mol_type = other DNA
tacagaaatttaaaaaatttct

SEQ ID NO: 25754 - DNA, 22 bp, synthetic construct
  misc_feature 1..22: note = chemically synthesized
  source 1..22: mol_type = other DNA
cagaaatttaaaaaatttctct

SEQ ID NO: 25755 - DNA, 22 bp, synthetic construct
  misc_feature 1..22: note = chemically synthesized
  source 1..22: mol_type = other DNA
aaaaaatttctctagctggcca

SEQ ID NO: 25756 - DNA, 22 bp, synthetic construct
  misc_feature 1..22: note = chemically synthesized
  source 1..22: mol_type = other DNA
aaaaatttctctagctggccat

SEQ ID NO: 25757 - DNA, 22 bp, synthetic construct
  misc_feature 1..22: note = chemically synthesized
  source 1..22: mol_type = other DNA
ctctagctggccatggaggctc

SEQ ID NO: 25758 - DNA, 22 bp, synthetic construct
  misc_feature 1..22: note = chemically synthesized
  source 1..22: mol_type = other DNA
tctagctggccatggaggctca

SEQ ID NO: 25759 - DNA, 22 bp, synthetic construct
  misc_feature 1..22: note = chemically synthesized
  source 1..22: mol_type = other DNA
tagctggccatggaggctcaca

SEQ ID NO: 25760 - DNA, 22 bp, synthetic construct
  misc_feature 1..22: note = chemically synthesized
  source 1..22: mol_type = other DNA
gctggccatggaggctcacacc

SEQ ID NO: 25761 - DNA, 22 bp, synthetic construct
  misc_feature 1..22: note = chemically synthesized
  source 1..22: mol_type = other DNA
gccatggaggctcacacctgta

SEQ ID NO: 25762 - DNA, 22 bp, synthetic construct
  misc_feature 1..22: note = chemically synthesized
  source 1..22: mol_type = other DNA
acacctgtagtcctagctacct

SEQ ID NO: 25763 - DNA, 22 bp, synthetic construct
  misc_feature 1..22: note = chemically synthesized
  source 1..22: mol_type = other DNA
tagtcctagctacctgagaggc

SEQ ID NO: 25764 - DNA, 22 bp, synthetic construct
  misc_feature 1..22: note = chemically synthesized
  source 1..22: mol_type = other DNA
gctacctgagaggctaaagcag

SEQ ID NO: 25765 - DNA, 22 bp, synthetic construct
  misc_feature 1..22: note = chemically synthesized
  source 1..22: mol_type = other DNA
cctgagaggctaaagcaggagg

SEQ ID NO: 25766 - DNA, 22 bp, synthetic construct
  misc_feature 1..22: note = chemically synthesized
  source 1..22: mol_type = other DNA
agaggctaaagcaggaggatca

SEQ ID NO: 25767 - DNA, 22 bp, synthetic construct
  misc_feature 1..22: note = chemically synthesized
  source 1..22: mol_type = other DNA
aagcaggaggatcaattgaatc

SEQ ID NO: 25768 - DNA, 22 bp, synthetic construct
  misc_feature 1..22: note = chemically synthesized
  source 1..22: mol_type = other DNA
aatccaggcgttctagtgaggc

SEQ ID NO: 25769 - DNA, 22 bp, synthetic construct
  misc_feature 1..22: note = chemically synthesized
  source 1..22: mol_type = other DNA
tagtgaggcttcagtgagcaag

SEQ ID NO: 25770 - DNA, 22 bp, synthetic construct
  misc_feature 1..22: note = chemically synthesized
  source 1..22: mol_type = other DNA
gtgaggcttcagtgagcaagat

SEQ ID NO: 25771 - DNA, 22 bp, synthetic construct
  misc_feature 1..22: note = chemically synthesized
  source 1..22: mol_type = other DNA
cagtgagcaagattgcaccatt

SEQ ID NO: 25772 - DNA, 22 bp, synthetic construct
  misc_feature 1..22: note = chemically synthesized
  source 1..22: mol_type = other DNA
agtgagcaagattgcaccattg

SEQ ID NO: 25773 - DNA, 22 bp, synthetic construct
  misc_feature 1..22: note = chemically synthesized
  source 1..22: mol_type = other DNA
caccattgcactccagccgggg

SEQ ID NO: 25774 - DNA, 22 bp, synthetic construct
  misc_feature 1..22: note = chemically synthesized
  source 1..22: mol_type = other DNA
cactccagccggggtgacagag

SEQ ID NO: 25775 - DNA, 22 bp, synthetic construct
  misc_feature 1..22: note = chemically synthesized
  source 1..22: mol_type = other DNA
cagccggggtgacagagtgaga

SEQ ID NO: 25776 - DNA, 22 bp, synthetic construct
  misc_feature 1..22: note = chemically synthesized
  source 1..22: mol_type = other DNA
tttcaaacaaacaagcaaaagc

SEQ ID NO: 25777 - DNA, 22 bp, synthetic construct
  misc_feature 1..22: note = chemically synthesized
  source 1..22: mol_type = other DNA
caaacaaacaagcaaaagcaaa

SEQ ID NO: 25778 - DNA, 22 bp, synthetic construct
  misc_feature 1..22: note = chemically synthesized
  source 1..22: mol_type = other DNA
aaacaaacaagcaaaagcaaaa

SEQ ID NO: 25779 - DNA, 22 bp, synthetic construct
  misc_feature 1..22: note = chemically synthesized
  source 1..22: mol_type = other DNA
gttgctccattcctttacttac

SEQ ID NO: 25780 - DNA, 22 bp, synthetic construct
  misc_feature 1..22: note = chemically synthesized
  source 1..22: mol_type = other DNA
ttgctccattcctttacttact

SEQ ID NO: 25781 - DNA, 22 bp, synthetic construct
  misc_feature 1..22: note = chemically synthesized
  source 1..22: mol_type = other DNA
ctccattcctttacttactatc

SEQ ID NO: 25782 - DNA, 22 bp, synthetic construct
  misc_feature 1..22: note = chemically synthesized
  source 1..22: mol_type = other DNA
cattcctttacttactatcttg

SEQ ID NO: 25783 - DNA, 22 bp, synthetic construct
  misc_feature 1..22: note = chemically synthesized
  source 1..22: mol_type = other DNA
ctttacttactatcttgctgtc

SEQ ID NO: 25784 - DNA, 22 bp, synthetic construct
  misc_feature 1..22: note = chemically synthesized
  source 1..22: mol_type = other DNA
tacttactatcttgctgtctac

SEQ ID NO: 25785 - DNA, 22 bp, synthetic construct
  misc_feature 1..22: note = chemically synthesized
  source 1..22: mol_type = other DNA
acttactatcttgctgtctaca

SEQ ID NO: 25786 - DNA, 22 bp, synthetic construct
  misc_feature 1..22: note = chemically synthesized
  source 1..22: mol_type = other DNA
cttactatcttgctgtctacag

SEQ ID NO: 25787 - DNA, 22 bp, synthetic construct
  misc_feature 1..22: note = chemically synthesized
  source 1..22: mol_type = other DNA
actatcttgctgtctacagcta

SEQ ID NO: 25788 - DNA, 22 bp, synthetic construct
  misc_feature 1..22: note = chemically synthesized
  source 1..22: mol_type = other DNA
ctatcttgctgtctacagctaa

SEQ ID NO: 25789 - DNA, 22 bp, synthetic construct
  misc_feature 1..22: note = chemically synthesized
  source 1..22: mol_type = other DNA
tcttgctgtctacagctaaagt

SEQ ID NO: 25790 - DNA, 22 bp, synthetic construct
  misc_feature 1..22: note = chemically synthesized
  source 1..22: mol_type = other DNA
gctgtctacagctaaagtcaga

SEQ ID NO: 25791 - DNA, 22 bp, synthetic construct
  misc_feature 1..22: note = chemically synthesized
  source 1..22: mol_type = other DNA
ctgtctacagctaaagtcagac

SEQ ID NO: 25792 - DNA, 22 bp, synthetic construct
  misc_feature 1..22: note = chemically synthesized
  source 1..22: mol_type = other DNA
tctacagctaaagtcagactgc

SEQ ID NO: 25793 - DNA, 22 bp, synthetic construct
  misc_feature 1..22: note = chemically synthesized
  source 1..22: mol_type = other DNA
cagctaaagtcagactgcatga

SEQ ID NO: 25794 - DNA, 22 bp, synthetic construct
  misc_feature 1..22: note = chemically synthesized
  source 1..22: mol_type = other DNA
aagtcagactgcatgatttgga

SEQ ID NO: 25795 - DNA, 22 bp, synthetic construct
  misc_feature 1..22: note = chemically synthesized
  source 1..22: mol_type = other DNA
catgatttggaattccaactcc

SEQ ID NO: 25796 - DNA, 22 bp, synthetic construct
  misc_feature 1..22: note = chemically synthesized
  source 1..22: mol_type = other DNA
ggaattccaactccaccatcac

SEQ ID NO: 25797 - DNA, 22 bp, synthetic construct
  misc_feature 1..22: note = chemically synthesized
  source 1..22: mol_type = other DNA
gaattccaactccaccatcacc

SEQ ID NO: 25798 - DNA, 22 bp, synthetic construct
  misc_feature 1..22: note = chemically synthesized
  source 1..22: mol_type = other DNA
caactccaccatcacctgggta

SEQ ID NO: 25799 - DNA, 22 bp, synthetic construct
  misc_feature 1..22: note = chemically synthesized
  source 1..22: mol_type = other DNA
caccatcacctgggtaatgttg

SEQ ID NO: 25800 - DNA, 22 bp, synthetic construct
  misc_feature 1..22: note = chemically synthesized
  source 1..22: mol_type = other DNA
ggtaatgttgagatttattaca

SEQ ID NO: 25801 - DNA, 22 bp, synthetic construct
  misc_feature 1..22: note = chemically synthesized
  source 1..22: mol_type = other DNA
agatttattacatagcatctct

SEQ ID NO: 25802 - DNA, 22 bp, synthetic construct
  misc_feature 1..22: note = chemically synthesized
  source 1..22: mol_type = other DNA
attacatagcatctctgtgcct

SEQ ID NO: 25803 - DNA, 22 bp, synthetic construct
  misc_feature 1..22: note = chemically synthesized
  source 1..22: mol_type = other DNA
ttacatagcatctctgtgcctc

SEQ ID NO: 25804 - DNA, 22 bp, synthetic construct
  misc_feature 1..22: note = chemically synthesized
  source 1..22: mol_type = other DNA
catagcatctctgtgcctcagt

SEQ ID NO: 25805 - DNA, 22 bp, synthetic construct
  misc_feature 1..22: note = chemically synthesized
  source 1..22: mol_type = other DNA
tgtgcctcagtttctccatata

SEQ ID NO: 25806 - DNA, 22 bp, synthetic construct
  misc_feature 1..22: note = chemically synthesized
  source 1..22: mol_type = other DNA
tgcctcagtttctccatatata

SEQ ID NO: 25807 - DNA, 22 bp, synthetic construct
  misc_feature 1..22: note = chemically synthesized
  source 1..22: mol_type = other DNA
agtttctccatatataaaatct

SEQ ID NO: 25808 - DNA, 22 bp, synthetic construct
  misc_feature 1..22: note = chemically synthesized
  source 1..22: mol_type = other DNA
ctccatatataaaatctacctg

SEQ ID NO: 25809 - DNA, 22 bp, synthetic construct
  misc_feature 1..22: note = chemically synthesized
  source 1..22: mol_type = other DNA
tccatatataaaatctacctgt

SEQ ID NO: 25810 - DNA, 22 bp, synthetic construct
  misc_feature 1..22: note = chemically synthesized
  source 1..22: mol_type = other DNA
catatataaaatctacctgtaa

SEQ ID NO: 25811 - DNA, 22 bp, synthetic construct
  misc_feature 1..22: note = chemically synthesized
  source 1..22: mol_type = other DNA
cctgtaataatgttgtgaaaat

SEQ ID NO: 25812 - DNA, 22 bp, synthetic construct
  misc_feature 1..22: note = chemically synthesized
  source 1..22: mol_type = other DNA
taataatgttgtgaaaattaaa

SEQ ID NO: 25813 - DNA, 22 bp, synthetic construct
  misc_feature 1..22: note = chemically synthesized
  source 1..22: mol_type = other DNA
tgaaaattaaaagaaataccag

SEQ ID NO: 25814 - DNA, 22 bp, synthetic construct
  misc_feature 1..22: note = chemically synthesized
  source 1..22: mol_type = other DNA
aaagaaataccagttgtaaatc

SEQ ID NO: 25815 - DNA, 22 bp, synthetic construct
  misc_feature 1..22: note = chemically synthesized
  source 1..22: mol_type = other DNA
taaatcactcagaactgtgcct

SEQ ID NO: 25816 - DNA, 22 bp, synthetic construct
  misc_feature 1..22: note = chemically synthesized
  source 1..22: mol_type = other DNA
agaactgtgcctagcatttaat

SEQ ID NO: 25817 - DNA, 22 bp, synthetic construct
  misc_feature 1..22: note = chemically synthesized
  source 1..22: mol_type = other DNA
tgcctagcatttaataaacact

SEQ ID NO: 25818 - DNA, 22 bp, synthetic construct
  misc_feature 1..22: note = chemically synthesized
  source 1..22: mol_type = other DNA
gcatttaataaacactctgtag

SEQ ID NO: 25819 - DNA, 22 bp, synthetic construct
  misc_feature 1..22: note = chemically synthesized
  source 1..22: mol_type = other DNA
aataaacactctgtaggtatta

SEQ ID NO: 25820 - DNA, 22 bp, synthetic construct
  misc_feature 1..22: note = chemically synthesized
  source 1..22: mol_type = other DNA
ataaacactctgtaggtattag

SEQ ID NO: 25821 - DNA, 22 bp, synthetic construct
  misc_feature 1..22: note = chemically synthesized
  source 1..22: mol_type = other DNA
tgtaggtattagcttatttctt

SEQ ID NO: 25822 - DNA, 22 bp, synthetic construct
  misc_feature 1..22: note = chemically synthesized
  source 1..22: mol_type = other DNA
taggtattagcttatttcttta

SEQ ID NO: 25823 - DNA, 22 bp, synthetic construct
  misc_feature 1..22: note = chemically synthesized
  source 1..22: mol_type = other DNA
gcttatttctttataaaattta

SEQ ID NO: 25824 - DNA, 22 bp, synthetic construct
  misc_feature 1..22: note = chemically synthesized
  source 1..22: mol_type = other DNA
atttctttataaaatttattca

SEQ ID NO: 25825 - DNA, 22 bp, synthetic construct
  misc_feature 1..22: note = chemically synthesized
  source 1..22: mol_type = other DNA
tttctttataaaatttattcat

SEQ ID NO: 25826 - DNA, 22 bp, synthetic construct
  misc_feature 1..22: note = chemically synthesized
  source 1..22: mol_type = other DNA
ctttataaaatttattcataaa

SEQ ID NO: 25827 - DNA, 22 bp, synthetic construct
  misc_feature 1..22: note = chemically synthesized
  source 1..22: mol_type = other DNA
tttataaaatttattcataaaa

SEQ ID NO: 25828 - DNA, 22 bp, synthetic construct
  misc_feature 1..22: note = chemically synthesized
  source 1..22: mol_type = other DNA
tataaaatttattcataaaatg

SEQ ID NO: 25829 - DNA, 22 bp, synthetic construct
  misc_feature 1..22: note = chemically synthesized
  source 1..22: mol_type = other DNA
ataaaatttattcataaaatga

SEQ ID NO: 25830 - DNA, 22 bp, synthetic construct
  misc_feature 1..22: note = chemically synthesized
  source 1..22: mol_type = other DNA
taaaatttattcataaaatgag

SEQ ID NO: 25831 - DNA, 22 bp, synthetic construct
  misc_feature 1..22: note = chemically synthesized
  source 1..22: mol_type = other DNA
attcataaaatgaggaagttag

SEQ ID NO: 25832 - DNA, 22 bp, synthetic construct
  misc_feature 1..22: note = chemically synthesized
  source 1..22: mol_type = other DNA
ttcataaaatgaggaagttagc

SEQ ID NO: 25833 - DNA, 22 bp, synthetic construct
  misc_feature 1..22: note = chemically synthesized
  source 1..22: mol_type = other DNA
ataaaatgaggaagttagctca

SEQ ID NO: 25834 - DNA, 22 bp, synthetic construct
  misc_feature 1..22: note = chemically synthesized
  source 1..22: mol_type = other DNA
gctcatgtattgtcataccagc

SEQ ID NO: 25835 - DNA, 22 bp, synthetic construct
  misc_feature 1..22: note = chemically synthesized
  source 1..22: mol_type = other DNA
atgtattgtcataccagctttc

SEQ ID NO: 25836 - DNA, 22 bp, synthetic construct
  misc_feature 1..22: note = chemically synthesized
  source 1..22: mol_type = other DNA
tcataccagctttcactttgaa

SEQ ID NO: 25837 - DNA, 22 bp, synthetic construct
  misc_feature 1..22: note = chemically synthesized
  source 1..22: mol_type = other DNA
tcactttgaatgagtccataat

SEQ ID NO: 25838 - DNA, 22 bp, synthetic construct
  misc_feature 1..22: note = chemically synthesized
  source 1..22: mol_type = other DNA
cactttgaatgagtccataatt

SEQ ID NO: 25839 - DNA, 22 bp, synthetic construct
  misc_feature 1..22: note = chemically synthesized
  source 1..22: mol_type = other DNA
actttgaatgagtccataattg

SEQ ID NO: 25840 - DNA, 22 bp, synthetic construct
  misc_feature 1..22: note = chemically synthesized
  source 1..22: mol_type = other DNA
tgaatgagtccataattgcatt

SEQ ID NO: 25841 - DNA, 22 bp, synthetic construct
  misc_feature 1..22: note = chemically synthesized
  source 1..22: mol_type = other DNA
gaatgagtccataattgcattt

SEQ ID NO: 25842 - DNA, 22 bp, synthetic construct
  misc_feature 1..22: note = chemically synthesized
  source 1..22: mol_type = other DNA
aatgagtccataattgcatttt

SEQ ID NO: 25843 - DNA, 22 bp, synthetic construct
  misc_feature 1..22: note = chemically synthesized
  source 1..22: mol_type = other DNA
catttttaaacacaaaaagaga

SEQ ID NO: 25844 - DNA, 22 bp, synthetic construct
  misc_feature 1..22: note = chemically synthesized
  source 1..22: mol_type = other DNA
ttaaacacaaaaagagaaataa

SEQ ID NO: 25845 - DNA, 22 bp, synthetic construct
  misc_feature 1..22: note = chemically synthesized
  source 1..22: mol_type = other DNA
taaacacaaaaagagaaataat

SEQ ID NO: 25846 - DNA, 22 bp, synthetic construct
  misc_feature 1..22: note = chemically synthesized
  source 1..22: mol_type = other DNA
aaacacaaaaagagaaataata

SEQ ID NO: 25847 - DNA, 22 bp, synthetic construct
  misc_feature 1..22: note = chemically synthesized
  source 1..22: mol_type = other DNA
aacacaaaaagagaaataatag

SEQ ID NO: 25848 - DNA, 22 bp, synthetic construct
  misc_feature 1..22: note = chemically synthesized
  source 1..22: mol_type = other DNA
cttcaatcacgggatgcatagt

SEQ ID NO: 25849 - DNA, 22 bp, synthetic construct
  misc_feature 1..22: note = chemically synthesized
  source 1..22: mol_type = other DNA
caatcacgggatgcatagtaat

SEQ ID NO: 25850 - DNA, 22 bp, synthetic construct
  misc_feature 1..22: note = chemically synthesized
  source 1..22: mol_type = other DNA
aatcacgggatgcatagtaatt

SEQ ID NO: 25851 - DNA, 22 bp, synthetic construct
  misc_feature 1..22: note = chemically synthesized
  source 1..22: mol_type = other DNA
ggatttctttgccctaattact

SEQ ID NO: 25852 - DNA, 22 bp, synthetic construct
  misc_feature 1..22: note = chemically synthesized
  source 1..22: mol_type = other DNA
ctttgccctaattactgatgtg

SEQ ID NO: 25853 - DNA, 22 bp, synthetic construct
  misc_feature 1..22: note = chemically synthesized
  source 1..22: mol_type = other DNA
tttgccctaattactgatgtgg

SEQ ID NO: 25854 - DNA, 22 bp, synthetic construct
  misc_feature 1..22: note = chemically synthesized
  source 1..22: mol_type = other DNA
tgccctaattactgatgtggat

SEQ ID NO: 25855 - DNA, 22 bp, synthetic construct
  misc_feature 1..22: note = chemically synthesized
  source 1..22: mol_type = other DNA
gccctaattactgatgtggata

SEQ ID NO: 25856 - DNA, 22 bp, synthetic construct
  misc_feature 1..22: note = chemically synthesized
  source 1..22: mol_type = other DNA
ccctaattactgatgtggataa

SEQ ID NO: 25857 - DNA, 22 bp, synthetic construct
  misc_feature 1..22: note = chemically synthesized
  source 1..22: mol_type = other DNA
attactgatgtggataagccgg

SEQ ID NO: 25858 - DNA, 22 bp, synthetic construct
  misc_feature 1..22: note = chemically synthesized
  source 1..22: mol_type = other DNA
ctgatgtggataagccggtggg

SEQ ID NO: 25859 - DNA, 22 bp, synthetic construct
  misc_feature 1..22: note = chemically synthesized
  source 1..22: mol_type = other DNA
atgtggataagccggtgggcca

SEQ ID NO: 25860 - DNA, 22 bp, synthetic construct
  misc_feature 1..22: note = chemically synthesized
  source 1..22: mol_type = other DNA
aagctgttatcacaccatgtga

SEQ ID NO: 25861 - DNA, 22 bp, synthetic construct
  misc_feature 1..22: note = chemically synthesized
  source 1..22: mol_type = other DNA
ttatcacaccatgtgaaacaca

SEQ ID NO: 25862 - DNA, 22 bp, synthetic construct
  misc_feature 1..22: note = chemically synthesized
  source 1..22: mol_type = other DNA
tcacaccatgtgaaacacacga

SEQ ID NO: 25863 - DNA, 22 bp, synthetic construct
  misc_feature 1..22: note = chemically synthesized
  source 1..22: mol_type = other DNA
tgtaaaaactatgcttggttgc

SEQ ID NO: 25864 - DNA, 22 bp, synthetic construct
  misc_feature 1..22: note = chemically synthesized
  source 1..22: mol_type = other DNA
tgcttggttgcacagcttcaag

SEQ ID NO: 25865 - DNA, 22 bp, synthetic construct
  misc_feature 1..22: note = chemically synthesized
  source 1..22: mol_type = other DNA
ggttgcacagcttcaaggaaag

SEQ ID NO: 25866 - DNA, 22 bp, synthetic construct
  misc_feature 1..22: note = chemically synthesized
  source 1..22: mol_type = other DNA
gttgcacagcttcaaggaaagc

SEQ ID NO: 25867 - DNA, 22 bp, synthetic construct
  misc_feature 1..22: note = chemically synthesized
  source 1..22: mol_type = other DNA
cacagcttcaaggaaagcacta

SEQ ID NO: 25868 - DNA, 22 bp, synthetic construct
  misc_feature 1..22: note = chemically synthesized
  source 1..22: mol_type = other DNA
caaggaaagcactagtctactc

SEQ ID NO: 25869 - DNA, 22 bp, synthetic construct
  misc_feature 1..22: note = chemically synthesized
  source 1..22: mol_type = other DNA
aaggaaagcactagtctactca

SEQ ID NO: 25870 - DNA, 22 bp, synthetic construct
  misc_feature 1..22: note = chemically synthesized
  source 1..22: mol_type = other DNA
gtctactcacttccttttcatt

SEQ ID NO: 25871 - DNA, 22 bp, synthetic construct
  misc_feature 1..22: note = chemically synthesized
  source 1..22: mol_type = other DNA
ctcacttccttttcattcagca

SEQ ID NO: 25872 - DNA, 22 bp, synthetic construct
  misc_feature 1..22: note = chemically synthesized
  source 1..22: mol_type = other DNA
acttccttttcattcagcatgc

SEQ ID NO: 25873 - DNA, 22 bp, synthetic construct
  misc_feature 1..22: note = chemically synthesized
  source 1..22: mol_type = other DNA
ccttttcattcagcatgctatg

SEQ ID NO: 25874 - DNA, 22 bp, synthetic construct
  misc_feature 1..22: note = chemically synthesized
  source 1..22: mol_type = other DNA
cttttcattcagcatgctatgt

SEQ ID NO: 25875 - DNA, 22 bp, synthetic construct
  misc_feature 1..22: note = chemically synthesized
  source 1..22: mol_type = other DNA
ttcattcagcatgctatgtcta

SEQ ID NO: 25876 - DNA, 22 bp, synthetic construct
  misc_feature 1..22: note = chemically synthesized
  source 1..22: mol_type = other DNA
tcattcagcatgctatgtctag

SEQ ID NO: 25877 - DNA, 22 bp, synthetic construct
  misc_feature 1..22: note = chemically synthesized
  source 1..22: mol_type = other DNA
cattcagcatgctatgtctagg

SEQ ID NO: 25878 - DNA, 22 bp, synthetic construct
  misc_feature 1..22: note = chemically synthesized
  source 1..22: mol_type = other DNA
attcagcatgctatgtctaggc

SEQ ID NO: 25879 - DNA, 22 bp, synthetic construct
  misc_feature 1..22: note = chemically synthesized
  source 1..22: mol_type = other DNA
agcatgctatgtctaggcccct

SEQ ID NO: 25880 - DNA, 22 bp, synthetic construct
  misc_feature 1..22: note = chemically synthesized
  source 1..22: mol_type = other DNA
tgtctaggcccctttcatataa

SEQ ID NO: 25881 - DNA, 22 bp, synthetic construct
  misc_feature 1..22: note = chemically synthesized
  source 1..22: mol_type = other DNA
ggcccctttcatataaaatatt

SEQ ID NO: 25882 - DNA, 22 bp, synthetic construct
  misc_feature 1..22: note = chemically synthesized
  source 1..22: mol_type = other DNA
tcatataaaatatttggagctg

SEQ ID NO: 25883 - DNA, 22 bp, synthetic construct
  misc_feature 1..22: note = chemically synthesized
  source 1..22: mol_type = other DNA
catataaaatatttggagctgc

SEQ ID NO: 25884 - DNA, 22 bp, synthetic construct
  misc_feature 1..22: note = chemically synthesized
  source 1..22: mol_type = other DNA
atataaaatatttggagctgcc

SEQ ID NO: 25885 - DNA, 22 bp, synthetic construct
  misc_feature 1..22: note = chemically synthesized
  source 1..22: mol_type = other DNA
ggagctgccattgtaggtagtg

SEQ ID NO: 25886 - DNA, 22 bp, synthetic construct
  misc_feature 1..22: note = chemically synthesized
  source 1..22: mol_type = other DNA
gagctgccattgtaggtagtgc

SEQ ID NO: 25887 - DNA, 22 bp, synthetic construct
  misc_feature 1..22: note = chemically synthesized
  source 1..22: mol_type = other DNA
ccattgtaggtagtgcaggtgg

SEQ ID NO: 25888 - DNA, 22 bp, synthetic construct
  misc_feature 1..22: note = chemically synthesized
  source 1..22: mol_type = other DNA
taggtagtgcaggtggtcttgt

SEQ ID NO: 25889 - DNA, 22 bp, synthetic construct
  misc_feature 1..22: note = chemically synthesized
  source 1..22: mol_type = other DNA
gttcaaagtgtgagtatcacct

SEQ ID NO: 25890 - DNA, 22 bp, synthetic construct
  misc_feature 1..22: note = chemically synthesized
  source 1..22: mol_type = other DNA
ttcaaagtgtgagtatcacctc

SEQ ID NO: 25891 - DNA, 22 bp, synthetic construct
  misc_feature 1..22: note = chemically synthesized
  source 1..22: mol_type = other DNA
aaagtgtgagtatcacctccca

SEQ ID NO: 25892 - DNA, 22 bp, synthetic construct
  misc_feature 1..22: note = chemically synthesized
  source 1..22: mol_type = other DNA
ccactgccaagactgcagctgc

SEQ ID NO: 25893 - DNA, 22 bp, synthetic construct
  misc_feature 1..22: note = chemically synthesized
  source 1..22: mol_type = other DNA
ccaagactgcagctgctttgat

SEQ ID NO: 25894 - DNA, 22 bp, synthetic construct
  misc_feature 1..22: note = chemically synthesized
  source 1..22: mol_type = other DNA
cagctgctttgattttaactga

SEQ ID NO: 25895 - DNA, 22 bp, synthetic construct
  misc_feature 1..22: note = chemically synthesized
  source 1..22: mol_type = other DNA
ctttgattttaactgaggatct

SEQ ID NO: 25896 - DNA, 22 bp, synthetic construct
  misc_feature 1..22: note = chemically synthesized
  source 1..22: mol_type = other DNA
tgattttaactgaggatctaga

SEQ ID NO: 25897 - DNA, 22 bp, synthetic construct
  misc_feature 1..22: note = chemically synthesized
  source 1..22: mol_type = other DNA
gattttaactgaggatctagaa

SEQ ID NO: 25898 - DNA, 22 bp, synthetic construct
  misc_feature 1..22: note = chemically synthesized
  source 1..22: mol_type = other DNA
attttaactgaggatctagaaa

SEQ ID NO: 25899 - DNA, 22 bp, synthetic construct
  misc_feature 1..22: note = chemically synthesized
  source 1..22: mol_type = other DNA
taactgaggatctagaaaagtg

SEQ ID NO: 25900 - DNA, 22 bp, synthetic construct
  misc_feature 1..22: note = chemically synthesized
  source 1..22: mol_type = other DNA
aactgaggatctagaaaagtgc

SEQ ID NO: 25901 - DNA, 22 bp, synthetic construct
  misc_feature 1..22: note = chemically synthesized
  source 1..22: mol_type = other DNA
actgaggatctagaaaagtgct

SEQ ID NO: 25902 - DNA, 22 bp, synthetic construct
  misc_feature 1..22: note = chemically synthesized
  source 1..22: mol_type = other DNA
aggatctagaaaagtgctggga

SEQ ID NO: 25903 - DNA, 22 bp, synthetic construct
  misc_feature 1..22: note = chemically synthesized
  source 1..22: mol_type = other DNA
gaaaagtgctgggaacacaaat

SEQ ID NO: 25904 - DNA, 22 bp, synthetic construct
  misc_feature 1..22: note = chemically synthesized
  source 1..22: mol_type = other DNA
ggaacacaaatatttgctgacc

SEQ ID NO: 25905 - DNA, 22 bp, synthetic construct
  misc_feature 1..22: note = chemically synthesized
  source 1..22: mol_type = other DNA
gctgacctttgtcacaagtagc

SEQ ID NO: 25906 - DNA, 22 bp, synthetic construct
  misc_feature 1..22: note = chemically synthesized
  source 1..22: mol_type = other DNA
ctgacctttgtcacaagtagca

SEQ ID NO: 25907 - DNA, 22 bp, synthetic construct
  misc_feature 1..22: note = chemically synthesized
  source 1..22: mol_type = other DNA
acctttgtcacaagtagcacct

SEQ ID NO: 25908 - DNA, 22 bp, synthetic construct
  misc_feature 1..22: note = chemically synthesized
  source 1..22: mol_type = other DNA
tgtcacaagtagcacctaatct

SEQ ID NO: 25909 - DNA, 22 bp, synthetic construct
  misc_feature 1..22: note = chemically synthesized
  source 1..22: mol_type = other DNA
gtcacaagtagcacctaatctc

SEQ ID NO: 25910 - DNA, 22 bp, synthetic construct
  misc_feature 1..22: note = chemically synthesized
  source 1..22: mol_type = other DNA
tcacaagtagcacctaatctcc

SEQ ID NO: 25911 - DNA, 22 bp, synthetic construct
  misc_feature 1..22: note = chemically synthesized
  source 1..22: mol_type = other DNA
atctccttcctaccagacctgc

SEQ ID NO: 25912 - DNA, 22 bp, synthetic construct
  misc_feature 1..22: note = chemically synthesized
  source 1..22: mol_type = other DNA
cttcctaccagacctgctgcct

SEQ ID NO: 25913 - DNA, 22 bp, synthetic construct
  misc_feature 1..22: note = chemically synthesized
  source 1..22: mol_type = other DNA
cctaccagacctgctgccttat

SEQ ID NO: 25914 - DNA, 22 bp, synthetic construct
  misc_feature 1..22: note = chemically synthesized
  source 1..22: mol_type = other DNA
ctaccagacctgctgccttata

SEQ ID NO: 25915 - DNA, 22 bp, synthetic construct
  misc_feature 1..22: note = chemically synthesized
  source 1..22: mol_type = other DNA
ccagacctgctgccttataaaa

SEQ ID NO: 25916 - DNA, 22 bp, synthetic construct
  misc_feature 1..22: note = chemically synthesized
  source 1..22: mol_type = other DNA
ctgccttataaaatgatgttct

SEQ ID NO: 25917 - DNA, 22 bp, synthetic construct
  misc_feature 1..22: note = chemically synthesized
  source 1..22: mol_type = other DNA
ccttataaaatgatgttctaag

SEQ ID NO: 25918 - DNA, 22 bp, synthetic construct
  misc_feature 1..22: note = chemically synthesized
  source 1..22: mol_type = other DNA
ataaaatgatgttctaagtgta

SEQ ID NO: 25919 - DNA, 22 bp, synthetic construct
  misc_feature 1..22: note = chemically synthesized
  source 1..22: mol_type = other DNA
taaaatgatgttctaagtgtat

SEQ ID NO: 25920 - DNA, 22 bp, synthetic construct
  misc_feature 1..22: note = chemically synthesized
  source 1..22: mol_type = other DNA
taagtgtataatgacttcctct

SEQ ID NO: 25921 - DNA, 22 bp, synthetic construct
  misc_feature 1..22: note = chemically synthesized
  source 1..22: mol_type = other DNA
agtgtataatgacttcctctgc

SEQ ID NO: 25922 - DNA, 22 bp, synthetic construct
  misc_feature 1..22: note = chemically synthesized
  source 1..22: mol_type = other DNA
cctctgcttctgcaactgtgtt

SEQ ID NO: 25923 - DNA, 22 bp, synthetic construct
  misc_feature 1..22: note = chemically synthesized
  source 1..22: mol_type = other DNA
ctctgcttctgcaactgtgttt

SEQ ID NO: 25924 - DNA, 22 bp, synthetic construct
  misc_feature 1..22: note = chemically synthesized
  source 1..22: mol_type = other DNA
tgcttctgcaactgtgttttgg

SEQ ID NO: 25925 - DNA, 22 bp, synthetic construct
  misc_feature 1..22: note = chemically synthesized
  source 1..22: mol_type = other DNA
cttctgcaactgtgttttggaa

SEQ ID NO: 25926 - DNA, 22 bp, synthetic construct
  misc_feature 1..22: note = chemically synthesized
  source 1..22: mol_type = other DNA
ctgcaactgtgttttggaacag

SEQ ID NO: 25927 - DNA, 22 bp, synthetic construct
  misc_feature 1..22: note = chemically synthesized
  source 1..22: mol_type = other DNA
tgcaactgtgttttggaacagg

SEQ ID NO: 25928 - DNA, 22 bp, synthetic construct
  misc_feature 1..22: note = chemically synthesized
  source 1..22: mol_type = other DNA
caactgtgttttggaacaggag

SEQ ID NO: 25929 - DNA, 22 bp, synthetic construct
  misc_feature 1..22: note = chemically synthesized
  source 1..22: mol_type = other DNA
tgttttggaacaggagggtgag

SEQ ID NO: 25930 - DNA, 22 bp, synthetic construct
  misc_feature 1..22: note = chemically synthesized
  source 1..22: mol_type = other DNA
tggaacaggagggtgagattag

SEQ ID NO: 25931 - DNA, 22 bp, synthetic construct
  misc_feature 1..22: note = chemically synthesized
  source 1..22: mol_type = other DNA
ggaacaggagggtgagattagt

SEQ ID NO: 25932 - DNA, 22 bp, synthetic construct
  misc_feature 1..22: note = chemically synthesized
  source 1..22: mol_type = other DNA
gaacaggagggtgagattagta

SEQ ID NO: 25933 - DNA, 22 bp, synthetic construct
  misc_feature 1..22: note = chemically synthesized
  source 1..22: mol_type = other DNA
gtagccacacacactgaaatag

SEQ ID NO: 25934 - DNA, 22 bp, synthetic construct
  misc_feature 1..22: note = chemically synthesized
  source 1..22: mol_type = other DNA
aaatagtcatatgacttccaaa

SEQ ID NO: 25935 - DNA, 22 bp, synthetic construct
  misc_feature 1..22: note = chemically synthesized
  source 1..22: mol_type = other DNA
ccaaagtctgtaatttttaagc

SEQ ID NO: 25936 - DNA, 22 bp, synthetic construct
  misc_feature 1..22: note = chemically synthesized
  source 1..22: mol_type = other DNA
caaagtctgtaatttttaagca

SEQ ID NO: 25937 - DNA, 22 bp, synthetic construct
  misc_feature 1..22: note = chemically synthesized
  source 1..22: mol_type = other DNA
taatttttaagcatatacaaaa

SEQ ID NO: 25938 - DNA, 22 bp, synthetic construct
  misc_feature 1..22: note = chemically synthesized
  source 1..22: mol_type = other DNA
ttaagcatatacaaaatagtga

SEQ ID NO: 25939 - DNA, 22 bp, synthetic construct
  misc_feature 1..22: note = chemically synthesized
  source 1..22: mol_type = other DNA
taagcatatacaaaatagtgaa

SEQ ID NO: 25940 - DNA, 22 bp, synthetic construct
  misc_feature 1..22: note = chemically synthesized
  source 1..22: mol_type = other DNA
aagcatatacaaaatagtgaaa

SEQ ID NO: 25941 - DNA, 22 bp, synthetic construct
  misc_feature 1..22: note = chemically synthesized
  source 1..22: mol_type = other DNA
agcatatacaaaatagtgaaat

SEQ ID NO: 25942 - DNA, 22 bp, synthetic construct
  misc_feature 1..22: note = chemically synthesized
  source 1..22: mol_type = other DNA
ctccatatgtgtataatatgta

SEQ ID NO: 25943 - DNA, 22 bp, synthetic construct
  misc_feature 1..22: note = chemically synthesized
  source 1..22: mol_type = other DNA
tccatatgtgtataatatgtat

SEQ ID NO: 25944 - DNA, 22 bp, synthetic construct
  misc_feature 1..22: note = chemically synthesized
  source 1..22: mol_type = other DNA
catatgtgtataatatgtatat

SEQ ID NO: 25945 - DNA, 22 bp, synthetic construct
  misc_feature 1..22: note = chemically synthesized
  source 1..22: mol_type = other DNA
attttggctgatatctattcta

SEQ ID NO: 25946 - DNA, 22 bp, synthetic construct
  misc_feature 1..22: note = chemically synthesized
  source 1..22: mol_type = other DNA
ttttggctgatatctattctat

SEQ ID NO: 25947 - DNA, 22 bp, synthetic construct
  misc_feature 1..22: note = chemically synthesized
  source 1..22: mol_type = other DNA
tggctgatatctattctatact

SEQ ID NO: 25948 - DNA, 22 bp, synthetic construct
  misc_feature 1..22: note = chemically synthesized
  source 1..22: mol_type = other DNA
ggctgatatctattctatactt

SEQ ID NO: 25949 - DNA, 22 bp, synthetic construct
  misc_feature 1..22: note = chemically synthesized
  source 1..22: mol_type = other DNA
gctgatatctattctatacttc

SEQ ID NO: 25950 - DNA, 22 bp, synthetic construct
  misc_feature 1..22: note = chemically synthesized
  source 1..22: mol_type = other DNA
atatctattctatacttctttg

SEQ ID NO: 25951 - DNA, 22 bp, synthetic construct
  misc_feature 1..22: note = chemically synthesized
  source 1..22: mol_type = other DNA
ttctatacttctttgaaatagt

SEQ ID NO: 25952 - DNA, 22 bp, synthetic construct
  misc_feature 1..22: note = chemically synthesized
  source 1..22: mol_type = other DNA
tatacttctttgaaatagtgat

SEQ ID NO: 25953 - DNA, 22 bp, synthetic construct
  misc_feature 1..22: note = chemically synthesized
  source 1..22: mol_type = other DNA
tacttctttgaaatagtgattt

SEQ ID NO: 25954 - DNA, 22 bp, synthetic construct
  misc_feature 1..22: note = chemically synthesized
  source 1..22: mol_type = other DNA
ctttgaaatagtgatttttagt

SEQ ID NO: 25955 - DNA, 22 bp, synthetic construct
  misc_feature 1..22: note = chemically synthesized
  source 1..22: mol_type = other DNA
tttgaaatagtgatttttagta

SEQ ID NO: 25956 - DNA, 22 bp, synthetic construct
  misc_feature 1..22: note = chemically synthesized
  source 1..22: mol_type = other DNA
tgaaatagtgatttttagtaaa

SEQ ID NO: 25957 - DNA, 22 bp, synthetic construct
  misc_feature 1..22: note = chemically synthesized
  source 1..22: mol_type = other DNA
gaaatagtgatttttagtaaat

SEQ ID NO: 25958 - DNA, 22 bp, synthetic construct
  misc_feature 1..22: note = chemically synthesized
  source 1..22: mol_type = other DNA
aaatagtgatttttagtaaatt

SEQ ID NO: 25959 - DNA, 22 bp, synthetic construct
  misc_feature 1..22: note = chemically synthesized
  source 1..22: mol_type = other DNA
ttagtaaattggcagtgttgcc

SEQ ID NO: 25960 - DNA, 22 bp, synthetic construct
  misc_feature 1..22: note = chemically synthesized
  source 1..22: mol_type = other DNA
tagtaaattggcagtgttgcca

SEQ ID NO: 25961 - DNA, 22 bp, synthetic construct
  misc_feature 1..22: note = chemically synthesized
  source 1..22: mol_type = other DNA
agtaaattggcagtgttgccag

SEQ ID NO: 25962 - DNA, 22 bp, synthetic construct
  misc_feature 1..22: note = chemically synthesized
  source 1..22: mol_type = other DNA
gtaaattggcagtgttgccaga

SEQ ID NO: 25963 - DNA, 22 bp, synthetic construct
  misc_feature 1..22: note = chemically synthesized
  source 1..22: mol_type = other DNA
gcagtgttgccagatgacgact

SEQ ID NO: 25964 - DNA, 22 bp, synthetic construct
  misc_feature 1..22: note = chemically synthesized
  source 1..22: mol_type = other DNA
ccagatgacgacttagagtttt

SEQ ID NO: 25965 - DNA, 22 bp, synthetic construct
  misc_feature 1..22: note = chemically synthesized
  source 1..22: mol_type = other DNA
agagttttaaccacctcattgt

SEQ ID NO: 25966 - DNA, 22 bp, synthetic construct
  misc_feature 1..22: note = chemically synthesized
  source 1..22: mol_type = other DNA
gagttttaaccacctcattgtt

SEQ ID NO: 25967 - DNA, 22 bp, synthetic construct
  misc_feature 1..22: note = chemically synthesized
  source 1..22: mol_type = other DNA
taaccacctcattgttatatgt

SEQ ID NO: 25968 - DNA, 22 bp, synthetic construct
  misc_feature 1..22: note = chemically synthesized
  source 1..22: mol_type = other DNA
aaccacctcattgttatatgta

SEQ ID NO: 25969 - DNA, 22 bp, synthetic construct
  misc_feature 1..22: note = chemically synthesized
  source 1..22: mol_type = other DNA
accacctcattgttatatgtac

SEQ ID NO: 25970 - DNA, 22 bp, synthetic construct
  misc_feature 1..22: note = chemically synthesized
  source 1..22: mol_type = other DNA
attgttatatgtaccatggtag

SEQ ID NO: 25971 - DNA, 22 bp, synthetic construct
  misc_feature 1..22: note = chemically synthesized
  source 1..22: mol_type = other DNA
ttatatgtaccatggtagctca

SEQ ID NO: 25972 - DNA, 22 bp, synthetic construct
  misc_feature 1..22: note = chemically synthesized
  source 1..22: mol_type = other DNA
tatgtaccatggtagctcatct

SEQ ID NO: 25973 - DNA, 22 bp, synthetic construct
  misc_feature 1..22: note = chemically synthesized
  source 1..22: mol_type = other DNA
atcttttctttcaggtgaaagt

SEQ ID NO: 25974 - DNA, 22 bp, synthetic construct
  misc_feature 1..22: note = chemically synthesized
  source 1..22: mol_type = other DNA
ttctttcaggtgaaagttgtga

SEQ ID NO: 25975 - DNA, 22 bp, synthetic construct
  misc_feature 1..22: note = chemically synthesized
  source 1..22: mol_type = other DNA
tctttcaggtgaaagttgtgat

SEQ ID NO: 25976 - DNA, 22 bp, synthetic construct
  misc_feature 1..22: note = chemically synthesized
  source 1..22: mol_type = other DNA
ctttcaggtgaaagttgtgata

SEQ ID NO: 25977 - DNA, 22 bp, synthetic construct
  misc_feature 1..22: note = chemically synthesized
  source 1..22: mol_type = other DNA
tttcaggtgaaagttgtgatac

SEQ ID NO: 25978 - DNA, 22 bp, synthetic construct
  misc_feature 1..22: note = chemically synthesized
  source 1..22: mol_type = other DNA
tcaggtgaaagttgtgatactt

SEQ ID NO: 25979 - DNA, 22 bp, synthetic construct
  misc_feature 1..22: note = chemically synthesized
  source 1..22: mol_type = other DNA
caggtgaaagttgtgatacttt

SEQ ID NO: 25980 - DNA, 22 bp, synthetic construct
  misc_feature 1..22: note = chemically synthesized
  source 1..22: mol_type = other DNA
aggtgaaagttgtgatactttg

SEQ ID NO: 25981 - DNA, 22 bp, synthetic construct
  misc_feature 1..22: note = chemically synthesized
  source 1..22: mol_type = other DNA
tgatactttgtcctcacgctaa

SEQ ID NO: 25982 - DNA, 22 bp, synthetic construct
  misc_feature 1..22: note = chemically synthesized
  source 1..22: mol_type = other DNA
tgtcctcacgctaaacatagcc

SEQ ID NO: 25983 - DNA, 22 bp, synthetic construct
  misc_feature 1..22: note = chemically synthesized
  source 1..22: mol_type = other DNA
gtcctcacgctaaacatagccc

SEQ ID NO: 25984 - DNA, 22 bp, synthetic construct
  misc_feature 1..22: note = chemically synthesized
  source 1..22: mol_type = other DNA
tcctcacgctaaacatagcccc

SEQ ID NO: 25985 - DNA, 22 bp, synthetic construct
  misc_feature 1..22: note = chemically synthesized
  source 1..22: mol_type = other DNA
acgctaaacatagcccccatgt

SEQ ID NO: 25986 - DNA, 22 bp, synthetic construct
  misc_feature 1..22: note = chemically synthesized
  source 1..22: mol_type = other DNA
aacatagcccccatgttgttcc

SEQ ID NO: 25987 - DNA, 22 bp, synthetic construct
  misc_feature 1..22: note = chemically synthesized
  source 1..22: mol_type = other DNA
ttccaggaaaatagagatcaat

SEQ ID NO: 25988 - DNA, 22 bp, synthetic construct
  misc_feature 1..22: note = chemically synthesized
  source 1..22: mol_type = other DNA
caggaaaatagagatcaataaa

SEQ ID NO: 25989 - DNA, 22 bp, synthetic construct
  misc_feature 1..22: note = chemically synthesized
  source 1..22: mol_type = other DNA
gtttgaaagtgaaggttaagtt

SEQ ID NO: 25990 - DNA, 22 bp, synthetic construct
  misc_feature 1..22: note = chemically synthesized
  source 1..22: mol_type = other DNA
tttgaaagtgaaggttaagttc

SEQ ID NO: 25991 - DNA, 22 bp, synthetic construct
  misc_feature 1..22: note = chemically synthesized
  source 1..22: mol_type = other DNA
gaaagtgaaggttaagttcaaa

SEQ ID NO: 25992 - DNA, 22 bp, synthetic construct
  misc_feature 1..22: note = chemically synthesized
  source 1..22: mol_type = other DNA
aaagtgaaggttaagttcaaat

SEQ ID NO: 25993 - DNA, 22 bp, synthetic construct
  misc_feature 1..22: note = chemically synthesized
  source 1..22: mol_type = other DNA
agttcaaattcaatgacctacg

SEQ ID NO: 25994 - DNA, 22 bp, synthetic construct
  misc_feature 1..22: note = chemically synthesized
  source 1..22: mol_type = other DNA
aaattcaatgacctacgctgtg

SEQ ID NO: 25995 - DNA, 22 bp, synthetic construct
  misc_feature 1..22: note = chemically synthesized
  source 1..22: mol_type = other DNA
aatgacctacgctgtggtaaaa

SEQ ID NO: 25996 - DNA, 22 bp, synthetic construct
  misc_feature 1..22: note = chemically synthesized
  source 1..22: mol_type = other DNA
cgctgtggtaaaacgatcattc

SEQ ID NO: 25997 - DNA, 22 bp, synthetic construct
  misc_feature 1..22: note = chemically synthesized
  source 1..22: mol_type = other DNA
tggtaaaacgatcattcattaa

SEQ ID NO: 25998 - DNA, 22 bp, synthetic construct
  misc_feature 1..22: note = chemically synthesized
  source 1..22: mol_type = other DNA
attaatgatattaagtattttc

SEQ ID NO: 25999 - DNA, 22 bp, synthetic construct
  misc_feature 1..22: note = chemically synthesized
  source 1..22: mol_type = other DNA
atgatattaagtattttctttt

SEQ ID NO: 26000 - DNA, 22 bp, synthetic construct
  misc_feature 1..22: note = chemically synthesized
  source 1..22: mol_type = other DNA
agtattttcttttttaatgtca

SEQ ID NO: 26001 - DNA, 22 bp, synthetic construct
  misc_feature 1..22: note = chemically synthesized
  source 1..22: mol_type = other DNA
tcttttttaatgtcagaataaa

SEQ ID NO: 26002 - DNA, 22 bp, synthetic construct
  misc_feature 1..22: note = chemically synthesized
  source 1..22: mol_type = other DNA
cttttttaatgtcagaataaaa

SEQ ID NO: 26003 - DNA, 22 bp, synthetic construct
  misc_feature 1..22: note = chemically synthesized
  source 1..22: mol_type = other DNA
ttttttaatgtcagaataaaac

SEQ ID NO: 26004 - DNA, 22 bp, synthetic construct
  misc_feature 1..22: note = chemically synthesized
  source 1..22: mol_type = other DNA
ttttaatgtcagaataaaacca

SEQ ID NO: 26005 - DNA, 22 bp, synthetic construct
  misc_feature 1..22: note = chemically synthesized
  source 1..22: mol_type = other DNA
tttaatgtcagaataaaaccat

SEQ ID NO: 26006 - DNA, 22 bp, synthetic construct
  misc_feature 1..22: note = chemically synthesized
  source 1..22: mol_type = other DNA
ttaatgtcagaataaaaccatt

SEQ ID NO: 26007 - DNA, 22 bp, synthetic construct
  misc_feature 1..22: note = chemically synthesized
  source 1..22: mol_type = other DNA
taatgtcagaataaaaccattt

SEQ ID NO: 26008 - DNA, 22 bp, synthetic construct
  misc_feature 1..22: note = chemically synthesized
  source 1..22: mol_type = other DNA
aatgtcagaataaaaccattta

SEQ ID NO: 26009 - DNA, 22 bp, synthetic construct
  misc_feature 1..22: note = chemically synthesized
  source 1..22: mol_type = other DNA
atgtcagaataaaaccatttat

SEQ ID NO: 26010 - DNA, 22 bp, synthetic construct
  misc_feature 1..22: note = chemically synthesized
  source 1..22: mol_type = other DNA
atttgcagatttaaaaatatat

SEQ ID NO: 26011 - DNA, 22 bp, synthetic construct
  misc_feature 1..22: note = chemically synthesized
  source 1..22: mol_type = other DNA
tttgcagatttaaaaatatata

SEQ ID NO: 26012 - DNA, 22 bp, synthetic construct
  misc_feature 1..22: note = chemically synthesized
  source 1..22: mol_type = other DNA
gcagatttaaaaatatatatgt

SEQ ID NO: 26013 - DNA, 22 bp, synthetic construct
  misc_feature 1..22: note = chemically synthesized
  source 1..22: mol_type = other DNA
cagatttaaaaatatatatgtg

SEQ ID NO: 26014 - DNA, 22 bp, synthetic construct
  misc_feature 1..22: note = chemically synthesized
  source 1..22: mol_type = other DNA
aaaaatatatatgtgtatgtaa

SEQ ID NO: 26015 - DNA, 22 bp, synthetic construct
  misc_feature 1..22: note = chemically synthesized
  source 1..22: mol_type = other DNA
aaaatatatatgtgtatgtaaa

SEQ ID NO: 26016 - DNA, 22 bp, synthetic construct
  misc_feature 1..22: note = chemically synthesized
  source 1..22: mol_type = other DNA
cttggtttatacctcaaatatg

SEQ ID NO: 26017 - DNA, 22 bp, synthetic construct
  misc_feature 1..22: note = chemically synthesized
  source 1..22: mol_type = other DNA
ggtttatacctcaaatatgaaa

SEQ ID NO: 26018 - DNA, 22 bp, synthetic construct
  misc_feature 1..22: note = chemically synthesized
  source 1..22: mol_type = other DNA
gtttatacctcaaatatgaaaa

SEQ ID NO: 26019 - DNA, 22 bp, synthetic construct
  misc_feature 1..22: note = chemically synthesized
  source 1..22: mol_type = other DNA
atacctcaaatatgaaaatagg

SEQ ID NO: 26020 - DNA, 22 bp, synthetic construct
  misc_feature 1..22: note = chemically synthesized
  source 1..22: mol_type = other DNA
tacctcaaatatgaaaatagga

SEQ ID NO: 26021 - DNA, 22 bp, synthetic construct
  misc_feature 1..22: note = chemically synthesized
  source 1..22: mol_type = other DNA
aaatatgaaaataggaatgacc

SEQ ID NO: 26022 - DNA, 22 bp, synthetic construct
  misc_feature 1..22: note = chemically synthesized
  source 1..22: mol_type = other DNA
tctctatgctcttgcattcact

SEQ ID NO: 26023 - DNA, 22 bp, synthetic construct
  misc_feature 1..22: note = chemically synthesized
  source 1..22: mol_type = other DNA
tatgctcttgcattcacttata

SEQ ID NO: 26024 - DNA, 22 bp, synthetic construct
  misc_feature 1..22: note = chemically synthesized
  source 1..22: mol_type = other DNA
tgctcttgcattcacttatatt

SEQ ID NO: 26025 - DNA, 22 bp, synthetic construct
  misc_feature 1..22: note = chemically synthesized
  source 1..22: mol_type = other DNA
ttgcattcacttatattctagc

SEQ ID NO: 26026 - DNA, 22 bp, synthetic construct
  misc_feature 1..22: note = chemically synthesized
  source 1..22: mol_type = other DNA
gcattcacttatattctagctt

SEQ ID NO: 26027 - DNA, 22 bp, synthetic construct
  misc_feature 1..22: note = chemically synthesized
  source 1..22: mol_type = other DNA
cattcacttatattctagcttg

SEQ ID NO: 26028 - DNA, 22 bp, synthetic construct
  misc_feature 1..22: note = chemically synthesized
  source 1..22: mol_type = other DNA
acttatattctagcttgttaag

SEQ ID NO: 26029 - DNA, 22 bp, synthetic construct
  misc_feature 1..22: note = chemically synthesized
  source 1..22: mol_type = other DNA
atattctagcttgttaagagag

SEQ ID NO: 26030 - DNA, 22 bp, synthetic construct
  misc_feature 1..22: note = chemically synthesized
  source 1..22: mol_type = other DNA
tattctagcttgttaagagaga

SEQ ID NO: 26031 - DNA, 22 bp, synthetic construct
  misc_feature 1..22: note = chemically synthesized
  source 1..22: mol_type = other DNA
tagcttgttaagagagaagttt

SEQ ID NO: 26032 - DNA, 22 bp, synthetic construct
  misc_feature 1..22: note = chemically synthesized
  source 1..22: mol_type = other DNA
gcttgttaagagagaagtttgg

SEQ ID NO: 26033 - DNA, 22 bp, synthetic construct
  misc_feature 1..22: note = chemically synthesized
  source 1..22: mol_type = other DNA
gttaagagagaagtttggggca

SEQ ID NO: 26034 - DNA, 22 bp, synthetic construct
  misc_feature 1..22: note = chemically synthesized
  source 1..22: mol_type = other DNA
ttaagagagaagtttggggcaa

SEQ ID NO: 26035 - DNA, 22 bp, synthetic construct
  misc_feature 1..22: note = chemically synthesized
  source 1..22: mol_type = other DNA
agagagaagtttggggcaaaat

SEQ ID NO: 26036 - DNA, 22 bp, synthetic construct
  misc_feature 1..22: note = chemically synthesized
  source 1..22: mol_type = other DNA
ggggcaaaatgtgctttataaa

SEQ ID NO: 26037 - DNA, 22 bp, synthetic construct
  misc_feature 1..22: note = chemically synthesized
  source 1..22: mol_type = other DNA
gggcaaaatgtgctttataaat

SEQ ID NO: 26038 - DNA, 22 bp, synthetic construct
  misc_feature 1..22: note = chemically synthesized
  source 1..22: mol_type = other DNA
tataaatagtaaaaactgaggt

SEQ ID NO: 26039 - DNA, 22 bp, synthetic construct
  misc_feature 1..22: note = chemically synthesized
  source 1..22: mol_type = other DNA
ataaatagtaaaaactgaggta

SEQ ID NO: 26040 - DNA, 22 bp, synthetic construct
  misc_feature 1..22: note = chemically synthesized
  source 1..22: mol_type = other DNA
taaatagtaaaaactgaggtaa

SEQ ID NO: 26041 - DNA, 22 bp, synthetic construct
  misc_feature 1..22: note = chemically synthesized
  source 1..22: mol_type = other DNA
aggtaaactatagcacaaagtg

SEQ ID NO: 26042 - DNA, 22 bp, synthetic construct
  misc_feature 1..22: note = chemically synthesized
  source 1..22: mol_type = other DNA
tagcacaaagtgtgctatataa

SEQ ID NO: 26043 - DNA, 22 bp, synthetic construct
  misc_feature 1..22: note = chemically synthesized
  source 1..22: mol_type = other DNA
tataaacagtaaaaaccgaggt

SEQ ID NO: 26044 - DNA, 22 bp, synthetic construct
  misc_feature 1..22: note = chemically synthesized
  source 1..22: mol_type = other DNA
aaatggtgttggaatataagaa

SEQ ID NO: 26045 - DNA, 22 bp, synthetic construct
  misc_feature 1..22: note = chemically synthesized
  source 1..22: mol_type = other DNA
gaatataagaaatagcagtaaa

SEQ ID NO: 26046 - DNA, 22 bp, synthetic construct
  misc_feature 1..22: note = chemically synthesized
  source 1..22: mol_type = other DNA
ctcacagcaagacagtacaggg

SEQ ID NO: 26047 - DNA, 22 bp, synthetic construct
  misc_feature 1..22: note = chemically synthesized
  source 1..22: mol_type = other DNA
acagcaagacagtacagggaaa

SEQ ID NO: 26048 - DNA, 22 bp, synthetic construct
  misc_feature 1..22: note = chemically synthesized
  source 1..22: mol_type = other DNA
gagggacaaagatttacttaca

SEQ ID NO: 26049 - DNA, 22 bp, synthetic construct
  misc_feature 1..22: note = chemically synthesized
  source 1..22: mol_type = other DNA
acttacaatcaggcctcaacca

SEQ ID NO: 26050 - DNA, 22 bp, synthetic construct
  misc_feature 1..22: note = chemically synthesized
  source 1..22: mol_type = other DNA
cttacaatcaggcctcaaccaa

SEQ ID NO: 26051 - DNA, 22 bp, synthetic construct
  misc_feature 1..22: note = chemically synthesized
  source 1..22: mol_type = other DNA
acaatcaggcctcaaccaatat

SEQ ID NO: 26052 - DNA, 22 bp, synthetic construct
  misc_feature 1..22: note = chemically synthesized
  source 1..22: mol_type = other DNA
caatcaggcctcaaccaatatg

SEQ ID NO: 26053 - DNA, 22 bp, synthetic construct
  misc_feature 1..22: note = chemically synthesized
  source 1..22: mol_type = other DNA
aaccaatatgagatcgactttc

SEQ ID NO: 26054 - DNA, 22 bp, synthetic construct
  misc_feature 1..22: note = chemically synthesized
  source 1..22: mol_type = other DNA
tcttttattgatatatgacgtg

SEQ ID NO: 26055 - DNA, 22 bp, synthetic construct
  misc_feature 1..22: note = chemically synthesized
  source 1..22: mol_type = other DNA
cttttattgatatatgacgtgt

SEQ ID NO: 26056 - DNA, 22 bp, synthetic construct
  misc_feature 1..22: note = chemically synthesized
  source 1..22: mol_type = other DNA
ttttattgatatatgacgtgtt

SEQ ID NO: 26057 - DNA, 22 bp, synthetic construct
  misc_feature 1..22: note = chemically synthesized
  source 1..22: mol_type = other DNA
ttattgatatatgacgtgttta

SEQ ID NO: 26058 - DNA, 22 bp, synthetic construct
  misc_feature 1..22: note = chemically synthesized
  source 1..22: mol_type = other DNA
tattgatatatgacgtgtttat

SEQ ID NO: 26059 - DNA, 22 bp, synthetic construct
  misc_feature 1..22: note = chemically synthesized
  source 1..22: mol_type = other DNA
attgatatatgacgtgtttata

SEQ ID NO: 26060 - DNA, 22 bp, synthetic construct
  misc_feature 1..22: note = chemically synthesized
  source 1..22: mol_type = other DNA
ttgatatatgacgtgtttatat

SEQ ID NO: 26061 - DNA, 22 bp, synthetic construct
  misc_feature 1..22: note = chemically synthesized
  source 1..22: mol_type = other DNA
atatatgacgtgtttatatgta

SEQ ID NO: 26062 - DNA, 22 bp, synthetic construct
  misc_feature 1..22: note = chemically synthesized
  source 1..22: mol_type = other DNA
atatgtatcaggtacatgtgac

SEQ ID NO: 26063 - DNA, 22 bp, synthetic construct
  misc_feature 1..22: note = chemically synthesized
  source 1..22: mol_type = other DNA
tatgtatcaggtacatgtgaca

SEQ ID NO: 26064 - DNA, 22 bp, synthetic construct
  misc_feature 1..22: note = chemically synthesized
  source 1..22: mol_type = other DNA
tgttacatgcatataatgtata

SEQ ID NO: 26065 - DNA, 22 bp, synthetic construct
  misc_feature 1..22: note = chemically synthesized
  source 1..22: mol_type = other DNA
gttacatgcatataatgtataa

SEQ ID NO: 26066 - DNA, 22 bp, synthetic construct
  misc_feature 1..22: note = chemically synthesized
  source 1..22: mol_type = other DNA
ttacatgcatataatgtataat

SEQ ID NO: 26067 - DNA, 22 bp, synthetic construct
  misc_feature 1..22: note = chemically synthesized
  source 1..22: mol_type = other DNA
catgcatataatgtataatgat

SEQ ID NO: 26068 - DNA, 22 bp, synthetic construct
  misc_feature 1..22: note = chemically synthesized
  source 1..22: mol_type = other DNA
ggggtattcatcacctcaagta

SEQ ID NO: 26069 - DNA, 22 bp, synthetic construct
  misc_feature 1..22: note = chemically synthesized
  source 1..22: mol_type = other DNA
gggtattcatcacctcaagtat

SEQ ID NO: 26070 - DNA, 22 bp, synthetic construct
  misc_feature 1..22: note = chemically synthesized
  source 1..22: mol_type = other DNA
atcacctcaagtatttatcgtt

SEQ ID NO: 26071 - DNA, 22 bp, synthetic construct
  misc_feature 1..22: note = chemically synthesized
  source 1..22: mol_type = other DNA
aagtatttatcgtttctatgtg

SEQ ID NO: 26072 - DNA, 22 bp, synthetic construct
  misc_feature 1..22: note = chemically synthesized
  source 1..22: mol_type = other DNA
atcgtttctatgtgttaggaac

SEQ ID NO: 26073 - DNA, 22 bp, synthetic construct
  misc_feature 1..22: note = chemically synthesized
  source 1..22: mol_type = other DNA
tcgtttctatgtgttaggaaca

SEQ ID NO: 26074 - DNA, 22 bp, synthetic construct
  misc_feature 1..22: note = chemically synthesized
  source 1..22: mol_type = other DNA
ctatgtgttaggaacatttcaa

SEQ ID NO: 26075 - DNA, 22 bp, synthetic construct
  misc_feature 1..22: note = chemically synthesized
  source 1..22: mol_type = other DNA
tatgtgttaggaacatttcaag

SEQ ID NO: 26076 - DNA, 22 bp, synthetic construct
  misc_feature 1..22: note = chemically synthesized
  source 1..22: mol_type = other DNA
tgtgttaggaacatttcaagac

SEQ ID NO: 26077 - DNA, 22 bp, synthetic construct
  misc_feature 1..22: note = chemically synthesized
  source 1..22: mol_type = other DNA
ggaacatttcaagacctttctt

SEQ ID NO: 26078 - DNA, 22 bp, synthetic construct
  misc_feature 1..22: note = chemically synthesized
  source 1..22: mol_type = other DNA
caagacctttcttctactattt

SEQ ID NO: 26079 - DNA, 22 bp, synthetic construct
  misc_feature 1..22: note = chemically synthesized
  source 1..22: mol_type = other DNA
aagacctttcttctactatttt

SEQ ID NO: 26080 - DNA, 22 bp, synthetic construct
  misc_feature 1..22: note = chemically synthesized
  source 1..22: mol_type = other DNA
tcttctactattttgaaatata

SEQ ID NO: 26081 - DNA, 22 bp, synthetic construct
  misc_feature 1..22: note = chemically synthesized
  source 1..22: mol_type = other DNA
cttctactattttgaaatatac

SEQ ID NO: 26082 - DNA, 22 bp, synthetic construct
  misc_feature 1..22: note = chemically synthesized
  source 1..22: mol_type = other DNA
ttctactattttgaaatataca

SEQ ID NO: 26083 - DNA, 22 bp, synthetic construct
  misc_feature 1..22: note = chemically synthesized
  source 1..22: mol_type = other DNA
ctactattttgaaatatacaat

SEQ ID NO: 26084 - DNA, 22 bp, synthetic construct
  misc_feature 1..22: note = chemically synthesized
  source 1..22: mol_type = other DNA
tactattttgaaatatacaata

SEQ ID NO: 26085 - DNA, 22 bp, synthetic construct
  misc_feature 1..22: note = chemically synthesized
  source 1..22: mol_type = other DNA
ctattttgaaatatacaatata

SEQ ID NO: 26086 - DNA, 22 bp, synthetic construct
  misc_feature 1..22: note = chemically synthesized
  source 1..22: mol_type = other DNA
ttttgaaatatacaatatattg

SEQ ID NO: 26087 - DNA, 22 bp, synthetic construct
  misc_feature 1..22: note = chemically synthesized
  source 1..22: mol_type = other DNA
tgaaatatacaatatattgttt

SEQ ID NO: 26088 - DNA, 22 bp, synthetic construct
  misc_feature 1..22: note = chemically synthesized
  source 1..22: mol_type = other DNA
gaaatatacaatatattgtttt

SEQ ID NO: 26089 - DNA, 22 bp, synthetic construct
  misc_feature 1..22: note = chemically synthesized
  source 1..22: mol_type = other DNA
aaatatacaatatattgttttt

SEQ ID NO: 26090 - DNA, 22 bp, synthetic construct
  misc_feature 1..22: note = chemically synthesized
  source 1..22: mol_type = other DNA
tttttaactataatcaccctac

SEQ ID NO: 26091 - DNA, 22 bp, synthetic construct
  misc_feature 1..22: note = chemically synthesized
  source 1..22: mol_type = other DNA
ttaactataatcaccctacttt

SEQ ID NO: 26092 - DNA, 22 bp, synthetic construct
  misc_feature 1..22: note = chemically synthesized
  source 1..22: mol_type = other DNA
taactataatcaccctactttg

SEQ ID NO: 26093 - DNA, 22 bp, synthetic construct
  misc_feature 1..22: note = chemically synthesized
  source 1..22: mol_type = other DNA
aactataatcaccctactttgc

SEQ ID NO: 26094 - DNA, 22 bp, synthetic construct
  misc_feature 1..22: note = chemically synthesized
  source 1..22: mol_type = other DNA
actataatcaccctactttgct

SEQ ID NO: 26095 - DNA, 22 bp, synthetic construct
  misc_feature 1..22: note = chemically synthesized
  source 1..22: mol_type = other DNA
taatcaccctactttgctattg

SEQ ID NO: 26096 - DNA, 22 bp, synthetic construct
  misc_feature 1..22: note = chemically synthesized
  source 1..22: mol_type = other DNA
ctttgctattgaacatcagaac

SEQ ID NO: 26097 - DNA, 22 bp, synthetic construct
  misc_feature 1..22: note = chemically synthesized
  source 1..22: mol_type = other DNA
tgctattgaacatcagaacata

SEQ ID NO: 26098 - DNA, 22 bp, synthetic construct
  misc_feature 1..22: note = chemically synthesized
  source 1..22: mol_type = other DNA
gctattgaacatcagaacatat

SEQ ID NO: 26099 - DNA, 22 bp, synthetic construct
  misc_feature 1..22: note = chemically synthesized
  source 1..22: mol_type = other DNA
ctattgaacatcagaacatatt

SEQ ID NO: 26100 - DNA, 22 bp, synthetic construct
  misc_feature 1..22: note = chemically synthesized
  source 1..22: mol_type = other DNA
ttgaacatcagaacatattcct

SEQ ID NO: 26101 - DNA, 22 bp, synthetic construct
  misc_feature 1..22: note = chemically synthesized
  source 1..22: mol_type = other DNA
aacatcagaacatattccttct

SEQ ID NO: 26102 - DNA, 22 bp, synthetic construct
  misc_feature 1..22: note = chemically synthesized
  source 1..22: mol_type = other DNA
cttctatctaactgcctgtttc

SEQ ID NO: 26103 - DNA, 22 bp, synthetic construct
  misc_feature 1..22: note = chemically synthesized
  source 1..22: mol_type = other DNA
ctatctaactgcctgtttccat

SEQ ID NO: 26104 - DNA, 22 bp, synthetic construct
  misc_feature 1..22: note = chemically synthesized
  source 1..22: mol_type = other DNA
tatctaactgcctgtttccatt

SEQ ID NO: 26105 - DNA, 22 bp, synthetic construct
  misc_feature 1..22: note = chemically synthesized
  source 1..22: mol_type = other DNA
tctaactgcctgtttccattaa

SEQ ID NO: 26106 - DNA, 22 bp, synthetic construct
  misc_feature 1..22: note = chemically synthesized
  source 1..22: mol_type = other DNA
actgcctgtttccattaaccaa

SEQ ID NO: 26107 - DNA, 22 bp, synthetic construct
  misc_feature 1..22: note = chemically synthesized
  source 1..22: mol_type = other DNA
cctgtttccattaaccaacttc

SEQ ID NO: 26108 - DNA, 22 bp, synthetic construct
  misc_feature 1..22: note = chemically synthesized
  source 1..22: mol_type = other DNA
tttccattaaccaacttctctt

SEQ ID NO: 26109 - DNA, 22 bp, synthetic construct
  misc_feature 1..22: note = chemically synthesized
  source 1..22: mol_type = other DNA
ccattaaccaacttctcttcgt

SEQ ID NO: 26110 - DNA, 22 bp, synthetic construct
  misc_feature 1..22: note = chemically synthesized
  source 1..22: mol_type = other DNA
cattaaccaacttctcttcgtc

SEQ ID NO: 26111 - DNA, 22 bp, synthetic construct
  misc_feature 1..22: note = chemically synthesized
  source 1..22: mol_type = other DNA
accaacttctcttcgtctccct

SEQ ID NO: 26112 - DNA, 22 bp, synthetic construct
  misc_feature 1..22: note = chemically synthesized
  source 1..22: mol_type = other DNA
ctcttcgtctcccttcctccca

SEQ ID NO: 26113 - DNA, 22 bp, synthetic construct
  misc_feature 1..22: note = chemically synthesized
  source 1..22: mol_type = other DNA
tcttcgtctcccttcctcccat

SEQ ID NO: 26114 - DNA, 22 bp, synthetic construct
  misc_feature 1..22: note = chemically synthesized
  source 1..22: mol_type = other DNA
ttcgtctcccttcctcccataa

SEQ ID NO: 26115 - DNA, 22 bp, synthetic construct
  misc_feature 1..22: note = chemically synthesized
  source 1..22: mol_type = other DNA
cgtctcccttcctcccataacg

SEQ ID NO: 26116 - DNA, 22 bp, synthetic construct
  misc_feature 1..22: note = chemically synthesized
  source 1..22: mol_type = other DNA
gtctcccttcctcccataacgt

SEQ ID NO: 26117 - DNA, 22 bp, synthetic construct
  misc_feature 1..22: note = chemically synthesized
  source 1..22: mol_type = other DNA
ccttcctcccataacgtacaca

SEQ ID NO: 26118 - DNA, 22 bp, synthetic construct
  misc_feature 1..22: note = chemically synthesized
  source 1..22: mol_type = other DNA
cctcccataacgtacacacctt

SEQ ID NO: 26119 - DNA, 22 bp, synthetic construct
  misc_feature 1..22: note = chemically synthesized
  source 1..22: mol_type = other DNA
ctcccataacgtacacaccttt

SEQ ID NO: 26120 - DNA, 22 bp, synthetic construct
  misc_feature 1..22: note = chemically synthesized
  source 1..22: mol_type = other DNA
ccataacgtacacacctttctc

SEQ ID NO: 26121 - DNA, 22 bp, synthetic construct
  misc_feature 1..22: note = chemically synthesized
  source 1..22: mol_type = other DNA
tctctacctctggtttctgtca

SEQ ID NO: 26122 - DNA, 22 bp, synthetic construct
  misc_feature 1..22: note = chemically synthesized
  source 1..22: mol_type = other DNA
ctctacctctggtttctgtcat

SEQ ID NO: 26123 - DNA, 22 bp, synthetic construct
  misc_feature 1..22: note = chemically synthesized
  source 1..22: mol_type = other DNA
tctacctctggtttctgtcatt

SEQ ID NO: 26124 - DNA, 22 bp, synthetic construct
  misc_feature 1..22: note = chemically synthesized
  source 1..22: mol_type = other DNA
tacctctggtttctgtcattct

SEQ ID NO: 26125 - DNA, 22 bp, synthetic construct
  misc_feature 1..22: note = chemically synthesized
  source 1..22: mol_type = other DNA
cctctggtttctgtcattctac

SEQ ID NO: 26126 - DNA, 22 bp, synthetic construct
  misc_feature 1..22: note = chemically synthesized
  source 1..22: mol_type = other DNA
tggtttctgtcattctactctc

SEQ ID NO: 26127 - DNA, 22 bp, synthetic construct
  misc_feature 1..22: note = chemically synthesized
  source 1..22: mol_type = other DNA
gtttctgtcattctactctcta

SEQ ID NO: 26128 - DNA, 22 bp, synthetic construct
  misc_feature 1..22: note = chemically synthesized
  source 1..22: mol_type = other DNA
ctgtcattctactctctaccta

SEQ ID NO: 26129 - DNA, 22 bp, synthetic construct
  misc_feature 1..22: note = chemically synthesized
  source 1..22: mol_type = other DNA
tgtcattctactctctacctac

SEQ ID NO: 26130 - DNA, 22 bp, synthetic construct
  misc_feature 1..22: note = chemically synthesized
  source 1..22: mol_type = other DNA
tcattctactctctacctacat

SEQ ID NO: 26131 - DNA, 22 bp, synthetic construct
  misc_feature 1..22: note = chemically synthesized
  source 1..22: mol_type = other DNA
tactctctacctacatgatatt

SEQ ID NO: 26132 - DNA, 22 bp, synthetic construct
  misc_feature 1..22: note = chemically synthesized
  source 1..22: mol_type = other DNA
ctctctacctacatgatattaa

SEQ ID NO: 26133 - DNA, 22 bp, synthetic construct
  misc_feature 1..22: note = chemically synthesized
  source 1..22: mol_type = other DNA
tctacctacatgatattaactt

SEQ ID NO: 26134 - DNA, 22 bp, synthetic construct
  misc_feature 1..22: note = chemically synthesized
  source 1..22: mol_type = other DNA
tacctacatgatattaactttt

SEQ ID NO: 26135 - DNA, 22 bp, synthetic construct
  misc_feature 1..22: note = chemically synthesized
  source 1..22: mol_type = other DNA
cctacatgatattaactttttt

SEQ ID NO: 26136 - DNA, 22 bp, synthetic construct
  misc_feature 1..22: note = chemically synthesized
  source 1..22: mol_type = other DNA
catgatattaacttttttagct

SEQ ID NO: 26137 - DNA, 22 bp, synthetic construct
  misc_feature 1..22: note = chemically synthesized
  source 1..22: mol_type = other DNA
acttttttagctcccacatatc

SEQ ID NO: 26138 - DNA, 22 bp, synthetic construct
  misc_feature 1..22: note = chemically synthesized
  source 1..22: mol_type = other DNA
ttttagctcccacatatcagtg

SEQ ID NO: 26139 - DNA, 22 bp, synthetic construct
  misc_feature 1..22: note = chemically synthesized
  source 1..22: mol_type = other DNA
tttagctcccacatatcagtga

SEQ ID NO: 26140 - DNA, 22 bp, synthetic construct
  misc_feature 1..22: note = chemically synthesized
  source 1..22: mol_type = other DNA
ttagctcccacatatcagtgag

SEQ ID NO: 26141 - DNA, 22 bp, synthetic construct
  misc_feature 1..22: note = chemically synthesized
  source 1..22: mol_type = other DNA
tagctcccacatatcagtgaga

SEQ ID NO: 26142 - DNA, 22 bp, synthetic construct
  misc_feature 1..22: note = chemically synthesized
  source 1..22: mol_type = other DNA
agctcccacatatcagtgagaa

SEQ ID NO: 26143 - DNA, 22 bp, synthetic construct
  misc_feature 1..22: note = chemically synthesized
  source 1..22: mol_type = other DNA
gctcccacatatcagtgagaac

SEQ ID NO: 26144 - DNA, 22 bp, synthetic construct
  misc_feature 1..22: note = chemically synthesized
  source 1..22: mol_type = other DNA
ccacatatcagtgagaacatgc

SEQ ID NO: 26145 - DNA, 22 bp, synthetic construct
  misc_feature 1..22: note = chemically synthesized
  source 1..22: mol_type = other DNA
gtctttctatgcctggcttatt

SEQ ID NO: 26146 - DNA, 22 bp, synthetic construct
  misc_feature 1..22: note = chemically synthesized
  source 1..22: mol_type = other DNA
tctttctatgcctggcttattt

SEQ ID NO: 26147 - DNA, 22 bp, synthetic construct
  misc_feature 1..22: note = chemically synthesized
  source 1..22: mol_type = other DNA
tctatgcctggcttatttcgtt

SEQ ID NO: 26148 - DNA, 22 bp, synthetic construct
  misc_feature 1..22: note = chemically synthesized
  source 1..22: mol_type = other DNA
ctatgcctggcttatttcgttt

SEQ ID NO: 26149 - DNA, 22 bp, synthetic construct
  misc_feature 1..22: note = chemically synthesized
  source 1..22: mol_type = other DNA
tatgcctggcttatttcgttta

SEQ ID NO: 26150 - DNA, 22 bp, synthetic construct
  misc_feature 1..22: note = chemically synthesized
  source 1..22: mol_type = other DNA
tgcctggcttatttcgtttaac

SEQ ID NO: 26151 - DNA, 22 bp, synthetic construct
  misc_feature 1..22: note = chemically synthesized
  source 1..22: mol_type = other DNA
gcttatttcgtttaacataatg

SEQ ID NO: 26152 - DNA, 22 bp, synthetic construct
  misc_feature 1..22: note = chemically synthesized
  source 1..22: mol_type = other DNA
atttcgtttaacataatgactt

SEQ ID NO: 26153 - DNA, 22 bp, synthetic construct
  misc_feature 1..22: note = chemically synthesized
  source 1..22: mol_type = other DNA
tttcgtttaacataatgacttc

SEQ ID NO: 26154 - DNA, 22 bp, synthetic construct
  misc_feature 1..22: note = chemically synthesized
  source 1..22: mol_type = other DNA
cgtttaacataatgacttccag

SEQ ID NO: 26155 - DNA, 22 bp, synthetic construct
  misc_feature 1..22: note = chemically synthesized
  source 1..22: mol_type = other DNA
gtttaacataatgacttccagt

SEQ ID NO: 26156 - DNA, 22 bp, synthetic construct
  misc_feature 1..22: note = chemically synthesized
  source 1..22: mol_type = other DNA
aacataatgacttccagtttca

SEQ ID NO: 26157 - DNA, 22 bp, synthetic construct
  misc_feature 1..22: note = chemically synthesized
  source 1..22: mol_type = other DNA
acataatgacttccagtttcat

SEQ ID NO: 26158 - DNA, 22 bp, synthetic construct
  misc_feature 1..22: note = chemically synthesized
  source 1..22: mol_type = other DNA
ccagtttcatccatgttgctgc

SEQ ID NO: 26159 - DNA, 22 bp, synthetic construct
  misc_feature 1..22: note = chemically synthesized
  source 1..22: mol_type = other DNA
cagtttcatccatgttgctgca

SEQ ID NO: 26160 - DNA, 22 bp, synthetic construct
  misc_feature 1..22: note = chemically synthesized
  source 1..22: mol_type = other DNA
catccatgttgctgcaaatgaa

SEQ ID NO: 26161 - DNA, 22 bp, synthetic construct
  misc_feature 1..22: note = chemically synthesized
  source 1..22: mol_type = other DNA
atccatgttgctgcaaatgaaa

SEQ ID NO: 26162 - DNA, 22 bp, synthetic construct
  misc_feature 1..22: note = chemically synthesized
  source 1..22: mol_type = other DNA
ctgcaaatgaaatgattttata

SEQ ID NO: 26163 - DNA, 22 bp, synthetic construct
  misc_feature 1..22: note = chemically synthesized
  source 1..22: mol_type = other DNA
caaatgaaatgattttatattt

SEQ ID NO: 26164 - DNA, 22 bp, synthetic construct
  misc_feature 1..22: note = chemically synthesized
  source 1..22: mol_type = other DNA
tatatttgtatggttgaataat

SEQ ID NO: 26165 - DNA, 22 bp, synthetic construct
  misc_feature 1..22: note = chemically synthesized
  source 1..22: mol_type = other DNA
atatttgtatggttgaataata

SEQ ID NO: 26166 - DNA, 22 bp, synthetic construct
  misc_feature 1..22: note = chemically synthesized
  source 1..22: mol_type = other DNA
tatttgtatggttgaataatat

SEQ ID NO: 26167 - DNA, 22 bp, synthetic construct
  misc_feature 1..22: note = chemically synthesized
  source 1..22: mol_type = other DNA
gtatggttgaataatattcaat

SEQ ID NO: 26168 - DNA, 22 bp, synthetic construct
  misc_feature 1..22: note = chemically synthesized
  source 1..22: mol_type = other DNA
tatggttgaataatattcaatt

SEQ ID NO: 26169 - DNA, 22 bp, synthetic construct
  misc_feature 1..22: note = chemically synthesized
  source 1..22: mol_type = other DNA
aataatattcaattgtgtgtat

SEQ ID NO: 26170 - DNA, 22 bp, synthetic construct
  misc_feature 1..22: note = chemically synthesized
  source 1..22: mol_type = other DNA
aattgtgtgtatacaccacatt

SEQ ID NO: 26171 - DNA, 22 bp, synthetic construct
  misc_feature 1..22: note = chemically synthesized
  source 1..22: mol_type = other DNA
tgtgtatacaccacattttctt

SEQ ID NO: 26172 - DNA, 22 bp, synthetic construct
  misc_feature 1..22: note = chemically synthesized
  source 1..22: mol_type = other DNA
tcttcattcatccattgatgga

SEQ ID NO: 26173 - DNA, 22 bp, synthetic construct
  misc_feature 1..22: note = chemically synthesized
  source 1..22: mol_type = other DNA
cttcattcatccattgatggac

SEQ ID NO: 26174 - DNA, 22 bp, synthetic construct
  misc_feature 1..22: note = chemically synthesized
  source 1..22: mol_type = other DNA
ttcattcatccattgatggaca

SEQ ID NO: 26175 - DNA, 22 bp, synthetic construct
  misc_feature 1..22: note = chemically synthesized
  source 1..22: mol_type = other DNA
cattcatccattgatggacact

SEQ ID NO: 26176 - DNA, 22 bp, synthetic construct
  misc_feature 1..22: note = chemically synthesized
  source 1..22: mol_type = other DNA
attcatccattgatggacactt

SEQ ID NO: 26177 - DNA, 22 bp, synthetic construct
  misc_feature 1..22: note = chemically synthesized
  source 1..22: mol_type = other DNA
atccattgatggacacttaggt

SEQ ID NO: 26178 - DNA, 22 bp, synthetic construct
  misc_feature 1..22: note = chemically synthesized
  source 1..22: mol_type = other DNA
atggacacttaggttgattcca

SEQ ID NO: 26179 - DNA, 22 bp, synthetic construct
  misc_feature 1..22: note = chemically synthesized
  source 1..22: mol_type = other DNA
aggttgattccatatctttgct

SEQ ID NO: 26180 - DNA, 22 bp, synthetic construct
  misc_feature 1..22: note = chemically synthesized
  source 1..22: mol_type = other DNA
ggttgattccatatctttgcta

SEQ ID NO: 26181 - DNA, 22 bp, synthetic construct
  misc_feature 1..22: note = chemically synthesized
  source 1..22: mol_type = other DNA
attccatatctttgctaatgtg

SEQ ID NO: 26182 - DNA, 22 bp, synthetic construct
  misc_feature 1..22: note = chemically synthesized
  source 1..22: mol_type = other DNA
catatctttgctaatgtgaatc

SEQ ID NO: 26183 - DNA, 22 bp, synthetic construct
  misc_feature 1..22: note = chemically synthesized
  source 1..22: mol_type = other DNA
tgctaatgtgaatcgtgctgca

SEQ ID NO: 26184 - DNA, 22 bp, synthetic construct
  misc_feature 1..22: note = chemically synthesized
  source 1..22: mol_type = other DNA
gctaatgtgaatcgtgctgcaa

SEQ ID NO: 26185 - DNA, 22 bp, synthetic construct
  misc_feature 1..22: note = chemically synthesized
  source 1..22: mol_type = other DNA
ctaatgtgaatcgtgctgcaat

SEQ ID NO: 26186 - DNA, 22 bp, synthetic construct
  misc_feature 1..22: note = chemically synthesized
  source 1..22: mol_type = other DNA
atgtgaatcgtgctgcaataaa

SEQ ID NO: 26187 - DNA, 22 bp, synthetic construct
  misc_feature 1..22: note = chemically synthesized
  source 1..22: mol_type = other DNA
caataaacagtgtggtaccagt

SEQ ID NO: 26188 - DNA, 22 bp, synthetic construct
  misc_feature 1..22: note = chemically synthesized
  source 1..22: mol_type = other DNA
tttattattctgaattcttttc

SEQ ID NO: 26189 - DNA, 22 bp, synthetic construct
  misc_feature 1..22: note = chemically synthesized
  source 1..22: mol_type = other DNA
attattctgaattcttttcctt

SEQ ID NO: 26190 - DNA, 22 bp, synthetic construct
  misc_feature 1..22: note = chemically synthesized
  source 1..22: mol_type = other DNA
ttattctgaattcttttccttt

SEQ ID NO: 26191 - DNA, 22 bp, synthetic construct
  misc_feature 1..22: note = chemically synthesized
  source 1..22: mol_type = other DNA
ttctgaattcttttcctttgga

SEQ ID NO: 26192 - DNA, 22 bp, synthetic construct
  misc_feature 1..22: note = chemically synthesized
  source 1..22: mol_type = other DNA
tgaattcttttcctttggataa

SEQ ID NO: 26193 - DNA, 22 bp, synthetic construct
  misc_feature 1..22: note = chemically synthesized
  source 1..22: mol_type = other DNA
aattcttttcctttggataaat

SEQ ID NO: 26194 - DNA, 22 bp, synthetic construct
  misc_feature 1..22: note = chemically synthesized
  source 1..22: mol_type = other DNA
ttttcctttggataaataccca

SEQ ID NO: 26195 - DNA, 22 bp, synthetic construct
  misc_feature 1..22: note = chemically synthesized
  source 1..22: mol_type = other DNA
ttcctttggataaatacccagt

SEQ ID NO: 26196 - DNA, 22 bp, synthetic construct
  misc_feature 1..22: note = chemically synthesized
  source 1..22: mol_type = other DNA
tcctttggataaatacccagta

SEQ ID NO: 26197 - DNA, 22 bp, synthetic construct
  misc_feature 1..22: note = chemically synthesized
  source 1..22: mol_type = other DNA
cctttggataaatacccagtaa

SEQ ID NO: 26198 - DNA, 22 bp, synthetic construct
  misc_feature 1..22: note = chemically synthesized
  source 1..22: mol_type = other DNA
ctttggataaatacccagtaat

SEQ ID NO: 26199 - DNA, 22 bp, synthetic construct
  misc_feature 1..22: note = chemically synthesized
  source 1..22: mol_type = other DNA
tggataaatacccagtaataag

SEQ ID NO: 26200 - DNA, 22 bp, synthetic construct
  misc_feature 1..22: note = chemically synthesized
  source 1..22: mol_type = other DNA
ggataaatacccagtaataaga

SEQ ID NO: 26201 - DNA, 22 bp, synthetic construct
  misc_feature 1..22: note = chemically synthesized
  source 1..22: mol_type = other DNA
gataaatacccagtaataagat

SEQ ID NO: 26202 - DNA, 22 bp, synthetic construct
  misc_feature 1..22: note = chemically synthesized
  source 1..22: mol_type = other DNA
ctggatcttatgatagttcaat

SEQ ID NO: 26203 - DNA, 22 bp, synthetic construct
  misc_feature 1..22: note = chemically synthesized
  source 1..22: mol_type = other DNA
gatcttatgatagttcaatttt

SEQ ID NO: 26204 - DNA, 22 bp, synthetic construct
  misc_feature 1..22: note = chemically synthesized
  source 1..22: mol_type = other DNA
atgatagttcaatttttagctt

SEQ ID NO: 26205 - DNA, 22 bp, synthetic construct
  misc_feature 1..22: note = chemically synthesized
  source 1..22: mol_type = other DNA
tgatagttcaatttttagcttt

SEQ ID NO: 26206 - DNA, 22 bp, synthetic construct
  misc_feature 1..22: note = chemically synthesized
  source 1..22: mol_type = other DNA
aatttttagctttttggtaaat

SEQ ID NO: 26207 - DNA, 22 bp, synthetic construct
  misc_feature 1..22: note = chemically synthesized
  source 1..22: mol_type = other DNA
ttagctttttggtaaatctaca

SEQ ID NO: 26208 - DNA, 22 bp, synthetic construct
  misc_feature 1..22: note = chemically synthesized
  source 1..22: mol_type = other DNA
tagctttttggtaaatctacat

SEQ ID NO: 26209 - DNA, 22 bp, synthetic construct
  misc_feature 1..22: note = chemically synthesized
  source 1..22: mol_type = other DNA
agctttttggtaaatctacata

SEQ ID NO: 26210 - DNA, 22 bp, synthetic construct
  misc_feature 1..22: note = chemically synthesized
  source 1..22: mol_type = other DNA
gctttttggtaaatctacatat

SEQ ID NO: 26211 - DNA, 22 bp, synthetic construct
  misc_feature 1..22: note = chemically synthesized
  source 1..22: mol_type = other DNA
tttggtaaatctacatattgtt

SEQ ID NO: 26212 - DNA, 22 bp, synthetic construct
  misc_feature 1..22: note = chemically synthesized
  source 1..22: mol_type = other DNA
ttggtaaatctacatattgttt

SEQ ID NO: 26213 - DNA, 22 bp, synthetic construct
  misc_feature 1..22: note = chemically synthesized
  source 1..22: mol_type = other DNA
tggtaaatctacatattgtttt

SEQ ID NO: 26214 - DNA, 22 bp, synthetic construct
  misc_feature 1..22: note = chemically synthesized
  source 1..22: mol_type = other DNA
ggtaaatctacatattgttttc

SEQ ID NO: 26215 - DNA, 22 bp, synthetic construct
  misc_feature 1..22: note = chemically synthesized
  source 1..22: mol_type = other DNA
gtaaatctacatattgttttcc

SEQ ID NO: 26216 - DNA, 22 bp, synthetic construct
  misc_feature 1..22: note = chemically synthesized
  source 1..22: mol_type = other DNA
catattgttttccatagtggct

SEQ ID NO: 26217 - DNA, 22 bp, synthetic construct
  misc_feature 1..22: note = chemically synthesized
  source 1..22: mol_type = other DNA
ttttccatagtggctatactaa

SEQ ID NO: 26218 - DNA, 22 bp, synthetic construct
  misc_feature 1..22: note = chemically synthesized
  source 1..22: mol_type = other DNA
tccatagtggctatactaattt

SEQ ID NO: 26219 - DNA, 22 bp, synthetic construct
  misc_feature 1..22: note = chemically synthesized
  source 1..22: mol_type = other DNA
ccatagtggctatactaatttg

SEQ ID NO: 26220 - DNA, 22 bp, synthetic construct
  misc_feature 1..22: note = chemically synthesized
  source 1..22: mol_type = other DNA
catagtggctatactaatttgc

SEQ ID NO: 26221 - DNA, 22 bp, synthetic construct
  misc_feature 1..22: note = chemically synthesized
  source 1..22: mol_type = other DNA
tactaatttgcatgcttaccaa

SEQ ID NO: 26222 - DNA, 22 bp, synthetic construct
  misc_feature 1..22: note = chemically synthesized
  source 1..22: mol_type = other DNA
atttgcatgcttaccaatagtg

SEQ ID NO: 26223 - DNA, 22 bp, synthetic construct
  misc_feature 1..22: note = chemically synthesized
  source 1..22: mol_type = other DNA
gcatgcttaccaatagtgccta

SEQ ID NO: 26224 - DNA, 22 bp, synthetic construct
  misc_feature 1..22: note = chemically synthesized
  source 1..22: mol_type = other DNA
catgcttaccaatagtgcctac

SEQ ID NO: 26225 - DNA, 22 bp, synthetic construct
  misc_feature 1..22: note = chemically synthesized
  source 1..22: mol_type = other DNA
accaatagtgcctacgagtgcc

SEQ ID NO: 26226 - DNA, 22 bp, synthetic construct
  misc_feature 1..22: note = chemically synthesized
  source 1..22: mol_type = other DNA
ccaatagtgcctacgagtgcct

SEQ ID NO: 26227 - DNA, 22 bp, synthetic construct
  misc_feature 1..22: note = chemically synthesized
  source 1..22: mol_type = other DNA
cgagtgccttttccttcacatc

SEQ ID NO: 26228 - DNA, 22 bp, synthetic construct
  misc_feature 1..22: note = chemically synthesized
  source 1..22: mol_type = other DNA
ttccttcacatccttgccagca

SEQ ID NO: 26229 - DNA, 22 bp, synthetic construct
  misc_feature 1..22: note = chemically synthesized
  source 1..22: mol_type = other DNA
tccttcacatccttgccagcat

SEQ ID NO: 26230 - DNA, 22 bp, synthetic construct
  misc_feature 1..22: note = chemically synthesized
  source 1..22: mol_type = other DNA
ccttcacatccttgccagcatg

SEQ ID NO: 26231 - DNA, 22 bp, synthetic construct
  misc_feature 1..22: note = chemically synthesized
  source 1..22: mol_type = other DNA
cttcacatccttgccagcatgt

SEQ ID NO: 26232 - DNA, 22 bp, synthetic construct
  misc_feature 1..22: note = chemically synthesized
  source 1..22: mol_type = other DNA
cacatccttgccagcatgtgtt

SEQ ID NO: 26233 - DNA, 22 bp, synthetic construct
  misc_feature 1..22: note = chemically synthesized
  source 1..22: mol_type = other DNA
acatccttgccagcatgtgtta

SEQ ID NO: 26234 - DNA, 22 bp, synthetic construct
  misc_feature 1..22: note = chemically synthesized
  source 1..22: mol_type = other DNA
gccagcatgtgttatttattta

SEQ ID NO: 26235 - DNA, 22 bp, synthetic construct
  misc_feature 1..22: note = chemically synthesized
  source 1..22: mol_type = other DNA
ccagcatgtgttatttatttat

SEQ ID NO: 26236 - DNA, 22 bp, synthetic construct
  misc_feature 1..22: note = chemically synthesized
  source 1..22: mol_type = other DNA
tttatttattaatttatttaaa

SEQ ID NO: 26237 - DNA, 22 bp, synthetic construct
  misc_feature 1..22: note = chemically synthesized
  source 1..22: mol_type = other DNA
atttattaatttatttaaatca

SEQ ID NO: 26238 - DNA, 22 bp, synthetic construct
  misc_feature 1..22: note = chemically synthesized
  source 1..22: mol_type = other DNA
tttattaatttatttaaatcat

SEQ ID NO: 26239 - DNA, 22 bp, synthetic construct
  misc_feature 1..22: note = chemically synthesized
  source 1..22: mol_type = other DNA
attaatttatttaaatcatgat

SEQ ID NO: 26240 - DNA, 22 bp, synthetic construct
  misc_feature 1..22: note = chemically synthesized
  source 1..22: mol_type = other DNA
ttaatttatttaaatcatgatg

SEQ ID NO: 26241 - DNA, 22 bp, synthetic construct
  misc_feature 1..22: note = chemically synthesized
  source 1..22: mol_type = other DNA
atttatttaaatcatgatgatt

SEQ ID NO: 26242 - DNA, 22 bp, synthetic construct
  misc_feature 1..22: note = chemically synthesized
  source 1..22: mol_type = other DNA
atttaaatcatgatgattctaa

SEQ ID NO: 26243 - DNA, 22 bp, synthetic construct
  misc_feature 1..22: note = chemically synthesized
  source 1..22: mol_type = other DNA
tttaaatcatgatgattctaac

SEQ ID NO: 26244 - DNA, 22 bp, synthetic construct
  misc_feature 1..22: note = chemically synthesized
  source 1..22: mol_type = other DNA
aaatcatgatgattctaactgg

SEQ ID NO: 26245 - DNA, 22 bp, synthetic construct
  misc_feature 1..22: note = chemically synthesized
  source 1..22: mol_type = other DNA
aatcatgatgattctaactggc

SEQ ID NO: 26246 - DNA, 22 bp, synthetic construct
  misc_feature 1..22: note = chemically synthesized
  source 1..22: mol_type = other DNA
taactggcataagatgatatct

SEQ ID NO: 26247 - DNA, 22 bp, synthetic construct
  misc_feature 1..22: note = chemically synthesized
  source 1..22: mol_type = other DNA
actggcataagatgatatctca

SEQ ID NO: 26248 - DNA, 22 bp, synthetic construct
  misc_feature 1..22: note = chemically synthesized
  source 1..22: mol_type = other DNA
gcataagatgatatctcattgt

SEQ ID NO: 26249 - DNA, 22 bp, synthetic construct
  misc_feature 1..22: note = chemically synthesized
  source 1..22: mol_type = other DNA
attgtggttttgatttgcattt

SEQ ID NO: 26250 - DNA, 22 bp, synthetic construct
  misc_feature 1..22: note = chemically synthesized
  source 1..22: mol_type = other DNA
tggttttgatttgcatttctct

SEQ ID NO: 26251 - DNA, 22 bp, synthetic construct
  misc_feature 1..22: note = chemically synthesized
  source 1..22: mol_type = other DNA
tgatttgcatttctctgatgat

SEQ ID NO: 26252 - DNA, 22 bp, synthetic construct
  misc_feature 1..22: note = chemically synthesized
  source 1..22: mol_type = other DNA
gatttgcatttctctgatgatt

SEQ ID NO: 26253 - DNA, 22 bp, synthetic construct
  misc_feature 1..22: note = chemically synthesized
  source 1..22: mol_type = other DNA
atttgcatttctctgatgatta

SEQ ID NO: 26254 - DNA, 22 bp, synthetic construct
  misc_feature 1..22: note = chemically synthesized
  source 1..22: mol_type = other DNA
gcatttctctgatgattagtaa

SEQ ID NO: 26255 - DNA, 22 bp, synthetic construct
  misc_feature 1..22: note = chemically synthesized
  source 1..22: mol_type = other DNA
catttctctgatgattagtaat

SEQ ID NO: 26256 - DNA, 22 bp, synthetic construct
  misc_feature 1..22: note = chemically synthesized
  source 1..22: mol_type = other DNA
ctctgatgattagtaatgttga

SEQ ID NO: 26257 - DNA, 22 bp, synthetic construct
  misc_feature 1..22: note = chemically synthesized
  source 1..22: mol_type = other DNA
tctgatgattagtaatgttgag

SEQ ID NO: 26258 - DNA, 22 bp, synthetic construct
  misc_feature 1..22: note = chemically synthesized
  source 1..22: mol_type = other DNA
tgatgattagtaatgttgagca

SEQ ID NO: 26259 - DNA, 22 bp, synthetic construct
  misc_feature 1..22: note = chemically synthesized
  source 1..22: mol_type = other DNA
atgattagtaatgttgagcaat

SEQ ID NO: 26260 - DNA, 22 bp, synthetic construct
  misc_feature 1..22: note = chemically synthesized
  source 1..22: mol_type = other DNA
gtaatgttgagcaatttcccca

SEQ ID NO: 26261 - DNA, 22 bp, synthetic construct
  misc_feature 1..22: note = chemically synthesized
  source 1..22: mol_type = other DNA
agcaatttccccatacccattg

SEQ ID NO: 26262 - DNA, 22 bp, synthetic construct
  misc_feature 1..22: note = chemically synthesized
  source 1..22: mol_type = other DNA
ccccatacccattgtgcatttg

SEQ ID NO: 26263 - DNA, 22 bp, synthetic construct
  misc_feature 1..22: note = chemically synthesized
  source 1..22: mol_type = other DNA
cccatacccattgtgcatttgt

SEQ ID NO: 26264 - DNA, 22 bp, synthetic construct
  misc_feature 1..22: note = chemically synthesized
  source 1..22: mol_type = other DNA
tgcatttgtatgtcttcttttg

SEQ ID NO: 26265 - DNA, 22 bp, synthetic construct
  misc_feature 1..22: note = chemically synthesized
  source 1..22: mol_type = other DNA
gtatgtcttcttttgaaaaata

SEQ ID NO: 26266 - DNA, 22 bp, synthetic construct
  misc_feature 1..22: note = chemically synthesized
  source 1..22: mol_type = other DNA
tatgtcttcttttgaaaaatat

SEQ ID NO: 26267 - DNA, 22 bp, synthetic construct
  misc_feature 1..22: note = chemically synthesized
  source 1..22: mol_type = other DNA
cttttgaaaaatatcctttgcc

SEQ ID NO: 26268 - DNA, 22 bp, synthetic construct
  misc_feature 1..22: note = chemically synthesized
  source 1..22: mol_type = other DNA
ttttgaaaaatatcctttgcca

SEQ ID NO: 26269 - DNA, 22 bp, synthetic construct
  misc_feature 1..22: note = chemically synthesized
  source 1..22: mol_type = other DNA
ttgaaaaatatcctttgccaat

SEQ ID NO: 26270 - DNA, 22 bp, synthetic construct
  misc_feature 1..22: note = chemically synthesized
  source 1..22: mol_type = other DNA
tgaaaaatatcctttgccaatt

SEQ ID NO: 26271 - DNA, 22 bp, synthetic construct
  misc_feature 1..22: note = chemically synthesized
  source 1..22: mol_type = other DNA
gaaaaatatcctttgccaattt

SEQ ID NO: 26272 - DNA, 22 bp, synthetic construct
  misc_feature 1..22: note = chemically synthesized
  source 1..22: mol_type = other DNA
aaaaatatcctttgccaatttt

SEQ ID NO: 26273 - DNA, 22 bp, synthetic construct
  misc_feature 1..22: note = chemically synthesized
  source 1..22: mol_type = other DNA
tgccaattttttaatgagatta

SEQ ID NO: 26274 - DNA, 22 bp, synthetic construct
  misc_feature 1..22: note = chemically synthesized
  source 1..22: mol_type = other DNA
gccaattttttaatgagattat

SEQ ID NO: 26275 - DNA, 22 bp, synthetic construct
  misc_feature 1..22: note = chemically synthesized
  source 1..22: mol_type = other DNA
ccaattttttaatgagattatt

SEQ ID NO: 26276 - DNA, 22 bp, synthetic construct
  misc_feature 1..22: note = chemically synthesized
  source 1..22: mol_type = other DNA
tttaatgagattatttgttttt

SEQ ID NO: 26277 - DNA, 22 bp, synthetic construct
  misc_feature 1..22: note = chemically synthesized
  source 1..22: mol_type = other DNA
ttaatgagattatttgtttttc

SEQ ID NO: 26278 - DNA, 22 bp, synthetic construct
  misc_feature 1..22: note = chemically synthesized
  source 1..22: mol_type = other DNA
taatgagattatttgtttttcc

SEQ ID NO: 26279 - DNA, 22 bp, synthetic construct
  misc_feature 1..22: note = chemically synthesized
  source 1..22: mol_type = other DNA
aatgagattatttgtttttcca

SEQ ID NO: 26280 - DNA, 22 bp, synthetic construct
  misc_feature 1..22: note = chemically synthesized
  source 1..22: mol_type = other DNA
atgagattatttgtttttccac

SEQ ID NO: 26281 - DNA, 22 bp, synthetic construct
  misc_feature 1..22: note = chemically synthesized
  source 1..22: mol_type = other DNA
tttgtttttccactgttgagtt

SEQ ID NO: 26282 - DNA, 22 bp, synthetic construct
  misc_feature 1..22: note = chemically synthesized
  source 1..22: mol_type = other DNA
gtttttccactgttgagttgtt

SEQ ID NO: 26283 - DNA, 22 bp, synthetic construct
  misc_feature 1..22: note = chemically synthesized
  source 1..22: mol_type = other DNA
tttttccactgttgagttgttt

SEQ ID NO: 26284 - DNA, 22 bp, synthetic construct
  misc_feature 1..22: note = chemically synthesized
  source 1..22: mol_type = other DNA
ttccactgttgagttgtttgag

SEQ ID NO: 26285 - DNA, 22 bp, synthetic construct
  misc_feature 1..22: note = chemically synthesized
  source 1..22: mol_type = other DNA
tccactgttgagttgtttgagt

SEQ ID NO: 26286 - DNA, 22 bp, synthetic construct
  misc_feature 1..22: note = chemically synthesized
  source 1..22: mol_type = other DNA
ccactgttgagttgtttgagtt

SEQ ID NO: 26287 - DNA, 22 bp, synthetic construct
  misc_feature 1..22: note = chemically synthesized
  source 1..22: mol_type = other DNA
cactgttgagttgtttgagttt

SEQ ID NO: 26288 - DNA, 22 bp, synthetic construct
  misc_feature 1..22: note = chemically synthesized
  source 1..22: mol_type = other DNA
ttgagttgtttgagtttcttat

SEQ ID NO: 26289 - DNA, 22 bp, synthetic construct
  misc_feature 1..22: note = chemically synthesized
  source 1..22: mol_type = other DNA
agttgtttgagtttcttatata

SEQ ID NO: 26290 - DNA, 22 bp, synthetic construct
  misc_feature 1..22: note = chemically synthesized
  source 1..22: mol_type = other DNA
tttgagtttcttatatattctg

SEQ ID NO: 26291 - DNA, 22 bp, synthetic construct
  misc_feature 1..22: note = chemically synthesized
  source 1..22: mol_type = other DNA
gagtttcttatatattctggag

SEQ ID NO: 26292 - DNA, 22 bp, synthetic construct
  misc_feature 1..22: note = chemically synthesized
  source 1..22: mol_type = other DNA
agtttcttatatattctggaga

SEQ ID NO: 26293 - DNA, 22 bp, synthetic construct
  misc_feature 1..22: note = chemically synthesized
  source 1..22: mol_type = other DNA
cttatatattctggagattaat

SEQ ID NO: 26294 - DNA, 22 bp, synthetic construct
  misc_feature 1..22: note = chemically synthesized
  source 1..22: mol_type = other DNA
ttatatattctggagattaatt

SEQ ID NO: 26295 - DNA, 22 bp, synthetic construct
  misc_feature 1..22: note = chemically synthesized
  source 1..22: mol_type = other DNA
atatattctggagattaattcc

SEQ ID NO: 26296 - DNA, 22 bp, synthetic construct
  misc_feature 1..22: note = chemically synthesized
  source 1..22: mol_type = other DNA
tatattctggagattaattcct

SEQ ID NO: 26297 - DNA, 22 bp, synthetic construct
  misc_feature 1..22: note = chemically synthesized
  source 1..22: mol_type = other DNA
tggagattaattccttgtcaaa

SEQ ID NO: 26298 - DNA, 22 bp, synthetic construct
  misc_feature 1..22: note = chemically synthesized
  source 1..22: mol_type = other DNA
gagattaattccttgtcaaatg

SEQ ID NO: 26299 - DNA, 22 bp, synthetic construct
  misc_feature 1..22: note = chemically synthesized
  source 1..22: mol_type = other DNA
attccttgtcaaatgtatgcaa

SEQ ID NO: 26300 - DNA, 22 bp, synthetic construct
  misc_feature 1..22: note = chemically synthesized
  source 1..22: mol_type = other DNA
cttgtcaaatgtatgcaaatat

SEQ ID NO: 26301 - DNA, 22 bp, synthetic construct
  misc_feature 1..22: note = chemically synthesized
  source 1..22: mol_type = other DNA
gtcaaatgtatgcaaatatttt

SEQ ID NO: 26302 - DNA, 22 bp, synthetic construct
  misc_feature 1..22: note = chemically synthesized
  source 1..22: mol_type = other DNA
tcaaatgtatgcaaatattttc

SEQ ID NO: 26303 - DNA, 22 bp, synthetic construct
  misc_feature 1..22: note = chemically synthesized
  source 1..22: mol_type = other DNA
tctcgcattcaacagcttgtct

SEQ ID NO: 26304 - DNA, 22 bp, synthetic construct
  misc_feature 1..22: note = chemically synthesized
  source 1..22: mol_type = other DNA
ctcgcattcaacagcttgtctc

SEQ ID NO: 26305 - DNA, 22 bp, synthetic construct
  misc_feature 1..22: note = chemically synthesized
  source 1..22: mol_type = other DNA
tcgcattcaacagcttgtctct

SEQ ID NO: 26306 - DNA, 22 bp, synthetic construct
  misc_feature 1..22: note = chemically synthesized
  source 1..22: mol_type = other DNA
gcattcaacagcttgtctcttc

SEQ ID NO: 26307 - DNA, 22 bp, synthetic construct
  misc_feature 1..22: note = chemically synthesized
  source 1..22: mol_type = other DNA
aacagcttgtctcttcactgtg

SEQ ID NO: 26308 - DNA, 22 bp, synthetic construct
  misc_feature 1..22: note = chemically synthesized
  source 1..22: mol_type = other DNA
gtctcttcactgtgttgattgt

SEQ ID NO: 26309 - DNA, 22 bp, synthetic construct
  misc_feature 1..22: note = chemically synthesized
  source 1..22: mol_type = other DNA
tctcttcactgtgttgattgtt

SEQ ID NO: 26310 - DNA, 22 bp, synthetic construct
  misc_feature 1..22: note = chemically synthesized
  source 1..22: mol_type = other DNA
ttcactgtgttgattgtttcct

SEQ ID NO: 26311 - DNA, 22 bp, synthetic construct
  misc_feature 1..22: note = chemically synthesized
  source 1..22: mol_type = other DNA
cactgtgttgattgtttccttt

SEQ ID NO: 26312 - DNA, 22 bp, synthetic construct
  misc_feature 1..22: note = chemically synthesized
  source 1..22: mol_type = other DNA
actgtgttgattgtttccttta

SEQ ID NO: 26313 - DNA, 22 bp, synthetic construct
  misc_feature 1..22: note = chemically synthesized
  source 1..22: mol_type = other DNA
tgttgattgtttcctttactgt

SEQ ID NO: 26314 - DNA, 22 bp, synthetic construct
  misc_feature 1..22: note = chemically synthesized
  source 1..22: mol_type = other DNA
attgtttcctttactgtgcaga

SEQ ID NO: 26315 - DNA, 22 bp, synthetic construct
  misc_feature 1..22: note = chemically synthesized
  source 1..22: mol_type = other DNA
tttcctttactgtgcagatgta

SEQ ID NO: 26316 - DNA, 22 bp, synthetic construct
  misc_feature 1..22: note = chemically synthesized
  source 1..22: mol_type = other DNA
cctttactgtgcagatgtattt

SEQ ID NO: 26317 - DNA, 22 bp, synthetic construct
  misc_feature 1..22: note = chemically synthesized
  source 1..22: mol_type = other DNA
ctttactgtgcagatgtatttt

SEQ ID NO: 26318 - DNA, 22 bp, synthetic construct
  misc_feature 1..22: note = chemically synthesized
  source 1..22: mol_type = other DNA
tactgtgcagatgtattttagc

SEQ ID NO: 26319 - DNA, 22 bp, synthetic construct
  misc_feature 1..22: note = chemically synthesized
  source 1..22: mol_type = other DNA
actgtgcagatgtattttagct

SEQ ID NO: 26320 - DNA, 22 bp, synthetic construct
  misc_feature 1..22: note = chemically synthesized
  source 1..22: mol_type = other DNA
ctgtgcagatgtattttagctt

SEQ ID NO: 26321 - DNA, 22 bp, synthetic construct
  misc_feature 1..22: note = chemically synthesized
  source 1..22: mol_type = other DNA
tgcagatgtattttagcttaat

SEQ ID NO: 26322 - DNA, 22 bp, synthetic construct
  misc_feature 1..22: note = chemically synthesized
  source 1..22: mol_type = other DNA
tagcttaatatagtcccatttg

SEQ ID NO: 26323 - DNA, 22 bp, synthetic construct
  misc_feature 1..22: note = chemically synthesized
  source 1..22: mol_type = other DNA
agcttaatatagtcccatttgt

SEQ ID NO: 26324 - DNA, 22 bp, synthetic construct
  misc_feature 1..22: note = chemically synthesized
  source 1..22: mol_type = other DNA
gcttaatatagtcccatttgtc

SEQ ID NO: 26325 - DNA, 22 bp, synthetic construct
  misc_feature 1..22: note = chemically synthesized
  source 1..22: mol_type = other DNA
aatatagtcccatttgtctatt

SEQ ID NO: 26326 - DNA, 22 bp, synthetic construct
  misc_feature 1..22: note = chemically synthesized
  source 1..22: mol_type = other DNA
atatagtcccatttgtctattt

SEQ ID NO: 26327 - DNA, 22 bp, synthetic construct
  misc_feature 1..22: note = chemically synthesized
  source 1..22: mol_type = other DNA
gtctatttttgcttttgttgcc

SEQ ID NO: 26328 - DNA, 22 bp, synthetic construct
  misc_feature 1..22: note = chemically synthesized
  source 1..22: mol_type = other DNA
tctatttttgcttttgttgcct

SEQ ID NO: 26329 - DNA, 22 bp, synthetic construct
  misc_feature 1..22: note = chemically synthesized
  source 1..22: mol_type = other DNA
tttttgcttttgttgcctgtgc

SEQ ID NO: 26330 - DNA, 22 bp, synthetic construct
  misc_feature 1..22: note = chemically synthesized
  source 1..22: mol_type = other DNA
ttgcttttgttgcctgtgcttt

SEQ ID NO: 26331 - DNA, 22 bp, synthetic construct
  misc_feature 1..22: note = chemically synthesized
  source 1..22: mol_type = other DNA
tgcttttgttgcctgtgctttt

SEQ ID NO: 26332 - DNA, 22 bp, synthetic construct
  misc_feature 1..22: note = chemically synthesized
  source 1..22: mol_type = other DNA
gcttttgttgcctgtgcttttg

SEQ ID NO: 26333 - DNA, 22 bp, synthetic construct
  misc_feature 1..22: note = chemically synthesized
  source 1..22: mol_type = other DNA
cttttgttgcctgtgcttttga

SEQ ID NO: 26334 - DNA, 22 bp, synthetic construct
  misc_feature 1..22: note = chemically synthesized
  source 1..22: mol_type = other DNA
ttgttgcctgtgcttttgaggt

SEQ ID NO: 26335 - DNA, 22 bp, synthetic construct
  misc_feature 1..22: note = chemically synthesized
  source 1..22: mol_type = other DNA
tgttgcctgtgcttttgaggtc

SEQ ID NO: 26336 - DNA, 22 bp, synthetic construct
  misc_feature 1..22: note = chemically synthesized
  source 1..22: mol_type = other DNA
gttgcctgtgcttttgaggtct

SEQ ID NO: 26337 - DNA, 22 bp, synthetic construct
  misc_feature 1..22: note = chemically synthesized
  source 1..22: mol_type = other DNA
ttgcctgtgcttttgaggtctt

SEQ ID NO: 26338 - DNA, 22 bp, synthetic construct
  misc_feature 1..22: note = chemically synthesized
  source 1..22: mol_type = other DNA
cctgtgcttttgaggtcttggc

SEQ ID NO: 26339 - DNA, 22 bp, synthetic construct
  misc_feature 1..22: note = chemically synthesized
  source 1..22: mol_type = other DNA
tgcttttgaggtcttggccata

SEQ ID NO: 26340 - DNA, 22 bp, synthetic construct
  misc_feature 1..22: note = chemically synthesized
  source 1..22: mol_type = other DNA
ttgaggtcttggccataaaatc

SEQ ID NO: 26341 - DNA, 22 bp, synthetic construct
  misc_feature 1..22: note = chemically synthesized
  source 1..22: mol_type = other DNA
tgaggtcttggccataaaatct

SEQ ID NO: 26342 - DNA, 22 bp, synthetic construct
  misc_feature 1..22: note = chemically synthesized
  source 1..22: mol_type = other DNA
gaggtcttggccataaaatctt

SEQ ID NO: 26343 - DNA, 22 bp, synthetic construct
  misc_feature 1..22: note = chemically synthesized
  source 1..22: mol_type = other DNA
aggtcttggccataaaatcttt

SEQ ID NO: 26344 - DNA, 22 bp, synthetic construct
  misc_feature 1..22: note = chemically synthesized
  source 1..22: mol_type = other DNA
ggccataaaatctttgcccaaa

SEQ ID NO: 26345 - DNA, 22 bp, synthetic construct
  misc_feature 1..22: note = chemically synthesized
  source 1..22: mol_type = other DNA
gccataaaatctttgcccaaag

SEQ ID NO: 26346 - DNA, 22 bp, synthetic construct
  misc_feature 1..22: note = chemically synthesized
  source 1..22: mol_type = other DNA
tgcccaaagccatgtcttgaag

SEQ ID NO: 26347 - DNA, 22 bp, synthetic construct
  misc_feature 1..22: note = chemically synthesized
  source 1..22: mol_type = other DNA
gcccaaagccatgtcttgaagt

SEQ ID NO: 26348 - DNA, 22 bp, synthetic construct
  misc_feature 1..22: note = chemically synthesized
  source 1..22: mol_type = other DNA
cccaaagccatgtcttgaagtg

SEQ ID NO: 26349 - DNA, 22 bp, synthetic construct
  misc_feature 1..22: note = chemically synthesized
  source 1..22: mol_type = other DNA
gaagtgtctcccttatgttttc

SEQ ID NO: 26350 - DNA, 22 bp, synthetic construct
  misc_feature 1..22: note = chemically synthesized
  source 1..22: mol_type = other DNA
aagtgtctcccttatgttttct

SEQ ID NO: 26351 - DNA, 22 bp, synthetic construct
  misc_feature 1..22: note = chemically synthesized
  source 1..22: mol_type = other DNA
ccttatgttttcttttagtagt

SEQ ID NO: 26352 - DNA, 22 bp, synthetic construct
  misc_feature 1..22: note = chemically synthesized
  source 1..22: mol_type = other DNA
atgttttcttttagtagtttta

SEQ ID NO: 26353 - DNA, 22 bp, synthetic construct
  misc_feature 1..22: note = chemically synthesized
  source 1..22: mol_type = other DNA
tgttttcttttagtagttttat

SEQ ID NO: 26354 - DNA, 22 bp, synthetic construct
  misc_feature 1..22: note = chemically synthesized
  source 1..22: mol_type = other DNA
tcttttagtagttttatagttt

SEQ ID NO: 26355 - DNA, 22 bp, synthetic construct
  misc_feature 1..22: note = chemically synthesized
  source 1..22: mol_type = other DNA
cttttagtagttttatagtttt

SEQ ID NO: 26356 - DNA, 22 bp, synthetic construct
  misc_feature 1..22: note = chemically synthesized
  source 1..22: mol_type = other DNA
ttttagtagttttatagtttta

SEQ ID NO: 26357 - DNA, 22 bp, synthetic construct
  misc_feature 1..22: note = chemically synthesized
  source 1..22: mol_type = other DNA
ttagtagttttatagttttaag

SEQ ID NO: 26358 - DNA, 22 bp, synthetic construct
  misc_feature 1..22: note = chemically synthesized
  source 1..22: mol_type = other DNA
tagtagttttatagttttaagt

SEQ ID NO: 26359 - DNA, 22 bp, synthetic construct
  misc_feature 1..22: note = chemically synthesized
  source 1..22: mol_type = other DNA
agtagttttatagttttaagtt

SEQ ID NO: 26360 - DNA, 22 bp, synthetic construct
  misc_feature 1..22: note = chemically synthesized
  source 1..22: mol_type = other DNA
gtagttttatagttttaagttt

SEQ ID NO: 26361 - DNA, 22 bp, synthetic construct
  misc_feature 1..22: note = chemically synthesized
  source 1..22: mol_type = other DNA
tatagttttaagttttatattt

SEQ ID NO: 26362 - DNA, 22 bp, synthetic construct
  misc_feature 1..22: note = chemically synthesized
  source 1..22: mol_type = other DNA
atagttttaagttttatattta

SEQ ID NO: 26363 - DNA, 22 bp, synthetic construct
  misc_feature 1..22: note = chemically synthesized
  source 1..22: mol_type = other DNA
tagttttaagttttatatttaa

SEQ ID NO: 26364 - DNA, 22 bp, synthetic construct
  misc_feature 1..22: note = chemically synthesized
  source 1..22: mol_type = other DNA
taagttttatatttaagtcttt

SEQ ID NO: 26365 - DNA, 22 bp, synthetic construct
  misc_feature 1..22: note = chemically synthesized
  source 1..22: mol_type = other DNA
aagttttatatttaagtcttta

SEQ ID NO: 26366 - DNA, 22 bp, synthetic construct
  misc_feature 1..22: note = chemically synthesized
  source 1..22: mol_type = other DNA
agttttatatttaagtctttaa

SEQ ID NO: 26367 - DNA, 22 bp, synthetic construct
  misc_feature 1..22: note = chemically synthesized
  source 1..22: mol_type = other DNA
tatatttaagtctttaatccat

SEQ ID NO: 26368 - DNA, 22 bp, synthetic construct
  misc_feature 1..22: note = chemically synthesized
  source 1..22: mol_type = other DNA
atatttaagtctttaatccatc

SEQ ID NO: 26369 - DNA, 22 bp, synthetic construct
  misc_feature 1..22: note = chemically synthesized
  source 1..22: mol_type = other DNA
tatttaagtctttaatccatct

SEQ ID NO: 26370 - DNA, 22 bp, synthetic construct
  misc_feature 1..22: note = chemically synthesized
  source 1..22: mol_type = other DNA
aagtctttaatccatcttgaga

SEQ ID NO: 26371 - DNA, 22 bp, synthetic construct
  misc_feature 1..22: note = chemically synthesized
  source 1..22: mol_type = other DNA
agtctttaatccatcttgagag

SEQ ID NO: 26372 - DNA, 22 bp, synthetic construct
  misc_feature 1..22: note = chemically synthesized
  source 1..22: mol_type = other DNA
taatccatcttgagagtacgtt

SEQ ID NO: 26373 - DNA, 22 bp, synthetic construct
  misc_feature 1..22: note = chemically synthesized
  source 1..22: mol_type = other DNA
aatccatcttgagagtacgttt

SEQ ID NO: 26374 - DNA, 22 bp, synthetic construct
  misc_feature 1..22: note = chemically synthesized
  source 1..22: mol_type = other DNA
atccatcttgagagtacgtttt

SEQ ID NO: 26375 - DNA, 22 bp, synthetic construct
  misc_feature 1..22: note = chemically synthesized
  source 1..22: mol_type = other DNA
gagagtacgttttatatggcaa

SEQ ID NO: 26376 - DNA, 22 bp, synthetic construct
  misc_feature 1..22: note = chemically synthesized
  source 1..22: mol_type = other DNA
agagtacgttttatatggcaat

SEQ ID NO: 26377 - DNA, 22 bp, synthetic construct
  misc_feature 1..22: note = chemically synthesized
  source 1..22: mol_type = other DNA
tatatggcaataaataggggtt

SEQ ID NO: 26378 - DNA, 22 bp, synthetic construct
  misc_feature 1..22: note = chemically synthesized
  source 1..22: mol_type = other DNA
atatggcaataaataggggttg

SEQ ID NO: 26379 - DNA, 22 bp, synthetic construct
  misc_feature 1..22: note = chemically synthesized
  source 1..22: mol_type = other DNA
tatggcaataaataggggttgt

SEQ ID NO: 26380 - DNA, 22 bp, synthetic construct
  misc_feature 1..22: note = chemically synthesized
  source 1..22: mol_type = other DNA
tattaggccatttttgcatcta

SEQ ID NO: 26381 - DNA, 22 bp, synthetic construct
  misc_feature 1..22: note = chemically synthesized
  source 1..22: mol_type = other DNA
ggccatttttgcatctattgta

SEQ ID NO: 26382 - DNA, 22 bp, synthetic construct
  misc_feature 1..22: note = chemically synthesized
  source 1..22: mol_type = other DNA
ttgcatctattgtacaaggggt

SEQ ID NO: 26383 - DNA, 22 bp, synthetic construct
  misc_feature 1..22: note = chemically synthesized
  source 1..22: mol_type = other DNA
tgcatctattgtacaaggggtt

SEQ ID NO: 26384 - DNA, 22 bp, synthetic construct
  misc_feature 1..22: note = chemically synthesized
  source 1..22: mol_type = other DNA
gcatctattgtacaaggggttg

SEQ ID NO: 26385 - DNA, 22 bp, synthetic construct
  misc_feature 1..22: note = chemically synthesized
  source 1..22: mol_type = other DNA
catctattgtacaaggggttga

SEQ ID NO: 26386 - DNA, 22 bp, synthetic construct
  misc_feature 1..22: note = chemically synthesized
  source 1..22: mol_type = other DNA
ttgtacaaggggttgagttctt

SEQ ID NO: 26387 - DNA, 22 bp, synthetic construct
  misc_feature 1..22: note = chemically synthesized
  source 1..22: mol_type = other DNA
tacaaggggttgagttcttgat

SEQ ID NO: 26388 - DNA, 22 bp, synthetic construct
  misc_feature 1..22: note = chemically synthesized
  source 1..22: mol_type = other DNA
agttcttgatttgattctccat

SEQ ID NO: 26389 - DNA, 22 bp, synthetic construct
  misc_feature 1..22: note = chemically synthesized
  source 1..22: mol_type = other DNA
ttgatttgattctccatttggt

SEQ ID NO: 26390 - DNA, 22 bp, synthetic construct
  misc_feature 1..22: note = chemically synthesized
  source 1..22: mol_type = other DNA
gatttgattctccatttggttg

SEQ ID NO: 26391 - DNA, 22 bp, synthetic construct
  misc_feature 1..22: note = chemically synthesized
  source 1..22: mol_type = other DNA
atttgattctccatttggttgc

SEQ ID NO: 26392 - DNA, 22 bp, synthetic construct
  misc_feature 1..22: note = chemically synthesized
  source 1..22: mol_type = other DNA
gattctccatttggttgctgtt

SEQ ID NO: 26393 - DNA, 22 bp, synthetic construct
  misc_feature 1..22: note = chemically synthesized
  source 1..22: mol_type = other DNA
attctccatttggttgctgttg

SEQ ID NO: 26394 - DNA, 22 bp, synthetic construct
  misc_feature 1..22: note = chemically synthesized
  source 1..22: mol_type = other DNA
tccatttggttgctgttggtgt

SEQ ID NO: 26395 - DNA, 22 bp, synthetic construct
  misc_feature 1..22: note = chemically synthesized
  source 1..22: mol_type = other DNA
catttggttgctgttggtgtat

SEQ ID NO: 26396 - DNA, 22 bp, synthetic construct
  misc_feature 1..22: note = chemically synthesized
  source 1..22: mol_type = other DNA
ggttgctgttggtgtatagaag

SEQ ID NO: 26397 - DNA, 22 bp, synthetic construct
  misc_feature 1..22: note = chemically synthesized
  source 1..22: mol_type = other DNA
gttgctgttggtgtatagaaga

SEQ ID NO: 26398 - DNA, 22 bp, synthetic construct
  misc_feature 1..22: note = chemically synthesized
  source 1..22: mol_type = other DNA
ctgttggtgtatagaagagtta

SEQ ID NO: 26399 - DNA, 22 bp, synthetic construct
  misc_feature 1..22: note = chemically synthesized
  source 1..22: mol_type = other DNA
ttggtgtatagaagagttactg

SEQ ID NO: 26400 - DNA, 22 bp, synthetic construct
  misc_feature 1..22: note = chemically synthesized
  source 1..22: mol_type = other DNA
gtgtatagaagagttactgatt

SEQ ID NO: 26401 - DNA, 22 bp, synthetic construct
  misc_feature 1..22: note = chemically synthesized
  source 1..22: mol_type = other DNA
ctgatttgtgtgcattcatctt

SEQ ID NO: 26402 - DNA, 22 bp, synthetic construct
  misc_feature 1..22: note = chemically synthesized
  source 1..22: mol_type = other DNA
atttgtgtgcattcatcttgta

SEQ ID NO: 26403 - DNA, 22 bp, synthetic construct
  misc_feature 1..22: note = chemically synthesized
  source 1..22: mol_type = other DNA
gtgtgcattcatcttgtatctg

SEQ ID NO: 26404 - DNA, 22 bp, synthetic construct
  misc_feature 1..22: note = chemically synthesized
  source 1..22: mol_type = other DNA
tgtgcattcatcttgtatctgg

SEQ ID NO: 26405 - DNA, 22 bp, synthetic construct
  misc_feature 1..22: note = chemically synthesized
  source 1..22: mol_type = other DNA
atcttgtatctggaaactttgc

SEQ ID NO: 26406 - DNA, 22 bp, synthetic construct
  misc_feature 1..22: note = chemically synthesized
  source 1..22: mol_type = other DNA
gtatctggaaactttgctgaat

SEQ ID NO: 26407 - DNA, 22 bp, synthetic construct
  misc_feature 1..22: note = chemically synthesized
  source 1..22: mol_type = other DNA
tatctggaaactttgctgaatt

SEQ ID NO: 26408 - DNA, 22 bp, synthetic construct
  misc_feature 1..22: note = chemically synthesized
  source 1..22: mol_type = other DNA
gaaactttgctgaattatttta

SEQ ID NO: 26409 - DNA, 22 bp, synthetic construct
  misc_feature 1..22: note = chemically synthesized
  source 1..22: mol_type = other DNA
tgctgaattattttatcagttc

SEQ ID NO: 26410 - DNA, 22 bp, synthetic construct
  misc_feature 1..22: note = chemically synthesized
  source 1..22: mol_type = other DNA
gctgaattattttatcagttct

SEQ ID NO: 26411 - DNA, 22 bp, synthetic construct
  misc_feature 1..22: note = chemically synthesized
  source 1..22: mol_type = other DNA
ctgaattattttatcagttcta

SEQ ID NO: 26412 - DNA, 22 bp, synthetic construct
  misc_feature 1..22: note = chemically synthesized
  source 1..22: mol_type = other DNA
aattattttatcagttctagga

SEQ ID NO: 26413 - DNA, 22 bp, synthetic construct
  misc_feature 1..22: note = chemically synthesized
  source 1..22: mol_type = other DNA
ttttatcagttctaggagcttt

SEQ ID NO: 26414 - DNA, 22 bp, synthetic construct
  misc_feature 1..22: note = chemically synthesized
  source 1..22: mol_type = other DNA
tatcagttctaggagctttctg

SEQ ID NO: 26415 - DNA, 22 bp, synthetic construct
  misc_feature 1..22: note = chemically synthesized
  source 1..22: mol_type = other DNA
atcagttctaggagctttctgg

SEQ ID NO: 26416 - DNA, 22 bp, synthetic construct
  misc_feature 1..22: note = chemically synthesized
  source 1..22: mol_type = other DNA
tcagttctaggagctttctgga

SEQ ID NO: 26417 - DNA, 22 bp, synthetic construct
  misc_feature 1..22: note = chemically synthesized
  source 1..22: mol_type = other DNA
taggagctttctggaggagtct

SEQ ID NO: 26418 - DNA, 22 bp, synthetic construct
  misc_feature 1..22: note = chemically synthesized
  source 1..22: mol_type = other DNA
ggagctttctggaggagtcttt

SEQ ID NO: 26419 - DNA, 22 bp, synthetic construct
  misc_feature 1..22: note = chemically synthesized
  source 1..22: mol_type = other DNA
tctggaggagtctttagggttt

SEQ ID NO: 26420 - DNA, 22 bp, synthetic construct
  misc_feature 1..22: note = chemically synthesized
  source 1..22: mol_type = other DNA
ctggaggagtctttagggtttt

SEQ ID NO: 26421 - DNA, 22 bp, synthetic construct
  misc_feature 1..22: note = chemically synthesized
  source 1..22: mol_type = other DNA
tggaggagtctttagggtttta

SEQ ID NO: 26422 - DNA, 22 bp, synthetic construct
  misc_feature 1..22: note = chemically synthesized
  source 1..22: mol_type = other DNA
gaggagtctttagggttttaaa

SEQ ID NO: 26423 - DNA, 22 bp, synthetic construct
  misc_feature 1..22: note = chemically synthesized
  source 1..22: mol_type = other DNA
tagggttttaaaggtaaatgat

SEQ ID NO: 26424 - DNA, 22 bp, synthetic construct
  misc_feature 1..22: note = chemically synthesized
  source 1..22: mol_type = other DNA
agggttttaaaggtaaatgatc

SEQ ID NO: 26425 - DNA, 22 bp, synthetic construct
  misc_feature 1..22: note = chemically synthesized
  source 1..22: mol_type = other DNA
gggttttaaaggtaaatgatca

SEQ ID NO: 26426 - DNA, 22 bp, synthetic construct
  misc_feature 1..22: note = chemically synthesized
  source 1..22: mol_type = other DNA
taaaggtaaatgatcatatcat

SEQ ID NO: 26427 - DNA, 22 bp, synthetic construct
  misc_feature 1..22: note = chemically synthesized
  source 1..22: mol_type = other DNA
aaaggtaaatgatcatatcatc

SEQ ID NO: 26428 - DNA, 22 bp, synthetic construct
  misc_feature 1..22: note = chemically synthesized
  source 1..22: mol_type = other DNA
aaggtaaatgatcatatcatca

SEQ ID NO: 26429 - DNA, 22 bp, synthetic construct
  misc_feature 1..22: note = chemically synthesized
  source 1..22: mol_type = other DNA
gacttcctctttactgatttga

SEQ ID NO: 26430 - DNA, 22 bp, synthetic construct
  misc_feature 1..22: note = chemically synthesized
  source 1..22: mol_type = other DNA
acttcctctttactgatttgaa

SEQ ID NO: 26431 - DNA, 22 bp, synthetic construct
  misc_feature 1..22: note = chemically synthesized
  source 1..22: mol_type = other DNA
cctctttactgatttgaatgcc

SEQ ID NO: 26432 - DNA, 22 bp, synthetic construct
  misc_feature 1..22: note = chemically synthesized
  source 1..22: mol_type = other DNA
ctctttactgatttgaatgccc

SEQ ID NO: 26433 - DNA, 22 bp, synthetic construct
  misc_feature 1..22: note = chemically synthesized
  source 1..22: mol_type = other DNA
tttactgatttgaatgcccttt

SEQ ID NO: 26434 - DNA, 22 bp, synthetic construct
  misc_feature 1..22: note = chemically synthesized
  source 1..22: mol_type = other DNA
tactgatttgaatgccctttat

SEQ ID NO: 26435 - DNA, 22 bp, synthetic construct
  misc_feature 1..22: note = chemically synthesized
  source 1..22: mol_type = other DNA
actgatttgaatgccctttatt

SEQ ID NO: 26436 - DNA, 22 bp, synthetic construct
  misc_feature 1..22: note = chemically synthesized
  source 1..22: mol_type = other DNA
ctgatttgaatgccctttattt

SEQ ID NO: 26437 - DNA, 22 bp, synthetic construct
  misc_feature 1..22: note = chemically synthesized
  source 1..22: mol_type = other DNA
atttgaatgccctttatttctt

SEQ ID NO: 26438 - DNA, 22 bp, synthetic construct
  misc_feature 1..22: note = chemically synthesized
  source 1..22: mol_type = other DNA
gaatgccctttatttctttgtt

SEQ ID NO: 26439 - DNA, 22 bp, synthetic construct
  misc_feature 1..22: note = chemically synthesized
  source 1..22: mol_type = other DNA
aatgccctttatttctttgttt

SEQ ID NO: 26440 - DNA, 22 bp, synthetic construct
  misc_feature 1..22: note = chemically synthesized
  source 1..22: mol_type = other DNA
tatttctttgttttgtctgatt

SEQ ID NO: 26441 - DNA, 22 bp, synthetic construct
  misc_feature 1..22: note = chemically synthesized
  source 1..22: mol_type = other DNA
atttctttgttttgtctgattg

SEQ ID NO: 26442 - DNA, 22 bp, synthetic construct
  misc_feature 1..22: note = chemically synthesized
  source 1..22: mol_type = other DNA
tttctttgttttgtctgattgc

SEQ ID NO: 26443 - DNA, 22 bp, synthetic construct
  misc_feature 1..22: note = chemically synthesized
  source 1..22: mol_type = other DNA
ctttgttttgtctgattgccct

SEQ ID NO: 26444 - DNA, 22 bp, synthetic construct
  misc_feature 1..22: note = chemically synthesized
  source 1..22: mol_type = other DNA
tttgttttgtctgattgccctg

SEQ ID NO: 26445 - DNA, 22 bp, synthetic construct
  misc_feature 1..22: note = chemically synthesized
  source 1..22: mol_type = other DNA
tgttttgtctgattgccctggc

SEQ ID NO: 26446 - DNA, 22 bp, synthetic construct
  misc_feature 1..22: note = chemically synthesized
  source 1..22: mol_type = other DNA
gttttgtctgattgccctggct

SEQ ID NO: 26447 - DNA, 22 bp, synthetic construct
  misc_feature 1..22: note = chemically synthesized
  source 1..22: mol_type = other DNA
ttttgtctgattgccctggcta

SEQ ID NO: 26448 - DNA, 22 bp, synthetic construct
  misc_feature 1..22: note = chemically synthesized
  source 1..22: mol_type = other DNA
tgtctgattgccctggctagga

SEQ ID NO: 26449 - DNA, 22 bp, synthetic construct
  misc_feature 1..22: note = chemically synthesized
  source 1..22: mol_type = other DNA
gtctgattgccctggctaggac

SEQ ID NO: 26450 - DNA, 22 bp, synthetic construct
  misc_feature 1..22: note = chemically synthesized
  source 1..22: mol_type = other DNA
tctgattgccctggctaggact

SEQ ID NO: 26451 - DNA, 22 bp, synthetic construct
  misc_feature 1..22: note = chemically synthesized
  source 1..22: mol_type = other DNA
attgccctggctaggacttcca

SEQ ID NO: 26452 - DNA, 22 bp, synthetic construct
  misc_feature 1..22: note = chemically synthesized
  source 1..22: mol_type = other DNA
ccctggctaggacttccagtac

SEQ ID NO: 26453 - DNA, 22 bp, synthetic construct
  misc_feature 1..22: note = chemically synthesized
  source 1..22: mol_type = other DNA
gctaggacttccagtactatgt

SEQ ID NO: 26454 - DNA, 22 bp, synthetic construct
  misc_feature 1..22: note = chemically synthesized
  source 1..22: mol_type = other DNA
ggacttccagtactatgttgaa

SEQ ID NO: 26455 - DNA, 22 bp, synthetic construct
  misc_feature 1..22: note = chemically synthesized
  source 1..22: mol_type = other DNA
ccagtactatgttgaagaggag

SEQ ID NO: 26456 - DNA, 22 bp, synthetic construct
  misc_feature 1..22: note = chemically synthesized
  source 1..22: mol_type = other DNA
cagtactatgttgaagaggagt

SEQ ID NO: 26457 - DNA, 22 bp, synthetic construct
  misc_feature 1..22: note = chemically synthesized
  source 1..22: mol_type = other DNA
tgttgaagaggagtggtgagag

SEQ ID NO: 26458 - DNA, 22 bp, synthetic construct
  misc_feature 1..22: note = chemically synthesized
  source 1..22: mol_type = other DNA
aagaggagtggtgagagtgggc

SEQ ID NO: 26459 - DNA, 22 bp, synthetic construct
  misc_feature 1..22: note = chemically synthesized
  source 1..22: mol_type = other DNA
gtcttgttccagttctcagagg

SEQ ID NO: 26460 - DNA, 22 bp, synthetic construct
  misc_feature 1..22: note = chemically synthesized
  source 1..22: mol_type = other DNA
tcttgttccagttctcagaggg

SEQ ID NO: 26461 - DNA, 22 bp, synthetic construct
  misc_feature 1..22: note = chemically synthesized
  source 1..22: mol_type = other DNA
gttccagttctcagagggaatg

SEQ ID NO: 26462 - DNA, 22 bp, synthetic construct
  misc_feature 1..22: note = chemically synthesized
  source 1..22: mol_type = other DNA
ttccagttctcagagggaatgc

SEQ ID NO: 26463 - DNA, 22 bp, synthetic construct
  misc_feature 1..22: note = chemically synthesized
  source 1..22: mol_type = other DNA
cagttctcagagggaatgcttt

SEQ ID NO: 26464 - DNA, 22 bp, synthetic construct
  misc_feature 1..22: note = chemically synthesized
  source 1..22: mol_type = other DNA
tcagagggaatgctttcaactt

SEQ ID NO: 26465 - DNA, 22 bp, synthetic construct
  misc_feature 1..22: note = chemically synthesized
  source 1..22: mol_type = other DNA
agagggaatgctttcaactttt

SEQ ID NO: 26466 - DNA, 22 bp, synthetic construct
  misc_feature 1..22: note = chemically synthesized
  source 1..22: mol_type = other DNA
tcaacttttccccattcaatat

SEQ ID NO: 26467 - DNA, 22 bp, synthetic construct
  misc_feature 1..22: note = chemically synthesized
  source 1..22: mol_type = other DNA
caacttttccccattcaatatt

SEQ ID NO: 26468 - DNA, 22 bp, synthetic construct
  misc_feature 1..22: note = chemically synthesized
  source 1..22: mol_type = other DNA
aacttttccccattcaatatta

SEQ ID NO: 26469 - DNA, 22 bp, synthetic construct
  misc_feature 1..22: note = chemically synthesized
  source 1..22: mol_type = other DNA
ttccccattcaatattatgttg

SEQ ID NO: 26470 - DNA, 22 bp, synthetic construct
  misc_feature 1..22: note = chemically synthesized
  source 1..22: mol_type = other DNA
tccccattcaatattatgttgg

SEQ ID NO: 26471 - DNA, 22 bp, synthetic construct
  misc_feature 1..22: note = chemically synthesized
  source 1..22: mol_type = other DNA
ccccattcaatattatgttggc

SEQ ID NO: 26472 - DNA, 22 bp, synthetic construct
  misc_feature 1..22: note = chemically synthesized
  source 1..22: mol_type = other DNA
cccattcaatattatgttggct

SEQ ID NO: 26473 - DNA, 22 bp, synthetic construct
  misc_feature 1..22: note = chemically synthesized
  source 1..22: mol_type = other DNA
aatattatgttggctgtgggtt

SEQ ID NO: 26474 - DNA, 22 bp, synthetic construct
  misc_feature 1..22: note = chemically synthesized
  source 1..22: mol_type = other DNA
tgttggctgtgggtttgtcaca

SEQ ID NO: 26475 - DNA, 22 bp, synthetic construct
  misc_feature 1..22: note = chemically synthesized
  source 1..22: mol_type = other DNA
gctgtgggtttgtcacagatgg

SEQ ID NO: 26476 - DNA, 22 bp, synthetic construct
  misc_feature 1..22: note = chemically synthesized
  source 1..22: mol_type = other DNA
tgggtttgtcacagatggcttt

SEQ ID NO: 26477 - DNA, 22 bp, synthetic construct
  misc_feature 1..22: note = chemically synthesized
  source 1..22: mol_type = other DNA
gtcacagatggcttttattaca

SEQ ID NO: 26478 - DNA, 22 bp, synthetic construct
  misc_feature 1..22: note = chemically synthesized
  source 1..22: mol_type = other DNA
tcacagatggcttttattacac

SEQ ID NO: 26479 - DNA, 22 bp, synthetic construct
  misc_feature 1..22: note = chemically synthesized
  source 1..22: mol_type = other DNA
ttattacactgaggtatgtctc

SEQ ID NO: 26480 - DNA, 22 bp, synthetic construct
  misc_feature 1..22: note = chemically synthesized
  source 1..22: mol_type = other DNA
tattacactgaggtatgtctct

SEQ ID NO: 26481 - DNA, 22 bp, synthetic construct
  misc_feature 1..22: note = chemically synthesized
  source 1..22: mol_type = other DNA
attacactgaggtatgtctctt

SEQ ID NO: 26482 - DNA, 22 bp, synthetic construct
  misc_feature 1..22: note = chemically synthesized
  source 1..22: mol_type = other DNA
ttacactgaggtatgtctcttg

SEQ ID NO: 26483 - DNA, 22 bp, synthetic construct
  misc_feature 1..22: note = chemically synthesized
  source 1..22: mol_type = other DNA
cactgaggtatgtctcttgtat

SEQ ID NO: 26484 - DNA, 22 bp, synthetic construct
  misc_feature 1..22: note = chemically synthesized
  source 1..22: mol_type = other DNA
aggtatgtctcttgtatgctga

SEQ ID NO: 26485 - DNA, 22 bp, synthetic construct
  misc_feature 1..22: note = chemically synthesized
  source 1..22: mol_type = other DNA
ttgtatgctgattttgctgagc

SEQ ID NO: 26486 - DNA, 22 bp, synthetic construct
  misc_feature 1..22: note = chemically synthesized
  source 1..22: mol_type = other DNA
gtatgctgattttgctgagcat

SEQ ID NO: 26487 - DNA, 22 bp, synthetic construct
  misc_feature 1..22: note = chemically synthesized
  source 1..22: mol_type = other DNA
tatgctgattttgctgagcatt

SEQ ID NO: 26488 - DNA, 22 bp, synthetic construct
  misc_feature 1..22: note = chemically synthesized
  source 1..22: mol_type = other DNA
attttgctgagcattttaatca

SEQ ID NO: 26489 - DNA, 22 bp, synthetic construct
  misc_feature 1..22: note = chemically synthesized
  source 1..22: mol_type = other DNA
tgctgagcattttaatcataaa

SEQ ID NO: 26490 - DNA, 22 bp, synthetic construct
  misc_feature 1..22: note = chemically synthesized
  source 1..22: mol_type = other DNA
gctgagcattttaatcataaat

SEQ ID NO: 26491 - DNA, 22 bp, synthetic construct
  misc_feature 1..22: note = chemically synthesized
  source 1..22: mol_type = other DNA
ctgagcattttaatcataaatg

SEQ ID NO: 26492 - DNA, 22 bp, synthetic construct
  misc_feature 1..22: note = chemically synthesized
  source 1..22: mol_type = other DNA
agcattttaatcataaatgtat

SEQ ID NO: 26493 - DNA, 22 bp, synthetic construct
  misc_feature 1..22: note = chemically synthesized
  source 1..22: mol_type = other DNA
taatcataaatgtatgctggat

SEQ ID NO: 26494 - DNA, 22 bp, synthetic construct
  misc_feature 1..22: note = chemically synthesized
  source 1..22: mol_type = other DNA
aatcataaatgtatgctggatt

SEQ ID NO: 26495 - DNA, 22 bp, synthetic construct
  misc_feature 1..22: note = chemically synthesized
  source 1..22: mol_type = other DNA
atcataaatgtatgctggattt

SEQ ID NO: 26496 - DNA, 22 bp, synthetic construct
  misc_feature 1..22: note = chemically synthesized
  source 1..22: mol_type = other DNA
gattttgttgaatgctttttct

SEQ ID NO: 26497 - DNA, 22 bp, synthetic construct
  misc_feature 1..22: note = chemically synthesized
  source 1..22: mol_type = other DNA
tgttgaatgctttttctgcatc

SEQ ID NO: 26498 - DNA, 22 bp, synthetic construct
  misc_feature 1..22: note = chemically synthesized
  source 1..22: mol_type = other DNA
gttgaatgctttttctgcatct

SEQ ID NO: 26499 - DNA, 22 bp, synthetic construct
  misc_feature 1..22: note = chemically synthesized
  source 1..22: mol_type = other DNA
ttgaatgctttttctgcatcta

SEQ ID NO: 26500 - DNA, 22 bp, synthetic construct
  misc_feature 1..22: note = chemically synthesized
  source 1..22: mol_type = other DNA
aatgctttttctgcatctattg

SEQ ID NO: 26501 - DNA, 22 bp, synthetic construct
  misc_feature 1..22: note = chemically synthesized
  source 1..22: mol_type = other DNA
tttctgcatctattgagatgat

SEQ ID NO: 26502 - DNA, 22 bp, synthetic construct
  misc_feature 1..22: note = chemically synthesized
  source 1..22: mol_type = other DNA
ttctgcatctattgagatgatc

SEQ ID NO: 26503 - DNA, 22 bp, synthetic construct
  misc_feature 1..22: note = chemically synthesized
  source 1..22: mol_type = other DNA
tctgcatctattgagatgatca

SEQ ID NO: 26504 - DNA, 22 bp, synthetic construct
  misc_feature 1..22: note = chemically synthesized
  source 1..22: mol_type = other DNA
ctgcatctattgagatgatcat

SEQ ID NO: 26505 - DNA, 22 bp, synthetic construct
  misc_feature 1..22: note = chemically synthesized
  source 1..22: mol_type = other DNA
tgcatctattgagatgatcatg

SEQ ID NO: 26506 - DNA, 22 bp, synthetic construct
  misc_feature 1..22: note = chemically synthesized
  source 1..22: mol_type = other DNA
catctattgagatgatcatgta

SEQ ID NO: 26507 - DNA, 22 bp, synthetic construct
  misc_feature 1..22: note = chemically synthesized
  source 1..22: mol_type = other DNA
ttgagatgatcatgtaattttt

SEQ ID NO: 26508 - DNA, 22 bp, synthetic construct
  misc_feature 1..22: note = chemically synthesized
  source 1..22: mol_type = other DNA
agatgatcatgtaatttttgtt

SEQ ID NO: 26509 - DNA, 22 bp, synthetic construct
  misc_feature 1..22: note = chemically synthesized
  source 1..22: mol_type = other DNA
ttgtttttaaatctgtttatgt

SEQ ID NO: 26510 - DNA, 22 bp, synthetic construct
  misc_feature 1..22: note = chemically synthesized
  source 1..22: mol_type = other DNA
tgtttttaaatctgtttatgtg

SEQ ID NO: 26511 - DNA, 22 bp, synthetic construct
  misc_feature 1..22: note = chemically synthesized
  source 1..22: mol_type = other DNA
gtttttaaatctgtttatgtgg

SEQ ID NO: 26512 - DNA, 22 bp, synthetic construct
  misc_feature 1..22: note = chemically synthesized
  source 1..22: mol_type = other DNA
tttttaaatctgtttatgtggt

SEQ ID NO: 26513 - DNA, 22 bp, synthetic construct
  misc_feature 1..22: note = chemically synthesized
  source 1..22: mol_type = other DNA
ttaaatctgtttatgtggtgta

SEQ ID NO: 26514 - DNA, 22 bp, synthetic construct
  misc_feature 1..22: note = chemically synthesized
  source 1..22: mol_type = other DNA
taaatctgtttatgtggtgtat

SEQ ID NO: 26515 - DNA, 22 bp, synthetic construct
  misc_feature 1..22: note = chemically synthesized
  source 1..22: mol_type = other DNA
aaatctgtttatgtggtgtatc

SEQ ID NO: 26516 - DNA, 22 bp, synthetic construct
  misc_feature 1..22: note = chemically synthesized
  source 1..22: mol_type = other DNA
aatctgtttatgtggtgtatca

SEQ ID NO: 26517 - DNA, 22 bp, synthetic construct
  misc_feature 1..22: note = chemically synthesized
  source 1..22: mol_type = other DNA
tttatgtggtgtatcacactta

SEQ ID NO: 26518 - DNA, 22 bp, synthetic construct
  misc_feature 1..22: note = chemically synthesized
  source 1..22: mol_type = other DNA
atgtggtgtatcacacttattg

SEQ ID NO: 26519 - DNA, 22 bp, synthetic construct
  misc_feature 1..22: note = chemically synthesized
  source 1..22: mol_type = other DNA
tgtggtgtatcacacttattga

SEQ ID NO: 26520 - DNA, 22 bp, synthetic construct
  misc_feature 1..22: note = chemically synthesized
  source 1..22: mol_type = other DNA
attgacttgcagatgtcaaacc

SEQ ID NO: 26521 - DNA, 22 bp, synthetic construct
  misc_feature 1..22: note = chemically synthesized
  source 1..22: mol_type = other DNA
ttgacttgcagatgtcaaacca

SEQ ID NO: 26522 - DNA, 22 bp, synthetic construct
  misc_feature 1..22: note = chemically synthesized
  source 1..22: mol_type = other DNA
acttgcagatgtcaaaccaacc

SEQ ID NO: 26523 - DNA, 22 bp, synthetic construct
  misc_feature 1..22: note = chemically synthesized
  source 1..22: mol_type = other DNA
gcagatgtcaaaccaaccctgc

SEQ ID NO: 26524 - DNA, 22 bp, synthetic construct
  misc_feature 1..22: note = chemically synthesized
  source 1..22: mol_type = other DNA
cagatgtcaaaccaaccctgca

SEQ ID NO: 26525 - DNA, 22 bp, synthetic construct
  misc_feature 1..22: note = chemically synthesized
  source 1..22: mol_type = other DNA
catccctggcatggaacctgct

SEQ ID NO: 26526 - DNA, 22 bp, synthetic construct
  misc_feature 1..22: note = chemically synthesized
  source 1..22: mol_type = other DNA
gcatggaacctgcttgatcatg

SEQ ID NO: 26527 - DNA, 22 bp, synthetic construct
  misc_feature 1..22: note = chemically synthesized
  source 1..22: mol_type = other DNA
cttgatcatggtggattatctt

SEQ ID NO: 26528 - DNA, 22 bp, synthetic construct
  misc_feature 1..22: note = chemically synthesized
  source 1..22: mol_type = other DNA
gatcatggtggattatcttttt

SEQ ID NO: 26529 - DNA, 22 bp, synthetic construct
  misc_feature 1..22: note = chemically synthesized
  source 1..22: mol_type = other DNA
atcatggtggattatctttttg

SEQ ID NO: 26530 - DNA, 22 bp, synthetic construct
  misc_feature 1..22: note = chemically synthesized
  source 1..22: mol_type = other DNA
tctttttgttatgttgttgaat

SEQ ID NO: 26531 - DNA, 22 bp, synthetic construct
  misc_feature 1..22: note = chemically synthesized
  source 1..22: mol_type = other DNA
tttgttatgttgttgaatttgg

SEQ ID NO: 26532 - DNA, 22 bp, synthetic construct
  misc_feature 1..22: note = chemically synthesized
  source 1..22: mol_type = other DNA
ttgttatgttgttgaatttggt

SEQ ID NO: 26533 - DNA, 22 bp, synthetic construct
  misc_feature 1..22: note = chemically synthesized
  source 1..22: mol_type = other DNA
tgttatgttgttgaatttggtt

SEQ ID NO: 26534 - DNA, 22 bp, synthetic construct
  misc_feature 1..22: note = chemically synthesized
  source 1..22: mol_type = other DNA
gttatgttgttgaatttggtta

SEQ ID NO: 26535 - DNA, 22 bp, synthetic construct
  misc_feature 1..22: note = chemically synthesized
  source 1..22: mol_type = other DNA
ttatgttgttgaatttggttat

SEQ ID NO: 26536 - DNA, 22 bp, synthetic construct
  misc_feature 1..22: note = chemically synthesized
  source 1..22: mol_type = other DNA
tgttgttgaatttggttatcta

SEQ ID NO: 26537 - DNA, 22 bp, synthetic construct
  misc_feature 1..22: note = chemically synthesized
  source 1..22: mol_type = other DNA
ttgaatttggttatctagtatt

SEQ ID NO: 26538 - DNA, 22 bp, synthetic construct
  misc_feature 1..22: note = chemically synthesized
  source 1..22: mol_type = other DNA
aatttggttatctagtattttg

SEQ ID NO: 26539 - DNA, 22 bp, synthetic construct
  misc_feature 1..22: note = chemically synthesized
  source 1..22: mol_type = other DNA
ggttatctagtattttgttaag

SEQ ID NO: 26540 - DNA, 22 bp, synthetic construct
  misc_feature 1..22: note = chemically synthesized
  source 1..22: mol_type = other DNA
gttatctagtattttgttaagg

SEQ ID NO: 26541 - DNA, 22 bp, synthetic construct
  misc_feature 1..22: note = chemically synthesized
  source 1..22: mol_type = other DNA
tctagtattttgttaaggattt

SEQ ID NO: 26542 - DNA, 22 bp, synthetic construct
  misc_feature 1..22: note = chemically synthesized
  source 1..22: mol_type = other DNA
gtattttgttaaggattttagc

SEQ ID NO: 26543 - DNA, 22 bp, synthetic construct
  misc_feature 1..22: note = chemically synthesized
  source 1..22: mol_type = other DNA
tgttaaggattttagcatctat

SEQ ID NO: 26544 - DNA, 22 bp, synthetic construct
  misc_feature 1..22: note = chemically synthesized
  source 1..22: mol_type = other DNA
gttaaggattttagcatctatg

SEQ ID NO: 26545 - DNA, 22 bp, synthetic construct
  misc_feature 1..22: note = chemically synthesized
  source 1..22: mol_type = other DNA
ttaaggattttagcatctatgt

SEQ ID NO: 26546 - DNA, 22 bp, synthetic construct
  misc_feature 1..22: note = chemically synthesized
  source 1..22: mol_type = other DNA
aggattttagcatctatgttca

SEQ ID NO: 26547 - DNA, 22 bp, synthetic construct
  misc_feature 1..22: note = chemically synthesized
  source 1..22: mol_type = other DNA
tagcatctatgttcatcaaggc

SEQ ID NO: 26548 - DNA, 22 bp, synthetic construct
  misc_feature 1..22: note = chemically synthesized
  source 1..22: mol_type = other DNA
agcatctatgttcatcaaggct

SEQ ID NO: 26549 - DNA, 22 bp, synthetic construct
  misc_feature 1..22: note = chemically synthesized
  source 1..22: mol_type = other DNA
gcatctatgttcatcaaggcta

SEQ ID NO: 26550 - DNA, 22 bp, synthetic construct
  misc_feature 1..22: note = chemically synthesized
  source 1..22: mol_type = other DNA
tgttcatcaaggctatcagtct

SEQ ID NO: 26551 - DNA, 22 bp, synthetic construct
  misc_feature 1..22: note = chemically synthesized
  source 1..22: mol_type = other DNA
atcaaggctatcagtctgtagt

SEQ ID NO: 26552 - DNA, 22 bp, synthetic construct
  misc_feature 1..22: note = chemically synthesized
  source 1..22: mol_type = other DNA
tcagtctgtagttttctttttt

SEQ ID NO: 26553 - DNA, 22 bp, synthetic construct
  misc_feature 1..22: note = chemically synthesized
  source 1..22: mol_type = other DNA
tagttttcttttttggttatgt

SEQ ID NO: 26554 - DNA, 22 bp, synthetic construct
  misc_feature 1..22: note = chemically synthesized
  source 1..22: mol_type = other DNA
tcttttttggttatgtccttcc

SEQ ID NO: 26555 - DNA, 22 bp, synthetic construct
  misc_feature 1..22: note = chemically synthesized
  source 1..22: mol_type = other DNA
cttttttggttatgtccttccc

SEQ ID NO: 26556 - DNA, 22 bp, synthetic construct
  misc_feature 1..22: note = chemically synthesized
  source 1..22: mol_type = other DNA
ttttttggttatgtccttccct

SEQ ID NO: 26557 - DNA, 22 bp, synthetic construct
  misc_feature 1..22: note = chemically synthesized
  source 1..22: mol_type = other DNA
ttttggttatgtccttccctgg

SEQ ID NO: 26558 - DNA, 22 bp, synthetic construct
  misc_feature 1..22: note = chemically synthesized
  source 1..22: mol_type = other DNA
tttggttatgtccttccctggt

SEQ ID NO: 26559 - DNA, 22 bp, synthetic construct
  misc_feature 1..22: note = chemically synthesized
  source 1..22: mol_type = other DNA
ttggttatgtccttccctggtt

SEQ ID NO: 26560 - DNA, 22 bp, synthetic construct
  misc_feature 1..22: note = chemically synthesized
  source 1..22: mol_type = other DNA
tggttatgtccttccctggttt

SEQ ID NO: 26561 - DNA, 22 bp, synthetic construct
  misc_feature 1..22: note = chemically synthesized
  source 1..22: mol_type = other DNA
ggttatgtccttccctggtttt

SEQ ID NO: 26562 - DNA, 22 bp, synthetic construct
  misc_feature 1..22: note = chemically synthesized
  source 1..22: mol_type = other DNA
gttatgtccttccctggttttg

SEQ ID NO: 26563 - DNA, 22 bp, synthetic construct
  misc_feature 1..22: note = chemically synthesized
  source 1..22: mol_type = other DNA
tgtccttccctggttttggtgt

SEQ ID NO: 26564 - DNA, 22 bp, synthetic construct
  misc_feature 1..22: note = chemically synthesized
  source 1..22: mol_type = other DNA
ccctggttttggtgtgatgctg

SEQ ID NO: 26565 - DNA, 22 bp, synthetic construct
  misc_feature 1..22: note = chemically synthesized
  source 1..22: mol_type = other DNA
cctggttttggtgtgatgctgg

SEQ ID NO: 26566 - DNA, 22 bp, synthetic construct
  misc_feature 1..22: note = chemically synthesized
  source 1..22: mol_type = other DNA
gttttggtgtgatgctggcttc

SEQ ID NO: 26567 - DNA, 22 bp, synthetic construct
  misc_feature 1..22: note = chemically synthesized
  source 1..22: mol_type = other DNA
tggtgtgatgctggcttcatag

SEQ ID NO: 26568 - DNA, 22 bp, synthetic construct
  misc_feature 1..22: note = chemically synthesized
  source 1..22: mol_type = other DNA
ggtgtgatgctggcttcataga

SEQ ID NO: 26569 - DNA, 22 bp, synthetic construct
  misc_feature 1..22: note = chemically synthesized
  source 1..22: mol_type = other DNA
gtgtgatgctggcttcatagaa

SEQ ID NO: 26570 - DNA, 22 bp, synthetic construct
  misc_feature 1..22: note = chemically synthesized
  source 1..22: mol_type = other DNA
gcttcatagaatgaattagggc

SEQ ID NO: 26571 - DNA, 22 bp, synthetic construct
  misc_feature 1..22: note = chemically synthesized
  source 1..22: mol_type = other DNA
catagaatgaattagggcaggt

SEQ ID NO: 26572 - DNA, 22 bp, synthetic construct
  misc_feature 1..22: note = chemically synthesized
  source 1..22: mol_type = other DNA
atagaatgaattagggcaggtt

SEQ ID NO: 26573 - DNA, 22 bp, synthetic construct
  misc_feature 1..22: note = chemically synthesized
  source 1..22: mol_type = other DNA
gggcaggttccttctttatctg

SEQ ID NO: 26574 - DNA, 22 bp, synthetic construct
  misc_feature 1..22: note = chemically synthesized
  source 1..22: mol_type = other DNA
cttctttatctgtcttgtagaa

SEQ ID NO: 26575 - DNA, 22 bp, synthetic construct
  misc_feature 1..22: note = chemically synthesized
  source 1..22: mol_type = other DNA
ctttatctgtcttgtagaatag

SEQ ID NO: 26576 - DNA, 22 bp, synthetic construct
  misc_feature 1..22: note = chemically synthesized
  source 1..22: mol_type = other DNA
tttatctgtcttgtagaatagt

SEQ ID NO: 26577 - DNA, 22 bp, synthetic construct
  misc_feature 1..22: note = chemically synthesized
  source 1..22: mol_type = other DNA
tatctgtcttgtagaatagtgt

SEQ ID NO: 26578 - DNA, 22 bp, synthetic construct
  misc_feature 1..22: note = chemically synthesized
  source 1..22: mol_type = other DNA
atctgtcttgtagaatagtgtc

SEQ ID NO: 26579 - DNA, 22 bp, synthetic construct
  misc_feature 1..22: note = chemically synthesized
  source 1..22: mol_type = other DNA
tctgtcttgtagaatagtgtca

SEQ ID NO: 26580 - DNA, 22 bp, synthetic construct
  misc_feature 1..22: note = chemically synthesized
  source 1..22: mol_type = other DNA
tcttgtagaatagtgtcaaaaa

SEQ ID NO: 26581 - DNA, 22 bp, synthetic construct
  misc_feature 1..22: note = chemically synthesized
  source 1..22: mol_type = other DNA
gtagaatagtgtcaaaaagatg

SEQ ID NO: 26582 - DNA, 22 bp, synthetic construct
  misc_feature 1..22: note = chemically synthesized
  source 1..22: mol_type = other DNA
tagaatagtgtcaaaaagatgg

SEQ ID NO: 26583 - DNA, 22 bp, synthetic construct
  misc_feature 1..22: note = chemically synthesized
  source 1..22: mol_type = other DNA
ctctttgaatgtctagtagaat

SEQ ID NO: 26584 - DNA, 22 bp, synthetic construct
  misc_feature 1..22: note = chemically synthesized
  source 1..22: mol_type = other DNA
tttgaatgtctagtagaattct

SEQ ID NO: 26585 - DNA, 22 bp, synthetic construct
  misc_feature 1..22: note = chemically synthesized
  source 1..22: mol_type = other DNA
tgaatgtctagtagaattctgt

SEQ ID NO: 26586 - DNA, 22 bp, synthetic construct
  misc_feature 1..22: note = chemically synthesized
  source 1..22: mol_type = other DNA
gaatgtctagtagaattctgtt

SEQ ID NO: 26587 - DNA, 22 bp, synthetic construct
  misc_feature 1..22: note = chemically synthesized
  source 1..22: mol_type = other DNA
aatgtctagtagaattctgttg

SEQ ID NO: 26588 - DNA, 22 bp, synthetic construct
  misc_feature 1..22: note = chemically synthesized
  source 1..22: mol_type = other DNA
gtagaattctgttgtgaatcca

SEQ ID NO: 26589 - DNA, 22 bp, synthetic construct
  misc_feature 1..22: note = chemically synthesized
  source 1..22: mol_type = other DNA
tgttgtgaatccatctggtcct

SEQ ID NO: 26590 - DNA, 22 bp, synthetic construct
  misc_feature 1..22: note = chemically synthesized
  source 1..22: mol_type = other DNA
ttgtgaatccatctggtcctga

SEQ ID NO: 26591 - DNA, 22 bp, synthetic construct
  misc_feature 1..22: note = chemically synthesized
  source 1..22: mol_type = other DNA
tgaatccatctggtcctgaact

SEQ ID NO: 26592 - DNA, 22 bp, synthetic construct
  misc_feature 1..22: note = chemically synthesized
  source 1..22: mol_type = other DNA
gtcctgaacttttttttggttg

SEQ ID NO: 26593 - DNA, 22 bp, synthetic construct
  misc_feature 1..22: note = chemically synthesized
  source 1..22: mol_type = other DNA
aacttttttttggttggtaatt

SEQ ID NO: 26594 - DNA, 22 bp, synthetic construct
  misc_feature 1..22: note = chemically synthesized
  source 1..22: mol_type = other DNA
ttttttggttggtaatttttta

SEQ ID NO: 26595 - DNA, 22 bp, synthetic construct
  misc_feature 1..22: note = chemically synthesized
  source 1..22: mol_type = other DNA
tttttggttggtaattttttaa

SEQ ID NO: 26596 - DNA, 22 bp, synthetic construct
  misc_feature 1..22: note = chemically synthesized
  source 1..22: mol_type = other DNA
ttttggttggtaattttttaat

SEQ ID NO: 26597 - DNA, 22 bp, synthetic construct
  misc_feature 1..22: note = chemically synthesized
  source 1..22: mol_type = other DNA
tttggttggtaattttttaatt

SEQ ID NO: 26598 - DNA, 22 bp, synthetic construct
  misc_feature 1..22: note = chemically synthesized
  source 1..22: mol_type = other DNA
ttggttggtaattttttaatta

SEQ ID NO: 26599 - DNA, 22 bp, synthetic construct
  misc_feature 1..22: note = chemically synthesized
  source 1..22: mol_type = other DNA
tggttggtaattttttaattac

SEQ ID NO: 26600 - DNA, 22 bp, synthetic construct
  misc_feature 1..22: note = chemically synthesized
  source 1..22: mol_type = other DNA
ggttggtaattttttaattacc

SEQ ID NO: 26601 - DNA, 22 bp, synthetic construct
  misc_feature 1..22: note = chemically synthesized
  source 1..22: mol_type = other DNA
gttggtaattttttaattacca

SEQ ID NO: 26602 - DNA, 22 bp, synthetic construct
  misc_feature 1..22: note = chemically synthesized
  source 1..22: mol_type = other DNA
gtaattttttaattaccaatta

SEQ ID NO: 26603 - DNA, 22 bp, synthetic construct
  misc_feature 1..22: note = chemically synthesized
  source 1..22: mol_type = other DNA
tttaattaccaattaaatctca

SEQ ID NO: 26604 - DNA, 22 bp, synthetic construct
  misc_feature 1..22: note = chemically synthesized
  source 1..22: mol_type = other DNA
ttaattaccaattaaatctcac

SEQ ID NO: 26605 - DNA, 22 bp, synthetic construct
  misc_feature 1..22: note = chemically synthesized
  source 1..22: mol_type = other DNA
taattaccaattaaatctcact

SEQ ID NO: 26606 - DNA, 22 bp, synthetic construct
  misc_feature 1..22: note = chemically synthesized
  source 1..22: mol_type = other DNA
aattaccaattaaatctcactg

SEQ ID NO: 26607 - DNA, 22 bp, synthetic construct
  misc_feature 1..22: note = chemically synthesized
  source 1..22: mol_type = other DNA
attaccaattaaatctcactgc

SEQ ID NO: 26608 - DNA, 22 bp, synthetic construct
  misc_feature 1..22: note = chemically synthesized
  source 1..22: mol_type = other DNA
ccaattaaatctcactgcttgt

SEQ ID NO: 26609 - DNA, 22 bp, synthetic construct
  misc_feature 1..22: note = chemically synthesized
  source 1..22: mol_type = other DNA
aatctcactgcttgttattggt

SEQ ID NO: 26610 - DNA, 22 bp, synthetic construct
  misc_feature 1..22: note = chemically synthesized
  source 1..22: mol_type = other DNA
actgcttgttattggtctgtta

SEQ ID NO: 26611 - DNA, 22 bp, synthetic construct
  misc_feature 1..22: note = chemically synthesized
  source 1..22: mol_type = other DNA
cttgttattggtctgttagtaa

SEQ ID NO: 26612 - DNA, 22 bp, synthetic construct
  misc_feature 1..22: note = chemically synthesized
  source 1..22: mol_type = other DNA
gttattggtctgttagtaaatt

SEQ ID NO: 26613 - DNA, 22 bp, synthetic construct
  misc_feature 1..22: note = chemically synthesized
  source 1..22: mol_type = other DNA
ttattggtctgttagtaaattt

SEQ ID NO: 26614 - DNA, 22 bp, synthetic construct
  misc_feature 1..22: note = chemically synthesized
  source 1..22: mol_type = other DNA
ttggtctgttagtaaatttatt

SEQ ID NO: 26615 - DNA, 22 bp, synthetic construct
  misc_feature 1..22: note = chemically synthesized
  source 1..22: mol_type = other DNA
gtctgttagtaaatttattgag

SEQ ID NO: 26616 - DNA, 22 bp, synthetic construct
  misc_feature 1..22: note = chemically synthesized
  source 1..22: mol_type = other DNA
ttagtaaatttattgaggctca

SEQ ID NO: 26617 - DNA, 22 bp, synthetic construct
  misc_feature 1..22: note = chemically synthesized
  source 1..22: mol_type = other DNA
gtaaatttattgaggctcattt

SEQ ID NO: 26618 - DNA, 22 bp, synthetic construct
  misc_feature 1..22: note = chemically synthesized
  source 1..22: mol_type = other DNA
attgaggctcatttcatggcct

SEQ ID NO: 26619 - DNA, 22 bp, synthetic construct
  misc_feature 1..22: note = chemically synthesized
  source 1..22: mol_type = other DNA
ttgaggctcatttcatggccta

SEQ ID NO: 26620 - DNA, 22 bp, synthetic construct
  misc_feature 1..22: note = chemically synthesized
  source 1..22: mol_type = other DNA
aggctcatttcatggcctatca

SEQ ID NO: 26621 - DNA, 22 bp, synthetic construct
  misc_feature 1..22: note = chemically synthesized
  source 1..22: mol_type = other DNA
atttcatggcctatcatatggt

SEQ ID NO: 26622 - DNA, 22 bp, synthetic construct
  misc_feature 1..22: note = chemically synthesized
  source 1..22: mol_type = other DNA
catggcctatcatatggtctac

SEQ ID NO: 26623 - DNA, 22 bp, synthetic construct
  misc_feature 1..22: note = chemically synthesized
  source 1..22: mol_type = other DNA
atggcctatcatatggtctacc

SEQ ID NO: 26624 - DNA, 22 bp, synthetic construct
  misc_feature 1..22: note = chemically synthesized
  source 1..22: mol_type = other DNA
tcatatggtctaccttggagaa

SEQ ID NO: 26625 - DNA, 22 bp, synthetic construct
  misc_feature 1..22: note = chemically synthesized
  source 1..22: mol_type = other DNA
ccttggagaaatttccacgcgc

SEQ ID NO: 26626 - DNA, 22 bp, synthetic construct
  misc_feature 1..22: note = chemically synthesized
  source 1..22: mol_type = other DNA
ggagaaatttccacgcgctgtt

SEQ ID NO: 26627 - DNA, 22 bp, synthetic construct
  misc_feature 1..22: note = chemically synthesized
  source 1..22: mol_type = other DNA
gagaaatttccacgcgctgttg

SEQ ID NO: 26628 - DNA, 22 bp, synthetic construct
  misc_feature 1..22: note = chemically synthesized
  source 1..22: mol_type = other DNA
ccacgcgctgttgaatagaatg

SEQ ID NO: 26629 - DNA, 22 bp, synthetic construct
  misc_feature 1..22: note = chemically synthesized
  source 1..22: mol_type = other DNA
cacgcgctgttgaatagaatgt

SEQ ID NO: 26630 - DNA, 22 bp, synthetic construct
  misc_feature 1..22: note = chemically synthesized
  source 1..22: mol_type = other DNA
ttgaatagaatgtgtgttctgt

SEQ ID NO: 26631 - DNA, 22 bp, synthetic construct
  misc_feature 1..22: note = chemically synthesized
  source 1..22: mol_type = other DNA
aatagaatgtgtgttctgtggt

SEQ ID NO: 26632 - DNA, 22 bp, synthetic construct
  misc_feature 1..22: note = chemically synthesized
  source 1..22: mol_type = other DNA
tgtggttattggatgaaatgtt

SEQ ID NO: 26633 - DNA, 22 bp, synthetic construct
  misc_feature 1..22: note = chemically synthesized
  source 1..22: mol_type = other DNA
tggttattggatgaaatgttct

SEQ ID NO: 26634 - DNA, 22 bp, synthetic construct
  misc_feature 1..22: note = chemically synthesized
  source 1..22: mol_type = other DNA
ttggatgaaatgttctgtatat

SEQ ID NO: 26635 - DNA, 22 bp, synthetic construct
  misc_feature 1..22: note = chemically synthesized
  source 1..22: mol_type = other DNA
gatgaaatgttctgtatataac

SEQ ID NO: 26636 - DNA, 22 bp, synthetic construct
  misc_feature 1..22: note = chemically synthesized
  source 1..22: mol_type = other DNA
tgtatataactgttaagtccat

SEQ ID NO: 26637 - DNA, 22 bp, synthetic construct
  misc_feature 1..22: note = chemically synthesized
  source 1..22: mol_type = other DNA
tatataactgttaagtccattt

SEQ ID NO: 26638 - DNA, 22 bp, synthetic construct
  misc_feature 1..22: note = chemically synthesized
  source 1..22: mol_type = other DNA
ttaagtccatttgttctaaggt

SEQ ID NO: 26639 - DNA, 22 bp, synthetic construct
  misc_feature 1..22: note = chemically synthesized
  source 1..22: mol_type = other DNA
agtccatttgttctaaggtata

SEQ ID NO: 26640 - DNA, 22 bp, synthetic construct
  misc_feature 1..22: note = chemically synthesized
  source 1..22: mol_type = other DNA
gttctaaggtataatttaaatc

SEQ ID NO: 26641 - DNA, 22 bp, synthetic construct
  misc_feature 1..22: note = chemically synthesized
  source 1..22: mol_type = other DNA
ttctaaggtataatttaaatcc

SEQ ID NO: 26642 - DNA, 22 bp, synthetic construct
  misc_feature 1..22: note = chemically synthesized
  source 1..22: mol_type = other DNA
taaggtataatttaaatccatt

SEQ ID NO: 26643 - DNA, 22 bp, synthetic construct
  misc_feature 1..22: note = chemically synthesized
  source 1..22: mol_type = other DNA
aggtataatttaaatccattat

SEQ ID NO: 26644 - DNA, 22 bp, synthetic construct
  misc_feature 1..22: note = chemically synthesized
  source 1..22: mol_type = other DNA
aaatccattatttttttgttga

SEQ ID NO: 26645 - DNA, 22 bp, synthetic construct
  misc_feature 1..22: note = chemically synthesized
  source 1..22: mol_type = other DNA
aatccattatttttttgttgac

SEQ ID NO: 26646 - DNA, 22 bp, synthetic construct
  misc_feature 1..22: note = chemically synthesized
  source 1..22: mol_type = other DNA
tttttttgttgactttctgtct

SEQ ID NO: 26647 - DNA, 22 bp, synthetic construct
  misc_feature 1..22: note = chemically synthesized
  source 1..22: mol_type = other DNA
ttttgttgactttctgtcttga

SEQ ID NO: 26648 - DNA, 22 bp, synthetic construct
  misc_feature 1..22: note = chemically synthesized
  source 1..22: mol_type = other DNA
tttgttgactttctgtcttgat

SEQ ID NO: 26649 - DNA, 22 bp, synthetic construct
  misc_feature 1..22: note = chemically synthesized
  source 1..22: mol_type = other DNA
ttgttgactttctgtcttgatg

SEQ ID NO: 26650 - DNA, 22 bp, synthetic construct
  misc_feature 1..22: note = chemically synthesized
  source 1..22: mol_type = other DNA
tgttgactttctgtcttgatga

SEQ ID NO: 26651 - DNA, 22 bp, synthetic construct
  misc_feature 1..22: note = chemically synthesized
  source 1..22: mol_type = other DNA
gttgactttctgtcttgatgaa

SEQ ID NO: 26652 - DNA, 22 bp, synthetic construct
  misc_feature 1..22: note = chemically synthesized
  source 1..22: mol_type = other DNA
ttgactttctgtcttgatgaac

SEQ ID NO: 26653 - DNA, 22 bp, synthetic construct
  misc_feature 1..22: note = chemically synthesized
  source 1..22: mol_type = other DNA
actttctgtcttgatgaactgt

SEQ ID NO: 26654 - DNA, 22 bp, synthetic construct
  misc_feature 1..22: note = chemically synthesized
  source 1..22: mol_type = other DNA
tctgtcttgatgaactgtctag

SEQ ID NO: 26655 - DNA, 22 bp, synthetic construct
  misc_feature 1..22: note = chemically synthesized
  source 1..22: mol_type = other DNA
ctgtcttgatgaactgtctagt

SEQ ID NO: 26656 - DNA, 22 bp, synthetic construct
  misc_feature 1..22: note = chemically synthesized
  source 1..22: mol_type = other DNA
tgtcttgatgaactgtctagtg

SEQ ID NO: 26657 - DNA, 22 bp, synthetic construct
  misc_feature 1..22: note = chemically synthesized
  source 1..22: mol_type = other DNA
tcttgatgaactgtctagtgct

SEQ ID NO: 26658 - DNA, 22 bp, synthetic construct
  misc_feature 1..22: note = chemically synthesized
  source 1..22: mol_type = other DNA
gatgaactgtctagtgctgtca

SEQ ID NO: 26659 - DNA, 22 bp, synthetic construct
  misc_feature 1..22: note = chemically synthesized
  source 1..22: mol_type = other DNA
atgaactgtctagtgctgtcaa

SEQ ID NO: 26660 - DNA, 22 bp, synthetic construct
  misc_feature 1..22: note = chemically synthesized
  source 1..22: mol_type = other DNA
tctagtgctgtcaatgaagtat

SEQ ID NO: 26661 - DNA, 22 bp, synthetic construct
  misc_feature 1..22: note = chemically synthesized
  source 1..22: mol_type = other DNA
gtgctgtcaatgaagtattgaa

SEQ ID NO: 26662 - DNA, 22 bp, synthetic construct
  misc_feature 1..22: note = chemically synthesized
  source 1..22: mol_type = other DNA
tcaatgaagtattgaagtcccc

SEQ ID NO: 26663 - DNA, 22 bp, synthetic construct
  misc_feature 1..22: note = chemically synthesized
  source 1..22: mol_type = other DNA
aagtcccccactattattgtgt

SEQ ID NO: 26664 - DNA, 22 bp, synthetic construct
  misc_feature 1..22: note = chemically synthesized
  source 1..22: mol_type = other DNA
ttattgtgttgctgtctatctc

SEQ ID NO: 26665 - DNA, 22 bp, synthetic construct
  misc_feature 1..22: note = chemically synthesized
  source 1..22: mol_type = other DNA
ttgtgttgctgtctatctcatt

SEQ ID NO: 26666 - DNA, 22 bp, synthetic construct
  misc_feature 1..22: note = chemically synthesized
  source 1..22: mol_type = other DNA
tgttgctgtctatctcatttct

SEQ ID NO: 26667 - DNA, 22 bp, synthetic construct
  misc_feature 1..22: note = chemically synthesized
  source 1..22: mol_type = other DNA
ctgtctatctcatttcttaggt

SEQ ID NO: 26668 - DNA, 22 bp, synthetic construct
  misc_feature 1..22: note = chemically synthesized
  source 1..22: mol_type = other DNA
tctatctcatttcttaggtcta

SEQ ID NO: 26669 - DNA, 22 bp, synthetic construct
  misc_feature 1..22: note = chemically synthesized
  source 1..22: mol_type = other DNA
tctcatttcttaggtctattag

SEQ ID NO: 26670 - DNA, 22 bp, synthetic construct
  misc_feature 1..22: note = chemically synthesized
  source 1..22: mol_type = other DNA
atttcttaggtctattagtaat

SEQ ID NO: 26671 - DNA, 22 bp, synthetic construct
  misc_feature 1..22: note = chemically synthesized
  source 1..22: mol_type = other DNA
cttaggtctattagtaattgtt

SEQ ID NO: 26672 - DNA, 22 bp, synthetic construct
  misc_feature 1..22: note = chemically synthesized
  source 1..22: mol_type = other DNA
ttaggtctattagtaattgttc

SEQ ID NO: 26673 - DNA, 22 bp, synthetic construct
  misc_feature 1..22: note = chemically synthesized
  source 1..22: mol_type = other DNA
aggtctattagtaattgttcta

SEQ ID NO: 26674 - DNA, 22 bp, synthetic construct
  misc_feature 1..22: note = chemically synthesized
  source 1..22: mol_type = other DNA
ggtctattagtaattgttctat

SEQ ID NO: 26675 - DNA, 22 bp, synthetic construct
  misc_feature 1..22: note = chemically synthesized
  source 1..22: mol_type = other DNA
ttagtaattgttctataaattt

SEQ ID NO: 26676 - DNA, 22 bp, synthetic construct
  misc_feature 1..22: note = chemically synthesized
  source 1..22: mol_type = other DNA
gtaattgttctataaatttggg

SEQ ID NO: 26677 - DNA, 22 bp, synthetic construct
  misc_feature 1..22: note = chemically synthesized
  source 1..22: mol_type = other DNA
ttctataaatttgggagctcca

SEQ ID NO: 26678 - DNA, 22 bp, synthetic construct
  misc_feature 1..22: note = chemically synthesized
  source 1..22: mol_type = other DNA
tataaatttgggagctccagtg

SEQ ID NO: 26679 - DNA, 22 bp, synthetic construct
  misc_feature 1..22: note = chemically synthesized
  source 1..22: mol_type = other DNA
taaatttgggagctccagtgtt

SEQ ID NO: 26680 - DNA, 22 bp, synthetic construct
  misc_feature 1..22: note = chemically synthesized
  source 1..22: mol_type = other DNA
gggagctccagtgttaggtgca

SEQ ID NO: 26681 - DNA, 22 bp, synthetic construct
  misc_feature 1..22: note = chemically synthesized
  source 1..22: mol_type = other DNA
ggagctccagtgttaggtgcat

SEQ ID NO: 26682 - DNA, 22 bp, synthetic construct
  misc_feature 1..22: note = chemically synthesized
  source 1..22: mol_type = other DNA
cagtgttaggtgcatatatgtt

SEQ ID NO: 26683 - DNA, 22 bp, synthetic construct
  misc_feature 1..22: note = chemically synthesized
  source 1..22: mol_type = other DNA
ggtgcatatatgtttaagattg

SEQ ID NO: 26684 - DNA, 22 bp, synthetic construct
  misc_feature 1..22: note = chemically synthesized
  source 1..22: mol_type = other DNA
aagattgtgatattttcctgtt

SEQ ID NO: 26685 - DNA, 22 bp, synthetic construct
  misc_feature 1..22: note = chemically synthesized
  source 1..22: mol_type = other DNA
agattgtgatattttcctgttg

SEQ ID NO: 26686 - DNA, 22 bp, synthetic construct
  misc_feature 1..22: note = chemically synthesized
  source 1..22: mol_type = other DNA
tgatattttcctgttggacaag

SEQ ID NO: 26687 - DNA, 22 bp, synthetic construct
  misc_feature 1..22: note = chemically synthesized
  source 1..22: mol_type = other DNA
tcctgttggacaaggcctttta

SEQ ID NO: 26688 - DNA, 22 bp, synthetic construct
  misc_feature 1..22: note = chemically synthesized
  source 1..22: mol_type = other DNA
cctgttggacaaggccttttac

SEQ ID NO: 26689 - DNA, 22 bp, synthetic construct
  misc_feature 1..22: note = chemically synthesized
  source 1..22: mol_type = other DNA
ctgttggacaaggccttttacc

SEQ ID NO: 26690 - DNA, 22 bp, synthetic construct
  misc_feature 1..22: note = chemically synthesized
  source 1..22: mol_type = other DNA
ttggacaaggccttttaccatt

SEQ ID NO: 26691 - DNA, 22 bp, synthetic construct
  misc_feature 1..22: note = chemically synthesized
  source 1..22: mol_type = other DNA
gacaaggccttttaccattata

SEQ ID NO: 26692 - DNA, 22 bp, synthetic construct
  misc_feature 1..22: note = chemically synthesized
  source 1..22: mol_type = other DNA
ttaccattatataatgtccctc

SEQ ID NO: 26693 - DNA, 22 bp, synthetic construct
  misc_feature 1..22: note = chemically synthesized
  source 1..22: mol_type = other DNA
taccattatataatgtccctct

SEQ ID NO: 26694 - DNA, 22 bp, synthetic construct
  misc_feature 1..22: note = chemically synthesized
  source 1..22: mol_type = other DNA
accattatataatgtccctctt

SEQ ID NO: 26695 - DNA, 22 bp, synthetic construct
  misc_feature 1..22: note = chemically synthesized
  source 1..22: mol_type = other DNA
ccattatataatgtccctcttt

SEQ ID NO: 26696 - DNA, 22 bp, synthetic construct
  misc_feature 1..22: note = chemically synthesized
  source 1..22: mol_type = other DNA
tataatgtccctctttgtctct

SEQ ID NO: 26697 - DNA, 22 bp, synthetic construct
  misc_feature 1..22: note = chemically synthesized
  source 1..22: mol_type = other DNA
tttgtctcttttaactgctgtt

SEQ ID NO: 26698 - DNA, 22 bp, synthetic construct
  misc_feature 1..22: note = chemically synthesized
  source 1..22: mol_type = other DNA
tgtctcttttaactgctgttgc

SEQ ID NO: 26699 - DNA, 22 bp, synthetic construct
  misc_feature 1..22: note = chemically synthesized
  source 1..22: mol_type = other DNA
gtctcttttaactgctgttgct

SEQ ID NO: 26700 - DNA, 22 bp, synthetic construct
  misc_feature 1..22: note = chemically synthesized
  source 1..22: mol_type = other DNA
tctcttttaactgctgttgctt

SEQ ID NO: 26701 - DNA, 22 bp, synthetic construct
  misc_feature 1..22: note = chemically synthesized
  source 1..22: mol_type = other DNA
ttttaactgctgttgctttaaa

SEQ ID NO: 26702 - DNA, 22 bp, synthetic construct
  misc_feature 1..22: note = chemically synthesized
  source 1..22: mol_type = other DNA
ttaactgctgttgctttaaagt

SEQ ID NO: 26703 - DNA, 22 bp, synthetic construct
  misc_feature 1..22: note = chemically synthesized
  source 1..22: mol_type = other DNA
taactgctgttgctttaaagtt

SEQ ID NO: 26704 - DNA, 22 bp, synthetic construct
  misc_feature 1..22: note = chemically synthesized
  source 1..22: mol_type = other DNA
aactgctgttgctttaaagttt

SEQ ID NO: 26705 - DNA, 22 bp, synthetic construct
  misc_feature 1..22: note = chemically synthesized
  source 1..22: mol_type = other DNA
actgctgttgctttaaagtttg

SEQ ID NO: 26706 - DNA, 22 bp, synthetic construct
  misc_feature 1..22: note = chemically synthesized
  source 1..22: mol_type = other DNA
ctgttgctttaaagtttgtttt

SEQ ID NO: 26707 - DNA, 22 bp, synthetic construct
  misc_feature 1..22: note = chemically synthesized
  source 1..22: mol_type = other DNA
ttgctttaaagtttgttttgcc

SEQ ID NO: 26708 - DNA, 22 bp, synthetic construct
  misc_feature 1..22: note = chemically synthesized
  source 1..22: mol_type = other DNA
ctttaaagtttgttttgcctac

SEQ ID NO: 26709 - DNA, 22 bp, synthetic construct
  misc_feature 1..22: note = chemically synthesized
  source 1..22: mol_type = other DNA
taaagtttgttttgcctactca

SEQ ID NO: 26710 - DNA, 22 bp, synthetic construct
  misc_feature 1..22: note = chemically synthesized
  source 1..22: mol_type = other DNA
aaagtttgttttgcctactcac

SEQ ID NO: 26711 - DNA, 22 bp, synthetic construct
  misc_feature 1..22: note = chemically synthesized
  source 1..22: mol_type = other DNA
aagtttgttttgcctactcact

SEQ ID NO: 26712 - DNA, 22 bp, synthetic construct
  misc_feature 1..22: note = chemically synthesized
  source 1..22: mol_type = other DNA
gttttgcctactcacttttggt

SEQ ID NO: 26713 - DNA, 22 bp, synthetic construct
  misc_feature 1..22: note = chemically synthesized
  source 1..22: mol_type = other DNA
ttttgcctactcacttttggtg

SEQ ID NO: 26714 - DNA, 22 bp, synthetic construct
  misc_feature 1..22: note = chemically synthesized
  source 1..22: mol_type = other DNA
tgcctactcacttttggtggcc

SEQ ID NO: 26715 - DNA, 22 bp, synthetic construct
  misc_feature 1..22: note = chemically synthesized
  source 1..22: mol_type = other DNA
gcctactcacttttggtggcca

SEQ ID NO: 26716 - DNA, 22 bp, synthetic construct
  misc_feature 1..22: note = chemically synthesized
  source 1..22: mol_type = other DNA
cctactcacttttggtggccat

SEQ ID NO: 26717 - DNA, 22 bp, synthetic construct
  misc_feature 1..22: note = chemically synthesized
  source 1..22: mol_type = other DNA
ctcacttttggtggccatttgc

SEQ ID NO: 26718 - DNA, 22 bp, synthetic construct
  misc_feature 1..22: note = chemically synthesized
  source 1..22: mol_type = other DNA
acttttggtggccatttgcatg

SEQ ID NO: 26719 - DNA, 22 bp, synthetic construct
  misc_feature 1..22: note = chemically synthesized
  source 1..22: mol_type = other DNA
ttggtggccatttgcatgaaat

SEQ ID NO: 26720 - DNA, 22 bp, synthetic construct
  misc_feature 1..22: note = chemically synthesized
  source 1..22: mol_type = other DNA
tggtggccatttgcatgaaata

SEQ ID NO: 26721 - DNA, 22 bp, synthetic construct
  misc_feature 1..22: note = chemically synthesized
  source 1..22: mol_type = other DNA
ggtggccatttgcatgaaatac

SEQ ID NO: 26722 - DNA, 22 bp, synthetic construct
  misc_feature 1..22: note = chemically synthesized
  source 1..22: mol_type = other DNA
gtggccatttgcatgaaatacc

SEQ ID NO: 26723 - DNA, 22 bp, synthetic construct
  misc_feature 1..22: note = chemically synthesized
  source 1..22: mol_type = other DNA
gcatgaaatacctttttcaccc

SEQ ID NO: 26724 - DNA, 22 bp, synthetic construct
  misc_feature 1..22: note = chemically synthesized
  source 1..22: mol_type = other DNA
catgaaatacctttttcaccct

SEQ ID NO: 26725 - DNA, 22 bp, synthetic construct
  misc_feature 1..22: note = chemically synthesized
  source 1..22: mol_type = other DNA
tttcacccttttaagtggagca

SEQ ID NO: 26726 - DNA, 22 bp, synthetic construct
  misc_feature 1..22: note = chemically synthesized
  source 1..22: mol_type = other DNA
ttcacccttttaagtggagcat

SEQ ID NO: 26727 - DNA, 22 bp, synthetic construct
  misc_feature 1..22: note = chemically synthesized
  source 1..22: mol_type = other DNA
tcacccttttaagtggagcatt

SEQ ID NO: 26728 - DNA, 22 bp, synthetic construct
  misc_feature 1..22: note = chemically synthesized
  source 1..22: mol_type = other DNA
cacccttttaagtggagcattt

SEQ ID NO: 26729 - DNA, 22 bp, synthetic construct
  misc_feature 1..22: note = chemically synthesized
  source 1..22: mol_type = other DNA
acccttttaagtggagcattta

SEQ ID NO: 26730 - DNA, 22 bp, synthetic construct
  misc_feature 1..22: note = chemically synthesized
  source 1..22: mol_type = other DNA
ttaagtggagcatttaggccat

SEQ ID NO: 26731 - DNA, 22 bp, synthetic construct
  misc_feature 1..22: note = chemically synthesized
  source 1..22: mol_type = other DNA
taagtggagcatttaggccatt

SEQ ID NO: 26732 - DNA, 22 bp, synthetic construct
  misc_feature 1..22: note = chemically synthesized
  source 1..22: mol_type = other DNA
aagtggagcatttaggccattt

SEQ ID NO: 26733 - DNA, 22 bp, synthetic construct
  misc_feature 1..22: note = chemically synthesized
  source 1..22: mol_type = other DNA
agtggagcatttaggccattta

SEQ ID NO: 26734 - DNA, 22 bp, synthetic construct
  misc_feature 1..22: note = chemically synthesized
  source 1..22: mol_type = other DNA
aggccatttacattcaatgtta

SEQ ID NO: 26735 - DNA, 22 bp, synthetic construct
  misc_feature 1..22: note = chemically synthesized
  source 1..22: mol_type = other DNA
ggccatttacattcaatgttag

SEQ ID NO: 26736 - DNA, 22 bp, synthetic construct
  misc_feature 1..22: note = chemically synthesized
  source 1..22: mol_type = other DNA
acattcaatgttagtaatgtaa

SEQ ID NO: 26737 - DNA, 22 bp, synthetic construct
  misc_feature 1..22: note = chemically synthesized
  source 1..22: mol_type = other DNA
cattcaatgttagtaatgtaaa

SEQ ID NO: 26738 - DNA, 22 bp, synthetic construct
  misc_feature 1..22: note = chemically synthesized
  source 1..22: mol_type = other DNA
aatgttagtaatgtaaatgcct

SEQ ID NO: 26739 - DNA, 22 bp, synthetic construct
  misc_feature 1..22: note = chemically synthesized
  source 1..22: mol_type = other DNA
gtaatgtaaatgcctggctatg

SEQ ID NO: 26740 - DNA, 22 bp, synthetic construct
  misc_feature 1..22: note = chemically synthesized
  source 1..22: mol_type = other DNA
gctatgccaggcaggaatggcc

SEQ ID NO: 26741 - DNA, 22 bp, synthetic construct
  misc_feature 1..22: note = chemically synthesized
  source 1..22: mol_type = other DNA
tgccaggcaggaatggcctgct

SEQ ID NO: 26742 - DNA, 22 bp, synthetic construct
  misc_feature 1..22: note = chemically synthesized
  source 1..22: mol_type = other DNA
ctcagggacccagtgagctccc

SEQ ID NO: 26743 - DNA, 22 bp, synthetic construct
  misc_feature 1..22: note = chemically synthesized
  source 1..22: mol_type = other DNA
agggacccagtgagctcccagg

SEQ ID NO: 26744 - DNA, 22 bp, synthetic construct
  misc_feature 1..22: note = chemically synthesized
  source 1..22: mol_type = other DNA
ccagggcctttctcactgcttc

SEQ ID NO: 26745 - DNA, 22 bp, synthetic construct
  misc_feature 1..22: note = chemically synthesized
  source 1..22: mol_type = other DNA
tctcactgcttcctctacacct

SEQ ID NO: 26746 - DNA, 22 bp, synthetic construct
  misc_feature 1..22: note = chemically synthesized
  source 1..22: mol_type = other DNA
ctcactgcttcctctacacctg

SEQ ID NO: 26747 - DNA, 22 bp, synthetic construct
  misc_feature 1..22: note = chemically synthesized
  source 1..22: mol_type = other DNA
tcactgcttcctctacacctgt

SEQ ID NO: 26748 - DNA, 22 bp, synthetic construct
  misc_feature 1..22: note = chemically synthesized
  source 1..22: mol_type = other DNA
actgcttcctctacacctgtat

SEQ ID NO: 26749 - DNA, 22 bp, synthetic construct
  misc_feature 1..22: note = chemically synthesized
  source 1..22: mol_type = other DNA
cttcctctacacctgtattttg

SEQ ID NO: 26750 - DNA, 22 bp, synthetic construct
  misc_feature 1..22: note = chemically synthesized
  source 1..22: mol_type = other DNA
cctctacacctgtattttgctc

SEQ ID NO: 26751 - DNA, 22 bp, synthetic construct
  misc_feature 1..22: note = chemically synthesized
  source 1..22: mol_type = other DNA
ctctacacctgtattttgctca

SEQ ID NO: 26752 - DNA, 22 bp, synthetic construct
  misc_feature 1..22: note = chemically synthesized
  source 1..22: mol_type = other DNA
tacacctgtattttgctcagct

SEQ ID NO: 26753 - DNA, 22 bp, synthetic construct
  misc_feature 1..22: note = chemically synthesized
  source 1..22: mol_type = other DNA
cacctgtattttgctcagctct

SEQ ID NO: 26754 - DNA, 22 bp, synthetic construct
  misc_feature 1..22: note = chemically synthesized
  source 1..22: mol_type = other DNA
tattttgctcagctctctaagt

SEQ ID NO: 26755 - DNA, 22 bp, synthetic construct
  misc_feature 1..22: note = chemically synthesized
  source 1..22: mol_type = other DNA
tgctcagctctctaagttaact

SEQ ID NO: 26756 - DNA, 22 bp, synthetic construct
  misc_feature 1..22: note = chemically synthesized
  source 1..22: mol_type = other DNA
gctcagctctctaagttaactc

SEQ ID NO: 26757 - DNA, 22 bp, synthetic construct
  misc_feature 1..22: note = chemically synthesized
  source 1..22: mol_type = other DNA
ctcagctctctaagttaactca

SEQ ID NO: 26758 - DNA, 22 bp, synthetic construct
  misc_feature 1..22: note = chemically synthesized
  source 1..22: mol_type = other DNA
agctctctaagttaactcaact

SEQ ID NO: 26759 - DNA, 22 bp, synthetic construct
  misc_feature 1..22: note = chemically synthesized
  source 1..22: mol_type = other DNA
tctaagttaactcaactccagg

SEQ ID NO: 26760 - DNA, 22 bp, synthetic construct
  misc_feature 1..22: note = chemically synthesized
  source 1..22: mol_type = other DNA
taagttaactcaactccaggta

SEQ ID NO: 26761 - DNA, 22 bp, synthetic construct
  misc_feature 1..22: note = chemically synthesized
  source 1..22: mol_type = other DNA
agttaactcaactccaggtaag

SEQ ID NO: 26762 - DNA, 22 bp, synthetic construct
  misc_feature 1..22: note = chemically synthesized
  source 1..22: mol_type = other DNA
actcaactccaggtaaggtcag

SEQ ID NO: 26763 - DNA, 22 bp, synthetic construct
  misc_feature 1..22: note = chemically synthesized
  source 1..22: mol_type = other DNA
aactccaggtaaggtcagaaac

SEQ ID NO: 26764 - DNA, 22 bp, synthetic construct
  misc_feature 1..22: note = chemically synthesized
  source 1..22: mol_type = other DNA
caggtaaggtcagaaacttctc

SEQ ID NO: 26765 - DNA, 22 bp, synthetic construct
  misc_feature 1..22: note = chemically synthesized
  source 1..22: mol_type = other DNA
ctcccacaaacagaccttcagt

SEQ ID NO: 26766 - DNA, 22 bp, synthetic construct
  misc_feature 1..22: note = chemically synthesized
  source 1..22: mol_type = other DNA
tcccacaaacagaccttcagtt

SEQ ID NO: 26767 - DNA, 22 bp, synthetic construct
  misc_feature 1..22: note = chemically synthesized
  source 1..22: mol_type = other DNA
ccacaaacagaccttcagtttc

SEQ ID NO: 26768 - DNA, 22 bp, synthetic construct
  misc_feature 1..22: note = chemically synthesized
  source 1..22: mol_type = other DNA
cagtttctccagtgggagtgtg

SEQ ID NO: 26769 - DNA, 22 bp, synthetic construct
  misc_feature 1..22: note = chemically synthesized
  source 1..22: mol_type = other DNA
agtttctccagtgggagtgtgt

SEQ ID NO: 26770 - DNA, 22 bp, synthetic construct
  misc_feature 1..22: note = chemically synthesized
  source 1..22: mol_type = other DNA
ctccagtgggagtgtgtgttta

SEQ ID NO: 26771 - DNA, 22 bp, synthetic construct
  misc_feature 1..22: note = chemically synthesized
  source 1..22: mol_type = other DNA
tccagtgggagtgtgtgtttag

SEQ ID NO: 26772 - DNA, 22 bp, synthetic construct
  misc_feature 1..22: note = chemically synthesized
  source 1..22: mol_type = other DNA
cagtgggagtgtgtgtttagga

SEQ ID NO: 26773 - DNA, 22 bp, synthetic construct
  misc_feature 1..22: note = chemically synthesized
  source 1..22: mol_type = other DNA
aggagaggaggatctccctttc

SEQ ID NO: 26774 - DNA, 22 bp, synthetic construct
  misc_feature 1..22: note = chemically synthesized
  source 1..22: mol_type = other DNA
ggagaggaggatctccctttcc

SEQ ID NO: 26775 - DNA, 22 bp, synthetic construct
  misc_feature 1..22: note = chemically synthesized
  source 1..22: mol_type = other DNA
cctttcccacttccgcagttgg

SEQ ID NO: 26776 - DNA, 22 bp, synthetic construct
  misc_feature 1..22: note = chemically synthesized
  source 1..22: mol_type = other DNA
tcccacttccgcagttggggca

SEQ ID NO: 26777 - DNA, 22 bp, synthetic construct
  misc_feature 1..22: note = chemically synthesized
  source 1..22: mol_type = other DNA
cccacttccgcagttggggcac

SEQ ID NO: 26778 - DNA, 22 bp, synthetic construct
  misc_feature 1..22: note = chemically synthesized
  source 1..22: mol_type = other DNA
ccacttccgcagttggggcact

SEQ ID NO: 26779 - DNA, 22 bp, synthetic construct
  misc_feature 1..22: note = chemically synthesized
  source 1..22: mol_type = other DNA
ccgcagttggggcactcacagt

SEQ ID NO: 26780 - DNA, 22 bp, synthetic construct
  misc_feature 1..22: note = chemically synthesized
  source 1..22: mol_type = other DNA
cgcagttggggcactcacagta

SEQ ID NO: 26781 - DNA, 22 bp, synthetic construct
  misc_feature 1..22: note = chemically synthesized
  source 1..22: mol_type = other DNA
gggcactcacagtatttggggt

SEQ ID NO: 26782 - DNA, 22 bp, synthetic construct
  misc_feature 1..22: note = chemically synthesized
  source 1..22: mol_type = other DNA
acagtatttggggtgtctcctg

SEQ ID NO: 26783 - DNA, 22 bp, synthetic construct
  misc_feature 1..22: note = chemically synthesized
  source 1..22: mol_type = other DNA
ggggtgtctcctgggtcctgca

SEQ ID NO: 26784 - DNA, 22 bp, synthetic construct
  misc_feature 1..22: note = chemically synthesized
  source 1..22: mol_type = other DNA
gggtgtctcctgggtcctgcag

SEQ ID NO: 26785 - DNA, 22 bp, synthetic construct
  misc_feature 1..22: note = chemically synthesized
  source 1..22: mol_type = other DNA
ctgggtcctgcaggagcaatct

SEQ ID NO: 26786 - DNA, 22 bp, synthetic construct
  misc_feature 1..22: note = chemically synthesized
  source 1..22: mol_type = other DNA
ggtcctgcaggagcaatctact

SEQ ID NO: 26787 - DNA, 22 bp, synthetic construct
  misc_feature 1..22: note = chemically synthesized
  source 1..22: mol_type = other DNA
caggagcaatctacttccttca

SEQ ID NO: 26788 - DNA, 22 bp, synthetic construct
  misc_feature 1..22: note = chemically synthesized
  source 1..22: mol_type = other DNA
cttccttcagagggtctgtggg

SEQ ID NO: 26789 - DNA, 22 bp, synthetic construct
  misc_feature 1..22: note = chemically synthesized
  source 1..22: mol_type = other DNA
ccttcagagggtctgtgggtcc

SEQ ID NO: 26790 - DNA, 22 bp, synthetic construct
  misc_feature 1..22: note = chemically synthesized
  source 1..22: mol_type = other DNA
cttcagagggtctgtgggtcct

SEQ ID NO: 26791 - DNA, 22 bp, synthetic construct
  misc_feature 1..22: note = chemically synthesized
  source 1..22: mol_type = other DNA
cagagggtctgtgggtcctctc

SEQ ID NO: 26792 - DNA, 22 bp, synthetic construct
  misc_feature 1..22: note = chemically synthesized
  source 1..22: mol_type = other DNA
agagggtctgtgggtcctctca

SEQ ID NO: 26793 - DNA, 22 bp, synthetic construct
  misc_feature 1..22: note = chemically synthesized
  source 1..22: mol_type = other DNA
tgggtcctctcaggattgctgg

SEQ ID NO: 26794 - DNA, 22 bp, synthetic construct
  misc_feature 1..22: note = chemically synthesized
  source 1..22: mol_type = other DNA
tcaggattgctggtttgttctt

SEQ ID NO: 26795 - DNA, 22 bp, synthetic construct
  misc_feature 1..22: note = chemically synthesized
  source 1..22: mol_type = other DNA
aggattgctggtttgttcttgc

SEQ ID NO: 26796 - DNA, 22 bp, synthetic construct
  misc_feature 1..22: note = chemically synthesized
  source 1..22: mol_type = other DNA
ctggtttgttcttgcagtctat

SEQ ID NO: 26797 - DNA, 22 bp, synthetic construct
  misc_feature 1..22: note = chemically synthesized
  source 1..22: mol_type = other DNA
gtttgttcttgcagtctatctg

SEQ ID NO: 26798 - DNA, 22 bp, synthetic construct
  misc_feature 1..22: note = chemically synthesized
  source 1..22: mol_type = other DNA
gttcttgcagtctatctgcagc

SEQ ID NO: 26799 - DNA, 22 bp, synthetic construct
  misc_feature 1..22: note = chemically synthesized
  source 1..22: mol_type = other DNA
ttcttgcagtctatctgcagct

SEQ ID NO: 26800 - DNA, 22 bp, synthetic construct
  misc_feature 1..22: note = chemically synthesized
  source 1..22: mol_type = other DNA
ttgcagtctatctgcagctaaa

SEQ ID NO: 26801 - DNA, 22 bp, synthetic construct
  misc_feature 1..22: note = chemically synthesized
  source 1..22: mol_type = other DNA
gcagtctatctgcagctaaaat

SEQ ID NO: 26802 - DNA, 22 bp, synthetic construct
  misc_feature 1..22: note = chemically synthesized
  source 1..22: mol_type = other DNA
cagtctatctgcagctaaaatt

SEQ ID NO: 26803 - DNA, 22 bp, synthetic construct
  misc_feature 1..22: note = chemically synthesized
  source 1..22: mol_type = other DNA
tctgcagctaaaattcacaatg

SEQ ID NO: 26804 - DNA, 22 bp, synthetic construct
  misc_feature 1..22: note = chemically synthesized
  source 1..22: mol_type = other DNA
cagctaaaattcacaatgcgag

SEQ ID NO: 26805 - DNA, 22 bp, synthetic construct
  misc_feature 1..22: note = chemically synthesized
  source 1..22: mol_type = other DNA
aaattcacaatgcgagcctcca

SEQ ID NO: 26806 - DNA, 22 bp, synthetic construct
  misc_feature 1..22: note = chemically synthesized
  source 1..22: mol_type = other DNA
acaatgcgagcctccacatgct

SEQ ID NO: 26807 - DNA, 22 bp, synthetic construct
  misc_feature 1..22: note = chemically synthesized
  source 1..22: mol_type = other DNA
cacatgctgctctgtccatctg

SEQ ID NO: 26808 - DNA, 22 bp, synthetic construct
  misc_feature 1..22: note = chemically synthesized
  source 1..22: mol_type = other DNA
ctctgtccatctgagttggagc

SEQ ID NO: 26809 - DNA, 22 bp, synthetic construct
  misc_feature 1..22: note = chemically synthesized
  source 1..22: mol_type = other DNA
tgtccatctgagttggagctgc

SEQ ID NO: 26810 - DNA, 22 bp, synthetic construct
  misc_feature 1..22: note = chemically synthesized
  source 1..22: mol_type = other DNA
tccatctgagttggagctgcaa

SEQ ID NO: 26811 - DNA, 22 bp, synthetic construct
  misc_feature 1..22: note = chemically synthesized
  source 1..22: mol_type = other DNA
agttggagctgcaatctaggcc

SEQ ID NO: 26812 - DNA, 22 bp, synthetic construct
  misc_feature 1..22: note = chemically synthesized
  source 1..22: mol_type = other DNA
gagctgcaatctaggcctacct

SEQ ID NO: 26813 - DNA, 22 bp, synthetic construct
  misc_feature 1..22: note = chemically synthesized
  source 1..22: mol_type = other DNA
caatctaggcctacctcccatc

SEQ ID NO: 26814 - DNA, 22 bp, synthetic construct
  misc_feature 1..22: note = chemically synthesized
  source 1..22: mol_type = other DNA
ggcctacctcccatccgccaag

SEQ ID NO: 26815 - DNA, 22 bp, synthetic construct
  misc_feature 1..22: note = chemically synthesized
  source 1..22: mol_type = other DNA
cctcccatccgccaagatcctg

SEQ ID NO: 26816 - DNA, 22 bp, synthetic construct
  misc_feature 1..22: note = chemically synthesized
  source 1..22: mol_type = other DNA
ccatccgccaagatcctgagaa

SEQ ID NO: 26817 - DNA, 22 bp, synthetic construct
  misc_feature 1..22: note = chemically synthesized
  source 1..22: mol_type = other DNA
agaagttggggattatatttca

SEQ ID NO: 26818 - DNA, 22 bp, synthetic construct
  misc_feature 1..22: note = chemically synthesized
  source 1..22: mol_type = other DNA
gggattatatttcaacatgaga

SEQ ID NO: 26819 - DNA, 22 bp, synthetic construct
  misc_feature 1..22: note = chemically synthesized
  source 1..22: mol_type = other DNA
tatttcaacatgagatttggag

SEQ ID NO: 26820 - DNA, 22 bp, synthetic construct
  misc_feature 1..22: note = chemically synthesized
  source 1..22: mol_type = other DNA
caacatgagatttggagggaac

SEQ ID NO: 26821 - DNA, 22 bp, synthetic construct
  misc_feature 1..22: note = chemically synthesized
  source 1..22: mol_type = other DNA
aacatgagatttggagggaaca

SEQ ID NO: 26822 - DNA, 22 bp, synthetic construct
  misc_feature 1..22: note = chemically synthesized
  source 1..22: mol_type = other DNA
ggagggaacaaacatccaaacc

SEQ ID NO: 26823 - DNA, 22 bp, synthetic construct
  misc_feature 1..22: note = chemically synthesized
  source 1..22: mol_type = other DNA
gagggaacaaacatccaaacca

SEQ ID NO: 26824 - DNA, 22 bp, synthetic construct
  misc_feature 1..22: note = chemically synthesized
  source 1..22: mol_type = other DNA
tattcttttgcacatggatatc

SEQ ID NO: 26825 - DNA, 22 bp, synthetic construct
  misc_feature 1..22: note = chemically synthesized
  source 1..22: mol_type = other DNA
attcttttgcacatggatatcc

SEQ ID NO: 26826 - DNA, 22 bp, synthetic construct
  misc_feature 1..22: note = chemically synthesized
  source 1..22: mol_type = other DNA
ttcttttgcacatggatatcca

SEQ ID NO: 26827 - DNA, 22 bp, synthetic construct
  misc_feature 1..22: note = chemically synthesized
  source 1..22: mol_type = other DNA
ttttgcacatggatatccaatg

SEQ ID NO: 26828 - DNA, 22 bp, synthetic construct
  misc_feature 1..22: note = chemically synthesized
  source 1..22: mol_type = other DNA
ttgcacatggatatccaatgga

SEQ ID NO: 26829 - DNA, 22 bp, synthetic construct
  misc_feature 1..22: note = chemically synthesized
  source 1..22: mol_type = other DNA
tgcacatggatatccaatggat

SEQ ID NO: 26830 - DNA, 22 bp, synthetic construct
  misc_feature 1..22: note = chemically synthesized
  source 1..22: mol_type = other DNA
gcacatggatatccaatggata

SEQ ID NO: 26831 - DNA, 22 bp, synthetic construct
  misc_feature 1..22: note = chemically synthesized
  source 1..22: mol_type = other DNA
cacatggatatccaatggatat

SEQ ID NO: 26832 - DNA, 22 bp, synthetic construct
  misc_feature 1..22: note = chemically synthesized
  source 1..22: mol_type = other DNA
tttcagcaccatttcttgaaca

SEQ ID NO: 26833 - DNA, 22 bp, synthetic construct
  misc_feature 1..22: note = chemically synthesized
  source 1..22: mol_type = other DNA
ttcagcaccatttcttgaacac

SEQ ID NO: 26834 - DNA, 22 bp, synthetic construct
  misc_feature 1..22: note = chemically synthesized
  source 1..22: mol_type = other DNA
tcagcaccatttcttgaacact

SEQ ID NO: 26835 - DNA, 22 bp, synthetic construct
  misc_feature 1..22: note = chemically synthesized
  source 1..22: mol_type = other DNA
cagcaccatttcttgaacactg

SEQ ID NO: 26836 - DNA, 22 bp, synthetic construct
  misc_feature 1..22: note = chemically synthesized
  source 1..22: mol_type = other DNA
agcaccatttcttgaacactgt

SEQ ID NO: 26837 - DNA, 22 bp, synthetic construct
  misc_feature 1..22: note = chemically synthesized
  source 1..22: mol_type = other DNA
cttgaacactgtgtcctttcct

SEQ ID NO: 26838 - DNA, 22 bp, synthetic construct
  misc_feature 1..22: note = chemically synthesized
  source 1..22: mol_type = other DNA
ttgaacactgtgtcctttcctc

SEQ ID NO: 26839 - DNA, 22 bp, synthetic construct
  misc_feature 1..22: note = chemically synthesized
  source 1..22: mol_type = other DNA
gaacactgtgtcctttcctcaa

SEQ ID NO: 26840 - DNA, 22 bp, synthetic construct
  misc_feature 1..22: note = chemically synthesized
  source 1..22: mol_type = other DNA
aacactgtgtcctttcctcaat

SEQ ID NO: 26841 - DNA, 22 bp, synthetic construct
  misc_feature 1..22: note = chemically synthesized
  source 1..22: mol_type = other DNA
tgtcctttcctcaatgtatatt

SEQ ID NO: 26842 - DNA, 22 bp, synthetic construct
  misc_feature 1..22: note = chemically synthesized
  source 1..22: mol_type = other DNA
tcctcaatgtatattcttgtca

SEQ ID NO: 26843 - DNA, 22 bp, synthetic construct
  misc_feature 1..22: note = chemically synthesized
  source 1..22: mol_type = other DNA
cctcaatgtatattcttgtcac

SEQ ID NO: 26844 - DNA, 22 bp, synthetic construct
  misc_feature 1..22: note = chemically synthesized
  source 1..22: mol_type = other DNA
ctcaatgtatattcttgtcacc

SEQ ID NO: 26845 - DNA, 22 bp, synthetic construct
  misc_feature 1..22: note = chemically synthesized
  source 1..22: mol_type = other DNA
aatgtatattcttgtcaccttt

SEQ ID NO: 26846 - DNA, 22 bp, synthetic construct
  misc_feature 1..22: note = chemically synthesized
  source 1..22: mol_type = other DNA
ttgtcacctttgttgaaaatct

SEQ ID NO: 26847 - DNA, 22 bp, synthetic construct
  misc_feature 1..22: note = chemically synthesized
  source 1..22: mol_type = other DNA
gtcacctttgttgaaaatctgt

SEQ ID NO: 26848 - DNA, 22 bp, synthetic construct
  misc_feature 1..22: note = chemically synthesized
  source 1..22: mol_type = other DNA
tcacctttgttgaaaatctgtt

SEQ ID NO: 26849 - DNA, 22 bp, synthetic construct
  misc_feature 1..22: note = chemically synthesized
  source 1..22: mol_type = other DNA
tgttgaaaatctgttggctata

SEQ ID NO: 26850 - DNA, 22 bp, synthetic construct
  misc_feature 1..22: note = chemically synthesized
  source 1..22: mol_type = other DNA
gttgaaaatctgttggctataa

SEQ ID NO: 26851 - DNA, 22 bp, synthetic construct
  misc_feature 1..22: note = chemically synthesized
  source 1..22: mol_type = other DNA
ttgaaaatctgttggctataaa

SEQ ID NO: 26852 - DNA, 22 bp, synthetic construct
  misc_feature 1..22: note = chemically synthesized
  source 1..22: mol_type = other DNA
aaaatctgttggctataaatat

SEQ ID NO: 26853 - DNA, 22 bp, synthetic construct
  misc_feature 1..22: note = chemically synthesized
  source 1..22: mol_type = other DNA
ttggctataaatatgtggatgc

SEQ ID NO: 26854 - DNA, 22 bp, synthetic construct
  misc_feature 1..22: note = chemically synthesized
  source 1..22: mol_type = other DNA
gctataaatatgtggatgcatt

SEQ ID NO: 26855 - DNA, 22 bp, synthetic construct
  misc_feature 1..22: note = chemically synthesized
  source 1..22: mol_type = other DNA
taaatatgtggatgcatttcta

SEQ ID NO: 26856 - DNA, 22 bp, synthetic construct
  misc_feature 1..22: note = chemically synthesized
  source 1..22: mol_type = other DNA
ctaggttctctattctcttcca

SEQ ID NO: 26857 - DNA, 22 bp, synthetic construct
  misc_feature 1..22: note = chemically synthesized
  source 1..22: mol_type = other DNA
taggttctctattctcttccat

SEQ ID NO: 26858 - DNA, 22 bp, synthetic construct
  misc_feature 1..22: note = chemically synthesized
  source 1..22: mol_type = other DNA
ggttctctattctcttccattg

SEQ ID NO: 26859 - DNA, 22 bp, synthetic construct
  misc_feature 1..22: note = chemically synthesized
  source 1..22: mol_type = other DNA
tctattctcttccattggtcta

SEQ ID NO: 26860 - DNA, 22 bp, synthetic construct
  misc_feature 1..22: note = chemically synthesized
  source 1..22: mol_type = other DNA
tattctcttccattggtctaag

SEQ ID NO: 26861 - DNA, 22 bp, synthetic construct
  misc_feature 1..22: note = chemically synthesized
  source 1..22: mol_type = other DNA
ttctcttccattggtctaagtg

SEQ ID NO: 26862 - DNA, 22 bp, synthetic construct
  misc_feature 1..22: note = chemically synthesized
  source 1..22: mol_type = other DNA
tcttccattggtctaagtgtct

SEQ ID NO: 26863 - DNA, 22 bp, synthetic construct
  misc_feature 1..22: note = chemically synthesized
  source 1..22: mol_type = other DNA
ttccattggtctaagtgtctgt

SEQ ID NO: 26864 - DNA, 22 bp, synthetic construct
  misc_feature 1..22: note = chemically synthesized
  source 1..22: mol_type = other DNA
ccattggtctaagtgtctgttc

SEQ ID NO: 26865 - DNA, 22 bp, synthetic construct
  misc_feature 1..22: note = chemically synthesized
  source 1..22: mol_type = other DNA
cattggtctaagtgtctgttct

SEQ ID NO: 26866 - DNA, 22 bp, synthetic construct
  misc_feature 1..22: note = chemically synthesized
  source 1..22: mol_type = other DNA
gtctaagtgtctgttctaatgt

SEQ ID NO: 26867 - DNA, 22 bp, synthetic construct
  misc_feature 1..22: note = chemically synthesized
  source 1..22: mol_type = other DNA
agtgtctgttctaatgtcagta

SEQ ID NO: 26868 - DNA, 22 bp, synthetic construct
  misc_feature 1..22: note = chemically synthesized
  source 1..22: mol_type = other DNA
ttctaatgtcagtatcatgctg

SEQ ID NO: 26869 - DNA, 22 bp, synthetic construct
  misc_feature 1..22: note = chemically synthesized
  source 1..22: mol_type = other DNA
taatgtcagtatcatgctgttt

SEQ ID NO: 26870 - DNA, 22 bp, synthetic construct
  misc_feature 1..22: note = chemically synthesized
  source 1..22: mol_type = other DNA
atgtcagtatcatgctgtttag

SEQ ID NO: 26871 - DNA, 22 bp, synthetic construct
  misc_feature 1..22: note = chemically synthesized
  source 1..22: mol_type = other DNA
tttaggttcctatacttttgta

SEQ ID NO: 26872 - DNA, 22 bp, synthetic construct
  misc_feature 1..22: note = chemically synthesized
  source 1..22: mol_type = other DNA
aggttcctatacttttgtaata

SEQ ID NO: 26873 - DNA, 22 bp, synthetic construct
  misc_feature 1..22: note = chemically synthesized
  source 1..22: mol_type = other DNA
ggttcctatacttttgtaatat

SEQ ID NO: 26874 - DNA, 22 bp, synthetic construct
  misc_feature 1..22: note = chemically synthesized
  source 1..22: mol_type = other DNA
ctatacttttgtaatatacttt

SEQ ID NO: 26875 - DNA, 22 bp, synthetic construct
  misc_feature 1..22: note = chemically synthesized
  source 1..22: mol_type = other DNA
tacttttgtaatatactttgaa

SEQ ID NO: 26876 - DNA, 22 bp, synthetic construct
  misc_feature 1..22: note = chemically synthesized
  source 1..22: mol_type = other DNA
ttgtaatatactttgaaatcag

SEQ ID NO: 26877 - DNA, 22 bp, synthetic construct
  misc_feature 1..22: note = chemically synthesized
  source 1..22: mol_type = other DNA
tgtaatatactttgaaatcagg

SEQ ID NO: 26878 - DNA, 22 bp, synthetic construct
  misc_feature 1..22: note = chemically synthesized
  source 1..22: mol_type = other DNA
gtaatatactttgaaatcaggt

SEQ ID NO: 26879 - DNA, 22 bp, synthetic construct
  misc_feature 1..22: note = chemically synthesized
  source 1..22: mol_type = other DNA
taatatactttgaaatcaggta

SEQ ID NO: 26880 - DNA, 22 bp, synthetic construct
  misc_feature 1..22: note = chemically synthesized
  source 1..22: mol_type = other DNA
tgaaatcaggtagtatgatacc

SEQ ID NO: 26881 - DNA, 22 bp, synthetic construct
  misc_feature 1..22: note = chemically synthesized
  source 1..22: mol_type = other DNA
gaaatcaggtagtatgatacct

SEQ ID NO: 26882 - DNA, 22 bp, synthetic construct
  misc_feature 1..22: note = chemically synthesized
  source 1..22: mol_type = other DNA
aaatcaggtagtatgatacctc

SEQ ID NO: 26883 - DNA, 22 bp, synthetic construct
  misc_feature 1..22: note = chemically synthesized
  source 1..22: mol_type = other DNA
tagcattgttcttttttcacag

SEQ ID NO: 26884 - DNA, 22 bp, synthetic construct
  misc_feature 1..22: note = chemically synthesized
  source 1..22: mol_type = other DNA
gcattgttcttttttcacagga

SEQ ID NO: 26885 - DNA, 22 bp, synthetic construct
  misc_feature 1..22: note = chemically synthesized
  source 1..22: mol_type = other DNA
ttcttttttcacaggatgactt

SEQ ID NO: 26886 - DNA, 22 bp, synthetic construct
  misc_feature 1..22: note = chemically synthesized
  source 1..22: mol_type = other DNA
ttttttcacaggatgactttgg

SEQ ID NO: 26887 - DNA, 22 bp, synthetic construct
  misc_feature 1..22: note = chemically synthesized
  source 1..22: mol_type = other DNA
ttttcacaggatgactttggct

SEQ ID NO: 26888 - DNA, 22 bp, synthetic construct
  misc_feature 1..22: note = chemically synthesized
  source 1..22: mol_type = other DNA
tttcacaggatgactttggcta

SEQ ID NO: 26889 - DNA, 22 bp, synthetic construct
  misc_feature 1..22: note = chemically synthesized
  source 1..22: mol_type = other DNA
ttcacaggatgactttggctac

SEQ ID NO: 26890 - DNA, 22 bp, synthetic construct
  misc_feature 1..22: note = chemically synthesized
  source 1..22: mol_type = other DNA
tcacaggatgactttggctact

SEQ ID NO: 26891 - DNA, 22 bp, synthetic construct
  misc_feature 1..22: note = chemically synthesized
  source 1..22: mol_type = other DNA
cacaggatgactttggctactg

SEQ ID NO: 26892 - DNA, 22 bp, synthetic construct
  misc_feature 1..22: note = chemically synthesized
  source 1..22: mol_type = other DNA
acaggatgactttggctactgg

SEQ ID NO: 26893 - DNA, 22 bp, synthetic construct
  misc_feature 1..22: note = chemically synthesized
  source 1..22: mol_type = other DNA
tggctactggagctatttttta

SEQ ID NO: 26894 - DNA, 22 bp, synthetic construct
  misc_feature 1..22: note = chemically synthesized
  source 1..22: mol_type = other DNA
ggctactggagctattttttaa

SEQ ID NO: 26895 - DNA, 22 bp, synthetic construct
  misc_feature 1..22: note = chemically synthesized
  source 1..22: mol_type = other DNA
gctactggagctattttttaat

SEQ ID NO: 26896 - DNA, 22 bp, synthetic construct
  misc_feature 1..22: note = chemically synthesized
  source 1..22: mol_type = other DNA
ctggagctattttttaatttca

SEQ ID NO: 26897 - DNA, 22 bp, synthetic construct
  misc_feature 1..22: note = chemically synthesized
  source 1..22: mol_type = other DNA
gagctattttttaatttcatac

SEQ ID NO: 26898 - DNA, 22 bp, synthetic construct
  misc_feature 1..22: note = chemically synthesized
  source 1..22: mol_type = other DNA
ttttttaatttcatacaaattt

SEQ ID NO: 26899 - DNA, 22 bp, synthetic construct
  misc_feature 1..22: note = chemically synthesized
  source 1..22: mol_type = other DNA
tttaatttcatacaaattttag

SEQ ID NO: 26900 - DNA, 22 bp, synthetic construct
  misc_feature 1..22: note = chemically synthesized
  source 1..22: mol_type = other DNA
ttaatttcatacaaattttaga

SEQ ID NO: 26901 - DNA, 22 bp, synthetic construct
  misc_feature 1..22: note = chemically synthesized
  source 1..22: mol_type = other DNA
taatttcatacaaattttagat

SEQ ID NO: 26902 - DNA, 22 bp, synthetic construct
  misc_feature 1..22: note = chemically synthesized
  source 1..22: mol_type = other DNA
aatttcatacaaattttagatt

SEQ ID NO: 26903 - DNA, 22 bp, synthetic construct
  misc_feature 1..22: note = chemically synthesized
  source 1..22: mol_type = other DNA
atttcatacaaattttagattg

SEQ ID NO: 26904 - DNA, 22 bp, synthetic construct
  misc_feature 1..22: note = chemically synthesized
  source 1..22: mol_type = other DNA
catacaaattttagattggttt

SEQ ID NO: 26905 - DNA, 22 bp, synthetic construct
  misc_feature 1..22: note = chemically synthesized
  source 1..22: mol_type = other DNA
atacaaattttagattggtttt

SEQ ID NO: 26906 - DNA, 22 bp, synthetic construct
  misc_feature 1..22: note = chemically synthesized
  source 1..22: mol_type = other DNA
tagattggtttttccatttctg

SEQ ID NO: 26907 - DNA, 22 bp, synthetic construct
  misc_feature 1..22: note = chemically synthesized
  source 1..22: mol_type = other DNA
agattggtttttccatttctgt

SEQ ID NO: 26908 - DNA, 22 bp, synthetic construct
  misc_feature 1..22: note = chemically synthesized
  source 1..22: mol_type = other DNA
gattggtttttccatttctgtg

SEQ ID NO: 26909 - DNA, 22 bp, synthetic construct
  misc_feature 1..22: note = chemically synthesized
  source 1..22: mol_type = other DNA
gtttttccatttctgtgaaaaa

SEQ ID NO: 26910 - DNA, 22 bp, synthetic construct
  misc_feature 1..22: note = chemically synthesized
  source 1..22: mol_type = other DNA
ttccatttctgtgaaaaatgac

SEQ ID NO: 26911 - DNA, 22 bp, synthetic construct
  misc_feature 1..22: note = chemically synthesized
  source 1..22: mol_type = other DNA
tccatttctgtgaaaaatgaca

SEQ ID NO: 26912 - DNA, 22 bp, synthetic construct
  misc_feature 1..22: note = chemically synthesized
  source 1..22: mol_type = other DNA
ccatttctgtgaaaaatgacat

SEQ ID NO: 26913 - DNA, 22 bp, synthetic construct
  misc_feature 1..22: note = chemically synthesized
  source 1..22: mol_type = other DNA
catttctgtgaaaaatgacatt

SEQ ID NO: 26914 - DNA, 22 bp, synthetic construct
  misc_feature 1..22: note = chemically synthesized
  source 1..22: mol_type = other DNA
ctgtgaaaaatgacattgctat

SEQ ID NO: 26915 - DNA, 22 bp, synthetic construct
  misc_feature 1..22: note = chemically synthesized
  source 1..22: mol_type = other DNA
tgtgaaaaatgacattgctatt

SEQ ID NO: 26916 - DNA, 22 bp, synthetic construct
  misc_feature 1..22: note = chemically synthesized
  source 1..22: mol_type = other DNA
tgaaaaatgacattgctatttt

SEQ ID NO: 26917 - DNA, 22 bp, synthetic construct
  misc_feature 1..22: note = chemically synthesized
  source 1..22: mol_type = other DNA
ctattttgatagcggtcatata

SEQ ID NO: 26918 - DNA, 22 bp, synthetic construct
  misc_feature 1..22: note = chemically synthesized
  source 1..22: mol_type = other DNA
ttttgatagcggtcatatagaa

SEQ ID NO: 26919 - DNA, 22 bp, synthetic construct
  misc_feature 1..22: note = chemically synthesized
  source 1..22: mol_type = other DNA
tgatagcggtcatatagaatct

SEQ ID NO: 26920 - DNA, 22 bp, synthetic construct
  misc_feature 1..22: note = chemically synthesized
  source 1..22: mol_type = other DNA
gatagcggtcatatagaatctg

SEQ ID NO: 26921 - DNA, 22 bp, synthetic construct
  misc_feature 1..22: note = chemically synthesized
  source 1..22: mol_type = other DNA
atagcggtcatatagaatctgt

SEQ ID NO: 26922 - DNA, 22 bp, synthetic construct
  misc_feature 1..22: note = chemically synthesized
  source 1..22: mol_type = other DNA
tagattgctttgggtagtatgg

SEQ ID NO: 26923 - DNA, 22 bp, synthetic construct
  misc_feature 1..22: note = chemically synthesized
  source 1..22: mol_type = other DNA
ctttgggtagtatggccatttt

SEQ ID NO: 26924 - DNA, 22 bp, synthetic construct
  misc_feature 1..22: note = chemically synthesized
  source 1..22: mol_type = other DNA
tgggtagtatggccattttaac

SEQ ID NO: 26925 - DNA, 22 bp, synthetic construct
  misc_feature 1..22: note = chemically synthesized
  source 1..22: mol_type = other DNA
gggtagtatggccattttaaca

SEQ ID NO: 26926 - DNA, 22 bp, synthetic construct
  misc_feature 1..22: note = chemically synthesized
  source 1..22: mol_type = other DNA
ggtagtatggccattttaacaa

SEQ ID NO: 26927 - DNA, 22 bp, synthetic construct
  misc_feature 1..22: note = chemically synthesized
  source 1..22: mol_type = other DNA
taacaatattaatttttctgat

SEQ ID NO: 26928 - DNA, 22 bp, synthetic construct
  misc_feature 1..22: note = chemically synthesized
  source 1..22: mol_type = other DNA
aacaatattaatttttctgatc

SEQ ID NO: 26929 - DNA, 22 bp, synthetic construct
  misc_feature 1..22: note = chemically synthesized
  source 1..22: mol_type = other DNA
acaatattaatttttctgatcc

SEQ ID NO: 26930 - DNA, 22 bp, synthetic construct
  misc_feature 1..22: note = chemically synthesized
  source 1..22: mol_type = other DNA
atttttctgatccatgaacata

SEQ ID NO: 26931 - DNA, 22 bp, synthetic construct
  misc_feature 1..22: note = chemically synthesized
  source 1..22: mol_type = other DNA
ttctgatccatgaacataggat

SEQ ID NO: 26932 - DNA, 22 bp, synthetic construct
  misc_feature 1..22: note = chemically synthesized
  source 1..22: mol_type = other DNA
tctgatccatgaacataggata

SEQ ID NO: 26933 - DNA, 22 bp, synthetic construct
  misc_feature 1..22: note = chemically synthesized
  source 1..22: mol_type = other DNA
ctgatccatgaacataggatat

SEQ ID NO: 26934 - DNA, 22 bp, synthetic construct
  misc_feature 1..22: note = chemically synthesized
  source 1..22: mol_type = other DNA
tgatccatgaacataggatatc

SEQ ID NO: 26935 - DNA, 22 bp, synthetic construct
  misc_feature 1..22: note = chemically synthesized
  source 1..22: mol_type = other DNA
atccatgaacataggatatctc

SEQ ID NO: 26936 - DNA, 22 bp, synthetic construct
  misc_feature 1..22: note = chemically synthesized
  source 1..22: mol_type = other DNA
tccatttgtttctgtccttttc

SEQ ID NO: 26937 - DNA, 22 bp, synthetic construct
  misc_feature 1..22: note = chemically synthesized
  source 1..22: mol_type = other DNA
catttgtttctgtccttttcaa

SEQ ID NO: 26938 - DNA, 22 bp, synthetic construct
  misc_feature 1..22: note = chemically synthesized
  source 1..22: mol_type = other DNA
gtttctgtccttttcaattctt

SEQ ID NO: 26939 - DNA, 22 bp, synthetic construct
  misc_feature 1..22: note = chemically synthesized
  source 1..22: mol_type = other DNA
tttctgtccttttcaattcttt

SEQ ID NO: 26940 - DNA, 22 bp, synthetic construct
  misc_feature 1..22: note = chemically synthesized
  source 1..22: mol_type = other DNA
ctgtccttttcaattcttttat

SEQ ID NO: 26941 - DNA, 22 bp, synthetic construct
  misc_feature 1..22: note = chemically synthesized
  source 1..22: mol_type = other DNA
tgtccttttcaattcttttatc

SEQ ID NO: 26942 - DNA, 22 bp, synthetic construct
  misc_feature 1..22: note = chemically synthesized
  source 1..22: mol_type = other DNA
tccttttcaattcttttatcag

SEQ ID NO: 26943 - DNA, 22 bp, synthetic construct
  misc_feature 1..22: note = chemically synthesized
  source 1..22: mol_type = other DNA
ttcaattcttttatcagtgttt

SEQ ID NO: 26944 - DNA, 22 bp, synthetic construct
  misc_feature 1..22: note = chemically synthesized
  source 1..22: mol_type = other DNA
tcaattcttttatcagtgtttt

SEQ ID NO: 26945 - DNA, 22 bp, synthetic construct
  misc_feature 1..22: note = chemically synthesized
  source 1..22: mol_type = other DNA
caattcttttatcagtgttttg

SEQ ID NO: 26946 - DNA, 22 bp, synthetic construct
  misc_feature 1..22: note = chemically synthesized
  source 1..22: mol_type = other DNA
aattcttttatcagtgttttgt

SEQ ID NO: 26947 - DNA, 22 bp, synthetic construct
  misc_feature 1..22: note = chemically synthesized
  source 1..22: mol_type = other DNA
ttttatcagtgttttgtagttt

SEQ ID NO: 26948 - DNA, 22 bp, synthetic construct
  misc_feature 1..22: note = chemically synthesized
  source 1..22: mol_type = other DNA
ttatcagtgttttgtagttttc

SEQ ID NO: 26949 - DNA, 22 bp, synthetic construct
  misc_feature 1..22: note = chemically synthesized
  source 1..22: mol_type = other DNA
tatcagtgttttgtagttttcc

SEQ ID NO: 26950 - DNA, 22 bp, synthetic construct
  misc_feature 1..22: note = chemically synthesized
  source 1..22: mol_type = other DNA
atcagtgttttgtagttttccg

SEQ ID NO: 26951 - DNA, 22 bp, synthetic construct
  misc_feature 1..22: note = chemically synthesized
  source 1..22: mol_type = other DNA
tcagtgttttgtagttttccga

SEQ ID NO: 26952 - DNA, 22 bp, synthetic construct
  misc_feature 1..22: note = chemically synthesized
  source 1..22: mol_type = other DNA
tgtagttttccgaatagaggtt

SEQ ID NO: 26953 - DNA, 22 bp, synthetic construct
  misc_feature 1..22: note = chemically synthesized
  source 1..22: mol_type = other DNA
gtagttttccgaatagaggttt

SEQ ID NO: 26954 - DNA, 22 bp, synthetic construct
  misc_feature 1..22: note = chemically synthesized
  source 1..22: mol_type = other DNA
tagttttccgaatagaggtttt

SEQ ID NO: 26955 - DNA, 22 bp, synthetic construct
  misc_feature 1..22: note = chemically synthesized
  source 1..22: mol_type = other DNA
tccgaatagaggtttttcggtt

SEQ ID NO: 26956 - DNA, 22 bp, synthetic construct
  misc_feature 1..22: note = chemically synthesized
  source 1..22: mol_type = other DNA
ccgaatagaggtttttcggttc

SEQ ID NO: 26957 - DNA, 22 bp, synthetic construct
  misc_feature 1..22: note = chemically synthesized
  source 1..22: mol_type = other DNA
cgaatagaggtttttcggttcc

SEQ ID NO: 26958 - DNA, 22 bp, synthetic construct
  misc_feature 1..22: note = chemically synthesized
  source 1..22: mol_type = other DNA
ttcggttccttggttaaattta

SEQ ID NO: 26959 - DNA, 22 bp, synthetic construct
  misc_feature 1..22: note = chemically synthesized
  source 1..22: mol_type = other DNA
tcggttccttggttaaatttat

SEQ ID NO: 26960 - DNA, 22 bp, synthetic construct
  misc_feature 1..22: note = chemically synthesized
  source 1..22: mol_type = other DNA
cggttccttggttaaatttatc

SEQ ID NO: 26961 - DNA, 22 bp, synthetic construct
  misc_feature 1..22: note = chemically synthesized
  source 1..22: mol_type = other DNA
ggttccttggttaaatttatcc

SEQ ID NO: 26962 - DNA, 22 bp, synthetic construct
  misc_feature 1..22: note = chemically synthesized
  source 1..22: mol_type = other DNA
cttggttaaatttatccctaaa

SEQ ID NO: 26963 - DNA, 22 bp, synthetic construct
  misc_feature 1..22: note = chemically synthesized
  source 1..22: mol_type = other DNA
ggttaaatttatccctaaatat

SEQ ID NO: 26964 - DNA, 22 bp, synthetic construct
  misc_feature 1..22: note = chemically synthesized
  source 1..22: mol_type = other DNA
gttaaatttatccctaaatatt

SEQ ID NO: 26965 - DNA, 22 bp, synthetic construct
  misc_feature 1..22: note = chemically synthesized
  source 1..22: mol_type = other DNA
aatttatccctaaatattttat

SEQ ID NO: 26966 - DNA, 22 bp, synthetic construct
  misc_feature 1..22: note = chemically synthesized
  source 1..22: mol_type = other DNA
atccctaaatattttatttttt

SEQ ID NO: 26967 - DNA, 22 bp, synthetic construct
  misc_feature 1..22: note = chemically synthesized
  source 1..22: mol_type = other DNA
tccctaaatattttatttttta

SEQ ID NO: 26968 - DNA, 22 bp, synthetic construct
  misc_feature 1..22: note = chemically synthesized
  source 1..22: mol_type = other DNA
aatattttattttttagctatt

SEQ ID NO: 26969 - DNA, 22 bp, synthetic construct
  misc_feature 1..22: note = chemically synthesized
  source 1..22: mol_type = other DNA
tattttttagctattgtaaatg

SEQ ID NO: 26970 - DNA, 22 bp, synthetic construct
  misc_feature 1..22: note = chemically synthesized
  source 1..22: mol_type = other DNA
attttttagctattgtaaatgg

SEQ ID NO: 26971 - DNA, 22 bp, synthetic construct
  misc_feature 1..22: note = chemically synthesized
  source 1..22: mol_type = other DNA
ttttttagctattgtaaatggg

SEQ ID NO: 26972 - DNA, 22 bp, synthetic construct
  misc_feature 1..22: note = chemically synthesized
  source 1..22: mol_type = other DNA
tttagctattgtaaatgggatt

SEQ ID NO: 26973 - DNA, 22 bp, synthetic construct
  misc_feature 1..22: note = chemically synthesized
  source 1..22: mol_type = other DNA
ttagctattgtaaatgggattg

SEQ ID NO: 26974 - DNA, 22 bp, synthetic construct
  misc_feature 1..22: note = chemically synthesized
  source 1..22: mol_type = other DNA
tagctattgtaaatgggattgc

SEQ ID NO: 26975 - DNA, 22 bp, synthetic construct
  misc_feature 1..22: note = chemically synthesized
  source 1..22: mol_type = other DNA
agctattgtaaatgggattgcc

SEQ ID NO: 26976 - DNA, 22 bp, synthetic construct
  misc_feature 1..22: note = chemically synthesized
  source 1..22: mol_type = other DNA
gctattgtaaatgggattgcct

SEQ ID NO: 26977 - DNA, 22 bp, synthetic construct
  misc_feature 1..22: note = chemically synthesized
  source 1..22: mol_type = other DNA
ttgtaaatgggattgccttctt

SEQ ID NO: 26978 - DNA, 22 bp, synthetic construct
  misc_feature 1..22: note = chemically synthesized
  source 1..22: mol_type = other DNA
taaatgggattgccttcttaat

SEQ ID NO: 26979 - DNA, 22 bp, synthetic construct
  misc_feature 1..22: note = chemically synthesized
  source 1..22: mol_type = other DNA
ccttcttaatttccttctcagc

SEQ ID NO: 26980 - DNA, 22 bp, synthetic construct
  misc_feature 1..22: note = chemically synthesized
  source 1..22: mol_type = other DNA
cttaatttccttctcagctagt

SEQ ID NO: 26981 - DNA, 22 bp, synthetic construct
  misc_feature 1..22: note = chemically synthesized
  source 1..22: mol_type = other DNA
ttaatttccttctcagctagtt

SEQ ID NO: 26982 - DNA, 22 bp, synthetic construct
  misc_feature 1..22: note = chemically synthesized
  source 1..22: mol_type = other DNA
aatttccttctcagctagttta

SEQ ID NO: 26983 - DNA, 22 bp, synthetic construct
  misc_feature 1..22: note = chemically synthesized
  source 1..22: mol_type = other DNA
atttccttctcagctagtttat

SEQ ID NO: 26984 - DNA, 22 bp, synthetic construct
  misc_feature 1..22: note = chemically synthesized
  source 1..22: mol_type = other DNA
ccttctcagctagtttattatt

SEQ ID NO: 26985 - DNA, 22 bp, synthetic construct
  misc_feature 1..22: note = chemically synthesized
  source 1..22: mol_type = other DNA
cttctcagctagtttattattg

SEQ ID NO: 26986 - DNA, 22 bp, synthetic construct
  misc_feature 1..22: note = chemically synthesized
  source 1..22: mol_type = other DNA
ctcagctagtttattattggtg

SEQ ID NO: 26987 - DNA, 22 bp, synthetic construct
  misc_feature 1..22: note = chemically synthesized
  source 1..22: mol_type = other DNA
tcagctagtttattattggtgt

SEQ ID NO: 26988 - DNA, 22 bp, synthetic construct
  misc_feature 1..22: note = chemically synthesized
  source 1..22: mol_type = other DNA
agctagtttattattggtgtgt

SEQ ID NO: 26989 - DNA, 22 bp, synthetic construct
  misc_feature 1..22: note = chemically synthesized
  source 1..22: mol_type = other DNA
gtttattattggtgtgtagaaa

SEQ ID NO: 26990 - DNA, 22 bp, synthetic construct
  misc_feature 1..22: note = chemically synthesized
  source 1..22: mol_type = other DNA
attattggtgtgtagaaacatt

SEQ ID NO: 26991 - DNA, 22 bp, synthetic construct
  misc_feature 1..22: note = chemically synthesized
  source 1..22: mol_type = other DNA
ttattggtgtgtagaaacattg

SEQ ID NO: 26992 - DNA, 22 bp, synthetic construct
  misc_feature 1..22: note = chemically synthesized
  source 1..22: mol_type = other DNA
ttggtgtgtagaaacattgctt

SEQ ID NO: 26993 - DNA, 22 bp, synthetic construct
  misc_feature 1..22: note = chemically synthesized
  source 1..22: mol_type = other DNA
gtgtgtagaaacattgcttgtt

SEQ ID NO: 26994 - DNA, 22 bp, synthetic construct
  misc_feature 1..22: note = chemically synthesized
  source 1..22: mol_type = other DNA
cttgtttcatatgctgattttg

SEQ ID NO: 26995 - DNA, 22 bp, synthetic construct
  misc_feature 1..22: note = chemically synthesized
  source 1..22: mol_type = other DNA
gtttcatatgctgattttgtct

SEQ ID NO: 26996 - DNA, 22 bp, synthetic construct
  misc_feature 1..22: note = chemically synthesized
  source 1..22: mol_type = other DNA
tttcatatgctgattttgtctc

SEQ ID NO: 26997 - DNA, 22 bp, synthetic construct
  misc_feature 1..22: note = chemically synthesized
  source 1..22: mol_type = other DNA
catatgctgattttgtctcctg

SEQ ID NO: 26998 - DNA, 22 bp, synthetic construct
  misc_feature 1..22: note = chemically synthesized
  source 1..22: mol_type = other DNA
atatgctgattttgtctcctgt

SEQ ID NO: 26999 - DNA, 22 bp, synthetic construct
  misc_feature 1..22: note = chemically synthesized
  source 1..22: mol_type = other DNA
attttgtctcctgtaactttac

SEQ ID NO: 27000 - DNA, 22 bp, synthetic construct
  misc_feature 1..22: note = chemically synthesized
  source 1..22: mol_type = other DNA
tgtctcctgtaactttactgaa

SEQ ID NO: 27001 - DNA, 22 bp, synthetic construct
  misc_feature 1..22: note = chemically synthesized
  source 1..22: mol_type = other DNA
gtctcctgtaactttactgaat

SEQ ID NO: 27002 - DNA, 22 bp, synthetic construct
  misc_feature 1..22: note = chemically synthesized
  source 1..22: mol_type = other DNA
tctcctgtaactttactgaatt

SEQ ID NO: 27003 - DNA, 22 bp, synthetic construct
  misc_feature 1..22: note = chemically synthesized
  source 1..22: mol_type = other DNA
ctgtaactttactgaatttatt

SEQ ID NO: 27004 - DNA, 22 bp, synthetic construct
  misc_feature 1..22: note = chemically synthesized
  source 1..22: mol_type = other DNA
taactttactgaatttattttt

SEQ ID NO: 27005 - DNA, 22 bp, synthetic construct
  misc_feature 1..22: note = chemically synthesized
  source 1..22: mol_type = other DNA
tactgaatttatttttcagcgc

SEQ ID NO: 27006 - DNA, 22 bp, synthetic construct
  misc_feature 1..22: note = chemically synthesized
  source 1..22: mol_type = other DNA
actgaatttatttttcagcgct

SEQ ID NO: 27007 - DNA, 22 bp, synthetic construct
  misc_feature 1..22: note = chemically synthesized
  source 1..22: mol_type = other DNA
ctgaatttatttttcagcgcta

SEQ ID NO: 27008 - DNA, 22 bp, synthetic construct
  misc_feature 1..22: note = chemically synthesized
  source 1..22: mol_type = other DNA
aatttatttttcagcgctaaga

SEQ ID NO: 27009 - DNA, 22 bp, synthetic construct
  misc_feature 1..22: note = chemically synthesized
  source 1..22: mol_type = other DNA
atttttcagcgctaagagtgct

SEQ ID NO: 27010 - DNA, 22 bp, synthetic construct
  misc_feature 1..22: note = chemically synthesized
  source 1..22: mol_type = other DNA
tttttcagcgctaagagtgctt

SEQ ID NO: 27011 - DNA, 22 bp, synthetic construct
  misc_feature 1..22: note = chemically synthesized
  source 1..22: mol_type = other DNA
ttcagcgctaagagtgctttgg

SEQ ID NO: 27012 - DNA, 22 bp, synthetic construct
  misc_feature 1..22: note = chemically synthesized
  source 1..22: mol_type = other DNA
tcagcgctaagagtgctttggt

SEQ ID NO: 27013 - DNA, 22 bp, synthetic construct
  misc_feature 1..22: note = chemically synthesized
  source 1..22: mol_type = other DNA
cagcgctaagagtgctttggtg

SEQ ID NO: 27014 - DNA, 22 bp, synthetic construct
  misc_feature 1..22: note = chemically synthesized
  source 1..22: mol_type = other DNA
agcgctaagagtgctttggtgg

SEQ ID NO: 27015 - DNA, 22 bp, synthetic construct
  misc_feature 1..22: note = chemically synthesized
  source 1..22: mol_type = other DNA
agagtgctttggtggagtcttg

SEQ ID NO: 27016 - DNA, 22 bp, synthetic construct
  misc_feature 1..22: note = chemically synthesized
  source 1..22: mol_type = other DNA
tggtggagtcttggtttttcta

SEQ ID NO: 27017 - DNA, 22 bp, synthetic construct
  misc_feature 1..22: note = chemically synthesized
  source 1..22: mol_type = other DNA
ggtggagtcttggtttttctag

SEQ ID NO: 27018 - DNA, 22 bp, synthetic construct
  misc_feature 1..22: note = chemically synthesized
  source 1..22: mol_type = other DNA
gtggagtcttggtttttctagg

SEQ ID NO: 27019 - DNA, 22 bp, synthetic construct
  misc_feature 1..22: note = chemically synthesized
  source 1..22: mol_type = other DNA
ggtttttctaggtataaaatca

SEQ ID NO: 27020 - DNA, 22 bp, synthetic construct
  misc_feature 1..22: note = chemically synthesized
  source 1..22: mol_type = other DNA
gtttttctaggtataaaatcat

SEQ ID NO: 27021 - DNA, 22 bp, synthetic construct
  misc_feature 1..22: note = chemically synthesized
  source 1..22: mol_type = other DNA
ttctaggtataaaatcatgtca

SEQ ID NO: 27022 - DNA, 22 bp, synthetic construct
  misc_feature 1..22: note = chemically synthesized
  source 1..22: mol_type = other DNA
tctaggtataaaatcatgtcat

SEQ ID NO: 27023 - DNA, 22 bp, synthetic construct
  misc_feature 1..22: note = chemically synthesized
  source 1..22: mol_type = other DNA
ctaggtataaaatcatgtcatc

SEQ ID NO: 27024 - DNA, 22 bp, synthetic construct
  misc_feature 1..22: note = chemically synthesized
  source 1..22: mol_type = other DNA
taggtataaaatcatgtcatct

SEQ ID NO: 27025 - DNA, 22 bp, synthetic construct
  misc_feature 1..22: note = chemically synthesized
  source 1..22: mol_type = other DNA
ggtataaaatcatgtcatctgg

SEQ ID NO: 27026 - DNA, 22 bp, synthetic construct
  misc_feature 1..22: note = chemically synthesized
  source 1..22: mol_type = other DNA
gaaagatggacagtttgacttc

SEQ ID NO: 27027 - DNA, 22 bp, synthetic construct
  misc_feature 1..22: note = chemically synthesized
  source 1..22: mol_type = other DNA
gacttcatcttttcctatttgc

SEQ ID NO: 27028 - DNA, 22 bp, synthetic construct
  misc_feature 1..22: note = chemically synthesized
  source 1..22: mol_type = other DNA
acttcatcttttcctatttgca

SEQ ID NO: 27029 - DNA, 22 bp, synthetic construct
  misc_feature 1..22: note = chemically synthesized
  source 1..22: mol_type = other DNA
catcttttcctatttgcatgcc

SEQ ID NO: 27030 - DNA, 22 bp, synthetic construct
  misc_feature 1..22: note = chemically synthesized
  source 1..22: mol_type = other DNA
atcttttcctatttgcatgcct

SEQ ID NO: 27031 - DNA, 22 bp, synthetic construct
  misc_feature 1..22: note = chemically synthesized
  source 1..22: mol_type = other DNA
ttcctatttgcatgccttttct

SEQ ID NO: 27032 - DNA, 22 bp, synthetic construct
  misc_feature 1..22: note = chemically synthesized
  source 1..22: mol_type = other DNA
tcctatttgcatgccttttctt

SEQ ID NO: 27033 - DNA, 22 bp, synthetic construct
  misc_feature 1..22: note = chemically synthesized
  source 1..22: mol_type = other DNA
cctatttgcatgccttttcttt

SEQ ID NO: 27034 - DNA, 22 bp, synthetic construct
  misc_feature 1..22: note = chemically synthesized
  source 1..22: mol_type = other DNA
ctatttgcatgccttttctttc

SEQ ID NO: 27035 - DNA, 22 bp, synthetic construct
  misc_feature 1..22: note = chemically synthesized
  source 1..22: mol_type = other DNA
tttgcatgccttttctttcttt

SEQ ID NO: 27036 - DNA, 22 bp, synthetic construct
  misc_feature 1..22: note = chemically synthesized
  source 1..22: mol_type = other DNA
gcatgccttttctttctttctt

SEQ ID NO: 27037 - DNA, 22 bp, synthetic construct
  misc_feature 1..22: note = chemically synthesized
  source 1..22: mol_type = other DNA
catgccttttctttctttcttt

SEQ ID NO: 27038 - DNA, 22 bp, synthetic construct
  misc_feature 1..22: note = chemically synthesized
  source 1..22: mol_type = other DNA
ttctttctttctttctctgacc

SEQ ID NO: 27039 - DNA, 22 bp, synthetic construct
  misc_feature 1..22: note = chemically synthesized
  source 1..22: mol_type = other DNA
tctttctttctttctctgacct

SEQ ID NO: 27040 - DNA, 22 bp, synthetic construct
  misc_feature 1..22: note = chemically synthesized
  source 1..22: mol_type = other DNA
ctttctttctttctctgacctg

SEQ ID NO: 27041 - DNA, 22 bp, synthetic construct
  misc_feature 1..22: note = chemically synthesized
  source 1..22: mol_type = other DNA
tttctttctttctctgacctga

SEQ ID NO: 27042 - DNA, 22 bp, synthetic construct
  misc_feature 1..22: note = chemically synthesized
  source 1..22: mol_type = other DNA
tctttctttctctgacctgaaa

SEQ ID NO: 27043 - DNA, 22 bp, synthetic construct
  misc_feature 1..22: note = chemically synthesized
  source 1..22: mol_type = other DNA
ctttctttctctgacctgaaag

SEQ ID NO: 27044 - DNA, 22 bp, synthetic construct
  misc_feature 1..22: note = chemically synthesized
  source 1..22: mol_type = other DNA
tttctttctctgacctgaaagc

SEQ ID NO: 27045 - DNA, 22 bp, synthetic construct
  misc_feature 1..22: note = chemically synthesized
  source 1..22: mol_type = other DNA
tctttctctgacctgaaagctg

SEQ ID NO: 27046 - DNA, 22 bp, synthetic construct
  misc_feature 1..22: note = chemically synthesized
  source 1..22: mol_type = other DNA
ctttctctgacctgaaagctgt

SEQ ID NO: 27047 - DNA, 22 bp, synthetic construct
  misc_feature 1..22: note = chemically synthesized
  source 1..22: mol_type = other DNA
tttctctgacctgaaagctgtg

SEQ ID NO: 27048 - DNA, 22 bp, synthetic construct
  misc_feature 1..22: note = chemically synthesized
  source 1..22: mol_type = other DNA
tctctgacctgaaagctgtggc

SEQ ID NO: 27049 - DNA, 22 bp, synthetic construct
  misc_feature 1..22: note = chemically synthesized
  source 1..22: mol_type = other DNA
ctctgacctgaaagctgtggct

SEQ ID NO: 27050 - DNA, 22 bp, synthetic construct
  misc_feature 1..22: note = chemically synthesized
  source 1..22: mol_type = other DNA
tctgacctgaaagctgtggcta

SEQ ID NO: 27051 - DNA, 22 bp, synthetic construct
  misc_feature 1..22: note = chemically synthesized
  source 1..22: mol_type = other DNA
tgacctgaaagctgtggctagg

SEQ ID NO: 27052 - DNA, 22 bp, synthetic construct
  misc_feature 1..22: note = chemically synthesized
  source 1..22: mol_type = other DNA
acctgaaagctgtggctaggac

SEQ ID NO: 27053 - DNA, 22 bp, synthetic construct
  misc_feature 1..22: note = chemically synthesized
  source 1..22: mol_type = other DNA
aaagctgtggctaggacttcca

SEQ ID NO: 27054 - DNA, 22 bp, synthetic construct
  misc_feature 1..22: note = chemically synthesized
  source 1..22: mol_type = other DNA
tggctaggacttccagtattat

SEQ ID NO: 27055 - DNA, 22 bp, synthetic construct
  misc_feature 1..22: note = chemically synthesized
  source 1..22: mol_type = other DNA
ggacttccagtattatattgaa

SEQ ID NO: 27056 - DNA, 22 bp, synthetic construct
  misc_feature 1..22: note = chemically synthesized
  source 1..22: mol_type = other DNA
ccagtattatattgaataggag

SEQ ID NO: 27057 - DNA, 22 bp, synthetic construct
  misc_feature 1..22: note = chemically synthesized
  source 1..22: mol_type = other DNA
cagtattatattgaataggagt

SEQ ID NO: 27058 - DNA, 22 bp, synthetic construct
  misc_feature 1..22: note = chemically synthesized
  source 1..22: mol_type = other DNA
tattgaataggagtgatggaag

SEQ ID NO: 27059 - DNA, 22 bp, synthetic construct
  misc_feature 1..22: note = chemically synthesized
  source 1..22: mol_type = other DNA
aataggagtgatggaagtgggc

SEQ ID NO: 27060 - DNA, 22 bp, synthetic construct
  misc_feature 1..22: note = chemically synthesized
  source 1..22: mol_type = other DNA
attttgtttcagttcttagagg

SEQ ID NO: 27061 - DNA, 22 bp, synthetic construct
  misc_feature 1..22: note = chemically synthesized
  source 1..22: mol_type = other DNA
ttttgtttcagttcttagagga

SEQ ID NO: 27062 - DNA, 22 bp, synthetic construct
  misc_feature 1..22: note = chemically synthesized
  source 1..22: mol_type = other DNA
tgtttcagttcttagaggaaag

SEQ ID NO: 27063 - DNA, 22 bp, synthetic construct
  misc_feature 1..22: note = chemically synthesized
  source 1..22: mol_type = other DNA
gtttcagttcttagaggaaagg

SEQ ID NO: 27064 - DNA, 22 bp, synthetic construct
  misc_feature 1..22: note = chemically synthesized
  source 1..22: mol_type = other DNA
tttcagttcttagaggaaaggc

SEQ ID NO: 27065 - DNA, 22 bp, synthetic construct
  misc_feature 1..22: note = chemically synthesized
  source 1..22: mol_type = other DNA
cagttcttagaggaaaggcttc

SEQ ID NO: 27066 - DNA, 22 bp, synthetic construct
  misc_feature 1..22: note = chemically synthesized
  source 1..22: mol_type = other DNA
agttcttagaggaaaggcttcc

SEQ ID NO: 27067 - DNA, 22 bp, synthetic construct
  misc_feature 1..22: note = chemically synthesized
  source 1..22: mol_type = other DNA
ttagaggaaaggcttccagctt

SEQ ID NO: 27068 - DNA, 22 bp, synthetic construct
  misc_feature 1..22: note = chemically synthesized
  source 1..22: mol_type = other DNA
agaggaaaggcttccagctttt

SEQ ID NO: 27069 - DNA, 22 bp, synthetic construct
  misc_feature 1..22: note = chemically synthesized
  source 1..22: mol_type = other DNA
gaggaaaggcttccagcttttc

SEQ ID NO: 27070 - DNA, 22 bp, synthetic construct
  misc_feature 1..22: note = chemically synthesized
  source 1..22: mol_type = other DNA
ccagcttttcccaattcagtat

SEQ ID NO: 27071 - DNA, 22 bp, synthetic construct
  misc_feature 1..22: note = chemically synthesized
  source 1..22: mol_type = other DNA
cagcttttcccaattcagtatg

SEQ ID NO: 27072 - DNA, 22 bp, synthetic construct
  misc_feature 1..22: note = chemically synthesized
  source 1..22: mol_type = other DNA
ttcccaattcagtatgatgtta

SEQ ID NO: 27073 - DNA, 22 bp, synthetic construct
  misc_feature 1..22: note = chemically synthesized
  source 1..22: mol_type = other DNA
tcccaattcagtatgatgttag

SEQ ID NO: 27074 - DNA, 22 bp, synthetic construct
  misc_feature 1..22: note = chemically synthesized
  source 1..22: mol_type = other DNA
cccaattcagtatgatgttagc

SEQ ID NO: 27075 - DNA, 22 bp, synthetic construct
  misc_feature 1..22: note = chemically synthesized
  source 1..22: mol_type = other DNA
ccaattcagtatgatgttagct

SEQ ID NO: 27076 - DNA, 22 bp, synthetic construct
  misc_feature 1..22: note = chemically synthesized
  source 1..22: mol_type = other DNA
agtatgatgttagctgtgggtt

SEQ ID NO: 27077 - DNA, 22 bp, synthetic construct
  misc_feature 1..22: note = chemically synthesized
  source 1..22: mol_type = other DNA
gctgtgggtttgtcatatatga

SEQ ID NO: 27078 - DNA, 22 bp, synthetic construct
  misc_feature 1..22: note = chemically synthesized
  source 1..22: mol_type = other DNA
tgggtttgtcatatatgacttt

SEQ ID NO: 27079 - DNA, 22 bp, synthetic construct
  misc_feature 1..22: note = chemically synthesized
  source 1..22: mol_type = other DNA
gtcatatatgacttttattata

SEQ ID NO: 27080 - DNA, 22 bp, synthetic construct
  misc_feature 1..22: note = chemically synthesized
  source 1..22: mol_type = other DNA
tcatatatgacttttattatat

SEQ ID NO: 27081 - DNA, 22 bp, synthetic construct
  misc_feature 1..22: note = chemically synthesized
  source 1..22: mol_type = other DNA
ttattatattgagatatgttcc

SEQ ID NO: 27082 - DNA, 22 bp, synthetic construct
  misc_feature 1..22: note = chemically synthesized
  source 1..22: mol_type = other DNA
tattatattgagatatgttcct

SEQ ID NO: 27083 - DNA, 22 bp, synthetic construct
  misc_feature 1..22: note = chemically synthesized
  source 1..22: mol_type = other DNA
attatattgagatatgttcctt

SEQ ID NO: 27084 - DNA, 22 bp, synthetic construct
  misc_feature 1..22: note = chemically synthesized
  source 1..22: mol_type = other DNA
ttatattgagatatgttccttc

SEQ ID NO: 27085 - DNA, 22 bp, synthetic construct
  misc_feature 1..22: note = chemically synthesized
  source 1..22: mol_type = other DNA
tattgagatatgttccttctat

SEQ ID NO: 27086 - DNA, 22 bp, synthetic construct
  misc_feature 1..22: note = chemically synthesized
  source 1..22: mol_type = other DNA
agatatgttccttctatgattg

SEQ ID NO: 27087 - DNA, 22 bp, synthetic construct
  misc_feature 1..22: note = chemically synthesized
  source 1..22: mol_type = other DNA
cttctatgattggctgcagata

SEQ ID NO: 27088 - DNA, 22 bp, synthetic construct
  misc_feature 1..22: note = chemically synthesized
  source 1..22: mol_type = other DNA
ctatgattggctgcagatagtt

SEQ ID NO: 27089 - DNA, 22 bp, synthetic construct
  misc_feature 1..22: note = chemically synthesized
  source 1..22: mol_type = other DNA
tatgattggctgcagatagttt

SEQ ID NO: 27090 - DNA, 22 bp, synthetic construct
  misc_feature 1..22: note = chemically synthesized
  source 1..22: mol_type = other DNA
tgattggctgcagatagttttt

SEQ ID NO: 27091 - DNA, 22 bp, synthetic construct
  misc_feature 1..22: note = chemically synthesized
  source 1..22: mol_type = other DNA
gctgcagatagtttttatcatg

SEQ ID NO: 27092 - DNA, 22 bp, synthetic construct
  misc_feature 1..22: note = chemically synthesized
  source 1..22: mol_type = other DNA
cagatagtttttatcatgaagg

SEQ ID NO: 27093 - DNA, 22 bp, synthetic construct
  misc_feature 1..22: note = chemically synthesized
  source 1..22: mol_type = other DNA
ttatcatgaaggaatgttaaat

SEQ ID NO: 27094 - DNA, 22 bp, synthetic construct
  misc_feature 1..22: note = chemically synthesized
  source 1..22: mol_type = other DNA
tatcatgaaggaatgttaaatt

SEQ ID NO: 27095 - DNA, 22 bp, synthetic construct
  misc_feature 1..22: note = chemically synthesized
  source 1..22: mol_type = other DNA
atcatgaaggaatgttaaattt

SEQ ID NO: 27096 - DNA, 22 bp, synthetic construct
  misc_feature 1..22: note = chemically synthesized
  source 1..22: mol_type = other DNA
tcatgaaggaatgttaaatttt

SEQ ID NO: 27097 - DNA, 22 bp, synthetic construct
  misc_feature 1..22: note = chemically synthesized
  source 1..22: mol_type = other DNA
aattttatcaaatactttttct

SEQ ID NO: 27098 - DNA, 22 bp, synthetic construct
  misc_feature 1..22: note = chemically synthesized
  source 1..22: mol_type = other DNA
tatcaaatactttttctgtatc

SEQ ID NO: 27099 - DNA, 22 bp, synthetic construct
  misc_feature 1..22: note = chemically synthesized
  source 1..22: mol_type = other DNA
atcaaatactttttctgtatct

SEQ ID NO: 27100 - DNA, 22 bp, synthetic construct
  misc_feature 1..22: note = chemically synthesized
  source 1..22: mol_type = other DNA
tcaaatactttttctgtatcta

SEQ ID NO: 27101 - DNA, 22 bp, synthetic construct
  misc_feature 1..22: note = chemically synthesized
  source 1..22: mol_type = other DNA
tttctgtatctattgagatgat

SEQ ID NO: 27102 - DNA, 22 bp, synthetic construct
  misc_feature 1..22: note = chemically synthesized
  source 1..22: mol_type = other DNA
ttctgtatctattgagatgatc

SEQ ID NO: 27103 - DNA, 22 bp, synthetic construct
  misc_feature 1..22: note = chemically synthesized
  source 1..22: mol_type = other DNA
tctgtatctattgagatgatca

SEQ ID NO: 27104 - DNA, 22 bp, synthetic construct
  misc_feature 1..22: note = chemically synthesized
  source 1..22: mol_type = other DNA
ctgtatctattgagatgatcat

SEQ ID NO: 27105 - DNA, 22 bp, synthetic construct
  misc_feature 1..22: note = chemically synthesized
  source 1..22: mol_type = other DNA
tgtatctattgagatgatcata

SEQ ID NO: 27106 - DNA, 22 bp, synthetic construct
  misc_feature 1..22: note = chemically synthesized
  source 1..22: mol_type = other DNA
tatctattgagatgatcatatg

SEQ ID NO: 27107 - DNA, 22 bp, synthetic construct
  misc_feature 1..22: note = chemically synthesized
  source 1..22: mol_type = other DNA
ttgagatgatcatatggttttt

SEQ ID NO: 27108 - DNA, 22 bp, synthetic construct
  misc_feature 1..22: note = chemically synthesized
  source 1..22: mol_type = other DNA
agatgatcatatggtttttgtt

SEQ ID NO: 27109 - DNA, 22 bp, synthetic construct
  misc_feature 1..22: note = chemically synthesized
  source 1..22: mol_type = other DNA
ttgttctttttgttgatgtgat

SEQ ID NO: 27110 - DNA, 22 bp, synthetic construct
  misc_feature 1..22: note = chemically synthesized
  source 1..22: mol_type = other DNA
tgttctttttgttgatgtgatg

SEQ ID NO: 27111 - DNA, 22 bp, synthetic construct
  misc_feature 1..22: note = chemically synthesized
  source 1..22: mol_type = other DNA
gttctttttgttgatgtgatgt

SEQ ID NO: 27112 - DNA, 22 bp, synthetic construct
  misc_feature 1..22: note = chemically synthesized
  source 1..22: mol_type = other DNA
ttctttttgttgatgtgatgta

SEQ ID NO: 27113 - DNA, 22 bp, synthetic construct
  misc_feature 1..22: note = chemically synthesized
  source 1..22: mol_type = other DNA
tttttgttgatgtgatgtatca

SEQ ID NO: 27114 - DNA, 22 bp, synthetic construct
  misc_feature 1..22: note = chemically synthesized
  source 1..22: mol_type = other DNA
tttgttgatgtgatgtatcaca

SEQ ID NO: 27115 - DNA, 22 bp, synthetic construct
  misc_feature 1..22: note = chemically synthesized
  source 1..22: mol_type = other DNA
ttgttgatgtgatgtatcacat

SEQ ID NO: 27116 - DNA, 22 bp, synthetic construct
  misc_feature 1..22: note = chemically synthesized
  source 1..22: mol_type = other DNA
tgttgatgtgatgtatcacatt

SEQ ID NO: 27117 - DNA, 22 bp, synthetic construct
  misc_feature 1..22: note = chemically synthesized
  source 1..22: mol_type = other DNA
gttgatgtgatgtatcacattt

SEQ ID NO: 27118 - DNA, 22 bp, synthetic construct
  misc_feature 1..22: note = chemically synthesized
  source 1..22: mol_type = other DNA
ttgatgtgatgtatcacattta

SEQ ID NO: 27119 - DNA, 22 bp, synthetic construct
  misc_feature 1..22: note = chemically synthesized
  source 1..22: mol_type = other DNA
atgtgatgtatcacatttattg

SEQ ID NO: 27120 - DNA, 22 bp, synthetic construct
  misc_feature 1..22: note = chemically synthesized
  source 1..22: mol_type = other DNA
attgatttgaactgttcttgca

SEQ ID NO: 27121 - DNA, 22 bp, synthetic construct
  misc_feature 1..22: note = chemically synthesized
  source 1..22: mol_type = other DNA
ttgatttgaactgttcttgcaa

SEQ ID NO: 27122 - DNA, 22 bp, synthetic construct
  misc_feature 1..22: note = chemically synthesized
  source 1..22: mol_type = other DNA
atttgaactgttcttgcaaccc

SEQ ID NO: 27123 - DNA, 22 bp, synthetic construct
  misc_feature 1..22: note = chemically synthesized
  source 1..22: mol_type = other DNA
gaactgttcttgcaaccctagt

SEQ ID NO: 27124 - DNA, 22 bp, synthetic construct
  misc_feature 1..22: note = chemically synthesized
  source 1..22: mol_type = other DNA
aactgttcttgcaaccctagta

SEQ ID NO: 27125 - DNA, 22 bp, synthetic construct
  misc_feature 1..22: note = chemically synthesized
  source 1..22: mol_type = other DNA
ttcttgcaaccctagtataaat

SEQ ID NO: 27126 - DNA, 22 bp, synthetic construct
  misc_feature 1..22: note = chemically synthesized
  source 1..22: mol_type = other DNA
ttgcaaccctagtataaatccc

SEQ ID NO: 27127 - DNA, 22 bp, synthetic construct
  misc_feature 1..22: note = chemically synthesized
  source 1..22: mol_type = other DNA
gcaaccctagtataaatcccac

SEQ ID NO: 27128 - DNA, 22 bp, synthetic construct
  misc_feature 1..22: note = chemically synthesized
  source 1..22: mol_type = other DNA
caaccctagtataaatcccact

SEQ ID NO: 27129 - DNA, 22 bp, synthetic construct
  misc_feature 1..22: note = chemically synthesized
  source 1..22: mol_type = other DNA
gtataaatcccacttgatcatg

SEQ ID NO: 27130 - DNA, 22 bp, synthetic construct
  misc_feature 1..22: note = chemically synthesized
  source 1..22: mol_type = other DNA
gatcatggtgtattatcttttg

SEQ ID NO: 27131 - DNA, 22 bp, synthetic construct
  misc_feature 1..22: note = chemically synthesized
  source 1..22: mol_type = other DNA
atcatggtgtattatcttttgg

SEQ ID NO: 27132 - DNA, 22 bp, synthetic construct
  misc_feature 1..22: note = chemically synthesized
  source 1..22: mol_type = other DNA
tcttttggatgtactgttggat

SEQ ID NO: 27133 - DNA, 22 bp, synthetic construct
  misc_feature 1..22: note = chemically synthesized
  source 1..22: mol_type = other DNA
ttggatgtactgttggattcag

SEQ ID NO: 27134 - DNA, 22 bp, synthetic construct
  misc_feature 1..22: note = chemically synthesized
  source 1..22: mol_type = other DNA
tggatgtactgttggattcagt

SEQ ID NO: 27135 - DNA, 22 bp, synthetic construct
  misc_feature 1..22: note = chemically synthesized
  source 1..22: mol_type = other DNA
ggatgtactgttggattcagtt

SEQ ID NO: 27136 - DNA, 22 bp, synthetic construct
  misc_feature 1..22: note = chemically synthesized
  source 1..22: mol_type = other DNA
gatgtactgttggattcagttt

SEQ ID NO: 27137 - DNA, 22 bp, synthetic construct
  misc_feature 1..22: note = chemically synthesized
  source 1..22: mol_type = other DNA
ttggattcagtttgctagtatt

SEQ ID NO: 27138 - DNA, 22 bp, synthetic construct
  misc_feature 1..22: note = chemically synthesized
  source 1..22: mol_type = other DNA
gattcagtttgctagtattttg

SEQ ID NO: 27139 - DNA, 22 bp, synthetic construct
  misc_feature 1..22: note = chemically synthesized
  source 1..22: mol_type = other DNA
agtttgctagtattttgttgag

SEQ ID NO: 27140 - DNA, 22 bp, synthetic construct
  misc_feature 1..22: note = chemically synthesized
  source 1..22: mol_type = other DNA
gctagtattttgttgaggattt

SEQ ID NO: 27141 - DNA, 22 bp, synthetic construct
  misc_feature 1..22: note = chemically synthesized
  source 1..22: mol_type = other DNA
ctagtattttgttgaggatttt

SEQ ID NO: 27142 - DNA, 22 bp, synthetic construct
  misc_feature 1..22: note = chemically synthesized
  source 1..22: mol_type = other DNA
gtattttgttgaggattttcac

SEQ ID NO: 27143 - DNA, 22 bp, synthetic construct
  misc_feature 1..22: note = chemically synthesized
  source 1..22: mol_type = other DNA
tgttgaggattttcacacctat

SEQ ID NO: 27144 - DNA, 22 bp, synthetic construct
  misc_feature 1..22: note = chemically synthesized
  source 1..22: mol_type = other DNA
gttgaggattttcacacctatg

SEQ ID NO: 27145 - DNA, 22 bp, synthetic construct
  misc_feature 1..22: note = chemically synthesized
  source 1..22: mol_type = other DNA
ttgaggattttcacacctatgt

SEQ ID NO: 27146 - DNA, 22 bp, synthetic construct
  misc_feature 1..22: note = chemically synthesized
  source 1..22: mol_type = other DNA
aggattttcacacctatgttcc

SEQ ID NO: 27147 - DNA, 22 bp, synthetic construct
  misc_feature 1..22: note = chemically synthesized
  source 1..22: mol_type = other DNA
tcacacctatgttccatcaggg

SEQ ID NO: 27148 - DNA, 22 bp, synthetic construct
  misc_feature 1..22: note = chemically synthesized
  source 1..22: mol_type = other DNA
cacacctatgttccatcaggga

SEQ ID NO: 27149 - DNA, 22 bp, synthetic construct
  misc_feature 1..22: note = chemically synthesized
  source 1..22: mol_type = other DNA
acacctatgttccatcagggat

SEQ ID NO: 27150 - DNA, 22 bp, synthetic construct
  misc_feature 1..22: note = chemically synthesized
  source 1..22: mol_type = other DNA
tgttccatcagggatattgacc

SEQ ID NO: 27151 - DNA, 22 bp, synthetic construct
  misc_feature 1..22: note = chemically synthesized
  source 1..22: mol_type = other DNA
catcagggatattgacctgcag

SEQ ID NO: 27152 - DNA, 22 bp, synthetic construct
  misc_feature 1..22: note = chemically synthesized
  source 1..22: mol_type = other DNA
acctgcagttttatttttactt

SEQ ID NO: 27153 - DNA, 22 bp, synthetic construct
  misc_feature 1..22: note = chemically synthesized
  source 1..22: mol_type = other DNA
cagttttatttttacttgcatc

SEQ ID NO: 27154 - DNA, 22 bp, synthetic construct
  misc_feature 1..22: note = chemically synthesized
  source 1..22: mol_type = other DNA
tatttttacttgcatccttgtc

SEQ ID NO: 27155 - DNA, 22 bp, synthetic construct
  misc_feature 1..22: note = chemically synthesized
  source 1..22: mol_type = other DNA
atttttacttgcatccttgtct

SEQ ID NO: 27156 - DNA, 22 bp, synthetic construct
  misc_feature 1..22: note = chemically synthesized
  source 1..22: mol_type = other DNA
tttttacttgcatccttgtctg

SEQ ID NO: 27157 - DNA, 22 bp, synthetic construct
  misc_feature 1..22: note = chemically synthesized
  source 1..22: mol_type = other DNA
ttacttgcatccttgtctggtt

SEQ ID NO: 27158 - DNA, 22 bp, synthetic construct
  misc_feature 1..22: note = chemically synthesized
  source 1..22: mol_type = other DNA
tacttgcatccttgtctggtta

SEQ ID NO: 27159 - DNA, 22 bp, synthetic construct
  misc_feature 1..22: note = chemically synthesized
  source 1..22: mol_type = other DNA
acttgcatccttgtctggttat

SEQ ID NO: 27160 - DNA, 22 bp, synthetic construct
  misc_feature 1..22: note = chemically synthesized
  source 1..22: mol_type = other DNA
cttgcatccttgtctggttatg

SEQ ID NO: 27161 - DNA, 22 bp, synthetic construct
  misc_feature 1..22: note = chemically synthesized
  source 1..22: mol_type = other DNA
gcatccttgtctggttatggaa

SEQ ID NO: 27162 - DNA, 22 bp, synthetic construct
  misc_feature 1..22: note = chemically synthesized
  source 1..22: mol_type = other DNA
catccttgtctggttatggaat

SEQ ID NO: 27163 - DNA, 22 bp, synthetic construct
  misc_feature 1..22: note = chemically synthesized
  source 1..22: mol_type = other DNA
gtctggttatggaatcaggata

SEQ ID NO: 27164 - DNA, 22 bp, synthetic construct
  misc_feature 1..22: note = chemically synthesized
  source 1..22: mol_type = other DNA
tctggttatggaatcaggataa

SEQ ID NO: 27165 - DNA, 22 bp, synthetic construct
  misc_feature 1..22: note = chemically synthesized
  source 1..22: mol_type = other DNA
gttatggaatcaggataatact

SEQ ID NO: 27166 - DNA, 22 bp, synthetic construct
  misc_feature 1..22: note = chemically synthesized
  source 1..22: mol_type = other DNA
tggaatcaggataatactggcc

SEQ ID NO: 27167 - DNA, 22 bp, synthetic construct
  misc_feature 1..22: note = chemically synthesized
  source 1..22: mol_type = other DNA
gcctcagagaatgagttaggga

SEQ ID NO: 27168 - DNA, 22 bp, synthetic construct
  misc_feature 1..22: note = chemically synthesized
  source 1..22: mol_type = other DNA
agagaatgagttagggagaatt

SEQ ID NO: 27169 - DNA, 22 bp, synthetic construct
  misc_feature 1..22: note = chemically synthesized
  source 1..22: mol_type = other DNA
gggagaattccttcctgtttaa

SEQ ID NO: 27170 - DNA, 22 bp, synthetic construct
  misc_feature 1..22: note = chemically synthesized
  source 1..22: mol_type = other DNA
cttcctgtttaatttttaaaag

SEQ ID NO: 27171 - DNA, 22 bp, synthetic construct
  misc_feature 1..22: note = chemically synthesized
  source 1..22: mol_type = other DNA
cctgtttaatttttaaaagaat

SEQ ID NO: 27172 - DNA, 22 bp, synthetic construct
  misc_feature 1..22: note = chemically synthesized
  source 1..22: mol_type = other DNA
ctgtttaatttttaaaagaatt

SEQ ID NO: 27173 - DNA, 22 bp, synthetic construct
  misc_feature 1..22: note = chemically synthesized
  source 1..22: mol_type = other DNA
tttaatttttaaaagaatttaa

SEQ ID NO: 27174 - DNA, 22 bp, synthetic construct
  misc_feature 1..22: note = chemically synthesized
  source 1..22: mol_type = other DNA
aatttttaaaagaatttaagga

SEQ ID NO: 27175 - DNA, 22 bp, synthetic construct
  misc_feature 1..22: note = chemically synthesized
  source 1..22: mol_type = other DNA
atttttaaaagaatttaaggag

SEQ ID NO: 27176 - DNA, 22 bp, synthetic construct
  misc_feature 1..22: note = chemically synthesized
  source 1..22: mol_type = other DNA
ttaaaagaatttaaggagactt

SEQ ID NO: 27177 - DNA, 22 bp, synthetic construct
  misc_feature 1..22: note = chemically synthesized
  source 1..22: mol_type = other DNA
taaaagaatttaaggagacttg

SEQ ID NO: 27178 - DNA, 22 bp, synthetic construct
  misc_feature 1..22: note = chemically synthesized
  source 1..22: mol_type = other DNA
aaaagaatttaaggagacttgt

SEQ ID NO: 27179 - DNA, 22 bp, synthetic construct
  misc_feature 1..22: note = chemically synthesized
  source 1..22: mol_type = other DNA
aaagaatttaaggagacttgtt

SEQ ID NO: 27180 - DNA, 22 bp, synthetic construct
  misc_feature 1..22: note = chemically synthesized
  source 1..22: mol_type = other DNA
aaggagacttgttagttttctt

SEQ ID NO: 27181 - DNA, 22 bp, synthetic construct
  misc_feature 1..22: note = chemically synthesized
  source 1..22: mol_type = other DNA
aggagacttgttagttttcttt

SEQ ID NO: 27182 - DNA, 22 bp, synthetic construct
  misc_feature 1..22: note = chemically synthesized
  source 1..22: mol_type = other DNA
gttagttttctttgaaagtttg

SEQ ID NO: 27183 - DNA, 22 bp, synthetic construct
  misc_feature 1..22: note = chemically synthesized
  source 1..22: mol_type = other DNA
ttagttttctttgaaagtttgg

SEQ ID NO: 27184 - DNA, 22 bp, synthetic construct
  misc_feature 1..22: note = chemically synthesized
  source 1..22: mol_type = other DNA
gttttctttgaaagtttggtaa

SEQ ID NO: 27185 - DNA, 22 bp, synthetic construct
  misc_feature 1..22: note = chemically synthesized
  source 1..22: mol_type = other DNA
tctttgaaagtttggtaaaatt

SEQ ID NO: 27186 - DNA, 22 bp, synthetic construct
  misc_feature 1..22: note = chemically synthesized
  source 1..22: mol_type = other DNA
ctttgaaagtttggtaaaattt

SEQ ID NO: 27187 - DNA, 22 bp, synthetic construct
  misc_feature 1..22: note = chemically synthesized
  source 1..22: mol_type = other DNA
tttgaaagtttggtaaaatttg

SEQ ID NO: 27188 - DNA, 22 bp, synthetic construct
  misc_feature 1..22: note = chemically synthesized
  source 1..22: mol_type = other DNA
tgaaagtttggtaaaatttgac

SEQ ID NO: 27189 - DNA, 22 bp, synthetic construct
  misc_feature 1..22: note = chemically synthesized
  source 1..22: mol_type = other DNA
gaaagtttggtaaaatttgaca

SEQ ID NO: 27190 - DNA, 22 bp, synthetic construct
  misc_feature 1..22: note = chemically synthesized
  source 1..22: mol_type = other DNA
aaagtttggtaaaatttgacag

SEQ ID NO: 27191 - DNA, 22 bp, synthetic construct
  misc_feature 1..22: note = chemically synthesized
  source 1..22: mol_type = other DNA
ggtaaaatttgacagtaaagcc

SEQ ID NO: 27192 - DNA, 22 bp, synthetic construct
  misc_feature 1..22: note = chemically synthesized
  source 1..22: mol_type = other DNA
gtaaaatttgacagtaaagcca

SEQ ID NO: 27193 - DNA, 22 bp, synthetic construct
  misc_feature 1..22: note = chemically synthesized
  source 1..22: mol_type = other DNA
gacagtaaagccatctggtctt

SEQ ID NO: 27194 - DNA, 22 bp, synthetic construct
  misc_feature 1..22: note = chemically synthesized
  source 1..22: mol_type = other DNA
acagtaaagccatctggtcttg

SEQ ID NO: 27195 - DNA, 22 bp, synthetic construct
  misc_feature 1..22: note = chemically synthesized
  source 1..22: mol_type = other DNA
gtcttgaaattttcttttttgg

SEQ ID NO: 27196 - DNA, 22 bp, synthetic construct
  misc_feature 1..22: note = chemically synthesized
  source 1..22: mol_type = other DNA
gaaattttcttttttgggagac

SEQ ID NO: 27197 - DNA, 22 bp, synthetic construct
  misc_feature 1..22: note = chemically synthesized
  source 1..22: mol_type = other DNA
aaattttcttttttgggagact

SEQ ID NO: 27198 - DNA, 22 bp, synthetic construct
  misc_feature 1..22: note = chemically synthesized
  source 1..22: mol_type = other DNA
tcttttttgggagactttttac

SEQ ID NO: 27199 - DNA, 22 bp, synthetic construct
  misc_feature 1..22: note = chemically synthesized
  source 1..22: mol_type = other DNA
cttttttgggagactttttact

SEQ ID NO: 27200 - DNA, 22 bp, synthetic construct
  misc_feature 1..22: note = chemically synthesized
  source 1..22: mol_type = other DNA
ttttttgggagactttttacta

SEQ ID NO: 27201 - DNA, 22 bp, synthetic construct
  misc_feature 1..22: note = chemically synthesized
  source 1..22: mol_type = other DNA
ttttgggagactttttactact

SEQ ID NO: 27202 - DNA, 22 bp, synthetic construct
  misc_feature 1..22: note = chemically synthesized
  source 1..22: mol_type = other DNA
tttgggagactttttactactg

SEQ ID NO: 27203 - DNA, 22 bp, synthetic construct
  misc_feature 1..22: note = chemically synthesized
  source 1..22: mol_type = other DNA
ttgggagactttttactactga

SEQ ID NO: 27204 - DNA, 22 bp, synthetic construct
  misc_feature 1..22: note = chemically synthesized
  source 1..22: mol_type = other DNA
tgggagactttttactactgat

SEQ ID NO: 27205 - DNA, 22 bp, synthetic construct
  misc_feature 1..22: note = chemically synthesized
  source 1..22: mol_type = other DNA
gggagactttttactactgatt

SEQ ID NO: 27206 - DNA, 22 bp, synthetic construct
  misc_feature 1..22: note = chemically synthesized
  source 1..22: mol_type = other DNA
ggagactttttactactgattc

SEQ ID NO: 27207 - DNA, 22 bp, synthetic construct
  misc_feature 1..22: note = chemically synthesized
  source 1..22: mol_type = other DNA
tttactactgattcaatttcat

SEQ ID NO: 27208 - DNA, 22 bp, synthetic construct
  misc_feature 1..22: note = chemically synthesized
  source 1..22: mol_type = other DNA
ttactactgattcaatttcatt

SEQ ID NO: 27209 - DNA, 22 bp, synthetic construct
  misc_feature 1..22: note = chemically synthesized
  source 1..22: mol_type = other DNA
tactactgattcaatttcatta

SEQ ID NO: 27210 - DNA, 22 bp, synthetic construct
  misc_feature 1..22: note = chemically synthesized
  source 1..22: mol_type = other DNA
actactgattcaatttcattat

SEQ ID NO: 27211 - DNA, 22 bp, synthetic construct
  misc_feature 1..22: note = chemically synthesized
  source 1..22: mol_type = other DNA
ctactgattcaatttcattatt

SEQ ID NO: 27212 - DNA, 22 bp, synthetic construct
  misc_feature 1..22: note = chemically synthesized
  source 1..22: mol_type = other DNA
ctgattcaatttcattattcat

SEQ ID NO: 27213 - DNA, 22 bp, synthetic construct
  misc_feature 1..22: note = chemically synthesized
  source 1..22: mol_type = other DNA
attcaatttcattattcattac

SEQ ID NO: 27214 - DNA, 22 bp, synthetic construct
  misc_feature 1..22: note = chemically synthesized
  source 1..22: mol_type = other DNA
aatttcattattcattactggt

SEQ ID NO: 27215 - DNA, 22 bp, synthetic construct
  misc_feature 1..22: note = chemically synthesized
  source 1..22: mol_type = other DNA
cattattcattactggtctgtt

SEQ ID NO: 27216 - DNA, 22 bp, synthetic construct
  misc_feature 1..22: note = chemically synthesized
  source 1..22: mol_type = other DNA
attattcattactggtctgttc

SEQ ID NO: 27217 - DNA, 22 bp, synthetic construct
  misc_feature 1..22: note = chemically synthesized
  source 1..22: mol_type = other DNA
ttcattactggtctgttcaggt

SEQ ID NO: 27218 - DNA, 22 bp, synthetic construct
  misc_feature 1..22: note = chemically synthesized
  source 1..22: mol_type = other DNA
attactggtctgttcaggtttt

SEQ ID NO: 27219 - DNA, 22 bp, synthetic construct
  misc_feature 1..22: note = chemically synthesized
  source 1..22: mol_type = other DNA
ctggtctgttcaggttttctat

SEQ ID NO: 27220 - DNA, 22 bp, synthetic construct
  misc_feature 1..22: note = chemically synthesized
  source 1..22: mol_type = other DNA
gtctgttcaggttttctattct

SEQ ID NO: 27221 - DNA, 22 bp, synthetic construct
  misc_feature 1..22: note = chemically synthesized
  source 1..22: mol_type = other DNA
ttcaggttttctattctttctt

SEQ ID NO: 27222 - DNA, 22 bp, synthetic construct
  misc_feature 1..22: note = chemically synthesized
  source 1..22: mol_type = other DNA
aggttttctattctttcttaat

SEQ ID NO: 27223 - DNA, 22 bp, synthetic construct
  misc_feature 1..22: note = chemically synthesized
  source 1..22: mol_type = other DNA
tctattctttcttaattcaatc

SEQ ID NO: 27224 - DNA, 22 bp, synthetic construct
  misc_feature 1..22: note = chemically synthesized
  source 1..22: mol_type = other DNA
ctattctttcttaattcaatct

SEQ ID NO: 27225 - DNA, 22 bp, synthetic construct
  misc_feature 1..22: note = chemically synthesized
  source 1..22: mol_type = other DNA
tattctttcttaattcaatctt

SEQ ID NO: 27226 - DNA, 22 bp, synthetic construct
  misc_feature 1..22: note = chemically synthesized
  source 1..22: mol_type = other DNA
ttctttcttaattcaatcttgg

SEQ ID NO: 27227 - DNA, 22 bp, synthetic construct
  misc_feature 1..22: note = chemically synthesized
  source 1..22: mol_type = other DNA
tttcttaattcaatcttggtag

SEQ ID NO: 27228 - DNA, 22 bp, synthetic construct
  misc_feature 1..22: note = chemically synthesized
  source 1..22: mol_type = other DNA
tcttaattcaatcttggtaggt

SEQ ID NO: 27229 - DNA, 22 bp, synthetic construct
  misc_feature 1..22: note = chemically synthesized
  source 1..22: mol_type = other DNA
cttaattcaatcttggtaggtg

SEQ ID NO: 27230 - DNA, 22 bp, synthetic construct
  misc_feature 1..22: note = chemically synthesized
  source 1..22: mol_type = other DNA
ttaattcaatcttggtaggtgg

SEQ ID NO: 27231 - DNA, 22 bp, synthetic construct
  misc_feature 1..22: note = chemically synthesized
  source 1..22: mol_type = other DNA
aattcaatcttggtaggtggta

SEQ ID NO: 27232 - DNA, 22 bp, synthetic construct
  misc_feature 1..22: note = chemically synthesized
  source 1..22: mol_type = other DNA
attcaatcttggtaggtggtat

SEQ ID NO: 27233 - DNA, 22 bp, synthetic construct
  misc_feature 1..22: note = chemically synthesized
  source 1..22: mol_type = other DNA
aatcttggtaggtggtatgtgt

SEQ ID NO: 27234 - DNA, 22 bp, synthetic construct
  misc_feature 1..22: note = chemically synthesized
  source 1..22: mol_type = other DNA
ggtaggtggtatgtgtccagaa

SEQ ID NO: 27235 - DNA, 22 bp, synthetic construct
  misc_feature 1..22: note = chemically synthesized
  source 1..22: mol_type = other DNA
gtaggtggtatgtgtccagaaa

SEQ ID NO: 27236 - DNA, 22 bp, synthetic construct
  misc_feature 1..22: note = chemically synthesized
  source 1..22: mol_type = other DNA
attaatttcctctagatttttc

SEQ ID NO: 27237 - DNA, 22 bp, synthetic construct
  misc_feature 1..22: note = chemically synthesized
  source 1..22: mol_type = other DNA
ttaatttcctctagatttttca

SEQ ID NO: 27238 - DNA, 22 bp, synthetic construct
  misc_feature 1..22: note = chemically synthesized
  source 1..22: mol_type = other DNA
atttcctctagatttttcagtt

SEQ ID NO: 27239 - DNA, 22 bp, synthetic construct
  misc_feature 1..22: note = chemically synthesized
  source 1..22: mol_type = other DNA
cctctagatttttcagtttttt

SEQ ID NO: 27240 - DNA, 22 bp, synthetic construct
  misc_feature 1..22: note = chemically synthesized
  source 1..22: mol_type = other DNA
ctctagatttttcagtttttta

SEQ ID NO: 27241 - DNA, 22 bp, synthetic construct
  misc_feature 1..22: note = chemically synthesized
  source 1..22: mol_type = other DNA
tagatttttcagttttttagtg

SEQ ID NO: 27242 - DNA, 22 bp, synthetic construct
  misc_feature 1..22: note = chemically synthesized
  source 1..22: mol_type = other DNA
gatttttcagttttttagtgta

SEQ ID NO: 27243 - DNA, 22 bp, synthetic construct
  misc_feature 1..22: note = chemically synthesized
  source 1..22: mol_type = other DNA
ttcagttttttagtgtatggtt

SEQ ID NO: 27244 - DNA, 22 bp, synthetic construct
  misc_feature 1..22: note = chemically synthesized
  source 1..22: mol_type = other DNA
tcagttttttagtgtatggttg

SEQ ID NO: 27245 - DNA, 22 bp, synthetic construct
  misc_feature 1..22: note = chemically synthesized
  source 1..22: mol_type = other DNA
cagttttttagtgtatggttgt

SEQ ID NO: 27246 - DNA, 22 bp, synthetic construct
  misc_feature 1..22: note = chemically synthesized
  source 1..22: mol_type = other DNA
agttttttagtgtatggttgtt

SEQ ID NO: 27247 - DNA, 22 bp, synthetic construct
  misc_feature 1..22: note = chemically synthesized
  source 1..22: mol_type = other DNA
tttagtgtatggttgttcataa

SEQ ID NO: 27248 - DNA, 22 bp, synthetic construct
  misc_feature 1..22: note = chemically synthesized
  source 1..22: mol_type = other DNA
ttagtgtatggttgttcataat

SEQ ID NO: 27249 - DNA, 22 bp, synthetic construct
  misc_feature 1..22: note = chemically synthesized
  source 1..22: mol_type = other DNA
tagtgtatggttgttcataata

SEQ ID NO: 27250 - DNA, 22 bp, synthetic construct
  misc_feature 1..22: note = chemically synthesized
  source 1..22: mol_type = other DNA
agtgtatggttgttcataatag

SEQ ID NO: 27251 - DNA, 22 bp, synthetic construct
  misc_feature 1..22: note = chemically synthesized
  source 1..22: mol_type = other DNA
gtgtatggttgttcataatagt

SEQ ID NO: 27252 - DNA, 22 bp, synthetic construct
  misc_feature 1..22: note = chemically synthesized
  source 1..22: mol_type = other DNA
ttcataatagtctctgataatc

SEQ ID NO: 27253 - DNA, 22 bp, synthetic construct
  misc_feature 1..22: note = chemically synthesized
  source 1..22: mol_type = other DNA
ataatagtctctgataatcttt

SEQ ID NO: 27254 - DNA, 22 bp, synthetic construct
  misc_feature 1..22: note = chemically synthesized
  source 1..22: mol_type = other DNA
tgataatcttttctatttctgt

SEQ ID NO: 27255 - DNA, 22 bp, synthetic construct
  misc_feature 1..22: note = chemically synthesized
  source 1..22: mol_type = other DNA
ataatcttttctatttctgtgg

SEQ ID NO: 27256 - DNA, 22 bp, synthetic construct
  misc_feature 1..22: note = chemically synthesized
  source 1..22: mol_type = other DNA
ttctatttctgtggtatcggtt

SEQ ID NO: 27257 - DNA, 22 bp, synthetic construct
  misc_feature 1..22: note = chemically synthesized
  source 1..22: mol_type = other DNA
tctatttctgtggtatcggttg

SEQ ID NO: 27258 - DNA, 22 bp, synthetic construct
  misc_feature 1..22: note = chemically synthesized
  source 1..22: mol_type = other DNA
ctatttctgtggtatcggttgt

SEQ ID NO: 27259 - DNA, 22 bp, synthetic construct
  misc_feature 1..22: note = chemically synthesized
  source 1..22: mol_type = other DNA
tatttctgtggtatcggttgta

SEQ ID NO: 27260 - DNA, 22 bp, synthetic construct
  misc_feature 1..22: note = chemically synthesized
  source 1..22: mol_type = other DNA
tttctgtggtatcggttgtaat

SEQ ID NO: 27261 - DNA, 22 bp, synthetic construct
  misc_feature 1..22: note = chemically synthesized
  source 1..22: mol_type = other DNA
ctgtggtatcggttgtaatata

SEQ ID NO: 27262 - DNA, 22 bp, synthetic construct
  misc_feature 1..22: note = chemically synthesized
  source 1..22: mol_type = other DNA
tgtggtatcggttgtaatatat

SEQ ID NO: 27263 - DNA, 22 bp, synthetic construct
  misc_feature 1..22: note = chemically synthesized
  source 1..22: mol_type = other DNA
tggtatcggttgtaatatattt

SEQ ID NO: 27264 - DNA, 22 bp, synthetic construct
  misc_feature 1..22: note = chemically synthesized
  source 1..22: mol_type = other DNA
taatatattttcttttttattt

SEQ ID NO: 27265 - DNA, 22 bp, synthetic construct
  misc_feature 1..22: note = chemically synthesized
  source 1..22: mol_type = other DNA
tcttttttatttctgattttct

SEQ ID NO: 27266 - DNA, 22 bp, synthetic construct
  misc_feature 1..22: note = chemically synthesized
  source 1..22: mol_type = other DNA
cttttttatttctgattttctt

SEQ ID NO: 27267 - DNA, 22 bp, synthetic construct
  misc_feature 1..22: note = chemically synthesized
  source 1..22: mol_type = other DNA
ttttttatttctgattttcttt

SEQ ID NO: 27268 - DNA, 22 bp, synthetic construct
  misc_feature 1..22: note = chemically synthesized
  source 1..22: mol_type = other DNA
ttttatttctgattttctttat

SEQ ID NO: 27269 - DNA, 22 bp, synthetic construct
  misc_feature 1..22: note = chemically synthesized
  source 1..22: mol_type = other DNA
tttatttctgattttctttatt

SEQ ID NO: 27270 - DNA, 22 bp, synthetic construct
  misc_feature 1..22: note = chemically synthesized
  source 1..22: mol_type = other DNA
ttatttctgattttctttattt

SEQ ID NO: 27271 - DNA, 22 bp, synthetic construct
  misc_feature 1..22: note = chemically synthesized
  source 1..22: mol_type = other DNA
tatttctgattttctttatttc

SEQ ID NO: 27272 - DNA, 22 bp, synthetic construct
  misc_feature 1..22: note = chemically synthesized
  source 1..22: mol_type = other DNA
atttctgattttctttatttca

SEQ ID NO: 27273 - DNA, 22 bp, synthetic construct
  misc_feature 1..22: note = chemically synthesized
  source 1..22: mol_type = other DNA
tttctgattttctttatttcag

SEQ ID NO: 27274 - DNA, 22 bp, synthetic construct
  misc_feature 1..22: note = chemically synthesized
  source 1..22: mol_type = other DNA
ctgattttctttatttcagtct

SEQ ID NO: 27275 - DNA, 22 bp, synthetic construct
  misc_feature 1..22: note = chemically synthesized
  source 1..22: mol_type = other DNA
tgattttctttatttcagtctc

SEQ ID NO: 27276 - DNA, 22 bp, synthetic construct
  misc_feature 1..22: note = chemically synthesized
  source 1..22: mol_type = other DNA
attttctttatttcagtctctt

SEQ ID NO: 27277 - DNA, 22 bp, synthetic construct
  misc_feature 1..22: note = chemically synthesized
  source 1..22: mol_type = other DNA
tctttatttcagtctcttctct

SEQ ID NO: 27278 - DNA, 22 bp, synthetic construct
  misc_feature 1..22: note = chemically synthesized
  source 1..22: mol_type = other DNA
ctttatttcagtctcttctctt

SEQ ID NO: 27279 - DNA, 22 bp, synthetic construct
  misc_feature 1..22: note = chemically synthesized
  source 1..22: mol_type = other DNA
tttatttcagtctcttctcttt

SEQ ID NO: 27280 - DNA, 22 bp, synthetic construct
  misc_feature 1..22: note = chemically synthesized
  source 1..22: mol_type = other DNA
tatttcagtctcttctcttttt

SEQ ID NO: 27281 - DNA, 22 bp, synthetic construct
  misc_feature 1..22: note = chemically synthesized
  source 1..22: mol_type = other DNA
atttcagtctcttctctttttc

SEQ ID NO: 27282 - DNA, 22 bp, synthetic construct
  misc_feature 1..22: note = chemically synthesized
  source 1..22: mol_type = other DNA
tttcagtctcttctctttttct

SEQ ID NO: 27283 - DNA, 22 bp, synthetic construct
  misc_feature 1..22: note = chemically synthesized
  source 1..22: mol_type = other DNA
cagtctcttctctttttcttgg

SEQ ID NO: 27284 - DNA, 22 bp, synthetic construct
  misc_feature 1..22: note = chemically synthesized
  source 1..22: mol_type = other DNA
agtctcttctctttttcttggt

SEQ ID NO: 27285 - DNA, 22 bp, synthetic construct
  misc_feature 1..22: note = chemically synthesized
  source 1..22: mol_type = other DNA
ttctctttttcttggttagtct

SEQ ID NO: 27286 - DNA, 22 bp, synthetic construct
  misc_feature 1..22: note = chemically synthesized
  source 1..22: mol_type = other DNA
ctctttttcttggttagtctag

SEQ ID NO: 27287 - DNA, 22 bp, synthetic construct
  misc_feature 1..22: note = chemically synthesized
  source 1..22: mol_type = other DNA
tctttttcttggttagtctagc

SEQ ID NO: 27288 - DNA, 22 bp, synthetic construct
  misc_feature 1..22: note = chemically synthesized
  source 1..22: mol_type = other DNA
tttttcttggttagtctagcta

SEQ ID NO: 27289 - DNA, 22 bp, synthetic construct
  misc_feature 1..22: note = chemically synthesized
  source 1..22: mol_type = other DNA
tttcttggttagtctagctaga

SEQ ID NO: 27290 - DNA, 22 bp, synthetic construct
  misc_feature 1..22: note = chemically synthesized
  source 1..22: mol_type = other DNA
ttcttggttagtctagctagag

SEQ ID NO: 27291 - DNA, 22 bp, synthetic construct
  misc_feature 1..22: note = chemically synthesized
  source 1..22: mol_type = other DNA
tcttggttagtctagctagagc

SEQ ID NO: 27292 - DNA, 22 bp, synthetic construct
  misc_feature 1..22: note = chemically synthesized
  source 1..22: mol_type = other DNA
cttggttagtctagctagagct

SEQ ID NO: 27293 - DNA, 22 bp, synthetic construct
  misc_feature 1..22: note = chemically synthesized
  source 1..22: mol_type = other DNA
ttggttagtctagctagagcta

SEQ ID NO: 27294 - DNA, 22 bp, synthetic construct
  misc_feature 1..22: note = chemically synthesized
  source 1..22: mol_type = other DNA
ggttagtctagctagagctata

SEQ ID NO: 27295 - DNA, 22 bp, synthetic construct
  misc_feature 1..22: note = chemically synthesized
  source 1..22: mol_type = other DNA
gttagtctagctagagctatat

SEQ ID NO: 27296 - DNA, 22 bp, synthetic construct
  misc_feature 1..22: note = chemically synthesized
  source 1..22: mol_type = other DNA
gtctagctagagctatatccat

SEQ ID NO: 27297 - DNA, 22 bp, synthetic construct
  misc_feature 1..22: note = chemically synthesized
  source 1..22: mol_type = other DNA
gctagagctatatccattttat

SEQ ID NO: 27298 - DNA, 22 bp, synthetic construct
  misc_feature 1..22: note = chemically synthesized
  source 1..22: mol_type = other DNA
gagctatatccattttatcttt

SEQ ID NO: 27299 - DNA, 22 bp, synthetic construct
  misc_feature 1..22: note = chemically synthesized
  source 1..22: mol_type = other DNA
tatccattttatcttttttaaa

SEQ ID NO: 27300 - DNA, 22 bp, synthetic construct
  misc_feature 1..22: note = chemically synthesized
  source 1..22: mol_type = other DNA
tatcttttttaaataacaactt

SEQ ID NO: 27301 - DNA, 22 bp, synthetic construct
  misc_feature 1..22: note = chemically synthesized
  source 1..22: mol_type = other DNA
atcttttttaaataacaacttt

SEQ ID NO: 27302 - DNA, 22 bp, synthetic construct
  misc_feature 1..22: note = chemically synthesized
  source 1..22: mol_type = other DNA
tcttttttaaataacaactttt

SEQ ID NO: 27303 - DNA, 22 bp, synthetic construct
  misc_feature 1..22: note = chemically synthesized
  source 1..22: mol_type = other DNA
ttttaaataacaacttttcatt

SEQ ID NO: 27304 - DNA, 22 bp, synthetic construct
  misc_feature 1..22: note = chemically synthesized
  source 1..22: mol_type = other DNA
tttaaataacaacttttcattt

SEQ ID NO: 27305 - DNA, 22 bp, synthetic construct
  misc_feature 1..22: note = chemically synthesized
  source 1..22: mol_type = other DNA
ttaaataacaacttttcatttt

SEQ ID NO: 27306 - DNA, 22 bp, synthetic construct
  misc_feature 1..22: note = chemically synthesized
  source 1..22: mol_type = other DNA
taaataacaacttttcattttg

SEQ ID NO: 27307 - DNA, 22 bp, synthetic construct
  misc_feature 1..22: note = chemically synthesized
  source 1..22: mol_type = other DNA
aaataacaacttttcattttgc

SEQ ID NO: 27308 - DNA, 22 bp, synthetic construct
  misc_feature 1..22: note = chemically synthesized
  source 1..22: mol_type = other DNA
aataacaacttttcattttgct

SEQ ID NO: 27309 - DNA, 22 bp, synthetic construct
  misc_feature 1..22: note = chemically synthesized
  source 1..22: mol_type = other DNA
ttcattttgctaatcccttgtt

SEQ ID NO: 27310 - DNA, 22 bp, synthetic construct
  misc_feature 1..22: note = chemically synthesized
  source 1..22: mol_type = other DNA
tcattttgctaatcccttgttg

SEQ ID NO: 27311 - DNA, 22 bp, synthetic construct
  misc_feature 1..22: note = chemically synthesized
  source 1..22: mol_type = other DNA
cattttgctaatcccttgttgt

SEQ ID NO: 27312 - DNA, 22 bp, synthetic construct
  misc_feature 1..22: note = chemically synthesized
  source 1..22: mol_type = other DNA
attttgctaatcccttgttgtt

SEQ ID NO: 27313 - DNA, 22 bp, synthetic construct
  misc_feature 1..22: note = chemically synthesized
  source 1..22: mol_type = other DNA
tgctaatcccttgttgttgttt

SEQ ID NO: 27314 - DNA, 22 bp, synthetic construct
  misc_feature 1..22: note = chemically synthesized
  source 1..22: mol_type = other DNA
gctaatcccttgttgttgtttt

SEQ ID NO: 27315 - DNA, 22 bp, synthetic construct
  misc_feature 1..22: note = chemically synthesized
  source 1..22: mol_type = other DNA
ctaatcccttgttgttgttttt

SEQ ID NO: 27316 - DNA, 22 bp, synthetic construct
  misc_feature 1..22: note = chemically synthesized
  source 1..22: mol_type = other DNA
atcccttgttgttgtttttctc

SEQ ID NO: 27317 - DNA, 22 bp, synthetic construct
  misc_feature 1..22: note = chemically synthesized
  source 1..22: mol_type = other DNA
gttgttgtttttctctatttca

SEQ ID NO: 27318 - DNA, 22 bp, synthetic construct
  misc_feature 1..22: note = chemically synthesized
  source 1..22: mol_type = other DNA
ttgttgtttttctctatttcat

SEQ ID NO: 27319 - DNA, 22 bp, synthetic construct
  misc_feature 1..22: note = chemically synthesized
  source 1..22: mol_type = other DNA
ttgtttttctctatttcattaa

SEQ ID NO: 27320 - DNA, 22 bp, synthetic construct
  misc_feature 1..22: note = chemically synthesized
  source 1..22: mol_type = other DNA
tttttctctatttcattaagtt

SEQ ID NO: 27321 - DNA, 22 bp, synthetic construct
  misc_feature 1..22: note = chemically synthesized
  source 1..22: mol_type = other DNA
ttctctatttcattaagttctt

SEQ ID NO: 27322 - DNA, 22 bp, synthetic construct
  misc_feature 1..22: note = chemically synthesized
  source 1..22: mol_type = other DNA
tctctatttcattaagttcttc

SEQ ID NO: 27323 - DNA, 22 bp, synthetic construct
  misc_feature 1..22: note = chemically synthesized
  source 1..22: mol_type = other DNA
ctctatttcattaagttcttct

SEQ ID NO: 27324 - DNA, 22 bp, synthetic construct
  misc_feature 1..22: note = chemically synthesized
  source 1..22: mol_type = other DNA
tctatttcattaagttcttctg

SEQ ID NO: 27325 - DNA, 22 bp, synthetic construct
  misc_feature 1..22: note = chemically synthesized
  source 1..22: mol_type = other DNA
tatttcattaagttcttctgtt

SEQ ID NO: 27326 - DNA, 22 bp, synthetic construct
  misc_feature 1..22: note = chemically synthesized
  source 1..22: mol_type = other DNA
tttcattaagttcttctgttct

SEQ ID NO: 27327 - DNA, 22 bp, synthetic construct
  misc_feature 1..22: note = chemically synthesized
  source 1..22: mol_type = other DNA
cattaagttcttctgttcttca

SEQ ID NO: 27328 - DNA, 22 bp, synthetic construct
  misc_feature 1..22: note = chemically synthesized
  source 1..22: mol_type = other DNA
attaagttcttctgttcttcat

SEQ ID NO: 27329 - DNA, 22 bp, synthetic construct
  misc_feature 1..22: note = chemically synthesized
  source 1..22: mol_type = other DNA
agttcttctgttcttcattttt

SEQ ID NO: 27330 - DNA, 22 bp, synthetic construct
  misc_feature 1..22: note = chemically synthesized
  source 1..22: mol_type = other DNA
ttctgttcttcattttttcttt

SEQ ID NO: 27331 - DNA, 22 bp, synthetic construct
  misc_feature 1..22: note = chemically synthesized
  source 1..22: mol_type = other DNA
ctgttcttcattttttctttcc

SEQ ID NO: 27332 - DNA, 22 bp, synthetic construct
  misc_feature 1..22: note = chemically synthesized
  source 1..22: mol_type = other DNA
tgttcttcattttttctttcct

SEQ ID NO: 27333 - DNA, 22 bp, synthetic construct
  misc_feature 1..22: note = chemically synthesized
  source 1..22: mol_type = other DNA
ttcttcattttttctttccttc

SEQ ID NO: 27334 - DNA, 22 bp, synthetic construct
  misc_feature 1..22: note = chemically synthesized
  source 1..22: mol_type = other DNA
ttcattttttctttccttctgc

SEQ ID NO: 27335 - DNA, 22 bp, synthetic construct
  misc_feature 1..22: note = chemically synthesized
  source 1..22: mol_type = other DNA
cattttttctttccttctgcta

SEQ ID NO: 27336 - DNA, 22 bp, synthetic construct
  misc_feature 1..22: note = chemically synthesized
  source 1..22: mol_type = other DNA
attttttctttccttctgctag

SEQ ID NO: 27337 - DNA, 22 bp, synthetic construct
  misc_feature 1..22: note = chemically synthesized
  source 1..22: mol_type = other DNA
tttctttccttctgctagtttt

SEQ ID NO: 27338 - DNA, 22 bp, synthetic construct
  misc_feature 1..22: note = chemically synthesized
  source 1..22: mol_type = other DNA
ttctttccttctgctagttttg

SEQ ID NO: 27339 - DNA, 22 bp, synthetic construct
  misc_feature 1..22: note = chemically synthesized
  source 1..22: mol_type = other DNA
tctttccttctgctagttttgg

SEQ ID NO: 27340 - DNA, 22 bp, synthetic construct
  misc_feature 1..22: note = chemically synthesized
  source 1..22: mol_type = other DNA
ctttccttctgctagttttggg

SEQ ID NO: 27341 - DNA, 22 bp, synthetic construct
  misc_feature 1..22: note = chemically synthesized
  source 1..22: mol_type = other DNA
tttccttctgctagttttgggt

SEQ ID NO: 27342 - DNA, 22 bp, synthetic construct
  misc_feature 1..22: note = chemically synthesized
  source 1..22: mol_type = other DNA
tccttctgctagttttgggttt

SEQ ID NO: 27343 - DNA, 22 bp, synthetic construct
  misc_feature 1..22: note = chemically synthesized
  source 1..22: mol_type = other DNA
ccttctgctagttttgggtttt

SEQ ID NO: 27344 - DNA, 22 bp, synthetic construct
  misc_feature 1..22: note = chemically synthesized
  source 1..22: mol_type = other DNA
cttctgctagttttgggttttg

SEQ ID NO: 27345 - DNA, 22 bp, synthetic construct
  misc_feature 1..22: note = chemically synthesized
  source 1..22: mol_type = other DNA
ctgctagttttgggttttgttc

SEQ ID NO: 27346 - DNA, 22 bp, synthetic construct
  misc_feature 1..22: note = chemically synthesized
  source 1..22: mol_type = other DNA
tgctagttttgggttttgttct

SEQ ID NO: 27347 - DNA, 22 bp, synthetic construct
  misc_feature 1..22: note = chemically synthesized
  source 1..22: mol_type = other DNA
ctagttttgggttttgttcttg

SEQ ID NO: 27348 - DNA, 22 bp, synthetic construct
  misc_feature 1..22: note = chemically synthesized
  source 1..22: mol_type = other DNA
gttttgggttttgttcttgctt

SEQ ID NO: 27349 - DNA, 22 bp, synthetic construct
  misc_feature 1..22: note = chemically synthesized
  source 1..22: mol_type = other DNA
tgggttttgttcttgcttttct

SEQ ID NO: 27350 - DNA, 22 bp, synthetic construct
  misc_feature 1..22: note = chemically synthesized
  source 1..22: mol_type = other DNA
gggttttgttcttgcttttcta

SEQ ID NO: 27351 - DNA, 22 bp, synthetic construct
  misc_feature 1..22: note = chemically synthesized
  source 1..22: mol_type = other DNA
ggttttgttcttgcttttctag

SEQ ID NO: 27352 - DNA, 22 bp, synthetic construct
  misc_feature 1..22: note = chemically synthesized
  source 1..22: mol_type = other DNA
tgttcttgcttttctagcttgt

SEQ ID NO: 27353 - DNA, 22 bp, synthetic construct
  misc_feature 1..22: note = chemically synthesized
  source 1..22: mol_type = other DNA
gttcttgcttttctagcttgtt

SEQ ID NO: 27354 - DNA, 22 bp, synthetic construct
  misc_feature 1..22: note = chemically synthesized
  source 1..22: mol_type = other DNA
ttcttgcttttctagcttgttg

SEQ ID NO: 27355 - DNA, 22 bp, synthetic construct
  misc_feature 1..22: note = chemically synthesized
  source 1..22: mol_type = other DNA
ttgcttttctagcttgttgagg

SEQ ID NO: 27356 - DNA, 22 bp, synthetic construct
  misc_feature 1..22: note = chemically synthesized
  source 1..22: mol_type = other DNA
gcttttctagcttgttgaggta

SEQ ID NO: 27357 - DNA, 22 bp, synthetic construct
  misc_feature 1..22: note = chemically synthesized
  source 1..22: mol_type = other DNA
cttttctagcttgttgaggtac

SEQ ID NO: 27358 - DNA, 22 bp, synthetic construct
  misc_feature 1..22: note = chemically synthesized
  source 1..22: mol_type = other DNA
ttctagcttgttgaggtacatg

SEQ ID NO: 27359 - DNA, 22 bp, synthetic construct
  misc_feature 1..22: note = chemically synthesized
  source 1..22: mol_type = other DNA
tctagcttgttgaggtacatga

SEQ ID NO: 27360 - DNA, 22 bp, synthetic construct
  misc_feature 1..22: note = chemically synthesized
  source 1..22: mol_type = other DNA
ctagcttgttgaggtacatgat

SEQ ID NO: 27361 - DNA, 22 bp, synthetic construct
  misc_feature 1..22: note = chemically synthesized
  source 1..22: mol_type = other DNA
tagcttgttgaggtacatgatt

SEQ ID NO: 27362 - DNA, 22 bp, synthetic construct
  misc_feature 1..22: note = chemically synthesized
  source 1..22: mol_type = other DNA
gcttgttgaggtacatgattag

SEQ ID NO: 27363 - DNA, 22 bp, synthetic construct
  misc_feature 1..22: note = chemically synthesized
  source 1..22: mol_type = other DNA
gttgaggtacatgattagatta

SEQ ID NO: 27364 - DNA, 22 bp, synthetic construct
  misc_feature 1..22: note = chemically synthesized
  source 1..22: mol_type = other DNA
ttgaggtacatgattagattat

SEQ ID NO: 27365 - DNA, 22 bp, synthetic construct
  misc_feature 1..22: note = chemically synthesized
  source 1..22: mol_type = other DNA
aggtacatgattagattatata

SEQ ID NO: 27366 - DNA, 22 bp, synthetic construct
  misc_feature 1..22: note = chemically synthesized
  source 1..22: mol_type = other DNA
gattatatatttgaaatctttc

SEQ ID NO: 27367 - DNA, 22 bp, synthetic construct
  misc_feature 1..22: note = chemically synthesized
  source 1..22: mol_type = other DNA
tatatttgaaatctttctatgt

SEQ ID NO: 27368 - DNA, 22 bp, synthetic construct
  misc_feature 1..22: note = chemically synthesized
  source 1..22: mol_type = other DNA
gaaatctttctatgtttttaat

SEQ ID NO: 27369 - DNA, 22 bp, synthetic construct
  misc_feature 1..22: note = chemically synthesized
  source 1..22: mol_type = other DNA
aaatctttctatgtttttaatt

SEQ ID NO: 27370 - DNA, 22 bp, synthetic construct
  misc_feature 1..22: note = chemically synthesized
  source 1..22: mol_type = other DNA
tctatgtttttaatttaagtgt

SEQ ID NO: 27371 - DNA, 22 bp, synthetic construct
  misc_feature 1..22: note = chemically synthesized
  source 1..22: mol_type = other DNA
ctatgtttttaatttaagtgtt

SEQ ID NO: 27372 - DNA, 22 bp, synthetic construct
  misc_feature 1..22: note = chemically synthesized
  source 1..22: mol_type = other DNA
tatgtttttaatttaagtgttt

SEQ ID NO: 27373 - DNA, 22 bp, synthetic construct
  misc_feature 1..22: note = chemically synthesized
  source 1..22: mol_type = other DNA
tgtttttaatttaagtgtttat

SEQ ID NO: 27374 - DNA, 22 bp, synthetic construct
  misc_feature 1..22: note = chemically synthesized
  source 1..22: mol_type = other DNA
ttaatttaagtgtttattgata

SEQ ID NO: 27375 - DNA, 22 bp, synthetic construct
  misc_feature 1..22: note = chemically synthesized
  source 1..22: mol_type = other DNA
taatttaagtgtttattgataa

SEQ ID NO: 27376 - DNA, 22 bp, synthetic construct
  misc_feature 1..22: note = chemically synthesized
  source 1..22: mol_type = other DNA
aatttaagtgtttattgataag

SEQ ID NO: 27377 - DNA, 22 bp, synthetic construct
  misc_feature 1..22: note = chemically synthesized
  source 1..22: mol_type = other DNA
atttaagtgtttattgataagc

SEQ ID NO: 27378 - DNA, 22 bp, synthetic construct
  misc_feature 1..22: note = chemically synthesized
  source 1..22: mol_type = other DNA
aagtgtttattgataagcttct

SEQ ID NO: 27379 - DNA, 22 bp, synthetic construct
  misc_feature 1..22: note = chemically synthesized
  source 1..22: mol_type = other DNA
agtgtttattgataagcttctc

SEQ ID NO: 27380 - DNA, 22 bp, synthetic construct
  misc_feature 1..22: note = chemically synthesized
  source 1..22: mol_type = other DNA
attgataagcttctctcttagc

SEQ ID NO: 27381 - DNA, 22 bp, synthetic construct
  misc_feature 1..22: note = chemically synthesized
  source 1..22: mol_type = other DNA
ttgataagcttctctcttagca

SEQ ID NO: 27382 - DNA, 22 bp, synthetic construct
  misc_feature 1..22: note = chemically synthesized
  source 1..22: mol_type = other DNA
ataagcttctctcttagcactg

SEQ ID NO: 27383 - DNA, 22 bp, synthetic construct
  misc_feature 1..22: note = chemically synthesized
  source 1..22: mol_type = other DNA
ctctcttagcactgcttttgct

SEQ ID NO: 27384 - DNA, 22 bp, synthetic construct
  misc_feature 1..22: note = chemically synthesized
  source 1..22: mol_type = other DNA
tctcttagcactgcttttgctg

SEQ ID NO: 27385 - DNA, 22 bp, synthetic construct
  misc_feature 1..22: note = chemically synthesized
  source 1..22: mol_type = other DNA
tcttagcactgcttttgctgta

SEQ ID NO: 27386 - DNA, 22 bp, synthetic construct
  misc_feature 1..22: note = chemically synthesized
  source 1..22: mol_type = other DNA
ttagcactgcttttgctgtatc

SEQ ID NO: 27387 - DNA, 22 bp, synthetic construct
  misc_feature 1..22: note = chemically synthesized
  source 1..22: mol_type = other DNA
agcactgcttttgctgtatccc

SEQ ID NO: 27388 - DNA, 22 bp, synthetic construct
  misc_feature 1..22: note = chemically synthesized
  source 1..22: mol_type = other DNA
gcactgcttttgctgtatccca

SEQ ID NO: 27389 - DNA, 22 bp, synthetic construct
  misc_feature 1..22: note = chemically synthesized
  source 1..22: mol_type = other DNA
cttttgctgtatcccatggctt

SEQ ID NO: 27390 - DNA, 22 bp, synthetic construct
  misc_feature 1..22: note = chemically synthesized
  source 1..22: mol_type = other DNA
ttgctgtatcccatggcttttc

SEQ ID NO: 27391 - DNA, 22 bp, synthetic construct
  misc_feature 1..22: note = chemically synthesized
  source 1..22: mol_type = other DNA
tgctgtatcccatggcttttcc

SEQ ID NO: 27392 - DNA, 22 bp, synthetic construct
  misc_feature 1..22: note = chemically synthesized
  source 1..22: mol_type = other DNA
gctgtatcccatggcttttcct

SEQ ID NO: 27393 - DNA, 22 bp, synthetic construct
  misc_feature 1..22: note = chemically synthesized
  source 1..22: mol_type = other DNA
ctgtatcccatggcttttccta

SEQ ID NO: 27394 - DNA, 22 bp, synthetic construct
  misc_feature 1..22: note = chemically synthesized
  source 1..22: mol_type = other DNA
tatcccatggcttttcctatgt

SEQ ID NO: 27395 - DNA, 22 bp, synthetic construct
  misc_feature 1..22: note = chemically synthesized
  source 1..22: mol_type = other DNA
ttcctatgttgtatttcaattt

SEQ ID NO: 27396 - DNA, 22 bp, synthetic construct
  misc_feature 1..22: note = chemically synthesized
  source 1..22: mol_type = other DNA
tcctatgttgtatttcaatttt

SEQ ID NO: 27397 - DNA, 22 bp, synthetic construct
  misc_feature 1..22: note = chemically synthesized
  source 1..22: mol_type = other DNA
cctatgttgtatttcaattttc

SEQ ID NO: 27398 - DNA, 22 bp, synthetic construct
  misc_feature 1..22: note = chemically synthesized
  source 1..22: mol_type = other DNA
ctatgttgtatttcaattttca

SEQ ID NO: 27399 - DNA, 22 bp, synthetic construct
  misc_feature 1..22: note = chemically synthesized
  source 1..22: mol_type = other DNA
tgttgtatttcaattttcattt

SEQ ID NO: 27400 - DNA, 22 bp, synthetic construct
  misc_feature 1..22: note = chemically synthesized
  source 1..22: mol_type = other DNA
tatttcaattttcatttgtttc

SEQ ID NO: 27401 - DNA, 22 bp, synthetic construct
  misc_feature 1..22: note = chemically synthesized
  source 1..22: mol_type = other DNA
caattttcatttgtttcaaaaa

SEQ ID NO: 27402 - DNA, 22 bp, synthetic construct
  misc_feature 1..22: note = chemically synthesized
  source 1..22: mol_type = other DNA
aattttcatttgtttcaaaaaa

SEQ ID NO: 27403 - DNA, 22 bp, synthetic construct
  misc_feature 1..22: note = chemically synthesized
  source 1..22: mol_type = other DNA
tcatttgtttcaaaaaattttt

SEQ ID NO: 27404 - DNA, 22 bp, synthetic construct
  misc_feature 1..22: note = chemically synthesized
  source 1..22: mol_type = other DNA
catttgtttcaaaaaatttttg

SEQ ID NO: 27405 - DNA, 22 bp, synthetic construct
  misc_feature 1..22: note = chemically synthesized
  source 1..22: mol_type = other DNA
atttgtttcaaaaaatttttga

SEQ ID NO: 27406 - DNA, 22 bp, synthetic construct
  misc_feature 1..22: note = chemically synthesized
  source 1..22: mol_type = other DNA
gtttcaaaaaatttttgatttc

SEQ ID NO: 27407 - DNA, 22 bp, synthetic construct
  misc_feature 1..22: note = chemically synthesized
  source 1..22: mol_type = other DNA
tttcaaaaaatttttgatttcc

SEQ ID NO: 27408 - DNA, 22 bp, synthetic construct
  misc_feature 1..22: note = chemically synthesized
  source 1..22: mol_type = other DNA
caaaaaatttttgatttccttc

SEQ ID NO: 27409 - DNA, 22 bp, synthetic construct
  misc_feature 1..22: note = chemically synthesized
  source 1..22: mol_type = other DNA
aaaaaatttttgatttccttct

SEQ ID NO: 27410 - DNA, 22 bp, synthetic construct
  misc_feature 1..22: note = chemically synthesized
  source 1..22: mol_type = other DNA
ttgatttccttcttaattttct

SEQ ID NO: 27411 - DNA, 22 bp, synthetic construct
  misc_feature 1..22: note = chemically synthesized
  source 1..22: mol_type = other DNA
tgatttccttcttaattttctt

SEQ ID NO: 27412 - DNA, 22 bp, synthetic construct
  misc_feature 1..22: note = chemically synthesized
  source 1..22: mol_type = other DNA
gatttccttcttaattttcttc

SEQ ID NO: 27413 - DNA, 22 bp, synthetic construct
  misc_feature 1..22: note = chemically synthesized
  source 1..22: mol_type = other DNA
atttccttcttaattttcttct

SEQ ID NO: 27414 - DNA, 22 bp, synthetic construct
  misc_feature 1..22: note = chemically synthesized
  source 1..22: mol_type = other DNA
ccttcttaattttcttcttgac

SEQ ID NO: 27415 - DNA, 22 bp, synthetic construct
  misc_feature 1..22: note = chemically synthesized
  source 1..22: mol_type = other DNA
cttcttaattttcttcttgaca

SEQ ID NO: 27416 - DNA, 22 bp, synthetic construct
  misc_feature 1..22: note = chemically synthesized
  source 1..22: mol_type = other DNA
cttaattttcttcttgacataa

SEQ ID NO: 27417 - DNA, 22 bp, synthetic construct
  misc_feature 1..22: note = chemically synthesized
  source 1..22: mol_type = other DNA
ttaattttcttcttgacataac

SEQ ID NO: 27418 - DNA, 22 bp, synthetic construct
  misc_feature 1..22: note = chemically synthesized
  source 1..22: mol_type = other DNA
aattttcttcttgacataacgt

SEQ ID NO: 27419 - DNA, 22 bp, synthetic construct
  misc_feature 1..22: note = chemically synthesized
  source 1..22: mol_type = other DNA
attttcttcttgacataacgtt

SEQ ID NO: 27420 - DNA, 22 bp, synthetic construct
  misc_feature 1..22: note = chemically synthesized
  source 1..22: mol_type = other DNA
tcttcttgacataacgttcatt

SEQ ID NO: 27421 - DNA, 22 bp, synthetic construct
  misc_feature 1..22: note = chemically synthesized
  source 1..22: mol_type = other DNA
cttcttgacataacgttcattc

SEQ ID NO: 27422 - DNA, 22 bp, synthetic construct
  misc_feature 1..22: note = chemically synthesized
  source 1..22: mol_type = other DNA
ttcttgacataacgttcattca

SEQ ID NO: 27423 - DNA, 22 bp, synthetic construct
  misc_feature 1..22: note = chemically synthesized
  source 1..22: mol_type = other DNA
cttgacataacgttcattcagg

SEQ ID NO: 27424 - DNA, 22 bp, synthetic construct
  misc_feature 1..22: note = chemically synthesized
  source 1..22: mol_type = other DNA
ttgacataacgttcattcagga

SEQ ID NO: 27425 - DNA, 22 bp, synthetic construct
  misc_feature 1..22: note = chemically synthesized
  source 1..22: mol_type = other DNA
gacataacgttcattcaggagc

SEQ ID NO: 27426 - DNA, 22 bp, synthetic construct
  misc_feature 1..22: note = chemically synthesized
  source 1..22: mol_type = other DNA
acataacgttcattcaggagca

SEQ ID NO: 27427 - DNA, 22 bp, synthetic construct
  misc_feature 1..22: note = chemically synthesized
  source 1..22: mol_type = other DNA
attcaggagcatgttgtttaat

SEQ ID NO: 27428 - DNA, 22 bp, synthetic construct
  misc_feature 1..22: note = chemically synthesized
  source 1..22: mol_type = other DNA
aggagcatgttgtttaatttcc

SEQ ID NO: 27429 - DNA, 22 bp, synthetic construct
  misc_feature 1..22: note = chemically synthesized
  source 1..22: mol_type = other DNA
tttaatttccatgtatttgtat

SEQ ID NO: 27430 - DNA, 22 bp, synthetic construct
  misc_feature 1..22: note = chemically synthesized
  source 1..22: mol_type = other DNA
aatttccatgtatttgtatagg

SEQ ID NO: 27431 - DNA, 22 bp, synthetic construct
  misc_feature 1..22: note = chemically synthesized
  source 1..22: mol_type = other DNA
atttccatgtatttgtataggt

SEQ ID NO: 27432 - DNA, 22 bp, synthetic construct
  misc_feature 1..22: note = chemically synthesized
  source 1..22: mol_type = other DNA
ccatgtatttgtataggtttta

SEQ ID NO: 27433 - DNA, 22 bp, synthetic construct
  misc_feature 1..22: note = chemically synthesized
  source 1..22: mol_type = other DNA
catgtatttgtataggttttaa

SEQ ID NO: 27434 - DNA, 22 bp, synthetic construct
  misc_feature 1..22: note = chemically synthesized
  source 1..22: mol_type = other DNA
gtataggttttaaagtttttct

SEQ ID NO: 27435 - DNA, 22 bp, synthetic construct
  misc_feature 1..22: note = chemically synthesized
  source 1..22: mol_type = other DNA
tataggttttaaagtttttctt

SEQ ID NO: 27436 - DNA, 22 bp, synthetic construct
  misc_feature 1..22: note = chemically synthesized
  source 1..22: mol_type = other DNA
taaagtttttcttgttattgat

SEQ ID NO: 27437 - DNA, 22 bp, synthetic construct
  misc_feature 1..22: note = chemically synthesized
  source 1..22: mol_type = other DNA
aaagtttttcttgttattgatt

SEQ ID NO: 27438 - DNA, 22 bp, synthetic construct
  misc_feature 1..22: note = chemically synthesized
  source 1..22: mol_type = other DNA
aagtttttcttgttattgattt

SEQ ID NO: 27439 - DNA, 22 bp, synthetic construct
  misc_feature 1..22: note = chemically synthesized
  source 1..22: mol_type = other DNA
ttcttgttattgatttctagtt

SEQ ID NO: 27440 - DNA, 22 bp, synthetic construct
  misc_feature 1..22: note = chemically synthesized
  source 1..22: mol_type = other DNA
tcttgttattgatttctagttt

SEQ ID NO: 27441 - DNA, 22 bp, synthetic construct
  misc_feature 1..22: note = chemically synthesized
  source 1..22: mol_type = other DNA
cttgttattgatttctagtttt

SEQ ID NO: 27442 - DNA, 22 bp, synthetic construct
  misc_feature 1..22: note = chemically synthesized
  source 1..22: mol_type = other DNA
ttgttattgatttctagtttta

SEQ ID NO: 27443 - DNA, 22 bp, synthetic construct
  misc_feature 1..22: note = chemically synthesized
  source 1..22: mol_type = other DNA
gttattgatttctagttttatt

SEQ ID NO: 27444 - DNA, 22 bp, synthetic construct
  misc_feature 1..22: note = chemically synthesized
  source 1..22: mol_type = other DNA
ttattgatttctagttttattc

SEQ ID NO: 27445 - DNA, 22 bp, synthetic construct
  misc_feature 1..22: note = chemically synthesized
  source 1..22: mol_type = other DNA
ttgatttctagttttattccat

SEQ ID NO: 27446 - DNA, 22 bp, synthetic construct
  misc_feature 1..22: note = chemically synthesized
  source 1..22: mol_type = other DNA
atttctagttttattccattgt

SEQ ID NO: 27447 - DNA, 22 bp, synthetic construct
  misc_feature 1..22: note = chemically synthesized
  source 1..22: mol_type = other DNA
ctagttttattccattgtggtc

SEQ ID NO: 27448 - DNA, 22 bp, synthetic construct
  misc_feature 1..22: note = chemically synthesized
  source 1..22: mol_type = other DNA
tagttttattccattgtggtct

SEQ ID NO: 27449 - DNA, 22 bp, synthetic construct
  misc_feature 1..22: note = chemically synthesized
  source 1..22: mol_type = other DNA
gttttattccattgtggtctga

SEQ ID NO: 27450 - DNA, 22 bp, synthetic construct
  misc_feature 1..22: note = chemically synthesized
  source 1..22: mol_type = other DNA
tattccattgtggtctgagaag

SEQ ID NO: 27451 - DNA, 22 bp, synthetic construct
  misc_feature 1..22: note = chemically synthesized
  source 1..22: mol_type = other DNA
attccattgtggtctgagaaga

SEQ ID NO: 27452 - DNA, 22 bp, synthetic construct
  misc_feature 1..22: note = chemically synthesized
  source 1..22: mol_type = other DNA
ttccattgtggtctgagaagat

SEQ ID NO: 27453 - DNA, 22 bp, synthetic construct
  misc_feature 1..22: note = chemically synthesized
  source 1..22: mol_type = other DNA
cattgtggtctgagaagatgct

SEQ ID NO: 27454 - DNA, 22 bp, synthetic construct
  misc_feature 1..22: note = chemically synthesized
  source 1..22: mol_type = other DNA
tggtctgagaagatgcttaata

SEQ ID NO: 27455 - DNA, 22 bp, synthetic construct
  misc_feature 1..22: note = chemically synthesized
  source 1..22: mol_type = other DNA
agaagatgcttaatatgatttc

SEQ ID NO: 27456 - DNA, 22 bp, synthetic construct
  misc_feature 1..22: note = chemically synthesized
  source 1..22: mol_type = other DNA
aatatgatttcaaatatttcaa

SEQ ID NO: 27457 - DNA, 22 bp, synthetic construct
  misc_feature 1..22: note = chemically synthesized
  source 1..22: mol_type = other DNA
atatgatttcaaatatttcaaa

SEQ ID NO: 27458 - DNA, 22 bp, synthetic construct
  misc_feature 1..22: note = chemically synthesized
  source 1..22: mol_type = other DNA
caaatatttcaaattagttgag

SEQ ID NO: 27459 - DNA, 22 bp, synthetic construct
  misc_feature 1..22: note = chemically synthesized
  source 1..22: mol_type = other DNA
aaatatttcaaattagttgaga

SEQ ID NO: 27460 - DNA, 22 bp, synthetic construct
  misc_feature 1..22: note = chemically synthesized
  source 1..22: mol_type = other DNA
caaattagttgagacttctttt

SEQ ID NO: 27461 - DNA, 22 bp, synthetic construct
  misc_feature 1..22: note = chemically synthesized
  source 1..22: mol_type = other DNA
aaattagttgagacttcttttg

SEQ ID NO: 27462 - DNA, 22 bp, synthetic construct
  misc_feature 1..22: note = chemically synthesized
  source 1..22: mol_type = other DNA
gttgagacttcttttgtgttct

SEQ ID NO: 27463 - DNA, 22 bp, synthetic construct
  misc_feature 1..22: note = chemically synthesized
  source 1..22: mol_type = other DNA
agacttcttttgtgttctaaca

SEQ ID NO: 27464 - DNA, 22 bp, synthetic construct
  misc_feature 1..22: note = chemically synthesized
  source 1..22: mol_type = other DNA
cttttgtgttctaacatatggt

SEQ ID NO: 27465 - DNA, 22 bp, synthetic construct
  misc_feature 1..22: note = chemically synthesized
  source 1..22: mol_type = other DNA
ttttgtgttctaacatatggtg

SEQ ID NO: 27466 - DNA, 22 bp, synthetic construct
  misc_feature 1..22: note = chemically synthesized
  source 1..22: mol_type = other DNA
ttgtgttctaacatatggtgta

SEQ ID NO: 27467 - DNA, 22 bp, synthetic construct
  misc_feature 1..22: note = chemically synthesized
  source 1..22: mol_type = other DNA
tgtgttctaacatatggtgtat

SEQ ID NO: 27468 - DNA, 22 bp, synthetic construct
  misc_feature 1..22: note = chemically synthesized
  source 1..22: mol_type = other DNA
gtgttctaacatatggtgtatc

SEQ ID NO: 27469 - DNA, 22 bp, synthetic construct
  misc_feature 1..22: note = chemically synthesized
  source 1..22: mol_type = other DNA
tgttctaacatatggtgtatcc

SEQ ID NO: 27470 - DNA, 22 bp, synthetic construct
  misc_feature 1..22: note = chemically synthesized
  source 1..22: mol_type = other DNA
taacatatggtgtatcctgggg

SEQ ID NO: 27471 - DNA, 22 bp, synthetic construct
  misc_feature 1..22: note = chemically synthesized
  source 1..22: mol_type = other DNA
acatatggtgtatcctggggaa

SEQ ID NO: 27472 - DNA, 22 bp, synthetic construct
  misc_feature 1..22: note = chemically synthesized
  source 1..22: mol_type = other DNA
gggaatgcgtcatgtgctgatg

SEQ ID NO: 27473 - DNA, 22 bp, synthetic construct
  misc_feature 1..22: note = chemically synthesized
  source 1..22: mol_type = other DNA
atgagataaatatattctgtag

SEQ ID NO: 27474 - DNA, 22 bp, synthetic construct
  misc_feature 1..22: note = chemically synthesized
  source 1..22: mol_type = other DNA
tgtagctgttggatgaaatatt

SEQ ID NO: 27475 - DNA, 22 bp, synthetic construct
  misc_feature 1..22: note = chemically synthesized
  source 1..22: mol_type = other DNA
tagctgttggatgaaatattgt

SEQ ID NO: 27476 - DNA, 22 bp, synthetic construct
  misc_feature 1..22: note = chemically synthesized
  source 1..22: mol_type = other DNA
ttggatgaaatattgtgtaaat

SEQ ID NO: 27477 - DNA, 22 bp, synthetic construct
  misc_feature 1..22: note = chemically synthesized
  source 1..22: mol_type = other DNA
gatgaaatattgtgtaaatgtt

SEQ ID NO: 27478 - DNA, 22 bp, synthetic construct
  misc_feature 1..22: note = chemically synthesized
  source 1..22: mol_type = other DNA
tgtaaatgttagatccatttgg

SEQ ID NO: 27479 - DNA, 22 bp, synthetic construct
  misc_feature 1..22: note = chemically synthesized
  source 1..22: mol_type = other DNA
gatccatttggtctaaagtcaa

SEQ ID NO: 27480 - DNA, 22 bp, synthetic construct
  misc_feature 1..22: note = chemically synthesized
  source 1..22: mol_type = other DNA
ggtctaaagtcaagtttaaatc

SEQ ID NO: 27481 - DNA, 22 bp, synthetic construct
  misc_feature 1..22: note = chemically synthesized
  source 1..22: mol_type = other DNA
gtctaaagtcaagtttaaatcc

SEQ ID NO: 27482 - DNA, 22 bp, synthetic construct
  misc_feature 1..22: note = chemically synthesized
  source 1..22: mol_type = other DNA
aagtcaagtttaaatccaatgt

SEQ ID NO: 27483 - DNA, 22 bp, synthetic construct
  misc_feature 1..22: note = chemically synthesized
  source 1..22: mol_type = other DNA
aaatccaatgtttctttgttaa

SEQ ID NO: 27484 - DNA, 22 bp, synthetic construct
  misc_feature 1..22: note = chemically synthesized
  source 1..22: mol_type = other DNA
aatccaatgtttctttgttaat

SEQ ID NO: 27485 - DNA, 22 bp, synthetic construct
  misc_feature 1..22: note = chemically synthesized
  source 1..22: mol_type = other DNA
ctttgttaattttctgtctaga

SEQ ID NO: 27486 - DNA, 22 bp, synthetic construct
  misc_feature 1..22: note = chemically synthesized
  source 1..22: mol_type = other DNA
tttgttaattttctgtctagat

SEQ ID NO: 27487 - DNA, 22 bp, synthetic construct
  misc_feature 1..22: note = chemically synthesized
  source 1..22: mol_type = other DNA
tgttaattttctgtctagatga

SEQ ID NO: 27488 - DNA, 22 bp, synthetic construct
  misc_feature 1..22: note = chemically synthesized
  source 1..22: mol_type = other DNA
gttaattttctgtctagatgat

SEQ ID NO: 27489 - DNA, 22 bp, synthetic construct
  misc_feature 1..22: note = chemically synthesized
  source 1..22: mol_type = other DNA
ttaattttctgtctagatgatc

SEQ ID NO: 27490 - DNA, 22 bp, synthetic construct
  misc_feature 1..22: note = chemically synthesized
  source 1..22: mol_type = other DNA
attttctgtctagatgatctat

SEQ ID NO: 27491 - DNA, 22 bp, synthetic construct
  misc_feature 1..22: note = chemically synthesized
  source 1..22: mol_type = other DNA
tctgtctagatgatctatctga

SEQ ID NO: 27492 - DNA, 22 bp, synthetic construct
  misc_feature 1..22: note = chemically synthesized
  source 1..22: mol_type = other DNA
ctgtctagatgatctatctgat

SEQ ID NO: 27493 - DNA, 22 bp, synthetic construct
  misc_feature 1..22: note = chemically synthesized
  source 1..22: mol_type = other DNA
tgtctagatgatctatctgatg

SEQ ID NO: 27494 - DNA, 22 bp, synthetic construct
  misc_feature 1..22: note = chemically synthesized
  source 1..22: mol_type = other DNA
tctagatgatctatctgatgct

SEQ ID NO: 27495 - DNA, 22 bp, synthetic construct
  misc_feature 1..22: note = chemically synthesized
  source 1..22: mol_type = other DNA
gatgatctatctgatgctgaga

SEQ ID NO: 27496 - DNA, 22 bp, synthetic construct
  misc_feature 1..22: note = chemically synthesized
  source 1..22: mol_type = other DNA
tctgatgctgagattagaatgt

SEQ ID NO: 27497 - DNA, 22 bp, synthetic construct
  misc_feature 1..22: note = chemically synthesized
  source 1..22: mol_type = other DNA
atgctgagattagaatgttgaa

SEQ ID NO: 27498 - DNA, 22 bp, synthetic construct
  misc_feature 1..22: note = chemically synthesized
  source 1..22: mol_type = other DNA
agattagaatgttgaaatcccc

SEQ ID NO: 27499 - DNA, 22 bp, synthetic construct
  misc_feature 1..22: note = chemically synthesized
  source 1..22: mol_type = other DNA
gaatgttgaaatccccaactat

SEQ ID NO: 27500 - DNA, 22 bp, synthetic construct
  misc_feature 1..22: note = chemically synthesized
  source 1..22: mol_type = other DNA
aaatccccaactattattgtat

SEQ ID NO: 27501 - DNA, 22 bp, synthetic construct
  misc_feature 1..22: note = chemically synthesized
  source 1..22: mol_type = other DNA
ttattgtattggattctatttc

SEQ ID NO: 27502 - DNA, 22 bp, synthetic construct
  misc_feature 1..22: note = chemically synthesized
  source 1..22: mol_type = other DNA
ttgtattggattctatttcacc

SEQ ID NO: 27503 - DNA, 22 bp, synthetic construct
  misc_feature 1..22: note = chemically synthesized
  source 1..22: mol_type = other DNA
tattggattctatttcaccctt

SEQ ID NO: 27504 - DNA, 22 bp, synthetic construct
  misc_feature 1..22: note = chemically synthesized
  source 1..22: mol_type = other DNA
gattctatttcaccctttatat

SEQ ID NO: 27505 - DNA, 22 bp, synthetic construct
  misc_feature 1..22: note = chemically synthesized
  source 1..22: mol_type = other DNA
tatttcaccctttatatctaat

SEQ ID NO: 27506 - DNA, 22 bp, synthetic construct
  misc_feature 1..22: note = chemically synthesized
  source 1..22: mol_type = other DNA
tttcaccctttatatctaataa

SEQ ID NO: 27507 - DNA, 22 bp, synthetic construct
  misc_feature 1..22: note = chemically synthesized
  source 1..22: mol_type = other DNA
caccctttatatctaataacat

SEQ ID NO: 27508 - DNA, 22 bp, synthetic construct
  misc_feature 1..22: note = chemically synthesized
  source 1..22: mol_type = other DNA
accctttatatctaataacatt

SEQ ID NO: 27509 - DNA, 22 bp, synthetic construct
  misc_feature 1..22: note = chemically synthesized
  source 1..22: mol_type = other DNA
tatatctaataacatttgcttt

SEQ ID NO: 27510 - DNA, 22 bp, synthetic construct
  misc_feature 1..22: note = chemically synthesized
  source 1..22: mol_type = other DNA
atatctaataacatttgcttta

SEQ ID NO: 27511 - DNA, 22 bp, synthetic construct
  misc_feature 1..22: note = chemically synthesized
  source 1..22: mol_type = other DNA
tatctaataacatttgctttac

SEQ ID NO: 27512 - DNA, 22 bp, synthetic construct
  misc_feature 1..22: note = chemically synthesized
  source 1..22: mol_type = other DNA
ataacatttgctttacatatct

SEQ ID NO: 27513 - DNA, 22 bp, synthetic construct
  misc_feature 1..22: note = chemically synthesized
  source 1..22: mol_type = other DNA
gctttacatatctggatgctct

SEQ ID NO: 27514 - DNA, 22 bp, synthetic construct
  misc_feature 1..22: note = chemically synthesized
  source 1..22: mol_type = other DNA
ctttacatatctggatgctctg

SEQ ID NO: 27515 - DNA, 22 bp, synthetic construct
  misc_feature 1..22: note = chemically synthesized
  source 1..22: mol_type = other DNA
tacatatctggatgctctggtg

SEQ ID NO: 27516 - DNA, 22 bp, synthetic construct
  misc_feature 1..22: note = chemically synthesized
  source 1..22: mol_type = other DNA
acatatctggatgctctggtgt

SEQ ID NO: 27517 - DNA, 22 bp, synthetic construct
  misc_feature 1..22: note = chemically synthesized
  source 1..22: mol_type = other DNA
catatctggatgctctggtgtt

SEQ ID NO: 27518 - DNA, 22 bp, synthetic construct
  misc_feature 1..22: note = chemically synthesized
  source 1..22: mol_type = other DNA
gatgctctggtgttgagtgtga

SEQ ID NO: 27519 - DNA, 22 bp, synthetic construct
  misc_feature 1..22: note = chemically synthesized
  source 1..22: mol_type = other DNA
tggtgttgagtgtgaatgttta

SEQ ID NO: 27520 - DNA, 22 bp, synthetic construct
  misc_feature 1..22: note = chemically synthesized
  source 1..22: mol_type = other DNA
gtgttgagtgtgaatgtttaga

SEQ ID NO: 27521 - DNA, 22 bp, synthetic construct
  misc_feature 1..22: note = chemically synthesized
  source 1..22: mol_type = other DNA
agtgtgaatgtttagaattgtt

SEQ ID NO: 27522 - DNA, 22 bp, synthetic construct
  misc_feature 1..22: note = chemically synthesized
  source 1..22: mol_type = other DNA
agaattgttatatactcttgct

SEQ ID NO: 27523 - DNA, 22 bp, synthetic construct
  misc_feature 1..22: note = chemically synthesized
  source 1..22: mol_type = other DNA
gaattgttatatactcttgctg

SEQ ID NO: 27524 - DNA, 22 bp, synthetic construct
  misc_feature 1..22: note = chemically synthesized
  source 1..22: mol_type = other DNA
ttatatactcttgctgaattgt

SEQ ID NO: 27525 - DNA, 22 bp, synthetic construct
  misc_feature 1..22: note = chemically synthesized
  source 1..22: mol_type = other DNA
tatactcttgctgaattgttcc

SEQ ID NO: 27526 - DNA, 22 bp, synthetic construct
  misc_feature 1..22: note = chemically synthesized
  source 1..22: mol_type = other DNA
ttgctgaattgttccttttatc

SEQ ID NO: 27527 - DNA, 22 bp, synthetic construct
  misc_feature 1..22: note = chemically synthesized
  source 1..22: mol_type = other DNA
gctgaattgttccttttatcat

SEQ ID NO: 27528 - DNA, 22 bp, synthetic construct
  misc_feature 1..22: note = chemically synthesized
  source 1..22: mol_type = other DNA
ctgaattgttccttttatcatt

SEQ ID NO: 27529 - DNA, 22 bp, synthetic construct
  misc_feature 1..22: note = chemically synthesized
  source 1..22: mol_type = other DNA
aattgttccttttatcattatg

SEQ ID NO: 27530 - DNA, 22 bp, synthetic construct
  misc_feature 1..22: note = chemically synthesized
  source 1..22: mol_type = other DNA
ttccttttatcattatgtaatg

SEQ ID NO: 27531 - DNA, 22 bp, synthetic construct
  misc_feature 1..22: note = chemically synthesized
  source 1..22: mol_type = other DNA
cttttatcattatgtaatgact

SEQ ID NO: 27532 - DNA, 22 bp, synthetic construct
  misc_feature 1..22: note = chemically synthesized
  source 1..22: mol_type = other DNA
ttatcattatgtaatgactttt

SEQ ID NO: 27533 - DNA, 22 bp, synthetic construct
  misc_feature 1..22: note = chemically synthesized
  source 1..22: mol_type = other DNA
tatcattatgtaatgacttttg

SEQ ID NO: 27534 - DNA, 22 bp, synthetic construct
  misc_feature 1..22: note = chemically synthesized
  source 1..22: mol_type = other DNA
atcattatgtaatgacttttgt

SEQ ID NO: 27535 - DNA, 22 bp, synthetic construct
  misc_feature 1..22: note = chemically synthesized
  source 1..22: mol_type = other DNA
tcattatgtaatgacttttgtc

SEQ ID NO: 27536 - DNA, 22 bp, synthetic construct
  misc_feature 1..22: note = chemically synthesized
  source 1..22: mol_type = other DNA
tgtaatgacttttgtctcttag

SEQ ID NO: 27537 - DNA, 22 bp, synthetic construct
  misc_feature 1..22: note = chemically synthesized
  source 1..22: mol_type = other DNA
ttgtctcttagtgttttttatt

SEQ ID NO: 27538 - DNA, 22 bp, synthetic construct
  misc_feature 1..22: note = chemically synthesized
  source 1..22: mol_type = other DNA
tgtctcttagtgttttttattt

SEQ ID NO: 27539 - DNA, 22 bp, synthetic construct
  misc_feature 1..22: note = chemically synthesized
  source 1..22: mol_type = other DNA
gtctcttagtgttttttattta

SEQ ID NO: 27540 - DNA, 22 bp, synthetic construct
  misc_feature 1..22: note = chemically synthesized
  source 1..22: mol_type = other DNA
tctcttagtgttttttatttaa

SEQ ID NO: 27541 - DNA, 22 bp, synthetic construct
  misc_feature 1..22: note = chemically synthesized
  source 1..22: mol_type = other DNA
ttagtgttttttatttaaagtc

SEQ ID NO: 27542 - DNA, 22 bp, synthetic construct
  misc_feature 1..22: note = chemically synthesized
  source 1..22: mol_type = other DNA
agtgttttttatttaaagtcaa

SEQ ID NO: 27543 - DNA, 22 bp, synthetic construct
  misc_feature 1..22: note = chemically synthesized
  source 1..22: mol_type = other DNA
gtgttttttatttaaagtcaat

SEQ ID NO: 27544 - DNA, 22 bp, synthetic construct
  misc_feature 1..22: note = chemically synthesized
  source 1..22: mol_type = other DNA
tttatttaaagtcaattttatc

SEQ ID NO: 27545 - DNA, 22 bp, synthetic construct
  misc_feature 1..22: note = chemically synthesized
  source 1..22: mol_type = other DNA
ttatttaaagtcaattttatct

SEQ ID NO: 27546 - DNA, 22 bp, synthetic construct
  misc_feature 1..22: note = chemically synthesized
  source 1..22: mol_type = other DNA
tatttaaagtcaattttatctg

SEQ ID NO: 27547 - DNA, 22 bp, synthetic construct
  misc_feature 1..22: note = chemically synthesized
  source 1..22: mol_type = other DNA
atttaaagtcaattttatctgt

SEQ ID NO: 27548 - DNA, 22 bp, synthetic construct
  misc_feature 1..22: note = chemically synthesized
  source 1..22: mol_type = other DNA
tttaaagtcaattttatctgtt

SEQ ID NO: 27549 - DNA, 22 bp, synthetic construct
  misc_feature 1..22: note = chemically synthesized
  source 1..22: mol_type = other DNA
aaagtcaattttatctgttata

SEQ ID NO: 27550 - DNA, 22 bp, synthetic construct
  misc_feature 1..22: note = chemically synthesized
  source 1..22: mol_type = other DNA
aagtcaattttatctgttatag

SEQ ID NO: 27551 - DNA, 22 bp, synthetic construct
  misc_feature 1..22: note = chemically synthesized
  source 1..22: mol_type = other DNA
tatctgttataggtataactac

SEQ ID NO: 27552 - DNA, 22 bp, synthetic construct
  misc_feature 1..22: note = chemically synthesized
  source 1..22: mol_type = other DNA
atctgttataggtataactact

SEQ ID NO: 27553 - DNA, 22 bp, synthetic construct
  misc_feature 1..22: note = chemically synthesized
  source 1..22: mol_type = other DNA
tctgttataggtataactactt

SEQ ID NO: 27554 - DNA, 22 bp, synthetic construct
  misc_feature 1..22: note = chemically synthesized
  source 1..22: mol_type = other DNA
ttataggtataactacttttgc

SEQ ID NO: 27555 - DNA, 22 bp, synthetic construct
  misc_feature 1..22: note = chemically synthesized
  source 1..22: mol_type = other DNA
taggtataactacttttgctca

SEQ ID NO: 27556 - DNA, 22 bp, synthetic construct
  misc_feature 1..22: note = chemically synthesized
  source 1..22: mol_type = other DNA
cttttgctcatttttggtttct

SEQ ID NO: 27557 - DNA, 22 bp, synthetic construct
  misc_feature 1..22: note = chemically synthesized
  source 1..22: mol_type = other DNA
ttgctcatttttggtttctctt

SEQ ID NO: 27558 - DNA, 22 bp, synthetic construct
  misc_feature 1..22: note = chemically synthesized
  source 1..22: mol_type = other DNA
tgctcatttttggtttctcttt

SEQ ID NO: 27559 - DNA, 22 bp, synthetic construct
  misc_feature 1..22: note = chemically synthesized
  source 1..22: mol_type = other DNA
gctcatttttggtttctctttg

SEQ ID NO: 27560 - DNA, 22 bp, synthetic construct
  misc_feature 1..22: note = chemically synthesized
  source 1..22: mol_type = other DNA
ctcatttttggtttctctttgt

SEQ ID NO: 27561 - DNA, 22 bp, synthetic construct
  misc_feature 1..22: note = chemically synthesized
  source 1..22: mol_type = other DNA
atttttggtttctctttgtatg

SEQ ID NO: 27562 - DNA, 22 bp, synthetic construct
  misc_feature 1..22: note = chemically synthesized
  source 1..22: mol_type = other DNA
ttggtttctctttgtatggaag

SEQ ID NO: 27563 - DNA, 22 bp, synthetic construct
  misc_feature 1..22: note = chemically synthesized
  source 1..22: mol_type = other DNA
tggtttctctttgtatggaaga

SEQ ID NO: 27564 - DNA, 22 bp, synthetic construct
  misc_feature 1..22: note = chemically synthesized
  source 1..22: mol_type = other DNA
ggtttctctttgtatggaagat

SEQ ID NO: 27565 - DNA, 22 bp, synthetic construct
  misc_feature 1..22: note = chemically synthesized
  source 1..22: mol_type = other DNA
gtttctctttgtatggaagatc

SEQ ID NO: 27566 - DNA, 22 bp, synthetic construct
  misc_feature 1..22: note = chemically synthesized
  source 1..22: mol_type = other DNA
ctctttgtatggaagatctttc

SEQ ID NO: 27567 - DNA, 22 bp, synthetic construct
  misc_feature 1..22: note = chemically synthesized
  source 1..22: mol_type = other DNA
tctttgtatggaagatctttca

SEQ ID NO: 27568 - DNA, 22 bp, synthetic construct
  misc_feature 1..22: note = chemically synthesized
  source 1..22: mol_type = other DNA
tttgtatggaagatctttcatc

SEQ ID NO: 27569 - DNA, 22 bp, synthetic construct
  misc_feature 1..22: note = chemically synthesized
  source 1..22: mol_type = other DNA
tgtatggaagatctttcatctt

SEQ ID NO: 27570 - DNA, 22 bp, synthetic construct
  misc_feature 1..22: note = chemically synthesized
  source 1..22: mol_type = other DNA
gtatggaagatctttcatcttt

SEQ ID NO: 27571 - DNA, 22 bp, synthetic construct
  misc_feature 1..22: note = chemically synthesized
  source 1..22: mol_type = other DNA
tatggaagatctttcatctttt

SEQ ID NO: 27572 - DNA, 22 bp, synthetic construct
  misc_feature 1..22: note = chemically synthesized
  source 1..22: mol_type = other DNA
tcatctttttactttcagtcta

SEQ ID NO: 27573 - DNA, 22 bp, synthetic construct
  misc_feature 1..22: note = chemically synthesized
  source 1..22: mol_type = other DNA
catctttttactttcagtctat

SEQ ID NO: 27574 - DNA, 22 bp, synthetic construct
  misc_feature 1..22: note = chemically synthesized
  source 1..22: mol_type = other DNA
atctttttactttcagtctata

SEQ ID NO: 27575 - DNA, 22 bp, synthetic construct
  misc_feature 1..22: note = chemically synthesized
  source 1..22: mol_type = other DNA
tttactttcagtctatatttat

SEQ ID NO: 27576 - DNA, 22 bp, synthetic construct
  misc_feature 1..22: note = chemically synthesized
  source 1..22: mol_type = other DNA
ttactttcagtctatatttatc

SEQ ID NO: 27577 - DNA, 22 bp, synthetic construct
  misc_feature 1..22: note = chemically synthesized
  source 1..22: mol_type = other DNA
tactttcagtctatatttatct

SEQ ID NO: 27578 - DNA, 22 bp, synthetic construct
  misc_feature 1..22: note = chemically synthesized
  source 1..22: mol_type = other DNA
actttcagtctatatttatctt

SEQ ID NO: 27579 - DNA, 22 bp, synthetic construct
  misc_feature 1..22: note = chemically synthesized
  source 1..22: mol_type = other DNA
ctttcagtctatatttatcttt

SEQ ID NO: 27580 - DNA, 22 bp, synthetic construct
  misc_feature 1..22: note = chemically synthesized
  source 1..22: mol_type = other DNA
tcagtctatatttatctttaca

SEQ ID NO: 27581 - DNA, 22 bp, synthetic construct
  misc_feature 1..22: note = chemically synthesized
  source 1..22: mol_type = other DNA
cagtctatatttatctttacaa

SEQ ID NO: 27582 - DNA, 22 bp, synthetic construct
  misc_feature 1..22: note = chemically synthesized
  source 1..22: mol_type = other DNA
agtctatatttatctttacaag

SEQ ID NO: 27583 - DNA, 22 bp, synthetic construct
  misc_feature 1..22: note = chemically synthesized
  source 1..22: mol_type = other DNA
tatttatctttacaagtgagat

SEQ ID NO: 27584 - DNA, 22 bp, synthetic construct
  misc_feature 1..22: note = chemically synthesized
  source 1..22: mol_type = other DNA
atctttacaagtgagataagtt

SEQ ID NO: 27585 - DNA, 22 bp, synthetic construct
  misc_feature 1..22: note = chemically synthesized
  source 1..22: mol_type = other DNA
tctttacaagtgagataagttt

SEQ ID NO: 27586 - DNA, 22 bp, synthetic construct
  misc_feature 1..22: note = chemically synthesized
  source 1..22: mol_type = other DNA
tacaagtgagataagtttctta

SEQ ID NO: 27587 - DNA, 22 bp, synthetic construct
  misc_feature 1..22: note = chemically synthesized
  source 1..22: mol_type = other DNA
acaagtgagataagtttcttat

SEQ ID NO: 27588 - DNA, 22 bp, synthetic construct
  misc_feature 1..22: note = chemically synthesized
  source 1..22: mol_type = other DNA
caagtgagataagtttcttata

SEQ ID NO: 27589 - DNA, 22 bp, synthetic construct
  misc_feature 1..22: note = chemically synthesized
  source 1..22: mol_type = other DNA
cttataggcagcttacaactgg

SEQ ID NO: 27590 - DNA, 22 bp, synthetic construct
  misc_feature 1..22: note = chemically synthesized
  source 1..22: mol_type = other DNA
ttataggcagcttacaactggg

SEQ ID NO: 27591 - DNA, 22 bp, synthetic construct
  misc_feature 1..22: note = chemically synthesized
  source 1..22: mol_type = other DNA
ataggcagcttacaactgggtc

SEQ ID NO: 27592 - DNA, 22 bp, synthetic construct
  misc_feature 1..22: note = chemically synthesized
  source 1..22: mol_type = other DNA
taggcagcttacaactgggtca

SEQ ID NO: 27593 - DNA, 22 bp, synthetic construct
  misc_feature 1..22: note = chemically synthesized
  source 1..22: mol_type = other DNA
acaactgggtcatatttttgtt

SEQ ID NO: 27594 - DNA, 22 bp, synthetic construct
  misc_feature 1..22: note = chemically synthesized
  source 1..22: mol_type = other DNA
caactgggtcatatttttgttt

SEQ ID NO: 27595 - DNA, 22 bp, synthetic construct
  misc_feature 1..22: note = chemically synthesized
  source 1..22: mol_type = other DNA
ggtcatatttttgttttaaatc

SEQ ID NO: 27596 - DNA, 22 bp, synthetic construct
  misc_feature 1..22: note = chemically synthesized
  source 1..22: mol_type = other DNA
ttgttttaaatctatttagcca

SEQ ID NO: 27597 - DNA, 22 bp, synthetic construct
  misc_feature 1..22: note = chemically synthesized
  source 1..22: mol_type = other DNA
tgttttaaatctatttagccag

SEQ ID NO: 27598 - DNA, 22 bp, synthetic construct
  misc_feature 1..22: note = chemically synthesized
  source 1..22: mol_type = other DNA
gttttaaatctatttagccagt

SEQ ID NO: 27599 - DNA, 22 bp, synthetic construct
  misc_feature 1..22: note = chemically synthesized
  source 1..22: mol_type = other DNA
ttttaaatctatttagccagtc

SEQ ID NO: 27600 - DNA, 22 bp, synthetic construct
  misc_feature 1..22: note = chemically synthesized
  source 1..22: mol_type = other DNA
taaatctatttagccagtctat

SEQ ID NO: 27601 - DNA, 22 bp, synthetic construct
  misc_feature 1..22: note = chemically synthesized
  source 1..22: mol_type = other DNA
aaatctatttagccagtctata

SEQ ID NO: 27602 - DNA, 22 bp, synthetic construct
  misc_feature 1..22: note = chemically synthesized
  source 1..22: mol_type = other DNA
aatctatttagccagtctatat

SEQ ID NO: 27603 - DNA, 22 bp, synthetic construct
  misc_feature 1..22: note = chemically synthesized
  source 1..22: mol_type = other DNA
tttagccagtctatatctttca

SEQ ID NO: 27604 - DNA, 22 bp, synthetic construct
  misc_feature 1..22: note = chemically synthesized
  source 1..22: mol_type = other DNA
agccagtctatatctttcaagt

SEQ ID NO: 27605 - DNA, 22 bp, synthetic construct
  misc_feature 1..22: note = chemically synthesized
  source 1..22: mol_type = other DNA
gccagtctatatctttcaagta

SEQ ID NO: 27606 - DNA, 22 bp, synthetic construct
  misc_feature 1..22: note = chemically synthesized
  source 1..22: mol_type = other DNA
tatctttcaagtaacaatttaa

SEQ ID NO: 27607 - DNA, 22 bp, synthetic construct
  misc_feature 1..22: note = chemically synthesized
  source 1..22: mol_type = other DNA
tcaagtaacaatttaatccatt

SEQ ID NO: 27608 - DNA, 22 bp, synthetic construct
  misc_feature 1..22: note = chemically synthesized
  source 1..22: mol_type = other DNA
caagtaacaatttaatccattt

SEQ ID NO: 27609 - DNA, 22 bp, synthetic construct
  misc_feature 1..22: note = chemically synthesized
  source 1..22: mol_type = other DNA
aagtaacaatttaatccattta

SEQ ID NO: 27610 - DNA, 22 bp, synthetic construct
  misc_feature 1..22: note = chemically synthesized
  source 1..22: mol_type = other DNA
aatccatttacatgcaaggcta

SEQ ID NO: 27611 - DNA, 22 bp, synthetic construct
  misc_feature 1..22: note = chemically synthesized
  source 1..22: mol_type = other DNA
atccatttacatgcaaggctat

SEQ ID NO: 27612 - DNA, 22 bp, synthetic construct
  misc_feature 1..22: note = chemically synthesized
  source 1..22: mol_type = other DNA
acatgcaaggctattattgaca

SEQ ID NO: 27613 - DNA, 22 bp, synthetic construct
  misc_feature 1..22: note = chemically synthesized
  source 1..22: mol_type = other DNA
catgcaaggctattattgacat

SEQ ID NO: 27614 - DNA, 22 bp, synthetic construct
  misc_feature 1..22: note = chemically synthesized
  source 1..22: mol_type = other DNA
ttattgacatgtgagagcttat

SEQ ID NO: 27615 - DNA, 22 bp, synthetic construct
  misc_feature 1..22: note = chemically synthesized
  source 1..22: mol_type = other DNA
ttgacatgtgagagcttattcc

SEQ ID NO: 27616 - DNA, 22 bp, synthetic construct
  misc_feature 1..22: note = chemically synthesized
  source 1..22: mol_type = other DNA
acatgtgagagcttattcctgc

SEQ ID NO: 27617 - DNA, 22 bp, synthetic construct
  misc_feature 1..22: note = chemically synthesized
  source 1..22: mol_type = other DNA
attcctgccattttgttaattg

SEQ ID NO: 27618 - DNA, 22 bp, synthetic construct
  misc_feature 1..22: note = chemically synthesized
  source 1..22: mol_type = other DNA
ttcctgccattttgttaattga

SEQ ID NO: 27619 - DNA, 22 bp, synthetic construct
  misc_feature 1..22: note = chemically synthesized
  source 1..22: mol_type = other DNA
ctgccattttgttaattgattc

SEQ ID NO: 27620 - DNA, 22 bp, synthetic construct
  misc_feature 1..22: note = chemically synthesized
  source 1..22: mol_type = other DNA
ccattttgttaattgattcctg

SEQ ID NO: 27621 - DNA, 22 bp, synthetic construct
  misc_feature 1..22: note = chemically synthesized
  source 1..22: mol_type = other DNA
tgttaattgattcctggttgtt

SEQ ID NO: 27622 - DNA, 22 bp, synthetic construct
  misc_feature 1..22: note = chemically synthesized
  source 1..22: mol_type = other DNA
gttaattgattcctggttgttt

SEQ ID NO: 27623 - DNA, 22 bp, synthetic construct
  misc_feature 1..22: note = chemically synthesized
  source 1..22: mol_type = other DNA
ttaattgattcctggttgtttt

SEQ ID NO: 27624 - DNA, 22 bp, synthetic construct
  misc_feature 1..22: note = chemically synthesized
  source 1..22: mol_type = other DNA
attgattcctggttgttttgtt

SEQ ID NO: 27625 - DNA, 22 bp, synthetic construct
  misc_feature 1..22: note = chemically synthesized
  source 1..22: mol_type = other DNA
attcctggttgttttgtttttt

SEQ ID NO: 27626 - DNA, 22 bp, synthetic construct
  misc_feature 1..22: note = chemically synthesized
  source 1..22: mol_type = other DNA
ctggttgttttgtttttttttt

SEQ ID NO: 27627 - DNA, 22 bp, synthetic construct
  misc_feature 1..22: note = chemically synthesized
  source 1..22: mol_type = other DNA
gttgttttgttttttttttagt

SEQ ID NO: 27628 - DNA, 22 bp, synthetic construct
  misc_feature 1..22: note = chemically synthesized
  source 1..22: mol_type = other DNA
ttttgttttttttttagtttgt

SEQ ID NO: 27629 - DNA, 22 bp, synthetic construct
  misc_feature 1..22: note = chemically synthesized
  source 1..22: mol_type = other DNA
tgttttttttttagtttgtttg

SEQ ID NO: 27630 - DNA, 22 bp, synthetic construct
  misc_feature 1..22: note = chemically synthesized
  source 1..22: mol_type = other DNA
gttttttttttagtttgtttgt

SEQ ID NO: 27631 - DNA, 22 bp, synthetic construct
  misc_feature 1..22: note = chemically synthesized
  source 1..22: mol_type = other DNA
ttttttttttagtttgtttgtt

SEQ ID NO: 27632 - DNA, 22 bp, synthetic construct
  misc_feature 1..22: note = chemically synthesized
  source 1..22: mol_type = other DNA
tttttttagtttgtttgttttg

SEQ ID NO: 27633 - DNA, 22 bp, synthetic construct
  misc_feature 1..22: note = chemically synthesized
  source 1..22: mol_type = other DNA
ttttttagtttgtttgttttgt

SEQ ID NO: 27634 - DNA, 22 bp, synthetic construct
  misc_feature 1..22: note = chemically synthesized
  source 1..22: mol_type = other DNA
tttttagtttgtttgttttgtg

SEQ ID NO: 27635 - DNA, 22 bp, synthetic construct
  misc_feature 1..22: note = chemically synthesized
  source 1..22: mol_type = other DNA
ttttagtttgtttgttttgtgt

SEQ ID NO: 27636 - DNA, 22 bp, synthetic construct
  misc_feature 1..22: note = chemically synthesized
  source 1..22: mol_type = other DNA
tttagtttgtttgttttgtgtt

SEQ ID NO: 27637 - DNA, 22 bp, synthetic construct
  misc_feature 1..22: note = chemically synthesized
  source 1..22: mol_type = other DNA
ttagtttgtttgttttgtgttt

SEQ ID NO: 27638 - DNA, 22 bp, synthetic construct
  misc_feature 1..22: note = chemically synthesized
  source 1..22: mol_type = other DNA
tagtttgtttgttttgtgtttt

SEQ ID NO: 27639 - DNA, 22 bp, synthetic construct
  misc_feature 1..22: note = chemically synthesized
  source 1..22: mol_type = other DNA
agtttgtttgttttgtgttttt

SEQ ID NO: 27640 - DNA, 22 bp, synthetic construct
  misc_feature 1..22: note = chemically synthesized
  source 1..22: mol_type = other DNA
gtttgtttgttttgtgtttttt

SEQ ID NO: 27641 - DNA, 22 bp, synthetic construct
  misc_feature 1..22: note = chemically synthesized
  source 1..22: mol_type = other DNA
gtttgttttgtgtttttttctt

SEQ ID NO: 27642 - DNA, 22 bp, synthetic construct
  misc_feature 1..22: note = chemically synthesized
  source 1..22: mol_type = other DNA
tttgttttgtgtttttttcttc

SEQ ID NO: 27643 - DNA, 22 bp, synthetic construct
  misc_feature 1..22: note = chemically synthesized
  source 1..22: mol_type = other DNA
gttttgtgtttttttcttcctt

SEQ ID NO: 27644 - DNA, 22 bp, synthetic construct
  misc_feature 1..22: note = chemically synthesized
  source 1..22: mol_type = other DNA
ttttgtgtttttttcttccttc

SEQ ID NO: 27645 - DNA, 22 bp, synthetic construct
  misc_feature 1..22: note = chemically synthesized
  source 1..22: mol_type = other DNA
tgtgtttttttcttccttcctt

SEQ ID NO: 27646 - DNA, 22 bp, synthetic construct
  misc_feature 1..22: note = chemically synthesized
  source 1..22: mol_type = other DNA
gtgtttttttcttccttccttc

SEQ ID NO: 27647 - DNA, 22 bp, synthetic construct
  misc_feature 1..22: note = chemically synthesized
  source 1..22: mol_type = other DNA
tgtttttttcttccttccttcc

SEQ ID NO: 27648 - DNA, 22 bp, synthetic construct
  misc_feature 1..22: note = chemically synthesized
  source 1..22: mol_type = other DNA
ttttcttccttccttccttttc

SEQ ID NO: 27649 - DNA, 22 bp, synthetic construct
  misc_feature 1..22: note = chemically synthesized
  source 1..22: mol_type = other DNA
tttcttccttccttccttttct

SEQ ID NO: 27650 - DNA, 22 bp, synthetic construct
  misc_feature 1..22: note = chemically synthesized
  source 1..22: mol_type = other DNA
ttcttccttccttccttttctt

SEQ ID NO: 27651 - DNA, 22 bp, synthetic construct
  misc_feature 1..22: note = chemically synthesized
  source 1..22: mol_type = other DNA
tcttccttccttccttttcttt

SEQ ID NO: 27652 - DNA, 22 bp, synthetic construct
  misc_feature 1..22: note = chemically synthesized
  source 1..22: mol_type = other DNA
cttccttccttccttttctttc

SEQ ID NO: 27653 - DNA, 22 bp, synthetic construct
  misc_feature 1..22: note = chemically synthesized
  source 1..22: mol_type = other DNA
ttccttccttccttttctttct

SEQ ID NO: 27654 - DNA, 22 bp, synthetic construct
  misc_feature 1..22: note = chemically synthesized
  source 1..22: mol_type = other DNA
ccttccttccttttctttcttt

SEQ ID NO: 27655 - DNA, 22 bp, synthetic construct
  misc_feature 1..22: note = chemically synthesized
  source 1..22: mol_type = other DNA
cttccttccttttctttctttc

SEQ ID NO: 27656 - DNA, 22 bp, synthetic construct
  misc_feature 1..22: note = chemically synthesized
  source 1..22: mol_type = other DNA
ccttccttttctttctttcatt

SEQ ID NO: 27657 - DNA, 22 bp, synthetic construct
  misc_feature 1..22: note = chemically synthesized
  source 1..22: mol_type = other DNA
cttccttttctttctttcattc

SEQ ID NO: 27658 - DNA, 22 bp, synthetic construct
  misc_feature 1..22: note = chemically synthesized
  source 1..22: mol_type = other DNA
ccttttctttctttcattctct

SEQ ID NO: 27659 - DNA, 22 bp, synthetic construct
  misc_feature 1..22: note = chemically synthesized
  source 1..22: mol_type = other DNA
cttttctttctttcattctctc

SEQ ID NO: 27660 - DNA, 22 bp, synthetic construct
  misc_feature 1..22: note = chemically synthesized
  source 1..22: mol_type = other DNA
ttctttctttcattctctctct

SEQ ID NO: 27661 - DNA, 22 bp, synthetic construct
  misc_feature 1..22: note = chemically synthesized
  source 1..22: mol_type = other DNA
tctttctttcattctctctctc

SEQ ID NO: 27662 - DNA, 22 bp, synthetic construct
  misc_feature 1..22: note = chemically synthesized
  source 1..22: mol_type = other DNA
ctttctttcattctctctctct

SEQ ID NO: 27663 - DNA, 22 bp, synthetic construct
  misc_feature 1..22: note = chemically synthesized
  source 1..22: mol_type = other DNA
tttctttcattctctctctctc

SEQ ID NO: 27664 - DNA, 22 bp, synthetic construct
  misc_feature 1..22: note = chemically synthesized
  source 1..22: mol_type = other DNA
tctttcattctctctctctctc

SEQ ID NO: 27665 - DNA, 22 bp, synthetic construct
  misc_feature 1..22: note = chemically synthesized
  source 1..22: mol_type = other DNA
ctttcattctctctctctctct

SEQ ID NO: 27666 - DNA, 22 bp, synthetic construct
  misc_feature 1..22: note = chemically synthesized
  source 1..22: mol_type = other DNA
tttcattctctctctctctctc

SEQ ID NO: 27667 - DNA, 22 bp, synthetic construct
  misc_feature 1..22: note = chemically synthesized
  source 1..22: mol_type = other DNA
tcattctctctctctctctctt

SEQ ID NO: 27668 - DNA, 22 bp, synthetic construct
  misc_feature 1..22: note = chemically synthesized
  source 1..22: mol_type = other DNA
cattctctctctctctctcttt

SEQ ID NO: 27669 - DNA, 22 bp, synthetic construct
  misc_feature 1..22: note = chemically synthesized
  source 1..22: mol_type = other DNA
attctctctctctctctctttc

SEQ ID NO: 27670 - DNA, 22 bp, synthetic construct
  misc_feature 1..22: note = chemically synthesized
  source 1..22: mol_type = other DNA
tctctctctctctctttctttc

SEQ ID NO: 27671 - DNA, 22 bp, synthetic construct
  misc_feature 1..22: note = chemically synthesized
  source 1..22: mol_type = other DNA
tctctctctctctttctttctt

SEQ ID NO: 27672 - DNA, 22 bp, synthetic construct
  misc_feature 1..22: note = chemically synthesized
  source 1..22: mol_type = other DNA
tctctctctctttctttctttc

SEQ ID NO: 27673 - DNA, 22 bp, synthetic construct
  misc_feature 1..22: note = chemically synthesized
  source 1..22: mol_type = other DNA
tctctctctttctttctttctt

SEQ ID NO: 27674 - DNA, 22 bp, synthetic construct
  misc_feature 1..22: note = chemically synthesized
  source 1..22: mol_type = other DNA
tctctctttctttctttctttc

SEQ ID NO: 27675 - DNA, 22 bp, synthetic construct
  misc_feature 1..22: note = chemically synthesized
  source 1..22: mol_type = other DNA
tctctttctttctttctttctt

SEQ ID NO: 27676 - DNA, 22 bp, synthetic construct
  misc_feature 1..22: note = chemically synthesized
  source 1..22: mol_type = other DNA
tctttctttctttctttctttc

SEQ ID NO: 27677 - DNA, 22 bp, synthetic construct
  misc_feature 1..22: note = chemically synthesized
  source 1..22: mol_type = other DNA
tttctttctttctttctttctt

SEQ ID NO: 27678 - DNA, 22 bp, synthetic construct
  misc_feature 1..22: note = chemically synthesized
  source 1..22: mol_type = other DNA
tctttctttctttctttcttat

SEQ ID NO: 27679 - DNA, 22 bp, synthetic construct
  misc_feature 1..22: note = chemically synthesized
  source 1..22: mol_type = other DNA
ctttctttctttctttcttatt

SEQ ID NO: 27680 - DNA, 22 bp, synthetic construct
  misc_feature 1..22: note = chemically synthesized
  source 1..22: mol_type = other DNA
tttctttctttctttcttatta

SEQ ID NO: 27681 - DNA, 22 bp, synthetic construct
  misc_feature 1..22: note = chemically synthesized
  source 1..22: mol_type = other DNA
tctttctttctttcttattatt

SEQ ID NO: 27682 - DNA, 22 bp, synthetic construct
  misc_feature 1..22: note = chemically synthesized
  source 1..22: mol_type = other DNA
ctttctttctttcttattattt

SEQ ID NO: 27683 - DNA, 22 bp, synthetic construct
  misc_feature 1..22: note = chemically synthesized
  source 1..22: mol_type = other DNA
tttctttctttcttattattta

SEQ ID NO: 27684 - DNA, 22 bp, synthetic construct
  misc_feature 1..22: note = chemically synthesized
  source 1..22: mol_type = other DNA
tctttctttcttattatttatg

SEQ ID NO: 27685 - DNA, 22 bp, synthetic construct
  misc_feature 1..22: note = chemically synthesized
  source 1..22: mol_type = other DNA
ctttctttcttattatttatga

SEQ ID NO: 27686 - DNA, 22 bp, synthetic construct
  misc_feature 1..22: note = chemically synthesized
  source 1..22: mol_type = other DNA
tttctttcttattatttatgat

SEQ ID NO: 27687 - DNA, 22 bp, synthetic construct
  misc_feature 1..22: note = chemically synthesized
  source 1..22: mol_type = other DNA
tctttcttattatttatgattg

SEQ ID NO: 27688 - DNA, 22 bp, synthetic construct
  misc_feature 1..22: note = chemically synthesized
  source 1..22: mol_type = other DNA
ctttcttattatttatgattgt

SEQ ID NO: 27689 - DNA, 22 bp, synthetic construct
  misc_feature 1..22: note = chemically synthesized
  source 1..22: mol_type = other DNA
tttcttattatttatgattgtg

SEQ ID NO: 27690 - DNA, 22 bp, synthetic construct
  misc_feature 1..22: note = chemically synthesized
  source 1..22: mol_type = other DNA
tcttattatttatgattgtggt

SEQ ID NO: 27691 - DNA, 22 bp, synthetic construct
  misc_feature 1..22: note = chemically synthesized
  source 1..22: mol_type = other DNA
cttattatttatgattgtggtt

SEQ ID NO: 27692 - DNA, 22 bp, synthetic construct
  misc_feature 1..22: note = chemically synthesized
  source 1..22: mol_type = other DNA
ttattatttatgattgtggttt

SEQ ID NO: 27693 - DNA, 22 bp, synthetic construct
  misc_feature 1..22: note = chemically synthesized
  source 1..22: mol_type = other DNA
attatttatgattgtggtttgg

SEQ ID NO: 27694 - DNA, 22 bp, synthetic construct
  misc_feature 1..22: note = chemically synthesized
  source 1..22: mol_type = other DNA
ttatttatgattgtggtttggt

SEQ ID NO: 27695 - DNA, 22 bp, synthetic construct
  misc_feature 1..22: note = chemically synthesized
  source 1..22: mol_type = other DNA
tttatgattgtggtttggtgat

SEQ ID NO: 27696 - DNA, 22 bp, synthetic construct
  misc_feature 1..22: note = chemically synthesized
  source 1..22: mol_type = other DNA
atgattgtggtttggtgatttt

SEQ ID NO: 27697 - DNA, 22 bp, synthetic construct
  misc_feature 1..22: note = chemically synthesized
  source 1..22: mol_type = other DNA
tgattgtggtttggtgattttc

SEQ ID NO: 27698 - DNA, 22 bp, synthetic construct
  misc_feature 1..22: note = chemically synthesized
  source 1..22: mol_type = other DNA
tggtttggtgattttctgtagt

SEQ ID NO: 27699 - DNA, 22 bp, synthetic construct
  misc_feature 1..22: note = chemically synthesized
  source 1..22: mol_type = other DNA
ggtgattttctgtagtggtaac

SEQ ID NO: 27700 - DNA, 22 bp, synthetic construct
  misc_feature 1..22: note = chemically synthesized
  source 1..22: mol_type = other DNA
gtgattttctgtagtggtaacg

SEQ ID NO: 27701 - DNA, 22 bp, synthetic construct
  misc_feature 1..22: note = chemically synthesized
  source 1..22: mol_type = other DNA
tctgtagtggtaacgtttgagt

SEQ ID NO: 27702 - DNA, 22 bp, synthetic construct
  misc_feature 1..22: note = chemically synthesized
  source 1..22: mol_type = other DNA
ctgtagtggtaacgtttgagtt

SEQ ID NO: 27703 - DNA, 22 bp, synthetic construct
  misc_feature 1..22: note = chemically synthesized
  source 1..22: mol_type = other DNA
tgtagtggtaacgtttgagttc

SEQ ID NO: 27704 - DNA, 22 bp, synthetic construct
  misc_feature 1..22: note = chemically synthesized
  source 1..22: mol_type = other DNA
tagtggtaacgtttgagttctt

SEQ ID NO: 27705 - DNA, 22 bp, synthetic construct
  misc_feature 1..22: note = chemically synthesized
  source 1..22: mol_type = other DNA
gagttctttctcttctttattt

SEQ ID NO: 27706 - DNA, 22 bp, synthetic construct
  misc_feature 1..22: note = chemically synthesized
  source 1..22: mol_type = other DNA
agttctttctcttctttatttg

SEQ ID NO: 27707 - DNA, 22 bp, synthetic construct
  misc_feature 1..22: note = chemically synthesized
  source 1..22: mol_type = other DNA
tttctcttctttatttgtgttt

SEQ ID NO: 27708 - DNA, 22 bp, synthetic construct
  misc_feature 1..22: note = chemically synthesized
  source 1..22: mol_type = other DNA
tctcttctttatttgtgttttg

SEQ ID NO: 27709 - DNA, 22 bp, synthetic construct
  misc_feature 1..22: note = chemically synthesized
  source 1..22: mol_type = other DNA
ctcttctttatttgtgttttgc

SEQ ID NO: 27710 - DNA, 22 bp, synthetic construct
  misc_feature 1..22: note = chemically synthesized
  source 1..22: mol_type = other DNA
tcttctttatttgtgttttgct

SEQ ID NO: 27711 - DNA, 22 bp, synthetic construct
  misc_feature 1..22: note = chemically synthesized
  source 1..22: mol_type = other DNA
ttctttatttgtgttttgctct

SEQ ID NO: 27712 - DNA, 22 bp, synthetic construct
  misc_feature 1..22: note = chemically synthesized
  source 1..22: mol_type = other DNA
ctttatttgtgttttgctctac

SEQ ID NO: 27713 - DNA, 22 bp, synthetic construct
  misc_feature 1..22: note = chemically synthesized
  source 1..22: mol_type = other DNA
tttatttgtgttttgctctacc

SEQ ID NO: 27714 - DNA, 22 bp, synthetic construct
  misc_feature 1..22: note = chemically synthesized
  source 1..22: mol_type = other DNA
tatttgtgttttgctctaccag

SEQ ID NO: 27715 - DNA, 22 bp, synthetic construct
  misc_feature 1..22: note = chemically synthesized
  source 1..22: mol_type = other DNA
atttgtgttttgctctaccagt

SEQ ID NO: 27716 - DNA, 22 bp, synthetic construct
  misc_feature 1..22: note = chemically synthesized
  source 1..22: mol_type = other DNA
tttgtgttttgctctaccagtt

SEQ ID NO: 27717 - DNA, 22 bp, synthetic construct
  misc_feature 1..22: note = chemically synthesized
  source 1..22: mol_type = other DNA
gtgttttgctctaccagttagt

SEQ ID NO: 27718 - DNA, 22 bp, synthetic construct
  misc_feature 1..22: note = chemically synthesized
  source 1..22: mol_type = other DNA
tgttttgctctaccagttagtt

SEQ ID NO: 27719 - DNA, 22 bp, synthetic construct
  misc_feature 1..22: note = chemically synthesized
  source 1..22: mol_type = other DNA
tgctctaccagttagttgtata

SEQ ID NO: 27720 - DNA, 22 bp, synthetic construct
  misc_feature 1..22: note = chemically synthesized
  source 1..22: mol_type = other DNA
gctctaccagttagttgtatac

SEQ ID NO: 27721 - DNA, 22 bp, synthetic construct
  misc_feature 1..22: note = chemically synthesized
  source 1..22: mol_type = other DNA
ctctaccagttagttgtatacc

SEQ ID NO: 27722 - DNA, 22 bp, synthetic construct
  misc_feature 1..22: note = chemically synthesized
  source 1..22: mol_type = other DNA
taccagttagttgtataccttt

SEQ ID NO: 27723 - DNA, 22 bp, synthetic construct
  misc_feature 1..22: note = chemically synthesized
  source 1..22: mol_type = other DNA
ccagttagttgtatacctttgt

SEQ ID NO: 27724 - DNA, 22 bp, synthetic construct
  misc_feature 1..22: note = chemically synthesized
  source 1..22: mol_type = other DNA
gttgtatacctttgtgtgtctt

SEQ ID NO: 27725 - DNA, 22 bp, synthetic construct
  misc_feature 1..22: note = chemically synthesized
  source 1..22: mol_type = other DNA
tatacctttgtgtgtcttcata

SEQ ID NO: 27726 - DNA, 22 bp, synthetic construct
  misc_feature 1..22: note = chemically synthesized
  source 1..22: mol_type = other DNA
tgtgtgtcttcataatggcagt

SEQ ID NO: 27727 - DNA, 22 bp, synthetic construct
  misc_feature 1..22: note = chemically synthesized
  source 1..22: mol_type = other DNA
gtgtgtcttcataatggcagtg

SEQ ID NO: 27728 - DNA, 22 bp, synthetic construct
  misc_feature 1..22: note = chemically synthesized
  source 1..22: mol_type = other DNA
tgtgtcttcataatggcagtgt

SEQ ID NO: 27729 - DNA, 22 bp, synthetic construct
  misc_feature 1..22: note = chemically synthesized
  source 1..22: mol_type = other DNA
cataatggcagtgtcctgtcac

SEQ ID NO: 27730 - DNA, 22 bp, synthetic construct
  misc_feature 1..22: note = chemically synthesized
  source 1..22: mol_type = other DNA
ataatggcagtgtcctgtcact

SEQ ID NO: 27731 - DNA, 22 bp, synthetic construct
  misc_feature 1..22: note = chemically synthesized
  source 1..22: mol_type = other DNA
tcactttcatgtgtaggactcc

SEQ ID NO: 27732 - DNA, 22 bp, synthetic construct
  misc_feature 1..22: note = chemically synthesized
  source 1..22: mol_type = other DNA
tcatgtgtaggactcccttaaa

SEQ ID NO: 27733 - DNA, 22 bp, synthetic construct
  misc_feature 1..22: note = chemically synthesized
  source 1..22: mol_type = other DNA
catgtgtaggactcccttaaat

SEQ ID NO: 27734 - DNA, 22 bp, synthetic construct
  misc_feature 1..22: note = chemically synthesized
  source 1..22: mol_type = other DNA
atgtgtaggactcccttaaata

SEQ ID NO: 27735 - DNA, 22 bp, synthetic construct
  misc_feature 1..22: note = chemically synthesized
  source 1..22: mol_type = other DNA
ccttaaatatttcttgtaaagc

SEQ ID NO: 27736 - DNA, 22 bp, synthetic construct
  misc_feature 1..22: note = chemically synthesized
  source 1..22: mol_type = other DNA
aaatatttcttgtaaagccagt

SEQ ID NO: 27737 - DNA, 22 bp, synthetic construct
  misc_feature 1..22: note = chemically synthesized
  source 1..22: mol_type = other DNA
aatatttcttgtaaagccagtc

SEQ ID NO: 27738 - DNA, 22 bp, synthetic construct
  misc_feature 1..22: note = chemically synthesized
  source 1..22: mol_type = other DNA
cttgtaaagccagtctagtgat

SEQ ID NO: 27739 - DNA, 22 bp, synthetic construct
  misc_feature 1..22: note = chemically synthesized
  source 1..22: mol_type = other DNA
ttgtaaagccagtctagtgata

SEQ ID NO: 27740 - DNA, 22 bp, synthetic construct
  misc_feature 1..22: note = chemically synthesized
  source 1..22: mol_type = other DNA
gtaaagccagtctagtgatagt

SEQ ID NO: 27741 - DNA, 22 bp, synthetic construct
  misc_feature 1..22: note = chemically synthesized
  source 1..22: mol_type = other DNA
taaagccagtctagtgatagtg

SEQ ID NO: 27742 - DNA, 22 bp, synthetic construct
  misc_feature 1..22: note = chemically synthesized
  source 1..22: mol_type = other DNA
gtgatagtgaattccttcaaat

SEQ ID NO: 27743 - DNA, 22 bp, synthetic construct
  misc_feature 1..22: note = chemically synthesized
  source 1..22: mol_type = other DNA
cttcaaatttttcttgcccaga

SEQ ID NO: 27744 - DNA, 22 bp, synthetic construct
  misc_feature 1..22: note = chemically synthesized
  source 1..22: mol_type = other DNA
caaatttttcttgcccagaaaa

SEQ ID NO: 27745 - DNA, 22 bp, synthetic construct
  misc_feature 1..22: note = chemically synthesized
  source 1..22: mol_type = other DNA
aaatttttcttgcccagaaaag

SEQ ID NO: 27746 - DNA, 22 bp, synthetic construct
  misc_feature 1..22: note = chemically synthesized
  source 1..22: mol_type = other DNA
ttcttgcccagaaaagatttta

SEQ ID NO: 27747 - DNA, 22 bp, synthetic construct
  misc_feature 1..22: note = chemically synthesized
  source 1..22: mol_type = other DNA
tcttgcccagaaaagattttat

SEQ ID NO: 27748 - DNA, 22 bp, synthetic construct
  misc_feature 1..22: note = chemically synthesized
  source 1..22: mol_type = other DNA
cttgcccagaaaagattttatt

SEQ ID NO: 27749 - DNA, 22 bp, synthetic construct
  misc_feature 1..22: note = chemically synthesized
  source 1..22: mol_type = other DNA
ttgcccagaaaagattttattt

SEQ ID NO: 27750 - DNA, 22 bp, synthetic construct
  misc_feature 1..22: note = chemically synthesized
  source 1..22: mol_type = other DNA
gcccagaaaagattttatttat

SEQ ID NO: 27751 - DNA, 22 bp, synthetic construct
  misc_feature 1..22: note = chemically synthesized
  source 1..22: mol_type = other DNA
cccagaaaagattttatttatc

SEQ ID NO: 27752 - DNA, 22 bp, synthetic construct
  misc_feature 1..22: note = chemically synthesized
  source 1..22: mol_type = other DNA
tatttatccttcatttttgaag

SEQ ID NO: 27753 - DNA, 22 bp, synthetic construct
  misc_feature 1..22: note = chemically synthesized
  source 1..22: mol_type = other DNA
atttatccttcatttttgaaga

SEQ ID NO: 27754 - DNA, 22 bp, synthetic construct
  misc_feature 1..22: note = chemically synthesized
  source 1..22: mol_type = other DNA
tttatccttcatttttgaagaa

SEQ ID NO: 27755 - DNA, 22 bp, synthetic construct
  misc_feature 1..22: note = chemically synthesized
  source 1..22: mol_type = other DNA
atccttcatttttgaagaacaa

SEQ ID NO: 27756 - DNA, 22 bp, synthetic construct
  misc_feature 1..22: note = chemically synthesized
  source 1..22: mol_type = other DNA
tccttcatttttgaagaacaat

SEQ ID NO: 27757 - DNA, 22 bp, synthetic construct
  misc_feature 1..22: note = chemically synthesized
  source 1..22: mol_type = other DNA
catttttgaagaacaatgttgc

SEQ ID NO: 27758 - DNA, 22 bp, synthetic construct
  misc_feature 1..22: note = chemically synthesized
  source 1..22: mol_type = other DNA
atttttgaagaacaatgttgct

SEQ ID NO: 27759 - DNA, 22 bp, synthetic construct
  misc_feature 1..22: note = chemically synthesized
  source 1..22: mol_type = other DNA
ttgaagaacaatgttgctgggt

SEQ ID NO: 27760 - DNA, 22 bp, synthetic construct
  misc_feature 1..22: note = chemically synthesized
  source 1..22: mol_type = other DNA
tgaagaacaatgttgctgggta

SEQ ID NO: 27761 - DNA, 22 bp, synthetic construct
  misc_feature 1..22: note = chemically synthesized
  source 1..22: mol_type = other DNA
gaagaacaatgttgctgggtat

SEQ ID NO: 27762 - DNA, 22 bp, synthetic construct
  misc_feature 1..22: note = chemically synthesized
  source 1..22: mol_type = other DNA
aagaacaatgttgctgggtata

SEQ ID NO: 27763 - DNA, 22 bp, synthetic construct
  misc_feature 1..22: note = chemically synthesized
  source 1..22: mol_type = other DNA
ctgggtataacatccttggtgt

SEQ ID NO: 27764 - DNA, 22 bp, synthetic construct
  misc_feature 1..22: note = chemically synthesized
  source 1..22: mol_type = other DNA
ggtataacatccttggtgtcat

SEQ ID NO: 27765 - DNA, 22 bp, synthetic construct
  misc_feature 1..22: note = chemically synthesized
  source 1..22: mol_type = other DNA
ggtgtcatttttttctttcact

SEQ ID NO: 27766 - DNA, 22 bp, synthetic construct
  misc_feature 1..22: note = chemically synthesized
  source 1..22: mol_type = other DNA
gtgtcatttttttctttcacta

SEQ ID NO: 27767 - DNA, 22 bp, synthetic construct
  misc_feature 1..22: note = chemically synthesized
  source 1..22: mol_type = other DNA
ttttctttcactattttgaata

SEQ ID NO: 27768 - DNA, 22 bp, synthetic construct
  misc_feature 1..22: note = chemically synthesized
  source 1..22: mol_type = other DNA
tttctttcactattttgaatat

SEQ ID NO: 27769 - DNA, 22 bp, synthetic construct
  misc_feature 1..22: note = chemically synthesized
  source 1..22: mol_type = other DNA
ttctttcactattttgaatata

SEQ ID NO: 27770 - DNA, 22 bp, synthetic construct
  misc_feature 1..22: note = chemically synthesized
  source 1..22: mol_type = other DNA
tctttcactattttgaatatat

SEQ ID NO: 27771 - DNA, 22 bp, synthetic construct
  misc_feature 1..22: note = chemically synthesized
  source 1..22: mol_type = other DNA
ctttcactattttgaatatatc

SEQ ID NO: 27772 - DNA, 22 bp, synthetic construct
  misc_feature 1..22: note = chemically synthesized
  source 1..22: mol_type = other DNA
tttcactattttgaatatatca

SEQ ID NO: 27773 - DNA, 22 bp, synthetic construct
  misc_feature 1..22: note = chemically synthesized
  source 1..22: mol_type = other DNA
tcactattttgaatatatcatc

SEQ ID NO: 27774 - DNA, 22 bp, synthetic construct
  misc_feature 1..22: note = chemically synthesized
  source 1..22: mol_type = other DNA
cactattttgaatatatcatcc

SEQ ID NO: 27775 - DNA, 22 bp, synthetic construct
  misc_feature 1..22: note = chemically synthesized
  source 1..22: mol_type = other DNA
actattttgaatatatcatccc

SEQ ID NO: 27776 - DNA, 22 bp, synthetic construct
  misc_feature 1..22: note = chemically synthesized
  source 1..22: mol_type = other DNA
ttttgaatatatcatcccatct

SEQ ID NO: 27777 - DNA, 22 bp, synthetic construct
  misc_feature 1..22: note = chemically synthesized
  source 1..22: mol_type = other DNA
tgaatatatcatcccatcttct

SEQ ID NO: 27778 - DNA, 22 bp, synthetic construct
  misc_feature 1..22: note = chemically synthesized
  source 1..22: mol_type = other DNA
gaatatatcatcccatcttctc

SEQ ID NO: 27779 - DNA, 22 bp, synthetic construct
  misc_feature 1..22: note = chemically synthesized
  source 1..22: mol_type = other DNA
aatatatcatcccatcttctcc

SEQ ID NO: 27780 - DNA, 22 bp, synthetic construct
  misc_feature 1..22: note = chemically synthesized
  source 1..22: mol_type = other DNA
ctcctggcctgtgaggtttctg

SEQ ID NO: 27781 - DNA, 22 bp, synthetic construct
  misc_feature 1..22: note = chemically synthesized
  source 1..22: mol_type = other DNA
tcctggcctgtgaggtttctgc

SEQ ID NO: 27782 - DNA, 22 bp, synthetic construct
  misc_feature 1..22: note = chemically synthesized
  source 1..22: mol_type = other DNA
ctggcctgtgaggtttctgctg

SEQ ID NO: 27783 - DNA, 22 bp, synthetic construct
  misc_feature 1..22: note = chemically synthesized
  source 1..22: mol_type = other DNA
gcctgtgaggtttctgctgaga

SEQ ID NO: 27784 - DNA, 22 bp, synthetic construct
  misc_feature 1..22: note = chemically synthesized
  source 1..22: mol_type = other DNA
tgaggtttctgctgagaaatct

SEQ ID NO: 27785 - DNA, 22 bp, synthetic construct
  misc_feature 1..22: note = chemically synthesized
  source 1..22: mol_type = other DNA
ctgctgagaaatctgctgttaa

SEQ ID NO: 27786 - DNA, 22 bp, synthetic construct
  misc_feature 1..22: note = chemically synthesized
  source 1..22: mol_type = other DNA
tgctgagaaatctgctgttaat

SEQ ID NO: 27787 - DNA, 22 bp, synthetic construct
  misc_feature 1..22: note = chemically synthesized
  source 1..22: mol_type = other DNA
ctgagaaatctgctgttaatct

SEQ ID NO: 27788 - DNA, 22 bp, synthetic construct
  misc_feature 1..22: note = chemically synthesized
  source 1..22: mol_type = other DNA
agaaatctgctgttaatctgtt

SEQ ID NO: 27789 - DNA, 22 bp, synthetic construct
  misc_feature 1..22: note = chemically synthesized
  source 1..22: mol_type = other DNA
ctgttaatctgttaatcttgtg

SEQ ID NO: 27790 - DNA, 22 bp, synthetic construct
  misc_feature 1..22: note = chemically synthesized
  source 1..22: mol_type = other DNA
ttaatctgttaatcttgtggaa

SEQ ID NO: 27791 - DNA, 22 bp, synthetic construct
  misc_feature 1..22: note = chemically synthesized
  source 1..22: mol_type = other DNA
atctgttaatcttgtggaagtt

SEQ ID NO: 27792 - DNA, 22 bp, synthetic construct
  misc_feature 1..22: note = chemically synthesized
  source 1..22: mol_type = other DNA
ttaatcttgtggaagttccctt

SEQ ID NO: 27793 - DNA, 22 bp, synthetic construct
  misc_feature 1..22: note = chemically synthesized
  source 1..22: mol_type = other DNA
atcttgtggaagttcccttata

SEQ ID NO: 27794 - DNA, 22 bp, synthetic construct
  misc_feature 1..22: note = chemically synthesized
  source 1..22: mol_type = other DNA
gtggaagttcccttataagtga

SEQ ID NO: 27795 - DNA, 22 bp, synthetic construct
  misc_feature 1..22: note = chemically synthesized
  source 1..22: mol_type = other DNA
tggaagttcccttataagtgac

SEQ ID NO: 27796 - DNA, 22 bp, synthetic construct
  misc_feature 1..22: note = chemically synthesized
  source 1..22: mol_type = other DNA
ccttataagtgactagacattt

SEQ ID NO: 27797 - DNA, 22 bp, synthetic construct
  misc_feature 1..22: note = chemically synthesized
  source 1..22: mol_type = other DNA
ataagtgactagacattttgct

SEQ ID NO: 27798 - DNA, 22 bp, synthetic construct
  misc_feature 1..22: note = chemically synthesized
  source 1..22: mol_type = other DNA
taagtgactagacattttgctt

SEQ ID NO: 27799 - DNA, 22 bp, synthetic construct
  misc_feature 1..22: note = chemically synthesized
  source 1..22: mol_type = other DNA
gacattttgcttgctgttttag

SEQ ID NO: 27800 - DNA, 22 bp, synthetic construct
  misc_feature 1..22: note = chemically synthesized
  source 1..22: mol_type = other DNA
tgcttgctgttttagagttctt

SEQ ID NO: 27801 - DNA, 22 bp, synthetic construct
  misc_feature 1..22: note = chemically synthesized
  source 1..22: mol_type = other DNA
gcttgctgttttagagttctta

SEQ ID NO: 27802 - DNA, 22 bp, synthetic construct
  misc_feature 1..22: note = chemically synthesized
  source 1..22: mol_type = other DNA
cttgctgttttagagttcttac

SEQ ID NO: 27803 - DNA, 22 bp, synthetic construct
  misc_feature 1..22: note = chemically synthesized
  source 1..22: mol_type = other DNA
gctgttttagagttcttactct

SEQ ID NO: 27804 - DNA, 22 bp, synthetic construct
  misc_feature 1..22: note = chemically synthesized
  source 1..22: mol_type = other DNA
ctgttttagagttcttactctt

SEQ ID NO: 27805 - DNA, 22 bp, synthetic construct
  misc_feature 1..22: note = chemically synthesized
  source 1..22: mol_type = other DNA
ttttagagttcttactctttgg

SEQ ID NO: 27806 - DNA, 22 bp, synthetic construct
  misc_feature 1..22: note = chemically synthesized
  source 1..22: mol_type = other DNA
tagagttcttactctttggctt

SEQ ID NO: 27807 - DNA, 22 bp, synthetic construct
  misc_feature 1..22: note = chemically synthesized
  source 1..22: mol_type = other DNA
agagttcttactctttggcttt

SEQ ID NO: 27808 - DNA, 22 bp, synthetic construct
  misc_feature 1..22: note = chemically synthesized
  source 1..22: mol_type = other DNA
gagttcttactctttggctttt

SEQ ID NO: 27809 - DNA, 22 bp, synthetic construct
  misc_feature 1..22: note = chemically synthesized
  source 1..22: mol_type = other DNA
ttactctttggcttttgacagt

SEQ ID NO: 27810 - DNA, 22 bp, synthetic construct
  misc_feature 1..22: note = chemically synthesized
  source 1..22: mol_type = other DNA
actctttggcttttgacagttt

SEQ ID NO: 27811 - DNA, 22 bp, synthetic construct
  misc_feature 1..22: note = chemically synthesized
  source 1..22: mol_type = other DNA
ctctttggcttttgacagtttg

SEQ ID NO: 27812 - DNA, 22 bp, synthetic construct
  misc_feature 1..22: note = chemically synthesized
  source 1..22: mol_type = other DNA
tttggcttttgacagtttgact

SEQ ID NO: 27813 - DNA, 22 bp, synthetic construct
  misc_feature 1..22: note = chemically synthesized
  source 1..22: mol_type = other DNA
tggcttttgacagtttgactat

SEQ ID NO: 27814 - DNA, 22 bp, synthetic construct
  misc_feature 1..22: note = chemically synthesized
  source 1..22: mol_type = other DNA
ggcttttgacagtttgactata

SEQ ID NO: 27815 - DNA, 22 bp, synthetic construct
  misc_feature 1..22: note = chemically synthesized
  source 1..22: mol_type = other DNA
gcttttgacagtttgactataa

SEQ ID NO: 27816 - DNA, 22 bp, synthetic construct
  misc_feature 1..22: note = chemically synthesized
  source 1..22: mol_type = other DNA
ttgacagtttgactataatgtg

SEQ ID NO: 27817 - DNA, 22 bp, synthetic construct
  misc_feature 1..22: note = chemically synthesized
  source 1..22: mol_type = other DNA
tgacagtttgactataatgtgc

SEQ ID NO: 27818 - DNA, 22 bp, synthetic construct
  misc_feature 1..22: note = chemically synthesized
  source 1..22: mol_type = other DNA
gacagtttgactataatgtgct

SEQ ID NO: 27819 - DNA, 22 bp, synthetic construct
  misc_feature 1..22: note = chemically synthesized
  source 1..22: mol_type = other DNA
acagtttgactataatgtgctg

SEQ ID NO: 27820 - DNA, 22 bp, synthetic construct
  misc_feature 1..22: note = chemically synthesized
  source 1..22: mol_type = other DNA
gactataatgtgctgtggagaa

SEQ ID NO: 27821 - DNA, 22 bp, synthetic construct
  misc_feature 1..22: note = chemically synthesized
  source 1..22: mol_type = other DNA
actataatgtgctgtggagaag

SEQ ID NO: 27822 - DNA, 22 bp, synthetic construct
  misc_feature 1..22: note = chemically synthesized
  source 1..22: mol_type = other DNA
taatgtgctgtggagaagagct

SEQ ID NO: 27823 - DNA, 22 bp, synthetic construct
  misc_feature 1..22: note = chemically synthesized
  source 1..22: mol_type = other DNA
tggagaagagctttttgcatta

SEQ ID NO: 27824 - DNA, 22 bp, synthetic construct
  misc_feature 1..22: note = chemically synthesized
  source 1..22: mol_type = other DNA
tttgcattatattatttgggaa

SEQ ID NO: 27825 - DNA, 22 bp, synthetic construct
  misc_feature 1..22: note = chemically synthesized
  source 1..22: mol_type = other DNA
ttgcattatattatttgggaat

SEQ ID NO: 27826 - DNA, 22 bp, synthetic construct
  misc_feature 1..22: note = chemically synthesized
  source 1..22: mol_type = other DNA
tgcattatattatttgggaatt

SEQ ID NO: 27827 - DNA, 22 bp, synthetic construct
  misc_feature 1..22: note = chemically synthesized
  source 1..22: mol_type = other DNA
gcattatattatttgggaattt

SEQ ID NO: 27828 - DNA, 22 bp, synthetic construct
  misc_feature 1..22: note = chemically synthesized
  source 1..22: mol_type = other DNA
cattatattatttgggaatttc

SEQ ID NO: 27829 - DNA, 22 bp, synthetic construct
  misc_feature 1..22: note = chemically synthesized
  source 1..22: mol_type = other DNA
tattatttgggaatttctgatt

SEQ ID NO: 27830 - DNA, 22 bp, synthetic construct
  misc_feature 1..22: note = chemically synthesized
  source 1..22: mol_type = other DNA
tttgggaatttctgattttcat

SEQ ID NO: 27831 - DNA, 22 bp, synthetic construct
  misc_feature 1..22: note = chemically synthesized
  source 1..22: mol_type = other DNA
gggaatttctgattttcatttg

SEQ ID NO: 27832 - DNA, 22 bp, synthetic construct
  misc_feature 1..22: note = chemically synthesized
  source 1..22: mol_type = other DNA
ggaatttctgattttcatttgt

SEQ ID NO: 27833 - DNA, 22 bp, synthetic construct
  misc_feature 1..22: note = chemically synthesized
  source 1..22: mol_type = other DNA
ctgattttcatttgtctggatg

SEQ ID NO: 27834 - DNA, 22 bp, synthetic construct
  misc_feature 1..22: note = chemically synthesized
  source 1..22: mol_type = other DNA
tgattttcatttgtctggatgt

SEQ ID NO: 27835 - DNA, 22 bp, synthetic construct
  misc_feature 1..22: note = chemically synthesized
  source 1..22: mol_type = other DNA
attttcatttgtctggatgtct

SEQ ID NO: 27836 - DNA, 22 bp, synthetic construct
  misc_feature 1..22: note = chemically synthesized
  source 1..22: mol_type = other DNA
tcatttgtctggatgtctacat

SEQ ID NO: 27837 - DNA, 22 bp, synthetic construct
  misc_feature 1..22: note = chemically synthesized
  source 1..22: mol_type = other DNA
catttgtctggatgtctacatt

SEQ ID NO: 27838 - DNA, 22 bp, synthetic construct
  misc_feature 1..22: note = chemically synthesized
  source 1..22: mol_type = other DNA
atttgtctggatgtctacattt

SEQ ID NO: 27839 - DNA, 22 bp, synthetic construct
  misc_feature 1..22: note = chemically synthesized
  source 1..22: mol_type = other DNA
gtctggatgtctacatttcttg

SEQ ID NO: 27840 - DNA, 22 bp, synthetic construct
  misc_feature 1..22: note = chemically synthesized
  source 1..22: mol_type = other DNA
tctggatgtctacatttcttgc

SEQ ID NO: 27841 - DNA, 22 bp, synthetic construct
  misc_feature 1..22: note = chemically synthesized
  source 1..22: mol_type = other DNA
gatgtctacatttcttgctaga

SEQ ID NO: 27842 - DNA, 22 bp, synthetic construct
  misc_feature 1..22: note = chemically synthesized
  source 1..22: mol_type = other DNA
catttcttgctagacttgacaa

SEQ ID NO: 27843 - DNA, 22 bp, synthetic construct
  misc_feature 1..22: note = chemically synthesized
  source 1..22: mol_type = other DNA
cttgctagacttgacaagtttt

SEQ ID NO: 27844 - DNA, 22 bp, synthetic construct
  misc_feature 1..22: note = chemically synthesized
  source 1..22: mol_type = other DNA
ttgctagacttgacaagttttc

SEQ ID NO: 27845 - DNA, 22 bp, synthetic construct
  misc_feature 1..22: note = chemically synthesized
  source 1..22: mol_type = other DNA
gctagacttgacaagttttcag

SEQ ID NO: 27846 - DNA, 22 bp, synthetic construct
  misc_feature 1..22: note = chemically synthesized
  source 1..22: mol_type = other DNA
ctagacttgacaagttttcagc

SEQ ID NO: 27847 - DNA, 22 bp, synthetic construct
  misc_feature 1..22: note = chemically synthesized
  source 1..22: mol_type = other DNA
gacttgacaagttttcagctat

SEQ ID NO: 27848 - DNA, 22 bp, synthetic construct
  misc_feature 1..22: note = chemically synthesized
  source 1..22: mol_type = other DNA
gacaagttttcagctattgtgt

SEQ ID NO: 27849 - DNA, 22 bp, synthetic construct
  misc_feature 1..22: note = chemically synthesized
  source 1..22: mol_type = other DNA
acaagttttcagctattgtgtt

SEQ ID NO: 27850 - DNA, 22 bp, synthetic construct
  misc_feature 1..22: note = chemically synthesized
  source 1..22: mol_type = other DNA
tcagctattgtgttgttacgta

SEQ ID NO: 27851 - DNA, 22 bp, synthetic construct
  misc_feature 1..22: note = chemically synthesized
  source 1..22: mol_type = other DNA
cagctattgtgttgttacgtag

SEQ ID NO: 27852 - DNA, 22 bp, synthetic construct
  misc_feature 1..22: note = chemically synthesized
  source 1..22: mol_type = other DNA
agctattgtgttgttacgtagg

SEQ ID NO: 27853 - DNA, 22 bp, synthetic construct
  misc_feature 1..22: note = chemically synthesized
  source 1..22: mol_type = other DNA
ttgtgttgttacgtaggtttcc

SEQ ID NO: 27854 - DNA, 22 bp, synthetic construct
  misc_feature 1..22: note = chemically synthesized
  source 1..22: mol_type = other DNA
tgttgttacgtaggtttcctac

SEQ ID NO: 27855 - DNA, 22 bp, synthetic construct
  misc_feature 1..22: note = chemically synthesized
  source 1..22: mol_type = other DNA
ttacgtaggtttcctacacctt

SEQ ID NO: 27856 - DNA, 22 bp, synthetic construct
  misc_feature 1..22: note = chemically synthesized
  source 1..22: mol_type = other DNA
cgtaggtttcctacacctttca

SEQ ID NO: 27857 - DNA, 22 bp, synthetic construct
  misc_feature 1..22: note = chemically synthesized
  source 1..22: mol_type = other DNA
cctacacctttcatgttctctt

SEQ ID NO: 27858 - DNA, 22 bp, synthetic construct
  misc_feature 1..22: note = chemically synthesized
  source 1..22: mol_type = other DNA
ctacacctttcatgttctcttt

SEQ ID NO: 27859 - DNA, 22 bp, synthetic construct
  misc_feature 1..22: note = chemically synthesized
  source 1..22: mol_type = other DNA
cacctttcatgttctctttacc

SEQ ID NO: 27860 - DNA, 22 bp, synthetic construct
  misc_feature 1..22: note = chemically synthesized
  source 1..22: mol_type = other DNA
tcatgttctctttaccttctgg

SEQ ID NO: 27861 - DNA, 22 bp, synthetic construct
  misc_feature 1..22: note = chemically synthesized
  source 1..22: mol_type = other DNA
catgttctctttaccttctggg

SEQ ID NO: 27862 - DNA, 22 bp, synthetic construct
  misc_feature 1..22: note = chemically synthesized
  source 1..22: mol_type = other DNA
atgttctctttaccttctggga

SEQ ID NO: 27863 - DNA, 22 bp, synthetic construct
  misc_feature 1..22: note = chemically synthesized
  source 1..22: mol_type = other DNA
tctttaccttctgggaaactgc

SEQ ID NO: 27864 - DNA, 22 bp, synthetic construct
  misc_feature 1..22: note = chemically synthesized
  source 1..22: mol_type = other DNA
tttaccttctgggaaactgcaa

SEQ ID NO: 27865 - DNA, 22 bp, synthetic construct
  misc_feature 1..22: note = chemically synthesized
  source 1..22: mol_type = other DNA
taccttctgggaaactgcaaat

SEQ ID NO: 27866 - DNA, 22 bp, synthetic construct
  misc_feature 1..22: note = chemically synthesized
  source 1..22: mol_type = other DNA
accttctgggaaactgcaaatt

SEQ ID NO: 27867 - DNA, 22 bp, synthetic construct
  misc_feature 1..22: note = chemically synthesized
  source 1..22: mol_type = other DNA
ccttctgggaaactgcaaattt

SEQ ID NO: 27868 - DNA, 22 bp, synthetic construct
  misc_feature 1..22: note = chemically synthesized
  source 1..22: mol_type = other DNA
ctgggaaactgcaaatttgaat

SEQ ID NO: 27869 - DNA, 22 bp, synthetic construct
  misc_feature 1..22: note = chemically synthesized
  source 1..22: mol_type = other DNA
tgggaaactgcaaatttgaata

SEQ ID NO: 27870 - DNA, 22 bp, synthetic construct
  misc_feature 1..22: note = chemically synthesized
  source 1..22: mol_type = other DNA
ggaaactgcaaatttgaatatt

SEQ ID NO: 27871 - DNA, 22 bp, synthetic construct
  misc_feature 1..22: note = chemically synthesized
  source 1..22: mol_type = other DNA
caaatttgaatatttgttcact

SEQ ID NO: 27872 - DNA, 22 bp, synthetic construct
  misc_feature 1..22: note = chemically synthesized
  source 1..22: mol_type = other DNA
gaatatttgttcactttatagt

SEQ ID NO: 27873 - DNA, 22 bp, synthetic construct
  misc_feature 1..22: note = chemically synthesized
  source 1..22: mol_type = other DNA
aatatttgttcactttatagtg

SEQ ID NO: 27874 - DNA, 22 bp, synthetic construct
  misc_feature 1..22: note = chemically synthesized
  source 1..22: mol_type = other DNA
gttcactttatagtgcctcata

SEQ ID NO: 27875 - DNA, 22 bp, synthetic construct
  misc_feature 1..22: note = chemically synthesized
  source 1..22: mol_type = other DNA
ttcactttatagtgcctcatat

SEQ ID NO: 27876 - DNA, 22 bp, synthetic construct
  misc_feature 1..22: note = chemically synthesized
  source 1..22: mol_type = other DNA
actttatagtgcctcatatgtc

SEQ ID NO: 27877 - DNA, 22 bp, synthetic construct
  misc_feature 1..22: note = chemically synthesized
  source 1..22: mol_type = other DNA
tatagtgcctcatatgtcacat

SEQ ID NO: 27878 - DNA, 22 bp, synthetic construct
  misc_feature 1..22: note = chemically synthesized
  source 1..22: mol_type = other DNA
atagtgcctcatatgtcacata

SEQ ID NO: 27879 - DNA, 22 bp, synthetic construct
  misc_feature 1..22: note = chemically synthesized
  source 1..22: mol_type = other DNA
tagtgcctcatatgtcacatac

SEQ ID NO: 27880 - DNA, 22 bp, synthetic construct
  misc_feature 1..22: note = chemically synthesized
  source 1..22: mol_type = other DNA
atatgtcacatacactttgttc

SEQ ID NO: 27881 - DNA, 22 bp, synthetic construct
  misc_feature 1..22: note = chemically synthesized
  source 1..22: mol_type = other DNA
tgttcattctttttttttcctt

SEQ ID NO: 27882 - DNA, 22 bp, synthetic construct
  misc_feature 1..22: note = chemically synthesized
  source 1..22: mol_type = other DNA
gttcattctttttttttccttt

SEQ ID NO: 27883 - DNA, 22 bp, synthetic construct
  misc_feature 1..22: note = chemically synthesized
  source 1..22: mol_type = other DNA
ttcattctttttttttcctttc

SEQ ID NO: 27884 - DNA, 22 bp, synthetic construct
  misc_feature 1..22: note = chemically synthesized
  source 1..22: mol_type = other DNA
attctttttttttcctttctat

SEQ ID NO: 27885 - DNA, 22 bp, synthetic construct
  misc_feature 1..22: note = chemically synthesized
  source 1..22: mol_type = other DNA
tttttttttcctttctatcatt

SEQ ID NO: 27886 - DNA, 22 bp, synthetic construct
  misc_feature 1..22: note = chemically synthesized
  source 1..22: mol_type = other DNA
tttttttcctttctatcatttg

SEQ ID NO: 27887 - DNA, 22 bp, synthetic construct
  misc_feature 1..22: note = chemically synthesized
  source 1..22: mol_type = other DNA
ttttttcctttctatcatttga

SEQ ID NO: 27888 - DNA, 22 bp, synthetic construct
  misc_feature 1..22: note = chemically synthesized
  source 1..22: mol_type = other DNA
tttttcctttctatcatttgac

SEQ ID NO: 27889 - DNA, 22 bp, synthetic construct
  misc_feature 1..22: note = chemically synthesized
  source 1..22: mol_type = other DNA
ttttcctttctatcatttgacc

SEQ ID NO: 27890 - DNA, 22 bp, synthetic construct
  misc_feature 1..22: note = chemically synthesized
  source 1..22: mol_type = other DNA
tttcctttctatcatttgacca

SEQ ID NO: 27891 - DNA, 22 bp, synthetic construct
  misc_feature 1..22: note = chemically synthesized
  source 1..22: mol_type = other DNA
ttcctttctatcatttgaccag

SEQ ID NO: 27892 - DNA, 22 bp, synthetic construct
  misc_feature 1..22: note = chemically synthesized
  source 1..22: mol_type = other DNA
tcctttctatcatttgaccagc

SEQ ID NO: 27893 - DNA, 22 bp, synthetic construct
  misc_feature 1..22: note = chemically synthesized
  source 1..22: mol_type = other DNA
cctttctatcatttgaccagct

SEQ ID NO: 27894 - DNA, 22 bp, synthetic construct
  misc_feature 1..22: note = chemically synthesized
  source 1..22: mol_type = other DNA
ctttctatcatttgaccagcta

SEQ ID NO: 27895 - DNA, 22 bp, synthetic construct
  misc_feature 1..22: note = chemically synthesized
  source 1..22: mol_type = other DNA
tctatcatttgaccagctaatt

SEQ ID NO: 27896 - DNA, 22 bp, synthetic construct
  misc_feature 1..22: note = chemically synthesized
  source 1..22: mol_type = other DNA
ctatcatttgaccagctaattt

SEQ ID NO: 27897 - DNA, 22 bp, synthetic construct
  misc_feature 1..22: note = chemically synthesized
  source 1..22: mol_type = other DNA
tatcatttgaccagctaatttt

SEQ ID NO: 27898 - DNA, 22 bp, synthetic construct
  misc_feature 1..22: note = chemically synthesized
  source 1..22: mol_type = other DNA
tcatttgaccagctaattttaa

SEQ ID NO: 27899 - DNA, 22 bp, synthetic construct
  misc_feature 1..22: note = chemically synthesized
  source 1..22: mol_type = other DNA
gaccagctaattttaaaagacc

SEQ ID NO: 27900 - DNA, 22 bp, synthetic construct
  misc_feature 1..22: note = chemically synthesized
  source 1..22: mol_type = other DNA
accagctaattttaaaagacct

SEQ ID NO: 27901 - DNA, 22 bp, synthetic construct
  misc_feature 1..22: note = chemically synthesized
  source 1..22: mol_type = other DNA
attttaaaagacctgtcttcaa

SEQ ID NO: 27902 - DNA, 22 bp, synthetic construct
  misc_feature 1..22: note = chemically synthesized
  source 1..22: mol_type = other DNA
taaaagacctgtcttcaagttc

SEQ ID NO: 27903 - DNA, 22 bp, synthetic construct
  misc_feature 1..22: note = chemically synthesized
  source 1..22: mol_type = other DNA
aaaagacctgtcttcaagttct

SEQ ID NO: 27904 - DNA, 22 bp, synthetic construct
  misc_feature 1..22: note = chemically synthesized
  source 1..22: mol_type = other DNA
aaagacctgtcttcaagttctg

SEQ ID NO: 27905 - DNA, 22 bp, synthetic construct
  misc_feature 1..22: note = chemically synthesized
  source 1..22: mol_type = other DNA
tcttcaagttctgaaatttttc

SEQ ID NO: 27906 - DNA, 22 bp, synthetic construct
  misc_feature 1..22: note = chemically synthesized
  source 1..22: mol_type = other DNA
caagttctgaaatttttcttct

SEQ ID NO: 27907 - DNA, 22 bp, synthetic construct
  misc_feature 1..22: note = chemically synthesized
  source 1..22: mol_type = other DNA
aagttctgaaatttttcttctg

SEQ ID NO: 27908 - DNA, 22 bp, synthetic construct
  misc_feature 1..22: note = chemically synthesized
  source 1..22: mol_type = other DNA
tgaaatttttcttctgcttgat

SEQ ID NO: 27909 - DNA, 22 bp, synthetic construct
  misc_feature 1..22: note = chemically synthesized
  source 1..22: mol_type = other DNA
aaatttttcttctgcttgatct

SEQ ID NO: 27910 - DNA, 22 bp, synthetic construct
  misc_feature 1..22: note = chemically synthesized
  source 1..22: mol_type = other DNA
ttcttctgcttgatctgatcta

SEQ ID NO: 27911 - DNA, 22 bp, synthetic construct
  misc_feature 1..22: note = chemically synthesized
  source 1..22: mol_type = other DNA
tcttctgcttgatctgatctat

SEQ ID NO: 27912 - DNA, 22 bp, synthetic construct
  misc_feature 1..22: note = chemically synthesized
  source 1..22: mol_type = other DNA
cttctgcttgatctgatctatt

SEQ ID NO: 27913 - DNA, 22 bp, synthetic construct
  misc_feature 1..22: note = chemically synthesized
  source 1..22: mol_type = other DNA
ttctgcttgatctgatctattg

SEQ ID NO: 27914 - DNA, 22 bp, synthetic construct
  misc_feature 1..22: note = chemically synthesized
  source 1..22: mol_type = other DNA
ctgcttgatctgatctattgtt

SEQ ID NO: 27915 - DNA, 22 bp, synthetic construct
  misc_feature 1..22: note = chemically synthesized
  source 1..22: mol_type = other DNA
tgcttgatctgatctattgttg

SEQ ID NO: 27916 - DNA, 22 bp, synthetic construct
  misc_feature 1..22: note = chemically synthesized
  source 1..22: mol_type = other DNA
cttgatctgatctattgttgaa

SEQ ID NO: 27917 - DNA, 22 bp, synthetic construct
  misc_feature 1..22: note = chemically synthesized
  source 1..22: mol_type = other DNA
gatctgatctattgttgaagtt

SEQ ID NO: 27918 - DNA, 22 bp, synthetic construct
  misc_feature 1..22: note = chemically synthesized
  source 1..22: mol_type = other DNA
atctgatctattgttgaagttt

SEQ ID NO: 27919 - DNA, 22 bp, synthetic construct
  misc_feature 1..22: note = chemically synthesized
  source 1..22: mol_type = other DNA
atctattgttgaagtttttgaa

SEQ ID NO: 27920 - DNA, 22 bp, synthetic construct
  misc_feature 1..22: note = chemically synthesized
  source 1..22: mol_type = other DNA
ttgttgaagtttttgaatgtat

SEQ ID NO: 27921 - DNA, 22 bp, synthetic construct
  misc_feature 1..22: note = chemically synthesized
  source 1..22: mol_type = other DNA
ttgaagtttttgaatgtatttt

SEQ ID NO: 27922 - DNA, 22 bp, synthetic construct
  misc_feature 1..22: note = chemically synthesized
  source 1..22: mol_type = other DNA
aagtttttgaatgtattttgta

SEQ ID NO: 27923 - DNA, 22 bp, synthetic construct
  misc_feature 1..22: note = chemically synthesized
  source 1..22: mol_type = other DNA
ttgaatgtattttgtatttctt

SEQ ID NO: 27924 - DNA, 22 bp, synthetic construct
  misc_feature 1..22: note = chemically synthesized
  source 1..22: mol_type = other DNA
tgaatgtattttgtatttcttt

SEQ ID NO: 27925 - DNA, 22 bp, synthetic construct
  misc_feature 1..22: note = chemically synthesized
  source 1..22: mol_type = other DNA
gaatgtattttgtatttctttc

SEQ ID NO: 27926 - DNA, 22 bp, synthetic construct
  misc_feature 1..22: note = chemically synthesized
  source 1..22: mol_type = other DNA
aatgtattttgtatttctttca

SEQ ID NO: 27927 - DNA, 22 bp, synthetic construct
  misc_feature 1..22: note = chemically synthesized
  source 1..22: mol_type = other DNA
tgtatttctttcaataaactct

SEQ ID NO: 27928 - DNA, 22 bp, synthetic construct
  misc_feature 1..22: note = chemically synthesized
  source 1..22: mol_type = other DNA
gtatttctttcaataaactctt

SEQ ID NO: 27929 - DNA, 22 bp, synthetic construct
  misc_feature 1..22: note = chemically synthesized
  source 1..22: mol_type = other DNA
tatttctttcaataaactcttc

SEQ ID NO: 27930 - DNA, 22 bp, synthetic construct
  misc_feature 1..22: note = chemically synthesized
  source 1..22: mol_type = other DNA
ctttcaataaactcttcagtta

SEQ ID NO: 27931 - DNA, 22 bp, synthetic construct
  misc_feature 1..22: note = chemically synthesized
  source 1..22: mol_type = other DNA
tttcaataaactcttcagttac

SEQ ID NO: 27932 - DNA, 22 bp, synthetic construct
  misc_feature 1..22: note = chemically synthesized
  source 1..22: mol_type = other DNA
tcaataaactcttcagttacag

SEQ ID NO: 27933 - DNA, 22 bp, synthetic construct
  misc_feature 1..22: note = chemically synthesized
  source 1..22: mol_type = other DNA
caataaactcttcagttacaga

SEQ ID NO: 27934 - DNA, 22 bp, synthetic construct
  misc_feature 1..22: note = chemically synthesized
  source 1..22: mol_type = other DNA
aataaactcttcagttacagaa

SEQ ID NO: 27935 - DNA, 22 bp, synthetic construct
  misc_feature 1..22: note = chemically synthesized
  source 1..22: mol_type = other DNA
ttcagttacagaatttctgttt

SEQ ID NO: 27936 - DNA, 22 bp, synthetic construct
  misc_feature 1..22: note = chemically synthesized
  source 1..22: mol_type = other DNA
cagttacagaatttctgtttgg

SEQ ID NO: 27937 - DNA, 22 bp, synthetic construct
  misc_feature 1..22: note = chemically synthesized
  source 1..22: mol_type = other DNA
agttacagaatttctgtttggt

SEQ ID NO: 27938 - DNA, 22 bp, synthetic construct
  misc_feature 1..22: note = chemically synthesized
  source 1..22: mol_type = other DNA
cagaatttctgtttggttcatt

SEQ ID NO: 27939 - DNA, 22 bp, synthetic construct
  misc_feature 1..22: note = chemically synthesized
  source 1..22: mol_type = other DNA
ctgtttggttcattcttgttgt

SEQ ID NO: 27940 - DNA, 22 bp, synthetic construct
  misc_feature 1..22: note = chemically synthesized
  source 1..22: mol_type = other DNA
tgtttggttcattcttgttgta

SEQ ID NO: 27941 - DNA, 22 bp, synthetic construct
  misc_feature 1..22: note = chemically synthesized
  source 1..22: mol_type = other DNA
tttggttcattcttgttgtatc

SEQ ID NO: 27942 - DNA, 22 bp, synthetic construct
  misc_feature 1..22: note = chemically synthesized
  source 1..22: mol_type = other DNA
ggttcattcttgttgtatctat

SEQ ID NO: 27943 - DNA, 22 bp, synthetic construct
  misc_feature 1..22: note = chemically synthesized
  source 1..22: mol_type = other DNA
gttcattcttgttgtatctatc

SEQ ID NO: 27944 - DNA, 22 bp, synthetic construct
  misc_feature 1..22: note = chemically synthesized
  source 1..22: mol_type = other DNA
attcttgttgtatctatctctt

SEQ ID NO: 27945 - DNA, 22 bp, synthetic construct
  misc_feature 1..22: note = chemically synthesized
  source 1..22: mol_type = other DNA
ttgttgtatctatctcttgggt

SEQ ID NO: 27946 - DNA, 22 bp, synthetic construct
  misc_feature 1..22: note = chemically synthesized
  source 1..22: mol_type = other DNA
gttgtatctatctcttgggtaa

SEQ ID NO: 27947 - DNA, 22 bp, synthetic construct
  misc_feature 1..22: note = chemically synthesized
  source 1..22: mol_type = other DNA
ttgtatctatctcttgggtaaa

SEQ ID NO: 27948 - DNA, 22 bp, synthetic construct
  misc_feature 1..22: note = chemically synthesized
  source 1..22: mol_type = other DNA
tatctatctcttgggtaaattt

SEQ ID NO: 27949 - DNA, 22 bp, synthetic construct
  misc_feature 1..22: note = chemically synthesized
  source 1..22: mol_type = other DNA
tctcttgggtaaatttctcatt

SEQ ID NO: 27950 - DNA, 22 bp, synthetic construct
  misc_feature 1..22: note = chemically synthesized
  source 1..22: mol_type = other DNA
ttgggtaaatttctcattcata

SEQ ID NO: 27951 - DNA, 22 bp, synthetic construct
  misc_feature 1..22: note = chemically synthesized
  source 1..22: mol_type = other DNA
gggtaaatttctcattcatatc

SEQ ID NO: 27952 - DNA, 22 bp, synthetic construct
  misc_feature 1..22: note = chemically synthesized
  source 1..22: mol_type = other DNA
ggtaaatttctcattcatatcc

SEQ ID NO: 27953 - DNA, 22 bp, synthetic construct
  misc_feature 1..22: note = chemically synthesized
  source 1..22: mol_type = other DNA
ctcattcatatcctgaattgtt

SEQ ID NO: 27954 - DNA, 22 bp, synthetic construct
  misc_feature 1..22: note = chemically synthesized
  source 1..22: mol_type = other DNA
tcattcatatcctgaattgttt

SEQ ID NO: 27955 - DNA, 22 bp, synthetic construct
  misc_feature 1..22: note = chemically synthesized
  source 1..22: mol_type = other DNA
attcatatcctgaattgttttt

SEQ ID NO: 27956 - DNA, 22 bp, synthetic construct
  misc_feature 1..22: note = chemically synthesized
  source 1..22: mol_type = other DNA
atatcctgaattgtttttctga

SEQ ID NO: 27957 - DNA, 22 bp, synthetic construct
  misc_feature 1..22: note = chemically synthesized
  source 1..22: mol_type = other DNA
aattgtttttctgatttctttt

SEQ ID NO: 27958 - DNA, 22 bp, synthetic construct
  misc_feature 1..22: note = chemically synthesized
  source 1..22: mol_type = other DNA
tttttctgatttctttttattg

SEQ ID NO: 27959 - DNA, 22 bp, synthetic construct
  misc_feature 1..22: note = chemically synthesized
  source 1..22: mol_type = other DNA
ttctgatttctttttattgttt

SEQ ID NO: 27960 - DNA, 22 bp, synthetic construct
  misc_feature 1..22: note = chemically synthesized
  source 1..22: mol_type = other DNA
tctgatttctttttattgttta

SEQ ID NO: 27961 - DNA, 22 bp, synthetic construct
  misc_feature 1..22: note = chemically synthesized
  source 1..22: mol_type = other DNA
ctgatttctttttattgtttat

SEQ ID NO: 27962 - DNA, 22 bp, synthetic construct
  misc_feature 1..22: note = chemically synthesized
  source 1..22: mol_type = other DNA
tgatttctttttattgtttatc

SEQ ID NO: 27963 - DNA, 22 bp, synthetic construct
  misc_feature 1..22: note = chemically synthesized
  source 1..22: mol_type = other DNA
atttctttttattgtttatctg

SEQ ID NO: 27964 - DNA, 22 bp, synthetic construct
  misc_feature 1..22: note = chemically synthesized
  source 1..22: mol_type = other DNA
ctttttattgtttatctgagtt

SEQ ID NO: 27965 - DNA, 22 bp, synthetic construct
  misc_feature 1..22: note = chemically synthesized
  source 1..22: mol_type = other DNA
tttttattgtttatctgagttc

SEQ ID NO: 27966 - DNA, 22 bp, synthetic construct
  misc_feature 1..22: note = chemically synthesized
  source 1..22: mol_type = other DNA
tttattgtttatctgagttctc

SEQ ID NO: 27967 - DNA, 22 bp, synthetic construct
  misc_feature 1..22: note = chemically synthesized
  source 1..22: mol_type = other DNA
ttattgtttatctgagttctct

SEQ ID NO: 27968 - DNA, 22 bp, synthetic construct
  misc_feature 1..22: note = chemically synthesized
  source 1..22: mol_type = other DNA
tattgtttatctgagttctctt

SEQ ID NO: 27969 - DNA, 22 bp, synthetic construct
  misc_feature 1..22: note = chemically synthesized
  source 1..22: mol_type = other DNA
attgtttatctgagttctcttg

SEQ ID NO: 27970 - DNA, 22 bp, synthetic construct
  misc_feature 1..22: note = chemically synthesized
  source 1..22: mol_type = other DNA
ttgtttatctgagttctcttgt

SEQ ID NO: 27971 - DNA, 22 bp, synthetic construct
  misc_feature 1..22: note = chemically synthesized
  source 1..22: mol_type = other DNA
tttatctgagttctcttgtgtc

SEQ ID NO: 27972 - DNA, 22 bp, synthetic construct
  misc_feature 1..22: note = chemically synthesized
  source 1..22: mol_type = other DNA
atctgagttctcttgtgtctca

SEQ ID NO: 27973 - DNA, 22 bp, synthetic construct
  misc_feature 1..22: note = chemically synthesized
  source 1..22: mol_type = other DNA
tctgagttctcttgtgtctcac

SEQ ID NO: 27974 - DNA, 22 bp, synthetic construct
  misc_feature 1..22: note = chemically synthesized
  source 1..22: mol_type = other DNA
agttctcttgtgtctcactgag

SEQ ID NO: 27975 - DNA, 22 bp, synthetic construct
  misc_feature 1..22: note = chemically synthesized
  source 1..22: mol_type = other DNA
tcttgtgtctcactgagcttcc

SEQ ID NO: 27976 - DNA, 22 bp, synthetic construct
  misc_feature 1..22: note = chemically synthesized
  source 1..22: mol_type = other DNA
ttgtgtctcactgagcttcctt

SEQ ID NO: 27977 - DNA, 22 bp, synthetic construct
  misc_feature 1..22: note = chemically synthesized
  source 1..22: mol_type = other DNA
gtgtctcactgagcttccttaa

SEQ ID NO: 27978 - DNA, 22 bp, synthetic construct
  misc_feature 1..22: note = chemically synthesized
  source 1..22: mol_type = other DNA
tgtctcactgagcttccttaat

SEQ ID NO: 27979 - DNA, 22 bp, synthetic construct
  misc_feature 1..22: note = chemically synthesized
  source 1..22: mol_type = other DNA
actgagcttccttaatatcaac

SEQ ID NO: 27980 - DNA, 22 bp, synthetic construct
  misc_feature 1..22: note = chemically synthesized
  source 1..22: mol_type = other DNA
agcttccttaatatcaacattt

SEQ ID NO: 27981 - DNA, 22 bp, synthetic construct
  misc_feature 1..22: note = chemically synthesized
  source 1..22: mol_type = other DNA
ccttaatatcaacattttggat

SEQ ID NO: 27982 - DNA, 22 bp, synthetic construct
  misc_feature 1..22: note = chemically synthesized
  source 1..22: mol_type = other DNA
cttaatatcaacattttggatt

SEQ ID NO: 27983 - DNA, 22 bp, synthetic construct
  misc_feature 1..22: note = chemically synthesized
  source 1..22: mol_type = other DNA
aatatcaacattttggattctt

SEQ ID NO: 27984 - DNA, 22 bp, synthetic construct
  misc_feature 1..22: note = chemically synthesized
  source 1..22: mol_type = other DNA
atatcaacattttggattcttt

SEQ ID NO: 27985 - DNA, 22 bp, synthetic construct
  misc_feature 1..22: note = chemically synthesized
  source 1..22: mol_type = other DNA
tggattcttttttccagaattt

SEQ ID NO: 27986 - DNA, 22 bp, synthetic construct
  misc_feature 1..22: note = chemically synthesized
  source 1..22: mol_type = other DNA
ggattcttttttccagaatttt

SEQ ID NO: 27987 - DNA, 22 bp, synthetic construct
  misc_feature 1..22: note = chemically synthesized
  source 1..22: mol_type = other DNA
gattcttttttccagaatttta

SEQ ID NO: 27988 - DNA, 22 bp, synthetic construct
  misc_feature 1..22: note = chemically synthesized
  source 1..22: mol_type = other DNA
ttttttccagaattttataaat

SEQ ID NO: 27989 - DNA, 22 bp, synthetic construct
  misc_feature 1..22: note = chemically synthesized
  source 1..22: mol_type = other DNA
ttttccagaattttataaatgt

SEQ ID NO: 27990 - DNA, 22 bp, synthetic construct
  misc_feature 1..22: note = chemically synthesized
  source 1..22: mol_type = other DNA
tttccagaattttataaatgtc

SEQ ID NO: 27991 - DNA, 22 bp, synthetic construct
  misc_feature 1..22: note = chemically synthesized
  source 1..22: mol_type = other DNA
ttccagaattttataaatgtct

SEQ ID NO: 27992 - DNA, 22 bp, synthetic construct
  misc_feature 1..22: note = chemically synthesized
  source 1..22: mol_type = other DNA
tccagaattttataaatgtctt

SEQ ID NO: 27993 - DNA, 22 bp, synthetic construct
  misc_feature 1..22: note = chemically synthesized
  source 1..22: mol_type = other DNA
ccagaattttataaatgtcttt

SEQ ID NO: 27994 - DNA, 22 bp, synthetic construct
  misc_feature 1..22: note = chemically synthesized
  source 1..22: mol_type = other DNA
cagaattttataaatgtctttt

SEQ ID NO: 27995 - DNA, 22 bp, synthetic construct
  misc_feature 1..22: note = chemically synthesized
  source 1..22: mol_type = other DNA
tataaatgtcttttttttccac

SEQ ID NO: 27996 - DNA, 22 bp, synthetic construct
  misc_feature 1..22: note = chemically synthesized
  source 1..22: mol_type = other DNA
ataaatgtcttttttttccact

SEQ ID NO: 27997 - DNA, 22 bp, synthetic construct
  misc_feature 1..22: note = chemically synthesized
  source 1..22: mol_type = other DNA
taaatgtcttttttttccactg

SEQ ID NO: 27998 - DNA, 22 bp, synthetic construct
  misc_feature 1..22: note = chemically synthesized
  source 1..22: mol_type = other DNA
ttttttccactggcttatgttg

SEQ ID NO: 27999 - DNA, 22 bp, synthetic construct
  misc_feature 1..22: note = chemically synthesized
  source 1..22: mol_type = other DNA
tttttccactggcttatgttgc

SEQ ID NO: 28000 - DNA, 22 bp, synthetic construct
  misc_feature 1..22: note = chemically synthesized
  source 1..22: mol_type = other DNA
ttttccactggcttatgttgct

SEQ ID NO: 28001 - DNA, 22 bp, synthetic construct
  misc_feature 1..22: note = chemically synthesized
  source 1..22: mol_type = other DNA
tttccactggcttatgttgctg

SEQ ID NO: 28002 - DNA, 22 bp, synthetic construct
  misc_feature 1..22: note = chemically synthesized
  source 1..22: mol_type = other DNA
ttccactggcttatgttgctga

SEQ ID NO: 28003 - DNA, 22 bp, synthetic construct
  misc_feature 1..22: note = chemically synthesized
  source 1..22: mol_type = other DNA
tccactggcttatgttgctgaa

SEQ ID NO: 28004 - DNA, 22 bp, synthetic construct
  misc_feature 1..22: note = chemically synthesized
  source 1..22: mol_type = other DNA
ccactggcttatgttgctgaag

SEQ ID NO: 28005 - DNA, 22 bp, synthetic construct
  misc_feature 1..22: note = chemically synthesized
  source 1..22: mol_type = other DNA
cactggcttatgttgctgaaga

SEQ ID NO: 28006 - DNA, 22 bp, synthetic construct
  misc_feature 1..22: note = chemically synthesized
  source 1..22: mol_type = other DNA
gcttatgttgctgaagaattat

SEQ ID NO: 28007 - DNA, 22 bp, synthetic construct
  misc_feature 1..22: note = chemically synthesized
  source 1..22: mol_type = other DNA
atgttgctgaagaattattaaa

SEQ ID NO: 28008 - DNA, 22 bp, synthetic construct
  misc_feature 1..22: note = chemically synthesized
  source 1..22: mol_type = other DNA
tgttgctgaagaattattaaat

SEQ ID NO: 28009 - DNA, 22 bp, synthetic construct
  misc_feature 1..22: note = chemically synthesized
  source 1..22: mol_type = other DNA
ctgaagaattattaaattcctt

SEQ ID NO: 28010 - DNA, 22 bp, synthetic construct
  misc_feature 1..22: note = chemically synthesized
  source 1..22: mol_type = other DNA
aagaattattaaattcctttgg

SEQ ID NO: 28011 - DNA, 22 bp, synthetic construct
  misc_feature 1..22: note = chemically synthesized
  source 1..22: mol_type = other DNA
ttaaattcctttggaagtgtca

SEQ ID NO: 28012 - DNA, 22 bp, synthetic construct
  misc_feature 1..22: note = chemically synthesized
  source 1..22: mol_type = other DNA
aattcctttggaagtgtcatat

SEQ ID NO: 28013 - DNA, 22 bp, synthetic construct
  misc_feature 1..22: note = chemically synthesized
  source 1..22: mol_type = other DNA
ctttggaagtgtcatatttctt

SEQ ID NO: 28014 - DNA, 22 bp, synthetic construct
  misc_feature 1..22: note = chemically synthesized
  source 1..22: mol_type = other DNA
tggaagtgtcatatttcttcac

SEQ ID NO: 28015 - DNA, 22 bp, synthetic construct
  misc_feature 1..22: note = chemically synthesized
  source 1..22: mol_type = other DNA
ggaagtgtcatatttcttcacc

SEQ ID NO: 28016 - DNA, 22 bp, synthetic construct
  misc_feature 1..22: note = chemically synthesized
  source 1..22: mol_type = other DNA
gaagtgtcatatttcttcacct

SEQ ID NO: 28017 - DNA, 22 bp, synthetic construct
  misc_feature 1..22: note = chemically synthesized
  source 1..22: mol_type = other DNA
cttcacctttttatgtttattt

SEQ ID NO: 28018 - DNA, 22 bp, synthetic construct
  misc_feature 1..22: note = chemically synthesized
  source 1..22: mol_type = other DNA
ttcacctttttatgtttatttt

SEQ ID NO: 28019 - DNA, 22 bp, synthetic construct
  misc_feature 1..22: note = chemically synthesized
  source 1..22: mol_type = other DNA
cacctttttatgtttattttgt

SEQ ID NO: 28020 - DNA, 22 bp, synthetic construct
  misc_feature 1..22: note = chemically synthesized
  source 1..22: mol_type = other DNA
acctttttatgtttattttgtt

SEQ ID NO: 28021 - DNA, 22 bp, synthetic construct
  misc_feature 1..22: note = chemically synthesized
  source 1..22: mol_type = other DNA
tttatgtttattttgttcttgc

SEQ ID NO: 28022 - DNA, 22 bp, synthetic construct
  misc_feature 1..22: note = chemically synthesized
  source 1..22: mol_type = other DNA
ttatgtttattttgttcttgca

SEQ ID NO: 28023 - DNA, 22 bp, synthetic construct
  misc_feature 1..22: note = chemically synthesized
  source 1..22: mol_type = other DNA
tatgtttattttgttcttgcat

SEQ ID NO: 28024 - DNA, 22 bp, synthetic construct
  misc_feature 1..22: note = chemically synthesized
  source 1..22: mol_type = other DNA
atgtttattttgttcttgcatt

SEQ ID NO: 28025 - DNA, 22 bp, synthetic construct
  misc_feature 1..22: note = chemically synthesized
  source 1..22: mol_type = other DNA
tgtttattttgttcttgcattg

SEQ ID NO: 28026 - DNA, 22 bp, synthetic construct
  misc_feature 1..22: note = chemically synthesized
  source 1..22: mol_type = other DNA
attttgttcttgcattgatatc

SEQ ID NO: 28027 - DNA, 22 bp, synthetic construct
  misc_feature 1..22: note = chemically synthesized
  source 1..22: mol_type = other DNA
ttttgttcttgcattgatatct

SEQ ID NO: 28028 - DNA, 22 bp, synthetic construct
  misc_feature 1..22: note = chemically synthesized
  source 1..22: mol_type = other DNA
tgttcttgcattgatatctctg

SEQ ID NO: 28029 - DNA, 22 bp, synthetic construct
  misc_feature 1..22: note = chemically synthesized
  source 1..22: mol_type = other DNA
gttcttgcattgatatctctgc

SEQ ID NO: 28030 - DNA, 22 bp, synthetic construct
  misc_feature 1..22: note = chemically synthesized
  source 1..22: mol_type = other DNA
ttcttgcattgatatctctgca

SEQ ID NO: 28031 - DNA, 22 bp, synthetic construct
  misc_feature 1..22: note = chemically synthesized
  source 1..22: mol_type = other DNA
ttgcattgatatctctgcatct

SEQ ID NO: 28032 - DNA, 22 bp, synthetic construct
  misc_feature 1..22: note = chemically synthesized
  source 1..22: mol_type = other DNA
gcattgatatctctgcatctgg

SEQ ID NO: 28033 - DNA, 22 bp, synthetic construct
  misc_feature 1..22: note = chemically synthesized
  source 1..22: mol_type = other DNA
cattgatatctctgcatctggt

SEQ ID NO: 28034 - DNA, 22 bp, synthetic construct
  misc_feature 1..22: note = chemically synthesized
  source 1..22: mol_type = other DNA
atatctctgcatctggtgtaat

SEQ ID NO: 28035 - DNA, 22 bp, synthetic construct
  misc_feature 1..22: note = chemically synthesized
  source 1..22: mol_type = other DNA
tgcatctggtgtaatgattgct

SEQ ID NO: 28036 - DNA, 22 bp, synthetic construct
  misc_feature 1..22: note = chemically synthesized
  source 1..22: mol_type = other DNA
catctggtgtaatgattgctgc

SEQ ID NO: 28037 - DNA, 22 bp, synthetic construct
  misc_feature 1..22: note = chemically synthesized
  source 1..22: mol_type = other DNA
gtgtaatgattgctgcttccag

SEQ ID NO: 28038 - DNA, 22 bp, synthetic construct
  misc_feature 1..22: note = chemically synthesized
  source 1..22: mol_type = other DNA
ctgcttccagttttgtaaattt

SEQ ID NO: 28039 - DNA, 22 bp, synthetic construct
  misc_feature 1..22: note = chemically synthesized
  source 1..22: mol_type = other DNA
cttccagttttgtaaatttgtt

SEQ ID NO: 28040 - DNA, 22 bp, synthetic construct
  misc_feature 1..22: note = chemically synthesized
  source 1..22: mol_type = other DNA
ccagttttgtaaatttgttttt

SEQ ID NO: 28041 - DNA, 22 bp, synthetic construct
  misc_feature 1..22: note = chemically synthesized
  source 1..22: mol_type = other DNA
cagttttgtaaatttgtttttg

SEQ ID NO: 28042 - DNA, 22 bp, synthetic construct
  misc_feature 1..22: note = chemically synthesized
  source 1..22: mol_type = other DNA
tgtaaatttgtttttgtagggg

SEQ ID NO: 28043 - DNA, 22 bp, synthetic construct
  misc_feature 1..22: note = chemically synthesized
  source 1..22: mol_type = other DNA
gtaaatttgtttttgtagggga

SEQ ID NO: 28044 - DNA, 22 bp, synthetic construct
  misc_feature 1..22: note = chemically synthesized
  source 1..22: mol_type = other DNA
taaatttgtttttgtaggggaa

SEQ ID NO: 28045 - DNA, 22 bp, synthetic construct
  misc_feature 1..22: note = chemically synthesized
  source 1..22: mol_type = other DNA
gtttttgtaggggaagactttt

SEQ ID NO: 28046 - DNA, 22 bp, synthetic construct
  misc_feature 1..22: note = chemically synthesized
  source 1..22: mol_type = other DNA
tttttgtaggggaagacttttt

SEQ ID NO: 28047 - DNA, 22 bp, synthetic construct
  misc_feature 1..22: note = chemically synthesized
  source 1..22: mol_type = other DNA
ttgtaggggaagacttttttct

SEQ ID NO: 28048 - DNA, 22 bp, synthetic construct
  misc_feature 1..22: note = chemically synthesized
  source 1..22: mol_type = other DNA
tgtaggggaagacttttttctg

SEQ ID NO: 28049 - DNA, 22 bp, synthetic construct
  misc_feature 1..22: note = chemically synthesized
  source 1..22: mol_type = other DNA
gtaggggaagacttttttctga

SEQ ID NO: 28050 - DNA, 22 bp, synthetic construct
  misc_feature 1..22: note = chemically synthesized
  source 1..22: mol_type = other DNA
taggggaagacttttttctgaa

SEQ ID NO: 28051 - DNA, 22 bp, synthetic construct
  misc_feature 1..22: note = chemically synthesized
  source 1..22: mol_type = other DNA
ttttctgaagatgtatcttggt

SEQ ID NO: 28052 - DNA, 22 bp, synthetic construct
  misc_feature 1..22: note = chemically synthesized
  source 1..22: mol_type = other DNA
tttctgaagatgtatcttggtg

SEQ ID NO: 28053 - DNA, 22 bp, synthetic construct
  misc_feature 1..22: note = chemically synthesized
  source 1..22: mol_type = other DNA
ttctgaagatgtatcttggtgt

SEQ ID NO: 28054 - DNA, 22 bp, synthetic construct
  misc_feature 1..22: note = chemically synthesized
  source 1..22: mol_type = other DNA
tctgaagatgtatcttggtgtt

SEQ ID NO: 28055 - DNA, 22 bp, synthetic construct
  misc_feature 1..22: note = chemically synthesized
  source 1..22: mol_type = other DNA
ctgaagatgtatcttggtgttg

SEQ ID NO: 28056 - DNA, 22 bp, synthetic construct
  misc_feature 1..22: note = chemically synthesized
  source 1..22: mol_type = other DNA
tgaagatgtatcttggtgttga

SEQ ID NO: 28057 - DNA, 22 bp, synthetic construct
  misc_feature 1..22: note = chemically synthesized
  source 1..22: mol_type = other DNA
aagatgtatcttggtgttgatt

SEQ ID NO: 28058 - DNA, 22 bp, synthetic construct
  misc_feature 1..22: note = chemically synthesized
  source 1..22: mol_type = other DNA
ggtgttgattgagtagggcact

SEQ ID NO: 28059 - DNA, 22 bp, synthetic construct
  misc_feature 1..22: note = chemically synthesized
  source 1..22: mol_type = other DNA
gtgttgattgagtagggcactt

SEQ ID NO: 28060 - DNA, 22 bp, synthetic construct
  misc_feature 1..22: note = chemically synthesized
  source 1..22: mol_type = other DNA
attgagtagggcactttgattt

SEQ ID NO: 28061 - DNA, 22 bp, synthetic construct
  misc_feature 1..22: note = chemically synthesized
  source 1..22: mol_type = other DNA
agtagggcactttgattttgat

SEQ ID NO: 28062 - DNA, 22 bp, synthetic construct
  misc_feature 1..22: note = chemically synthesized
  source 1..22: mol_type = other DNA
tgattttgatttctaggtgcat

SEQ ID NO: 28063 - DNA, 22 bp, synthetic construct
  misc_feature 1..22: note = chemically synthesized
  source 1..22: mol_type = other DNA
gattttgatttctaggtgcata

SEQ ID NO: 28064 - DNA, 22 bp, synthetic construct
  misc_feature 1..22: note = chemically synthesized
  source 1..22: mol_type = other DNA
attttgatttctaggtgcatac

SEQ ID NO: 28065 - DNA, 22 bp, synthetic construct
  misc_feature 1..22: note = chemically synthesized
  source 1..22: mol_type = other DNA
tgatttctaggtgcatacagca

SEQ ID NO: 28066 - DNA, 22 bp, synthetic construct
  misc_feature 1..22: note = chemically synthesized
  source 1..22: mol_type = other DNA
gatttctaggtgcatacagcag

SEQ ID NO: 28067 - DNA, 22 bp, synthetic construct
  misc_feature 1..22: note = chemically synthesized
  source 1..22: mol_type = other DNA
atttctaggtgcatacagcagc

SEQ ID NO: 28068 - DNA, 22 bp, synthetic construct
  misc_feature 1..22: note = chemically synthesized
  source 1..22: mol_type = other DNA
ctaggtgcatacagcagcatag

SEQ ID NO: 28069 - DNA, 22 bp, synthetic construct
  misc_feature 1..22: note = chemically synthesized
  source 1..22: mol_type = other DNA
taggtgcatacagcagcatagt

SEQ ID NO: 28070 - DNA, 22 bp, synthetic construct
  misc_feature 1..22: note = chemically synthesized
  source 1..22: mol_type = other DNA
ggtgcatacagcagcatagtct

SEQ ID NO: 28071 - DNA, 22 bp, synthetic construct
  misc_feature 1..22: note = chemically synthesized
  source 1..22: mol_type = other DNA
catattattttttttcagctgc

SEQ ID NO: 28072 - DNA, 22 bp, synthetic construct
  misc_feature 1..22: note = chemically synthesized
  source 1..22: mol_type = other DNA
atattattttttttcagctgcc

SEQ ID NO: 28073 - DNA, 22 bp, synthetic construct
  misc_feature 1..22: note = chemically synthesized
  source 1..22: mol_type = other DNA
ttttttttcagctgccaacagt

SEQ ID NO: 28074 - DNA, 22 bp, synthetic construct
  misc_feature 1..22: note = chemically synthesized
  source 1..22: mol_type = other DNA
tttttcagctgccaacagtatc

SEQ ID NO: 28075 - DNA, 22 bp, synthetic construct
  misc_feature 1..22: note = chemically synthesized
  source 1..22: mol_type = other DNA
ttttcagctgccaacagtatca

SEQ ID NO: 28076 - DNA, 22 bp, synthetic construct
  misc_feature 1..22: note = chemically synthesized
  source 1..22: mol_type = other DNA
tttcagctgccaacagtatcat

SEQ ID NO: 28077 - DNA, 22 bp, synthetic construct
  misc_feature 1..22: note = chemically synthesized
  source 1..22: mol_type = other DNA
ttcagctgccaacagtatcatc

SEQ ID NO: 28078 - DNA, 22 bp, synthetic construct
  misc_feature 1..22: note = chemically synthesized
  source 1..22: mol_type = other DNA
tcagctgccaacagtatcatca

SEQ ID NO: 28079 - DNA, 22 bp, synthetic construct
  misc_feature 1..22: note = chemically synthesized
  source 1..22: mol_type = other DNA
cagctgccaacagtatcatcag

SEQ ID NO: 28080 - DNA, 22 bp, synthetic construct
  misc_feature 1..22: note = chemically synthesized
  source 1..22: mol_type = other DNA
agctgccaacagtatcatcagt

SEQ ID NO: 28081 - DNA, 22 bp, synthetic construct
  misc_feature 1..22: note = chemically synthesized
  source 1..22: mol_type = other DNA
ccaacagtatcatcagtgtctg

SEQ ID NO: 28082 - DNA, 22 bp, synthetic construct
  misc_feature 1..22: note = chemically synthesized
  source 1..22: mol_type = other DNA
tgattttttcagtggcttaggg

SEQ ID NO: 28083 - DNA, 22 bp, synthetic construct
  misc_feature 1..22: note = chemically synthesized
  source 1..22: mol_type = other DNA
tttcagtggcttagggtgcatt

SEQ ID NO: 28084 - DNA, 22 bp, synthetic construct
  misc_feature 1..22: note = chemically synthesized
  source 1..22: mol_type = other DNA
ttcagtggcttagggtgcattt

SEQ ID NO: 28085 - DNA, 22 bp, synthetic construct
  misc_feature 1..22: note = chemically synthesized
  source 1..22: mol_type = other DNA
tcagtggcttagggtgcatttg

SEQ ID NO: 28086 - DNA, 22 bp, synthetic construct
  misc_feature 1..22: note = chemically synthesized
  source 1..22: mol_type = other DNA
cagtggcttagggtgcatttgt

SEQ ID NO: 28087 - DNA, 22 bp, synthetic construct
  misc_feature 1..22: note = chemically synthesized
  source 1..22: mol_type = other DNA
agtggcttagggtgcatttgtt

SEQ ID NO: 28088 - DNA, 22 bp, synthetic construct
  misc_feature 1..22: note = chemically synthesized
  source 1..22: mol_type = other DNA
agggtgcatttgttagtgaagg

SEQ ID NO: 28089 - DNA, 22 bp, synthetic construct
  misc_feature 1..22: note = chemically synthesized
  source 1..22: mol_type = other DNA
gggtgcatttgttagtgaaggt

SEQ ID NO: 28090 - DNA, 22 bp, synthetic construct
  misc_feature 1..22: note = chemically synthesized
  source 1..22: mol_type = other DNA
gttagtgaaggtggtgatgagg

SEQ ID NO: 28091 - DNA, 22 bp, synthetic construct
  misc_feature 1..22: note = chemically synthesized
  source 1..22: mol_type = other DNA
ttagtgaaggtggtgatgaggt

SEQ ID NO: 28092 - DNA, 22 bp, synthetic construct
  misc_feature 1..22: note = chemically synthesized
  source 1..22: mol_type = other DNA
gtgaaggtggtgatgaggttgt

SEQ ID NO: 28093 - DNA, 22 bp, synthetic construct
  misc_feature 1..22: note = chemically synthesized
  source 1..22: mol_type = other DNA
tgctggagacaagaatatcaag

SEQ ID NO: 28094 - DNA, 22 bp, synthetic construct
  misc_feature 1..22: note = chemically synthesized
  source 1..22: mol_type = other DNA
gagacaagaatatcaagtgggc

SEQ ID NO: 28095 - DNA, 22 bp, synthetic construct
  misc_feature 1..22: note = chemically synthesized
  source 1..22: mol_type = other DNA
ggccccagtggtggtggtgggc

SEQ ID NO: 28096 - DNA, 22 bp, synthetic construct
  misc_feature 1..22: note = chemically synthesized
  source 1..22: mol_type = other DNA
gccccagtggtggtggtgggcc

SEQ ID NO: 28097 - DNA, 22 bp, synthetic construct
  misc_feature 1..22: note = chemically synthesized
  source 1..22: mol_type = other DNA
gcattcctgtccttgggcccca

SEQ ID NO: 28098 - DNA, 22 bp, synthetic construct
  misc_feature 1..22: note = chemically synthesized
  source 1..22: mol_type = other DNA
ctgtccttgggccccatggctg

SEQ ID NO: 28099 - DNA, 22 bp, synthetic construct
  misc_feature 1..22: note = chemically synthesized
  source 1..22: mol_type = other DNA
tccttgggccccatggctgtgt

SEQ ID NO: 28100 - DNA, 22 bp, synthetic construct
  misc_feature 1..22: note = chemically synthesized
  source 1..22: mol_type = other DNA
gggccccatggctgtgtacatt

SEQ ID NO: 28101 - DNA, 22 bp, synthetic construct
  misc_feature 1..22: note = chemically synthesized
  source 1..22: mol_type = other DNA
ggccccatggctgtgtacattg

SEQ ID NO: 28102 - DNA, 22 bp, synthetic construct
  misc_feature 1..22: note = chemically synthesized
  source 1..22: mol_type = other DNA
tgtacattggcactgatggtaa

SEQ ID NO: 28103 - DNA, 22 bp, synthetic construct
  misc_feature 1..22: note = chemically synthesized
  source 1..22: mol_type = other DNA
gcactgatggtaatgagtctag

SEQ ID NO: 28104 - DNA, 22 bp, synthetic construct
  misc_feature 1..22: note = chemically synthesized
  source 1..22: mol_type = other DNA
atggtaatgagtctagttgggt

SEQ ID NO: 28105 - DNA, 22 bp, synthetic construct
  misc_feature 1..22: note = chemically synthesized
  source 1..22: mol_type = other DNA
gttgggttgattctttggcctt

SEQ ID NO: 28106 - DNA, 22 bp, synthetic construct
  misc_feature 1..22: note = chemically synthesized
  source 1..22: mol_type = other DNA
ggttgattctttggccttcagg

SEQ ID NO: 28107 - DNA, 22 bp, synthetic construct
  misc_feature 1..22: note = chemically synthesized
  source 1..22: mol_type = other DNA
attctttggccttcaggcagtt

SEQ ID NO: 28108 - DNA, 22 bp, synthetic construct
  misc_feature 1..22: note = chemically synthesized
  source 1..22: mol_type = other DNA
tttggccttcaggcagtttgct

SEQ ID NO: 28109 - DNA, 22 bp, synthetic construct
  misc_feature 1..22: note = chemically synthesized
  source 1..22: mol_type = other DNA
tggccttcaggcagtttgcttg

SEQ ID NO: 28110 - DNA, 22 bp, synthetic construct
  misc_feature 1..22: note = chemically synthesized
  source 1..22: mol_type = other DNA
ggccttcaggcagtttgcttgg

SEQ ID NO: 28111 - DNA, 22 bp, synthetic construct
  misc_feature 1..22: note = chemically synthesized
  source 1..22: mol_type = other DNA
gccttcaggcagtttgcttggg

SEQ ID NO: 28112 - DNA, 22 bp, synthetic construct
  misc_feature 1..22: note = chemically synthesized
  source 1..22: mol_type = other DNA
caggcagtttgcttgggtgtca

SEQ ID NO: 28113 - DNA, 22 bp, synthetic construct
  misc_feature 1..22: note = chemically synthesized
  source 1..22: mol_type = other DNA
aggcagtttgcttgggtgtcag

SEQ ID NO: 28114 - DNA, 22 bp, synthetic construct
  misc_feature 1..22: note = chemically synthesized
  source 1..22: mol_type = other DNA
gcttgggtgtcagtagtggcca

SEQ ID NO: 28115 - DNA, 22 bp, synthetic construct
  misc_feature 1..22: note = chemically synthesized
  source 1..22: mol_type = other DNA
cttgggtgtcagtagtggccat

SEQ ID NO: 28116 - DNA, 22 bp, synthetic construct
  misc_feature 1..22: note = chemically synthesized
  source 1..22: mol_type = other DNA
gggtgtcagtagtggccatagt

SEQ ID NO: 28117 - DNA, 22 bp, synthetic construct
  misc_feature 1..22: note = chemically synthesized
  source 1..22: mol_type = other DNA
ggtgtcagtagtggccatagta

SEQ ID NO: 28118 - DNA, 22 bp, synthetic construct
  misc_feature 1..22: note = chemically synthesized
  source 1..22: mol_type = other DNA
ggctggtgtgtgggtcctcagg

SEQ ID NO: 28119 - DNA, 22 bp, synthetic construct
  misc_feature 1..22: note = chemically synthesized
  source 1..22: mol_type = other DNA
gtgtgtgggtcctcaggcttct

SEQ ID NO: 28120 - DNA, 22 bp, synthetic construct
  misc_feature 1..22: note = chemically synthesized
  source 1..22: mol_type = other DNA
aggcttctggacagtgggtgtg

SEQ ID NO: 28121 - DNA, 22 bp, synthetic construct
  misc_feature 1..22: note = chemically synthesized
  source 1..22: mol_type = other DNA
ctggacagtgggtgtggtgtgg

SEQ ID NO: 28122 - DNA, 22 bp, synthetic construct
  misc_feature 1..22: note = chemically synthesized
  source 1..22: mol_type = other DNA
tggacagtgggtgtggtgtggg

SEQ ID NO: 28123 - DNA, 22 bp, synthetic construct
  misc_feature 1..22: note = chemically synthesized
  source 1..22: mol_type = other DNA
gacagtgggtgtggtgtgggtg

SEQ ID NO: 28124 - DNA, 22 bp, synthetic construct
  misc_feature 1..22: note = chemically synthesized
  source 1..22: mol_type = other DNA
tagcaactgcaggacaaccctc

SEQ ID NO: 28125 - DNA, 22 bp, synthetic construct
  misc_feature 1..22: note = chemically synthesized
  source 1..22: mol_type = other DNA
caggacaaccctctggctccca

SEQ ID NO: 28126 - DNA, 22 bp, synthetic construct
  misc_feature 1..22: note = chemically synthesized
  source 1..22: mol_type = other DNA
tggctcccaagcagtctgcact

SEQ ID NO: 28127 - DNA, 22 bp, synthetic construct
  misc_feature 1..22: note = chemically synthesized
  source 1..22: mol_type = other DNA
gctcccaagcagtctgcactgg

SEQ ID NO: 28128 - DNA, 22 bp, synthetic construct
  misc_feature 1..22: note = chemically synthesized
  source 1..22: mol_type = other DNA
ccaagcagtctgcactggtgtt

SEQ ID NO: 28129 - DNA, 22 bp, synthetic construct
  misc_feature 1..22: note = chemically synthesized
  source 1..22: mol_type = other DNA
cactggtgttggtggtggctgc

SEQ ID NO: 28130 - DNA, 22 bp, synthetic construct
  misc_feature 1..22: note = chemically synthesized
  source 1..22: mol_type = other DNA
gtgttggtggtggctgcaaggg

SEQ ID NO: 28131 - DNA, 22 bp, synthetic construct
  misc_feature 1..22: note = chemically synthesized
  source 1..22: mol_type = other DNA
gtggtggctgcaagggctgaat

SEQ ID NO: 28132 - DNA, 22 bp, synthetic construct
  misc_feature 1..22: note = chemically synthesized
  source 1..22: mol_type = other DNA
caagggctgaatgagccagtct

SEQ ID NO: 28133 - DNA, 22 bp, synthetic construct
  misc_feature 1..22: note = chemically synthesized
  source 1..22: mol_type = other DNA
aatgagccagtcttcagaccca

SEQ ID NO: 28134 - DNA, 22 bp, synthetic construct
  misc_feature 1..22: note = chemically synthesized
  source 1..22: mol_type = other DNA
cagacccacaggtggcacatgc

SEQ ID NO: 28135 - DNA, 22 bp, synthetic construct
  misc_feature 1..22: note = chemically synthesized
  source 1..22: mol_type = other DNA
agacccacaggtggcacatgca

SEQ ID NO: 28136 - DNA, 22 bp, synthetic construct
  misc_feature 1..22: note = chemically synthesized
  source 1..22: mol_type = other DNA
tgatggcagtggcagattgggt

SEQ ID NO: 28137 - DNA, 22 bp, synthetic construct
  misc_feature 1..22: note = chemically synthesized
  source 1..22: mol_type = other DNA
ggtaggcccatcatcaggcttc

SEQ ID NO: 28138 - DNA, 22 bp, synthetic construct
  misc_feature 1..22: note = chemically synthesized
  source 1..22: mol_type = other DNA
ctgggagggttgcttaggtacc

SEQ ID NO: 28139 - DNA, 22 bp, synthetic construct
  misc_feature 1..22: note = chemically synthesized
  source 1..22: mol_type = other DNA
tgggagggttgcttaggtacca

SEQ ID NO: 28140 - DNA, 22 bp, synthetic construct
  misc_feature 1..22: note = chemically synthesized
  source 1..22: mol_type = other DNA
ggagggttgcttaggtaccagt

SEQ ID NO: 28141 - DNA, 22 bp, synthetic construct
  misc_feature 1..22: note = chemically synthesized
  source 1..22: mol_type = other DNA
cttaggtaccagtcatggtgga

SEQ ID NO: 28142 - DNA, 22 bp, synthetic construct
  misc_feature 1..22: note = chemically synthesized
  source 1..22: mol_type = other DNA
aggtaccagtcatggtggatgg

SEQ ID NO: 28143 - DNA, 22 bp, synthetic construct
  misc_feature 1..22: note = chemically synthesized
  source 1..22: mol_type = other DNA
ggtaccagtcatggtggatggc

SEQ ID NO: 28144 - DNA, 22 bp, synthetic construct
  misc_feature 1..22: note = chemically synthesized
  source 1..22: mol_type = other DNA
tctctgggttcccagacaactt

SEQ ID NO: 28145 - DNA, 22 bp, synthetic construct
  misc_feature 1..22: note = chemically synthesized
  source 1..22: mol_type = other DNA
tgggttcccagacaacttgctt

SEQ ID NO: 28146 - DNA, 22 bp, synthetic construct
  misc_feature 1..22: note = chemically synthesized
  source 1..22: mol_type = other DNA
ggttcccagacaacttgcttag

SEQ ID NO: 28147 - DNA, 22 bp, synthetic construct
  misc_feature 1..22: note = chemically synthesized
  source 1..22: mol_type = other DNA
ccagacaacttgcttaggcatt

SEQ ID NO: 28148 - DNA, 22 bp, synthetic construct
  misc_feature 1..22: note = chemically synthesized
  source 1..22: mol_type = other DNA
gcttaggcattgaggaaggcaa

SEQ ID NO: 28149 - DNA, 22 bp, synthetic construct
  misc_feature 1..22: note = chemically synthesized
  source 1..22: mol_type = other DNA
cttaggcattgaggaaggcaaa

SEQ ID NO: 28150 - DNA, 22 bp, synthetic construct
  misc_feature 1..22: note = chemically synthesized
  source 1..22: mol_type = other DNA
aggcattgaggaaggcaaagcc

SEQ ID NO: 28151 - DNA, 22 bp, synthetic construct
  misc_feature 1..22: note = chemically synthesized
  source 1..22: mol_type = other DNA
ggcattgaggaaggcaaagcca

SEQ ID NO: 28152 - DNA, 22 bp, synthetic construct
  misc_feature 1..22: note = chemically synthesized
  source 1..22: mol_type = other DNA
aggaaggcaaagccaggctggg

SEQ ID NO: 28153 - DNA, 22 bp, synthetic construct
  misc_feature 1..22: note = chemically synthesized
  source 1..22: mol_type = other DNA
ggtgttcctgacctcaggccac

SEQ ID NO: 28154 - DNA, 22 bp, synthetic construct
  misc_feature 1..22: note = chemically synthesized
  source 1..22: mol_type = other DNA
ctgacctcaggccactcagtgg

SEQ ID NO: 28155 - DNA, 22 bp, synthetic construct
  misc_feature 1..22: note = chemically synthesized
  source 1..22: mol_type = other DNA
acctcaggccactcagtggtgt

SEQ ID NO: 28156 - DNA, 22 bp, synthetic construct
  misc_feature 1..22: note = chemically synthesized
  source 1..22: mol_type = other DNA
aggccactcagtggtgtgtgtg

SEQ ID NO: 28157 - DNA, 22 bp, synthetic construct
  misc_feature 1..22: note = chemically synthesized
  source 1..22: mol_type = other DNA
agtggtgtgtgtggacaccggc

SEQ ID NO: 28158 - DNA, 22 bp, synthetic construct
  misc_feature 1..22: note = chemically synthesized
  source 1..22: mol_type = other DNA
tcataggctggagtggagtgat

SEQ ID NO: 28159 - DNA, 22 bp, synthetic construct
  misc_feature 1..22: note = chemically synthesized
  source 1..22: mol_type = other DNA
gagtggagtgatcctcaggccc

SEQ ID NO: 28160 - DNA, 22 bp, synthetic construct
  misc_feature 1..22: note = chemically synthesized
  source 1..22: mol_type = other DNA
aggcccccagcagaatgcctga

SEQ ID NO: 28161 - DNA, 22 bp, synthetic construct
  misc_feature 1..22: note = chemically synthesized
  source 1..22: mol_type = other DNA
agtgaattagcagctactgcat

SEQ ID NO: 28162 - DNA, 22 bp, synthetic construct
  misc_feature 1..22: note = chemically synthesized
  source 1..22: mol_type = other DNA
gcagctactgcattgttgccct

SEQ ID NO: 28163 - DNA, 22 bp, synthetic construct
  misc_feature 1..22: note = chemically synthesized
  source 1..22: mol_type = other DNA
ctgcattgttgccctgctcttg

SEQ ID NO: 28164 - DNA, 22 bp, synthetic construct
  misc_feature 1..22: note = chemically synthesized
  source 1..22: mol_type = other DNA
cattgttgccctgctcttgaag

SEQ ID NO: 28165 - DNA, 22 bp, synthetic construct
  misc_feature 1..22: note = chemically synthesized
  source 1..22: mol_type = other DNA
ttgccctgctcttgaaggggtg

SEQ ID NO: 28166 - DNA, 22 bp, synthetic construct
  misc_feature 1..22: note = chemically synthesized
  source 1..22: mol_type = other DNA
ccctgctcttgaaggggtgcgg

SEQ ID NO: 28167 - DNA, 22 bp, synthetic construct
  misc_feature 1..22: note = chemically synthesized
  source 1..22: mol_type = other DNA
ctcttgaaggggtgcggggtgt

SEQ ID NO: 28168 - DNA, 22 bp, synthetic construct
  misc_feature 1..22: note = chemically synthesized
  source 1..22: mol_type = other DNA
ttgaaggggtgcggggtgtgtt

SEQ ID NO: 28169 - DNA, 22 bp, synthetic construct
  misc_feature 1..22: note = chemically synthesized
  source 1..22: mol_type = other DNA
gaaggggtgcggggtgtgttgc

SEQ ID NO: 28170 - DNA, 22 bp, synthetic construct
  misc_feature 1..22: note = chemically synthesized
  source 1..22: mol_type = other DNA
aaggggtgcggggtgtgttgct

SEQ ID NO: 28171 - DNA, 22 bp, synthetic construct
  misc_feature 1..22: note = chemically synthesized
  source 1..22: mol_type = other DNA
ctttcagtggcagcagctataa

SEQ ID NO: 28172 - DNA, 22 bp, synthetic construct
  misc_feature 1..22: note = chemically synthesized
  source 1..22: mol_type = other DNA
tcagtggcagcagctataaatg

SEQ ID NO: 28173 - DNA, 22 bp, synthetic construct
  misc_feature 1..22: note = chemically synthesized
  source 1..22: mol_type = other DNA
cagtggcagcagctataaatgg

SEQ ID NO: 28174 - DNA, 22 bp, synthetic construct
  misc_feature 1..22: note = chemically synthesized
  source 1..22: mol_type = other DNA
agtggcagcagctataaatggg

SEQ ID NO: 28175 - DNA, 22 bp, synthetic construct
  misc_feature 1..22: note = chemically synthesized
  source 1..22: mol_type = other DNA
taaatgggttgctggtgggcat

SEQ ID NO: 28176 - DNA, 22 bp, synthetic construct
  misc_feature 1..22: note = chemically synthesized
  source 1..22: mol_type = other DNA
ctggtgggcatgtgtttcagcc

SEQ ID NO: 28177 - DNA, 22 bp, synthetic construct
  misc_feature 1..22: note = chemically synthesized
  source 1..22: mol_type = other DNA
gtgggcatgtgtttcagcccca

SEQ ID NO: 28178 - DNA, 22 bp, synthetic construct
  misc_feature 1..22: note = chemically synthesized
  source 1..22: mol_type = other DNA
cagccccagatggtggctgcaa

SEQ ID NO: 28179 - DNA, 22 bp, synthetic construct
  misc_feature 1..22: note = chemically synthesized
  source 1..22: mol_type = other DNA
agccccagatggtggctgcaag

SEQ ID NO: 28180 - DNA, 22 bp, synthetic construct
  misc_feature 1..22: note = chemically synthesized
  source 1..22: mol_type = other DNA
caagtggggtagcattttctta

SEQ ID NO: 28181 - DNA, 22 bp, synthetic construct
  misc_feature 1..22: note = chemically synthesized
  source 1..22: mol_type = other DNA
tcttagggagcttataaatgtg

SEQ ID NO: 28182 - DNA, 22 bp, synthetic construct
  misc_feature 1..22: note = chemically synthesized
  source 1..22: mol_type = other DNA
cttagggagcttataaatgtgt

SEQ ID NO: 28183 - DNA, 22 bp, synthetic construct
  misc_feature 1..22: note = chemically synthesized
  source 1..22: mol_type = other DNA
ttagggagcttataaatgtgta

SEQ ID NO: 28184 - DNA, 22 bp, synthetic construct
  misc_feature 1..22: note = chemically synthesized
  source 1..22: mol_type = other DNA
agggagcttataaatgtgtagc

SEQ ID NO: 28185 - DNA, 22 bp, synthetic construct
  misc_feature 1..22: note = chemically synthesized
  source 1..22: mol_type = other DNA
gggagcttataaatgtgtagca

SEQ ID NO: 28186 - DNA, 22 bp, synthetic construct
  misc_feature 1..22: note = chemically synthesized
  source 1..22: mol_type = other DNA
ataaatgtgtagcagccctgct

SEQ ID NO: 28187 - DNA, 22 bp, synthetic construct
  misc_feature 1..22: note = chemically synthesized
  source 1..22: mol_type = other DNA
taaatgtgtagcagccctgcta

SEQ ID NO: 28188 - DNA, 22 bp, synthetic construct
  misc_feature 1..22: note = chemically synthesized
  source 1..22: mol_type = other DNA
ctactgggggtgggggagtcca

SEQ ID NO: 28189 - DNA, 22 bp, synthetic construct
  misc_feature 1..22: note = chemically synthesized
  source 1..22: mol_type = other DNA
ctgggggtgggggagtccactt

SEQ ID NO: 28190 - DNA, 22 bp, synthetic construct
  misc_feature 1..22: note = chemically synthesized
  source 1..22: mol_type = other DNA
ggggtgggggagtccacttcta

SEQ ID NO: 28191 - DNA, 22 bp, synthetic construct
  misc_feature 1..22: note = chemically synthesized
  source 1..22: mol_type = other DNA
ctaatgacacactttatccctg

SEQ ID NO: 28192 - DNA, 22 bp, synthetic construct
  misc_feature 1..22: note = chemically synthesized
  source 1..22: mol_type = other DNA
taatgacacactttatccctgg

SEQ ID NO: 28193 - DNA, 22 bp, synthetic construct
  misc_feature 1..22: note = chemically synthesized
  source 1..22: mol_type = other DNA
atgacacactttatccctggtg

SEQ ID NO: 28194 - DNA, 22 bp, synthetic construct
  misc_feature 1..22: note = chemically synthesized
  source 1..22: mol_type = other DNA
tatccctggtgacagcagccag

SEQ ID NO: 28195 - DNA, 22 bp, synthetic construct
  misc_feature 1..22: note = chemically synthesized
  source 1..22: mol_type = other DNA
atccctggtgacagcagccagc

SEQ ID NO: 28196 - DNA, 22 bp, synthetic construct
  misc_feature 1..22: note = chemically synthesized
  source 1..22: mol_type = other DNA
tccctggtgacagcagccagca

SEQ ID NO: 28197 - DNA, 22 bp, synthetic construct
  misc_feature 1..22: note = chemically synthesized
  source 1..22: mol_type = other DNA
gtgacagcagccagcagtagca

SEQ ID NO: 28198 - DNA, 22 bp, synthetic construct
  misc_feature 1..22: note = chemically synthesized
  source 1..22: mol_type = other DNA
agctgtgggtgggggatgtcag

SEQ ID NO: 28199 - DNA, 22 bp, synthetic construct
  misc_feature 1..22: note = chemically synthesized
  source 1..22: mol_type = other DNA
tgggtgggggatgtcagcagag

SEQ ID NO: 28200 - DNA, 22 bp, synthetic construct
  misc_feature 1..22: note = chemically synthesized
  source 1..22: mol_type = other DNA
cagggatgtagagatgcagatg

SEQ ID NO: 28201 - DNA, 22 bp, synthetic construct
  misc_feature 1..22: note = chemically synthesized
  source 1..22: mol_type = other DNA
agggatgtagagatgcagatga

SEQ ID NO: 28202 - DNA, 22 bp, synthetic construct
  misc_feature 1..22: note = chemically synthesized
  source 1..22: mol_type = other DNA
gggtctgaggaacgatgtcatc

SEQ ID NO: 28203 - DNA, 22 bp, synthetic construct
  misc_feature 1..22: note = chemically synthesized
  source 1..22: mol_type = other DNA
aggaacgatgtcatctggtggg

SEQ ID NO: 28204 - DNA, 22 bp, synthetic construct
  misc_feature 1..22: note = chemically synthesized
  source 1..22: mol_type = other DNA
gtgggtgttgggctctcaaaat

SEQ ID NO: 28205 - DNA, 22 bp, synthetic construct
  misc_feature 1..22: note = chemically synthesized
  source 1..22: mol_type = other DNA
ggctctcaaaatggcaccttgc

SEQ ID NO: 28206 - DNA, 22 bp, synthetic construct
  misc_feature 1..22: note = chemically synthesized
  source 1..22: mol_type = other DNA
tcaaaatggcaccttgctgctc

SEQ ID NO: 28207 - DNA, 22 bp, synthetic construct
  misc_feature 1..22: note = chemically synthesized
  source 1..22: mol_type = other DNA
aaaatggcaccttgctgctcag

SEQ ID NO: 28208 - DNA, 22 bp, synthetic construct
  misc_feature 1..22: note = chemically synthesized
  source 1..22: mol_type = other DNA
gctgctcagtaatggggatggc

SEQ ID NO: 28209 - DNA, 22 bp, synthetic construct
  misc_feature 1..22: note = chemically synthesized
  source 1..22: mol_type = other DNA
ctgctcagtaatggggatggca

SEQ ID NO: 28210 - DNA, 22 bp, synthetic construct
  misc_feature 1..22: note = chemically synthesized
  source 1..22: mol_type = other DNA
ctcagtaatggggatggcaggg

SEQ ID NO: 28211 - DNA, 22 bp, synthetic construct
  misc_feature 1..22: note = chemically synthesized
  source 1..22: mol_type = other DNA
agtaatggggatggcaggggtg

SEQ ID NO: 28212 - DNA, 22 bp, synthetic construct
  misc_feature 1..22: note = chemically synthesized
  source 1..22: mol_type = other DNA
cttctctggagcaatgcctttg

SEQ ID NO: 28213 - DNA, 22 bp, synthetic construct
  misc_feature 1..22: note = chemically synthesized
  source 1..22: mol_type = other DNA
ctctggagcaatgcctttgtgc

SEQ ID NO: 28214 - DNA, 22 bp, synthetic construct
  misc_feature 1..22: note = chemically synthesized
  source 1..22: mol_type = other DNA
tctggagcaatgcctttgtgcg

SEQ ID NO: 28215 - DNA, 22 bp, synthetic construct
  misc_feature 1..22: note = chemically synthesized
  source 1..22: mol_type = other DNA
tggagcaatgcctttgtgcgat

SEQ ID NO: 28216 - DNA, 22 bp, synthetic construct
  misc_feature 1..22: note = chemically synthesized
  source 1..22: mol_type = other DNA
gagcaatgcctttgtgcgattg

SEQ ID NO: 28217 - DNA, 22 bp, synthetic construct
  misc_feature 1..22: note = chemically synthesized
  source 1..22: mol_type = other DNA
tgtgcgattgctgggcagttcc

SEQ ID NO: 28218 - DNA, 22 bp, synthetic construct
  misc_feature 1..22: note = chemically synthesized
  source 1..22: mol_type = other DNA
gtgcgattgctgggcagttcct

SEQ ID NO: 28219 - DNA, 22 bp, synthetic construct
  misc_feature 1..22: note = chemically synthesized
  source 1..22: mol_type = other DNA
tgcgattgctgggcagttcctt

SEQ ID NO: 28220 - DNA, 22 bp, synthetic construct
  misc_feature 1..22: note = chemically synthesized
  source 1..22: mol_type = other DNA
ctgggcagttccttatgatagt

SEQ ID NO: 28221 - DNA, 22 bp, synthetic construct
  misc_feature 1..22: note = chemically synthesized
  source 1..22: mol_type = other DNA
ggcagttccttatgatagtctc

SEQ ID NO: 28222 - DNA, 22 bp, synthetic construct
  misc_feature 1..22: note = chemically synthesized
  source 1..22: mol_type = other DNA
cttatgatagtctcaaggcctg

SEQ ID NO: 28223 - DNA, 22 bp, synthetic construct
  misc_feature 1..22: note = chemically synthesized
  source 1..22: mol_type = other DNA
atgatagtctcaaggcctgcat

SEQ ID NO: 28224 - DNA, 22 bp, synthetic construct
  misc_feature 1..22: note = chemically synthesized
  source 1..22: mol_type = other DNA
tgatagtctcaaggcctgcatg

SEQ ID NO: 28225 - DNA, 22 bp, synthetic construct
  misc_feature 1..22: note = chemically synthesized
  source 1..22: mol_type = other DNA
aaggcctgcatggtcaagggac

SEQ ID NO: 28226 - DNA, 22 bp, synthetic construct
  misc_feature 1..22: note = chemically synthesized
  source 1..22: mol_type = other DNA
catggtcaagggactctcctgt

SEQ ID NO: 28227 - DNA, 22 bp, synthetic construct
  misc_feature 1..22: note = chemically synthesized
  source 1..22: mol_type = other DNA
tcctgtggctaggattcctgga

SEQ ID NO: 28228 - DNA, 22 bp, synthetic construct
  misc_feature 1..22: note = chemically synthesized
  source 1..22: mol_type = other DNA
ctgtggctaggattcctggagt

SEQ ID NO: 28229 - DNA, 22 bp, synthetic construct
  misc_feature 1..22: note = chemically synthesized
  source 1..22: mol_type = other DNA
tggctaggattcctggagtcca

SEQ ID NO: 28230 - DNA, 22 bp, synthetic construct
  misc_feature 1..22: note = chemically synthesized
  source 1..22: mol_type = other DNA
ggattcctggagtccataatgc

SEQ ID NO: 28231 - DNA, 22 bp, synthetic construct
  misc_feature 1..22: note = chemically synthesized
  source 1..22: mol_type = other DNA
ctggagtccataatgcagatgt

SEQ ID NO: 28232 - DNA, 22 bp, synthetic construct
  misc_feature 1..22: note = chemically synthesized
  source 1..22: mol_type = other DNA
gagtccataatgcagatgtgga

SEQ ID NO: 28233 - DNA, 22 bp, synthetic construct
  misc_feature 1..22: note = chemically synthesized
  source 1..22: mol_type = other DNA
ggagtcagtcacttaactttcg

SEQ ID NO: 28234 - DNA, 22 bp, synthetic construct
  misc_feature 1..22: note = chemically synthesized
  source 1..22: mol_type = other DNA
aactttcgatgcactggggagc

SEQ ID NO: 28235 - DNA, 22 bp, synthetic construct
  misc_feature 1..22: note = chemically synthesized
  source 1..22: mol_type = other DNA
actttcgatgcactggggagcc

SEQ ID NO: 28236 - DNA, 22 bp, synthetic construct
  misc_feature 1..22: note = chemically synthesized
  source 1..22: mol_type = other DNA
tcgatgcactggggagcctctc

SEQ ID NO: 28237 - DNA, 22 bp, synthetic construct
  misc_feature 1..22: note = chemically synthesized
  source 1..22: mol_type = other DNA
cgatgcactggggagcctctct

SEQ ID NO: 28238 - DNA, 22 bp, synthetic construct
  misc_feature 1..22: note = chemically synthesized
  source 1..22: mol_type = other DNA
gatgcactggggagcctctctg

SEQ ID NO: 28239 - DNA, 22 bp, synthetic construct
  misc_feature 1..22: note = chemically synthesized
  source 1..22: mol_type = other DNA
gggagcctctctggcctcacag

SEQ ID NO: 28240 - DNA, 22 bp, synthetic construct
  misc_feature 1..22: note = chemically synthesized
  source 1..22: mol_type = other DNA
tctggcctcacagaggatccct

SEQ ID NO: 28241 - DNA, 22 bp, synthetic construct
  misc_feature 1..22: note = chemically synthesized
  source 1..22: mol_type = other DNA
tggcctcacagaggatccctac

SEQ ID NO: 28242 - DNA, 22 bp, synthetic construct
  misc_feature 1..22: note = chemically synthesized
  source 1..22: mol_type = other DNA
gcctcacagaggatccctactg

SEQ ID NO: 28243 - DNA, 22 bp, synthetic construct
  misc_feature 1..22: note = chemically synthesized
  source 1..22: mol_type = other DNA
acagaggatccctactgggtag

SEQ ID NO: 28244 - DNA, 22 bp, synthetic construct
  misc_feature 1..22: note = chemically synthesized
  source 1..22: mol_type = other DNA
ctgggtaggcttccttgcttcc

SEQ ID NO: 28245 - DNA, 22 bp, synthetic construct
  misc_feature 1..22: note = chemically synthesized
  source 1..22: mol_type = other DNA
ggtaggcttccttgcttccctc

SEQ ID NO: 28246 - DNA, 22 bp, synthetic construct
  misc_feature 1..22: note = chemically synthesized
  source 1..22: mol_type = other DNA
ccttgcttccctccccttcatt

SEQ ID NO: 28247 - DNA, 22 bp, synthetic construct
  misc_feature 1..22: note = chemically synthesized
  source 1..22: mol_type = other DNA
cttgcttccctccccttcattg

SEQ ID NO: 28248 - DNA, 22 bp, synthetic construct
  misc_feature 1..22: note = chemically synthesized
  source 1..22: mol_type = other DNA
gcttccctccccttcattgcct

SEQ ID NO: 28249 - DNA, 22 bp, synthetic construct
  misc_feature 1..22: note = chemically synthesized
  source 1..22: mol_type = other DNA
cttccctccccttcattgcctt

SEQ ID NO: 28250 - DNA, 22 bp, synthetic construct
  misc_feature 1..22: note = chemically synthesized
  source 1..22: mol_type = other DNA
ccctccccttcattgccttaga

SEQ ID NO: 28251 - DNA, 22 bp, synthetic construct
  misc_feature 1..22: note = chemically synthesized
  source 1..22: mol_type = other DNA
cctccccttcattgccttagat

SEQ ID NO: 28252 - DNA, 22 bp, synthetic construct
  misc_feature 1..22: note = chemically synthesized
  source 1..22: mol_type = other DNA
cccttcattgccttagatgctt

SEQ ID NO: 28253 - DNA, 22 bp, synthetic construct
  misc_feature 1..22: note = chemically synthesized
  source 1..22: mol_type = other DNA
cattgccttagatgcttcctgt

SEQ ID NO: 28254 - DNA, 22 bp, synthetic construct
  misc_feature 1..22: note = chemically synthesized
  source 1..22: mol_type = other DNA
attgccttagatgcttcctgtc

SEQ ID NO: 28255 - DNA, 22 bp, synthetic construct
  misc_feature 1..22: note = chemically synthesized
  source 1..22: mol_type = other DNA
ccttagatgcttcctgtcactt

SEQ ID NO: 28256 - DNA, 22 bp, synthetic construct
  misc_feature 1..22: note = chemically synthesized
  source 1..22: mol_type = other DNA
agatgcttcctgtcacttctct

SEQ ID NO: 28257 - DNA, 22 bp, synthetic construct
  misc_feature 1..22: note = chemically synthesized
  source 1..22: mol_type = other DNA
gatgcttcctgtcacttctctg

SEQ ID NO: 28258 - DNA, 22 bp, synthetic construct
  misc_feature 1..22: note = chemically synthesized
  source 1..22: mol_type = other DNA
cctgtcacttctctgttgaatt

SEQ ID NO: 28259 - DNA, 22 bp, synthetic construct
  misc_feature 1..22: note = chemically synthesized
  source 1..22: mol_type = other DNA
ctgtcacttctctgttgaattc

SEQ ID NO: 28260 - DNA, 22 bp, synthetic construct
  misc_feature 1..22: note = chemically synthesized
  source 1..22: mol_type = other DNA
tcacttctctgttgaattccag

SEQ ID NO: 28261 - DNA, 22 bp, synthetic construct
  misc_feature 1..22: note = chemically synthesized
  source 1..22: mol_type = other DNA
ctctgttgaattccagaattct

SEQ ID NO: 28262 - DNA, 22 bp, synthetic construct
  misc_feature 1..22: note = chemically synthesized
  source 1..22: mol_type = other DNA
tctgttgaattccagaattctc

SEQ ID NO: 28263 - DNA, 22 bp, synthetic construct
  misc_feature 1..22: note = chemically synthesized
  source 1..22: mol_type = other DNA
tgttgaattccagaattctctc

SEQ ID NO: 28264 - DNA, 22 bp, synthetic construct
  misc_feature 1..22: note = chemically synthesized
  source 1..22: mol_type = other DNA
ttgaattccagaattctctctt

SEQ ID NO: 28265 - DNA, 22 bp, synthetic construct
  misc_feature 1..22: note = chemically synthesized
  source 1..22: mol_type = other DNA
aattccagaattctctcttatg

SEQ ID NO: 28266 - DNA, 22 bp, synthetic construct
  misc_feature 1..22: note = chemically synthesized
  source 1..22: mol_type = other DNA
cagaattctctcttatgtggga

SEQ ID NO: 28267 - DNA, 22 bp, synthetic construct
  misc_feature 1..22: note = chemically synthesized
  source 1..22: mol_type = other DNA
tctcttatgtgggattttctac

SEQ ID NO: 28268 - DNA, 22 bp, synthetic construct
  misc_feature 1..22: note = chemically synthesized
  source 1..22: mol_type = other DNA
tcttatgtgggattttctactt

SEQ ID NO: 28269 - DNA, 22 bp, synthetic construct
  misc_feature 1..22: note = chemically synthesized
  source 1..22: mol_type = other DNA
ttatgtgggattttctacttac

SEQ ID NO: 28270 - DNA, 22 bp, synthetic construct
  misc_feature 1..22: note = chemically synthesized
  source 1..22: mol_type = other DNA
atgtgggattttctacttacta

SEQ ID NO: 28271 - DNA, 22 bp, synthetic construct
  misc_feature 1..22: note = chemically synthesized
  source 1..22: mol_type = other DNA
tgtgggattttctacttactat

SEQ ID NO: 28272 - DNA, 22 bp, synthetic construct
  misc_feature 1..22: note = chemically synthesized
  source 1..22: mol_type = other DNA
tctacttactattttggttctt

SEQ ID NO: 28273 - DNA, 22 bp, synthetic construct
  misc_feature 1..22: note = chemically synthesized
  source 1..22: mol_type = other DNA
ctacttactattttggttcttt

SEQ ID NO: 28274 - DNA, 22 bp, synthetic construct
  misc_feature 1..22: note = chemically synthesized
  source 1..22: mol_type = other DNA
tacttactattttggttctttg

SEQ ID NO: 28275 - DNA, 22 bp, synthetic construct
  misc_feature 1..22: note = chemically synthesized
  source 1..22: mol_type = other DNA
cttactattttggttctttgtg

SEQ ID NO: 28276 - DNA, 22 bp, synthetic construct
  misc_feature 1..22: note = chemically synthesized
  source 1..22: mol_type = other DNA
actattttggttctttgtggag

SEQ ID NO: 28277 - DNA, 22 bp, synthetic construct
  misc_feature 1..22: note = chemically synthesized
  source 1..22: mol_type = other DNA
ctattttggttctttgtggagg

SEQ ID NO: 28278 - DNA, 22 bp, synthetic construct
  misc_feature 1..22: note = chemically synthesized
  source 1..22: mol_type = other DNA
ttttggttctttgtggaggagg

SEQ ID NO: 28279 - DNA, 22 bp, synthetic construct
  misc_feature 1..22: note = chemically synthesized
  source 1..22: mol_type = other DNA
tggttctttgtggaggaggtga

SEQ ID NO: 28280 - DNA, 22 bp, synthetic construct
  misc_feature 1..22: note = chemically synthesized
  source 1..22: mol_type = other DNA
ggttctttgtggaggaggtgag

SEQ ID NO: 28281 - DNA, 22 bp, synthetic construct
  misc_feature 1..22: note = chemically synthesized
  source 1..22: mol_type = other DNA
gttctttgtggaggaggtgagt

SEQ ID NO: 28282 - DNA, 22 bp, synthetic construct
  misc_feature 1..22: note = chemically synthesized
  source 1..22: mol_type = other DNA
tttgtggaggaggtgagtgtca

SEQ ID NO: 28283 - DNA, 22 bp, synthetic construct
  misc_feature 1..22: note = chemically synthesized
  source 1..22: mol_type = other DNA
tgtggaggaggtgagtgtcagc

SEQ ID NO: 28284 - DNA, 22 bp, synthetic construct
  misc_feature 1..22: note = chemically synthesized
  source 1..22: mol_type = other DNA
gtggaggaggtgagtgtcagct

SEQ ID NO: 28285 - DNA, 22 bp, synthetic construct
  misc_feature 1..22: note = chemically synthesized
  source 1..22: mol_type = other DNA
tggaggaggtgagtgtcagctg

SEQ ID NO: 28286 - DNA, 22 bp, synthetic construct
  misc_feature 1..22: note = chemically synthesized
  source 1..22: mol_type = other DNA
cccttagtcagtaatcttcaag

SEQ ID NO: 28287 - DNA, 22 bp, synthetic construct
  misc_feature 1..22: note = chemically synthesized
  source 1..22: mol_type = other DNA
agtcagtaatcttcaagcccct

SEQ ID NO: 28288 - DNA, 22 bp, synthetic construct
  misc_feature 1..22: note = chemically synthesized
  source 1..22: mol_type = other DNA
gtcagtaatcttcaagcccctt

SEQ ID NO: 28289 - DNA, 22 bp, synthetic construct
  misc_feature 1..22: note = chemically synthesized
  source 1..22: mol_type = other DNA
caagccccttcccttgaaattt

SEQ ID NO: 28290 - DNA, 22 bp, synthetic construct
  misc_feature 1..22: note = chemically synthesized
  source 1..22: mol_type = other DNA
aagccccttcccttgaaatttt

SEQ ID NO: 28291 - DNA, 22 bp, synthetic construct
  misc_feature 1..22: note = chemically synthesized
  source 1..22: mol_type = other DNA
cccttgaaattttttaagcttt

SEQ ID NO: 28292 - DNA, 22 bp, synthetic construct
  misc_feature 1..22: note = chemically synthesized
  source 1..22: mol_type = other DNA
ccttgaaattttttaagcttta

SEQ ID NO: 28293 - DNA, 22 bp, synthetic construct
  misc_feature 1..22: note = chemically synthesized
  source 1..22: mol_type = other DNA
gaaattttttaagctttatgtt

SEQ ID NO: 28294 - DNA, 22 bp, synthetic construct
  misc_feature 1..22: note = chemically synthesized
  source 1..22: mol_type = other DNA
aaattttttaagctttatgttt

SEQ ID NO: 28295 - DNA, 22 bp, synthetic construct
  misc_feature 1..22: note = chemically synthesized
  source 1..22: mol_type = other DNA
tttaagctttatgtttttattt

SEQ ID NO: 28296 - DNA, 22 bp, synthetic construct
  misc_feature 1..22: note = chemically synthesized
  source 1..22: mol_type = other DNA
ttaagctttatgtttttatttc

SEQ ID NO: 28297 - DNA, 22 bp, synthetic construct
  misc_feature 1..22: note = chemically synthesized
  source 1..22: mol_type = other DNA
taagctttatgtttttatttct

SEQ ID NO: 28298 - DNA, 22 bp, synthetic construct
  misc_feature 1..22: note = chemically synthesized
  source 1..22: mol_type = other DNA
aagctttatgtttttatttcta

SEQ ID NO: 28299 - DNA, 22 bp, synthetic construct
  misc_feature 1..22: note = chemically synthesized
  source 1..22: mol_type = other DNA
agctttatgtttttatttctaa

SEQ ID NO: 28300 - DNA, 22 bp, synthetic construct
  misc_feature 1..22: note = chemically synthesized
  source 1..22: mol_type = other DNA
tatgtttttatttctaatagac

SEQ ID NO: 28301 - DNA, 22 bp, synthetic construct
  misc_feature 1..22: note = chemically synthesized
  source 1..22: mol_type = other DNA
atgtttttatttctaatagact

SEQ ID NO: 28302 - DNA, 22 bp, synthetic construct
  misc_feature 1..22: note = chemically synthesized
  source 1..22: mol_type = other DNA
tgtttttatttctaatagactg

SEQ ID NO: 28303 - DNA, 22 bp, synthetic construct
  misc_feature 1..22: note = chemically synthesized
  source 1..22: mol_type = other DNA
ttatttctaatagactgaaaga

SEQ ID NO: 28304 - DNA, 22 bp, synthetic construct
  misc_feature 1..22: note = chemically synthesized
  source 1..22: mol_type = other DNA
tatttctaatagactgaaagag

SEQ ID NO: 28305 - DNA, 22 bp, synthetic construct
  misc_feature 1..22: note = chemically synthesized
  source 1..22: mol_type = other DNA
atttctaatagactgaaagagc

SEQ ID NO: 28306 - DNA, 22 bp, synthetic construct
  misc_feature 1..22: note = chemically synthesized
  source 1..22: mol_type = other DNA
tttctaatagactgaaagagca

SEQ ID NO: 28307 - DNA, 22 bp, synthetic construct
  misc_feature 1..22: note = chemically synthesized
  source 1..22: mol_type = other DNA
ctaatagactgaaagagcataa

SEQ ID NO: 28308 - DNA, 22 bp, synthetic construct
  misc_feature 1..22: note = chemically synthesized
  source 1..22: mol_type = other DNA
taatagactgaaagagcataat

SEQ ID NO: 28309 - DNA, 22 bp, synthetic construct
  misc_feature 1..22: note = chemically synthesized
  source 1..22: mol_type = other DNA
atagactgaaagagcataatca

SEQ ID NO: 28310 - DNA, 22 bp, synthetic construct
  misc_feature 1..22: note = chemically synthesized
  source 1..22: mol_type = other DNA
aaagagcataatcatattttaa

SEQ ID NO: 28311 - DNA, 22 bp, synthetic construct
  misc_feature 1..22: note = chemically synthesized
  source 1..22: mol_type = other DNA
taaacactctaaggctatatgg

SEQ ID NO: 28312 - DNA, 22 bp, synthetic construct
  misc_feature 1..22: note = chemically synthesized
  source 1..22: mol_type = other DNA
aaacactctaaggctatatggg

SEQ ID NO: 28313 - DNA, 22 bp, synthetic construct
  misc_feature 1..22: note = chemically synthesized
  source 1..22: mol_type = other DNA
aacactctaaggctatatgggg

SEQ ID NO: 28314 - DNA, 22 bp, synthetic construct
  misc_feature 1..22: note = chemically synthesized
  source 1..22: mol_type = other DNA
taaggctatatgggggactatc

SEQ ID NO: 28315 - DNA, 22 bp, synthetic construct
  misc_feature 1..22: note = chemically synthesized
  source 1..22: mol_type = other DNA
aggctatatgggggactatctg

SEQ ID NO: 28316 - DNA, 22 bp, synthetic construct
  misc_feature 1..22: note = chemically synthesized
  source 1..22: mol_type = other DNA
tatgggggactatctgaaggcc

SEQ ID NO: 28317 - DNA, 22 bp, synthetic construct
  misc_feature 1..22: note = chemically synthesized
  source 1..22: mol_type = other DNA
tctgaaggcctcagatgagtaa

SEQ ID NO: 28318 - DNA, 22 bp, synthetic construct
  misc_feature 1..22: note = chemically synthesized
  source 1..22: mol_type = other DNA
aaggcctcagatgagtaaaaga

SEQ ID NO: 28319 - DNA, 22 bp, synthetic construct
  misc_feature 1..22: note = chemically synthesized
  source 1..22: mol_type = other DNA
agatgagtaaaagaagtagcga

SEQ ID NO: 28320 - DNA, 22 bp, synthetic construct
  misc_feature 1..22: note = chemically synthesized
  source 1..22: mol_type = other DNA
gttaactatgtttttcttttca

SEQ ID NO: 28321 - DNA, 22 bp, synthetic construct
  misc_feature 1..22: note = chemically synthesized
  source 1..22: mol_type = other DNA
actatgtttttcttttcatttc

SEQ ID NO: 28322 - DNA, 22 bp, synthetic construct
  misc_feature 1..22: note = chemically synthesized
  source 1..22: mol_type = other DNA
tgtttttcttttcatttcattt

SEQ ID NO: 28323 - DNA, 22 bp, synthetic construct
  misc_feature 1..22: note = chemically synthesized
  source 1..22: mol_type = other DNA
ttcttttcatttcatttcccaa

SEQ ID NO: 28324 - DNA, 22 bp, synthetic construct
  misc_feature 1..22: note = chemically synthesized
  source 1..22: mol_type = other DNA
tcttttcatttcatttcccaaa

SEQ ID NO: 28325 - DNA, 22 bp, synthetic construct
  misc_feature 1..22: note = chemically synthesized
  source 1..22: mol_type = other DNA
cttttcatttcatttcccaaat

SEQ ID NO: 28326 - DNA, 22 bp, synthetic construct
  misc_feature 1..22: note = chemically synthesized
  source 1..22: mol_type = other DNA
ttttcatttcatttcccaaatc

SEQ ID NO: 28327 - DNA, 22 bp, synthetic construct
  misc_feature 1..22: note = chemically synthesized
  source 1..22: mol_type = other DNA
ttcatttcatttcccaaatcaa

SEQ ID NO: 28328 - DNA, 22 bp, synthetic construct
  misc_feature 1..22: note = chemically synthesized
  source 1..22: mol_type = other DNA
tcatttcatttcccaaatcaaa

SEQ ID NO: 28329 - DNA, 22 bp, synthetic construct
  misc_feature 1..22: note = chemically synthesized
  source 1..22: mol_type = other DNA
catttcatttcccaaatcaaat

SEQ ID NO: 28330 - DNA, 22 bp, synthetic construct
  misc_feature 1..22: note = chemically synthesized
  source 1..22: mol_type = other DNA
atttcatttcccaaatcaaatc

SEQ ID NO: 28331 - DNA, 22 bp, synthetic construct
  misc_feature 1..22: note = chemically synthesized
  source 1..22: mol_type = other DNA
catttcccaaatcaaatcattt

SEQ ID NO: 28332 - DNA, 22 bp, synthetic construct
  misc_feature 1..22: note = chemically synthesized
  source 1..22: mol_type = other DNA
atttcccaaatcaaatcatttg

SEQ ID NO: 28333 - DNA, 22 bp, synthetic construct
  misc_feature 1..22: note = chemically synthesized
  source 1..22: mol_type = other DNA
cccaaatcaaatcatttgtttc

SEQ ID NO: 28334 - DNA, 22 bp, synthetic construct
  misc_feature 1..22: note = chemically synthesized
  source 1..22: mol_type = other DNA
ccaaatcaaatcatttgtttct

SEQ ID NO: 28335 - DNA, 22 bp, synthetic construct
  misc_feature 1..22: note = chemically synthesized
  source 1..22: mol_type = other DNA
gtttcttcaaataaagaatctc

SEQ ID NO: 28336 - DNA, 22 bp, synthetic construct
  misc_feature 1..22: note = chemically synthesized
  source 1..22: mol_type = other DNA
tttcttcaaataaagaatctct

SEQ ID NO: 28337 - DNA, 22 bp, synthetic construct
  misc_feature 1..22: note = chemically synthesized
  source 1..22: mol_type = other DNA
cttcaaataaagaatctctatt

SEQ ID NO: 28338 - DNA, 22 bp, synthetic construct
  misc_feature 1..22: note = chemically synthesized
  source 1..22: mol_type = other DNA
ttcaaataaagaatctctattt

SEQ ID NO: 28339 - DNA, 22 bp, synthetic construct
  misc_feature 1..22: note = chemically synthesized
  source 1..22: mol_type = other DNA
caaataaagaatctctatttcc

SEQ ID NO: 28340 - DNA, 22 bp, synthetic construct
  misc_feature 1..22: note = chemically synthesized
  source 1..22: mol_type = other DNA
aaataaagaatctctatttccc

SEQ ID NO: 28341 - DNA, 22 bp, synthetic construct
  misc_feature 1..22: note = chemically synthesized
  source 1..22: mol_type = other DNA
tatttcccccttatgttcttca

SEQ ID NO: 28342 - DNA, 22 bp, synthetic construct
  misc_feature 1..22: note = chemically synthesized
  source 1..22: mol_type = other DNA
tttcccccttatgttcttcagc

SEQ ID NO: 28343 - DNA, 22 bp, synthetic construct
  misc_feature 1..22: note = chemically synthesized
  source 1..22: mol_type = other DNA
cccccttatgttcttcagcaaa

SEQ ID NO: 28344 - DNA, 22 bp, synthetic construct
  misc_feature 1..22: note = chemically synthesized
  source 1..22: mol_type = other DNA
ccccttatgttcttcagcaaat

SEQ ID NO: 28345 - DNA, 22 bp, synthetic construct
  misc_feature 1..22: note = chemically synthesized
  source 1..22: mol_type = other DNA
atgttcttcagcaaataaaaat

SEQ ID NO: 28346 - DNA, 22 bp, synthetic construct
  misc_feature 1..22: note = chemically synthesized
  source 1..22: mol_type = other DNA
tgttcttcagcaaataaaaatg

SEQ ID NO: 28347 - DNA, 22 bp, synthetic construct
  misc_feature 1..22: note = chemically synthesized
  source 1..22: mol_type = other DNA
ttcagcaaataaaaatgtttgc

SEQ ID NO: 28348 - DNA, 22 bp, synthetic construct
  misc_feature 1..22: note = chemically synthesized
  source 1..22: mol_type = other DNA
cagcaaataaaaatgtttgcat

SEQ ID NO: 28349 - DNA, 22 bp, synthetic construct
  misc_feature 1..22: note = chemically synthesized
  source 1..22: mol_type = other DNA
agcaaataaaaatgtttgcatc

SEQ ID NO: 28350 - DNA, 22 bp, synthetic construct
  misc_feature 1..22: note = chemically synthesized
  source 1..22: mol_type = other DNA
gcatctaccaaagtgtatatga

SEQ ID NO: 28351 - DNA, 22 bp, synthetic construct
  misc_feature 1..22: note = chemically synthesized
  source 1..22: mol_type = other DNA
catctaccaaagtgtatatgaa

SEQ ID NO: 28352 - DNA, 22 bp, synthetic construct
  misc_feature 1..22: note = chemically synthesized
  source 1..22: mol_type = other DNA
ccaaagtgtatatgaatttgaa

SEQ ID NO: 28353 - DNA, 22 bp, synthetic construct
  misc_feature 1..22: note = chemically synthesized
  source 1..22: mol_type = other DNA
gaaatacgtaatctaacaaaca

SEQ ID NO: 28354 - DNA, 22 bp, synthetic construct
  misc_feature 1..22: note = chemically synthesized
  source 1..22: mol_type = other DNA
aaatacgtaatctaacaaacaa

SEQ ID NO: 28355 - DNA, 22 bp, synthetic construct
  misc_feature 1..22: note = chemically synthesized
  source 1..22: mol_type = other DNA
acaaacaaggatgttttaagat

SEQ ID NO: 28356 - DNA, 22 bp, synthetic construct
  misc_feature 1..22: note = chemically synthesized
  source 1..22: mol_type = other DNA
taagatctctgagtaagatgca

SEQ ID NO: 28357 - DNA, 22 bp, synthetic construct
  misc_feature 1..22: note = chemically synthesized
  source 1..22: mol_type = other DNA
aagatctctgagtaagatgcat

SEQ ID NO: 28358 - DNA, 22 bp, synthetic construct
  misc_feature 1..22: note = chemically synthesized
  source 1..22: mol_type = other DNA
agatctctgagtaagatgcata

SEQ ID NO: 28359 - DNA, 22 bp, synthetic construct
  misc_feature 1..22: note = chemically synthesized
  source 1..22: mol_type = other DNA
tgagtaagatgcatagttgcaa

SEQ ID NO: 28360 - DNA, 22 bp, synthetic construct
  misc_feature 1..22: note = chemically synthesized
  source 1..22: mol_type = other DNA
agtaagatgcatagttgcaaat

SEQ ID NO: 28361 - DNA, 22 bp, synthetic construct
  misc_feature 1..22: note = chemically synthesized
  source 1..22: mol_type = other DNA
caaataaaaggagttttcaagg

SEQ ID NO: 28362 - DNA, 22 bp, synthetic construct
  misc_feature 1..22: note = chemically synthesized
  source 1..22: mol_type = other DNA
tcaaggataaaaaatgtaaata

SEQ ID NO: 28363 - DNA, 22 bp, synthetic construct
  misc_feature 1..22: note = chemically synthesized
  source 1..22: mol_type = other DNA
caaggataaaaaatgtaaataa

SEQ ID NO: 28364 - DNA, 22 bp, synthetic construct
  misc_feature 1..22: note = chemically synthesized
  source 1..22: mol_type = other DNA
aaggataaaaaatgtaaataaa

SEQ ID NO: 28365 - DNA, 22 bp, synthetic construct
  misc_feature 1..22: note = chemically synthesized
  source 1..22: mol_type = other DNA
ataaatgtgtaccatcagaaac

SEQ ID NO: 28366 - DNA, 22 bp, synthetic construct
  misc_feature 1..22: note = chemically synthesized
  source 1..22: mol_type = other DNA
atggtatattctcctggaaaag

SEQ ID NO: 28367 - DNA, 22 bp, synthetic construct
  misc_feature 1..22: note = chemically synthesized
  source 1..22: mol_type = other DNA
tggtatattctcctggaaaaga

SEQ ID NO: 28368 - DNA, 22 bp, synthetic construct
  misc_feature 1..22: note = chemically synthesized
  source 1..22: mol_type = other DNA
tcctggaaaagatgaagatgaa

SEQ ID NO: 28369 - DNA, 22 bp, synthetic construct
  misc_feature 1..22: note = chemically synthesized
  source 1..22: mol_type = other DNA
ctggaaaagatgaagatgaaga

SEQ ID NO: 28370 - DNA, 22 bp, synthetic construct
  misc_feature 1..22: note = chemically synthesized
  source 1..22: mol_type = other DNA
gaaaagatgaagatgaagaaaa

SEQ ID NO: 28371 - DNA, 22 bp, synthetic construct
  misc_feature 1..22: note = chemically synthesized
  source 1..22: mol_type = other DNA
cagaagaggagaaattctttgg

SEQ ID NO: 28372 - DNA, 22 bp, synthetic construct
  misc_feature 1..22: note = chemically synthesized
  source 1..22: mol_type = other DNA
tttggaaattttgcatttttgt

SEQ ID NO: 28373 - DNA, 22 bp, synthetic construct
  misc_feature 1..22: note = chemically synthesized
  source 1..22: mol_type = other DNA
tggaaattttgcatttttgtgg

SEQ ID NO: 28374 - DNA, 22 bp, synthetic construct
  misc_feature 1..22: note = chemically synthesized
  source 1..22: mol_type = other DNA
ggaaattttgcatttttgtgga

SEQ ID NO: 28375 - DNA, 22 bp, synthetic construct
  misc_feature 1..22: note = chemically synthesized
  source 1..22: mol_type = other DNA
gaaattttgcatttttgtggat

SEQ ID NO: 28376 - DNA, 22 bp, synthetic construct
  misc_feature 1..22: note = chemically synthesized
  source 1..22: mol_type = other DNA
tgcatttttgtggatagtggtt

SEQ ID NO: 28377 - DNA, 22 bp, synthetic construct
  misc_feature 1..22: note = chemically synthesized
  source 1..22: mol_type = other DNA
gcatttttgtggatagtggttt

SEQ ID NO: 28378 - DNA, 22 bp, synthetic construct
  misc_feature 1..22: note = chemically synthesized
  source 1..22: mol_type = other DNA
catttttgtggatagtggtttt

SEQ ID NO: 28379 - DNA, 22 bp, synthetic construct
  misc_feature 1..22: note = chemically synthesized
  source 1..22: mol_type = other DNA
ttgtggatagtggttttgaaga

SEQ ID NO: 28380 - DNA, 22 bp, synthetic construct
  misc_feature 1..22: note = chemically synthesized
  source 1..22: mol_type = other DNA
tgtggatagtggttttgaagaa

SEQ ID NO: 28381 - DNA, 22 bp, synthetic construct
  misc_feature 1..22: note = chemically synthesized
  source 1..22: mol_type = other DNA
gtggatagtggttttgaagaaa

SEQ ID NO: 28382 - DNA, 22 bp, synthetic construct
  misc_feature 1..22: note = chemically synthesized
  source 1..22: mol_type = other DNA
tggatagtggttttgaagaaag

SEQ ID NO: 28383 - DNA, 22 bp, synthetic construct
  misc_feature 1..22: note = chemically synthesized
  source 1..22: mol_type = other DNA
tgaagaaagcttagatatattt

SEQ ID NO: 28384 - DNA, 22 bp, synthetic construct
  misc_feature 1..22: note = chemically synthesized
  source 1..22: mol_type = other DNA
gaagaaagcttagatatattta

SEQ ID NO: 28385 - DNA, 22 bp, synthetic construct
  misc_feature 1..22: note = chemically synthesized
  source 1..22: mol_type = other DNA
aagaaagcttagatatatttaa

SEQ ID NO: 28386 - DNA, 22 bp, synthetic construct
  misc_feature 1..22: note = chemically synthesized
  source 1..22: mol_type = other DNA
agatatatttaaatatgttgct

SEQ ID NO: 28387 - DNA, 22 bp, synthetic construct
  misc_feature 1..22: note = chemically synthesized
  source 1..22: mol_type = other DNA
gatatatttaaatatgttgcta

SEQ ID NO: 28388 - DNA, 22 bp, synthetic construct
  misc_feature 1..22: note = chemically synthesized
  source 1..22: mol_type = other DNA
aaatatgttgctaagatgtgac

SEQ ID NO: 28389 - DNA, 22 bp, synthetic construct
  misc_feature 1..22: note = chemically synthesized
  source 1..22: mol_type = other DNA
aatatgttgctaagatgtgact

SEQ ID NO: 28390 - DNA, 22 bp, synthetic construct
  misc_feature 1..22: note = chemically synthesized
  source 1..22: mol_type = other DNA
ctaagatgtgactcccacactt

SEQ ID NO: 28391 - DNA, 22 bp, synthetic construct
  misc_feature 1..22: note = chemically synthesized
  source 1..22: mol_type = other DNA
agatgtgactcccacactttaa

SEQ ID NO: 28392 - DNA, 22 bp, synthetic construct
  misc_feature 1..22: note = chemically synthesized
  source 1..22: mol_type = other DNA
ccacactttaaagaaaagttct

SEQ ID NO: 28393 - DNA, 22 bp, synthetic construct
  misc_feature 1..22: note = chemically synthesized
  source 1..22: mol_type = other DNA
taaagaaaagttcttcatttta

SEQ ID NO: 28394 - DNA, 22 bp, synthetic construct
  misc_feature 1..22: note = chemically synthesized
  source 1..22: mol_type = other DNA
aaagaaaagttcttcattttag

SEQ ID NO: 28395 - DNA, 22 bp, synthetic construct
  misc_feature 1..22: note = chemically synthesized
  source 1..22: mol_type = other DNA
aagaaaagttcttcattttagt

SEQ ID NO: 28396 - DNA, 22 bp, synthetic construct
  misc_feature 1..22: note = chemically synthesized
  source 1..22: mol_type = other DNA
ttcattttagttgcccttgcaa

SEQ ID NO: 28397 - DNA, 22 bp, synthetic construct
  misc_feature 1..22: note = chemically synthesized
  source 1..22: mol_type = other DNA
cattttagttgcccttgcaaat

SEQ ID NO: 28398 - DNA, 22 bp, synthetic construct
  misc_feature 1..22: note = chemically synthesized
  source 1..22: mol_type = other DNA
attttagttgcccttgcaaatt

SEQ ID NO: 28399 - DNA, 22 bp, synthetic construct
  misc_feature 1..22: note = chemically synthesized
  source 1..22: mol_type = other DNA
tagttgcccttgcaaattggct

SEQ ID NO: 28400 - DNA, 22 bp, synthetic construct
  misc_feature 1..22: note = chemically synthesized
  source 1..22: mol_type = other DNA
agttgcccttgcaaattggcta

SEQ ID NO: 28401 - DNA, 22 bp, synthetic construct
  misc_feature 1..22: note = chemically synthesized
  source 1..22: mol_type = other DNA
gttgcccttgcaaattggctaa

SEQ ID NO: 28402 - DNA, 22 bp, synthetic construct
  misc_feature 1..22: note = chemically synthesized
  source 1..22: mol_type = other DNA
cccttgcaaattggctaagttt

SEQ ID NO: 28403 - DNA, 22 bp, synthetic construct
  misc_feature 1..22: note = chemically synthesized
  source 1..22: mol_type = other DNA
gcaaattggctaagtttatttt

SEQ ID NO: 28404 - DNA, 22 bp, synthetic construct
  misc_feature 1..22: note = chemically synthesized
  source 1..22: mol_type = other DNA
caaattggctaagtttattttt

SEQ ID NO: 28405 - DNA, 22 bp, synthetic construct
  misc_feature 1..22: note = chemically synthesized
  source 1..22: mol_type = other DNA
gctaagtttatttttcctcaac

SEQ ID NO: 28406 - DNA, 22 bp, synthetic construct
  misc_feature 1..22: note = chemically synthesized
  source 1..22: mol_type = other DNA
agtttatttttcctcaacaaat

SEQ ID NO: 28407 - DNA, 22 bp, synthetic construct
  misc_feature 1..22: note = chemically synthesized
  source 1..22: mol_type = other DNA
atttttcctcaacaaataattt

SEQ ID NO: 28408 - DNA, 22 bp, synthetic construct
  misc_feature 1..22: note = chemically synthesized
  source 1..22: mol_type = other DNA
tttttcctcaacaaataatttt

SEQ ID NO: 28409 - DNA, 22 bp, synthetic construct
  misc_feature 1..22: note = chemically synthesized
  source 1..22: mol_type = other DNA
ttcctcaacaaataattttgat

SEQ ID NO: 28410 - DNA, 22 bp, synthetic construct
  misc_feature 1..22: note = chemically synthesized
  source 1..22: mol_type = other DNA
tcctcaacaaataattttgatg

SEQ ID NO: 28411 - DNA, 22 bp, synthetic construct
  misc_feature 1..22: note = chemically synthesized
  source 1..22: mol_type = other DNA
cctcaacaaataattttgatgg

SEQ ID NO: 28412 - DNA, 22 bp, synthetic construct
  misc_feature 1..22: note = chemically synthesized
  source 1..22: mol_type = other DNA
ctcaacaaataattttgatggt

SEQ ID NO: 28413 - DNA, 22 bp, synthetic construct
  misc_feature 1..22: note = chemically synthesized
  source 1..22: mol_type = other DNA
aacaaataattttgatggtttc

SEQ ID NO: 28414 - DNA, 22 bp, synthetic construct
  misc_feature 1..22: note = chemically synthesized
  source 1..22: mol_type = other DNA
tgatggtttctaaaattgtcca

SEQ ID NO: 28415 - DNA, 22 bp, synthetic construct
  misc_feature 1..22: note = chemically synthesized
  source 1..22: mol_type = other DNA
gatggtttctaaaattgtccag

SEQ ID NO: 28416 - DNA, 22 bp, synthetic construct
  misc_feature 1..22: note = chemically synthesized
  source 1..22: mol_type = other DNA
atggtttctaaaattgtccaga

SEQ ID NO: 28417 - DNA, 22 bp, synthetic construct
  misc_feature 1..22: note = chemically synthesized
  source 1..22: mol_type = other DNA
ctaaaattgtccagaatttgag

SEQ ID NO: 28418 - DNA, 22 bp, synthetic construct
  misc_feature 1..22: note = chemically synthesized
  source 1..22: mol_type = other DNA
taaaattgtccagaatttgagg

SEQ ID NO: 28419 - DNA, 22 bp, synthetic construct
  misc_feature 1..22: note = chemically synthesized
  source 1..22: mol_type = other DNA
aaattgtccagaatttgaggaa

SEQ ID NO: 28420 - DNA, 22 bp, synthetic construct
  misc_feature 1..22: note = chemically synthesized
  source 1..22: mol_type = other DNA
tccagaatttgaggaaatactt

SEQ ID NO: 28421 - DNA, 22 bp, synthetic construct
  misc_feature 1..22: note = chemically synthesized
  source 1..22: mol_type = other DNA
gaggaaatacttagatgtagta

SEQ ID NO: 28422 - DNA, 22 bp, synthetic construct
  misc_feature 1..22: note = chemically synthesized
  source 1..22: mol_type = other DNA
aggaaatacttagatgtagtag

SEQ ID NO: 28423 - DNA, 22 bp, synthetic construct
  misc_feature 1..22: note = chemically synthesized
  source 1..22: mol_type = other DNA
agatgtagtagatgacatcaat

SEQ ID NO: 28424 - DNA, 22 bp, synthetic construct
  misc_feature 1..22: note = chemically synthesized
  source 1..22: mol_type = other DNA
gatgtagtagatgacatcaatt

SEQ ID NO: 28425 - DNA, 22 bp, synthetic construct
  misc_feature 1..22: note = chemically synthesized
  source 1..22: mol_type = other DNA
atgttaacttagatttattgtt

SEQ ID NO: 28426 - DNA, 22 bp, synthetic construct
  misc_feature 1..22: note = chemically synthesized
  source 1..22: mol_type = other DNA
tgttaacttagatttattgttg

SEQ ID NO: 28427 - DNA, 22 bp, synthetic construct
  misc_feature 1..22: note = chemically synthesized
  source 1..22: mol_type = other DNA
acttagatttattgttggatgg

SEQ ID NO: 28428 - DNA, 22 bp, synthetic construct
  misc_feature 1..22: note = chemically synthesized
  source 1..22: mol_type = other DNA
agatttattgttggatggttaa

SEQ ID NO: 28429 - DNA, 22 bp, synthetic construct
  misc_feature 1..22: note = chemically synthesized
  source 1..22: mol_type = other DNA
gatttattgttggatggttaag

SEQ ID NO: 28430 - DNA, 22 bp, synthetic construct
  misc_feature 1..22: note = chemically synthesized
  source 1..22: mol_type = other DNA
attgttggatggttaagttaat

SEQ ID NO: 28431 - DNA, 22 bp, synthetic construct
  misc_feature 1..22: note = chemically synthesized
  source 1..22: mol_type = other DNA
ttgttggatggttaagttaatc

SEQ ID NO: 28432 - DNA, 22 bp, synthetic construct
  misc_feature 1..22: note = chemically synthesized
  source 1..22: mol_type = other DNA
ttggatggttaagttaatcatg

SEQ ID NO: 28433 - DNA, 22 bp, synthetic construct
  misc_feature 1..22: note = chemically synthesized
  source 1..22: mol_type = other DNA
gatggttaagttaatcatgtct

SEQ ID NO: 28434 - DNA, 22 bp, synthetic construct
  misc_feature 1..22: note = chemically synthesized
  source 1..22: mol_type = other DNA
agttaatcatgtctgttcttgt

SEQ ID NO: 28435 - DNA, 22 bp, synthetic construct
  misc_feature 1..22: note = chemically synthesized
  source 1..22: mol_type = other DNA
atcatgtctgttcttgtccagt

SEQ ID NO: 28436 - DNA, 22 bp, synthetic construct
  misc_feature 1..22: note = chemically synthesized
  source 1..22: mol_type = other DNA
ttcttgtccagtctagaagttt

SEQ ID NO: 28437 - DNA, 22 bp, synthetic construct
  misc_feature 1..22: note = chemically synthesized
  source 1..22: mol_type = other DNA
ttgtccagtctagaagtttctg

SEQ ID NO: 28438 - DNA, 22 bp, synthetic construct
  misc_feature 1..22: note = chemically synthesized
  source 1..22: mol_type = other DNA
gtccagtctagaagtttctgct

SEQ ID NO: 28439 - DNA, 22 bp, synthetic construct
  misc_feature 1..22: note = chemically synthesized
  source 1..22: mol_type = other DNA
tccagtctagaagtttctgctt

SEQ ID NO: 28440 - DNA, 22 bp, synthetic construct
  misc_feature 1..22: note = chemically synthesized
  source 1..22: mol_type = other DNA
gaagtttctgcttcctcctcat

SEQ ID NO: 28441 - DNA, 22 bp, synthetic construct
  misc_feature 1..22: note = chemically synthesized
  source 1..22: mol_type = other DNA
ctgcttcctcctcatgtgttct

SEQ ID NO: 28442 - DNA, 22 bp, synthetic construct
  misc_feature 1..22: note = chemically synthesized
  source 1..22: mol_type = other DNA
tgcttcctcctcatgtgttcta

SEQ ID NO: 28443 - DNA, 22 bp, synthetic construct
  misc_feature 1..22: note = chemically synthesized
  source 1..22: mol_type = other DNA
cttcctcctcatgtgttctatt

SEQ ID NO: 28444 - DNA, 22 bp, synthetic construct
  misc_feature 1..22: note = chemically synthesized
  source 1..22: mol_type = other DNA
cctcctcatgtgttctattctg

SEQ ID NO: 28445 - DNA, 22 bp, synthetic construct
  misc_feature 1..22: note = chemically synthesized
  source 1..22: mol_type = other DNA
ctcctcatgtgttctattctgt

SEQ ID NO: 28446 - DNA, 22 bp, synthetic construct
  misc_feature 1..22: note = chemically synthesized
  source 1..22: mol_type = other DNA
ctcatgtgttctattctgtcct

SEQ ID NO: 28447 - DNA, 22 bp, synthetic construct
  misc_feature 1..22: note = chemically synthesized
  source 1..22: mol_type = other DNA
atgtgttctattctgtcctcat

SEQ ID NO: 28448 - DNA, 22 bp, synthetic construct
  misc_feature 1..22: note = chemically synthesized
  source 1..22: mol_type = other DNA
tattctgtcctcatcacataac

SEQ ID NO: 28449 - DNA, 22 bp, synthetic construct
  misc_feature 1..22: note = chemically synthesized
  source 1..22: mol_type = other DNA
ttctgtcctcatcacataacat

SEQ ID NO: 28450 - DNA, 22 bp, synthetic construct
  misc_feature 1..22: note = chemically synthesized
  source 1..22: mol_type = other DNA
tgtcctcatcacataacatctg

SEQ ID NO: 28451 - DNA, 22 bp, synthetic construct
  misc_feature 1..22: note = chemically synthesized
  source 1..22: mol_type = other DNA
tcctcatcacataacatctgaa

SEQ ID NO: 28452 - DNA, 22 bp, synthetic construct
  misc_feature 1..22: note = chemically synthesized
  source 1..22: mol_type = other DNA
atcacataacatctgaactgtg

SEQ ID NO: 28453 - DNA, 22 bp, synthetic construct
  misc_feature 1..22: note = chemically synthesized
  source 1..22: mol_type = other DNA
aactgtgatttgacagtgtcct

SEQ ID NO: 28454 - DNA, 22 bp, synthetic construct
  misc_feature 1..22: note = chemically synthesized
  source 1..22: mol_type = other DNA
tgatttgacagtgtccttatta

SEQ ID NO: 28455 - DNA, 22 bp, synthetic construct
  misc_feature 1..22: note = chemically synthesized
  source 1..22: mol_type = other DNA
gacagtgtccttattatcagac

SEQ ID NO: 28456 - DNA, 22 bp, synthetic construct
  misc_feature 1..22: note = chemically synthesized
  source 1..22: mol_type = other DNA
acagtgtccttattatcagact

SEQ ID NO: 28457 - DNA, 22 bp, synthetic construct
  misc_feature 1..22: note = chemically synthesized
  source 1..22: mol_type = other DNA
attatcagactctgctcaatga

SEQ ID NO: 28458 - DNA, 22 bp, synthetic construct
  misc_feature 1..22: note = chemically synthesized
  source 1..22: mol_type = other DNA
ttatcagactctgctcaatgac

SEQ ID NO: 28459 - DNA, 22 bp, synthetic construct
  misc_feature 1..22: note = chemically synthesized
  source 1..22: mol_type = other DNA
tcagactctgctcaatgacagt

SEQ ID NO: 28460 - DNA, 22 bp, synthetic construct
  misc_feature 1..22: note = chemically synthesized
  source 1..22: mol_type = other DNA
tgctcaatgacagtttaaactt

SEQ ID NO: 28461 - DNA, 22 bp, synthetic construct
  misc_feature 1..22: note = chemically synthesized
  source 1..22: mol_type = other DNA
ctcaatgacagtttaaacttct

SEQ ID NO: 28462 - DNA, 22 bp, synthetic construct
  misc_feature 1..22: note = chemically synthesized
  source 1..22: mol_type = other DNA
aatgacagtttaaacttctttt

SEQ ID NO: 28463 - DNA, 22 bp, synthetic construct
  misc_feature 1..22: note = chemically synthesized
  source 1..22: mol_type = other DNA
aaacttctttttgatacagtaa

SEQ ID NO: 28464 - DNA, 22 bp, synthetic construct
  misc_feature 1..22: note = chemically synthesized
  source 1..22: mol_type = other DNA
aacttctttttgatacagtaaa

SEQ ID NO: 28465 - DNA, 22 bp, synthetic construct
  misc_feature 1..22: note = chemically synthesized
  source 1..22: mol_type = other DNA
ctttttgatacagtaaaaaact

SEQ ID NO: 28466 - DNA, 22 bp, synthetic construct
  misc_feature 1..22: note = chemically synthesized
  source 1..22: mol_type = other DNA
tttttgatacagtaaaaaactt

SEQ ID NO: 28467 - DNA, 22 bp, synthetic construct
  misc_feature 1..22: note = chemically synthesized
  source 1..22: mol_type = other DNA
tttgatacagtaaaaaactttt

SEQ ID NO: 28468 - DNA, 22 bp, synthetic construct
  misc_feature 1..22: note = chemically synthesized
  source 1..22: mol_type = other DNA
ttgatacagtaaaaaacttttc

SEQ ID NO: 28469 - DNA, 22 bp, synthetic construct
  misc_feature 1..22: note = chemically synthesized
  source 1..22: mol_type = other DNA
tgatacagtaaaaaacttttcc

SEQ ID NO: 28470 - DNA, 22 bp, synthetic construct
  misc_feature 1..22: note = chemically synthesized
  source 1..22: mol_type = other DNA
gatacagtaaaaaacttttcct

SEQ ID NO: 28471 - DNA, 22 bp, synthetic construct
  misc_feature 1..22: note = chemically synthesized
  source 1..22: mol_type = other DNA
atacagtaaaaaacttttcctt

SEQ ID NO: 28472 - DNA, 22 bp, synthetic construct
  misc_feature 1..22: note = chemically synthesized
  source 1..22: mol_type = other DNA
ttccttaaagatgaaattctta

SEQ ID NO: 28473 - DNA, 22 bp, synthetic construct
  misc_feature 1..22: note = chemically synthesized
  source 1..22: mol_type = other DNA
tccttaaagatgaaattcttaa

SEQ ID NO: 28474 - DNA, 22 bp, synthetic construct
  misc_feature 1..22: note = chemically synthesized
  source 1..22: mol_type = other DNA
ccttaaagatgaaattcttaag

SEQ ID NO: 28475 - DNA, 22 bp, synthetic construct
  misc_feature 1..22: note = chemically synthesized
  source 1..22: mol_type = other DNA
cttaaagatgaaattcttaagg

SEQ ID NO: 28476 - DNA, 22 bp, synthetic construct
  misc_feature 1..22: note = chemically synthesized
  source 1..22: mol_type = other DNA
aaagatgaaattcttaaggaca

SEQ ID NO: 28477 - DNA, 22 bp, synthetic construct
  misc_feature 1..22: note = chemically synthesized
  source 1..22: mol_type = other DNA
aagatgaaattcttaaggacaa

SEQ ID NO: 28478 - DNA, 22 bp, synthetic construct
  misc_feature 1..22: note = chemically synthesized
  source 1..22: mol_type = other DNA
ttaaggacaattagcttgtgta

SEQ ID NO: 28479 - DNA, 22 bp, synthetic construct
  misc_feature 1..22: note = chemically synthesized
  source 1..22: mol_type = other DNA
aaggacaattagcttgtgtaga

SEQ ID NO: 28480 - DNA, 22 bp, synthetic construct
  misc_feature 1..22: note = chemically synthesized
  source 1..22: mol_type = other DNA
aggacaattagcttgtgtagac

SEQ ID NO: 28481 - DNA, 22 bp, synthetic construct
  misc_feature 1..22: note = chemically synthesized
  source 1..22: mol_type = other DNA
gcttgtgtagactcatatgaaa

SEQ ID NO: 28482 - DNA, 22 bp, synthetic construct
  misc_feature 1..22: note = chemically synthesized
  source 1..22: mol_type = other DNA
gtgtagactcatatgaaaattg

SEQ ID NO: 28483 - DNA, 22 bp, synthetic construct
  misc_feature 1..22: note = chemically synthesized
  source 1..22: mol_type = other DNA
tgtagactcatatgaaaattgc

SEQ ID NO: 28484 - DNA, 22 bp, synthetic construct
  misc_feature 1..22: note = chemically synthesized
  source 1..22: mol_type = other DNA
atatgaaaattgcttgcatttt

SEQ ID NO: 28485 - DNA, 22 bp, synthetic construct
  misc_feature 1..22: note = chemically synthesized
  source 1..22: mol_type = other DNA
cttgcattttggagttacatta

SEQ ID NO: 28486 - DNA, 22 bp, synthetic construct
  misc_feature 1..22: note = chemically synthesized
  source 1..22: mol_type = other DNA
gcattttggagttacattagct

SEQ ID NO: 28487 - DNA, 22 bp, synthetic construct
  misc_feature 1..22: note = chemically synthesized
  source 1..22: mol_type = other DNA
cattttggagttacattagctc

SEQ ID NO: 28488 - DNA, 22 bp, synthetic construct
  misc_feature 1..22: note = chemically synthesized
  source 1..22: mol_type = other DNA
tggagttacattagctcttctc

SEQ ID NO: 28489 - DNA, 22 bp, synthetic construct
  misc_feature 1..22: note = chemically synthesized
  source 1..22: mol_type = other DNA
ggagttacattagctcttctcc

SEQ ID NO: 28490 - DNA, 22 bp, synthetic construct
  misc_feature 1..22: note = chemically synthesized
  source 1..22: mol_type = other DNA
gagttacattagctcttctcct

SEQ ID NO: 28491 - DNA, 22 bp, synthetic construct
  misc_feature 1..22: note = chemically synthesized
  source 1..22: mol_type = other DNA
cattagctcttctcctttataa

SEQ ID NO: 28492 - DNA, 22 bp, synthetic construct
  misc_feature 1..22: note = chemically synthesized
  source 1..22: mol_type = other DNA
gctcttctcctttataaattaa

SEQ ID NO: 28493 - DNA, 22 bp, synthetic construct
  misc_feature 1..22: note = chemically synthesized
  source 1..22: mol_type = other DNA
ttctcctttataaattaatgaa

SEQ ID NO: 28494 - DNA, 22 bp, synthetic construct
  misc_feature 1..22: note = chemically synthesized
  source 1..22: mol_type = other DNA
ctcctttataaattaatgaatc

SEQ ID NO: 28495 - DNA, 22 bp, synthetic construct
  misc_feature 1..22: note = chemically synthesized
  source 1..22: mol_type = other DNA
tcctttataaattaatgaatcc

SEQ ID NO: 28496 - DNA, 22 bp, synthetic construct
  misc_feature 1..22: note = chemically synthesized
  source 1..22: mol_type = other DNA
ctttataaattaatgaatccta

SEQ ID NO: 28497 - DNA, 22 bp, synthetic construct
  misc_feature 1..22: note = chemically synthesized
  source 1..22: mol_type = other DNA
tataaattaatgaatcctattg

SEQ ID NO: 28498 - DNA, 22 bp, synthetic construct
  misc_feature 1..22: note = chemically synthesized
  source 1..22: mol_type = other DNA
ataaattaatgaatcctattgg

SEQ ID NO: 28499 - DNA, 22 bp, synthetic construct
  misc_feature 1..22: note = chemically synthesized
  source 1..22: mol_type = other DNA
taaattaatgaatcctattggt

SEQ ID NO: 28500 - DNA, 22 bp, synthetic construct
  misc_feature 1..22: note = chemically synthesized
  source 1..22: mol_type = other DNA
atgaatcctattggtaccatat

SEQ ID NO: 28501 - DNA, 22 bp, synthetic construct
  misc_feature 1..22: note = chemically synthesized
  source 1..22: mol_type = other DNA
ttggtaccatataatagcatca

SEQ ID NO: 28502 - DNA, 22 bp, synthetic construct
  misc_feature 1..22: note = chemically synthesized
  source 1..22: mol_type = other DNA
gtaccatataatagcatcaaca

SEQ ID NO: 28503 - DNA, 22 bp, synthetic construct
  misc_feature 1..22: note = chemically synthesized
  source 1..22: mol_type = other DNA
gccttttgtgtctcgcctttca

SEQ ID NO: 28504 - DNA, 22 bp, synthetic construct
  misc_feature 1..22: note = chemically synthesized
  source 1..22: mol_type = other DNA
ccttttgtgtctcgcctttcaa

SEQ ID NO: 28505 - DNA, 22 bp, synthetic construct
  misc_feature 1..22: note = chemically synthesized
  source 1..22: mol_type = other DNA
ttgtgtctcgcctttcaaaggg

SEQ ID NO: 28506 - DNA, 22 bp, synthetic construct
  misc_feature 1..22: note = chemically synthesized
  source 1..22: mol_type = other DNA
tgtgtctcgcctttcaaagggc

SEQ ID NO: 28507 - DNA, 22 bp, synthetic construct
  misc_feature 1..22: note = chemically synthesized
  source 1..22: mol_type = other DNA
gtgtctcgcctttcaaagggca

SEQ ID NO: 28508 - DNA, 22 bp, synthetic construct
  misc_feature 1..22: note = chemically synthesized
  source 1..22: mol_type = other DNA
tgtctcgcctttcaaagggcaa

SEQ ID NO: 28509 - DNA, 22 bp, synthetic construct
  misc_feature 1..22: note = chemically synthesized
  source 1..22: mol_type = other DNA
gcctttcaaagggcaattttcc

SEQ ID NO: 28510 - DNA, 22 bp, synthetic construct
  misc_feature 1..22: note = chemically synthesized
  source 1..22: mol_type = other DNA
tcaaagggcaattttccaaaaa

SEQ ID NO: 28511 - DNA, 22 bp, synthetic construct
  misc_feature 1..22: note = chemically synthesized
  source 1..22: mol_type = other DNA
caaagggcaattttccaaaaag

SEQ ID NO: 28512 - DNA, 22 bp, synthetic construct
  misc_feature 1..22: note = chemically synthesized
  source 1..22: mol_type = other DNA
aaagggcaattttccaaaaagt

SEQ ID NO: 28513 - DNA, 22 bp, synthetic construct
  misc_feature 1..22: note = chemically synthesized
  source 1..22: mol_type = other DNA
tccaaaaagtatattttgcatg

SEQ ID NO: 28514 - DNA, 22 bp, synthetic construct
  misc_feature 1..22: note = chemically synthesized
  source 1..22: mol_type = other DNA
ccaaaaagtatattttgcatgg

SEQ ID NO: 28515 - DNA, 22 bp, synthetic construct
  misc_feature 1..22: note = chemically synthesized
  source 1..22: mol_type = other DNA
caaaaagtatattttgcatggc

SEQ ID NO: 28516 - DNA, 22 bp, synthetic construct
  misc_feature 1..22: note = chemically synthesized
  source 1..22: mol_type = other DNA
tgcatggctcaggctaaaagta

SEQ ID NO: 28517 - DNA, 22 bp, synthetic construct
  misc_feature 1..22: note = chemically synthesized
  source 1..22: mol_type = other DNA
gcatggctcaggctaaaagtaa

SEQ ID NO: 28518 - DNA, 22 bp, synthetic construct
  misc_feature 1..22: note = chemically synthesized
  source 1..22: mol_type = other DNA
catggctcaggctaaaagtaat

SEQ ID NO: 28519 - DNA, 22 bp, synthetic construct
  misc_feature 1..22: note = chemically synthesized
  source 1..22: mol_type = other DNA
aggctaaaagtaatgtctccag

SEQ ID NO: 28520 - DNA, 22 bp, synthetic construct
  misc_feature 1..22: note = chemically synthesized
  source 1..22: mol_type = other DNA
aaagtaatgtctccagatgaag

SEQ ID NO: 28521 - DNA, 22 bp, synthetic construct
  misc_feature 1..22: note = chemically synthesized
  source 1..22: mol_type = other DNA
cagatgaagttctactttgtga

SEQ ID NO: 28522 - DNA, 22 bp, synthetic construct
  misc_feature 1..22: note = chemically synthesized
  source 1..22: mol_type = other DNA
tactttgtgaccattgattgtg

SEQ ID NO: 28523 - DNA, 22 bp, synthetic construct
  misc_feature 1..22: note = chemically synthesized
  source 1..22: mol_type = other DNA
ctttgtgaccattgattgtgac

SEQ ID NO: 28524 - DNA, 22 bp, synthetic construct
  misc_feature 1..22: note = chemically synthesized
  source 1..22: mol_type = other DNA
tgtgaccattgattgtgactat

SEQ ID NO: 28525 - DNA, 22 bp, synthetic construct
  misc_feature 1..22: note = chemically synthesized
  source 1..22: mol_type = other DNA
gtgaccattgattgtgactatt

SEQ ID NO: 28526 - DNA, 22 bp, synthetic construct
  misc_feature 1..22: note = chemically synthesized
  source 1..22: mol_type = other DNA
tgaccattgattgtgactattg

SEQ ID NO: 28527 - DNA, 22 bp, synthetic construct
  misc_feature 1..22: note = chemically synthesized
  source 1..22: mol_type = other DNA
attgtgactattgataagattt

SEQ ID NO: 28528 - DNA, 22 bp, synthetic construct
  misc_feature 1..22: note = chemically synthesized
  source 1..22: mol_type = other DNA
tgactattgataagatttacta

SEQ ID NO: 28529 - DNA, 22 bp, synthetic construct
  misc_feature 1..22: note = chemically synthesized
  source 1..22: mol_type = other DNA
ttgataagatttactatgtaaa

SEQ ID NO: 28530 - DNA, 22 bp, synthetic construct
  misc_feature 1..22: note = chemically synthesized
  source 1..22: mol_type = other DNA
ataagatttactatgtaaagta

SEQ ID NO: 28531 - DNA, 22 bp, synthetic construct
  misc_feature 1..22: note = chemically synthesized
  source 1..22: mol_type = other DNA
actatgtaaagtataagttact

SEQ ID NO: 28532 - DNA, 22 bp, synthetic construct
  misc_feature 1..22: note = chemically synthesized
  source 1..22: mol_type = other DNA
ctatgtaaagtataagttactg

SEQ ID NO: 28533 - DNA, 22 bp, synthetic construct
  misc_feature 1..22: note = chemically synthesized
  source 1..22: mol_type = other DNA
tgtaaagtataagttactggaa

SEQ ID NO: 28534 - DNA, 22 bp, synthetic construct
  misc_feature 1..22: note = chemically synthesized
  source 1..22: mol_type = other DNA
ctggaataatacatttaagaaa

SEQ ID NO: 28535 - DNA, 22 bp, synthetic construct
  misc_feature 1..22: note = chemically synthesized
  source 1..22: mol_type = other DNA
gaataatacatttaagaaatat

SEQ ID NO: 28536 - DNA, 22 bp, synthetic construct
  misc_feature 1..22: note = chemically synthesized
  source 1..22: mol_type = other DNA
aagaaatatagtagctattaaa

SEQ ID NO: 28537 - DNA, 22 bp, synthetic construct
  misc_feature 1..22: note = chemically synthesized
  source 1..22: mol_type = other DNA
agaaatatagtagctattaaaa

SEQ ID NO: 28538 - DNA, 22 bp, synthetic construct
  misc_feature 1..22: note = chemically synthesized
  source 1..22: mol_type = other DNA
ttaaaacctgtagtctgatgaa

SEQ ID NO: 28539 - DNA, 22 bp, synthetic construct
  misc_feature 1..22: note = chemically synthesized
  source 1..22: mol_type = other DNA
aaacctgtagtctgatgaaatg

SEQ ID NO: 28540 - DNA, 22 bp, synthetic construct
  misc_feature 1..22: note = chemically synthesized
  source 1..22: mol_type = other DNA
tagtctgatgaaatggaatatg

SEQ ID NO: 28541 - DNA, 22 bp, synthetic construct
  misc_feature 1..22: note = chemically synthesized
  source 1..22: mol_type = other DNA
atgaaatggaatatgttttgaa

SEQ ID NO: 28542 - DNA, 22 bp, synthetic construct
  misc_feature 1..22: note = chemically synthesized
  source 1..22: mol_type = other DNA
tgaaagacagcagtgaaaaatg

SEQ ID NO: 28543 - DNA, 22 bp, synthetic construct
  misc_feature 1..22: note = chemically synthesized
  source 1..22: mol_type = other DNA
gaaagacagcagtgaaaaatga

SEQ ID NO: 28544 - DNA, 22 bp, synthetic construct
  misc_feature 1..22: note = chemically synthesized
  source 1..22: mol_type = other DNA
aaagacagcagtgaaaaatgag

SEQ ID NO: 28545 - DNA, 22 bp, synthetic construct
  misc_feature 1..22: note = chemically synthesized
  source 1..22: mol_type = other DNA
ctttttgcaattgagttgaaga

SEQ ID NO: 28546 - DNA, 22 bp, synthetic construct
  misc_feature 1..22: note = chemically synthesized
  source 1..22: mol_type = other DNA
tttgcaattgagttgaagattg

SEQ ID NO: 28547 - DNA, 22 bp, synthetic construct
  misc_feature 1..22: note = chemically synthesized
  source 1..22: mol_type = other DNA
ttgcaattgagttgaagattga

SEQ ID NO: 28548 - DNA, 22 bp, synthetic construct
  misc_feature 1..22: note = chemically synthesized
  source 1..22: mol_type = other DNA
tgcaattgagttgaagattgat

SEQ ID NO: 28549 - DNA, 22 bp, synthetic construct
  misc_feature 1..22: note = chemically synthesized
  source 1..22: mol_type = other DNA
gcaattgagttgaagattgatg

SEQ ID NO: 28550 - DNA, 22 bp, synthetic construct
  misc_feature 1..22: note = chemically synthesized
  source 1..22: mol_type = other DNA
caattgagttgaagattgatgc

SEQ ID NO: 28551 - DNA, 22 bp, synthetic construct
  misc_feature 1..22: note = chemically synthesized
  source 1..22: mol_type = other DNA
agttgaagattgatgccaggat

SEQ ID NO: 28552 - DNA, 22 bp, synthetic construct
  misc_feature 1..22: note = chemically synthesized
  source 1..22: mol_type = other DNA
aagattgatgccaggatcttat

SEQ ID NO: 28553 - DNA, 22 bp, synthetic construct
  misc_feature 1..22: note = chemically synthesized
  source 1..22: mol_type = other DNA
atgccaggatcttattacctcc

SEQ ID NO: 28554 - DNA, 22 bp, synthetic construct
  misc_feature 1..22: note = chemically synthesized
  source 1..22: mol_type = other DNA
attacctccaggatttcacaaa

SEQ ID NO: 28555 - DNA, 22 bp, synthetic construct
  misc_feature 1..22: note = chemically synthesized
  source 1..22: mol_type = other DNA
ttacctccaggatttcacaaag

SEQ ID NO: 28556 - DNA, 22 bp, synthetic construct
  misc_feature 1..22: note = chemically synthesized
  source 1..22: mol_type = other DNA
cctccaggatttcacaaaggat

SEQ ID NO: 28557 - DNA, 22 bp, synthetic construct
  misc_feature 1..22: note = chemically synthesized
  source 1..22: mol_type = other DNA
caggatttcacaaaggatttct

SEQ ID NO: 28558 - DNA, 22 bp, synthetic construct
  misc_feature 1..22: note = chemically synthesized
  source 1..22: mol_type = other DNA
cacaaaggatttcttgagtcat

SEQ ID NO: 28559 - DNA, 22 bp, synthetic construct
  misc_feature 1..22: note = chemically synthesized
  source 1..22: mol_type = other DNA
acaaaggatttcttgagtcatc

SEQ ID NO: 28560 - DNA, 22 bp, synthetic construct
  misc_feature 1..22: note = chemically synthesized
  source 1..22: mol_type = other DNA
cttgagtcatccccttgctcta

SEQ ID NO: 28561 - DNA, 22 bp, synthetic construct
  misc_feature 1..22: note = chemically synthesized
  source 1..22: mol_type = other DNA
ttgagtcatccccttgctctag

SEQ ID NO: 28562 - DNA, 22 bp, synthetic construct
  misc_feature 1..22: note = chemically synthesized
  source 1..22: mol_type = other DNA
gagtcatccccttgctctagct

SEQ ID NO: 28563 - DNA, 22 bp, synthetic construct
  misc_feature 1..22: note = chemically synthesized
  source 1..22: mol_type = other DNA
agtcatccccttgctctagctc

SEQ ID NO: 28564 - DNA, 22 bp, synthetic construct
  misc_feature 1..22: note = chemically synthesized
  source 1..22: mol_type = other DNA
gctctagctcatgaacaaagta

SEQ ID NO: 28565 - DNA, 22 bp, synthetic construct
  misc_feature 1..22: note = chemically synthesized
  source 1..22: mol_type = other DNA
ctctagctcatgaacaaagtat

SEQ ID NO: 28566 - DNA, 22 bp, synthetic construct
  misc_feature 1..22: note = chemically synthesized
  source 1..22: mol_type = other DNA
tagctcatgaacaaagtattgc

SEQ ID NO: 28567 - DNA, 22 bp, synthetic construct
  misc_feature 1..22: note = chemically synthesized
  source 1..22: mol_type = other DNA
gctcatgaacaaagtattgctc

SEQ ID NO: 28568 - DNA, 22 bp, synthetic construct
  misc_feature 1..22: note = chemically synthesized
  source 1..22: mol_type = other DNA
atgaacaaagtattgctcaagt

SEQ ID NO: 28569 - DNA, 22 bp, synthetic construct
  misc_feature 1..22: note = chemically synthesized
  source 1..22: mol_type = other DNA
ctcaagtaatcgacagattatt

SEQ ID NO: 28570 - DNA, 22 bp, synthetic construct
  misc_feature 1..22: note = chemically synthesized
  source 1..22: mol_type = other DNA
aagtaatcgacagattatttgt

SEQ ID NO: 28571 - DNA, 22 bp, synthetic construct
  misc_feature 1..22: note = chemically synthesized
  source 1..22: mol_type = other DNA
tttgtgtattctcacatgtgat

SEQ ID NO: 28572 - DNA, 22 bp, synthetic construct
  misc_feature 1..22: note = chemically synthesized
  source 1..22: mol_type = other DNA
gtgtattctcacatgtgattat

SEQ ID NO: 28573 - DNA, 22 bp, synthetic construct
  misc_feature 1..22: note = chemically synthesized
  source 1..22: mol_type = other DNA
tgtattctcacatgtgattatt

SEQ ID NO: 28574 - DNA, 22 bp, synthetic construct
  misc_feature 1..22: note = chemically synthesized
  source 1..22: mol_type = other DNA
tcacatgtgattattatttagt

SEQ ID NO: 28575 - DNA, 22 bp, synthetic construct
  misc_feature 1..22: note = chemically synthesized
  source 1..22: mol_type = other DNA
acatgtgattattatttagtgc

SEQ ID NO: 28576 - DNA, 22 bp, synthetic construct
  misc_feature 1..22: note = chemically synthesized
  source 1..22: mol_type = other DNA
ttatttagtgctgtcacgggaa

SEQ ID NO: 28577 - DNA, 22 bp, synthetic construct
  misc_feature 1..22: note = chemically synthesized
  source 1..22: mol_type = other DNA
tttagtgctgtcacgggaaata

SEQ ID NO: 28578 - DNA, 22 bp, synthetic construct
  misc_feature 1..22: note = chemically synthesized
  source 1..22: mol_type = other DNA
agtgctgtcacgggaaatatcc

SEQ ID NO: 28579 - DNA, 22 bp, synthetic construct
  misc_feature 1..22: note = chemically synthesized
  source 1..22: mol_type = other DNA
gtgctgtcacgggaaatatcct

SEQ ID NO: 28580 - DNA, 22 bp, synthetic construct
  misc_feature 1..22: note = chemically synthesized
  source 1..22: mol_type = other DNA
tcacgggaaatatcctgcctaa

SEQ ID NO: 28581 - DNA, 22 bp, synthetic construct
  misc_feature 1..22: note = chemically synthesized
  source 1..22: mol_type = other DNA
cctaagtttactggaggtcttc

SEQ ID NO: 28582 - DNA, 22 bp, synthetic construct
  misc_feature 1..22: note = chemically synthesized
  source 1..22: mol_type = other DNA
agtttactggaggtcttcctcc

SEQ ID NO: 28583 - DNA, 22 bp, synthetic construct
  misc_feature 1..22: note = chemically synthesized
  source 1..22: mol_type = other DNA
actggaggtcttcctcccctta

SEQ ID NO: 28584 - DNA, 22 bp, synthetic construct
  misc_feature 1..22: note = chemically synthesized
  source 1..22: mol_type = other DNA
ctggaggtcttcctccccttac

SEQ ID NO: 28585 - DNA, 22 bp, synthetic construct
  misc_feature 1..22: note = chemically synthesized
  source 1..22: mol_type = other DNA
gaggtcttcctccccttacccc

SEQ ID NO: 28586 - DNA, 22 bp, synthetic construct
  misc_feature 1..22: note = chemically synthesized
  source 1..22: mol_type = other DNA
cctccccttacccctccctatg

SEQ ID NO: 28587 - DNA, 22 bp, synthetic construct
  misc_feature 1..22: note = chemically synthesized
  source 1..22: mol_type = other DNA
ctccccttacccctccctatgt

SEQ ID NO: 28588 - DNA, 22 bp, synthetic construct
  misc_feature 1..22: note = chemically synthesized
  source 1..22: mol_type = other DNA
cccttacccctccctatgtcct

SEQ ID NO: 28589 - DNA, 22 bp, synthetic construct
  misc_feature 1..22: note = chemically synthesized
  source 1..22: mol_type = other DNA
acccctccctatgtcctcctac

SEQ ID NO: 28590 - DNA, 22 bp, synthetic construct
  misc_feature 1..22: note = chemically synthesized
  source 1..22: mol_type = other DNA
cccctccctatgtcctcctacc

SEQ ID NO: 28591 - DNA, 22 bp, synthetic construct
  misc_feature 1..22: note = chemically synthesized
  source 1..22: mol_type = other DNA
cctatgtcctcctacctggtta

SEQ ID NO: 28592 - DNA, 22 bp, synthetic construct
  misc_feature 1..22: note = chemically synthesized
  source 1..22: mol_type = other DNA
tgtcctcctacctggttatcct

SEQ ID NO: 28593 - DNA, 22 bp, synthetic construct
  misc_feature 1..22: note = chemically synthesized
  source 1..22: mol_type = other DNA
ctacctggttatccttttcaat

SEQ ID NO: 28594 - DNA, 22 bp, synthetic construct
  misc_feature 1..22: note = chemically synthesized
  source 1..22: mol_type = other DNA
cctggttatccttttcaatcct

SEQ ID NO: 28595 - DNA, 22 bp, synthetic construct
  misc_feature 1..22: note = chemically synthesized
  source 1..22: mol_type = other DNA
gttatccttttcaatcctatta

SEQ ID NO: 28596 - DNA, 22 bp, synthetic construct
  misc_feature 1..22: note = chemically synthesized
  source 1..22: mol_type = other DNA
tccttttcaatcctattactct

SEQ ID NO: 28597 - DNA, 22 bp, synthetic construct
  misc_feature 1..22: note = chemically synthesized
  source 1..22: mol_type = other DNA
ttcaatcctattactctttcct

SEQ ID NO: 28598 - DNA, 22 bp, synthetic construct
  misc_feature 1..22: note = chemically synthesized
  source 1..22: mol_type = other DNA
tcaatcctattactctttcctt

SEQ ID NO: 28599 - DNA, 22 bp, synthetic construct
  misc_feature 1..22: note = chemically synthesized
  source 1..22: mol_type = other DNA
caatcctattactctttccttg

SEQ ID NO: 28600 - DNA, 22 bp, synthetic construct
  misc_feature 1..22: note = chemically synthesized
  source 1..22: mol_type = other DNA
aatcctattactctttccttgc

SEQ ID NO: 28601 - DNA, 22 bp, synthetic construct
  misc_feature 1..22: note = chemically synthesized
  source 1..22: mol_type = other DNA
ttactctttccttgcacactct

SEQ ID NO: 28602 - DNA, 22 bp, synthetic construct
  misc_feature 1..22: note = chemically synthesized
  source 1..22: mol_type = other DNA
ctctttccttgcacactctact

SEQ ID NO: 28603 - DNA, 22 bp, synthetic construct
  misc_feature 1..22: note = chemically synthesized
  source 1..22: mol_type = other DNA
tttccttgcacactctactcca

SEQ ID NO: 28604 - DNA, 22 bp, synthetic construct
  misc_feature 1..22: note = chemically synthesized
  source 1..22: mol_type = other DNA
tccttgcacactctactccagc

SEQ ID NO: 28605 - DNA, 22 bp, synthetic construct
  misc_feature 1..22: note = chemically synthesized
  source 1..22: mol_type = other DNA
ccttgcacactctactccagct

SEQ ID NO: 28606 - DNA, 22 bp, synthetic construct
  misc_feature 1..22: note = chemically synthesized
  source 1..22: mol_type = other DNA
cttgcacactctactccagctt

SEQ ID NO: 28607 - DNA, 22 bp, synthetic construct
  misc_feature 1..22: note = chemically synthesized
  source 1..22: mol_type = other DNA
gcacactctactccagcttagg

SEQ ID NO: 28608 - DNA, 22 bp, synthetic construct
  misc_feature 1..22: note = chemically synthesized
  source 1..22: mol_type = other DNA
cacactctactccagcttaggg

SEQ ID NO: 28609 - DNA, 22 bp, synthetic construct
  misc_feature 1..22: note = chemically synthesized
  source 1..22: mol_type = other DNA
tactccagcttagggcctgggc

SEQ ID NO: 28610 - DNA, 22 bp, synthetic construct
  misc_feature 1..22: note = chemically synthesized
  source 1..22: mol_type = other DNA
ctccagcttagggcctgggctc

SEQ ID NO: 28611 - DNA, 22 bp, synthetic construct
  misc_feature 1..22: note = chemically synthesized
  source 1..22: mol_type = other DNA
cagcttagggcctgggctctga

SEQ ID NO: 28612 - DNA, 22 bp, synthetic construct
  misc_feature 1..22: note = chemically synthesized
  source 1..22: mol_type = other DNA
agggcctgggctctgaccatta

SEQ ID NO: 28613 - DNA, 22 bp, synthetic construct
  misc_feature 1..22: note = chemically synthesized
  source 1..22: mol_type = other DNA
gggcctgggctctgaccattac

SEQ ID NO: 28614 - DNA, 22 bp, synthetic construct
  misc_feature 1..22: note = chemically synthesized
  source 1..22: mol_type = other DNA
ggctctgaccattacctctgcc

SEQ ID NO: 28615 - DNA, 22 bp, synthetic construct
  misc_feature 1..22: note = chemically synthesized
  source 1..22: mol_type = other DNA
tgaccattacctctgcctaaaa

SEQ ID NO: 28616 - DNA, 22 bp, synthetic construct
  misc_feature 1..22: note = chemically synthesized
  source 1..22: mol_type = other DNA
accattacctctgcctaaaaat

SEQ ID NO: 28617 - DNA, 22 bp, synthetic construct
  misc_feature 1..22: note = chemically synthesized
  source 1..22: mol_type = other DNA
cctctgcctaaaaattcctcct

SEQ ID NO: 28618 - DNA, 22 bp, synthetic construct
  misc_feature 1..22: note = chemically synthesized
  source 1..22: mol_type = other DNA
tgcctaaaaattcctcctcatg

SEQ ID NO: 28619 - DNA, 22 bp, synthetic construct
  misc_feature 1..22: note = chemically synthesized
  source 1..22: mol_type = other DNA
cctaaaaattcctcctcatgac

SEQ ID NO: 28620 - DNA, 22 bp, synthetic construct
  misc_feature 1..22: note = chemically synthesized
  source 1..22: mol_type = other DNA
aaaattcctcctcatgacatcc

SEQ ID NO: 28621 - DNA, 22 bp, synthetic construct
  misc_feature 1..22: note = chemically synthesized
  source 1..22: mol_type = other DNA
ctcctcatgacatccatttgcc

SEQ ID NO: 28622 - DNA, 22 bp, synthetic construct
  misc_feature 1..22: note = chemically synthesized
  source 1..22: mol_type = other DNA
ctcatgacatccatttgcccaa

SEQ ID NO: 28623 - DNA, 22 bp, synthetic construct
  misc_feature 1..22: note = chemically synthesized
  source 1..22: mol_type = other DNA
atgacatccatttgcccaattt

SEQ ID NO: 28624 - DNA, 22 bp, synthetic construct
  misc_feature 1..22: note = chemically synthesized
  source 1..22: mol_type = other DNA
gcccaatttcttcaccctttta

SEQ ID NO: 28625 - DNA, 22 bp, synthetic construct
  misc_feature 1..22: note = chemically synthesized
  source 1..22: mol_type = other DNA
cccaatttcttcacccttttaa

SEQ ID NO: 28626 - DNA, 22 bp, synthetic construct
  misc_feature 1..22: note = chemically synthesized
  source 1..22: mol_type = other DNA
cttcacccttttaattacccca

SEQ ID NO: 28627 - DNA, 22 bp, synthetic construct
  misc_feature 1..22: note = chemically synthesized
  source 1..22: mol_type = other DNA
ttcacccttttaattaccccat

SEQ ID NO: 28628 - DNA, 22 bp, synthetic construct
  misc_feature 1..22: note = chemically synthesized
  source 1..22: mol_type = other DNA
cacccttttaattaccccatta

SEQ ID NO: 28629 - DNA, 22 bp, synthetic construct
  misc_feature 1..22: note = chemically synthesized
  source 1..22: mol_type = other DNA
acccttttaattaccccattaa

SEQ ID NO: 28630 - DNA, 22 bp, synthetic construct
  misc_feature 1..22: note = chemically synthesized
  source 1..22: mol_type = other DNA
ttaattaccccattaagtgata

SEQ ID NO: 28631 - DNA, 22 bp, synthetic construct
  misc_feature 1..22: note = chemically synthesized
  source 1..22: mol_type = other DNA
taattaccccattaagtgatat

SEQ ID NO: 28632 - DNA, 22 bp, synthetic construct
  misc_feature 1..22: note = chemically synthesized
  source 1..22: mol_type = other DNA
aattaccccattaagtgatatt

SEQ ID NO: 28633 - DNA, 22 bp, synthetic construct
  misc_feature 1..22: note = chemically synthesized
  source 1..22: mol_type = other DNA
attaccccattaagtgatattt

SEQ ID NO: 28634 - DNA, 22 bp, synthetic construct
  misc_feature 1..22: note = chemically synthesized
  source 1..22: mol_type = other DNA
ccccattaagtgatattttgct

SEQ ID NO: 28635 - DNA, 22 bp, synthetic construct
  misc_feature 1..22: note = chemically synthesized
  source 1..22: mol_type = other DNA
agtgatattttgcttgctcaat

SEQ ID NO: 28636 - DNA, 22 bp, synthetic construct
  misc_feature 1..22: note = chemically synthesized
  source 1..22: mol_type = other DNA
tgcttgctcaatttttgccttt

SEQ ID NO: 28637 - DNA, 22 bp, synthetic construct
  misc_feature 1..22: note = chemically synthesized
  source 1..22: mol_type = other DNA
gcttgctcaatttttgcctttt

SEQ ID NO: 28638 - DNA, 22 bp, synthetic construct
  misc_feature 1..22: note = chemically synthesized
  source 1..22: mol_type = other DNA
cttgctcaatttttgccttttc

SEQ ID NO: 28639 - DNA, 22 bp, synthetic construct
  misc_feature 1..22: note = chemically synthesized
  source 1..22: mol_type = other DNA
gctcaatttttgccttttcaat

SEQ ID NO: 28640 - DNA, 22 bp, synthetic construct
  misc_feature 1..22: note = chemically synthesized
  source 1..22: mol_type = other DNA
ctcaatttttgccttttcaatc

SEQ ID NO: 28641 - DNA, 22 bp, synthetic construct
  misc_feature 1..22: note = chemically synthesized
  source 1..22: mol_type = other DNA
aatttttgccttttcaatcaga

SEQ ID NO: 28642 - DNA, 22 bp, synthetic construct
  misc_feature 1..22: note = chemically synthesized
  source 1..22: mol_type = other DNA
ttgccttttcaatcagatctaa

SEQ ID NO: 28643 - DNA, 22 bp, synthetic construct
  misc_feature 1..22: note = chemically synthesized
  source 1..22: mol_type = other DNA
tgccttttcaatcagatctaat

SEQ ID NO: 28644 - DNA, 22 bp, synthetic construct
  misc_feature 1..22: note = chemically synthesized
  source 1..22: mol_type = other DNA
gccttttcaatcagatctaatt

SEQ ID NO: 28645 - DNA, 22 bp, synthetic construct
  misc_feature 1..22: note = chemically synthesized
  source 1..22: mol_type = other DNA
ccttttcaatcagatctaattt

SEQ ID NO: 28646 - DNA, 22 bp, synthetic construct
  misc_feature 1..22: note = chemically synthesized
  source 1..22: mol_type = other DNA
ttcaatcagatctaatttattt

SEQ ID NO: 28647 - DNA, 22 bp, synthetic construct
  misc_feature 1..22: note = chemically synthesized
  source 1..22: mol_type = other DNA
tcaatcagatctaatttatttt

SEQ ID NO: 28648 - DNA, 22 bp, synthetic construct
  misc_feature 1..22: note = chemically synthesized
  source 1..22: mol_type = other DNA
caatcagatctaatttatttta

SEQ ID NO: 28649 - DNA, 22 bp, synthetic construct
  misc_feature 1..22: note = chemically synthesized
  source 1..22: mol_type = other DNA
aatcagatctaatttattttat

SEQ ID NO: 28650 - DNA, 22 bp, synthetic construct
  misc_feature 1..22: note = chemically synthesized
  source 1..22: mol_type = other DNA
atttattttatatttttaaaat

SEQ ID NO: 28651 - DNA, 22 bp, synthetic construct
  misc_feature 1..22: note = chemically synthesized
  source 1..22: mol_type = other DNA
attttatatttttaaaatttat

SEQ ID NO: 28652 - DNA, 22 bp, synthetic construct
  misc_feature 1..22: note = chemically synthesized
  source 1..22: mol_type = other DNA
ttttatatttttaaaatttatt

SEQ ID NO: 28653 - DNA, 22 bp, synthetic construct
  misc_feature 1..22: note = chemically synthesized
  source 1..22: mol_type = other DNA
tatatttttaaaatttatttat

SEQ ID NO: 28654 - DNA, 22 bp, synthetic construct
  misc_feature 1..22: note = chemically synthesized
  source 1..22: mol_type = other DNA
atatttttaaaatttatttata

SEQ ID NO: 28655 - DNA, 22 bp, synthetic construct
  misc_feature 1..22: note = chemically synthesized
  source 1..22: mol_type = other DNA
tatttttaaaatttatttatat

SEQ ID NO: 28656 - DNA, 22 bp, synthetic construct
  misc_feature 1..22: note = chemically synthesized
  source 1..22: mol_type = other DNA
ttaaaatttatttatatatatt

SEQ ID NO: 28657 - DNA, 22 bp, synthetic construct
  misc_feature 1..22: note = chemically synthesized
  source 1..22: mol_type = other DNA
taaaatttatttatatatattt

SEQ ID NO: 28658 - DNA, 22 bp, synthetic construct
  misc_feature 1..22: note = chemically synthesized
  source 1..22: mol_type = other DNA
aaaatttatttatatatattta

SEQ ID NO: 28659 - DNA, 22 bp, synthetic construct
  misc_feature 1..22: note = chemically synthesized
  source 1..22: mol_type = other DNA
aaatttatttatatatatttag

SEQ ID NO: 28660 - DNA, 22 bp, synthetic construct
  misc_feature 1..22: note = chemically synthesized
  source 1..22: mol_type = other DNA
atttatatatatttagaaggta

SEQ ID NO: 28661 - DNA, 22 bp, synthetic construct
  misc_feature 1..22: note = chemically synthesized
  source 1..22: mol_type = other DNA
tttatatatatttagaaggtat

SEQ ID NO: 28662 - DNA, 22 bp, synthetic construct
  misc_feature 1..22: note = chemically synthesized
  source 1..22: mol_type = other DNA
atatatatttagaaggtatgta

SEQ ID NO: 28663 - DNA, 22 bp, synthetic construct
  misc_feature 1..22: note = chemically synthesized
  source 1..22: mol_type = other DNA
tatatatttagaaggtatgtac

SEQ ID NO: 28664 - DNA, 22 bp, synthetic construct
  misc_feature 1..22: note = chemically synthesized
  source 1..22: mol_type = other DNA
agaaggtatgtactagttcgtt

SEQ ID NO: 28665 - DNA, 22 bp, synthetic construct
  misc_feature 1..22: note = chemically synthesized
  source 1..22: mol_type = other DNA
gaaggtatgtactagttcgtta

SEQ ID NO: 28666 - DNA, 22 bp, synthetic construct
  misc_feature 1..22: note = chemically synthesized
  source 1..22: mol_type = other DNA
gttcgttatcatgctgcttata

SEQ ID NO: 28667 - DNA, 22 bp, synthetic construct
  misc_feature 1..22: note = chemically synthesized
  source 1..22: mol_type = other DNA
gttatcatgctgcttataaaga

SEQ ID NO: 28668 - DNA, 22 bp, synthetic construct
  misc_feature 1..22: note = chemically synthesized
  source 1..22: mol_type = other DNA
tcatgctgcttataaagacata

SEQ ID NO: 28669 - DNA, 22 bp, synthetic construct
  misc_feature 1..22: note = chemically synthesized
  source 1..22: mol_type = other DNA
cttataaagacatacctgagac

SEQ ID NO: 28670 - DNA, 22 bp, synthetic construct
  misc_feature 1..22: note = chemically synthesized
  source 1..22: mol_type = other DNA
ataaagacatacctgagactgg

SEQ ID NO: 28671 - DNA, 22 bp, synthetic construct
  misc_feature 1..22: note = chemically synthesized
  source 1..22: mol_type = other DNA
taaagacatacctgagactggg

SEQ ID NO: 28672 - DNA, 22 bp, synthetic construct
  misc_feature 1..22: note = chemically synthesized
  source 1..22: mol_type = other DNA
agactgggtaatttataaggaa

SEQ ID NO: 28673 - DNA, 22 bp, synthetic construct
  misc_feature 1..22: note = chemically synthesized
  source 1..22: mol_type = other DNA
ggtaatttataaggaaaaaacg

SEQ ID NO: 28674 - DNA, 22 bp, synthetic construct
  misc_feature 1..22: note = chemically synthesized
  source 1..22: mol_type = other DNA
ataaggaaaaaacgtttaattg

SEQ ID NO: 28675 - DNA, 22 bp, synthetic construct
  misc_feature 1..22: note = chemically synthesized
  source 1..22: mol_type = other DNA
taaggaaaaaacgtttaattgt

SEQ ID NO: 28676 - DNA, 22 bp, synthetic construct
  misc_feature 1..22: note = chemically synthesized
  source 1..22: mol_type = other DNA
aattgtctcacagttccacagg

SEQ ID NO: 28677 - DNA, 22 bp, synthetic construct
  misc_feature 1..22: note = chemically synthesized
  source 1..22: mol_type = other DNA
attgtctcacagttccacaggg

SEQ ID NO: 28678 - DNA, 22 bp, synthetic construct
  misc_feature 1..22: note = chemically synthesized
  source 1..22: mol_type = other DNA
tctcacagttccacagggctgg

SEQ ID NO: 28679 - DNA, 22 bp, synthetic construct
  misc_feature 1..22: note = chemically synthesized
  source 1..22: mol_type = other DNA
acagttccacagggctggggag

SEQ ID NO: 28680 - DNA, 22 bp, synthetic construct
  misc_feature 1..22: note = chemically synthesized
  source 1..22: mol_type = other DNA
cacagggctggggaggcctcgg

SEQ ID NO: 28681 - DNA, 22 bp, synthetic construct
  misc_feature 1..22: note = chemically synthesized
  source 1..22: mol_type = other DNA
gggaggcctcgggaaacttaca

SEQ ID NO: 28682 - DNA, 22 bp, synthetic construct
  misc_feature 1..22: note = chemically synthesized
  source 1..22: mol_type = other DNA
gggaaacttacaatcatggcag

SEQ ID NO: 28683 - DNA, 22 bp, synthetic construct
  misc_feature 1..22: note = chemically synthesized
  source 1..22: mol_type = other DNA
acaatcatggcagaagaagaaa

SEQ ID NO: 28684 - DNA, 22 bp, synthetic construct
  misc_feature 1..22: note = chemically synthesized
  source 1..22: mol_type = other DNA
caatcatggcagaagaagaaac

SEQ ID NO: 28685 - DNA, 22 bp, synthetic construct
  misc_feature 1..22: note = chemically synthesized
  source 1..22: mol_type = other DNA
cttcacatggcagcagcaagta

SEQ ID NO: 28686 - DNA, 22 bp, synthetic construct
  misc_feature 1..22: note = chemically synthesized
  source 1..22: mol_type = other DNA
ttcacatggcagcagcaagtag

SEQ ID NO: 28687 - DNA, 22 bp, synthetic construct
  misc_feature 1..22: note = chemically synthesized
  source 1..22: mol_type = other DNA
cacatggcagcagcaagtagaa

SEQ ID NO: 28688 - DNA, 22 bp, synthetic construct
  misc_feature 1..22: note = chemically synthesized
  source 1..22: mol_type = other DNA
acatggcagcagcaagtagaag

SEQ ID NO: 28689 - DNA, 22 bp, synthetic construct
  misc_feature 1..22: note = chemically synthesized
  source 1..22: mol_type = other DNA
ataaaaccatcagatcttgtaa

SEQ ID NO: 28690 - DNA, 22 bp, synthetic construct
  misc_feature 1..22: note = chemically synthesized
  source 1..22: mol_type = other DNA
taaaaccatcagatcttgtaag

SEQ ID NO: 28691 - DNA, 22 bp, synthetic construct
  misc_feature 1..22: note = chemically synthesized
  source 1..22: mol_type = other DNA
gtaagaactcactatcacgaga

SEQ ID NO: 28692 - DNA, 22 bp, synthetic construct
  misc_feature 1..22: note = chemically synthesized
  source 1..22: mol_type = other DNA
taagaactcactatcacgagaa

SEQ ID NO: 28693 - DNA, 22 bp, synthetic construct
  misc_feature 1..22: note = chemically synthesized
  source 1..22: mol_type = other DNA
actatcacgagaagagcatgag

SEQ ID NO: 28694 - DNA, 22 bp, synthetic construct
  misc_feature 1..22: note = chemically synthesized
  source 1..22: mol_type = other DNA
tcacgagaagagcatgagagta

SEQ ID NO: 28695 - DNA, 22 bp, synthetic construct
  misc_feature 1..22: note = chemically synthesized
  source 1..22: mol_type = other DNA
ctctatgattcaattacctccc

SEQ ID NO: 28696 - DNA, 22 bp, synthetic construct
  misc_feature 1..22: note = chemically synthesized
  source 1..22: mol_type = other DNA
tatgattcaattacctccctcc

SEQ ID NO: 28697 - DNA, 22 bp, synthetic construct
  misc_feature 1..22: note = chemically synthesized
  source 1..22: mol_type = other DNA
tgattcaattacctccctccaa

SEQ ID NO: 28698 - DNA, 22 bp, synthetic construct
  misc_feature 1..22: note = chemically synthesized
  source 1..22: mol_type = other DNA
aattacctccctccaaatccct

SEQ ID NO: 28699 - DNA, 22 bp, synthetic construct
  misc_feature 1..22: note = chemically synthesized
  source 1..22: mol_type = other DNA
cctccctccaaatccctcccac

SEQ ID NO: 28700 - DNA, 22 bp, synthetic construct
  misc_feature 1..22: note = chemically synthesized
  source 1..22: mol_type = other DNA
cctccaaatccctcccacaaca

SEQ ID NO: 28701 - DNA, 22 bp, synthetic construct
  misc_feature 1..22: note = chemically synthesized
  source 1..22: mol_type = other DNA
caaatccctcccacaacacgtg

SEQ ID NO: 28702 - DNA, 22 bp, synthetic construct
  misc_feature 1..22: note = chemically synthesized
  source 1..22: mol_type = other DNA
ccacaacacgtgaggattatgg

SEQ ID NO: 28703 - DNA, 22 bp, synthetic construct
  misc_feature 1..22: note = chemically synthesized
  source 1..22: mol_type = other DNA
tgggaactacaattcaagatga

SEQ ID NO: 28704 - DNA, 22 bp, synthetic construct
  misc_feature 1..22: note = chemically synthesized
  source 1..22: mol_type = other DNA
caattcaagatgagatttgggt

SEQ ID NO: 28705 - DNA, 22 bp, synthetic construct
  misc_feature 1..22: note = chemically synthesized
  source 1..22: mol_type = other DNA
aagatgagatttgggtggggac

SEQ ID NO: 28706 - DNA, 22 bp, synthetic construct
  misc_feature 1..22: note = chemically synthesized
  source 1..22: mol_type = other DNA
gggtggggacacagtcaagctg

SEQ ID NO: 28707 - DNA, 22 bp, synthetic construct
  misc_feature 1..22: note = chemically synthesized
  source 1..22: mol_type = other DNA
ggtggggacacagtcaagctgt

SEQ ID NO: 28708 - DNA, 22 bp, synthetic construct
  misc_feature 1..22: note = chemically synthesized
  source 1..22: mol_type = other DNA
tatcagggtacaagctcgggtt

SEQ ID NO: 28709 - DNA, 22 bp, synthetic construct
  misc_feature 1..22: note = chemically synthesized
  source 1..22: mol_type = other DNA
gggttccttacatatgtatgtt

SEQ ID NO: 28710 - DNA, 22 bp, synthetic construct
  misc_feature 1..22: note = chemically synthesized
  source 1..22: mol_type = other DNA
cttacatatgtatgttgcatag

SEQ ID NO: 28711 - DNA, 22 bp, synthetic construct
  misc_feature 1..22: note = chemically synthesized
  source 1..22: mol_type = other DNA
acatatgtatgttgcatagtgg

SEQ ID NO: 28712 - DNA, 22 bp, synthetic construct
  misc_feature 1..22: note = chemically synthesized
  source 1..22: mol_type = other DNA
catatgtatgttgcatagtggt

SEQ ID NO: 28713 - DNA, 22 bp, synthetic construct
  misc_feature 1..22: note = chemically synthesized
  source 1..22: mol_type = other DNA
catagtggtgaagtctgagctt

SEQ ID NO: 28714 - DNA, 22 bp, synthetic construct
  misc_feature 1..22: note = chemically synthesized
  source 1..22: mol_type = other DNA
agcttttagtggaccatcacct

SEQ ID NO: 28715 - DNA, 22 bp, synthetic construct
  misc_feature 1..22: note = chemically synthesized
  source 1..22: mol_type = other DNA
ttagtggaccatcacctgaaaa

SEQ ID NO: 28716 - DNA, 22 bp, synthetic construct
  misc_feature 1..22: note = chemically synthesized
  source 1..22: mol_type = other DNA
tagtggaccatcacctgaaaag

SEQ ID NO: 28717 - DNA, 22 bp, synthetic construct
  misc_feature 1..22: note = chemically synthesized
  source 1..22: mol_type = other DNA
agtggaccatcacctgaaaagt

SEQ ID NO: 28718 - DNA, 22 bp, synthetic construct
  misc_feature 1..22: note = chemically synthesized
  source 1..22: mol_type = other DNA
gtggaccatcacctgaaaagtg

SEQ ID NO: 28719 - DNA, 22 bp, synthetic construct
  misc_feature 1..22: note = chemically synthesized
  source 1..22: mol_type = other DNA
aaaagtgaatgttgtatccaat

SEQ ID NO: 28720 - DNA, 22 bp, synthetic construct
  misc_feature 1..22: note = chemically synthesized
  source 1..22: mol_type = other DNA
tatccaatccgtagtttttcag

SEQ ID NO: 28721 - DNA, 22 bp, synthetic construct
  misc_feature 1..22: note = chemically synthesized
  source 1..22: mol_type = other DNA
ttcagtcctcaccatactccta

SEQ ID NO: 28722 - DNA, 22 bp, synthetic construct
  misc_feature 1..22: note = chemically synthesized
  source 1..22: mol_type = other DNA
tcagtcctcaccatactcctat

SEQ ID NO: 28723 - DNA, 22 bp, synthetic construct
  misc_feature 1..22: note = chemically synthesized
  source 1..22: mol_type = other DNA
cagtcctcaccatactcctatc

SEQ ID NO: 28724 - DNA, 22 bp, synthetic construct
  misc_feature 1..22: note = chemically synthesized
  source 1..22: mol_type = other DNA
agtcctcaccatactcctatcc

SEQ ID NO: 28725 - DNA, 22 bp, synthetic construct
  misc_feature 1..22: note = chemically synthesized
  source 1..22: mol_type = other DNA
accatactcctatcctcccacc

SEQ ID NO: 28726 - DNA, 22 bp, synthetic construct
  misc_feature 1..22: note = chemically synthesized
  source 1..22: mol_type = other DNA
ctatcctcccacctttctctag

SEQ ID NO: 28727 - DNA, 22 bp, synthetic construct
  misc_feature 1..22: note = chemically synthesized
  source 1..22: mol_type = other DNA
tcctcccacctttctctagtct

SEQ ID NO: 28728 - DNA, 22 bp, synthetic construct
  misc_feature 1..22: note = chemically synthesized
  source 1..22: mol_type = other DNA
ccacctttctctagtctcaagt

SEQ ID NO: 28729 - DNA, 22 bp, synthetic construct
  misc_feature 1..22: note = chemically synthesized
  source 1..22: mol_type = other DNA
tctctagtctcaagtgtctatt

SEQ ID NO: 28730 - DNA, 22 bp, synthetic construct
  misc_feature 1..22: note = chemically synthesized
  source 1..22: mol_type = other DNA
ctctagtctcaagtgtctatta

SEQ ID NO: 28731 - DNA, 22 bp, synthetic construct
  misc_feature 1..22: note = chemically synthesized
  source 1..22: mol_type = other DNA
tctagtctcaagtgtctattat

SEQ ID NO: 28732 - DNA, 22 bp, synthetic construct
  misc_feature 1..22: note = chemically synthesized
  source 1..22: mol_type = other DNA
tagtctcaagtgtctattattt

SEQ ID NO: 28733 - DNA, 22 bp, synthetic construct
  misc_feature 1..22: note = chemically synthesized
  source 1..22: mol_type = other DNA
gtctcaagtgtctattatttca

SEQ ID NO: 28734 - DNA, 22 bp, synthetic construct
  misc_feature 1..22: note = chemically synthesized
  source 1..22: mol_type = other DNA
aagtgtctattatttcattcta

SEQ ID NO: 28735 - DNA, 22 bp, synthetic construct
  misc_feature 1..22: note = chemically synthesized
  source 1..22: mol_type = other DNA
ttatttcattctatatgtctat

SEQ ID NO: 28736 - DNA, 22 bp, synthetic construct
  misc_feature 1..22: note = chemically synthesized
  source 1..22: mol_type = other DNA
tttcattctatatgtctatgct

SEQ ID NO: 28737 - DNA, 22 bp, synthetic construct
  misc_feature 1..22: note = chemically synthesized
  source 1..22: mol_type = other DNA
cattctatatgtctatgcttac

SEQ ID NO: 28738 - DNA, 22 bp, synthetic construct
  misc_feature 1..22: note = chemically synthesized
  source 1..22: mol_type = other DNA
attctatatgtctatgcttact

SEQ ID NO: 28739 - DNA, 22 bp, synthetic construct
  misc_feature 1..22: note = chemically synthesized
  source 1..22: mol_type = other DNA
tatatgtctatgcttactcatc

SEQ ID NO: 28740 - DNA, 22 bp, synthetic construct
  misc_feature 1..22: note = chemically synthesized
  source 1..22: mol_type = other DNA
tatgtctatgcttactcatcgt

SEQ ID NO: 28741 - DNA, 22 bp, synthetic construct
  misc_feature 1..22: note = chemically synthesized
  source 1..22: mol_type = other DNA
tgcttactcatcgtttagctcc

SEQ ID NO: 28742 - DNA, 22 bp, synthetic construct
  misc_feature 1..22: note = chemically synthesized
  source 1..22: mol_type = other DNA
actcatcgtttagctcccactt

SEQ ID NO: 28743 - DNA, 22 bp, synthetic construct
  misc_feature 1..22: note = chemically synthesized
  source 1..22: mol_type = other DNA
ctcatcgtttagctcccacttg

SEQ ID NO: 28744 - DNA, 22 bp, synthetic construct
  misc_feature 1..22: note = chemically synthesized
  source 1..22: mol_type = other DNA
atcgtttagctcccacttggct

SEQ ID NO: 28745 - DNA, 22 bp, synthetic construct
  misc_feature 1..22: note = chemically synthesized
  source 1..22: mol_type = other DNA
agctcccacttggctctcacta

SEQ ID NO: 28746 - DNA, 22 bp, synthetic construct
  misc_feature 1..22: note = chemically synthesized
  source 1..22: mol_type = other DNA
gctcccacttggctctcactaa

SEQ ID NO: 28747 - DNA, 22 bp, synthetic construct
  misc_feature 1..22: note = chemically synthesized
  source 1..22: mol_type = other DNA
ccacttggctctcactaaatga

SEQ ID NO: 28748 - DNA, 22 bp, synthetic construct
  misc_feature 1..22: note = chemically synthesized
  source 1..22: mol_type = other DNA
ggctctcactaaatgagaacat

SEQ ID NO: 28749 - DNA, 22 bp, synthetic construct
  misc_feature 1..22: note = chemically synthesized
  source 1..22: mol_type = other DNA
gctctcactaaatgagaacata

SEQ ID NO: 28750 - DNA, 22 bp, synthetic construct
  misc_feature 1..22: note = chemically synthesized
  source 1..22: mol_type = other DNA
tcactaaatgagaacatactgt

SEQ ID NO: 28751 - DNA, 22 bp, synthetic construct
  misc_feature 1..22: note = chemically synthesized
  source 1..22: mol_type = other DNA
actaaatgagaacatactgtgt

SEQ ID NO: 28752 - DNA, 22 bp, synthetic construct
  misc_feature 1..22: note = chemically synthesized
  source 1..22: mol_type = other DNA
aatgagaacatactgtgtttga

SEQ ID NO: 28753 - DNA, 22 bp, synthetic construct
  misc_feature 1..22: note = chemically synthesized
  source 1..22: mol_type = other DNA
tgtttgactttctgtttctgag

SEQ ID NO: 28754 - DNA, 22 bp, synthetic construct
  misc_feature 1..22: note = chemically synthesized
  source 1..22: mol_type = other DNA
gactttctgtttctgagttatt

SEQ ID NO: 28755 - DNA, 22 bp, synthetic construct
  misc_feature 1..22: note = chemically synthesized
  source 1..22: mol_type = other DNA
actttctgtttctgagttattt

SEQ ID NO: 28756 - DNA, 22 bp, synthetic construct
  misc_feature 1..22: note = chemically synthesized
  source 1..22: mol_type = other DNA
tctgtttctgagttatttcact

SEQ ID NO: 28757 - DNA, 22 bp, synthetic construct
  misc_feature 1..22: note = chemically synthesized
  source 1..22: mol_type = other DNA
ctgtttctgagttatttcactg

SEQ ID NO: 28758 - DNA, 22 bp, synthetic construct
  misc_feature 1..22: note = chemically synthesized
  source 1..22: mol_type = other DNA
tgtttctgagttatttcactga

SEQ ID NO: 28759 - DNA, 22 bp, synthetic construct
  misc_feature 1..22: note = chemically synthesized
  source 1..22: mol_type = other DNA
tttctgagttatttcactgagg

SEQ ID NO: 28760 - DNA, 22 bp, synthetic construct
  misc_feature 1..22: note = chemically synthesized
  source 1..22: mol_type = other DNA
ctgagttatttcactgaggata

SEQ ID NO: 28761 - DNA, 22 bp, synthetic construct
  misc_feature 1..22: note = chemically synthesized
  source 1..22: mol_type = other DNA
tgagttatttcactgaggataa

SEQ ID NO: 28762 - DNA, 22 bp, synthetic construct
  misc_feature 1..22: note = chemically synthesized
  source 1..22: mol_type = other DNA
agttatttcactgaggataatg

SEQ ID NO: 28763 - DNA, 22 bp, synthetic construct
  misc_feature 1..22: note = chemically synthesized
  source 1..22: mol_type = other DNA
tttcactgaggataatgtcctc

SEQ ID NO: 28764 - DNA, 22 bp, synthetic construct
  misc_feature 1..22: note = chemically synthesized
  source 1..22: mol_type = other DNA
cactgaggataatgtcctccag

SEQ ID NO: 28765 - DNA, 22 bp, synthetic construct
  misc_feature 1..22: note = chemically synthesized
  source 1..22: mol_type = other DNA
actgaggataatgtcctccagt

SEQ ID NO: 28766 - DNA, 22 bp, synthetic construct
  misc_feature 1..22: note = chemically synthesized
  source 1..22: mol_type = other DNA
aggataatgtcctccagttcta

SEQ ID NO: 28767 - DNA, 22 bp, synthetic construct
  misc_feature 1..22: note = chemically synthesized
  source 1..22: mol_type = other DNA
cagttctaaccatgtttctaga

SEQ ID NO: 28768 - DNA, 22 bp, synthetic construct
  misc_feature 1..22: note = chemically synthesized
  source 1..22: mol_type = other DNA
taaccatgtttctagagaagac

SEQ ID NO: 28769 - DNA, 22 bp, synthetic construct
  misc_feature 1..22: note = chemically synthesized
  source 1..22: mol_type = other DNA
accatgtttctagagaagacat

SEQ ID NO: 28770 - DNA, 22 bp, synthetic construct
  misc_feature 1..22: note = chemically synthesized
  source 1..22: mol_type = other DNA
ctagagaagacatgatttcatt

SEQ ID NO: 28771 - DNA, 22 bp, synthetic construct
  misc_feature 1..22: note = chemically synthesized
  source 1..22: mol_type = other DNA
tagagaagacatgatttcattc

SEQ ID NO: 28772 - DNA, 22 bp, synthetic construct
  misc_feature 1..22: note = chemically synthesized
  source 1..22: mol_type = other DNA
gagaagacatgatttcattctt

SEQ ID NO: 28773 - DNA, 22 bp, synthetic construct
  misc_feature 1..22: note = chemically synthesized
  source 1..22: mol_type = other DNA
cattcttttttatggctgagta

SEQ ID NO: 28774 - DNA, 22 bp, synthetic construct
  misc_feature 1..22: note = chemically synthesized
  source 1..22: mol_type = other DNA
attcttttttatggctgagtaa

SEQ ID NO: 28775 - DNA, 22 bp, synthetic construct
  misc_feature 1..22: note = chemically synthesized
  source 1..22: mol_type = other DNA
ttttttatggctgagtaatata

SEQ ID NO: 28776 - DNA, 22 bp, synthetic construct
  misc_feature 1..22: note = chemically synthesized
  source 1..22: mol_type = other DNA
ttttatggctgagtaatatata

SEQ ID NO: 28777 - DNA, 22 bp, synthetic construct
  misc_feature 1..22: note = chemically synthesized
  source 1..22: mol_type = other DNA
tttatggctgagtaatatatat

SEQ ID NO: 28778 - DNA, 22 bp, synthetic construct
  misc_feature 1..22: note = chemically synthesized
  source 1..22: mol_type = other DNA
ttatggctgagtaatatatatg

SEQ ID NO: 28779 - DNA, 22 bp, synthetic construct
  misc_feature 1..22: note = chemically synthesized
  source 1..22: mol_type = other DNA
tatggctgagtaatatatatgt

SEQ ID NO: 28780 - DNA, 22 bp, synthetic construct
  misc_feature 1..22: note = chemically synthesized
  source 1..22: mol_type = other DNA
atggctgagtaatatatatgta

SEQ ID NO: 28781 - DNA, 22 bp, synthetic construct
  misc_feature 1..22: note = chemically synthesized
  source 1..22: mol_type = other DNA
tggctgagtaatatatatgtat

SEQ ID NO: 28782 - DNA, 22 bp, synthetic construct
  misc_feature 1..22: note = chemically synthesized
  source 1..22: mol_type = other DNA
agtaatatatatgtatataaat

SEQ ID NO: 28783 - DNA, 22 bp, synthetic construct
  misc_feature 1..22: note = chemically synthesized
  source 1..22: mol_type = other DNA
tctttatccaatcgtccattgg

SEQ ID NO: 28784 - DNA, 22 bp, synthetic construct
  misc_feature 1..22: note = chemically synthesized
  source 1..22: mol_type = other DNA
ctttatccaatcgtccattggt

SEQ ID NO: 28785 - DNA, 22 bp, synthetic construct
  misc_feature 1..22: note = chemically synthesized
  source 1..22: mol_type = other DNA
tttatccaatcgtccattggta

SEQ ID NO: 28786 - DNA, 22 bp, synthetic construct
  misc_feature 1..22: note = chemically synthesized
  source 1..22: mol_type = other DNA
tatccaatcgtccattggtaga

SEQ ID NO: 28787 - DNA, 22 bp, synthetic construct
  misc_feature 1..22: note = chemically synthesized
  source 1..22: mol_type = other DNA
atccaatcgtccattggtagac

SEQ ID NO: 28788 - DNA, 22 bp, synthetic construct
  misc_feature 1..22: note = chemically synthesized
  source 1..22: mol_type = other DNA
tccaatcgtccattggtagaca

SEQ ID NO: 28789 - DNA, 22 bp, synthetic construct
  misc_feature 1..22: note = chemically synthesized
  source 1..22: mol_type = other DNA
gtagacatttaggttgattcca

SEQ ID NO: 28790 - DNA, 22 bp, synthetic construct
  misc_feature 1..22: note = chemically synthesized
  source 1..22: mol_type = other DNA
aggttgattccatatctttgct

SEQ ID NO: 28791 - DNA, 22 bp, synthetic construct
  misc_feature 1..22: note = chemically synthesized
  source 1..22: mol_type = other DNA
ggttgattccatatctttgcta

SEQ ID NO: 28792 - DNA, 22 bp, synthetic construct
  misc_feature 1..22: note = chemically synthesized
  source 1..22: mol_type = other DNA
attccatatctttgctattggg

SEQ ID NO: 28793 - DNA, 22 bp, synthetic construct
  misc_feature 1..22: note = chemically synthesized
  source 1..22: mol_type = other DNA
catatctttgctattgggaaca

SEQ ID NO: 28794 - DNA, 22 bp, synthetic construct
  misc_feature 1..22: note = chemically synthesized
  source 1..22: mol_type = other DNA
tgctattgggaacagtgctact

SEQ ID NO: 28795 - DNA, 22 bp, synthetic construct
  misc_feature 1..22: note = chemically synthesized
  source 1..22: mol_type = other DNA
gctattgggaacagtgctactt

SEQ ID NO: 28796 - DNA, 22 bp, synthetic construct
  misc_feature 1..22: note = chemically synthesized
  source 1..22: mol_type = other DNA
ctattgggaacagtgctacttt

SEQ ID NO: 28797 - DNA, 22 bp, synthetic construct
  misc_feature 1..22: note = chemically synthesized
  source 1..22: mol_type = other DNA
ttgggaacagtgctactttgaa

SEQ ID NO: 28798 - DNA, 22 bp, synthetic construct
  misc_feature 1..22: note = chemically synthesized
  source 1..22: mol_type = other DNA
ggaacagtgctactttgaacat

SEQ ID NO: 28799 - DNA, 22 bp, synthetic construct
  misc_feature 1..22: note = chemically synthesized
  source 1..22: mol_type = other DNA
ctttgaacatactaatgcagat

SEQ ID NO: 28800 - DNA, 22 bp, synthetic construct
  misc_feature 1..22: note = chemically synthesized
  source 1..22: mol_type = other DNA
tgaacatactaatgcagatatc

SEQ ID NO: 28801 - DNA, 22 bp, synthetic construct
  misc_feature 1..22: note = chemically synthesized
  source 1..22: mol_type = other DNA
gaacatactaatgcagatatct

SEQ ID NO: 28802 - DNA, 22 bp, synthetic construct
  misc_feature 1..22: note = chemically synthesized
  source 1..22: mol_type = other DNA
aacatactaatgcagatatctt

SEQ ID NO: 28803 - DNA, 22 bp, synthetic construct
  misc_feature 1..22: note = chemically synthesized
  source 1..22: mol_type = other DNA
atgcagatatcttttttaatat

SEQ ID NO: 28804 - DNA, 22 bp, synthetic construct
  misc_feature 1..22: note = chemically synthesized
  source 1..22: mol_type = other DNA
ttttaatatgatctctttcact

SEQ ID NO: 28805 - DNA, 22 bp, synthetic construct
  misc_feature 1..22: note = chemically synthesized
  source 1..22: mol_type = other DNA
tttaatatgatctctttcactt

SEQ ID NO: 28806 - DNA, 22 bp, synthetic construct
  misc_feature 1..22: note = chemically synthesized
  source 1..22: mol_type = other DNA
ttaatatgatctctttcacttt

SEQ ID NO: 28807 - DNA, 22 bp, synthetic construct
  misc_feature 1..22: note = chemically synthesized
  source 1..22: mol_type = other DNA
taatatgatctctttcactttg

SEQ ID NO: 28808 - DNA, 22 bp, synthetic construct
  misc_feature 1..22: note = chemically synthesized
  source 1..22: mol_type = other DNA
aatatgatctctttcactttgg

SEQ ID NO: 28809 - DNA, 22 bp, synthetic construct
  misc_feature 1..22: note = chemically synthesized
  source 1..22: mol_type = other DNA
atatgatctctttcactttggg

SEQ ID NO: 28810 - DNA, 22 bp, synthetic construct
  misc_feature 1..22: note = chemically synthesized
  source 1..22: mol_type = other DNA
tttcactttgggtccataccca

SEQ ID NO: 28811 - DNA, 22 bp, synthetic construct
  misc_feature 1..22: note = chemically synthesized
  source 1..22: mol_type = other DNA
tcactttgggtccatacccagt

SEQ ID NO: 28812 - DNA, 22 bp, synthetic construct
  misc_feature 1..22: note = chemically synthesized
  source 1..22: mol_type = other DNA
cactttgggtccatacccagta

SEQ ID NO: 28813 - DNA, 22 bp, synthetic construct
  misc_feature 1..22: note = chemically synthesized
  source 1..22: mol_type = other DNA
actttgggtccatacccagtag

SEQ ID NO: 28814 - DNA, 22 bp, synthetic construct
  misc_feature 1..22: note = chemically synthesized
  source 1..22: mol_type = other DNA
tgggtccatacccagtagtggg

SEQ ID NO: 28815 - DNA, 22 bp, synthetic construct
  misc_feature 1..22: note = chemically synthesized
  source 1..22: mol_type = other DNA
gggtccatacccagtagtggga

SEQ ID NO: 28816 - DNA, 22 bp, synthetic construct
  misc_feature 1..22: note = chemically synthesized
  source 1..22: mol_type = other DNA
ggtccatacccagtagtgggat

SEQ ID NO: 28817 - DNA, 22 bp, synthetic construct
  misc_feature 1..22: note = chemically synthesized
  source 1..22: mol_type = other DNA
caggattgaatggtagttctgt

SEQ ID NO: 28818 - DNA, 22 bp, synthetic construct
  misc_feature 1..22: note = chemically synthesized
  source 1..22: mol_type = other DNA
aatggtagttctgtttctagtt

SEQ ID NO: 28819 - DNA, 22 bp, synthetic construct
  misc_feature 1..22: note = chemically synthesized
  source 1..22: mol_type = other DNA
tgtttctagttctttaagaaat

SEQ ID NO: 28820 - DNA, 22 bp, synthetic construct
  misc_feature 1..22: note = chemically synthesized
  source 1..22: mol_type = other DNA
tttctagttctttaagaaatct

SEQ ID NO: 28821 - DNA, 22 bp, synthetic construct
  misc_feature 1..22: note = chemically synthesized
  source 1..22: mol_type = other DNA
ctagttctttaagaaatcttca

SEQ ID NO: 28822 - DNA, 22 bp, synthetic construct
  misc_feature 1..22: note = chemically synthesized
  source 1..22: mol_type = other DNA
tagttctttaagaaatcttcat

SEQ ID NO: 28823 - DNA, 22 bp, synthetic construct
  misc_feature 1..22: note = chemically synthesized
  source 1..22: mol_type = other DNA
gttctttaagaaatcttcatgc

SEQ ID NO: 28824 - DNA, 22 bp, synthetic construct
  misc_feature 1..22: note = chemically synthesized
  source 1..22: mol_type = other DNA
tttaagaaatcttcatgctgtc

SEQ ID NO: 28825 - DNA, 22 bp, synthetic construct
  misc_feature 1..22: note = chemically synthesized
  source 1..22: mol_type = other DNA
taagaaatcttcatgctgtctt

SEQ ID NO: 28826 - DNA, 22 bp, synthetic construct
  misc_feature 1..22: note = chemically synthesized
  source 1..22: mol_type = other DNA
aagaaatcttcatgctgtcttc

SEQ ID NO: 28827 - DNA, 22 bp, synthetic construct
  misc_feature 1..22: note = chemically synthesized
  source 1..22: mol_type = other DNA
agaaatcttcatgctgtcttcc

SEQ ID NO: 28828 - DNA, 22 bp, synthetic construct
  misc_feature 1..22: note = chemically synthesized
  source 1..22: mol_type = other DNA
catgctgtcttccataaagttt

SEQ ID NO: 28829 - DNA, 22 bp, synthetic construct
  misc_feature 1..22: note = chemically synthesized
  source 1..22: mol_type = other DNA
atgctgtcttccataaagtttg

SEQ ID NO: 28830 - DNA, 22 bp, synthetic construct
  misc_feature 1..22: note = chemically synthesized
  source 1..22: mol_type = other DNA
tcttccataaagtttgtactaa

SEQ ID NO: 28831 - DNA, 22 bp, synthetic construct
  misc_feature 1..22: note = chemically synthesized
  source 1..22: mol_type = other DNA
ccataaagtttgtactaattta

SEQ ID NO: 28832 - DNA, 22 bp, synthetic construct
  misc_feature 1..22: note = chemically synthesized
  source 1..22: mol_type = other DNA
cataaagtttgtactaatttac

SEQ ID NO: 28833 - DNA, 22 bp, synthetic construct
  misc_feature 1..22: note = chemically synthesized
  source 1..22: mol_type = other DNA
gtactaatttacattcttacca

SEQ ID NO: 28834 - DNA, 22 bp, synthetic construct
  misc_feature 1..22: note = chemically synthesized
  source 1..22: mol_type = other DNA
tactaatttacattcttaccaa

SEQ ID NO: 28835 - DNA, 22 bp, synthetic construct
  misc_feature 1..22: note = chemically synthesized
  source 1..22: mol_type = other DNA
atttacattcttaccaacagtg

SEQ ID NO: 28836 - DNA, 22 bp, synthetic construct
  misc_feature 1..22: note = chemically synthesized
  source 1..22: mol_type = other DNA
acattcttaccaacagtgtata

SEQ ID NO: 28837 - DNA, 22 bp, synthetic construct
  misc_feature 1..22: note = chemically synthesized
  source 1..22: mol_type = other DNA
cattcttaccaacagtgtataa

SEQ ID NO: 28838 - DNA, 22 bp, synthetic construct
  misc_feature 1..22: note = chemically synthesized
  source 1..22: mol_type = other DNA
ttaccaacagtgtataagcatt

SEQ ID NO: 28839 - DNA, 22 bp, synthetic construct
  misc_feature 1..22: note = chemically synthesized
  source 1..22: mol_type = other DNA
accaacagtgtataagcatttt

SEQ ID NO: 28840 - DNA, 22 bp, synthetic construct
  misc_feature 1..22: note = chemically synthesized
  source 1..22: mol_type = other DNA
ccaacagtgtataagcattttc

SEQ ID NO: 28841 - DNA, 22 bp, synthetic construct
  misc_feature 1..22: note = chemically synthesized
  source 1..22: mol_type = other DNA
tcttgtctccacatcctcacca

SEQ ID NO: 28842 - DNA, 22 bp, synthetic construct
  misc_feature 1..22: note = chemically synthesized
  source 1..22: mol_type = other DNA
cttgtctccacatcctcaccaa

SEQ ID NO: 28843 - DNA, 22 bp, synthetic construct
  misc_feature 1..22: note = chemically synthesized
  source 1..22: mol_type = other DNA
ttgtctccacatcctcaccaac

SEQ ID NO: 28844 - DNA, 22 bp, synthetic construct
  misc_feature 1..22: note = chemically synthesized
  source 1..22: mol_type = other DNA
gtctccacatcctcaccaacat

SEQ ID NO: 28845 - DNA, 22 bp, synthetic construct
  misc_feature 1..22: note = chemically synthesized
  source 1..22: mol_type = other DNA
tctccacatcctcaccaacatc

SEQ ID NO: 28846 - DNA, 22 bp, synthetic construct
  misc_feature 1..22: note = chemically synthesized
  source 1..22: mol_type = other DNA
cacatcctcaccaacatctgct

SEQ ID NO: 28847 - DNA, 22 bp, synthetic construct
  misc_feature 1..22: note = chemically synthesized
  source 1..22: mol_type = other DNA
accaacatctgctgtttttgaa

SEQ ID NO: 28848 - DNA, 22 bp, synthetic construct
  misc_feature 1..22: note = chemically synthesized
  source 1..22: mol_type = other DNA
ctgtttttgaactttataatga

SEQ ID NO: 28849 - DNA, 22 bp, synthetic construct
  misc_feature 1..22: note = chemically synthesized
  source 1..22: mol_type = other DNA
tttttgaactttataatgatag

SEQ ID NO: 28850 - DNA, 22 bp, synthetic construct
  misc_feature 1..22: note = chemically synthesized
  source 1..22: mol_type = other DNA
ttgaactttataatgatagcca

SEQ ID NO: 28851 - DNA, 22 bp, synthetic construct
  misc_feature 1..22: note = chemically synthesized
  source 1..22: mol_type = other DNA
tgaactttataatgatagccat

SEQ ID NO: 28852 - DNA, 22 bp, synthetic construct
  misc_feature 1..22: note = chemically synthesized
  source 1..22: mol_type = other DNA
gaactttataatgatagccatt

SEQ ID NO: 28853 - DNA, 22 bp, synthetic construct
  misc_feature 1..22: note = chemically synthesized
  source 1..22: mol_type = other DNA
aactttataatgatagccattc

SEQ ID NO: 28854 - DNA, 22 bp, synthetic construct
  misc_feature 1..22: note = chemically synthesized
  source 1..22: mol_type = other DNA
tataatgatagccattctgact

SEQ ID NO: 28855 - DNA, 22 bp, synthetic construct
  misc_feature 1..22: note = chemically synthesized
  source 1..22: mol_type = other DNA
ataatgatagccattctgactg

SEQ ID NO: 28856 - DNA, 22 bp, synthetic construct
  misc_feature 1..22: note = chemically synthesized
  source 1..22: mol_type = other DNA
taatgatagccattctgactgg

SEQ ID NO: 28857 - DNA, 22 bp, synthetic construct
  misc_feature 1..22: note = chemically synthesized
  source 1..22: mol_type = other DNA
tgactggcataaggaggtatca

SEQ ID NO: 28858 - DNA, 22 bp, synthetic construct
  misc_feature 1..22: note = chemically synthesized
  source 1..22: mol_type = other DNA
actggcataaggaggtatcata

SEQ ID NO: 28859 - DNA, 22 bp, synthetic construct
  misc_feature 1..22: note = chemically synthesized
  source 1..22: mol_type = other DNA
gcataaggaggtatcatatggt

SEQ ID NO: 28860 - DNA, 22 bp, synthetic construct
  misc_feature 1..22: note = chemically synthesized
  source 1..22: mol_type = other DNA
taatttgcattctctgattatt

SEQ ID NO: 28861 - DNA, 22 bp, synthetic construct
  misc_feature 1..22: note = chemically synthesized
  source 1..22: mol_type = other DNA
aatttgcattctctgattatta

SEQ ID NO: 28862 - DNA, 22 bp, synthetic construct
  misc_feature 1..22: note = chemically synthesized
  source 1..22: mol_type = other DNA
atttgcattctctgattattag

SEQ ID NO: 28863 - DNA, 22 bp, synthetic construct
  misc_feature 1..22: note = chemically synthesized
  source 1..22: mol_type = other DNA
gcattctctgattattagtgat

SEQ ID NO: 28864 - DNA, 22 bp, synthetic construct
  misc_feature 1..22: note = chemically synthesized
  source 1..22: mol_type = other DNA
cattctctgattattagtgatg

SEQ ID NO: 28865 - DNA, 22 bp, synthetic construct
  misc_feature 1..22: note = chemically synthesized
  source 1..22: mol_type = other DNA
tctgattattagtgatgttgaa

SEQ ID NO: 28866 - DNA, 22 bp, synthetic construct
  misc_feature 1..22: note = chemically synthesized
  source 1..22: mol_type = other DNA
tgattattagtgatgttgaact

SEQ ID NO: 28867 - DNA, 22 bp, synthetic construct
  misc_feature 1..22: note = chemically synthesized
  source 1..22: mol_type = other DNA
attattagtgatgttgaacttt

SEQ ID NO: 28868 - DNA, 22 bp, synthetic construct
  misc_feature 1..22: note = chemically synthesized
  source 1..22: mol_type = other DNA
ttagtgatgttgaacttttttt

SEQ ID NO: 28869 - DNA, 22 bp, synthetic construct
  misc_feature 1..22: note = chemically synthesized
  source 1..22: mol_type = other DNA
gtgatgttgaacttttttttga

SEQ ID NO: 28870 - DNA, 22 bp, synthetic construct
  misc_feature 1..22: note = chemically synthesized
  source 1..22: mol_type = other DNA
aacttttttttgacgtttattg

SEQ ID NO: 28871 - DNA, 22 bp, synthetic construct
  misc_feature 1..22: note = chemically synthesized
  source 1..22: mol_type = other DNA
ttttttgacgtttattggccac

SEQ ID NO: 28872 - DNA, 22 bp, synthetic construct
  misc_feature 1..22: note = chemically synthesized
  source 1..22: mol_type = other DNA
tttttgacgtttattggccact

SEQ ID NO: 28873 - DNA, 22 bp, synthetic construct
  misc_feature 1..22: note = chemically synthesized
  source 1..22: mol_type = other DNA
ttttgacgtttattggccactt

SEQ ID NO: 28874 - DNA, 22 bp, synthetic construct
  misc_feature 1..22: note = chemically synthesized
  source 1..22: mol_type = other DNA
tttgacgtttattggccacttg

SEQ ID NO: 28875 - DNA, 22 bp, synthetic construct
  misc_feature 1..22: note = chemically synthesized
  source 1..22: mol_type = other DNA
ttgacgtttattggccacttgt

SEQ ID NO: 28876 - DNA, 22 bp, synthetic construct
  misc_feature 1..22: note = chemically synthesized
  source 1..22: mol_type = other DNA
tgacgtttattggccacttgta

SEQ ID NO: 28877 - DNA, 22 bp, synthetic construct
  misc_feature 1..22: note = chemically synthesized
  source 1..22: mol_type = other DNA
gacgtttattggccacttgtat

SEQ ID NO: 28878 - DNA, 22 bp, synthetic construct
  misc_feature 1..22: note = chemically synthesized
  source 1..22: mol_type = other DNA
acgtttattggccacttgtatg

SEQ ID NO: 28879 - DNA, 22 bp, synthetic construct
  misc_feature 1..22: note = chemically synthesized
  source 1..22: mol_type = other DNA
attggccacttgtatgtcttct

SEQ ID NO: 28880 - DNA, 22 bp, synthetic construct
  misc_feature 1..22: note = chemically synthesized
  source 1..22: mol_type = other DNA
ttggccacttgtatgtcttctt

SEQ ID NO: 28881 - DNA, 22 bp, synthetic construct
  misc_feature 1..22: note = chemically synthesized
  source 1..22: mol_type = other DNA
gccacttgtatgtcttcttttg

SEQ ID NO: 28882 - DNA, 22 bp, synthetic construct
  misc_feature 1..22: note = chemically synthesized
  source 1..22: mol_type = other DNA
gtatgtcttcttttggaaaatg

SEQ ID NO: 28883 - DNA, 22 bp, synthetic construct
  misc_feature 1..22: note = chemically synthesized
  source 1..22: mol_type = other DNA
tatgtcttcttttggaaaatgt

SEQ ID NO: 28884 - DNA, 22 bp, synthetic construct
  misc_feature 1..22: note = chemically synthesized
  source 1..22: mol_type = other DNA
cttttggaaaatgtctgctcag

SEQ ID NO: 28885 - DNA, 22 bp, synthetic construct
  misc_feature 1..22: note = chemically synthesized
  source 1..22: mol_type = other DNA
ttttggaaaatgtctgctcagg

SEQ ID NO: 28886 - DNA, 22 bp, synthetic construct
  misc_feature 1..22: note = chemically synthesized
  source 1..22: mol_type = other DNA
ttggaaaatgtctgctcaggac

SEQ ID NO: 28887 - DNA, 22 bp, synthetic construct
  misc_feature 1..22: note = chemically synthesized
  source 1..22: mol_type = other DNA
tggaaaatgtctgctcaggacc

SEQ ID NO: 28888 - DNA, 22 bp, synthetic construct
  misc_feature 1..22: note = chemically synthesized
  source 1..22: mol_type = other DNA
ggaaaatgtctgctcaggacct

SEQ ID NO: 28889 - DNA, 22 bp, synthetic construct
  misc_feature 1..22: note = chemically synthesized
  source 1..22: mol_type = other DNA
gaaaatgtctgctcaggacctg

SEQ ID NO: 28890 - DNA, 22 bp, synthetic construct
  misc_feature 1..22: note = chemically synthesized
  source 1..22: mol_type = other DNA
ctcaggacctgagctcactgta

SEQ ID NO: 28891 - DNA, 22 bp, synthetic construct
  misc_feature 1..22: note = chemically synthesized
  source 1..22: mol_type = other DNA
aggacctgagctcactgtattt

SEQ ID NO: 28892 - DNA, 22 bp, synthetic construct
  misc_feature 1..22: note = chemically synthesized
  source 1..22: mol_type = other DNA
agctcactgtatttgtcagggt

SEQ ID NO: 28893 - DNA, 22 bp, synthetic construct
  misc_feature 1..22: note = chemically synthesized
  source 1..22: mol_type = other DNA
actgtatttgtcagggttccct

SEQ ID NO: 28894 - DNA, 22 bp, synthetic construct
  misc_feature 1..22: note = chemically synthesized
  source 1..22: mol_type = other DNA
tatttgtcagggttccctagag

SEQ ID NO: 28895 - DNA, 22 bp, synthetic construct
  misc_feature 1..22: note = chemically synthesized
  source 1..22: mol_type = other DNA
gtcagggttccctagagagaca

SEQ ID NO: 28896 - DNA, 22 bp, synthetic construct
  misc_feature 1..22: note = chemically synthesized
  source 1..22: mol_type = other DNA
tcagggttccctagagagacag

SEQ ID NO: 28897 - DNA, 22 bp, synthetic construct
  misc_feature 1..22: note = chemically synthesized
  source 1..22: mol_type = other DNA
cctagagagacagaactaatag

SEQ ID NO: 28898 - DNA, 22 bp, synthetic construct
  misc_feature 1..22: note = chemically synthesized
  source 1..22: mol_type = other DNA
gagagacagaactaataggaga

SEQ ID NO: 28899 - DNA, 22 bp, synthetic construct
  misc_feature 1..22: note = chemically synthesized
  source 1..22: mol_type = other DNA
ataggagatagatagatagata

SEQ ID NO: 28900 - DNA, 22 bp, synthetic construct
  misc_feature 1..22: note = chemically synthesized
  source 1..22: mol_type = other DNA
agatataaaagggagtttatta

SEQ ID NO: 28901 - DNA, 22 bp, synthetic construct
  misc_feature 1..22: note = chemically synthesized
  source 1..22: mol_type = other DNA
gatataaaagggagtttattaa

SEQ ID NO: 28902 - DNA, 22 bp, synthetic construct
  misc_feature 1..22: note = chemically synthesized
  source 1..22: mol_type = other DNA
attaagtagtgttaacttacac

SEQ ID NO: 28903 - DNA, 22 bp, synthetic construct
  misc_feature 1..22: note = chemically synthesized
  source 1..22: mol_type = other DNA
ttaagtagtgttaacttacaca

SEQ ID NO: 28904 - DNA, 22 bp, synthetic construct
  misc_feature 1..22: note = chemically synthesized
  source 1..22: mol_type = other DNA
agtagtgttaacttacacaatc

SEQ ID NO: 28905 - DNA, 22 bp, synthetic construct
  misc_feature 1..22: note = chemically synthesized
  source 1..22: mol_type = other DNA
acttacacaatcacaaggtccc

SEQ ID NO: 28906 - DNA, 22 bp, synthetic construct
  misc_feature 1..22: note = chemically synthesized
  source 1..22: mol_type = other DNA
acacaatcacaaggtcccacaa

SEQ ID NO: 28907 - DNA, 22 bp, synthetic construct
  misc_feature 1..22: note = chemically synthesized
  source 1..22: mol_type = other DNA
cacaatcacaaggtcccacaat

SEQ ID NO: 28908 - DNA, 22 bp, synthetic construct
  misc_feature 1..22: note = chemically synthesized
  source 1..22: mol_type = other DNA
caagcagaggagcaaggaagcc

SEQ ID NO: 28909 - DNA, 22 bp, synthetic construct
  misc_feature 1..22: note = chemically synthesized
  source 1..22: mol_type = other DNA
aaggacttggagtccaatgttt

SEQ ID NO: 28910 - DNA, 22 bp, synthetic construct
  misc_feature 1..22: note = chemically synthesized
  source 1..22: mol_type = other DNA
ggagtccaatgtttgagggcag

SEQ ID NO: 28911 - DNA, 22 bp, synthetic construct
  misc_feature 1..22: note = chemically synthesized
  source 1..22: mol_type = other DNA
gagtccaatgtttgagggcagg

SEQ ID NO: 28912 - DNA, 22 bp, synthetic construct
  misc_feature 1..22: note = chemically synthesized
  source 1..22: mol_type = other DNA
gagggcaggaagcatccagcat

SEQ ID NO: 28913 - DNA, 22 bp, synthetic construct
  misc_feature 1..22: note = chemically synthesized
  source 1..22: mol_type = other DNA
agggcaggaagcatccagcatg

SEQ ID NO: 28914 - DNA, 22 bp, synthetic construct
  misc_feature 1..22: note = chemically synthesized
  source 1..22: mol_type = other DNA
ggaggctaagccagtccaggat

SEQ ID NO: 28915 - DNA, 22 bp, synthetic construct
  misc_feature 1..22: note = chemically synthesized
  source 1..22: mol_type = other DNA
gaggctaagccagtccaggatt

SEQ ID NO: 28916 - DNA, 22 bp, synthetic construct
  misc_feature 1..22: note = chemically synthesized
  source 1..22: mol_type = other DNA
agccagtccaggattttcacat

SEQ ID NO: 28917 - DNA, 22 bp, synthetic construct
  misc_feature 1..22: note = chemically synthesized
  source 1..22: mol_type = other DNA
tcacatgttttttttctgcctg

SEQ ID NO: 28918 - DNA, 22 bp, synthetic construct
  misc_feature 1..22: note = chemically synthesized
  source 1..22: mol_type = other DNA
cacatgttttttttctgcctgc

SEQ ID NO: 28919 - DNA, 22 bp, synthetic construct
  misc_feature 1..22: note = chemically synthesized
  source 1..22: mol_type = other DNA
acatgttttttttctgcctgct

SEQ ID NO: 28920 - DNA, 22 bp, synthetic construct
  misc_feature 1..22: note = chemically synthesized
  source 1..22: mol_type = other DNA
tttttctgcctgctttatatcc

SEQ ID NO: 28921 - DNA, 22 bp, synthetic construct
  misc_feature 1..22: note = chemically synthesized
  source 1..22: mol_type = other DNA
ttttctgcctgctttatatcct

SEQ ID NO: 28922 - DNA, 22 bp, synthetic construct
  misc_feature 1..22: note = chemically synthesized
  source 1..22: mol_type = other DNA
tttctgcctgctttatatcctg

SEQ ID NO: 28923 - DNA, 22 bp, synthetic construct
  misc_feature 1..22: note = chemically synthesized
  source 1..22: mol_type = other DNA
ttctgcctgctttatatcctgg

SEQ ID NO: 28924 - DNA, 22 bp, synthetic construct
  misc_feature 1..22: note = chemically synthesized
  source 1..22: mol_type = other DNA
tctgcctgctttatatcctggc

SEQ ID NO: 28925 - DNA, 22 bp, synthetic construct
  misc_feature 1..22: note = chemically synthesized
  source 1..22: mol_type = other DNA
ctgcctgctttatatcctggcc

SEQ ID NO: 28926 - DNA, 22 bp, synthetic construct
  misc_feature 1..22: note = chemically synthesized
  source 1..22: mol_type = other DNA
tgcctgctttatatcctggcca

SEQ ID NO: 28927 - DNA, 22 bp, synthetic construct
  misc_feature 1..22: note = chemically synthesized
  source 1..22: mol_type = other DNA
cctgctttatatcctggccaca

SEQ ID NO: 28928 - DNA, 22 bp, synthetic construct
  misc_feature 1..22: note = chemically synthesized
  source 1..22: mol_type = other DNA
ctttatatcctggccacactgg

SEQ ID NO: 28929 - DNA, 22 bp, synthetic construct
  misc_feature 1..22: note = chemically synthesized
  source 1..22: mol_type = other DNA
tatatcctggccacactggcaa

SEQ ID NO: 28930 - DNA, 22 bp, synthetic construct
  misc_feature 1..22: note = chemically synthesized
  source 1..22: mol_type = other DNA
atatcctggccacactggcaac

SEQ ID NO: 28931 - DNA, 22 bp, synthetic construct
  misc_feature 1..22: note = chemically synthesized
  source 1..22: mol_type = other DNA
tatcctggccacactggcaact

SEQ ID NO: 28932 - DNA, 22 bp, synthetic construct
  misc_feature 1..22: note = chemically synthesized
  source 1..22: mol_type = other DNA
gccacactggcaactgattaga

SEQ ID NO: 28933 - DNA, 22 bp, synthetic construct
  misc_feature 1..22: note = chemically synthesized
  source 1..22: mol_type = other DNA
gcaactgattagatggtgccca

SEQ ID NO: 28934 - DNA, 22 bp, synthetic construct
  misc_feature 1..22: note = chemically synthesized
  source 1..22: mol_type = other DNA
attagatggtgcccacccagat

SEQ ID NO: 28935 - DNA, 22 bp, synthetic construct
  misc_feature 1..22: note = chemically synthesized
  source 1..22: mol_type = other DNA
gatggtgcccacccagattaag

SEQ ID NO: 28936 - DNA, 22 bp, synthetic construct
  misc_feature 1..22: note = chemically synthesized
  source 1..22: mol_type = other DNA
agggtgggtctgcctttcccag

SEQ ID NO: 28937 - DNA, 22 bp, synthetic construct
  misc_feature 1..22: note = chemically synthesized
  source 1..22: mol_type = other DNA
cctttcccagcccactgactaa

SEQ ID NO: 28938 - DNA, 22 bp, synthetic construct
  misc_feature 1..22: note = chemically synthesized
  source 1..22: mol_type = other DNA
tcccagcccactgactaaaatg

SEQ ID NO: 28939 - DNA, 22 bp, synthetic construct
  misc_feature 1..22: note = chemically synthesized
  source 1..22: mol_type = other DNA
cccagcccactgactaaaatgt

SEQ ID NO: 28940 - DNA, 22 bp, synthetic construct
  misc_feature 1..22: note = chemically synthesized
  source 1..22: mol_type = other DNA
ccagcccactgactaaaatgtt

SEQ ID NO: 28941 - DNA, 22 bp, synthetic construct
  misc_feature 1..22: note = chemically synthesized
  source 1..22: mol_type = other DNA
actaaaatgttaatctcctttg

SEQ ID NO: 28942 - DNA, 22 bp, synthetic construct
  misc_feature 1..22: note = chemically synthesized
  source 1..22: mol_type = other DNA
aaatgttaatctcctttggcaa

SEQ ID NO: 28943 - DNA, 22 bp, synthetic construct
  misc_feature 1..22: note = chemically synthesized
  source 1..22: mol_type = other DNA
atctcctttggcaataccctca

SEQ ID NO: 28944 - DNA, 22 bp, synthetic construct
  misc_feature 1..22: note = chemically synthesized
  source 1..22: mol_type = other DNA
ctttggcaataccctcacagac

SEQ ID NO: 28945 - DNA, 22 bp, synthetic construct
  misc_feature 1..22: note = chemically synthesized
  source 1..22: mol_type = other DNA
tggcaataccctcacagacaca

SEQ ID NO: 28946 - DNA, 22 bp, synthetic construct
  misc_feature 1..22: note = chemically synthesized
  source 1..22: mol_type = other DNA
ggcaataccctcacagacacac

SEQ ID NO: 28947 - DNA, 22 bp, synthetic construct
  misc_feature 1..22: note = chemically synthesized
  source 1..22: mol_type = other DNA
gcaataccctcacagacacact

SEQ ID NO: 28948 - DNA, 22 bp, synthetic construct
  misc_feature 1..22: note = chemically synthesized
  source 1..22: mol_type = other DNA
acagacacactcaggatcaata

SEQ ID NO: 28949 - DNA, 22 bp, synthetic construct
  misc_feature 1..22: note = chemically synthesized
  source 1..22: mol_type = other DNA
aggatcaatactttgcacactt

SEQ ID NO: 28950 - DNA, 22 bp, synthetic construct
  misc_feature 1..22: note = chemically synthesized
  source 1..22: mol_type = other DNA
tgcacacttcaatccaatcaag

SEQ ID NO: 28951 - DNA, 22 bp, synthetic construct
  misc_feature 1..22: note = chemically synthesized
  source 1..22: mol_type = other DNA
gcacacttcaatccaatcaagt

SEQ ID NO: 28952 - DNA, 22 bp, synthetic construct
  misc_feature 1..22: note = chemically synthesized
  source 1..22: mol_type = other DNA
cacacttcaatccaatcaagtt

SEQ ID NO: 28953 - DNA, 22 bp, synthetic construct
  misc_feature 1..22: note = chemically synthesized
  source 1..22: mol_type = other DNA
caatccaatcaagttgacactc

SEQ ID NO: 28954 - DNA, 22 bp, synthetic construct
  misc_feature 1..22: note = chemically synthesized
  source 1..22: mol_type = other DNA
aatccaatcaagttgacactca

SEQ ID NO: 28955 - DNA, 22 bp, synthetic construct
  misc_feature 1..22: note = chemically synthesized
  source 1..22: mol_type = other DNA
acactcagtattaaccatcaca

SEQ ID NO: 28956 - DNA, 22 bp, synthetic construct
  misc_feature 1..22: note = chemically synthesized
  source 1..22: mol_type = other DNA
agtattaaccatcacaagtcca

SEQ ID NO: 28957 - DNA, 22 bp, synthetic construct
  misc_feature 1..22: note = chemically synthesized
  source 1..22: mol_type = other DNA
accatcacaagtccatcgcttg

SEQ ID NO: 28958 - DNA, 22 bp, synthetic construct
  misc_feature 1..22: note = chemically synthesized
  source 1..22: mol_type = other DNA
gtcaacttgagcctatacacat

SEQ ID NO: 28959 - DNA, 22 bp, synthetic construct
  misc_feature 1..22: note = chemically synthesized
  source 1..22: mol_type = other DNA
tcaacttgagcctatacacatc

SEQ ID NO: 28960 - DNA, 22 bp, synthetic construct
  misc_feature 1..22: note = chemically synthesized
  source 1..22: mol_type = other DNA
gagcctatacacatcccctgag

SEQ ID NO: 28961 - DNA, 22 bp, synthetic construct
  misc_feature 1..22: note = chemically synthesized
  source 1..22: mol_type = other DNA
agcctatacacatcccctgagg

SEQ ID NO: 28962 - DNA, 22 bp, synthetic construct
  misc_feature 1..22: note = chemically synthesized
  source 1..22: mol_type = other DNA
tacacatcccctgaggtcatac

SEQ ID NO: 28963 - DNA, 22 bp, synthetic construct
  misc_feature 1..22: note = chemically synthesized
  source 1..22: mol_type = other DNA
aggtcatacattatcttcaaat

SEQ ID NO: 28964 - DNA, 22 bp, synthetic construct
  misc_feature 1..22: note = chemically synthesized
  source 1..22: mol_type = other DNA
tcttcaaataaagacaacaata

SEQ ID NO: 28965 - DNA, 22 bp, synthetic construct
  misc_feature 1..22: note = chemically synthesized
  source 1..22: mol_type = other DNA
caaataaagacaacaataagtc

SEQ ID NO: 28966 - DNA, 22 bp, synthetic construct
  misc_feature 1..22: note = chemically synthesized
  source 1..22: mol_type = other DNA
aaataaagacaacaataagtca

SEQ ID NO: 28967 - DNA, 22 bp, synthetic construct
  misc_feature 1..22: note = chemically synthesized
  source 1..22: mol_type = other DNA
tgcctaacatactaaaactatc

SEQ ID NO: 28968 - DNA, 22 bp, synthetic construct
  misc_feature 1..22: note = chemically synthesized
  source 1..22: mol_type = other DNA
acatactaaaactatccttcgt

SEQ ID NO: 28969 - DNA, 22 bp, synthetic construct
  misc_feature 1..22: note = chemically synthesized
  source 1..22: mol_type = other DNA
aaactatccttcgtgcaattga

SEQ ID NO: 28970 - DNA, 22 bp, synthetic construct
  misc_feature 1..22: note = chemically synthesized
  source 1..22: mol_type = other DNA
tccttcgtgcaattgaaaatgc

SEQ ID NO: 28971 - DNA, 22 bp, synthetic construct
  misc_feature 1..22: note = chemically synthesized
  source 1..22: mol_type = other DNA
cgtgcaattgaaaatgcaccaa

SEQ ID NO: 28972 - DNA, 22 bp, synthetic construct
  misc_feature 1..22: note = chemically synthesized
  source 1..22: mol_type = other DNA
gtgcaattgaaaatgcaccaat

SEQ ID NO: 28973 - DNA, 22 bp, synthetic construct
  misc_feature 1..22: note = chemically synthesized
  source 1..22: mol_type = other DNA
aaaatgcaccaatccccattgc

SEQ ID NO: 28974 - DNA, 22 bp, synthetic construct
  misc_feature 1..22: note = chemically synthesized
  source 1..22: mol_type = other DNA
caaatgctattacataaactta

SEQ ID NO: 28975 - DNA, 22 bp, synthetic construct
  misc_feature 1..22: note = chemically synthesized
  source 1..22: mol_type = other DNA
ttacataaacttaacaatactt

SEQ ID NO: 28976 - DNA, 22 bp, synthetic construct
  misc_feature 1..22: note = chemically synthesized
  source 1..22: mol_type = other DNA
cataaacttaacaatacttaaa

SEQ ID NO: 28977 - DNA, 22 bp, synthetic construct
  misc_feature 1..22: note = chemically synthesized
  source 1..22: mol_type = other DNA
aacaatacttaaatgctgatat

SEQ ID NO: 28978 - DNA, 22 bp, synthetic construct
  misc_feature 1..22: note = chemically synthesized
  source 1..22: mol_type = other DNA
acaatacttaaatgctgatatg

SEQ ID NO: 28979 - DNA, 22 bp, synthetic construct
  misc_feature 1..22: note = chemically synthesized
  source 1..22: mol_type = other DNA
aaatgctgatatgaagtcaata

SEQ ID NO: 28980 - DNA, 22 bp, synthetic construct
  misc_feature 1..22: note = chemically synthesized
  source 1..22: mol_type = other DNA
aatgctgatatgaagtcaataa

SEQ ID NO: 28981 - DNA, 22 bp, synthetic construct
  misc_feature 1..22: note = chemically synthesized
  source 1..22: mol_type = other DNA
atatgaagtcaataaatcttat

SEQ ID NO: 28982 - DNA, 22 bp, synthetic construct
  misc_feature 1..22: note = chemically synthesized
  source 1..22: mol_type = other DNA
atgtcacatgataaaggaaaaa

SEQ ID NO: 28983 - DNA, 22 bp, synthetic construct
  misc_feature 1..22: note = chemically synthesized
  source 1..22: mol_type = other DNA
tgtcacatgataaaggaaaaag

SEQ ID NO: 28984 - DNA, 22 bp, synthetic construct
  misc_feature 1..22: note = chemically synthesized
  source 1..22: mol_type = other DNA
tcttagtacaagtgtatacaga

SEQ ID NO: 28985 - DNA, 22 bp, synthetic construct
  misc_feature 1..22: note = chemically synthesized
  source 1..22: mol_type = other DNA
cttagtacaagtgtatacagac

SEQ ID NO: 28986 - DNA, 22 bp, synthetic construct
  misc_feature 1..22: note = chemically synthesized
  source 1..22: mol_type = other DNA
ttagtacaagtgtatacagaca

SEQ ID NO: 28987 - DNA, 22 bp, synthetic construct
  misc_feature 1..22: note = chemically synthesized
  source 1..22: mol_type = other DNA
agtacaagtgtatacagacacg

SEQ ID NO: 28988 - DNA, 22 bp, synthetic construct
  misc_feature 1..22: note = chemically synthesized
  source 1..22: mol_type = other DNA
gtacaagtgtatacagacacga

SEQ ID NO: 28989 - DNA, 22 bp, synthetic construct
  misc_feature 1..22: note = chemically synthesized
  source 1..22: mol_type = other DNA
ttaacaaaagaaggaggaaata

SEQ ID NO: 28990 - DNA, 22 bp, synthetic construct
  misc_feature 1..22: note = chemically synthesized
  source 1..22: mol_type = other DNA
taacaaaagaaggaggaaatac

SEQ ID NO: 28991 - DNA, 22 bp, synthetic construct
  misc_feature 1..22: note = chemically synthesized
  source 1..22: mol_type = other DNA
aacaaaagaaggaggaaatact

SEQ ID NO: 28992 - DNA, 22 bp, synthetic construct
  misc_feature 1..22: note = chemically synthesized
  source 1..22: mol_type = other DNA
acaaaagaaggaggaaatactc

SEQ ID NO: 28993 - DNA, 22 bp, synthetic construct
  misc_feature 1..22: note = chemically synthesized
  source 1..22: mol_type = other DNA
atgacaattacagtccttgtat

SEQ ID NO: 28994 - DNA, 22 bp, synthetic construct
  misc_feature 1..22: note = chemically synthesized
  source 1..22: mol_type = other DNA
cagtccttgtatctgcaattgg

SEQ ID NO: 28995 - DNA, 22 bp, synthetic construct
  misc_feature 1..22: note = chemically synthesized
  source 1..22: mol_type = other DNA
gtatctgcaattggtcacgtga

SEQ ID NO: 28996 - DNA, 22 bp, synthetic construct
  misc_feature 1..22: note = chemically synthesized
  source 1..22: mol_type = other DNA
tatctgcaattggtcacgtgat

SEQ ID NO: 28997 - DNA, 22 bp, synthetic construct
  misc_feature 1..22: note = chemically synthesized
  source 1..22: mol_type = other DNA
caattggtcacgtgatcgtagc

SEQ ID NO: 28998 - DNA, 22 bp, synthetic construct
  misc_feature 1..22: note = chemically synthesized
  source 1..22: mol_type = other DNA
gtcacgtgatcgtagctggtat

SEQ ID NO: 28999 - DNA, 22 bp, synthetic construct
  misc_feature 1..22: note = chemically synthesized
  source 1..22: mol_type = other DNA
gtattgatgactaccttcttct

SEQ ID NO: 29000 - DNA, 22 bp, synthetic construct
  misc_feature 1..22: note = chemically synthesized
  source 1..22: mol_type = other DNA
atgactaccttcttctgctaca

SEQ ID NO: 29001 - DNA, 22 bp, synthetic construct
  misc_feature 1..22: note = chemically synthesized
  source 1..22: mol_type = other DNA
ccttcttctgctacatattctg

SEQ ID NO: 29002 - DNA, 22 bp, synthetic construct
  misc_feature 1..22: note = chemically synthesized
  source 1..22: mol_type = other DNA
cttctgctacatattctgtatt

SEQ ID NO: 29003 - DNA, 22 bp, synthetic construct
  misc_feature 1..22: note = chemically synthesized
  source 1..22: mol_type = other DNA
ttctgctacatattctgtattc

SEQ ID NO: 29004 - DNA, 22 bp, synthetic construct
  misc_feature 1..22: note = chemically synthesized
  source 1..22: mol_type = other DNA
ctgctacatattctgtattccc

SEQ ID NO: 29005 - DNA, 22 bp, synthetic construct
  misc_feature 1..22: note = chemically synthesized
  source 1..22: mol_type = other DNA
tgctacatattctgtattccct

SEQ ID NO: 29006 - DNA, 22 bp, synthetic construct
  misc_feature 1..22: note = chemically synthesized
  source 1..22: mol_type = other DNA
ctacatattctgtattcccttt

SEQ ID NO: 29007 - DNA, 22 bp, synthetic construct
  misc_feature 1..22: note = chemically synthesized
  source 1..22: mol_type = other DNA
catattctgtattccctttgcc

SEQ ID NO: 29008 - DNA, 22 bp, synthetic construct
  misc_feature 1..22: note = chemically synthesized
  source 1..22: mol_type = other DNA
tgtattccctttgccctcagca

SEQ ID NO: 29009 - DNA, 22 bp, synthetic construct
  misc_feature 1..22: note = chemically synthesized
  source 1..22: mol_type = other DNA
tattccctttgccctcagcaag

SEQ ID NO: 29010 - DNA, 22 bp, synthetic construct
  misc_feature 1..22: note = chemically synthesized
  source 1..22: mol_type = other DNA
cctttgccctcagcaagcacct

SEQ ID NO: 29011 - DNA, 22 bp, synthetic construct
  misc_feature 1..22: note = chemically synthesized
  source 1..22: mol_type = other DNA
tgccctcagcaagcacctcagc

SEQ ID NO: 29012 - DNA, 22 bp, synthetic construct
  misc_feature 1..22: note = chemically synthesized
  source 1..22: mol_type = other DNA
gccctcagcaagcacctcagca

SEQ ID NO: 29013 - DNA, 22 bp, synthetic construct
  misc_feature 1..22: note = chemically synthesized
  source 1..22: mol_type = other DNA
ccctcagcaagcacctcagcag

SEQ ID NO: 29014 - DNA, 22 bp, synthetic construct
  misc_feature 1..22: note = chemically synthesized
  source 1..22: mol_type = other DNA
agcaagcacctcagcaggtctt

SEQ ID NO: 29015 - DNA, 22 bp, synthetic construct
  misc_feature 1..22: note = chemically synthesized
  source 1..22: mol_type = other DNA
agcaggtcttgtcttttttttt

SEQ ID NO: 29016 - DNA, 22 bp, synthetic construct
  misc_feature 1..22: note = chemically synthesized
  source 1..22: mol_type = other DNA
gtcttttttttttttttttttc

SEQ ID NO: 29017 - DNA, 22 bp, synthetic construct
  misc_feature 1..22: note = chemically synthesized
  source 1..22: mol_type = other DNA
tcttttttttttttttttttcc

SEQ ID NO: 29018 - DNA, 22 bp, synthetic construct
  misc_feature 1..22: note = chemically synthesized
  source 1..22: mol_type = other DNA
ttttttttttttttttcctggt

SEQ ID NO: 29019 - DNA, 22 bp, synthetic construct
  misc_feature 1..22: note = chemically synthesized
  source 1..22: mol_type = other DNA
tttttttttttttttcctggtg

SEQ ID NO: 29020 - DNA, 22 bp, synthetic construct
  misc_feature 1..22: note = chemically synthesized
  source 1..22: mol_type = other DNA
ttttttttttttttcctggtgg

SEQ ID NO: 29021 - DNA, 22 bp, synthetic construct
  misc_feature 1..22: note = chemically synthesized
  source 1..22: mol_type = other DNA
tttttttttttttcctggtgga

SEQ ID NO: 29022 - DNA, 22 bp, synthetic construct
  misc_feature 1..22: note = chemically synthesized
  source 1..22: mol_type = other DNA
ttttttttttttcctggtggag

SEQ ID NO: 29023 - DNA, 22 bp, synthetic construct
  misc_feature 1..22: note = chemically synthesized
  source 1..22: mol_type = other DNA
tttttttttttcctggtggagt

SEQ ID NO: 29024 - DNA, 22 bp, synthetic construct
  misc_feature 1..22: note = chemically synthesized
  source 1..22: mol_type = other DNA
ttttttttttcctggtggagtg

SEQ ID NO: 29025 - DNA, 22 bp, synthetic construct
  misc_feature 1..22: note = chemically synthesized
  source 1..22: mol_type = other DNA
tttttttttcctggtggagtga

SEQ ID NO: 29026 - DNA, 22 bp, synthetic construct
  misc_feature 1..22: note = chemically synthesized
  source 1..22: mol_type = other DNA
ttttttttcctggtggagtgac

SEQ ID NO: 29027 - DNA, 22 bp, synthetic construct
  misc_feature 1..22: note = chemically synthesized
  source 1..22: mol_type = other DNA
tttttttcctggtggagtgacc

SEQ ID NO: 29028 - DNA, 22 bp, synthetic construct
  misc_feature 1..22: note = chemically synthesized
  source 1..22: mol_type = other DNA
ttttttcctggtggagtgaccc

SEQ ID NO: 29029 - DNA, 22 bp, synthetic construct
  misc_feature 1..22: note = chemically synthesized
  source 1..22: mol_type = other DNA
tttttcctggtggagtgaccca

SEQ ID NO: 29030 - DNA, 22 bp, synthetic construct
  misc_feature 1..22: note = chemically synthesized
  source 1..22: mol_type = other DNA
ttttcctggtggagtgacccaa

SEQ ID NO: 29031 - DNA, 22 bp, synthetic construct
  misc_feature 1..22: note = chemically synthesized
  source 1..22: mol_type = other DNA
tttcctggtggagtgacccaaa

SEQ ID NO: 29032 - DNA, 22 bp, synthetic construct
  misc_feature 1..22: note = chemically synthesized
  source 1..22: mol_type = other DNA
ttcctggtggagtgacccaaac

SEQ ID NO: 29033 - DNA, 22 bp, synthetic construct
  misc_feature 1..22: note = chemically synthesized
  source 1..22: mol_type = other DNA
tcctggtggagtgacccaaacc

SEQ ID NO: 29034 - DNA, 22 bp, synthetic construct
  misc_feature 1..22: note = chemically synthesized
  source 1..22: mol_type = other DNA
cctggtggagtgacccaaacct

SEQ ID NO: 29035 - DNA, 22 bp, synthetic construct
  misc_feature 1..22: note = chemically synthesized
  source 1..22: mol_type = other DNA
ctggtggagtgacccaaacctt

SEQ ID NO: 29036 - DNA, 22 bp, synthetic construct
  misc_feature 1..22: note = chemically synthesized
  source 1..22: mol_type = other DNA
gtggagtgacccaaacctttat

SEQ ID NO: 29037 - DNA, 22 bp, synthetic construct
  misc_feature 1..22: note = chemically synthesized
  source 1..22: mol_type = other DNA
tatttgtagtcctgcctggaat

SEQ ID NO: 29038 - DNA, 22 bp, synthetic construct
  misc_feature 1..22: note = chemically synthesized
  source 1..22: mol_type = other DNA
atttgtagtcctgcctggaatg

SEQ ID NO: 29039 - DNA, 22 bp, synthetic construct
  misc_feature 1..22: note = chemically synthesized
  source 1..22: mol_type = other DNA
tttgtagtcctgcctggaatgg

SEQ ID NO: 29040 - DNA, 22 bp, synthetic construct
  misc_feature 1..22: note = chemically synthesized
  source 1..22: mol_type = other DNA
gtagtcctgcctggaatggcct

SEQ ID NO: 29041 - DNA, 22 bp, synthetic construct
  misc_feature 1..22: note = chemically synthesized
  source 1..22: mol_type = other DNA
tagtcctgcctggaatggcctg

SEQ ID NO: 29042 - DNA, 22 bp, synthetic construct
  misc_feature 1..22: note = chemically synthesized
  source 1..22: mol_type = other DNA
cctggaatggcctgtagtagtt

SEQ ID NO: 29043 - DNA, 22 bp, synthetic construct
  misc_feature 1..22: note = chemically synthesized
  source 1..22: mol_type = other DNA
gaatggcctgtagtagtttccc

SEQ ID NO: 29044 - DNA, 22 bp, synthetic construct
  misc_feature 1..22: note = chemically synthesized
  source 1..22: mol_type = other DNA
tagtagtttcccactgacctta

SEQ ID NO: 29045 - DNA, 22 bp, synthetic construct
  misc_feature 1..22: note = chemically synthesized
  source 1..22: mol_type = other DNA
cccactgaccttaattccagga

SEQ ID NO: 29046 - DNA, 22 bp, synthetic construct
  misc_feature 1..22: note = chemically synthesized
  source 1..22: mol_type = other DNA
ccactgaccttaattccaggac

SEQ ID NO: 29047 - DNA, 22 bp, synthetic construct
  misc_feature 1..22: note = chemically synthesized
  source 1..22: mol_type = other DNA
accttaattccaggacatggta

SEQ ID NO: 29048 - DNA, 22 bp, synthetic construct
  misc_feature 1..22: note = chemically synthesized
  source 1..22: mol_type = other DNA
aattccaggacatggtaaaact

SEQ ID NO: 29049 - DNA, 22 bp, synthetic construct
  misc_feature 1..22: note = chemically synthesized
  source 1..22: mol_type = other DNA
attccaggacatggtaaaacta

SEQ ID NO: 29050 - DNA, 22 bp, synthetic construct
  misc_feature 1..22: note = chemically synthesized
  source 1..22: mol_type = other DNA
caggacatggtaaaactaagag

SEQ ID NO: 29051 - DNA, 22 bp, synthetic construct
  misc_feature 1..22: note = chemically synthesized
  source 1..22: mol_type = other DNA
agagacaccctaatggatctcc

SEQ ID NO: 29052 - DNA, 22 bp, synthetic construct
  misc_feature 1..22: note = chemically synthesized
  source 1..22: mol_type = other DNA
atggatctcctatattccatgc

SEQ ID NO: 29053 - DNA, 22 bp, synthetic construct
  misc_feature 1..22: note = chemically synthesized
  source 1..22: mol_type = other DNA
ctatattccatgcatacgcttc

SEQ ID NO: 29054 - DNA, 22 bp, synthetic construct
  misc_feature 1..22: note = chemically synthesized
  source 1..22: mol_type = other DNA
tattccatgcatacgcttcctt

SEQ ID NO: 29055 - DNA, 22 bp, synthetic construct
  misc_feature 1..22: note = chemically synthesized
  source 1..22: mol_type = other DNA
catgcatacgcttccttacctc

SEQ ID NO: 29056 - DNA, 22 bp, synthetic construct
  misc_feature 1..22: note = chemically synthesized
  source 1..22: mol_type = other DNA
ccttacctccattgtggagttg

SEQ ID NO: 29057 - DNA, 22 bp, synthetic construct
  misc_feature 1..22: note = chemically synthesized
  source 1..22: mol_type = other DNA
cttacctccattgtggagttgt

SEQ ID NO: 29058 - DNA, 22 bp, synthetic construct
  misc_feature 1..22: note = chemically synthesized
  source 1..22: mol_type = other DNA
acctccattgtggagttgtaga

SEQ ID NO: 29059 - DNA, 22 bp, synthetic construct
  misc_feature 1..22: note = chemically synthesized
  source 1..22: mol_type = other DNA
cctccattgtggagttgtagac

SEQ ID NO: 29060 - DNA, 22 bp, synthetic construct
  misc_feature 1..22: note = chemically synthesized
  source 1..22: mol_type = other DNA
cattgtggagttgtagactgat

SEQ ID NO: 29061 - DNA, 22 bp, synthetic construct
  misc_feature 1..22: note = chemically synthesized
  source 1..22: mol_type = other DNA
tggagttgtagactgatttcat

SEQ ID NO: 29062 - DNA, 22 bp, synthetic construct
  misc_feature 1..22: note = chemically synthesized
  source 1..22: mol_type = other DNA
tagactgatttcatcttgatag

SEQ ID NO: 29063 - DNA, 22 bp, synthetic construct
  misc_feature 1..22: note = chemically synthesized
  source 1..22: mol_type = other DNA
atttcatcttgatagtctgggt

SEQ ID NO: 29064 - DNA, 22 bp, synthetic construct
  misc_feature 1..22: note = chemically synthesized
  source 1..22: mol_type = other DNA
catcttgatagtctgggttaat

SEQ ID NO: 29065 - DNA, 22 bp, synthetic construct
  misc_feature 1..22: note = chemically synthesized
  source 1..22: mol_type = other DNA
atcttgatagtctgggttaatc

SEQ ID NO: 29066 - DNA, 22 bp, synthetic construct
  misc_feature 1..22: note = chemically synthesized
  source 1..22: mol_type = other DNA
gatagtctgggttaatcaccgc

SEQ ID NO: 29067 - DNA, 22 bp, synthetic construct
  misc_feature 1..22: note = chemically synthesized
  source 1..22: mol_type = other DNA
atagtctgggttaatcaccgca

SEQ ID NO: 29068 - DNA, 22 bp, synthetic construct
  misc_feature 1..22: note = chemically synthesized
  source 1..22: mol_type = other DNA
ggttaatcaccgcagccaacac

SEQ ID NO: 29069 - DNA, 22 bp, synthetic construct
  misc_feature 1..22: note = chemically synthesized
  source 1..22: mol_type = other DNA
atcaccgcagccaacactgtaa

SEQ ID NO: 29070 - DNA, 22 bp, synthetic construct
  misc_feature 1..22: note = chemically synthesized
  source 1..22: mol_type = other DNA
taactctcttcttagcctgttg

SEQ ID NO: 29071 - DNA, 22 bp, synthetic construct
  misc_feature 1..22: note = chemically synthesized
  source 1..22: mol_type = other DNA
tcttcttagcctgttgacttaa

SEQ ID NO: 29072 - DNA, 22 bp, synthetic construct
  misc_feature 1..22: note = chemically synthesized
  source 1..22: mol_type = other DNA
ttcttagcctgttgacttaaag

SEQ ID NO: 29073 - DNA, 22 bp, synthetic construct
  misc_feature 1..22: note = chemically synthesized
  source 1..22: mol_type = other DNA
cttagcctgttgacttaaaggt

SEQ ID NO: 29074 - DNA, 22 bp, synthetic construct
  misc_feature 1..22: note = chemically synthesized
  source 1..22: mol_type = other DNA
ttagcctgttgacttaaaggtg

SEQ ID NO: 29075 - DNA, 22 bp, synthetic construct
  misc_feature 1..22: note = chemically synthesized
  source 1..22: mol_type = other DNA
agcctgttgacttaaaggtggg

SEQ ID NO: 29076 - DNA, 22 bp, synthetic construct
  misc_feature 1..22: note = chemically synthesized
  source 1..22: mol_type = other DNA
gcctgttgacttaaaggtggga

SEQ ID NO: 29077 - DNA, 22 bp, synthetic construct
  misc_feature 1..22: note = chemically synthesized
  source 1..22: mol_type = other DNA
ttgacttaaaggtgggaggagc

SEQ ID NO: 29078 - DNA, 22 bp, synthetic construct
  misc_feature 1..22: note = chemically synthesized
  source 1..22: mol_type = other DNA
acttaaaggtgggaggagccca

SEQ ID NO: 29079 - DNA, 22 bp, synthetic construct
  misc_feature 1..22: note = chemically synthesized
  source 1..22: mol_type = other DNA
aaaggtgggaggagcccaaagt

SEQ ID NO: 29080 - DNA, 22 bp, synthetic construct
  misc_feature 1..22: note = chemically synthesized
  source 1..22: mol_type = other DNA
aaggtgggaggagcccaaagtg

SEQ ID NO: 29081 - DNA, 22 bp, synthetic construct
  misc_feature 1..22: note = chemically synthesized
  source 1..22: mol_type = other DNA
aatttgcagtttaatggaatca

SEQ ID NO: 29082 - DNA, 22 bp, synthetic construct
  misc_feature 1..22: note = chemically synthesized
  source 1..22: mol_type = other DNA
atttgcagtttaatggaatcat

SEQ ID NO: 29083 - DNA, 22 bp, synthetic construct
  misc_feature 1..22: note = chemically synthesized
  source 1..22: mol_type = other DNA
gcagtttaatggaatcattatt

SEQ ID NO: 29084 - DNA, 22 bp, synthetic construct
  misc_feature 1..22: note = chemically synthesized
  source 1..22: mol_type = other DNA
cagtttaatggaatcattattg

SEQ ID NO: 29085 - DNA, 22 bp, synthetic construct
  misc_feature 1..22: note = chemically synthesized
  source 1..22: mol_type = other DNA
aatggaatcattattgtgtcac

SEQ ID NO: 29086 - DNA, 22 bp, synthetic construct
  misc_feature 1..22: note = chemically synthesized
  source 1..22: mol_type = other DNA
atggaatcattattgtgtcacc

SEQ ID NO: 29087 - DNA, 22 bp, synthetic construct
  misc_feature 1..22: note = chemically synthesized
  source 1..22: mol_type = other DNA
ttgtgtcacctggcggcagtgt

SEQ ID NO: 29088 - DNA, 22 bp, synthetic construct
  misc_feature 1..22: note = chemically synthesized
  source 1..22: mol_type = other DNA
tgtcacctggcggcagtgttcc

SEQ ID NO: 29089 - DNA, 22 bp, synthetic construct
  misc_feature 1..22: note = chemically synthesized
  source 1..22: mol_type = other DNA
gcggcagtgttcctccctctgg

SEQ ID NO: 29090 - DNA, 22 bp, synthetic construct
  misc_feature 1..22: note = chemically synthesized
  source 1..22: mol_type = other DNA
ctccctctggaactaagacctc

SEQ ID NO: 29091 - DNA, 22 bp, synthetic construct
  misc_feature 1..22: note = chemically synthesized
  source 1..22: mol_type = other DNA
cctctggaactaagacctctaa

SEQ ID NO: 29092 - DNA, 22 bp, synthetic construct
  misc_feature 1..22: note = chemically synthesized
  source 1..22: mol_type = other DNA
tggaactaagacctctaagcca

SEQ ID NO: 29093 - DNA, 22 bp, synthetic construct
  misc_feature 1..22: note = chemically synthesized
  source 1..22: mol_type = other DNA
gaactaagacctctaagccagc

SEQ ID NO: 29094 - DNA, 22 bp, synthetic construct
  misc_feature 1..22: note = chemically synthesized
  source 1..22: mol_type = other DNA
agacctctaagccagcagaaca

SEQ ID NO: 29095 - DNA, 22 bp, synthetic construct
  misc_feature 1..22: note = chemically synthesized
  source 1..22: mol_type = other DNA
taagccagcagaacataatgcc

SEQ ID NO: 29096 - DNA, 22 bp, synthetic construct
  misc_feature 1..22: note = chemically synthesized
  source 1..22: mol_type = other DNA
agccagcagaacataatgccat

SEQ ID NO: 29097 - DNA, 22 bp, synthetic construct
  misc_feature 1..22: note = chemically synthesized
  source 1..22: mol_type = other DNA
tgctagtggaacactaggggtg

SEQ ID NO: 29098 - DNA, 22 bp, synthetic construct
  misc_feature 1..22: note = chemically synthesized
  source 1..22: mol_type = other DNA
gctagtggaacactaggggtga

SEQ ID NO: 29099 - DNA, 22 bp, synthetic construct
  misc_feature 1..22: note = chemically synthesized
  source 1..22: mol_type = other DNA
ctagtggaacactaggggtgat

SEQ ID NO: 29100 - DNA, 22 bp, synthetic construct
  misc_feature 1..22: note = chemically synthesized
  source 1..22: mol_type = other DNA
gtggaacactaggggtgatggt

SEQ ID NO: 29101 - DNA, 22 bp, synthetic construct
  misc_feature 1..22: note = chemically synthesized
  source 1..22: mol_type = other DNA
ggggtgatggtgagtggtgcca

SEQ ID NO: 29102 - DNA, 22 bp, synthetic construct
  misc_feature 1..22: note = chemically synthesized
  source 1..22: mol_type = other DNA
ccacttccacttccaccctttg

SEQ ID NO: 29103 - DNA, 22 bp, synthetic construct
  misc_feature 1..22: note = chemically synthesized
  source 1..22: mol_type = other DNA
cacttccacttccaccctttga

SEQ ID NO: 29104 - DNA, 22 bp, synthetic construct
  misc_feature 1..22: note = chemically synthesized
  source 1..22: mol_type = other DNA
ccacttccaccctttgattcct

SEQ ID NO: 29105 - DNA, 22 bp, synthetic construct
  misc_feature 1..22: note = chemically synthesized
  source 1..22: mol_type = other DNA
cacttccaccctttgattcctg

SEQ ID NO: 29106 - DNA, 22 bp, synthetic construct
  misc_feature 1..22: note = chemically synthesized
  source 1..22: mol_type = other DNA
ccaccctttgattcctggaccc

SEQ ID NO: 29107 - DNA, 22 bp, synthetic construct
  misc_feature 1..22: note = chemically synthesized
  source 1..22: mol_type = other DNA
caccctttgattcctggacccg

SEQ ID NO: 29108 - DNA, 22 bp, synthetic construct
  misc_feature 1..22: note = chemically synthesized
  source 1..22: mol_type = other DNA
tgattcctggacccgtgaatcc

SEQ ID NO: 29109 - DNA, 22 bp, synthetic construct
  misc_feature 1..22: note = chemically synthesized
  source 1..22: mol_type = other DNA
gattcctggacccgtgaatcct

SEQ ID NO: 29110 - DNA, 22 bp, synthetic construct
  misc_feature 1..22: note = chemically synthesized
  source 1..22: mol_type = other DNA
attcctggacccgtgaatcctg

SEQ ID NO: 29111 - DNA, 22 bp, synthetic construct
  misc_feature 1..22: note = chemically synthesized
  source 1..22: mol_type = other DNA
ctggacccgtgaatcctgtcta

SEQ ID NO: 29112 - DNA, 22 bp, synthetic construct
  misc_feature 1..22: note = chemically synthesized
  source 1..22: mol_type = other DNA
gacccgtgaatcctgtctatgg

SEQ ID NO: 29113 - DNA, 22 bp, synthetic construct
  misc_feature 1..22: note = chemically synthesized
  source 1..22: mol_type = other DNA
tctatgggagaaacagtaccat

SEQ ID NO: 29114 - DNA, 22 bp, synthetic construct
  misc_feature 1..22: note = chemically synthesized
  source 1..22: mol_type = other DNA
tgggagaaacagtaccatatat

SEQ ID NO: 29115 - DNA, 22 bp, synthetic construct
  misc_feature 1..22: note = chemically synthesized
  source 1..22: mol_type = other DNA
gacactgattcagagcatacac

SEQ ID NO: 29116 - DNA, 22 bp, synthetic construct
  misc_feature 1..22: note = chemically synthesized
  source 1..22: mol_type = other DNA
attcagagcatacacagccttc

SEQ ID NO: 29117 - DNA, 22 bp, synthetic construct
  misc_feature 1..22: note = chemically synthesized
  source 1..22: mol_type = other DNA
agagcatacacagccttctgga

SEQ ID NO: 29118 - DNA, 22 bp, synthetic construct
  misc_feature 1..22: note = chemically synthesized
  source 1..22: mol_type = other DNA
ctggagaactttgccccaggcc

SEQ ID NO: 29119 - DNA, 22 bp, synthetic construct
  misc_feature 1..22: note = chemically synthesized
  source 1..22: mol_type = other DNA
tggagaactttgccccaggcct

SEQ ID NO: 29120 - DNA, 22 bp, synthetic construct
  misc_feature 1..22: note = chemically synthesized
  source 1..22: mol_type = other DNA
gagaactttgccccaggcctgc

SEQ ID NO: 29121 - DNA, 22 bp, synthetic construct
  misc_feature 1..22: note = chemically synthesized
  source 1..22: mol_type = other DNA
tgccccaggcctgcaaagtatt

SEQ ID NO: 29122 - DNA, 22 bp, synthetic construct
  misc_feature 1..22: note = chemically synthesized
  source 1..22: mol_type = other DNA
gccccaggcctgcaaagtattg

SEQ ID NO: 29123 - DNA, 22 bp, synthetic construct
  misc_feature 1..22: note = chemically synthesized
  source 1..22: mol_type = other DNA
ccccaggcctgcaaagtattgt

SEQ ID NO: 29124 - DNA, 22 bp, synthetic construct
  misc_feature 1..22: note = chemically synthesized
  source 1..22: mol_type = other DNA
caaagtattgtcacctagttgg

SEQ ID NO: 29125 - DNA, 22 bp, synthetic construct
  misc_feature 1..22: note = chemically synthesized
  source 1..22: mol_type = other DNA
tcacctagttggcattgtaatc

SEQ ID NO: 29126 - DNA, 22 bp, synthetic construct
  misc_feature 1..22: note = chemically synthesized
  source 1..22: mol_type = other DNA
gttggcattgtaatcgtgactt

SEQ ID NO: 29127 - DNA, 22 bp, synthetic construct
  misc_feature 1..22: note = chemically synthesized
  source 1..22: mol_type = other DNA
gcattgtaatcgtgacttcaaa

SEQ ID NO: 29128 - DNA, 22 bp, synthetic construct
  misc_feature 1..22: note = chemically synthesized
  source 1..22: mol_type = other DNA
taatcgtgacttcaaaaggcca

SEQ ID NO: 29129 - DNA, 22 bp, synthetic construct
  misc_feature 1..22: note = chemically synthesized
  source 1..22: mol_type = other DNA
caaaaggccattcaaaagctgc

SEQ ID NO: 29130 - DNA, 22 bp, synthetic construct
  misc_feature 1..22: note = chemically synthesized
  source 1..22: mol_type = other DNA
aaaaggccattcaaaagctgct

SEQ ID NO: 29131 - DNA, 22 bp, synthetic construct
  misc_feature 1..22: note = chemically synthesized
  source 1..22: mol_type = other DNA
aaaagctgcttcaggatgatag

SEQ ID NO: 29132 - DNA, 22 bp, synthetic construct
  misc_feature 1..22: note = chemically synthesized
  source 1..22: mol_type = other DNA
cttcaggatgatagggatcatg

SEQ ID NO: 29133 - DNA, 22 bp, synthetic construct
  misc_feature 1..22: note = chemically synthesized
  source 1..22: mol_type = other DNA
caggatgatagggatcatggta

SEQ ID NO: 29134 - DNA, 22 bp, synthetic construct
  misc_feature 1..22: note = chemically synthesized
  source 1..22: mol_type = other DNA
aggatgatagggatcatggtaa

SEQ ID NO: 29135 - DNA, 22 bp, synthetic construct
  misc_feature 1..22: note = chemically synthesized
  source 1..22: mol_type = other DNA
catgagcatgagcccactgtca

SEQ ID NO: 29136 - DNA, 22 bp, synthetic construct
  misc_feature 1..22: note = chemically synthesized
  source 1..22: mol_type = other DNA
tcacacttctttagccataaag

SEQ ID NO: 29137 - DNA, 22 bp, synthetic construct
  misc_feature 1..22: note = chemically synthesized
  source 1..22: mol_type = other DNA
ctttagccataaagtgagtggc

SEQ ID NO: 29138 - DNA, 22 bp, synthetic construct
  misc_feature 1..22: note = chemically synthesized
  source 1..22: mol_type = other DNA
tttagccataaagtgagtggct

SEQ ID NO: 29139 - DNA, 22 bp, synthetic construct
  misc_feature 1..22: note = chemically synthesized
  source 1..22: mol_type = other DNA
tagccataaagtgagtggcttg

SEQ ID NO: 29140 - DNA, 22 bp, synthetic construct
  misc_feature 1..22: note = chemically synthesized
  source 1..22: mol_type = other DNA
agccataaagtgagtggcttgg

SEQ ID NO: 29141 - DNA, 22 bp, synthetic construct
  misc_feature 1..22: note = chemically synthesized
  source 1..22: mol_type = other DNA
gccataaagtgagtggcttggt

SEQ ID NO: 29142 - DNA, 22 bp, synthetic construct
  misc_feature 1..22: note = chemically synthesized
  source 1..22: mol_type = other DNA
ggtcagaagcaatgctgtgtgg

SEQ ID NO: 29143 - DNA, 22 bp, synthetic construct
  misc_feature 1..22: note = chemically synthesized
  source 1..22: mol_type = other DNA
gtcagaagcaatgctgtgtgga

SEQ ID NO: 29144 - DNA, 22 bp, synthetic construct
  misc_feature 1..22: note = chemically synthesized
  source 1..22: mol_type = other DNA
tgtggaataccatgacagtgga

SEQ ID NO: 29145 - DNA, 22 bp, synthetic construct
  misc_feature 1..22: note = chemically synthesized
  source 1..22: mol_type = other DNA
tgtgattccatggatggtagtc

SEQ ID NO: 29146 - DNA, 22 bp, synthetic construct
  misc_feature 1..22: note = chemically synthesized
  source 1..22: mol_type = other DNA
tgattccatggatggtagtctt

SEQ ID NO: 29147 - DNA, 22 bp, synthetic construct
  misc_feature 1..22: note = chemically synthesized
  source 1..22: mol_type = other DNA
catggatggtagtcttggcata

SEQ ID NO: 29148 - DNA, 22 bp, synthetic construct
  misc_feature 1..22: note = chemically synthesized
  source 1..22: mol_type = other DNA
ggcataagcattgagttcagga

SEQ ID NO: 29149 - DNA, 22 bp, synthetic construct
  misc_feature 1..22: note = chemically synthesized
  source 1..22: mol_type = other DNA
gcataagcattgagttcaggat

SEQ ID NO: 29150 - DNA, 22 bp, synthetic construct
  misc_feature 1..22: note = chemically synthesized
  source 1..22: mol_type = other DNA
agttcaggattgggaaacccat

SEQ ID NO: 29151 - DNA, 22 bp, synthetic construct
  misc_feature 1..22: note = chemically synthesized
  source 1..22: mol_type = other DNA
aggattgggaaacccatatcca

SEQ ID NO: 29152 - DNA, 22 bp, synthetic construct
  misc_feature 1..22: note = chemically synthesized
  source 1..22: mol_type = other DNA
ggaaacccatatccagagtaag

SEQ ID NO: 29153 - DNA, 22 bp, synthetic construct
  misc_feature 1..22: note = chemically synthesized
  source 1..22: mol_type = other DNA
ttccagtgaggacaagcctctg

SEQ ID NO: 29154 - DNA, 22 bp, synthetic construct
  misc_feature 1..22: note = chemically synthesized
  source 1..22: mol_type = other DNA
cagtgaggacaagcctctgccc

SEQ ID NO: 29155 - DNA, 22 bp, synthetic construct
  misc_feature 1..22: note = chemically synthesized
  source 1..22: mol_type = other DNA
tgccctttccatgatggaagag

SEQ ID NO: 29156 - DNA, 22 bp, synthetic construct
  misc_feature 1..22: note = chemically synthesized
  source 1..22: mol_type = other DNA
ccctttccatgatggaagaggt

SEQ ID NO: 29157 - DNA, 22 bp, synthetic construct
  misc_feature 1..22: note = chemically synthesized
  source 1..22: mol_type = other DNA
tccatgatggaagaggtccaat

SEQ ID NO: 29158 - DNA, 22 bp, synthetic construct
  misc_feature 1..22: note = chemically synthesized
  source 1..22: mol_type = other DNA
ccatgatggaagaggtccaata

SEQ ID NO: 29159 - DNA, 22 bp, synthetic construct
  misc_feature 1..22: note = chemically synthesized
  source 1..22: mol_type = other DNA
catgatggaagaggtccaatat

SEQ ID NO: 29160 - DNA, 22 bp, synthetic construct
  misc_feature 1..22: note = chemically synthesized
  source 1..22: mol_type = other DNA
ccaccaggtagctggctgatca

SEQ ID NO: 29161 - DNA, 22 bp, synthetic construct
  misc_feature 1..22: note = chemically synthesized
  source 1..22: mol_type = other DNA
gctgatcaccccgaggaatggt

SEQ ID NO: 29162 - DNA, 22 bp, synthetic construct
  misc_feature 1..22: note = chemically synthesized
  source 1..22: mol_type = other DNA
atcaccccgaggaatggtgcca

SEQ ID NO: 29163 - DNA, 22 bp, synthetic construct
  misc_feature 1..22: note = chemically synthesized
  source 1..22: mol_type = other DNA
agtgttggtctctgatgctggc

SEQ ID NO: 29164 - DNA, 22 bp, synthetic construct
  misc_feature 1..22: note = chemically synthesized
  source 1..22: mol_type = other DNA
gtgttggtctctgatgctggca

SEQ ID NO: 29165 - DNA, 22 bp, synthetic construct
  misc_feature 1..22: note = chemically synthesized
  source 1..22: mol_type = other DNA
gtctctgatgctggcaagcagt

SEQ ID NO: 29166 - DNA, 22 bp, synthetic construct
  misc_feature 1..22: note = chemically synthesized
  source 1..22: mol_type = other DNA
tgatgctggcaagcagtggctg

SEQ ID NO: 29167 - DNA, 22 bp, synthetic construct
  misc_feature 1..22: note = chemically synthesized
  source 1..22: mol_type = other DNA
atgctggcaagcagtggctgtg

SEQ ID NO: 29168 - DNA, 22 bp, synthetic construct
  misc_feature 1..22: note = chemically synthesized
  source 1..22: mol_type = other DNA
gcaagcagtggctgtggccagg

SEQ ID NO: 29169 - DNA, 22 bp, synthetic construct
  misc_feature 1..22: note = chemically synthesized
  source 1..22: mol_type = other DNA
tggccaggtcagctttggtgag

SEQ ID NO: 29170 - DNA, 22 bp, synthetic construct
  misc_feature 1..22: note = chemically synthesized
  source 1..22: mol_type = other DNA
tggtgagtggaagtccatgttg

SEQ ID NO: 29171 - DNA, 22 bp, synthetic construct
  misc_feature 1..22: note = chemically synthesized
  source 1..22: mol_type = other DNA
ggtgagtggaagtccatgttgc

SEQ ID NO: 29172 - DNA, 22 bp, synthetic construct
  misc_feature 1..22: note = chemically synthesized
  source 1..22: mol_type = other DNA
gtgagtggaagtccatgttgct

SEQ ID NO: 29173 - DNA, 22 bp, synthetic construct
  misc_feature 1..22: note = chemically synthesized
  source 1..22: mol_type = other DNA
ctgagcccaagcataacttcca

SEQ ID NO: 29174 - DNA, 22 bp, synthetic construct
  misc_feature 1..22: note = chemically synthesized
  source 1..22: mol_type = other DNA
agcccaagcataacttccatcc

SEQ ID NO: 29175 - DNA, 22 bp, synthetic construct
  misc_feature 1..22: note = chemically synthesized
  source 1..22: mol_type = other DNA
ccatccctgcaactgtggccac

SEQ ID NO: 29176 - DNA, 22 bp, synthetic construct
  misc_feature 1..22: note = chemically synthesized
  source 1..22: mol_type = other DNA
catccctgcaactgtggccact

SEQ ID NO: 29177 - DNA, 22 bp, synthetic construct
  misc_feature 1..22: note = chemically synthesized
  source 1..22: mol_type = other DNA
caactgtggccactttgttcat

SEQ ID NO: 29178 - DNA, 22 bp, synthetic construct
  misc_feature 1..22: note = chemically synthesized
  source 1..22: mol_type = other DNA
tggccactttgttcatgggtcc

SEQ ID NO: 29179 - DNA, 22 bp, synthetic construct
  misc_feature 1..22: note = chemically synthesized
  source 1..22: mol_type = other DNA
tgttcatgggtccattggacga

SEQ ID NO: 29180 - DNA, 22 bp, synthetic construct
  misc_feature 1..22: note = chemically synthesized
  source 1..22: mol_type = other DNA
gttcatgggtccattggacgat

SEQ ID NO: 29181 - DNA, 22 bp, synthetic construct
  misc_feature 1..22: note = chemically synthesized
  source 1..22: mol_type = other DNA
ttcatgggtccattggacgatg

SEQ ID NO: 29182 - DNA, 22 bp, synthetic construct
  misc_feature 1..22: note = chemically synthesized
  source 1..22: mol_type = other DNA
atgggtccattggacgatgaca

SEQ ID NO: 29183 - DNA, 22 bp, synthetic construct
  misc_feature 1..22: note = chemically synthesized
  source 1..22: mol_type = other DNA
gacgatgacatgagtggcctgg

SEQ ID NO: 29184 - DNA, 22 bp, synthetic construct
  misc_feature 1..22: note = chemically synthesized
  source 1..22: mol_type = other DNA
ggaaaaggctgagtggtgtcca

SEQ ID NO: 29185 - DNA, 22 bp, synthetic construct
  misc_feature 1..22: note = chemically synthesized
  source 1..22: mol_type = other DNA
agtggtgtccacagaattgatc

SEQ ID NO: 29186 - DNA, 22 bp, synthetic construct
  misc_feature 1..22: note = chemically synthesized
  source 1..22: mol_type = other DNA
atcatcctatccacttgattat

SEQ ID NO: 29187 - DNA, 22 bp, synthetic construct
  misc_feature 1..22: note = chemically synthesized
  source 1..22: mol_type = other DNA
tccacttgattattaaaatcct

SEQ ID NO: 29188 - DNA, 22 bp, synthetic construct
  misc_feature 1..22: note = chemically synthesized
  source 1..22: mol_type = other DNA
gattattaaaatcctcttctgc

SEQ ID NO: 29189 - DNA, 22 bp, synthetic construct
  misc_feature 1..22: note = chemically synthesized
  source 1..22: mol_type = other DNA
attattaaaatcctcttctgct

SEQ ID NO: 29190 - DNA, 22 bp, synthetic construct
  misc_feature 1..22: note = chemically synthesized
  source 1..22: mol_type = other DNA
ttaaaatcctcttctgctgagg

SEQ ID NO: 29191 - DNA, 22 bp, synthetic construct
  misc_feature 1..22: note = chemically synthesized
  source 1..22: mol_type = other DNA
aaatcctcttctgctgaggtca

SEQ ID NO: 29192 - DNA, 22 bp, synthetic construct
  misc_feature 1..22: note = chemically synthesized
  source 1..22: mol_type = other DNA
ttctgctgaggtcacccattgg

SEQ ID NO: 29193 - DNA, 22 bp, synthetic construct
  misc_feature 1..22: note = chemically synthesized
  source 1..22: mol_type = other DNA
ctgctgaggtcacccattggtg

SEQ ID NO: 29194 - DNA, 22 bp, synthetic construct
  misc_feature 1..22: note = chemically synthesized
  source 1..22: mol_type = other DNA
tgctgaggtcacccattggtga

SEQ ID NO: 29195 - DNA, 22 bp, synthetic construct
  misc_feature 1..22: note = chemically synthesized
  source 1..22: mol_type = other DNA
ctgaggtcacccattggtgagc

SEQ ID NO: 29196 - DNA, 22 bp, synthetic construct
  misc_feature 1..22: note = chemically synthesized
  source 1..22: mol_type = other DNA
aggtcacccattggtgagcact

SEQ ID NO: 29197 - DNA, 22 bp, synthetic construct
  misc_feature 1..22: note = chemically synthesized
  source 1..22: mol_type = other DNA
gtgagcactcacatgggatgaa

SEQ ID NO: 29198 - DNA, 22 bp, synthetic construct
  misc_feature 1..22: note = chemically synthesized
  source 1..22: mol_type = other DNA
acatgggatgaaaatatctttg

SEQ ID NO: 29199 - DNA, 22 bp, synthetic construct
  misc_feature 1..22: note = chemically synthesized
  source 1..22: mol_type = other DNA
tgtagtttttgactaatcatag

SEQ ID NO: 29200 - DNA, 22 bp, synthetic construct
  misc_feature 1..22: note = chemically synthesized
  source 1..22: mol_type = other DNA
gtagtttttgactaatcataga

SEQ ID NO: 29201 - DNA, 22 bp, synthetic construct
  misc_feature 1..22: note = chemically synthesized
  source 1..22: mol_type = other DNA
tagtttttgactaatcatagag

SEQ ID NO: 29202 - DNA, 22 bp, synthetic construct
  misc_feature 1..22: note = chemically synthesized
  source 1..22: mol_type = other DNA
ttgactaatcatagaggtccat

SEQ ID NO: 29203 - DNA, 22 bp, synthetic construct
  misc_feature 1..22: note = chemically synthesized
  source 1..22: mol_type = other DNA
tgactaatcatagaggtccatc

SEQ ID NO: 29204 - DNA, 22 bp, synthetic construct
  misc_feature 1..22: note = chemically synthesized
  source 1..22: mol_type = other DNA
gactaatcatagaggtccatcc

SEQ ID NO: 29205 - DNA, 22 bp, synthetic construct
  misc_feature 1..22: note = chemically synthesized
  source 1..22: mol_type = other DNA
actaatcatagaggtccatcca

SEQ ID NO: 29206 - DNA, 22 bp, synthetic construct
  misc_feature 1..22: note = chemically synthesized
  source 1..22: mol_type = other DNA
atcatagaggtccatccacata

SEQ ID NO: 29207 - DNA, 22 bp, synthetic construct
  misc_feature 1..22: note = chemically synthesized
  source 1..22: mol_type = other DNA
ttccccaaatttctttgtcatc

SEQ ID NO: 29208 - DNA, 22 bp, synthetic construct
  misc_feature 1..22: note = chemically synthesized
  source 1..22: mol_type = other DNA
ccccaaatttctttgtcatcaa

SEQ ID NO: 29209 - DNA, 22 bp, synthetic construct
  misc_feature 1..22: note = chemically synthesized
  source 1..22: mol_type = other DNA
cccaaatttctttgtcatcaat

SEQ ID NO: 29210 - DNA, 22 bp, synthetic construct
  misc_feature 1..22: note = chemically synthesized
  source 1..22: mol_type = other DNA
ctttgtcatcaattttccagtc

SEQ ID NO: 29211 - DNA, 22 bp, synthetic construct
  misc_feature 1..22: note = chemically synthesized
  source 1..22: mol_type = other DNA
tttgtcatcaattttccagtca

SEQ ID NO: 29212 - DNA, 22 bp, synthetic construct
  misc_feature 1..22: note = chemically synthesized
  source 1..22: mol_type = other DNA
tgtcatcaattttccagtcatg

SEQ ID NO: 29213 - DNA, 22 bp, synthetic construct
  misc_feature 1..22: note = chemically synthesized
  source 1..22: mol_type = other DNA
gtcatcaattttccagtcatgc

SEQ ID NO: 29214 - DNA, 22 bp, synthetic construct
  misc_feature 1..22: note = chemically synthesized
  source 1..22: mol_type = other DNA
tcatcaattttccagtcatgct

SEQ ID NO: 29215 - DNA, 22 bp, synthetic construct
  misc_feature 1..22: note = chemically synthesized
  source 1..22: mol_type = other DNA
tccagtcatgctttttccaagt

SEQ ID NO: 29216 - DNA, 22 bp, synthetic construct
  misc_feature 1..22: note = chemically synthesized
  source 1..22: mol_type = other DNA
ccagtcatgctttttccaagtc

SEQ ID NO: 29217 - DNA, 22 bp, synthetic construct
  misc_feature 1..22: note = chemically synthesized
  source 1..22: mol_type = other DNA
cagtcatgctttttccaagtcc

SEQ ID NO: 29218 - DNA, 22 bp, synthetic construct
  misc_feature 1..22: note = chemically synthesized
  source 1..22: mol_type = other DNA
tttccaagtccctgaccatcta

SEQ ID NO: 29219 - DNA, 22 bp, synthetic construct
  misc_feature 1..22: note = chemically synthesized
  source 1..22: mol_type = other DNA
ttccaagtccctgaccatctag

SEQ ID NO: 29220 - DNA, 22 bp, synthetic construct
  misc_feature 1..22: note = chemically synthesized
  source 1..22: mol_type = other DNA
tccaagtccctgaccatctagc

SEQ ID NO: 29221 - DNA, 22 bp, synthetic construct
  misc_feature 1..22: note = chemically synthesized
  source 1..22: mol_type = other DNA
ccaagtccctgaccatctagcc

SEQ ID NO: 29222 - DNA, 22 bp, synthetic construct
  misc_feature 1..22: note = chemically synthesized
  source 1..22: mol_type = other DNA
caagtccctgaccatctagcca

SEQ ID NO: 29223 - DNA, 22 bp, synthetic construct
  misc_feature 1..22: note = chemically synthesized
  source 1..22: mol_type = other DNA
accatctagccaaacctttggc

SEQ ID NO: 29224 - DNA, 22 bp, synthetic construct
  misc_feature 1..22: note = chemically synthesized
  source 1..22: mol_type = other DNA
gccaaacctttggctacagccc

SEQ ID NO: 29225 - DNA, 22 bp, synthetic construct
  misc_feature 1..22: note = chemically synthesized
  source 1..22: mol_type = other DNA
tggctacagcccatgaataagt

SEQ ID NO: 29226 - DNA, 22 bp, synthetic construct
  misc_feature 1..22: note = chemically synthesized
  source 1..22: mol_type = other DNA
ggctacagcccatgaataagta

SEQ ID NO: 29227 - DNA, 22 bp, synthetic construct
  misc_feature 1..22: note = chemically synthesized
  source 1..22: mol_type = other DNA
gctacagcccatgaataagtat

SEQ ID NO: 29228 - DNA, 22 bp, synthetic construct
  misc_feature 1..22: note = chemically synthesized
  source 1..22: mol_type = other DNA
cagcccatgaataagtatataa

SEQ ID NO: 29229 - DNA, 22 bp, synthetic construct
  misc_feature 1..22: note = chemically synthesized
  source 1..22: mol_type = other DNA
gccatttctccttctgtgcaaa

SEQ ID NO: 29230 - DNA, 22 bp, synthetic construct
  misc_feature 1..22: note = chemically synthesized
  source 1..22: mol_type = other DNA
ctccttctgtgcaaagtgcaca

SEQ ID NO: 29231 - DNA, 22 bp, synthetic construct
  misc_feature 1..22: note = chemically synthesized
  source 1..22: mol_type = other DNA
tccttctgtgcaaagtgcacaa

SEQ ID NO: 29232 - DNA, 22 bp, synthetic construct
  misc_feature 1..22: note = chemically synthesized
  source 1..22: mol_type = other DNA
cttctgtgcaaagtgcacaacc

SEQ ID NO: 29233 - DNA, 22 bp, synthetic construct
  misc_feature 1..22: note = chemically synthesized
  source 1..22: mol_type = other DNA
ctgtgcaaagtgcacaaccagg

SEQ ID NO: 29234 - DNA, 22 bp, synthetic construct
  misc_feature 1..22: note = chemically synthesized
  source 1..22: mol_type = other DNA
tgtgcaaagtgcacaaccaggc

SEQ ID NO: 29235 - DNA, 22 bp, synthetic construct
  misc_feature 1..22: note = chemically synthesized
  source 1..22: mol_type = other DNA
tgcaaagtgcacaaccaggcac

SEQ ID NO: 29236 - DNA, 22 bp, synthetic construct
  misc_feature 1..22: note = chemically synthesized
  source 1..22: mol_type = other DNA
ctcaaagttctgccaactagga

SEQ ID NO: 29237 - DNA, 22 bp, synthetic construct
  misc_feature 1..22: note = chemically synthesized
  source 1..22: mol_type = other DNA
aaagttctgccaactaggaaga

SEQ ID NO: 29238 - DNA, 22 bp, synthetic construct
  misc_feature 1..22: note = chemically synthesized
  source 1..22: mol_type = other DNA
tgccaactaggaagatttccct

SEQ ID NO: 29239 - DNA, 22 bp, synthetic construct
  misc_feature 1..22: note = chemically synthesized
  source 1..22: mol_type = other DNA
ccaactaggaagatttcccttc

SEQ ID NO: 29240 - DNA, 22 bp, synthetic construct
  misc_feature 1..22: note = chemically synthesized
  source 1..22: mol_type = other DNA
ggaagatttcccttcaccgttg

SEQ ID NO: 29241 - DNA, 22 bp, synthetic construct
  misc_feature 1..22: note = chemically synthesized
  source 1..22: mol_type = other DNA
cccttcaccgttgtccttcagg

SEQ ID NO: 29242 - DNA, 22 bp, synthetic construct
  misc_feature 1..22: note = chemically synthesized
  source 1..22: mol_type = other DNA
ccttcaccgttgtccttcaggg

SEQ ID NO: 29243 - DNA, 22 bp, synthetic construct
  misc_feature 1..22: note = chemically synthesized
  source 1..22: mol_type = other DNA
caccgttgtccttcagggatgt

SEQ ID NO: 29244 - DNA, 22 bp, synthetic construct
  misc_feature 1..22: note = chemically synthesized
  source 1..22: mol_type = other DNA
accgttgtccttcagggatgtc

SEQ ID NO: 29245 - DNA, 22 bp, synthetic construct
  misc_feature 1..22: note = chemically synthesized
  source 1..22: mol_type = other DNA
tccttcagggatgtcctagaaa

SEQ ID NO: 29246 - DNA, 22 bp, synthetic construct
  misc_feature 1..22: note = chemically synthesized
  source 1..22: mol_type = other DNA
cagggatgtcctagaaaggggc

SEQ ID NO: 29247 - DNA, 22 bp, synthetic construct
  misc_feature 1..22: note = chemically synthesized
  source 1..22: mol_type = other DNA
agggatgtcctagaaaggggct

SEQ ID NO: 29248 - DNA, 22 bp, synthetic construct
  misc_feature 1..22: note = chemically synthesized
  source 1..22: mol_type = other DNA
gaaaggggctgtagtgctgcgg

SEQ ID NO: 29249 - DNA, 22 bp, synthetic construct
  misc_feature 1..22: note = chemically synthesized
  source 1..22: mol_type = other DNA
tagtgctgcggctgtccacttt

SEQ ID NO: 29250 - DNA, 22 bp, synthetic construct
  misc_feature 1..22: note = chemically synthesized
  source 1..22: mol_type = other DNA
cggctgtccacttttgggtggt

SEQ ID NO: 29251 - DNA, 22 bp, synthetic construct
  misc_feature 1..22: note = chemically synthesized
  source 1..22: mol_type = other DNA
tccacttttgggtggtgcctgc

SEQ ID NO: 29252 - DNA, 22 bp, synthetic construct
  misc_feature 1..22: note = chemically synthesized
  source 1..22: mol_type = other DNA
ttgggtggtgcctgcatatcgt

SEQ ID NO: 29253 - DNA, 22 bp, synthetic construct
  misc_feature 1..22: note = chemically synthesized
  source 1..22: mol_type = other DNA
tgggtggtgcctgcatatcgtg

SEQ ID NO: 29254 - DNA, 22 bp, synthetic construct
  misc_feature 1..22: note = chemically synthesized
  source 1..22: mol_type = other DNA
gggtggtgcctgcatatcgtgc

SEQ ID NO: 29255 - DNA, 22 bp, synthetic construct
  misc_feature 1..22: note = chemically synthesized
  source 1..22: mol_type = other DNA
ggtggtgcctgcatatcgtgca

SEQ ID NO: 29256 - DNA, 22 bp, synthetic construct
  misc_feature 1..22: note = chemically synthesized
  source 1..22: mol_type = other DNA
catatcgtgcagaactatctgt

SEQ ID NO: 29257 - DNA, 22 bp, synthetic construct
  misc_feature 1..22: note = chemically synthesized
  source 1..22: mol_type = other DNA
tctgtgaaccaggacctagtct

SEQ ID NO: 29258 - DNA, 22 bp, synthetic construct
  misc_feature 1..22: note = chemically synthesized
  source 1..22: mol_type = other DNA
tgaaccaggacctagtcttctc

SEQ ID NO: 29259 - DNA, 22 bp, synthetic construct
  misc_feature 1..22: note = chemically synthesized
  source 1..22: mol_type = other DNA
gtcttctcttcctctgtcagct

SEQ ID NO: 29260 - DNA, 22 bp, synthetic construct
  misc_feature 1..22: note = chemically synthesized
  source 1..22: mol_type = other DNA
ctcttcctctgtcagctgatca

SEQ ID NO: 29261 - DNA, 22 bp, synthetic construct
  misc_feature 1..22: note = chemically synthesized
  source 1..22: mol_type = other DNA
tcttcctctgtcagctgatcat

SEQ ID NO: 29262 - DNA, 22 bp, synthetic construct
  misc_feature 1..22: note = chemically synthesized
  source 1..22: mol_type = other DNA
ttcctctgtcagctgatcatag

SEQ ID NO: 29263 - DNA, 22 bp, synthetic construct
  misc_feature 1..22: note = chemically synthesized
  source 1..22: mol_type = other DNA
cctctgtcagctgatcataggg

SEQ ID NO: 29264 - DNA, 22 bp, synthetic construct
  misc_feature 1..22: note = chemically synthesized
  source 1..22: mol_type = other DNA
ctctgtcagctgatcataggga

SEQ ID NO: 29265 - DNA, 22 bp, synthetic construct
  misc_feature 1..22: note = chemically synthesized
  source 1..22: mol_type = other DNA
tgtcagctgatcatagggaact

SEQ ID NO: 29266 - DNA, 22 bp, synthetic construct
  misc_feature 1..22: note = chemically synthesized
  source 1..22: mol_type = other DNA
tcagctgatcatagggaactcc

SEQ ID NO: 29267 - DNA, 22 bp, synthetic construct
  misc_feature 1..22: note = chemically synthesized
  source 1..22: mol_type = other DNA
atcatagggaactccccatgag

SEQ ID NO: 29268 - DNA, 22 bp, synthetic construct
  misc_feature 1..22: note = chemically synthesized
  source 1..22: mol_type = other DNA
cccatgagaccatcggtgcagt

SEQ ID NO: 29269 - DNA, 22 bp, synthetic construct
  misc_feature 1..22: note = chemically synthesized
  source 1..22: mol_type = other DNA
agggagagaaagcagtgtgtca

SEQ ID NO: 29270 - DNA, 22 bp, synthetic construct
  misc_feature 1..22: note = chemically synthesized
  source 1..22: mol_type = other DNA
gagcccctttctcatgtaactt

SEQ ID NO: 29271 - DNA, 22 bp, synthetic construct
  misc_feature 1..22: note = chemically synthesized
  source 1..22: mol_type = other DNA
agcccctttctcatgtaactta

SEQ ID NO: 29272 - DNA, 22 bp, synthetic construct
  misc_feature 1..22: note = chemically synthesized
  source 1..22: mol_type = other DNA
tctcatgtaacttactagtgcc

SEQ ID NO: 29273 - DNA, 22 bp, synthetic construct
  misc_feature 1..22: note = chemically synthesized
  source 1..22: mol_type = other DNA
ctcatgtaacttactagtgcct

SEQ ID NO: 29274 - DNA, 22 bp, synthetic construct
  misc_feature 1..22: note = chemically synthesized
  source 1..22: mol_type = other DNA
tcatgtaacttactagtgcctt

SEQ ID NO: 29275 - DNA, 22 bp, synthetic construct
  misc_feature 1..22: note = chemically synthesized
  source 1..22: mol_type = other DNA
atgtaacttactagtgccttca

SEQ ID NO: 29276 - DNA, 22 bp, synthetic construct
  misc_feature 1..22: note = chemically synthesized
  source 1..22: mol_type = other DNA
actagtgccttcaggatctgct

SEQ ID NO: 29277 - DNA, 22 bp, synthetic construct
  misc_feature 1..22: note = chemically synthesized
  source 1..22: mol_type = other DNA
ctagtgccttcaggatctgctc

SEQ ID NO: 29278 - DNA, 22 bp, synthetic construct
  misc_feature 1..22: note = chemically synthesized
  source 1..22: mol_type = other DNA
gtgccttcaggatctgctcaag

SEQ ID NO: 29279 - DNA, 22 bp, synthetic construct
  misc_feature 1..22: note = chemically synthesized
  source 1..22: mol_type = other DNA
caggatctgctcaagcccaatc

SEQ ID NO: 29280 - DNA, 22 bp, synthetic construct
  misc_feature 1..22: note = chemically synthesized
  source 1..22: mol_type = other DNA
aggatctgctcaagcccaatcg

SEQ ID NO: 29281 - DNA, 22 bp, synthetic construct
  misc_feature 1..22: note = chemically synthesized
  source 1..22: mol_type = other DNA
ctcaagcccaatcgcatatata

SEQ ID NO: 29282 - DNA, 22 bp, synthetic construct
  misc_feature 1..22: note = chemically synthesized
  source 1..22: mol_type = other DNA
aagcccaatcgcatatatacca

SEQ ID NO: 29283 - DNA, 22 bp, synthetic construct
  misc_feature 1..22: note = chemically synthesized
  source 1..22: mol_type = other DNA
ccatttgctgatgcaatgctgc

SEQ ID NO: 29284 - DNA, 22 bp, synthetic construct
  misc_feature 1..22: note = chemically synthesized
  source 1..22: mol_type = other DNA
catttgctgatgcaatgctgct

SEQ ID NO: 29285 - DNA, 22 bp, synthetic construct
  misc_feature 1..22: note = chemically synthesized
  source 1..22: mol_type = other DNA
gctgatgcaatgctgctgtgca

SEQ ID NO: 29286 - DNA, 22 bp, synthetic construct
  misc_feature 1..22: note = chemically synthesized
  source 1..22: mol_type = other DNA
ctgatgcaatgctgctgtgcac

SEQ ID NO: 29287 - DNA, 22 bp, synthetic construct
  misc_feature 1..22: note = chemically synthesized
  source 1..22: mol_type = other DNA
atgcaatgctgctgtgcacagc

SEQ ID NO: 29288 - DNA, 22 bp, synthetic construct
  misc_feature 1..22: note = chemically synthesized
  source 1..22: mol_type = other DNA
ctgtgcacagcccactttatgg

SEQ ID NO: 29289 - DNA, 22 bp, synthetic construct
  misc_feature 1..22: note = chemically synthesized
  source 1..22: mol_type = other DNA
tgcacagcccactttatggcta

SEQ ID NO: 29290 - DNA, 22 bp, synthetic construct
  misc_feature 1..22: note = chemically synthesized
  source 1..22: mol_type = other DNA
tatggctagatggatcagaaag

SEQ ID NO: 29291 - DNA, 22 bp, synthetic construct
  misc_feature 1..22: note = chemically synthesized
  source 1..22: mol_type = other DNA
atggctagatggatcagaaagc

SEQ ID NO: 29292 - DNA, 22 bp, synthetic construct
  misc_feature 1..22: note = chemically synthesized
  source 1..22: mol_type = other DNA
tggctagatggatcagaaagca

SEQ ID NO: 29293 - DNA, 22 bp, synthetic construct
  misc_feature 1..22: note = chemically synthesized
  source 1..22: mol_type = other DNA
gatggatcagaaagcacccagt

SEQ ID NO: 29294 - DNA, 22 bp, synthetic construct
  misc_feature 1..22: note = chemically synthesized
  source 1..22: mol_type = other DNA
atgataggcagttcaggtcaca

SEQ ID NO: 29295 - DNA, 22 bp, synthetic construct
  misc_feature 1..22: note = chemically synthesized
  source 1..22: mol_type = other DNA
aggtcacatggtgacttgatga

SEQ ID NO: 29296 - DNA, 22 bp, synthetic construct
  misc_feature 1..22: note = chemically synthesized
  source 1..22: mol_type = other DNA
gatgactcatagtcaaatattt

SEQ ID NO: 29297 - DNA, 22 bp, synthetic construct
  misc_feature 1..22: note = chemically synthesized
  source 1..22: mol_type = other DNA
atgactcatagtcaaatatttc

SEQ ID NO: 29298 - DNA, 22 bp, synthetic construct
  misc_feature 1..22: note = chemically synthesized
  source 1..22: mol_type = other DNA
atagtcaaatatttcgtttcca

SEQ ID NO: 29299 - DNA, 22 bp, synthetic construct
  misc_feature 1..22: note = chemically synthesized
  source 1..22: mol_type = other DNA
cgtttccaccaaagcccagtaa

SEQ ID NO: 29300 - DNA, 22 bp, synthetic construct
  misc_feature 1..22: note = chemically synthesized
  source 1..22: mol_type = other DNA
gtttccaccaaagcccagtaac

SEQ ID NO: 29301 - DNA, 22 bp, synthetic construct
  misc_feature 1..22: note = chemically synthesized
  source 1..22: mol_type = other DNA
ccaccaaagcccagtaacaggc

SEQ ID NO: 29302 - DNA, 22 bp, synthetic construct
  misc_feature 1..22: note = chemically synthesized
  source 1..22: mol_type = other DNA
caccaaagcccagtaacaggcc

SEQ ID NO: 29303 - DNA, 22 bp, synthetic construct
  misc_feature 1..22: note = chemically synthesized
  source 1..22: mol_type = other DNA
tctccctaaaagagagtagtta

SEQ ID NO: 29304 - DNA, 22 bp, synthetic construct
  misc_feature 1..22: note = chemically synthesized
  source 1..22: mol_type = other DNA
ctccctaaaagagagtagttat

SEQ ID NO: 29305 - DNA, 22 bp, synthetic construct
  misc_feature 1..22: note = chemically synthesized
  source 1..22: mol_type = other DNA
tccctaaaagagagtagttatc

SEQ ID NO: 29306 - DNA, 22 bp, synthetic construct
  misc_feature 1..22: note = chemically synthesized
  source 1..22: mol_type = other DNA
cctaaaagagagtagttatctg

SEQ ID NO: 29307 - DNA, 22 bp, synthetic construct
  misc_feature 1..22: note = chemically synthesized
  source 1..22: mol_type = other DNA
aaagagagtagttatctgcaga

SEQ ID NO: 29308 - DNA, 22 bp, synthetic construct
  misc_feature 1..22: note = chemically synthesized
  source 1..22: mol_type = other DNA
tctgcagaagatggcagggcct

SEQ ID NO: 29309 - DNA, 22 bp, synthetic construct
  misc_feature 1..22: note = chemically synthesized
  source 1..22: mol_type = other DNA
cagaagatggcagggccttgct

SEQ ID NO: 29310 - DNA, 22 bp, synthetic construct
  misc_feature 1..22: note = chemically synthesized
  source 1..22: mol_type = other DNA
gctccaaaatcctagaggcctc

SEQ ID NO: 29311 - DNA, 22 bp, synthetic construct
  misc_feature 1..22: note = chemically synthesized
  source 1..22: mol_type = other DNA
ctccaaaatcctagaggcctcc

SEQ ID NO: 29312 - DNA, 22 bp, synthetic construct
  misc_feature 1..22: note = chemically synthesized
  source 1..22: mol_type = other DNA
caaaatcctagaggcctccgct

SEQ ID NO: 29313 - DNA, 22 bp, synthetic construct
  misc_feature 1..22: note = chemically synthesized
  source 1..22: mol_type = other DNA
gaggcctccgctgtgattcagc

SEQ ID NO: 29314 - DNA, 22 bp, synthetic construct
  misc_feature 1..22: note = chemically synthesized
  source 1..22: mol_type = other DNA
cgctgtgattcagcctgccaaa

SEQ ID NO: 29315 - DNA, 22 bp, synthetic construct
  misc_feature 1..22: note = chemically synthesized
  source 1..22: mol_type = other DNA
tgattcagcctgccaaatgctc

SEQ ID NO: 29316 - DNA, 22 bp, synthetic construct
  misc_feature 1..22: note = chemically synthesized
  source 1..22: mol_type = other DNA
agcctgccaaatgctccaaaca

SEQ ID NO: 29317 - DNA, 22 bp, synthetic construct
  misc_feature 1..22: note = chemically synthesized
  source 1..22: mol_type = other DNA
ccaaatgctccaaacagcatcc

SEQ ID NO: 29318 - DNA, 22 bp, synthetic construct
  misc_feature 1..22: note = chemically synthesized
  source 1..22: mol_type = other DNA
caaacagcatccctatctggca

SEQ ID NO: 29319 - DNA, 22 bp, synthetic construct
  misc_feature 1..22: note = chemically synthesized
  source 1..22: mol_type = other DNA
tctggcactgacacctcaagca

SEQ ID NO: 29320 - DNA, 22 bp, synthetic construct
  misc_feature 1..22: note = chemically synthesized
  source 1..22: mol_type = other DNA
gcactgacacctcaagcatcat

SEQ ID NO: 29321 - DNA, 22 bp, synthetic construct
  misc_feature 1..22: note = chemically synthesized
  source 1..22: mol_type = other DNA
acacctcaagcatcattggatc

SEQ ID NO: 29322 - DNA, 22 bp, synthetic construct
  misc_feature 1..22: note = chemically synthesized
  source 1..22: mol_type = other DNA
aagcatcattggatctgctagg

SEQ ID NO: 29323 - DNA, 22 bp, synthetic construct
  misc_feature 1..22: note = chemically synthesized
  source 1..22: mol_type = other DNA
gatctgctaggtcatatggccc

SEQ ID NO: 29324 - DNA, 22 bp, synthetic construct
  misc_feature 1..22: note = chemically synthesized
  source 1..22: mol_type = other DNA
ctaggtcatatggcccaagtgg

SEQ ID NO: 29325 - DNA, 22 bp, synthetic construct
  misc_feature 1..22: note = chemically synthesized
  source 1..22: mol_type = other DNA
ggtcatatggcccaagtggcat

SEQ ID NO: 29326 - DNA, 22 bp, synthetic construct
  misc_feature 1..22: note = chemically synthesized
  source 1..22: mol_type = other DNA
gcacagcagcctggacctgtgg

SEQ ID NO: 29327 - DNA, 22 bp, synthetic construct
  misc_feature 1..22: note = chemically synthesized
  source 1..22: mol_type = other DNA
cacagcagcctggacctgtggc

SEQ ID NO: 29328 - DNA, 22 bp, synthetic construct
  misc_feature 1..22: note = chemically synthesized
  source 1..22: mol_type = other DNA
gacctgtggcagagccttctgt

SEQ ID NO: 29329 - DNA, 22 bp, synthetic construct
  misc_feature 1..22: note = chemically synthesized
  source 1..22: mol_type = other DNA
tggcagagccttctgttctgga

SEQ ID NO: 29330 - DNA, 22 bp, synthetic construct
  misc_feature 1..22: note = chemically synthesized
  source 1..22: mol_type = other DNA
ctgttctggactccactcaaaa

SEQ ID NO: 29331 - DNA, 22 bp, synthetic construct
  misc_feature 1..22: note = chemically synthesized
  source 1..22: mol_type = other DNA
tgttctggactccactcaaaac

SEQ ID NO: 29332 - DNA, 22 bp, synthetic construct
  misc_feature 1..22: note = chemically synthesized
  source 1..22: mol_type = other DNA
ttctggactccactcaaaactg

SEQ ID NO: 29333 - DNA, 22 bp, synthetic construct
  misc_feature 1..22: note = chemically synthesized
  source 1..22: mol_type = other DNA
tggactccactcaaaactggca

SEQ ID NO: 29334 - DNA, 22 bp, synthetic construct
  misc_feature 1..22: note = chemically synthesized
  source 1..22: mol_type = other DNA
gactccactcaaaactggcagc

SEQ ID NO: 29335 - DNA, 22 bp, synthetic construct
  misc_feature 1..22: note = chemically synthesized
  source 1..22: mol_type = other DNA
cactcaaaactggcagcctttt

SEQ ID NO: 29336 - DNA, 22 bp, synthetic construct
  misc_feature 1..22: note = chemically synthesized
  source 1..22: mol_type = other DNA
aaaactggcagccttttggatc

SEQ ID NO: 29337 - DNA, 22 bp, synthetic construct
  misc_feature 1..22: note = chemically synthesized
  source 1..22: mol_type = other DNA
gcagccttttggatcactcgat

SEQ ID NO: 29338 - DNA, 22 bp, synthetic construct
  misc_feature 1..22: note = chemically synthesized
  source 1..22: mol_type = other DNA
ttggatcactcgataaatgggc

SEQ ID NO: 29339 - DNA, 22 bp, synthetic construct
  misc_feature 1..22: note = chemically synthesized
  source 1..22: mol_type = other DNA
tggatcactcgataaatgggcc

SEQ ID NO: 29340 - DNA, 22 bp, synthetic construct
  misc_feature 1..22: note = chemically synthesized
  source 1..22: mol_type = other DNA
ggatcactcgataaatgggcca

SEQ ID NO: 29341 - DNA, 22 bp, synthetic construct
  misc_feature 1..22: note = chemically synthesized
  source 1..22: mol_type = other DNA
gatcactcgataaatgggccag

SEQ ID NO: 29342 - DNA, 22 bp, synthetic construct
  misc_feature 1..22: note = chemically synthesized
  source 1..22: mol_type = other DNA
gataaatgggccagagtaacac

SEQ ID NO: 29343 - DNA, 22 bp, synthetic construct
  misc_feature 1..22: note = chemically synthesized
  source 1..22: mol_type = other DNA
cctccaaaatccaaataggccc

SEQ ID NO: 29344 - DNA, 22 bp, synthetic construct
  misc_feature 1..22: note = chemically synthesized
  source 1..22: mol_type = other DNA
caaaatccaaataggcccacta

SEQ ID NO: 29345 - DNA, 22 bp, synthetic construct
  misc_feature 1..22: note = chemically synthesized
  source 1..22: mol_type = other DNA
ggcgttgtgcctatttcttggt

SEQ ID NO: 29346 - DNA, 22 bp, synthetic construct
  misc_feature 1..22: note = chemically synthesized
  source 1..22: mol_type = other DNA
tgcctatttcttggttgtaaga

SEQ ID NO: 29347 - DNA, 22 bp, synthetic construct
  misc_feature 1..22: note = chemically synthesized
  source 1..22: mol_type = other DNA
tttcttggttgtaagagtggcc

SEQ ID NO: 29348 - DNA, 22 bp, synthetic construct
  misc_feature 1..22: note = chemically synthesized
  source 1..22: mol_type = other DNA
cttggttgtaagagtggccaaa

SEQ ID NO: 29349 - DNA, 22 bp, synthetic construct
  misc_feature 1..22: note = chemically synthesized
  source 1..22: mol_type = other DNA
ttggttgtaagagtggccaaat

SEQ ID NO: 29350 - DNA, 22 bp, synthetic construct
  misc_feature 1..22: note = chemically synthesized
  source 1..22: mol_type = other DNA
ggttgtaagagtggccaaatgc

SEQ ID NO: 29351 - DNA, 22 bp, synthetic construct
  misc_feature 1..22: note = chemically synthesized
  source 1..22: mol_type = other DNA
gttgtaagagtggccaaatgca

SEQ ID NO: 29352 - DNA, 22 bp, synthetic construct
  misc_feature 1..22: note = chemically synthesized
  source 1..22: mol_type = other DNA
taagagtggccaaatgcagcaa

SEQ ID NO: 29353 - DNA, 22 bp, synthetic construct
  misc_feature 1..22: note = chemically synthesized
  source 1..22: mol_type = other DNA
tccttcactttagaaggaatat

SEQ ID NO: 29354 - DNA, 22 bp, synthetic construct
  misc_feature 1..22: note = chemically synthesized
  source 1..22: mol_type = other DNA
cactttagaaggaatatctcaa

SEQ ID NO: 29355 - DNA, 22 bp, synthetic construct
  misc_feature 1..22: note = chemically synthesized
  source 1..22: mol_type = other DNA
actttagaaggaatatctcaaa

SEQ ID NO: 29356 - DNA, 22 bp, synthetic construct
  misc_feature 1..22: note = chemically synthesized
  source 1..22: mol_type = other DNA
tagaaggaatatctcaaagagc

SEQ ID NO: 29357 - DNA, 22 bp, synthetic construct
  misc_feature 1..22: note = chemically synthesized
  source 1..22: mol_type = other DNA
agaaggaatatctcaaagagcc

SEQ ID NO: 29358 - DNA, 22 bp, synthetic construct
  misc_feature 1..22: note = chemically synthesized
  source 1..22: mol_type = other DNA
gaaggaatatctcaaagagccc

SEQ ID NO: 29359 - DNA, 22 bp, synthetic construct
  misc_feature 1..22: note = chemically synthesized
  source 1..22: mol_type = other DNA
aaagagccccaaaccattggac

SEQ ID NO: 29360 - DNA, 22 bp, synthetic construct
  misc_feature 1..22: note = chemically synthesized
  source 1..22: mol_type = other DNA
gacccctataaattttactgag

SEQ ID NO: 29361 - DNA, 22 bp, synthetic construct
  misc_feature 1..22: note = chemically synthesized
  source 1..22: mol_type = other DNA
taaattttactgaggtagaagg

SEQ ID NO: 29362 - DNA, 22 bp, synthetic construct
  misc_feature 1..22: note = chemically synthesized
  source 1..22: mol_type = other DNA
tactgaggtagaaggtccctga

SEQ ID NO: 29363 - DNA, 22 bp, synthetic construct
  misc_feature 1..22: note = chemically synthesized
  source 1..22: mol_type = other DNA
actgaggtagaaggtccctgaa

SEQ ID NO: 29364 - DNA, 22 bp, synthetic construct
  misc_feature 1..22: note = chemically synthesized
  source 1..22: mol_type = other DNA
ctgaggtagaaggtccctgaat

SEQ ID NO: 29365 - DNA, 22 bp, synthetic construct
  misc_feature 1..22: note = chemically synthesized
  source 1..22: mol_type = other DNA
aggtagaaggtccctgaattta

SEQ ID NO: 29366 - DNA, 22 bp, synthetic construct
  misc_feature 1..22: note = chemically synthesized
  source 1..22: mol_type = other DNA
aatttaatcagatttatttccc

SEQ ID NO: 29367 - DNA, 22 bp, synthetic construct
  misc_feature 1..22: note = chemically synthesized
  source 1..22: mol_type = other DNA
aatcagatttatttcccatcct

SEQ ID NO: 29368 - DNA, 22 bp, synthetic construct
  misc_feature 1..22: note = chemically synthesized
  source 1..22: mol_type = other DNA
atcagatttatttcccatcctc

SEQ ID NO: 29369 - DNA, 22 bp, synthetic construct
  misc_feature 1..22: note = chemically synthesized
  source 1..22: mol_type = other DNA
atttcccatcctctgtcccaca

SEQ ID NO: 29370 - DNA, 22 bp, synthetic construct
  misc_feature 1..22: note = chemically synthesized
  source 1..22: mol_type = other DNA
tttcccatcctctgtcccacaa

SEQ ID NO: 29371 - DNA, 22 bp, synthetic construct
  misc_feature 1..22: note = chemically synthesized
  source 1..22: mol_type = other DNA
cccatcctctgtcccacaaatg

SEQ ID NO: 29372 - DNA, 22 bp, synthetic construct
  misc_feature 1..22: note = chemically synthesized
  source 1..22: mol_type = other DNA
ccatcctctgtcccacaaatgt

SEQ ID NO: 29373 - DNA, 22 bp, synthetic construct
  misc_feature 1..22: note = chemically synthesized
  source 1..22: mol_type = other DNA
tgtcccacaaatgtctcatcaa

SEQ ID NO: 29374 - DNA, 22 bp, synthetic construct
  misc_feature 1..22: note = chemically synthesized
  source 1..22: mol_type = other DNA
tcccacaaatgtctcatcaata

SEQ ID NO: 29375 - DNA, 22 bp, synthetic construct
  misc_feature 1..22: note = chemically synthesized
  source 1..22: mol_type = other DNA
atcaataaatccagtgtgtttg

SEQ ID NO: 29376 - DNA, 22 bp, synthetic construct
  misc_feature 1..22: note = chemically synthesized
  source 1..22: mol_type = other DNA
gctacttcttgctcactagttc

SEQ ID NO: 29377 - DNA, 22 bp, synthetic construct
  misc_feature 1..22: note = chemically synthesized
  source 1..22: mol_type = other DNA
ctacttcttgctcactagttcc

SEQ ID NO: 29378 - DNA, 22 bp, synthetic construct
  misc_feature 1..22: note = chemically synthesized
  source 1..22: mol_type = other DNA
cttcttgctcactagttccagt

SEQ ID NO: 29379 - DNA, 22 bp, synthetic construct
  misc_feature 1..22: note = chemically synthesized
  source 1..22: mol_type = other DNA
cttgctcactagttccagtcag

SEQ ID NO: 29380 - DNA, 22 bp, synthetic construct
  misc_feature 1..22: note = chemically synthesized
  source 1..22: mol_type = other DNA
ttgctcactagttccagtcagc

SEQ ID NO: 29381 - DNA, 22 bp, synthetic construct
  misc_feature 1..22: note = chemically synthesized
  source 1..22: mol_type = other DNA
gctcactagttccagtcagcat

SEQ ID NO: 29382 - DNA, 22 bp, synthetic construct
  misc_feature 1..22: note = chemically synthesized
  source 1..22: mol_type = other DNA
ctcactagttccagtcagcatg

SEQ ID NO: 29383 - DNA, 22 bp, synthetic construct
  misc_feature 1..22: note = chemically synthesized
  source 1..22: mol_type = other DNA
actagttccagtcagcatgtca

SEQ ID NO: 29384 - DNA, 22 bp, synthetic construct
  misc_feature 1..22: note = chemically synthesized
  source 1..22: mol_type = other DNA
gttccagtcagcatgtcatcaa

SEQ ID NO: 29385 - DNA, 22 bp, synthetic construct
  misc_feature 1..22: note = chemically synthesized
  source 1..22: mol_type = other DNA
cagtcagcatgtcatcaatgta

SEQ ID NO: 29386 - DNA, 22 bp, synthetic construct
  misc_feature 1..22: note = chemically synthesized
  source 1..22: mol_type = other DNA
tgatatcttgtggaagtgaaag

SEQ ID NO: 29387 - DNA, 22 bp, synthetic construct
  misc_feature 1..22: note = chemically synthesized
  source 1..22: mol_type = other DNA
gtggaagtgaaaggtgagcaag

SEQ ID NO: 29388 - DNA, 22 bp, synthetic construct
  misc_feature 1..22: note = chemically synthesized
  source 1..22: mol_type = other DNA
tggaagtgaaaggtgagcaagt

SEQ ID NO: 29389 - DNA, 22 bp, synthetic construct
  misc_feature 1..22: note = chemically synthesized
  source 1..22: mol_type = other DNA
tctccaaataagattatggcac

SEQ ID NO: 29390 - DNA, 22 bp, synthetic construct
  misc_feature 1..22: note = chemically synthesized
  source 1..22: mol_type = other DNA
tccaaataagattatggcacaa

SEQ ID NO: 29391 - DNA, 22 bp, synthetic construct
  misc_feature 1..22: note = chemically synthesized
  source 1..22: mol_type = other DNA
caaataagattatggcacaaag

SEQ ID NO: 29392 - DNA, 22 bp, synthetic construct
  misc_feature 1..22: note = chemically synthesized
  source 1..22: mol_type = other DNA
tggcacaaagctggagagttga

SEQ ID NO: 29393 - DNA, 22 bp, synthetic construct
  misc_feature 1..22: note = chemically synthesized
  source 1..22: mol_type = other DNA
gagagttgatatactcctgagt

SEQ ID NO: 29394 - DNA, 22 bp, synthetic construct
  misc_feature 1..22: note = chemically synthesized
  source 1..22: mol_type = other DNA
atatactcctgagttcatcatt

SEQ ID NO: 29395 - DNA, 22 bp, synthetic construct
  misc_feature 1..22: note = chemically synthesized
  source 1..22: mol_type = other DNA
ctgagttcatcattttctttca

SEQ ID NO: 29396 - DNA, 22 bp, synthetic construct
  misc_feature 1..22: note = chemically synthesized
  source 1..22: mol_type = other DNA
agttcatcattttctttcatca

SEQ ID NO: 29397 - DNA, 22 bp, synthetic construct
  misc_feature 1..22: note = chemically synthesized
  source 1..22: mol_type = other DNA
atcattttctttcatcactttg

SEQ ID NO: 29398 - DNA, 22 bp, synthetic construct
  misc_feature 1..22: note = chemically synthesized
  source 1..22: mol_type = other DNA
tctttcatcactttgtccagcg

SEQ ID NO: 29399 - DNA, 22 bp, synthetic construct
  misc_feature 1..22: note = chemically synthesized
  source 1..22: mol_type = other DNA
ctttcatcactttgtccagcga

SEQ ID NO: 29400 - DNA, 22 bp, synthetic construct
  misc_feature 1..22: note = chemically synthesized
  source 1..22: mol_type = other DNA
tttcatcactttgtccagcgaa

SEQ ID NO: 29401 - DNA, 22 bp, synthetic construct
  misc_feature 1..22: note = chemically synthesized
  source 1..22: mol_type = other DNA
tcatcactttgtccagcgaact

SEQ ID NO: 29402 - DNA, 22 bp, synthetic construct
  misc_feature 1..22: note = chemically synthesized
  source 1..22: mol_type = other DNA
catcactttgtccagcgaactt

SEQ ID NO: 29403 - DNA, 22 bp, synthetic construct
  misc_feature 1..22: note = chemically synthesized
  source 1..22: mol_type = other DNA
atcactttgtccagcgaactta

SEQ ID NO: 29404 - DNA, 22 bp, synthetic construct
  misc_feature 1..22: note = chemically synthesized
  source 1..22: mol_type = other DNA
tgtccagcgaacttacaagcaa

SEQ ID NO: 29405 - DNA, 22 bp, synthetic construct
  misc_feature 1..22: note = chemically synthesized
  source 1..22: mol_type = other DNA
gtccagcgaacttacaagcaac

SEQ ID NO: 29406 - DNA, 22 bp, synthetic construct
  misc_feature 1..22: note = chemically synthesized
  source 1..22: mol_type = other DNA
tccagcgaacttacaagcaacc

SEQ ID NO: 29407 - DNA, 22 bp, synthetic construct
  misc_feature 1..22: note = chemically synthesized
  source 1..22: mol_type = other DNA
acaagcaaccaaccaacttcac

SEQ ID NO: 29408 - DNA, 22 bp, synthetic construct
  misc_feature 1..22: note = chemically synthesized
  source 1..22: mol_type = other DNA
caagcaaccaaccaacttcact

SEQ ID NO: 29409 - DNA, 22 bp, synthetic construct
  misc_feature 1..22: note = chemically synthesized
  source 1..22: mol_type = other DNA
cactatgttccttgattctcca

SEQ ID NO: 29410 - DNA, 22 bp, synthetic construct
  misc_feature 1..22: note = chemically synthesized
  source 1..22: mol_type = other DNA
actatgttccttgattctccac

SEQ ID NO: 29411 - DNA, 22 bp, synthetic construct
  misc_feature 1..22: note = chemically synthesized
  source 1..22: mol_type = other DNA
tgttccttgattctccacatat

SEQ ID NO: 29412 - DNA, 22 bp, synthetic construct
  misc_feature 1..22: note = chemically synthesized
  source 1..22: mol_type = other DNA
cttgattctccacatatagtca

SEQ ID NO: 29413 - DNA, 22 bp, synthetic construct
  misc_feature 1..22: note = chemically synthesized
  source 1..22: mol_type = other DNA
gattctccacatatagtcaaaa

SEQ ID NO: 29414 - DNA, 22 bp, synthetic construct
  misc_feature 1..22: note = chemically synthesized
  source 1..22: mol_type = other DNA
attctccacatatagtcaaaag

SEQ ID NO: 29415 - DNA, 22 bp, synthetic construct
  misc_feature 1..22: note = chemically synthesized
  source 1..22: mol_type = other DNA
tccacatatagtcaaaagtatt

SEQ ID NO: 29416 - DNA, 22 bp, synthetic construct
  misc_feature 1..22: note = chemically synthesized
  source 1..22: mol_type = other DNA
cacatatagtcaaaagtattat

SEQ ID NO: 29417 - DNA, 22 bp, synthetic construct
  misc_feature 1..22: note = chemically synthesized
  source 1..22: mol_type = other DNA
tgtatacagtagctaaattcct

SEQ ID NO: 29418 - DNA, 22 bp, synthetic construct
  misc_feature 1..22: note = chemically synthesized
  source 1..22: mol_type = other DNA
aattccttgcctctcacaagcg

SEQ ID NO: 29419 - DNA, 22 bp, synthetic construct
  misc_feature 1..22: note = chemically synthesized
  source 1..22: mol_type = other DNA
cttgcctctcacaagcgttgaa

SEQ ID NO: 29420 - DNA, 22 bp, synthetic construct
  misc_feature 1..22: note = chemically synthesized
  source 1..22: mol_type = other DNA
gcctctcacaagcgttgaatca

SEQ ID NO: 29421 - DNA, 22 bp, synthetic construct
  misc_feature 1..22: note = chemically synthesized
  source 1..22: mol_type = other DNA
cctctcacaagcgttgaatcaa

SEQ ID NO: 29422 - DNA, 22 bp, synthetic construct
  misc_feature 1..22: note = chemically synthesized
  source 1..22: mol_type = other DNA
tcacaagcgttgaatcaagagt

SEQ ID NO: 29423 - DNA, 22 bp, synthetic construct
  misc_feature 1..22: note = chemically synthesized
  source 1..22: mol_type = other DNA
acaagcgttgaatcaagagtgt

SEQ ID NO: 29424 - DNA, 22 bp, synthetic construct
  misc_feature 1..22: note = chemically synthesized
  source 1..22: mol_type = other DNA
aatcaagagtgtcaaatgcatt

SEQ ID NO: 29425 - DNA, 22 bp, synthetic construct
  misc_feature 1..22: note = chemically synthesized
  source 1..22: mol_type = other DNA
attttgcataactctctaaaca

SEQ ID NO: 29426 - DNA, 22 bp, synthetic construct
  misc_feature 1..22: note = chemically synthesized
  source 1..22: mol_type = other DNA
ttttgcataactctctaaacaa

SEQ ID NO: 29427 - DNA, 22 bp, synthetic construct
  misc_feature 1..22: note = chemically synthesized
  source 1..22: mol_type = other DNA
tgcataactctctaaacaattg

SEQ ID NO: 29428 - DNA, 22 bp, synthetic construct
  misc_feature 1..22: note = chemically synthesized
  source 1..22: mol_type = other DNA
gcataactctctaaacaattga

SEQ ID NO: 29429 - DNA, 22 bp, synthetic construct
  misc_feature 1..22: note = chemically synthesized
  source 1..22: mol_type = other DNA
cataactctctaaacaattgat

SEQ ID NO: 29430 - DNA, 22 bp, synthetic construct
  misc_feature 1..22: note = chemically synthesized
  source 1..22: mol_type = other DNA
tctaaacaattgatgccaagga

SEQ ID NO: 29431 - DNA, 22 bp, synthetic construct
  misc_feature 1..22: note = chemically synthesized
  source 1..22: mol_type = other DNA
taaacaattgatgccaaggatt

SEQ ID NO: 29432 - DNA, 22 bp, synthetic construct
  misc_feature 1..22: note = chemically synthesized
  source 1..22: mol_type = other DNA
aacaattgatgccaaggattat

SEQ ID NO: 29433 - DNA, 22 bp, synthetic construct
  misc_feature 1..22: note = chemically synthesized
  source 1..22: mol_type = other DNA
atgccaaggattatcagtgttc

SEQ ID NO: 29434 - DNA, 22 bp, synthetic construct
  misc_feature 1..22: note = chemically synthesized
  source 1..22: mol_type = other DNA
tcagtgttctccataccattag

SEQ ID NO: 29435 - DNA, 22 bp, synthetic construct
  misc_feature 1..22: note = chemically synthesized
  source 1..22: mol_type = other DNA
tccataccattagaagaagagt

SEQ ID NO: 29436 - DNA, 22 bp, synthetic construct
  misc_feature 1..22: note = chemically synthesized
  source 1..22: mol_type = other DNA
cataccattagaagaagagtcc

SEQ ID NO: 29437 - DNA, 22 bp, synthetic construct
  misc_feature 1..22: note = chemically synthesized
  source 1..22: mol_type = other DNA
gaagaagagtccttagcatatt

SEQ ID NO: 29438 - DNA, 22 bp, synthetic construct
  misc_feature 1..22: note = chemically synthesized
  source 1..22: mol_type = other DNA
agcatatttgggtctaatcata

SEQ ID NO: 29439 - DNA, 22 bp, synthetic construct
  misc_feature 1..22: note = chemically synthesized
  source 1..22: mol_type = other DNA
gcatatttgggtctaatcatat

SEQ ID NO: 29440 - DNA, 22 bp, synthetic construct
  misc_feature 1..22: note = chemically synthesized
  source 1..22: mol_type = other DNA
gggtctaatcatattaagcagc

SEQ ID NO: 29441 - DNA, 22 bp, synthetic construct
  misc_feature 1..22: note = chemically synthesized
  source 1..22: mol_type = other DNA
ggtctaatcatattaagcagcc

SEQ ID NO: 29442 - DNA, 22 bp, synthetic construct
  misc_feature 1..22: note = chemically synthesized
  source 1..22: mol_type = other DNA
atcatattaagcagccaactcc

SEQ ID NO: 29443 - DNA, 22 bp, synthetic construct
  misc_feature 1..22: note = chemically synthesized
  source 1..22: mol_type = other DNA
agcagccaactccagaaacccc

SEQ ID NO: 29444 - DNA, 22 bp, synthetic construct
  misc_feature 1..22: note = chemically synthesized
  source 1..22: mol_type = other DNA
cagaaaccccaaaaccaatgaa

SEQ ID NO: 29445 - DNA, 22 bp, synthetic construct
  misc_feature 1..22: note = chemically synthesized
  source 1..22: mol_type = other DNA
catccttaatattctgttcctc

SEQ ID NO: 29446 - DNA, 22 bp, synthetic construct
  misc_feature 1..22: note = chemically synthesized
  source 1..22: mol_type = other DNA
aatattctgttcctctagaacc

SEQ ID NO: 29447 - DNA, 22 bp, synthetic construct
  misc_feature 1..22: note = chemically synthesized
  source 1..22: mol_type = other DNA
atattctgttcctctagaacca

SEQ ID NO: 29448 - DNA, 22 bp, synthetic construct
  misc_feature 1..22: note = chemically synthesized
  source 1..22: mol_type = other DNA
tgttcctctagaaccactcctg

SEQ ID NO: 29449 - DNA, 22 bp, synthetic construct
  misc_feature 1..22: note = chemically synthesized
  source 1..22: mol_type = other DNA
ttcctctagaaccactcctggt

SEQ ID NO: 29450 - DNA, 22 bp, synthetic construct
  misc_feature 1..22: note = chemically synthesized
  source 1..22: mol_type = other DNA
ctctagaaccactcctggtacc

SEQ ID NO: 29451 - DNA, 22 bp, synthetic construct
  misc_feature 1..22: note = chemically synthesized
  source 1..22: mol_type = other DNA
tagaaccactcctggtaccaaa

SEQ ID NO: 29452 - DNA, 22 bp, synthetic construct
  misc_feature 1..22: note = chemically synthesized
  source 1..22: mol_type = other DNA
gaaccactcctggtaccaaaat

SEQ ID NO: 29453 - DNA, 22 bp, synthetic construct
  misc_feature 1..22: note = chemically synthesized
  source 1..22: mol_type = other DNA
ctggtaccaaaatctgtattag

SEQ ID NO: 29454 - DNA, 22 bp, synthetic construct
  misc_feature 1..22: note = chemically synthesized
  source 1..22: mol_type = other DNA
gtaccaaaatctgtattagggt

SEQ ID NO: 29455 - DNA, 22 bp, synthetic construct
  misc_feature 1..22: note = chemically synthesized
  source 1..22: mol_type = other DNA
tattagggttctacagagaaac

SEQ ID NO: 29456 - DNA, 22 bp, synthetic construct
  misc_feature 1..22: note = chemically synthesized
  source 1..22: mol_type = other DNA
gggttctacagagaaacagaat

SEQ ID NO: 29457 - DNA, 22 bp, synthetic construct
  misc_feature 1..22: note = chemically synthesized
  source 1..22: mol_type = other DNA
tacagagaaacagaattaatag

SEQ ID NO: 29458 - DNA, 22 bp, synthetic construct
  misc_feature 1..22: note = chemically synthesized
  source 1..22: mol_type = other DNA
cagagaaacagaattaatagga

SEQ ID NO: 29459 - DNA, 22 bp, synthetic construct
  misc_feature 1..22: note = chemically synthesized
  source 1..22: mol_type = other DNA
ataggagatatatatctatatc

SEQ ID NO: 29460 - DNA, 22 bp, synthetic construct
  misc_feature 1..22: note = chemically synthesized
  source 1..22: mol_type = other DNA
tatctatatctatatctatatc

SEQ ID NO: 29461 - DNA, 22 bp, synthetic construct
  misc_feature 1..22: note = chemically synthesized
  source 1..22: mol_type = other DNA
tatctatatctatatctatatc

SEQ ID NO: 29462 - DNA, 22 bp, synthetic construct
  misc_feature 1..22: note = chemically synthesized
  source 1..22: mol_type = other DNA
tatctatatctatatctatatc

SEQ ID NO: 29463 - DNA, 22 bp, synthetic construct
  misc_feature 1..22: note = chemically synthesized
  source 1..22: mol_type = other DNA
tatctatatctatatctatctc

SEQ ID NO: 29464 - DNA, 22 bp, synthetic construct
  misc_feature 1..22: note = chemically synthesized
  source 1..22: mol_type = other DNA
tatctatatctatctctatatc

SEQ ID NO: 29465 - DNA, 22 bp, synthetic construct
  misc_feature 1..22: note = chemically synthesized
  source 1..22: mol_type = other DNA
tatctatctctatatctatctc

SEQ ID NO: 29466 - DNA, 22 bp, synthetic construct
  misc_feature 1..22: note = chemically synthesized
  source 1..22: mol_type = other DNA
tctctatatctatctctatatc

SEQ ID NO: 29467 - DNA, 22 bp, synthetic construct
  misc_feature 1..22: note = chemically synthesized
  source 1..22: mol_type = other DNA
tatatctatctctatatctata

SEQ ID NO: 29468 - DNA, 22 bp, synthetic construct
  misc_feature 1..22: note = chemically synthesized
  source 1..22: mol_type = other DNA
tatctatctctatatctatatc

SEQ ID NO: 29469 - DNA, 22 bp, synthetic construct
  misc_feature 1..22: note = chemically synthesized
  source 1..22: mol_type = other DNA
tctctatatctatatctatatg

SEQ ID NO: 29470 - DNA, 22 bp, synthetic construct
  misc_feature 1..22: note = chemically synthesized
  source 1..22: mol_type = other DNA
tatatctatatctatatgagag

SEQ ID NO: 29471 - DNA, 22 bp, synthetic construct
  misc_feature 1..22: note = chemically synthesized
  source 1..22: mol_type = other DNA
tatctatatctatatgagagtt

SEQ ID NO: 29472 - DNA, 22 bp, synthetic construct
  misc_feature 1..22: note = chemically synthesized
  source 1..22: mol_type = other DNA
tatctatatgagagtttattat

SEQ ID NO: 29473 - DNA, 22 bp, synthetic construct
  misc_feature 1..22: note = chemically synthesized
  source 1..22: mol_type = other DNA
tatgagagtttattatgtagta

SEQ ID NO: 29474 - DNA, 22 bp, synthetic construct
  misc_feature 1..22: note = chemically synthesized
  source 1..22: mol_type = other DNA
attatgtagtattgactcacat

SEQ ID NO: 29475 - DNA, 22 bp, synthetic construct
  misc_feature 1..22: note = chemically synthesized
  source 1..22: mol_type = other DNA
ttatgtagtattgactcacatg

SEQ ID NO: 29476 - DNA, 22 bp, synthetic construct
  misc_feature 1..22: note = chemically synthesized
  source 1..22: mol_type = other DNA
tgtagtattgactcacatgttc

SEQ ID NO: 29477 - DNA, 22 bp, synthetic construct
  misc_feature 1..22: note = chemically synthesized
  source 1..22: mol_type = other DNA
actcacatgttcacaaggtccc

SEQ ID NO: 29478 - DNA, 22 bp, synthetic construct
  misc_feature 1..22: note = chemically synthesized
  source 1..22: mol_type = other DNA
acatgttcacaaggtcccaaaa

SEQ ID NO: 29479 - DNA, 22 bp, synthetic construct
  misc_feature 1..22: note = chemically synthesized
  source 1..22: mol_type = other DNA
acaaggtcccaaaacaggccat

SEQ ID NO: 29480 - DNA, 22 bp, synthetic construct
  misc_feature 1..22: note = chemically synthesized
  source 1..22: mol_type = other DNA
ccagctgaggaacaaggaagct

SEQ ID NO: 29481 - DNA, 22 bp, synthetic construct
  misc_feature 1..22: note = chemically synthesized
  source 1..22: mol_type = other DNA
aggaacaaggaagctagtcgga

SEQ ID NO: 29482 - DNA, 22 bp, synthetic construct
  misc_feature 1..22: note = chemically synthesized
  source 1..22: mol_type = other DNA
gtcggagtcccaaagctgaaga

SEQ ID NO: 29483 - DNA, 22 bp, synthetic construct
  misc_feature 1..22: note = chemically synthesized
  source 1..22: mol_type = other DNA
aagaacctggagttcaatgttc

SEQ ID NO: 29484 - DNA, 22 bp, synthetic construct
  misc_feature 1..22: note = chemically synthesized
  source 1..22: mol_type = other DNA
gagttcaatgttccagggcagg

SEQ ID NO: 29485 - DNA, 22 bp, synthetic construct
  misc_feature 1..22: note = chemically synthesized
  source 1..22: mol_type = other DNA
aatgttccagggcaggaagaat

SEQ ID NO: 29486 - DNA, 22 bp, synthetic construct
  misc_feature 1..22: note = chemically synthesized
  source 1..22: mol_type = other DNA
cagggcaggaagaatccagcat

SEQ ID NO: 29487 - DNA, 22 bp, synthetic construct
  misc_feature 1..22: note = chemically synthesized
  source 1..22: mol_type = other DNA
ggatgccaagccaatctagcct

SEQ ID NO: 29488 - DNA, 22 bp, synthetic construct
  misc_feature 1..22: note = chemically synthesized
  source 1..22: mol_type = other DNA
gccttttcacatttttctgcct

SEQ ID NO: 29489 - DNA, 22 bp, synthetic construct
  misc_feature 1..22: note = chemically synthesized
  source 1..22: mol_type = other DNA
ttcacatttttctgcctgcttt

SEQ ID NO: 29490 - DNA, 22 bp, synthetic construct
  misc_feature 1..22: note = chemically synthesized
  source 1..22: mol_type = other DNA
tcacatttttctgcctgcttta

SEQ ID NO: 29491 - DNA, 22 bp, synthetic construct
  misc_feature 1..22: note = chemically synthesized
  source 1..22: mol_type = other DNA
cacatttttctgcctgctttat

SEQ ID NO: 29492 - DNA, 22 bp, synthetic construct
  misc_feature 1..22: note = chemically synthesized
  source 1..22: mol_type = other DNA
acatttttctgcctgctttata

SEQ ID NO: 29493 - DNA, 22 bp, synthetic construct
  misc_feature 1..22: note = chemically synthesized
  source 1..22: mol_type = other DNA
ttctgcctgctttatatcctgg

SEQ ID NO: 29494 - DNA, 22 bp, synthetic construct
  misc_feature 1..22: note = chemically synthesized
  source 1..22: mol_type = other DNA
tctgcctgctttatatcctggc

SEQ ID NO: 29495 - DNA, 22 bp, synthetic construct
  misc_feature 1..22: note = chemically synthesized
  source 1..22: mol_type = other DNA
ctgcctgctttatatcctggct

SEQ ID NO: 29496 - DNA, 22 bp, synthetic construct
  misc_feature 1..22: note = chemically synthesized
  source 1..22: mol_type = other DNA
tgcctgctttatatcctggctg

SEQ ID NO: 29497 - DNA, 22 bp, synthetic construct
  misc_feature 1..22: note = chemically synthesized
  source 1..22: mol_type = other DNA
cctgctttatatcctggctgtg

SEQ ID NO: 29498 - DNA, 22 bp, synthetic construct
  misc_feature 1..22: note = chemically synthesized
  source 1..22: mol_type = other DNA
ctttatatcctggctgtgctgg

SEQ ID NO: 29499 - DNA, 22 bp, synthetic construct
  misc_feature 1..22: note = chemically synthesized
  source 1..22: mol_type = other DNA
tatatcctggctgtgctggcaa

SEQ ID NO: 29500 - DNA, 22 bp, synthetic construct
  misc_feature 1..22: note = chemically synthesized
  source 1..22: mol_type = other DNA
atatcctggctgtgctggcaac

SEQ ID NO: 29501 - DNA, 22 bp, synthetic construct
  misc_feature 1..22: note = chemically synthesized
  source 1..22: mol_type = other DNA
tatcctggctgtgctggcaact

SEQ ID NO: 29502 - DNA, 22 bp, synthetic construct
  misc_feature 1..22: note = chemically synthesized
  source 1..22: mol_type = other DNA
gctgtgctggcaactgattaga

SEQ ID NO: 29503 - DNA, 22 bp, synthetic construct
  misc_feature 1..22: note = chemically synthesized
  source 1..22: mol_type = other DNA
tgctggcaactgattagatggt

SEQ ID NO: 29504 - DNA, 22 bp, synthetic construct
  misc_feature 1..22: note = chemically synthesized
  source 1..22: mol_type = other DNA
gcaactgattagatggtgccca

SEQ ID NO: 29505 - DNA, 22 bp, synthetic construct
  misc_feature 1..22: note = chemically synthesized
  source 1..22: mol_type = other DNA
attagatggtgcccacccagat

SEQ ID NO: 29506 - DNA, 22 bp, synthetic construct
  misc_feature 1..22: note = chemically synthesized
  source 1..22: mol_type = other DNA
gatggtgcccacccagattaag

SEQ ID NO: 29507 - DNA, 22 bp, synthetic construct
  misc_feature 1..22: note = chemically synthesized
  source 1..22: mol_type = other DNA
agggtgggtctgccttccccag

SEQ ID NO: 29508 - DNA, 22 bp, synthetic construct
  misc_feature 1..22: note = chemically synthesized
  source 1..22: mol_type = other DNA
ccttccccagcccactgactga

SEQ ID NO: 29509 - DNA, 22 bp, synthetic construct
  misc_feature 1..22: note = chemically synthesized
  source 1..22: mol_type = other DNA
ccccagcccactgactgaaata

SEQ ID NO: 29510 - DNA, 22 bp, synthetic construct
  misc_feature 1..22: note = chemically synthesized
  source 1..22: mol_type = other DNA
cccagcccactgactgaaatat

SEQ ID NO: 29511 - DNA, 22 bp, synthetic construct
  misc_feature 1..22: note = chemically synthesized
  source 1..22: mol_type = other DNA
actgaaatattaatctcctttg

SEQ ID NO: 29512 - DNA, 22 bp, synthetic construct
  misc_feature 1..22: note = chemically synthesized
  source 1..22: mol_type = other DNA
aaatattaatctcctttggtaa

SEQ ID NO: 29513 - DNA, 22 bp, synthetic construct
  misc_feature 1..22: note = chemically synthesized
  source 1..22: mol_type = other DNA
atctcctttggtaacaccctca

SEQ ID NO: 29514 - DNA, 22 bp, synthetic construct
  misc_feature 1..22: note = chemically synthesized
  source 1..22: mol_type = other DNA
ctttggtaacaccctcacagac

SEQ ID NO: 29515 - DNA, 22 bp, synthetic construct
  misc_feature 1..22: note = chemically synthesized
  source 1..22: mol_type = other DNA
tggtaacaccctcacagacaca

SEQ ID NO: 29516 - DNA, 22 bp, synthetic construct
  misc_feature 1..22: note = chemically synthesized
  source 1..22: mol_type = other DNA
ggtaacaccctcacagacacac

SEQ ID NO: 29517 - DNA, 22 bp, synthetic construct
  misc_feature 1..22: note = chemically synthesized
  source 1..22: mol_type = other DNA
gtaacaccctcacagacacacc

SEQ ID NO: 29518 - DNA, 22 bp, synthetic construct
  misc_feature 1..22: note = chemically synthesized
  source 1..22: mol_type = other DNA
acagacacacccaagatcatta

SEQ ID NO: 29519 - DNA, 22 bp, synthetic construct
  misc_feature 1..22: note = chemically synthesized
  source 1..22: mol_type = other DNA
ctttgcatccttcagtccaatc

SEQ ID NO: 29520 - DNA, 22 bp, synthetic construct
  misc_feature 1..22: note = chemically synthesized
  source 1..22: mol_type = other DNA
tgcatccttcagtccaatcaag

SEQ ID NO: 29521 - DNA, 22 bp, synthetic construct
  misc_feature 1..22: note = chemically synthesized
  source 1..22: mol_type = other DNA
gcatccttcagtccaatcaagt

SEQ ID NO: 29522 - DNA, 22 bp, synthetic construct
  misc_feature 1..22: note = chemically synthesized
  source 1..22: mol_type = other DNA
catccttcagtccaatcaagtt

SEQ ID NO: 29523 - DNA, 22 bp, synthetic construct
  misc_feature 1..22: note = chemically synthesized
  source 1..22: mol_type = other DNA
cagtccaatcaagttgacactc

SEQ ID NO: 29524 - DNA, 22 bp, synthetic construct
  misc_feature 1..22: note = chemically synthesized
  source 1..22: mol_type = other DNA
agtccaatcaagttgacactca

SEQ ID NO: 29525 - DNA, 22 bp, synthetic construct
  misc_feature 1..22: note = chemically synthesized
  source 1..22: mol_type = other DNA
acactcagtattaaccatcaca

SEQ ID NO: 29526 - DNA, 22 bp, synthetic construct
  misc_feature 1..22: note = chemically synthesized
  source 1..22: mol_type = other DNA
agtattaaccatcacagtcact

SEQ ID NO: 29527 - DNA, 22 bp, synthetic construct
  misc_feature 1..22: note = chemically synthesized
  source 1..22: mol_type = other DNA
accatcacagtcactttctaat

SEQ ID NO: 29528 - DNA, 22 bp, synthetic construct
  misc_feature 1..22: note = chemically synthesized
  source 1..22: mol_type = other DNA
tctaatgaggttggtttttttg

SEQ ID NO: 29529 - DNA, 22 bp, synthetic construct
  misc_feature 1..22: note = chemically synthesized
  source 1..22: mol_type = other DNA
ctaatgaggttggtttttttgt

SEQ ID NO: 29530 - DNA, 22 bp, synthetic construct
  misc_feature 1..22: note = chemically synthesized
  source 1..22: mol_type = other DNA
taatgaggttggtttttttgtt

SEQ ID NO: 29531 - DNA, 22 bp, synthetic construct
  misc_feature 1..22: note = chemically synthesized
  source 1..22: mol_type = other DNA
atgaggttggtttttttgttgt

SEQ ID NO: 29532 - DNA, 22 bp, synthetic construct
  misc_feature 1..22: note = chemically synthesized
  source 1..22: mol_type = other DNA
gtttttttgttgttgagttcct

SEQ ID NO: 29533 - DNA, 22 bp, synthetic construct
  misc_feature 1..22: note = chemically synthesized
  source 1..22: mol_type = other DNA
ttttgttgttgagttccttgta

SEQ ID NO: 29534 - DNA, 22 bp, synthetic construct
  misc_feature 1..22: note = chemically synthesized
  source 1..22: mol_type = other DNA
tttgttgttgagttccttgtag

SEQ ID NO: 29535 - DNA, 22 bp, synthetic construct
  misc_feature 1..22: note = chemically synthesized
  source 1..22: mol_type = other DNA
ttgttgttgagttccttgtaga

SEQ ID NO: 29536 - DNA, 22 bp, synthetic construct
  misc_feature 1..22: note = chemically synthesized
  source 1..22: mol_type = other DNA
tgttgttgagttccttgtagat

SEQ ID NO: 29537 - DNA, 22 bp, synthetic construct
  misc_feature 1..22: note = chemically synthesized
  source 1..22: mol_type = other DNA
gttgttgagttccttgtagatt

SEQ ID NO: 29538 - DNA, 22 bp, synthetic construct
  misc_feature 1..22: note = chemically synthesized
  source 1..22: mol_type = other DNA
ttgttgagttccttgtagattc

SEQ ID NO: 29539 - DNA, 22 bp, synthetic construct
  misc_feature 1..22: note = chemically synthesized
  source 1..22: mol_type = other DNA
ttgagttccttgtagattctgt

SEQ ID NO: 29540 - DNA, 22 bp, synthetic construct
  misc_feature 1..22: note = chemically synthesized
  source 1..22: mol_type = other DNA
agttccttgtagattctgtata

SEQ ID NO: 29541 - DNA, 22 bp, synthetic construct
  misc_feature 1..22: note = chemically synthesized
  source 1..22: mol_type = other DNA
cttgtagattctgtatattagc

SEQ ID NO: 29542 - DNA, 22 bp, synthetic construct
  misc_feature 1..22: note = chemically synthesized
  source 1..22: mol_type = other DNA
gtagattctgtatattagcctt

SEQ ID NO: 29543 - DNA, 22 bp, synthetic construct
  misc_feature 1..22: note = chemically synthesized
  source 1..22: mol_type = other DNA
tagattctgtatattagccttt

SEQ ID NO: 29544 - DNA, 22 bp, synthetic construct
  misc_feature 1..22: note = chemically synthesized
  source 1..22: mol_type = other DNA
tgtatattagccttttgttgca

SEQ ID NO: 29545 - DNA, 22 bp, synthetic construct
  misc_feature 1..22: note = chemically synthesized
  source 1..22: mol_type = other DNA
tatattagccttttgttgcatt

SEQ ID NO: 29546 - DNA, 22 bp, synthetic construct
  misc_feature 1..22: note = chemically synthesized
  source 1..22: mol_type = other DNA
gccttttgttgcattcatagtt

SEQ ID NO: 29547 - DNA, 22 bp, synthetic construct
  misc_feature 1..22: note = chemically synthesized
  source 1..22: mol_type = other DNA
ttgttgcattcatagtttgcaa

SEQ ID NO: 29548 - DNA, 22 bp, synthetic construct
  misc_feature 1..22: note = chemically synthesized
  source 1..22: mol_type = other DNA
tgttgcattcatagtttgcaat

SEQ ID NO: 29549 - DNA, 22 bp, synthetic construct
  misc_feature 1..22: note = chemically synthesized
  source 1..22: mol_type = other DNA
gttgcattcatagtttgcaatt

SEQ ID NO: 29550 - DNA, 22 bp, synthetic construct
  misc_feature 1..22: note = chemically synthesized
  source 1..22: mol_type = other DNA
ttgcattcatagtttgcaattt

SEQ ID NO: 29551 - DNA, 22 bp, synthetic construct
  misc_feature 1..22: note = chemically synthesized
  source 1..22: mol_type = other DNA
cattcatagtttgcaatttttt

SEQ ID NO: 29552 - DNA, 22 bp, synthetic construct
  misc_feature 1..22: note = chemically synthesized
  source 1..22: mol_type = other DNA
atagtttgcaatttttttttct

SEQ ID NO: 29553 - DNA, 22 bp, synthetic construct
  misc_feature 1..22: note = chemically synthesized
  source 1..22: mol_type = other DNA
gcaatttttttttctcattctg

SEQ ID NO: 29554 - DNA, 22 bp, synthetic construct
  misc_feature 1..22: note = chemically synthesized
  source 1..22: mol_type = other DNA
caatttttttttctcattctgt

SEQ ID NO: 29555 - DNA, 22 bp, synthetic construct
  misc_feature 1..22: note = chemically synthesized
  source 1..22: mol_type = other DNA
ttttttctcattctgtaggtta

SEQ ID NO: 29556 - DNA, 22 bp, synthetic construct
  misc_feature 1..22: note = chemically synthesized
  source 1..22: mol_type = other DNA
tttttctcattctgtaggttat

SEQ ID NO: 29557 - DNA, 22 bp, synthetic construct
  misc_feature 1..22: note = chemically synthesized
  source 1..22: mol_type = other DNA
ttttctcattctgtaggttatc

SEQ ID NO: 29558 - DNA, 22 bp, synthetic construct
  misc_feature 1..22: note = chemically synthesized
  source 1..22: mol_type = other DNA
tttctcattctgtaggttatcc

SEQ ID NO: 29559 - DNA, 22 bp, synthetic construct
  misc_feature 1..22: note = chemically synthesized
  source 1..22: mol_type = other DNA
ttctcattctgtaggttatccg

SEQ ID NO: 29560 - DNA, 22 bp, synthetic construct
  misc_feature 1..22: note = chemically synthesized
  source 1..22: mol_type = other DNA
tctcattctgtaggttatccgt

SEQ ID NO: 29561 - DNA, 22 bp, synthetic construct
  misc_feature 1..22: note = chemically synthesized
  source 1..22: mol_type = other DNA
ctcattctgtaggttatccgtt

SEQ ID NO: 29562 - DNA, 22 bp, synthetic construct
  misc_feature 1..22: note = chemically synthesized
  source 1..22: mol_type = other DNA
tcattctgtaggttatccgttt

SEQ ID NO: 29563 - DNA, 22 bp, synthetic construct
  misc_feature 1..22: note = chemically synthesized
  source 1..22: mol_type = other DNA
attctgtaggttatccgtttac

SEQ ID NO: 29564 - DNA, 22 bp, synthetic construct
  misc_feature 1..22: note = chemically synthesized
  source 1..22: mol_type = other DNA
tgtaggttatccgtttactctg

SEQ ID NO: 29565 - DNA, 22 bp, synthetic construct
  misc_feature 1..22: note = chemically synthesized
  source 1..22: mol_type = other DNA
taggttatccgtttactctgtt

SEQ ID NO: 29566 - DNA, 22 bp, synthetic construct
  misc_feature 1..22: note = chemically synthesized
  source 1..22: mol_type = other DNA
tccgtttactctgttgattcgg

SEQ ID NO: 29567 - DNA, 22 bp, synthetic construct
  misc_feature 1..22: note = chemically synthesized
  source 1..22: mol_type = other DNA
actctgttgattcggtcttttg

SEQ ID NO: 29568 - DNA, 22 bp, synthetic construct
  misc_feature 1..22: note = chemically synthesized
  source 1..22: mol_type = other DNA
ctctgttgattcggtcttttgc

SEQ ID NO: 29569 - DNA, 22 bp, synthetic construct
  misc_feature 1..22: note = chemically synthesized
  source 1..22: mol_type = other DNA
tgttgattcggtcttttgcggt

SEQ ID NO: 29570 - DNA, 22 bp, synthetic construct
  misc_feature 1..22: note = chemically synthesized
  source 1..22: mol_type = other DNA
ttgattcggtcttttgcggtgc

SEQ ID NO: 29571 - DNA, 22 bp, synthetic construct
  misc_feature 1..22: note = chemically synthesized
  source 1..22: mol_type = other DNA
attcggtcttttgcggtgcaga

SEQ ID NO: 29572 - DNA, 22 bp, synthetic construct
  misc_feature 1..22: note = chemically synthesized
  source 1..22: mol_type = other DNA
ggtcttttgcggtgcagaagca

SEQ ID NO: 29573 - DNA, 22 bp, synthetic construct
  misc_feature 1..22: note = chemically synthesized
  source 1..22: mol_type = other DNA
ttgcggtgcagaagcattttag

SEQ ID NO: 29574 - DNA, 22 bp, synthetic construct
  misc_feature 1..22: note = chemically synthesized
  source 1..22: mol_type = other DNA
tgcggtgcagaagcattttagt

SEQ ID NO: 29575 - DNA, 22 bp, synthetic construct
  misc_feature 1..22: note = chemically synthesized
  source 1..22: mol_type = other DNA
gcggtgcagaagcattttagtt

SEQ ID NO: 29576 - DNA, 22 bp, synthetic construct
  misc_feature 1..22: note = chemically synthesized
  source 1..22: mol_type = other DNA
cggtgcagaagcattttagttt

SEQ ID NO: 29577 - DNA, 22 bp, synthetic construct
  misc_feature 1..22: note = chemically synthesized
  source 1..22: mol_type = other DNA
tagtttaattaagtcccatttg

SEQ ID NO: 29578 - DNA, 22 bp, synthetic construct
  misc_feature 1..22: note = chemically synthesized
  source 1..22: mol_type = other DNA
agtttaattaagtcccatttgt

SEQ ID NO: 29579 - DNA, 22 bp, synthetic construct
  misc_feature 1..22: note = chemically synthesized
  source 1..22: mol_type = other DNA
gtttaattaagtcccatttgtc

SEQ ID NO: 29580 - DNA, 22 bp, synthetic construct
  misc_feature 1..22: note = chemically synthesized
  source 1..22: mol_type = other DNA
aattaagtcccatttgtctgtt

SEQ ID NO: 29581 - DNA, 22 bp, synthetic construct
  misc_feature 1..22: note = chemically synthesized
  source 1..22: mol_type = other DNA
attaagtcccatttgtctgttt

SEQ ID NO: 29582 - DNA, 22 bp, synthetic construct
  misc_feature 1..22: note = chemically synthesized
  source 1..22: mol_type = other DNA
agtcccatttgtctgtttttgt

SEQ ID NO: 29583 - DNA, 22 bp, synthetic construct
  misc_feature 1..22: note = chemically synthesized
  source 1..22: mol_type = other DNA
gtctgtttttgtttttgttgtg

SEQ ID NO: 29584 - DNA, 22 bp, synthetic construct
  misc_feature 1..22: note = chemically synthesized
  source 1..22: mol_type = other DNA
tctgtttttgtttttgttgtgt

SEQ ID NO: 29585 - DNA, 22 bp, synthetic construct
  misc_feature 1..22: note = chemically synthesized
  source 1..22: mol_type = other DNA
tttttgtttttgttgtgtttag

SEQ ID NO: 29586 - DNA, 22 bp, synthetic construct
  misc_feature 1..22: note = chemically synthesized
  source 1..22: mol_type = other DNA
ttgtttttgttgtgtttagttt

SEQ ID NO: 29587 - DNA, 22 bp, synthetic construct
  misc_feature 1..22: note = chemically synthesized
  source 1..22: mol_type = other DNA
tgtttttgttgtgtttagtttt

SEQ ID NO: 29588 - DNA, 22 bp, synthetic construct
  misc_feature 1..22: note = chemically synthesized
  source 1..22: mol_type = other DNA
gtttttgttgtgtttagttttg

SEQ ID NO: 29589 - DNA, 22 bp, synthetic construct
  misc_feature 1..22: note = chemically synthesized
  source 1..22: mol_type = other DNA
tttttgttgtgtttagttttga

SEQ ID NO: 29590 - DNA, 22 bp, synthetic construct
  misc_feature 1..22: note = chemically synthesized
  source 1..22: mol_type = other DNA
ttgttgtgtttagttttgagga

SEQ ID NO: 29591 - DNA, 22 bp, synthetic construct
  misc_feature 1..22: note = chemically synthesized
  source 1..22: mol_type = other DNA
tgttgtgtttagttttgaggac

SEQ ID NO: 29592 - DNA, 22 bp, synthetic construct
  misc_feature 1..22: note = chemically synthesized
  source 1..22: mol_type = other DNA
gttgtgtttagttttgaggact

SEQ ID NO: 29593 - DNA, 22 bp, synthetic construct
  misc_feature 1..22: note = chemically synthesized
  source 1..22: mol_type = other DNA
ttgtgtttagttttgaggactt

SEQ ID NO: 29594 - DNA, 22 bp, synthetic construct
  misc_feature 1..22: note = chemically synthesized
  source 1..22: mol_type = other DNA
tgtttagttttgaggacttggt

SEQ ID NO: 29595 - DNA, 22 bp, synthetic construct
  misc_feature 1..22: note = chemically synthesized
  source 1..22: mol_type = other DNA
agttttgaggacttggtcataa

SEQ ID NO: 29596 - DNA, 22 bp, synthetic construct
  misc_feature 1..22: note = chemically synthesized
  source 1..22: mol_type = other DNA
gttttgaggacttggtcataaa

SEQ ID NO: 29597 - DNA, 22 bp, synthetic construct
  misc_feature 1..22: note = chemically synthesized
  source 1..22: mol_type = other DNA
tgaggacttggtcataaattct

SEQ ID NO: 29598 - DNA, 22 bp, synthetic construct
  misc_feature 1..22: note = chemically synthesized
  source 1..22: mol_type = other DNA
gaggacttggtcataaattctt

SEQ ID NO: 29599 - DNA, 22 bp, synthetic construct
  misc_feature 1..22: note = chemically synthesized
  source 1..22: mol_type = other DNA
aggacttggtcataaattcttt

SEQ ID NO: 29600 - DNA, 22 bp, synthetic construct
  misc_feature 1..22: note = chemically synthesized
  source 1..22: mol_type = other DNA
ggtcataaattctttgcctagg

SEQ ID NO: 29601 - DNA, 22 bp, synthetic construct
  misc_feature 1..22: note = chemically synthesized
  source 1..22: mol_type = other DNA
gtcataaattctttgcctaggc

SEQ ID NO: 29602 - DNA, 22 bp, synthetic construct
  misc_feature 1..22: note = chemically synthesized
  source 1..22: mol_type = other DNA
tttgcctaggccacatctaatt

SEQ ID NO: 29603 - DNA, 22 bp, synthetic construct
  misc_feature 1..22: note = chemically synthesized
  source 1..22: mol_type = other DNA
tgcctaggccacatctaatttt

SEQ ID NO: 29604 - DNA, 22 bp, synthetic construct
  misc_feature 1..22: note = chemically synthesized
  source 1..22: mol_type = other DNA
gcctaggccacatctaattttt

SEQ ID NO: 29605 - DNA, 22 bp, synthetic construct
  misc_feature 1..22: note = chemically synthesized
  source 1..22: mol_type = other DNA
cctaggccacatctaattttta

SEQ ID NO: 29606 - DNA, 22 bp, synthetic construct
  misc_feature 1..22: note = chemically synthesized
  source 1..22: mol_type = other DNA
ggccacatctaatttttaatcc

SEQ ID NO: 29607 - DNA, 22 bp, synthetic construct
  misc_feature 1..22: note = chemically synthesized
  source 1..22: mol_type = other DNA
atttttaatcctcttttagagc

SEQ ID NO: 29608 - DNA, 22 bp, synthetic construct
  misc_feature 1..22: note = chemically synthesized
  source 1..22: mol_type = other DNA
ttaatcctcttttagagcctgt

SEQ ID NO: 29609 - DNA, 22 bp, synthetic construct
  misc_feature 1..22: note = chemically synthesized
  source 1..22: mol_type = other DNA
taatcctcttttagagcctgtc

SEQ ID NO: 29610 - DNA, 22 bp, synthetic construct
  misc_feature 1..22: note = chemically synthesized
  source 1..22: mol_type = other DNA
aatcctcttttagagcctgtct

SEQ ID NO: 29611 - DNA, 22 bp, synthetic construct
  misc_feature 1..22: note = chemically synthesized
  source 1..22: mol_type = other DNA
atcctcttttagagcctgtctt

SEQ ID NO: 29612 - DNA, 22 bp, synthetic construct
  misc_feature 1..22: note = chemically synthesized
  source 1..22: mol_type = other DNA
ttttagagcctgtctttccctc

SEQ ID NO: 29613 - DNA, 22 bp, synthetic construct
  misc_feature 1..22: note = chemically synthesized
  source 1..22: mol_type = other DNA
ttagagcctgtctttccctcca

SEQ ID NO: 29614 - DNA, 22 bp, synthetic construct
  misc_feature 1..22: note = chemically synthesized
  source 1..22: mol_type = other DNA
tagagcctgtctttccctccaa

SEQ ID NO: 29615 - DNA, 22 bp, synthetic construct
  misc_feature 1..22: note = chemically synthesized
  source 1..22: mol_type = other DNA
agagcctgtctttccctccaaa

SEQ ID NO: 29616 - DNA, 22 bp, synthetic construct
  misc_feature 1..22: note = chemically synthesized
  source 1..22: mol_type = other DNA
gagcctgtctttccctccaaac

SEQ ID NO: 29617 - DNA, 22 bp, synthetic construct
  misc_feature 1..22: note = chemically synthesized
  source 1..22: mol_type = other DNA
tctttccctccaaactaaatat

SEQ ID NO: 29618 - DNA, 22 bp, synthetic construct
  misc_feature 1..22: note = chemically synthesized
  source 1..22: mol_type = other DNA
tccctccaaactaaatattatt

SEQ ID NO: 29619 - DNA, 22 bp, synthetic construct
  misc_feature 1..22: note = chemically synthesized
  source 1..22: mol_type = other DNA
ccctccaaactaaatattattt

SEQ ID NO: 29620 - DNA, 22 bp, synthetic construct
  misc_feature 1..22: note = chemically synthesized
  source 1..22: mol_type = other DNA
cctccaaactaaatattatttt

SEQ ID NO: 29621 - DNA, 22 bp, synthetic construct
  misc_feature 1..22: note = chemically synthesized
  source 1..22: mol_type = other DNA
caaactaaatattattttaccc

SEQ ID NO: 29622 - DNA, 22 bp, synthetic construct
  misc_feature 1..22: note = chemically synthesized
  source 1..22: mol_type = other DNA
aatattattttacccccatttg

SEQ ID NO: 29623 - DNA, 22 bp, synthetic construct
  misc_feature 1..22: note = chemically synthesized
  source 1..22: mol_type = other DNA
ttttacccccatttgacacatg

SEQ ID NO: 29624 - DNA, 22 bp, synthetic construct
  misc_feature 1..22: note = chemically synthesized
  source 1..22: mol_type = other DNA
tacccccatttgacacatgagc

SEQ ID NO: 29625 - DNA, 22 bp, synthetic construct
  misc_feature 1..22: note = chemically synthesized
  source 1..22: mol_type = other DNA
acccccatttgacacatgagct

SEQ ID NO: 29626 - DNA, 22 bp, synthetic construct
  misc_feature 1..22: note = chemically synthesized
  source 1..22: mol_type = other DNA
cccccatttgacacatgagcta

SEQ ID NO: 29627 - DNA, 22 bp, synthetic construct
  misc_feature 1..22: note = chemically synthesized
  source 1..22: mol_type = other DNA
gacacatgagctaattgagcct

SEQ ID NO: 29628 - DNA, 22 bp, synthetic construct
  misc_feature 1..22: note = chemically synthesized
  source 1..22: mol_type = other DNA
acacatgagctaattgagcctt

SEQ ID NO: 29629 - DNA, 22 bp, synthetic construct
  misc_feature 1..22: note = chemically synthesized
  source 1..22: mol_type = other DNA
attgagccttctgtctgttaag

SEQ ID NO: 29630 - DNA, 22 bp, synthetic construct
  misc_feature 1..22: note = chemically synthesized
  source 1..22: mol_type = other DNA
agccttctgtctgttaagtaag

SEQ ID NO: 29631 - DNA, 22 bp, synthetic construct
  misc_feature 1..22: note = chemically synthesized
  source 1..22: mol_type = other DNA
ctgtctgttaagtaagttgact

SEQ ID NO: 29632 - DNA, 22 bp, synthetic construct
  misc_feature 1..22: note = chemically synthesized
  source 1..22: mol_type = other DNA
tgtctgttaagtaagttgacta

SEQ ID NO: 29633 - DNA, 22 bp, synthetic construct
  misc_feature 1..22: note = chemically synthesized
  source 1..22: mol_type = other DNA
tctgttaagtaagttgactagt

SEQ ID NO: 29634 - DNA, 22 bp, synthetic construct
  misc_feature 1..22: note = chemically synthesized
  source 1..22: mol_type = other DNA
ttaagtaagttgactagttcag

SEQ ID NO: 29635 - DNA, 22 bp, synthetic construct
  misc_feature 1..22: note = chemically synthesized
  source 1..22: mol_type = other DNA
agtaagttgactagttcagtgt

SEQ ID NO: 29636 - DNA, 22 bp, synthetic construct
  misc_feature 1..22: note = chemically synthesized
  source 1..22: mol_type = other DNA
actagttcagtgtaagttgttt

SEQ ID NO: 29637 - DNA, 22 bp, synthetic construct
  misc_feature 1..22: note = chemically synthesized
  source 1..22: mol_type = other DNA
gttcagtgtaagttgtttctaa

SEQ ID NO: 29638 - DNA, 22 bp, synthetic construct
  misc_feature 1..22: note = chemically synthesized
  source 1..22: mol_type = other DNA
agtgtaagttgtttctaatttt

SEQ ID NO: 29639 - DNA, 22 bp, synthetic construct
  misc_feature 1..22: note = chemically synthesized
  source 1..22: mol_type = other DNA
tttctaattttttgccatcata

SEQ ID NO: 29640 - DNA, 22 bp, synthetic construct
  misc_feature 1..22: note = chemically synthesized
  source 1..22: mol_type = other DNA
ctaattttttgccatcataatg

SEQ ID NO: 29641 - DNA, 22 bp, synthetic construct
  misc_feature 1..22: note = chemically synthesized
  source 1..22: mol_type = other DNA
taattttttgccatcataatgc

SEQ ID NO: 29642 - DNA, 22 bp, synthetic construct
  misc_feature 1..22: note = chemically synthesized
  source 1..22: mol_type = other DNA
attttttgccatcataatgctt

SEQ ID NO: 29643 - DNA, 22 bp, synthetic construct
  misc_feature 1..22: note = chemically synthesized
  source 1..22: mol_type = other DNA
tttgccatcataatgctttagt

SEQ ID NO: 29644 - DNA, 22 bp, synthetic construct
  misc_feature 1..22: note = chemically synthesized
  source 1..22: mol_type = other DNA
ttgccatcataatgctttagta

SEQ ID NO: 29645 - DNA, 22 bp, synthetic construct
  misc_feature 1..22: note = chemically synthesized
  source 1..22: mol_type = other DNA
tgccatcataatgctttagtaa

SEQ ID NO: 29646 - DNA, 22 bp, synthetic construct
  misc_feature 1..22: note = chemically synthesized
  source 1..22: mol_type = other DNA
gccatcataatgctttagtaaa

SEQ ID NO: 29647 - DNA, 22 bp, synthetic construct
  misc_feature 1..22: note = chemically synthesized
  source 1..22: mol_type = other DNA
ccatcataatgctttagtaaac

SEQ ID NO: 29648 - DNA, 22 bp, synthetic construct
  misc_feature 1..22: note = chemically synthesized
  source 1..22: mol_type = other DNA
tagtaaacatccttttcatact

SEQ ID NO: 29649 - DNA, 22 bp, synthetic construct
  misc_feature 1..22: note = chemically synthesized
  source 1..22: mol_type = other DNA
agtaaacatccttttcatactc

SEQ ID NO: 29650 - DNA, 22 bp, synthetic construct
  misc_feature 1..22: note = chemically synthesized
  source 1..22: mol_type = other DNA
gtaaacatccttttcatactct

SEQ ID NO: 29651 - DNA, 22 bp, synthetic construct
  misc_feature 1..22: note = chemically synthesized
  source 1..22: mol_type = other DNA
ttcatactctccttaattttcc

SEQ ID NO: 29652 - DNA, 22 bp, synthetic construct
  misc_feature 1..22: note = chemically synthesized
  source 1..22: mol_type = other DNA
tcatactctccttaattttccc

SEQ ID NO: 29653 - DNA, 22 bp, synthetic construct
  misc_feature 1..22: note = chemically synthesized
  source 1..22: mol_type = other DNA
catactctccttaattttcccc

SEQ ID NO: 29654 - DNA, 22 bp, synthetic construct
  misc_feature 1..22: note = chemically synthesized
  source 1..22: mol_type = other DNA
atactctccttaattttccccc

SEQ ID NO: 29655 - DNA, 22 bp, synthetic construct
  misc_feature 1..22: note = chemically synthesized
  source 1..22: mol_type = other DNA
tccttaattttcccccaggatg

SEQ ID NO: 29656 - DNA, 22 bp, synthetic construct
  misc_feature 1..22: note = chemically synthesized
  source 1..22: mol_type = other DNA
cttaattttcccccaggatggt

SEQ ID NO: 29657 - DNA, 22 bp, synthetic construct
  misc_feature 1..22: note = chemically synthesized
  source 1..22: mol_type = other DNA
aattttcccccaggatggtttt

SEQ ID NO: 29658 - DNA, 22 bp, synthetic construct
  misc_feature 1..22: note = chemically synthesized
  source 1..22: mol_type = other DNA
attttcccccaggatggttttc

SEQ ID NO: 29659 - DNA, 22 bp, synthetic construct
  misc_feature 1..22: note = chemically synthesized
  source 1..22: mol_type = other DNA
tcccccaggatggttttctaga

SEQ ID NO: 29660 - DNA, 22 bp, synthetic construct
  misc_feature 1..22: note = chemically synthesized
  source 1..22: mol_type = other DNA
cccccaggatggttttctagat

SEQ ID NO: 29661 - DNA, 22 bp, synthetic construct
  misc_feature 1..22: note = chemically synthesized
  source 1..22: mol_type = other DNA
ccccaggatggttttctagatg

SEQ ID NO: 29662 - DNA, 22 bp, synthetic construct
  misc_feature 1..22: note = chemically synthesized
  source 1..22: mol_type = other DNA
tctagatgtggacttgctggat

SEQ ID NO: 29663 - DNA, 22 bp, synthetic construct
  misc_feature 1..22: note = chemically synthesized
  source 1..22: mol_type = other DNA
ctagatgtggacttgctggatc

SEQ ID NO: 29664 - DNA, 22 bp, synthetic construct
  misc_feature 1..22: note = chemically synthesized
  source 1..22: mol_type = other DNA
tagatgtggacttgctggatcc

SEQ ID NO: 29665 - DNA, 22 bp, synthetic construct
  misc_feature 1..22: note = chemically synthesized
  source 1..22: mol_type = other DNA
gatgtggacttgctggatccaa

SEQ ID NO: 29666 - DNA, 22 bp, synthetic construct
  misc_feature 1..22: note = chemically synthesized
  source 1..22: mol_type = other DNA
gctggatccaaagtgtgcatat

SEQ ID NO: 29667 - DNA, 22 bp, synthetic construct
  misc_feature 1..22: note = chemically synthesized
  source 1..22: mol_type = other DNA
ctggatccaaagtgtgcatatt

SEQ ID NO: 29668 - DNA, 22 bp, synthetic construct
  misc_feature 1..22: note = chemically synthesized
  source 1..22: mol_type = other DNA
gatccaaagtgtgcatattttc

SEQ ID NO: 29669 - DNA, 22 bp, synthetic construct
  misc_feature 1..22: note = chemically synthesized
  source 1..22: mol_type = other DNA
tccaaatgtatccatatattgt

SEQ ID NO: 29670 - DNA, 22 bp, synthetic construct
  misc_feature 1..22: note = chemically synthesized
  source 1..22: mol_type = other DNA
ccaaatgtatccatatattgtg

SEQ ID NO: 29671 - DNA, 22 bp, synthetic construct
  misc_feature 1..22: note = chemically synthesized
  source 1..22: mol_type = other DNA
caaatgtatccatatattgtgg

SEQ ID NO: 29672 - DNA, 22 bp, synthetic construct
  misc_feature 1..22: note = chemically synthesized
  source 1..22: mol_type = other DNA
tggctttgtgttttaatagagg

SEQ ID NO: 29673 - DNA, 22 bp, synthetic construct
  misc_feature 1..22: note = chemically synthesized
  source 1..22: mol_type = other DNA
tgtgttttaatagaggtagcag

SEQ ID NO: 29674 - DNA, 22 bp, synthetic construct
  misc_feature 1..22: note = chemically synthesized
  source 1..22: mol_type = other DNA
gtgttttaatagaggtagcagc

SEQ ID NO: 29675 - DNA, 22 bp, synthetic construct
  misc_feature 1..22: note = chemically synthesized
  source 1..22: mol_type = other DNA
tgttttaatagaggtagcagca

SEQ ID NO: 29676 - DNA, 22 bp, synthetic construct
  misc_feature 1..22: note = chemically synthesized
  source 1..22: mol_type = other DNA
taatagaggtagcagcaatatt

SEQ ID NO: 29677 - DNA, 22 bp, synthetic construct
  misc_feature 1..22: note = chemically synthesized
  source 1..22: mol_type = other DNA
aatagaggtagcagcaatatta

SEQ ID NO: 29678 - DNA, 22 bp, synthetic construct
  misc_feature 1..22: note = chemically synthesized
  source 1..22: mol_type = other DNA
atagaggtagcagcaatattag

SEQ ID NO: 29679 - DNA, 22 bp, synthetic construct
  misc_feature 1..22: note = chemically synthesized
  source 1..22: mol_type = other DNA
gaggagagaattaaggaacgat

SEQ ID NO: 29680 - DNA, 22 bp, synthetic construct
  misc_feature 1..22: note = chemically synthesized
  source 1..22: mol_type = other DNA
aggaacgattctagtgtagcag

SEQ ID NO: 29681 - DNA, 22 bp, synthetic construct
  misc_feature 1..22: note = chemically synthesized
  source 1..22: mol_type = other DNA
tagtgtagcaggacaagctgca

SEQ ID NO: 29682 - DNA, 22 bp, synthetic construct
  misc_feature 1..22: note = chemically synthesized
  source 1..22: mol_type = other DNA
gtgtagcaggacaagctgcata

SEQ ID NO: 29683 - DNA, 22 bp, synthetic construct
  misc_feature 1..22: note = chemically synthesized
  source 1..22: mol_type = other DNA
catacaaaacccctcagacacc

SEQ ID NO: 29684 - DNA, 22 bp, synthetic construct
  misc_feature 1..22: note = chemically synthesized
  source 1..22: mol_type = other DNA
agacaccgagttaaagaaggaa

SEQ ID NO: 29685 - DNA, 22 bp, synthetic construct
  misc_feature 1..22: note = chemically synthesized
  source 1..22: mol_type = other DNA
aagaaggaagggctttattcgg

SEQ ID NO: 29686 - DNA, 22 bp, synthetic construct
  misc_feature 1..22: note = chemically synthesized
  source 1..22: mol_type = other DNA
tattcggctgggagcttgggca

SEQ ID NO: 29687 - DNA, 22 bp, synthetic construct
  misc_feature 1..22: note = chemically synthesized
  source 1..22: mol_type = other DNA
attcggctgggagcttgggcaa

SEQ ID NO: 29688 - DNA, 22 bp, synthetic construct
  misc_feature 1..22: note = chemically synthesized
  source 1..22: mol_type = other DNA
ttcggctgggagcttgggcaag

SEQ ID NO: 29689 - DNA, 22 bp, synthetic construct
  misc_feature 1..22: note = chemically synthesized
  source 1..22: mol_type = other DNA
ggctgggagcttgggcaagact

SEQ ID NO: 29690 - DNA, 22 bp, synthetic construct
  misc_feature 1..22: note = chemically synthesized
  source 1..22: mol_type = other DNA
ggagcttgggcaagactcacat

SEQ ID NO: 29691 - DNA, 22 bp, synthetic construct
  misc_feature 1..22: note = chemically synthesized
  source 1..22: mol_type = other DNA
gggcaagactcacatctccaac

SEQ ID NO: 29692 - DNA, 22 bp, synthetic construct
  misc_feature 1..22: note = chemically synthesized
  source 1..22: mol_type = other DNA
ggcaagactcacatctccaaca

SEQ ID NO: 29693 - DNA, 22 bp, synthetic construct
  misc_feature 1..22: note = chemically synthesized
  source 1..22: mol_type = other DNA
acatctccaacaaccaagctct

SEQ ID NO: 29694 - DNA, 22 bp, synthetic construct
  misc_feature 1..22: note = chemically synthesized
  source 1..22: mol_type = other DNA
caacaaccaagctctcagagtg

SEQ ID NO: 29695 - DNA, 22 bp, synthetic construct
  misc_feature 1..22: note = chemically synthesized
  source 1..22: mol_type = other DNA
tcagagtgagcaattcctgtcc

SEQ ID NO: 29696 - DNA, 22 bp, synthetic construct
  misc_feature 1..22: note = chemically synthesized
  source 1..22: mol_type = other DNA
agagtgagcaattcctgtccct

SEQ ID NO: 29697 - DNA, 22 bp, synthetic construct
  misc_feature 1..22: note = chemically synthesized
  source 1..22: mol_type = other DNA
ctgtcccttttaagggcttaca

SEQ ID NO: 29698 - DNA, 22 bp, synthetic construct
  misc_feature 1..22: note = chemically synthesized
  source 1..22: mol_type = other DNA
tcccttttaagggcttacaact

SEQ ID NO: 29699 - DNA, 22 bp, synthetic construct
  misc_feature 1..22: note = chemically synthesized
  source 1..22: mol_type = other DNA
ttaagggcttacaactctaagg

SEQ ID NO: 29700 - DNA, 22 bp, synthetic construct
  misc_feature 1..22: note = chemically synthesized
  source 1..22: mol_type = other DNA
taagggcttacaactctaaggg

SEQ ID NO: 29701 - DNA, 22 bp, synthetic construct
  misc_feature 1..22: note = chemically synthesized
  source 1..22: mol_type = other DNA
aagggcttacaactctaagggg

SEQ ID NO: 29702 - DNA, 22 bp, synthetic construct
  misc_feature 1..22: note = chemically synthesized
  source 1..22: mol_type = other DNA
agggcttacaactctaaggggg

SEQ ID NO: 29703 - DNA, 22 bp, synthetic construct
  misc_feature 1..22: note = chemically synthesized
  source 1..22: mol_type = other DNA
acaactctaagggggtacatga

SEQ ID NO: 29704 - DNA, 22 bp, synthetic construct
  misc_feature 1..22: note = chemically synthesized
  source 1..22: mol_type = other DNA
caactctaagggggtacatgac

SEQ ID NO: 29705 - DNA, 22 bp, synthetic construct
  misc_feature 1..22: note = chemically synthesized
  source 1..22: mol_type = other DNA
taagggggtacatgactggggg

SEQ ID NO: 29706 - DNA, 22 bp, synthetic construct
  misc_feature 1..22: note = chemically synthesized
  source 1..22: mol_type = other DNA
agggggtacatgactgggggct

SEQ ID NO: 29707 - DNA, 22 bp, synthetic construct
  misc_feature 1..22: note = chemically synthesized
  source 1..22: mol_type = other DNA
ggggctgcatgcactggtcatc

SEQ ID NO: 29708 - DNA, 22 bp, synthetic construct
  misc_feature 1..22: note = chemically synthesized
  source 1..22: mol_type = other DNA
catgcactggtcatcagaatgg

SEQ ID NO: 29709 - DNA, 22 bp, synthetic construct
  misc_feature 1..22: note = chemically synthesized
  source 1..22: mol_type = other DNA
gtcatcagaatggaacagaaca

SEQ ID NO: 29710 - DNA, 22 bp, synthetic construct
  misc_feature 1..22: note = chemically synthesized
  source 1..22: mol_type = other DNA
tcacactgcttttccatacagt

SEQ ID NO: 29711 - DNA, 22 bp, synthetic construct
  misc_feature 1..22: note = chemically synthesized
  source 1..22: mol_type = other DNA
cacactgcttttccatacagtg

SEQ ID NO: 29712 - DNA, 22 bp, synthetic construct
  misc_feature 1..22: note = chemically synthesized
  source 1..22: mol_type = other DNA
acactgcttttccatacagtgt

SEQ ID NO: 29713 - DNA, 22 bp, synthetic construct
  misc_feature 1..22: note = chemically synthesized
  source 1..22: mol_type = other DNA
cttttccatacagtgtctggaa

SEQ ID NO: 29714 - DNA, 22 bp, synthetic construct
  misc_feature 1..22: note = chemically synthesized
  source 1..22: mol_type = other DNA
ttccatacagtgtctggaatct

SEQ ID NO: 29715 - DNA, 22 bp, synthetic construct
  misc_feature 1..22: note = chemically synthesized
  source 1..22: mol_type = other DNA
tccatacagtgtctggaatcta

SEQ ID NO: 29716 - DNA, 22 bp, synthetic construct
  misc_feature 1..22: note = chemically synthesized
  source 1..22: mol_type = other DNA
ccatacagtgtctggaatctat

SEQ ID NO: 29717 - DNA, 22 bp, synthetic construct
  misc_feature 1..22: note = chemically synthesized
  source 1..22: mol_type = other DNA
catacagtgtctggaatctata

SEQ ID NO: 29718 - DNA, 22 bp, synthetic construct
  misc_feature 1..22: note = chemically synthesized
  source 1..22: mol_type = other DNA
gaatctatagataacataactg

SEQ ID NO: 29719 - DNA, 22 bp, synthetic construct
  misc_feature 1..22: note = chemically synthesized
  source 1..22: mol_type = other DNA
tagataacataactggccaggt

SEQ ID NO: 29720 - DNA, 22 bp, synthetic construct
  misc_feature 1..22: note = chemically synthesized
  source 1..22: mol_type = other DNA
gccaggtcaggggtctatcttt

SEQ ID NO: 29721 - DNA, 22 bp, synthetic construct
  misc_feature 1..22: note = chemically synthesized
  source 1..22: mol_type = other DNA
tctttaaccaggcccaggatgt

SEQ ID NO: 29722 - DNA, 22 bp, synthetic construct
  misc_feature 1..22: note = chemically synthesized
  source 1..22: mol_type = other DNA
taaccaggcccaggatgtggtc

SEQ ID NO: 29723 - DNA, 22 bp, synthetic construct
  misc_feature 1..22: note = chemically synthesized
  source 1..22: mol_type = other DNA
aaccaggcccaggatgtggtct

SEQ ID NO: 29724 - DNA, 22 bp, synthetic construct
  misc_feature 1..22: note = chemically synthesized
  source 1..22: mol_type = other DNA
accaggcccaggatgtggtctc

SEQ ID NO: 29725 - DNA, 22 bp, synthetic construct
  misc_feature 1..22: note = chemically synthesized
  source 1..22: mol_type = other DNA
aggctgtttgcctgtggatttc

SEQ ID NO: 29726 - DNA, 22 bp, synthetic construct
  misc_feature 1..22: note = chemically synthesized
  source 1..22: mol_type = other DNA
tttgcctgtggatttcatttct

SEQ ID NO: 29727 - DNA, 22 bp, synthetic construct
  misc_feature 1..22: note = chemically synthesized
  source 1..22: mol_type = other DNA
gcctgtggatttcatttctgcc

SEQ ID NO: 29728 - DNA, 22 bp, synthetic construct
  misc_feature 1..22: note = chemically synthesized
  source 1..22: mol_type = other DNA
cctgtggatttcatttctgcct

SEQ ID NO: 29729 - DNA, 22 bp, synthetic construct
  misc_feature 1..22: note = chemically synthesized
  source 1..22: mol_type = other DNA
tggatttcatttctgcctttta

SEQ ID NO: 29730 - DNA, 22 bp, synthetic construct
  misc_feature 1..22: note = chemically synthesized
  source 1..22: mol_type = other DNA
catttctgccttttagttttta

SEQ ID NO: 29731 - DNA, 22 bp, synthetic construct
  misc_feature 1..22: note = chemically synthesized
  source 1..22: mol_type = other DNA
atttctgccttttagtttttac

SEQ ID NO: 29732 - DNA, 22 bp, synthetic construct
  misc_feature 1..22: note = chemically synthesized
  source 1..22: mol_type = other DNA
ctgccttttagtttttacttct

SEQ ID NO: 29733 - DNA, 22 bp, synthetic construct
  misc_feature 1..22: note = chemically synthesized
  source 1..22: mol_type = other DNA
tgccttttagtttttacttctt

SEQ ID NO: 29734 - DNA, 22 bp, synthetic construct
  misc_feature 1..22: note = chemically synthesized
  source 1..22: mol_type = other DNA
ccttttagtttttacttcttct

SEQ ID NO: 29735 - DNA, 22 bp, synthetic construct
  misc_feature 1..22: note = chemically synthesized
  source 1..22: mol_type = other DNA
ttagtttttacttcttctttct

SEQ ID NO: 29736 - DNA, 22 bp, synthetic construct
  misc_feature 1..22: note = chemically synthesized
  source 1..22: mol_type = other DNA
tagtttttacttcttctttctt

SEQ ID NO: 29737 - DNA, 22 bp, synthetic construct
  misc_feature 1..22: note = chemically synthesized
  source 1..22: mol_type = other DNA
agtttttacttcttctttcttt

SEQ ID NO: 29738 - DNA, 22 bp, synthetic construct
  misc_feature 1..22: note = chemically synthesized
  source 1..22: mol_type = other DNA
gtttttacttcttctttctttg

SEQ ID NO: 29739 - DNA, 22 bp, synthetic construct
  misc_feature 1..22: note = chemically synthesized
  source 1..22: mol_type = other DNA
ttacttcttctttctttggagg

SEQ ID NO: 29740 - DNA, 22 bp, synthetic construct
  misc_feature 1..22: note = chemically synthesized
  source 1..22: mol_type = other DNA
tacttcttctttctttggaggc

SEQ ID NO: 29741 - DNA, 22 bp, synthetic construct
  misc_feature 1..22: note = chemically synthesized
  source 1..22: mol_type = other DNA
acttcttctttctttggaggca

SEQ ID NO: 29742 - DNA, 22 bp, synthetic construct
  misc_feature 1..22: note = chemically synthesized
  source 1..22: mol_type = other DNA
cttcttctttctttggaggcag

SEQ ID NO: 29743 - DNA, 22 bp, synthetic construct
  misc_feature 1..22: note = chemically synthesized
  source 1..22: mol_type = other DNA
cttctttctttggaggcagaaa

SEQ ID NO: 29744 - DNA, 22 bp, synthetic construct
  misc_feature 1..22: note = chemically synthesized
  source 1..22: mol_type = other DNA
ttctttctttggaggcagaaat

SEQ ID NO: 29745 - DNA, 22 bp, synthetic construct
  misc_feature 1..22: note = chemically synthesized
  source 1..22: mol_type = other DNA
ctttctttggaggcagaaattg

SEQ ID NO: 29746 - DNA, 22 bp, synthetic construct
  misc_feature 1..22: note = chemically synthesized
  source 1..22: mol_type = other DNA
tttctttggaggcagaaattgg

SEQ ID NO: 29747 - DNA, 22 bp, synthetic construct
  misc_feature 1..22: note = chemically synthesized
  source 1..22: mol_type = other DNA
tctttggaggcagaaattgggc

SEQ ID NO: 29748 - DNA, 22 bp, synthetic construct
  misc_feature 1..22: note = chemically synthesized
  source 1..22: mol_type = other DNA
ctttggaggcagaaattgggca

SEQ ID NO: 29749 - DNA, 22 bp, synthetic construct
  misc_feature 1..22: note = chemically synthesized
  source 1..22: mol_type = other DNA
tttggaggcagaaattgggcat

SEQ ID NO: 29750 - DNA, 22 bp, synthetic construct
  misc_feature 1..22: note = chemically synthesized
  source 1..22: mol_type = other DNA
tggaggcagaaattgggcataa

SEQ ID NO: 29751 - DNA, 22 bp, synthetic construct
  misc_feature 1..22: note = chemically synthesized
  source 1..22: mol_type = other DNA
ggaggcagaaattgggcataaa

SEQ ID NO: 29752 - DNA, 22 bp, synthetic construct
  misc_feature 1..22: note = chemically synthesized
  source 1..22: mol_type = other DNA
gaggcagaaattgggcataaaa

SEQ ID NO: 29753 - DNA, 22 bp, synthetic construct
  misc_feature 1..22: note = chemically synthesized
  source 1..22: mol_type = other DNA
ggcataaaacaatatgaagggt

SEQ ID NO: 29754 - DNA, 22 bp, synthetic construct
  misc_feature 1..22: note = chemically synthesized
  source 1..22: mol_type = other DNA
ctcccttactaggaagagagaa

SEQ ID NO: 29755 - DNA, 22 bp, synthetic construct
  misc_feature 1..22: note = chemically synthesized
  source 1..22: mol_type = other DNA
ccttactaggaagagagaaata

SEQ ID NO: 29756 - DNA, 22 bp, synthetic construct
  misc_feature 1..22: note = chemically synthesized
  source 1..22: mol_type = other DNA
actaggaagagagaaataccat

SEQ ID NO: 29757 - DNA, 22 bp, synthetic construct
  misc_feature 1..22: note = chemically synthesized
  source 1..22: mol_type = other DNA
ctaggaagagagaaataccatg

SEQ ID NO: 29758 - DNA, 22 bp, synthetic construct
  misc_feature 1..22: note = chemically synthesized
  source 1..22: mol_type = other DNA
ggaagagagaaataccatgtga

SEQ ID NO: 29759 - DNA, 22 bp, synthetic construct
  misc_feature 1..22: note = chemically synthesized
  source 1..22: mol_type = other DNA
gtgttattggatttgacatcgg

SEQ ID NO: 29760 - DNA, 22 bp, synthetic construct
  misc_feature 1..22: note = chemically synthesized
  source 1..22: mol_type = other DNA
tgttattggatttgacatcggg

SEQ ID NO: 29761 - DNA, 22 bp, synthetic construct
  misc_feature 1..22: note = chemically synthesized
  source 1..22: mol_type = other DNA
ttggatttgacatcggggttgg

SEQ ID NO: 29762 - DNA, 22 bp, synthetic construct
  misc_feature 1..22: note = chemically synthesized
  source 1..22: mol_type = other DNA
gatttgacatcggggttggacc

SEQ ID NO: 29763 - DNA, 22 bp, synthetic construct
  misc_feature 1..22: note = chemically synthesized
  source 1..22: mol_type = other DNA
gacatcggggttggaccaagca

SEQ ID NO: 29764 - DNA, 22 bp, synthetic construct
  misc_feature 1..22: note = chemically synthesized
  source 1..22: mol_type = other DNA
acatcggggttggaccaagcat

SEQ ID NO: 29765 - DNA, 22 bp, synthetic construct
  misc_feature 1..22: note = chemically synthesized
  source 1..22: mol_type = other DNA
gaccaagcatcttctatgaaca

SEQ ID NO: 29766 - DNA, 22 bp, synthetic construct
  misc_feature 1..22: note = chemically synthesized
  source 1..22: mol_type = other DNA
ctatgaacatctataagcacgt

SEQ ID NO: 29767 - DNA, 22 bp, synthetic construct
  misc_feature 1..22: note = chemically synthesized
  source 1..22: mol_type = other DNA
tatgaacatctataagcacgtt

SEQ ID NO: 29768 - DNA, 22 bp, synthetic construct
  misc_feature 1..22: note = chemically synthesized
  source 1..22: mol_type = other DNA
tgaacatctataagcacgttct

SEQ ID NO: 29769 - DNA, 22 bp, synthetic construct
  misc_feature 1..22: note = chemically synthesized
  source 1..22: mol_type = other DNA
taagcacgttctccttatcaaa

SEQ ID NO: 29770 - DNA, 22 bp, synthetic construct
  misc_feature 1..22: note = chemically synthesized
  source 1..22: mol_type = other DNA
tccttatcaaaaggtactttgc

SEQ ID NO: 29771 - DNA, 22 bp, synthetic construct
  misc_feature 1..22: note = chemically synthesized
  source 1..22: mol_type = other DNA
cttatcaaaaggtactttgctt

SEQ ID NO: 29772 - DNA, 22 bp, synthetic construct
  misc_feature 1..22: note = chemically synthesized
  source 1..22: mol_type = other DNA
atcaaaaggtactttgcttggt

SEQ ID NO: 29773 - DNA, 22 bp, synthetic construct
  misc_feature 1..22: note = chemically synthesized
  source 1..22: mol_type = other DNA
tcaaaaggtactttgcttggtg

SEQ ID NO: 29774 - DNA, 22 bp, synthetic construct
  misc_feature 1..22: note = chemically synthesized
  source 1..22: mol_type = other DNA
tgcttggtgctttaaaagataa

SEQ ID NO: 29775 - DNA, 22 bp, synthetic construct
  misc_feature 1..22: note = chemically synthesized
  source 1..22: mol_type = other DNA
gcttggtgctttaaaagataaa

SEQ ID NO: 29776 - DNA, 22 bp, synthetic construct
  misc_feature 1..22: note = chemically synthesized
  source 1..22: mol_type = other DNA
cttggtgctttaaaagataaat

SEQ ID NO: 29777 - DNA, 22 bp, synthetic construct
  misc_feature 1..22: note = chemically synthesized
  source 1..22: mol_type = other DNA
ggtgctttaaaagataaatgac

SEQ ID NO: 29778 - DNA, 22 bp, synthetic construct
  misc_feature 1..22: note = chemically synthesized
  source 1..22: mol_type = other DNA
gtgctttaaaagataaatgact

SEQ ID NO: 29779 - DNA, 22 bp, synthetic construct
  misc_feature 1..22: note = chemically synthesized
  source 1..22: mol_type = other DNA
taaaagataaatgactatgtag

SEQ ID NO: 29780 - DNA, 22 bp, synthetic construct
  misc_feature 1..22: note = chemically synthesized
  source 1..22: mol_type = other DNA
aaaagataaatgactatgtagc

SEQ ID NO: 29781 - DNA, 22 bp, synthetic construct
  misc_feature 1..22: note = chemically synthesized
  source 1..22: mol_type = other DNA
aaagataaatgactatgtagct

SEQ ID NO: 29782 - DNA, 22 bp, synthetic construct
  misc_feature 1..22: note = chemically synthesized
  source 1..22: mol_type = other DNA
tgtagcttaggagatttcttca

SEQ ID NO: 29783 - DNA, 22 bp, synthetic construct
  misc_feature 1..22: note = chemically synthesized
  source 1..22: mol_type = other DNA
aggagatttcttcataattgaa

SEQ ID NO: 29784 - DNA, 22 bp, synthetic construct
  misc_feature 1..22: note = chemically synthesized
  source 1..22: mol_type = other DNA
ggagatttcttcataattgaaa

SEQ ID NO: 29785 - DNA, 22 bp, synthetic construct
  misc_feature 1..22: note = chemically synthesized
  source 1..22: mol_type = other DNA
cttcataattgaaaaccacagc

SEQ ID NO: 29786 - DNA, 22 bp, synthetic construct
  misc_feature 1..22: note = chemically synthesized
  source 1..22: mol_type = other DNA
ttcataattgaaaaccacagca

SEQ ID NO: 29787 - DNA, 22 bp, synthetic construct
  misc_feature 1..22: note = chemically synthesized
  source 1..22: mol_type = other DNA
cataattgaaaaccacagcagc

SEQ ID NO: 29788 - DNA, 22 bp, synthetic construct
  misc_feature 1..22: note = chemically synthesized
  source 1..22: mol_type = other DNA
ataattgaaaaccacagcagct

SEQ ID NO: 29789 - DNA, 22 bp, synthetic construct
  misc_feature 1..22: note = chemically synthesized
  source 1..22: mol_type = other DNA
aaaaccacagcagctgttattt

SEQ ID NO: 29790 - DNA, 22 bp, synthetic construct
  misc_feature 1..22: note = chemically synthesized
  source 1..22: mol_type = other DNA
ttatttgaacatacctgagccc

SEQ ID NO: 29791 - DNA, 22 bp, synthetic construct
  misc_feature 1..22: note = chemically synthesized
  source 1..22: mol_type = other DNA
tttgaacatacctgagcccctt

SEQ ID NO: 29792 - DNA, 22 bp, synthetic construct
  misc_feature 1..22: note = chemically synthesized
  source 1..22: mol_type = other DNA
gaacatacctgagccccttctg

SEQ ID NO: 29793 - DNA, 22 bp, synthetic construct
  misc_feature 1..22: note = chemically synthesized
  source 1..22: mol_type = other DNA
aacatacctgagccccttctgg

SEQ ID NO: 29794 - DNA, 22 bp, synthetic construct
  misc_feature 1..22: note = chemically synthesized
  source 1..22: mol_type = other DNA
agccccttctggaccactgtag

SEQ ID NO: 29795 - DNA, 22 bp, synthetic construct
  misc_feature 1..22: note = chemically synthesized
  source 1..22: mol_type = other DNA
ctggaccactgtaggagaagga

SEQ ID NO: 29796 - DNA, 22 bp, synthetic construct
  misc_feature 1..22: note = chemically synthesized
  source 1..22: mol_type = other DNA
tggaccactgtaggagaaggag

SEQ ID NO: 29797 - DNA, 22 bp, synthetic construct
  misc_feature 1..22: note = chemically synthesized
  source 1..22: mol_type = other DNA
gaccactgtaggagaaggagga

SEQ ID NO: 29798 - DNA, 22 bp, synthetic construct
  misc_feature 1..22: note = chemically synthesized
  source 1..22: mol_type = other DNA
taggagaaggaggaagagaggt

SEQ ID NO: 29799 - DNA, 22 bp, synthetic construct
  misc_feature 1..22: note = chemically synthesized
  source 1..22: mol_type = other DNA
ctgctgctgagggcatgtatga

SEQ ID NO: 29800 - DNA, 22 bp, synthetic construct
  misc_feature 1..22: note = chemically synthesized
  source 1..22: mol_type = other DNA
tgctgctgagggcatgtatgat

SEQ ID NO: 29801 - DNA, 22 bp, synthetic construct
  misc_feature 1..22: note = chemically synthesized
  source 1..22: mol_type = other DNA
ctgctgagggcatgtatgatga

SEQ ID NO: 29802 - DNA, 22 bp, synthetic construct
  misc_feature 1..22: note = chemically synthesized
  source 1..22: mol_type = other DNA
ctgagggcatgtatgatgacaa

SEQ ID NO: 29803 - DNA, 22 bp, synthetic construct
  misc_feature 1..22: note = chemically synthesized
  source 1..22: mol_type = other DNA
agggcatgtatgatgacaatgg

SEQ ID NO: 29804 - DNA, 22 bp, synthetic construct
  misc_feature 1..22: note = chemically synthesized
  source 1..22: mol_type = other DNA
gtcctaactttgacactacaaa

SEQ ID NO: 29805 - DNA, 22 bp, synthetic construct
  misc_feature 1..22: note = chemically synthesized
  source 1..22: mol_type = other DNA
tcctaactttgacactacaaag

SEQ ID NO: 29806 - DNA, 22 bp, synthetic construct
  misc_feature 1..22: note = chemically synthesized
  source 1..22: mol_type = other DNA
actttgacactacaaagtgact

SEQ ID NO: 29807 - DNA, 22 bp, synthetic construct
  misc_feature 1..22: note = chemically synthesized
  source 1..22: mol_type = other DNA
tgacactacaaagtgactggag

SEQ ID NO: 29808 - DNA, 22 bp, synthetic construct
  misc_feature 1..22: note = chemically synthesized
  source 1..22: mol_type = other DNA
gacactacaaagtgactggagc

SEQ ID NO: 29809 - DNA, 22 bp, synthetic construct
  misc_feature 1..22: note = chemically synthesized
  source 1..22: mol_type = other DNA
acactacaaagtgactggagct

SEQ ID NO: 29810 - DNA, 22 bp, synthetic construct
  misc_feature 1..22: note = chemically synthesized
  source 1..22: mol_type = other DNA
caaagtgactggagctttaggc

SEQ ID NO: 29811 - DNA, 22 bp, synthetic construct
  misc_feature 1..22: note = chemically synthesized
  source 1..22: mol_type = other DNA
gagctttaggcaagtagttact

SEQ ID NO: 29812 - DNA, 22 bp, synthetic construct
  misc_feature 1..22: note = chemically synthesized
  source 1..22: mol_type = other DNA
taggcaagtagttactccaatt

SEQ ID NO: 29813 - DNA, 22 bp, synthetic construct
  misc_feature 1..22: note = chemically synthesized
  source 1..22: mol_type = other DNA
aggcaagtagttactccaattg

SEQ ID NO: 29814 - DNA, 22 bp, synthetic construct
  misc_feature 1..22: note = chemically synthesized
  source 1..22: mol_type = other DNA
ggcaagtagttactccaattgt

SEQ ID NO: 29815 - DNA, 22 bp, synthetic construct
  misc_feature 1..22: note = chemically synthesized
  source 1..22: mol_type = other DNA
ctccaattgtcttttcagactc

SEQ ID NO: 29816 - DNA, 22 bp, synthetic construct
  misc_feature 1..22: note = chemically synthesized
  source 1..22: mol_type = other DNA
caattgtcttttcagactcttt

SEQ ID NO: 29817 - DNA, 22 bp, synthetic construct
  misc_feature 1..22: note = chemically synthesized
  source 1..22: mol_type = other DNA
tcttttcagactctttcttttt

SEQ ID NO: 29818 - DNA, 22 bp, synthetic construct
  misc_feature 1..22: note = chemically synthesized
  source 1..22: mol_type = other DNA
ttcagactctttctttttgagg

SEQ ID NO: 29819 - DNA, 22 bp, synthetic construct
  misc_feature 1..22: note = chemically synthesized
  source 1..22: mol_type = other DNA
tcagactctttctttttgaggt

SEQ ID NO: 29820 - DNA, 22 bp, synthetic construct
  misc_feature 1..22: note = chemically synthesized
  source 1..22: mol_type = other DNA
cagactctttctttttgaggta

SEQ ID NO: 29821 - DNA, 22 bp, synthetic construct
  misc_feature 1..22: note = chemically synthesized
  source 1..22: mol_type = other DNA
agactctttctttttgaggtat

SEQ ID NO: 29822 - DNA, 22 bp, synthetic construct
  misc_feature 1..22: note = chemically synthesized
  source 1..22: mol_type = other DNA
tttctttttgaggtatttgacc

SEQ ID NO: 29823 - DNA, 22 bp, synthetic construct
  misc_feature 1..22: note = chemically synthesized
  source 1..22: mol_type = other DNA
tctttttgaggtatttgacctc

SEQ ID NO: 29824 - DNA, 22 bp, synthetic construct
  misc_feature 1..22: note = chemically synthesized
  source 1..22: mol_type = other DNA
ctttttgaggtatttgacctct

SEQ ID NO: 29825 - DNA, 22 bp, synthetic construct
  misc_feature 1..22: note = chemically synthesized
  source 1..22: mol_type = other DNA
tttttgaggtatttgacctctt

SEQ ID NO: 29826 - DNA, 22 bp, synthetic construct
  misc_feature 1..22: note = chemically synthesized
  source 1..22: mol_type = other DNA
tttgaggtatttgacctctttg

SEQ ID NO: 29827 - DNA, 22 bp, synthetic construct
  misc_feature 1..22: note = chemically synthesized
  source 1..22: mol_type = other DNA
ttgaggtatttgacctctttgc

SEQ ID NO: 29828 - DNA, 22 bp, synthetic construct
  misc_feature 1..22: note = chemically synthesized
  source 1..22: mol_type = other DNA
tgaggtatttgacctctttgcg

SEQ ID NO: 29829 - DNA, 22 bp, synthetic construct
  misc_feature 1..22: note = chemically synthesized
  source 1..22: mol_type = other DNA
gaggtatttgacctctttgcgg

SEQ ID NO: 29830 - DNA, 22 bp, synthetic construct
  misc_feature 1..22: note = chemically synthesized
  source 1..22: mol_type = other DNA
aggtatttgacctctttgcggc

SEQ ID NO: 29831 - DNA, 22 bp, synthetic construct
  misc_feature 1..22: note = chemically synthesized
  source 1..22: mol_type = other DNA
gacctctttgcggcatcagcct

SEQ ID NO: 29832 - DNA, 22 bp, synthetic construct
  misc_feature 1..22: note = chemically synthesized
  source 1..22: mol_type = other DNA
acctctttgcggcatcagcctg

SEQ ID NO: 29833 - DNA, 22 bp, synthetic construct
  misc_feature 1..22: note = chemically synthesized
  source 1..22: mol_type = other DNA
tttgcggcatcagcctgctgct

SEQ ID NO: 29834 - DNA, 22 bp, synthetic construct
  misc_feature 1..22: note = chemically synthesized
  source 1..22: mol_type = other DNA
tgcggcatcagcctgctgctat

SEQ ID NO: 29835 - DNA, 22 bp, synthetic construct
  misc_feature 1..22: note = chemically synthesized
  source 1..22: mol_type = other DNA
gcggcatcagcctgctgctatt

SEQ ID NO: 29836 - DNA, 22 bp, synthetic construct
  misc_feature 1..22: note = chemically synthesized
  source 1..22: mol_type = other DNA
cggcatcagcctgctgctattt

SEQ ID NO: 29837 - DNA, 22 bp, synthetic construct
  misc_feature 1..22: note = chemically synthesized
  source 1..22: mol_type = other DNA
ctgctatttcacatgcacctag

SEQ ID NO: 29838 - DNA, 22 bp, synthetic construct
  misc_feature 1..22: note = chemically synthesized
  source 1..22: mol_type = other DNA
ctatttcacatgcacctagaag

SEQ ID NO: 29839 - DNA, 22 bp, synthetic construct
  misc_feature 1..22: note = chemically synthesized
  source 1..22: mol_type = other DNA
tttcacatgcacctagaaggga

SEQ ID NO: 29840 - DNA, 22 bp, synthetic construct
  misc_feature 1..22: note = chemically synthesized
  source 1..22: mol_type = other DNA
cacatgcacctagaagggactt

SEQ ID NO: 29841 - DNA, 22 bp, synthetic construct
  misc_feature 1..22: note = chemically synthesized
  source 1..22: mol_type = other DNA
acatgcacctagaagggacttt

SEQ ID NO: 29842 - DNA, 22 bp, synthetic construct
  misc_feature 1..22: note = chemically synthesized
  source 1..22: mol_type = other DNA
gaagggactttaaaacatgcac

SEQ ID NO: 29843 - DNA, 22 bp, synthetic construct
  misc_feature 1..22: note = chemically synthesized
  source 1..22: mol_type = other DNA
taaaacatgcacagaattgaac

SEQ ID NO: 29844 - DNA, 22 bp, synthetic construct
  misc_feature 1..22: note = chemically synthesized
  source 1..22: mol_type = other DNA
aaaacatgcacagaattgaaca

SEQ ID NO: 29845 - DNA, 22 bp, synthetic construct
  misc_feature 1..22: note = chemically synthesized
  source 1..22: mol_type = other DNA
aaacatgcacagaattgaacaa

SEQ ID NO: 29846 - DNA, 22 bp, synthetic construct
  misc_feature 1..22: note = chemically synthesized
  source 1..22: mol_type = other DNA
aacaaagcagtaaccattcgtt

SEQ ID NO: 29847 - DNA, 22 bp, synthetic construct
  misc_feature 1..22: note = chemically synthesized
  source 1..22: mol_type = other DNA
gttggtgtcccttaacaatatg

SEQ ID NO: 29848 - DNA, 22 bp, synthetic construct
  misc_feature 1..22: note = chemically synthesized
  source 1..22: mol_type = other DNA
gtgtcccttaacaatatgtcaa

SEQ ID NO: 29849 - DNA, 22 bp, synthetic construct
  misc_feature 1..22: note = chemically synthesized
  source 1..22: mol_type = other DNA
aacaatatgtcaaatactatta

SEQ ID NO: 29850 - DNA, 22 bp, synthetic construct
  misc_feature 1..22: note = chemically synthesized
  source 1..22: mol_type = other DNA
acaatatgtcaaatactattat

SEQ ID NO: 29851 - DNA, 22 bp, synthetic construct
  misc_feature 1..22: note = chemically synthesized
  source 1..22: mol_type = other DNA
ttatttttgaaaggtaaataaa

SEQ ID NO: 29852 - DNA, 22 bp, synthetic construct
  misc_feature 1..22: note = chemically synthesized
  source 1..22: mol_type = other DNA
tttttgaaaggtaaataaatcc

SEQ ID NO: 29853 - DNA, 22 bp, synthetic construct
  misc_feature 1..22: note = chemically synthesized
  source 1..22: mol_type = other DNA
ttgaaaggtaaataaatccttg

SEQ ID NO: 29854 - DNA, 22 bp, synthetic construct
  misc_feature 1..22: note = chemically synthesized
  source 1..22: mol_type = other DNA
tgaaaggtaaataaatccttgg

SEQ ID NO: 29855 - DNA, 22 bp, synthetic construct
  misc_feature 1..22: note = chemically synthesized
  source 1..22: mol_type = other DNA
gaaaggtaaataaatccttggg

SEQ ID NO: 29856 - DNA, 22 bp, synthetic construct
  misc_feature 1..22: note = chemically synthesized
  source 1..22: mol_type = other DNA
aaaggtaaataaatccttgggc

SEQ ID NO: 29857 - DNA, 22 bp, synthetic construct
  misc_feature 1..22: note = chemically synthesized
  source 1..22: mol_type = other DNA
gggcttagtggatcctaaatgc

SEQ ID NO: 29858 - DNA, 22 bp, synthetic construct
  misc_feature 1..22: note = chemically synthesized
  source 1..22: mol_type = other DNA
ggcttagtggatcctaaatgct

SEQ ID NO: 29859 - DNA, 22 bp, synthetic construct
  misc_feature 1..22: note = chemically synthesized
  source 1..22: mol_type = other DNA
agtggatcctaaatgctaattt

SEQ ID NO: 29860 - DNA, 22 bp, synthetic construct
  misc_feature 1..22: note = chemically synthesized
  source 1..22: mol_type = other DNA
gtggatcctaaatgctaattta

SEQ ID NO: 29861 - DNA, 22 bp, synthetic construct
  misc_feature 1..22: note = chemically synthesized
  source 1..22: mol_type = other DNA
aatgctaatttaaaaatctgaa

SEQ ID NO: 29862 - DNA, 22 bp, synthetic construct
  misc_feature 1..22: note = chemically synthesized
  source 1..22: mol_type = other DNA
atttaaaaatctgaactcattt

SEQ ID NO: 29863 - DNA, 22 bp, synthetic construct
  misc_feature 1..22: note = chemically synthesized
  source 1..22: mol_type = other DNA
aaaaatctgaactcatttccat

SEQ ID NO: 29864 - DNA, 22 bp, synthetic construct
  misc_feature 1..22: note = chemically synthesized
  source 1..22: mol_type = other DNA
aaaatctgaactcatttccatc

SEQ ID NO: 29865 - DNA, 22 bp, synthetic construct
  misc_feature 1..22: note = chemically synthesized
  source 1..22: mol_type = other DNA
aactcatttccatcccttatta

SEQ ID NO: 29866 - DNA, 22 bp, synthetic construct
  misc_feature 1..22: note = chemically synthesized
  source 1..22: mol_type = other DNA
atttccatcccttattacttta

SEQ ID NO: 29867 - DNA, 22 bp, synthetic construct
  misc_feature 1..22: note = chemically synthesized
  source 1..22: mol_type = other DNA
ccatcccttattactttaaaca

SEQ ID NO: 29868 - DNA, 22 bp, synthetic construct
  misc_feature 1..22: note = chemically synthesized
  source 1..22: mol_type = other DNA
catcccttattactttaaacaa

SEQ ID NO: 29869 - DNA, 22 bp, synthetic construct
  misc_feature 1..22: note = chemically synthesized
  source 1..22: mol_type = other DNA
attactttaaacaaattgctaa

SEQ ID NO: 29870 - DNA, 22 bp, synthetic construct
  misc_feature 1..22: note = chemically synthesized
  source 1..22: mol_type = other DNA
ttactttaaacaaattgctaac

SEQ ID NO: 29871 - DNA, 22 bp, synthetic construct
  misc_feature 1..22: note = chemically synthesized
  source 1..22: mol_type = other DNA
ctttaaacaaattgctaacctg

SEQ ID NO: 29872 - DNA, 22 bp, synthetic construct
  misc_feature 1..22: note = chemically synthesized
  source 1..22: mol_type = other DNA
taaacaaattgctaacctgaat

SEQ ID NO: 29873 - DNA, 22 bp, synthetic construct
  misc_feature 1..22: note = chemically synthesized
  source 1..22: mol_type = other DNA
aaacaaattgctaacctgaatg

SEQ ID NO: 29874 - DNA, 22 bp, synthetic construct
  misc_feature 1..22: note = chemically synthesized
  source 1..22: mol_type = other DNA
aacaaattgctaacctgaatga

SEQ ID NO: 29875 - DNA, 22 bp, synthetic construct
  misc_feature 1..22: note = chemically synthesized
  source 1..22: mol_type = other DNA
ctaacctgaatgataatagaaa

SEQ ID NO: 29876 - DNA, 22 bp, synthetic construct
  misc_feature 1..22: note = chemically synthesized
  source 1..22: mol_type = other DNA
acctgaatgataatagaaactt

SEQ ID NO: 29877 - DNA, 22 bp, synthetic construct
  misc_feature 1..22: note = chemically synthesized
  source 1..22: mol_type = other DNA
aatgataatagaaacttttttc

SEQ ID NO: 29878 - DNA, 22 bp, synthetic construct
  misc_feature 1..22: note = chemically synthesized
  source 1..22: mol_type = other DNA
ttttccttttaacagttggagg

SEQ ID NO: 29879 - DNA, 22 bp, synthetic construct
  misc_feature 1..22: note = chemically synthesized
  source 1..22: mol_type = other DNA
tttccttttaacagttggaggc

SEQ ID NO: 29880 - DNA, 22 bp, synthetic construct
  misc_feature 1..22: note = chemically synthesized
  source 1..22: mol_type = other DNA
ttccttttaacagttggaggca

SEQ ID NO: 29881 - DNA, 22 bp, synthetic construct
  misc_feature 1..22: note = chemically synthesized
  source 1..22: mol_type = other DNA
tccttttaacagttggaggcat

SEQ ID NO: 29882 - DNA, 22 bp, synthetic construct
  misc_feature 1..22: note = chemically synthesized
  source 1..22: mol_type = other DNA
ccttttaacagttggaggcatc

SEQ ID NO: 29883 - DNA, 22 bp, synthetic construct
  misc_feature 1..22: note = chemically synthesized
  source 1..22: mol_type = other DNA
cttttaacagttggaggcatct

SEQ ID NO: 29884 - DNA, 22 bp, synthetic construct
  misc_feature 1..22: note = chemically synthesized
  source 1..22: mol_type = other DNA
ttaacagttggaggcatctata

SEQ ID NO: 29885 - DNA, 22 bp, synthetic construct
  misc_feature 1..22: note = chemically synthesized
  source 1..22: mol_type = other DNA
taacagttggaggcatctatac

SEQ ID NO: 29886 - DNA, 22 bp, synthetic construct
  misc_feature 1..22: note = chemically synthesized
  source 1..22: mol_type = other DNA
aacagttggaggcatctatact

SEQ ID NO: 29887 - DNA, 22 bp, synthetic construct
  misc_feature 1..22: note = chemically synthesized
  source 1..22: mol_type = other DNA
acagttggaggcatctatactg

SEQ ID NO: 29888 - DNA, 22 bp, synthetic construct
  misc_feature 1..22: note = chemically synthesized
  source 1..22: mol_type = other DNA
gaggcatctatactgtgattca

SEQ ID NO: 29889 - DNA, 22 bp, synthetic construct
  misc_feature 1..22: note = chemically synthesized
  source 1..22: mol_type = other DNA
tactgtgattcagacaaaggcc

SEQ ID NO: 29890 - DNA, 22 bp, synthetic construct
  misc_feature 1..22: note = chemically synthesized
  source 1..22: mol_type = other DNA
tgattcagacaaaggccaaaac

SEQ ID NO: 29891 - DNA, 22 bp, synthetic construct
  misc_feature 1..22: note = chemically synthesized
  source 1..22: mol_type = other DNA
agacaaaggccaaaacaacagc

SEQ ID NO: 29892 - DNA, 22 bp, synthetic construct
  misc_feature 1..22: note = chemically synthesized
  source 1..22: mol_type = other DNA
ttttctgataggtccatatttt

SEQ ID NO: 29893 - DNA, 22 bp, synthetic construct
  misc_feature 1..22: note = chemically synthesized
  source 1..22: mol_type = other DNA
tctgataggtccatattttgag

SEQ ID NO: 29894 - DNA, 22 bp, synthetic construct
  misc_feature 1..22: note = chemically synthesized
  source 1..22: mol_type = other DNA
ctgataggtccatattttgagc

SEQ ID NO: 29895 - DNA, 22 bp, synthetic construct
  misc_feature 1..22: note = chemically synthesized
  source 1..22: mol_type = other DNA
tgataggtccatattttgagca

SEQ ID NO: 29896 - DNA, 22 bp, synthetic construct
  misc_feature 1..22: note = chemically synthesized
  source 1..22: mol_type = other DNA
ataggtccatattttgagcata

SEQ ID NO: 29897 - DNA, 22 bp, synthetic construct
  misc_feature 1..22: note = chemically synthesized
  source 1..22: mol_type = other DNA
tgagcataatatgaagactcag

SEQ ID NO: 29898 - DNA, 22 bp, synthetic construct
  misc_feature 1..22: note = chemically synthesized
  source 1..22: mol_type = other DNA
gagcataatatgaagactcagg

SEQ ID NO: 29899 - DNA, 22 bp, synthetic construct
  misc_feature 1..22: note = chemically synthesized
  source 1..22: mol_type = other DNA
agcataatatgaagactcaggt

SEQ ID NO: 29900 - DNA, 22 bp, synthetic construct
  misc_feature 1..22: note = chemically synthesized
  source 1..22: mol_type = other DNA
aggtggaacagtgtgaacctgt

SEQ ID NO: 29901 - DNA, 22 bp, synthetic construct
  misc_feature 1..22: note = chemically synthesized
  source 1..22: mol_type = other DNA
taaatgatgctgtcagaagagc

SEQ ID NO: 29902 - DNA, 22 bp, synthetic construct
  misc_feature 1..22: note = chemically synthesized
  source 1..22: mol_type = other DNA
tcagaagagcagtggacgcaat

SEQ ID NO: 29903 - DNA, 20 bp, synthetic construct
  misc_feature 1..20: note = chemically synthesized
  source 1..20: mol_type = other DNA
tgtccttctggcagggaacc

SEQ ID NO: 29904 - DNA, 20 bp, synthetic construct
  misc_feature 1..20: note = chemically synthesized
  source 1..20: mol_type = other DNA
gtccttctggcagggaacct

SEQ ID NO: 29905 - DNA, 20 bp, synthetic construct
  misc_feature 1..20: note = chemically synthesized
  source 1..20: mol_type = other DNA
cttctggcagggaacctggg

SEQ ID NO: 29906 - DNA, 20 bp, synthetic construct
  misc_feature 1..20: note = chemically synthesized
  source 1..20: mol_type = other DNA
tggcagggaacctgggcagc

SEQ ID NO: 29907 - DNA, 20 bp, synthetic construct
  misc_feature 1..20: note = chemically synthesized
  source 1..20: mol_type = other DNA
ggcagggaacctgggcagcg

SEQ ID NO: 29908 - DNA, 20 bp, synthetic construct
  misc_feature 1..20: note = chemically synthesized
  source 1..20: mol_type = other DNA
tgggcagcgaggatcctctg

SEQ ID NO: 29909 - DNA, 20 bp, synthetic construct
  misc_feature 1..20: note = chemically synthesized
  source 1..20: mol_type = other DNA
agaacactcattcccaaatc

SEQ ID NO: 29910 - DNA, 20 bp, synthetic construct
  misc_feature 1..20: note = chemically synthesized
  source 1..20: mol_type = other DNA
ccaaatccagaaatgtactg

SEQ ID NO: 29911 - DNA, 20 bp, synthetic construct
  misc_feature 1..20: note = chemically synthesized
  source 1..20: mol_type = other DNA
caaatccagaaatgtactgt

SEQ ID NO: 29912 - DNA, 20 bp, synthetic construct
  misc_feature 1..20: note = chemically synthesized
  source 1..20: mol_type = other DNA
gaaatgtactgtaggtgaca

SEQ ID NO: 29913 - DNA, 20 bp, synthetic construct
  misc_feature 1..20: note = chemically synthesized
  source 1..20: mol_type = other DNA
aaagacacaaatgccaccat

SEQ ID NO: 29914 - DNA, 20 bp, synthetic construct
  misc_feature 1..20: note = chemically synthesized
  source 1..20: mol_type = other DNA
gacacaaatgccaccattag

SEQ ID NO: 29915 - DNA, 20 bp, synthetic construct
  misc_feature 1..20: note = chemically synthesized
  source 1..20: mol_type = other DNA
acacaaatgccaccattagc

SEQ ID NO: 29916 - DNA, 20 bp, synthetic construct
  misc_feature 1..20: note = chemically synthesized
  source 1..20: mol_type = other DNA
gccaccattagcaggattta

SEQ ID NO: 29917 - DNA, 20 bp, synthetic construct
  misc_feature 1..20: note = chemically synthesized
  source 1..20: mol_type = other DNA
caccattagcaggatttaaa

SEQ ID NO: 29918 - DNA, 20 bp, synthetic construct
  misc_feature 1..20: note = chemically synthesized
  source 1..20: mol_type = other DNA
gcaggatttaaagagcattt

SEQ ID NO: 29919 - DNA, 20 bp, synthetic construct
  misc_feature 1..20: note = chemically synthesized
  source 1..20: mol_type = other DNA
taaagagcatttcagaaaat

SEQ ID NO: 29920 - DNA, 20 bp, synthetic construct
  misc_feature 1..20: note = chemically synthesized
  source 1..20: mol_type = other DNA
agagcatttcagaaaattgg

SEQ ID NO: 29921 - DNA, 20 bp, synthetic construct
  misc_feature 1..20: note = chemically synthesized
  source 1..20: mol_type = other DNA
cagaaaattggcagtttact

SEQ ID NO: 29922 - DNA, 20 bp, synthetic construct
  misc_feature 1..20: note = chemically synthesized
  source 1..20: mol_type = other DNA
agaaaattggcagtttacta

SEQ ID NO: 29923 - DNA, 20 bp, synthetic construct
  misc_feature 1..20: note = chemically synthesized
  source 1..20: mol_type = other DNA
aattggcagtttactaaggt

SEQ ID NO: 29924 - DNA, 20 bp, synthetic construct
  misc_feature 1..20: note = chemically synthesized
  source 1..20: mol_type = other DNA
ctaaggtaagaatttctata

SEQ ID NO: 29925 - DNA, 20 bp, synthetic construct
  misc_feature 1..20: note = chemically synthesized
  source 1..20: mol_type = other DNA
gtcttgacatatgaatcatt

SEQ ID NO: 29926 - DNA, 20 bp, synthetic construct
  misc_feature 1..20: note = chemically synthesized
  source 1..20: mol_type = other DNA
tcttgacatatgaatcattt

SEQ ID NO: 29927 - DNA, 20 bp, synthetic construct
  misc_feature 1..20: note = chemically synthesized
  source 1..20: mol_type = other DNA
cttgacatatgaatcattta

SEQ ID NO: 29928 - DNA, 20 bp, synthetic construct
  misc_feature 1..20: note = chemically synthesized
  source 1..20: mol_type = other DNA
gacatatgaatcatttaggg

SEQ ID NO: 29929 - DNA, 20 bp, synthetic construct
  misc_feature 1..20: note = chemically synthesized
  source 1..20: mol_type = other DNA
atcatttagggaagacaata

SEQ ID NO: 29930 - DNA, 20 bp, synthetic construct
  misc_feature 1..20: note = chemically synthesized
  source 1..20: mol_type = other DNA
tatggtttctgtgaatttta

SEQ ID NO: 29931 - DNA, 20 bp, synthetic construct
  misc_feature 1..20: note = chemically synthesized
  source 1..20: mol_type = other DNA
tttaaagacttctaattaat

SEQ ID NO: 29932 - DNA, 20 bp, synthetic construct
  misc_feature 1..20: note = chemically synthesized
  source 1..20: mol_type = other DNA
aaagacttctaattaatcag

SEQ ID NO: 29933 - DNA, 20 bp, synthetic construct
  misc_feature 1..20: note = chemically synthesized
  source 1..20: mol_type = other DNA
agacttctaattaatcagaa

SEQ ID NO: 29934 - DNA, 20 bp, synthetic construct
  misc_feature 1..20: note = chemically synthesized
  source 1..20: mol_type = other DNA
ctaattaatcagaagagtgc

SEQ ID NO: 29935 - DNA, 20 bp, synthetic construct
  misc_feature 1..20: note = chemically synthesized
  source 1..20: mol_type = other DNA
gaagagtgctggatattgca

SEQ ID NO: 29936 - DNA, 20 bp, synthetic construct
  misc_feature 1..20: note = chemically synthesized
  source 1..20: mol_type = other DNA
tgcatagacttctccaccct

SEQ ID NO: 29937 - DNA, 20 bp, synthetic construct
  misc_feature 1..20: note = chemically synthesized
  source 1..20: mol_type = other DNA
tctccacccttagctgtact

SEQ ID NO: 29938 - DNA, 20 bp, synthetic construct
  misc_feature 1..20: note = chemically synthesized
  source 1..20: mol_type = other DNA
agctgtacttagctgatttg

SEQ ID NO: 29939 - DNA, 20 bp, synthetic construct
  misc_feature 1..20: note = chemically synthesized
  source 1..20: mol_type = other DNA
gctgtacttagctgatttgt

SEQ ID NO: 29940 - DNA, 20 bp, synthetic construct
  misc_feature 1..20: note = chemically synthesized
  source 1..20: mol_type = other DNA
actgtaacctccctgaactt

SEQ ID NO: 29941 - DNA, 20 bp, synthetic construct
  misc_feature 1..20: note = chemically synthesized
  source 1..20: mol_type = other DNA
tccatttccctttcaaactc

SEQ ID NO: 29942 - DNA, 20 bp, synthetic construct
  misc_feature 1..20: note = chemically synthesized
  source 1..20: mol_type = other DNA
ccatttccctttcaaactct

SEQ ID NO: 29943 - DNA, 20 bp, synthetic construct
  misc_feature 1..20: note = chemically synthesized
  source 1..20: mol_type = other DNA
tttcaaactctgggaaaaaa

SEQ ID NO: 29944 - DNA, 20 bp, synthetic construct
  misc_feature 1..20: note = chemically synthesized
  source 1..20: mol_type = other DNA
actctgggaaaaaaaagaaa

SEQ ID NO: 29945 - DNA, 20 bp, synthetic construct
  misc_feature 1..20: note = chemically synthesized
  source 1..20: mol_type = other DNA
aaaaagaaaaagcatctatg

SEQ ID NO: 29946 - DNA, 20 bp, synthetic construct
  misc_feature 1..20: note = chemically synthesized
  source 1..20: mol_type = other DNA
aaagaaaaagcatctatgaa

SEQ ID NO: 29947 - DNA, 20 bp, synthetic construct
  misc_feature 1..20: note = chemically synthesized
  source 1..20: mol_type = other DNA
aagaaaaagcatctatgaag

SEQ ID NO: 29948 - DNA, 20 bp, synthetic construct
  misc_feature 1..20: note = chemically synthesized
  source 1..20: mol_type = other DNA
agcatctatgaagaggtgtg

SEQ ID NO: 29949 - DNA, 20 bp, synthetic construct
  misc_feature 1..20: note = chemically synthesized
  source 1..20: mol_type = other DNA
gcatctatgaagaggtgtgt

SEQ ID NO: 29950 - DNA, 20 bp, synthetic construct
  misc_feature 1..20: note = chemically synthesized
  source 1..20: mol_type = other DNA
gtgtgtgggtccaaccctga

SEQ ID NO: 29951 - DNA, 20 bp, synthetic construct
  misc_feature 1..20: note = chemically synthesized
  source 1..20: mol_type = other DNA
cagcaaaaccctctccaaac

SEQ ID NO: 29952 - DNA, 20 bp, synthetic construct
  misc_feature 1..20: note = chemically synthesized
  source 1..20: mol_type = other DNA
tctccaaactagccttgctg

SEQ ID NO: 29953 - DNA, 20 bp, synthetic construct
  misc_feature 1..20: note = chemically synthesized
  source 1..20: mol_type = other DNA
ctccaaactagccttgctgt

SEQ ID NO: 29954 - DNA, 20 bp, synthetic construct
  misc_feature 1..20: note = chemically synthesized
  source 1..20: mol_type = other DNA
caaactagccttgctgtagg

SEQ ID NO: 29955 - DNA, 20 bp, synthetic construct
  misc_feature 1..20: note = chemically synthesized
  source 1..20: mol_type = other DNA
actagccttgctgtaggcag

SEQ ID NO: 29956 - DNA, 20 bp, synthetic construct
  misc_feature 1..20: note = chemically synthesized
  source 1..20: mol_type = other DNA
tctgctatctgcctcatcta

SEQ ID NO: 29957 - DNA, 20 bp, synthetic construct
  misc_feature 1..20: note = chemically synthesized
  source 1..20: mol_type = other DNA
tgtgcgaatgcatgaaaata

SEQ ID NO: 29958 - DNA, 20 bp, synthetic construct
  misc_feature 1..20: note = chemically synthesized
  source 1..20: mol_type = other DNA
atgcatgaaaataaagttta

SEQ ID NO: 29959 - DNA, 20 bp, synthetic construct
  misc_feature 1..20: note = chemically synthesized
  source 1..20: mol_type = other DNA
gaaaataaagtttaaagata

SEQ ID NO: 29960 - DNA, 20 bp, synthetic construct
  misc_feature 1..20: note = chemically synthesized
  source 1..20: mol_type = other DNA
aaaataaagtttaaagatat

SEQ ID NO: 29961 - DNA, 20 bp, synthetic construct
  misc_feature 1..20: note = chemically synthesized
  source 1..20: mol_type = other DNA
ataaagtttaaagatatggg

SEQ ID NO: 29962 - DNA, 20 bp, synthetic construct
  misc_feature 1..20: note = chemically synthesized
  source 1..20: mol_type = other DNA
ttaaagatatgggtggcctt

SEQ ID NO: 29963 - DNA, 20 bp, synthetic construct
  misc_feature 1..20: note = chemically synthesized
  source 1..20: mol_type = other DNA
taaagatatgggtggccttc

SEQ ID NO: 29964 - DNA, 20 bp, synthetic construct
  misc_feature 1..20: note = chemically synthesized
  source 1..20: mol_type = other DNA
aagatatgggtggccttcag

SEQ ID NO: 29965 - DNA, 20 bp, synthetic construct
  misc_feature 1..20: note = chemically synthesized
  source 1..20: mol_type = other DNA
gtggccttcaggagacacgc

SEQ ID NO: 29966 - DNA, 20 bp, synthetic construct
  misc_feature 1..20: note = chemically synthesized
  source 1..20: mol_type = other DNA
cttcaggagacacgccagcc

SEQ ID NO: 29967 - DNA, 20 bp, synthetic construct
  misc_feature 1..20: note = chemically synthesized
  source 1..20: mol_type = other DNA
atcttttcacaatgacacaa

SEQ ID NO: 29968 - DNA, 20 bp, synthetic construct
  misc_feature 1..20: note = chemically synthesized
  source 1..20: mol_type = other DNA
ccatctcttcactttacacc

SEQ ID NO: 29969 - DNA, 20 bp, synthetic construct
  misc_feature 1..20: note = chemically synthesized
  source 1..20: mol_type = other DNA
atctcttcactttacaccca

SEQ ID NO: 29970 - DNA, 20 bp, synthetic construct
  misc_feature 1..20: note = chemically synthesized
  source 1..20: mol_type = other DNA
tctcttcactttacacccag

SEQ ID NO: 29971 - DNA, 20 bp, synthetic construct
  misc_feature 1..20: note = chemically synthesized
  source 1..20: mol_type = other DNA
ttacacccagaggaaaaaaa

SEQ ID NO: 29972 - DNA, 20 bp, synthetic construct
  misc_feature 1..20: note = chemically synthesized
  source 1..20: mol_type = other DNA
ccagaggaaaaaaaaagtta

SEQ ID NO: 29973 - DNA, 20 bp, synthetic construct
  misc_feature 1..20: note = chemically synthesized
  source 1..20: mol_type = other DNA
cagaggaaaaaaaaagttaa

SEQ ID NO: 29974 - DNA, 20 bp, synthetic construct
  misc_feature 1..20: note = chemically synthesized
  source 1..20: mol_type = other DNA
agaggaaaaaaaaagttaaa

SEQ ID NO: 29975 - DNA, 20 bp, synthetic construct
  misc_feature 1..20: note = chemically synthesized
  source 1..20: mol_type = other DNA
aagttaaagggtttctcaac

SEQ ID NO: 29976 - DNA, 20 bp, synthetic construct
  misc_feature 1..20: note = chemically synthesized
  source 1..20: mol_type = other DNA
agttaaagggtttctcaacc

SEQ ID NO: 29977 - DNA, 20 bp, synthetic construct
  misc_feature 1..20: note = chemically synthesized
  source 1..20: mol_type = other DNA
aaagggtttctcaaccaggt

SEQ ID NO: 29978 - DNA, 20 bp, synthetic construct
  misc_feature 1..20: note = chemically synthesized
  source 1..20: mol_type = other DNA
tttctcaaccaggtaagtca

SEQ ID NO: 29979 - DNA, 20 bp, synthetic construct
  misc_feature 1..20: note = chemically synthesized
  source 1..20: mol_type = other DNA
tctcaaccaggtaagtcatg

SEQ ID NO: 29980 - DNA, 20 bp, synthetic construct
  misc_feature 1..20: note = chemically synthesized
  source 1..20: mol_type = other DNA
tcaaccaggtaagtcatgga

SEQ ID NO: 29981 - DNA, 20 bp, synthetic construct
  misc_feature 1..20: note = chemically synthesized
  source 1..20: mol_type = other DNA
gcaacactcaacacacttgt

SEQ ID NO: 29982 - DNA, 20 bp, synthetic construct
  misc_feature 1..20: note = chemically synthesized
  source 1..20: mol_type = other DNA
gtgagttcttgtgcactgtc

SEQ ID NO: 29983 - DNA, 20 bp, synthetic construct
  misc_feature 1..20: note = chemically synthesized
  source 1..20: mol_type = other DNA
gcactgtctggcttttttgc

SEQ ID NO: 29984 - DNA, 20 bp, synthetic construct
  misc_feature 1..20: note = chemically synthesized
  source 1..20: mol_type = other DNA
tggcttttttgctagcctat

SEQ ID NO: 29985 - DNA, 20 bp, synthetic construct
  misc_feature 1..20: note = chemically synthesized
  source 1..20: mol_type = other DNA
gctagcctataagctgcatg

SEQ ID NO: 29986 - DNA, 20 bp, synthetic construct
  misc_feature 1..20: note = chemically synthesized
  source 1..20: mol_type = other DNA
ctagcctataagctgcatga

SEQ ID NO: 29987 - DNA, 20 bp, synthetic construct
  misc_feature 1..20: note = chemically synthesized
  source 1..20: mol_type = other DNA
ctataagctgcatgaaggct

SEQ ID NO: 29988 - DNA, 20 bp, synthetic construct
  misc_feature 1..20: note = chemically synthesized
  source 1..20: mol_type = other DNA
ctgcatgaaggctgagacta

SEQ ID NO: 29989 - DNA, 20 bp, synthetic construct
  misc_feature 1..20: note = chemically synthesized
  source 1..20: mol_type = other DNA
catgaaggctgagactatgg

SEQ ID NO: 29990 - DNA, 20 bp, synthetic construct
  misc_feature 1..20: note = chemically synthesized
  source 1..20: mol_type = other DNA
ggctgagactatggcagtct

SEQ ID NO: 29991 - DNA, 20 bp, synthetic construct
  misc_feature 1..20: note = chemically synthesized
  source 1..20: mol_type = other DNA
actatggcagtcttggctca

SEQ ID NO: 29992 - DNA, 20 bp, synthetic construct
  misc_feature 1..20: note = chemically synthesized
  source 1..20: mol_type = other DNA
atggcagtcttggctcatag

SEQ ID NO: 29993 - DNA, 20 bp, synthetic construct
  misc_feature 1..20: note = chemically synthesized
  source 1..20: mol_type = other DNA
tggcagtcttggctcataga

SEQ ID NO: 29994 - DNA, 20 bp, synthetic construct
  misc_feature 1..20: note = chemically synthesized
  source 1..20: mol_type = other DNA
cttggctcatagaaggtaat

SEQ ID NO: 29995 - DNA, 20 bp, synthetic construct
  misc_feature 1..20: note = chemically synthesized
  source 1..20: mol_type = other DNA
ggctcatagaaggtaatcag

SEQ ID NO: 29996 - DNA, 20 bp, synthetic construct
  misc_feature 1..20: note = chemically synthesized
  source 1..20: mol_type = other DNA
ttgattgaatttttccctta

SEQ ID NO: 29997 - DNA, 20 bp, synthetic construct
  misc_feature 1..20: note = chemically synthesized
  source 1..20: mol_type = other DNA
cttaaagccaattctaatgt

SEQ ID NO: 29998 - DNA, 20 bp, synthetic construct
  misc_feature 1..20: note = chemically synthesized
  source 1..20: mol_type = other DNA
tgtatgtgtgctgctgtaaa

SEQ ID NO: 29999 - DNA, 20 bp, synthetic construct
  misc_feature 1..20: note = chemically synthesized
  source 1..20: mol_type = other DNA
gtatgtgtgctgctgtaaat

SEQ ID NO: 30000 - DNA, 20 bp, synthetic construct
  misc_feature 1..20: note = chemically synthesized
  source 1..20: mol_type = other DNA
tatgtgtgctgctgtaaata

SEQ ID NO: 30001 - DNA, 20 bp, synthetic construct
  misc_feature 1..20: note = chemically synthesized
  source 1..20: mol_type = other DNA
tgtgctgctgtaaatagggt

SEQ ID NO: 30002 - DNA, 20 bp, synthetic construct
  misc_feature 1..20: note = chemically synthesized
  source 1..20: mol_type = other DNA
acttaaataccaattgattt

SEQ ID NO: 30003 - DNA, 20 bp, synthetic construct
  misc_feature 1..20: note = chemically synthesized
  source 1..20: mol_type = other DNA
aataccaattgattttagcc

SEQ ID NO: 30004 - DNA, 20 bp, synthetic construct
  misc_feature 1..20: note = chemically synthesized
  source 1..20: mol_type = other DNA
ataccaattgattttagccc

SEQ ID NO: 30005 - DNA, 20 bp, synthetic construct
  misc_feature 1..20: note = chemically synthesized
  source 1..20: mol_type = other DNA
agcccaggataatgaaaatg

SEQ ID NO: 30006 - DNA, 20 bp, synthetic construct
  misc_feature 1..20: note = chemically synthesized
  source 1..20: mol_type = other DNA
aatgaaaatgcagtcttgct

SEQ ID NO: 30007 - DNA, 20 bp, synthetic construct
  misc_feature 1..20: note = chemically synthesized
  source 1..20: mol_type = other DNA
aaaatgcagtcttgctcagc

SEQ ID NO: 30008 - DNA, 20 bp, synthetic construct
  misc_feature 1..20: note = chemically synthesized
  source 1..20: mol_type = other DNA
gaaatgtaaccatctgaaca

SEQ ID NO: 30009 - DNA, 20 bp, synthetic construct
  misc_feature 1..20: note = chemically synthesized
  source 1..20: mol_type = other DNA
ccatctgaacacagctcctt

SEQ ID NO: 30010 - DNA, 20 bp, synthetic construct
  misc_feature 1..20: note = chemically synthesized
  source 1..20: mol_type = other DNA
atctgaacacagctccttaa

SEQ ID NO: 30011 - DNA, 20 bp, synthetic construct
  misc_feature 1..20: note = chemically synthesized
  source 1..20: mol_type = other DNA
cacagctccttaagagatat

SEQ ID NO: 30012 - DNA, 20 bp, synthetic construct
  misc_feature 1..20: note = chemically synthesized
  source 1..20: mol_type = other DNA
agctccttaagagatataag

SEQ ID NO: 30013 - DNA, 20 bp, synthetic construct
  misc_feature 1..20: note = chemically synthesized
  source 1..20: mol_type = other DNA
gctccttaagagatataaga

SEQ ID NO: 30014 - DNA, 20 bp, synthetic construct
  misc_feature 1..20: note = chemically synthesized
  source 1..20: mol_type = other DNA
ctccttaagagatataagaa

SEQ ID NO: 30015 - DNA, 20 bp, synthetic construct
  misc_feature 1..20: note = chemically synthesized
  source 1..20: mol_type = other DNA
cttaagagatataagaaggg

SEQ ID NO: 30016 - DNA, 20 bp, synthetic construct
  misc_feature 1..20: note = chemically synthesized
  source 1..20: mol_type = other DNA
aagagatataagaagggtgg

SEQ ID NO: 30017 - DNA, 20 bp, synthetic construct
  misc_feature 1..20: note = chemically synthesized
  source 1..20: mol_type = other DNA
agatataagaagggtggaag

SEQ ID NO: 30018 - DNA, 20 bp, synthetic construct
  misc_feature 1..20: note = chemically synthesized
  source 1..20: mol_type = other DNA
gatataagaagggtggaagt

SEQ ID NO: 30019 - DNA, 20 bp, synthetic construct
  misc_feature 1..20: note = chemically synthesized
  source 1..20: mol_type = other DNA
aagaagggtggaagtgggtg

SEQ ID NO: 30020 - DNA, 20 bp, synthetic construct
  misc_feature 1..20: note = chemically synthesized
  source 1..20: mol_type = other DNA
agaagggtggaagtgggtga

SEQ ID NO: 30021 - DNA, 20 bp, synthetic construct
  misc_feature 1..20: note = chemically synthesized
  source 1..20: mol_type = other DNA
gaagggtggaagtgggtgaa

SEQ ID NO: 30022 - DNA, 20 bp, synthetic construct
  misc_feature 1..20: note = chemically synthesized
  source 1..20: mol_type = other DNA
gggtggaagtgggtgaaggg

SEQ ID NO: 30023 - DNA, 20 bp, synthetic construct
  misc_feature 1..20: note = chemically synthesized
  source 1..20: mol_type = other DNA
ggtggaagtgggtgaagggt

SEQ ID NO: 30024 - DNA, 20 bp, synthetic construct
  misc_feature 1..20: note = chemically synthesized
  source 1..20: mol_type = other DNA
tgggtgaagggtaggccctc

SEQ ID NO: 30025 - DNA, 20 bp, synthetic construct
  misc_feature 1..20: note = chemically synthesized
  source 1..20: mol_type = other DNA
ggtgaagggtaggccctcca

SEQ ID NO: 30026 - DNA, 20 bp, synthetic construct
  misc_feature 1..20: note = chemically synthesized
  source 1..20: mol_type = other DNA
ggtaggccctccagagttct

SEQ ID NO: 30027 - DNA, 20 bp, synthetic construct
  misc_feature 1..20: note = chemically synthesized
  source 1..20: mol_type = other DNA
tccagagttctcagttgttg

SEQ ID NO: 30028 - DNA, 20 bp, synthetic construct
  misc_feature 1..20: note = chemically synthesized
  source 1..20: mol_type = other DNA
ccagagttctcagttgttgc

SEQ ID NO: 30029 - DNA, 20 bp, synthetic construct
  misc_feature 1..20: note = chemically synthesized
  source 1..20: mol_type = other DNA
gagttctcagttgttgcggg

SEQ ID NO: 30030 - DNA, 20 bp, synthetic construct
  misc_feature 1..20: note = chemically synthesized
  source 1..20: mol_type = other DNA
ctcagttgttgcgggaagtc

SEQ ID NO: 30031 - DNA, 20 bp, synthetic construct
  misc_feature 1..20: note = chemically synthesized
  source 1..20: mol_type = other DNA
tcagttgttgcgggaagtct

SEQ ID NO: 30032 - DNA, 20 bp, synthetic construct
  misc_feature 1..20: note = chemically synthesized
  source 1..20: mol_type = other DNA
gggaagtctgggactccaaa

SEQ ID NO: 30033 - DNA, 20 bp, synthetic construct
  misc_feature 1..20: note = chemically synthesized
  source 1..20: mol_type = other DNA
gaagtctgggactccaaacg

SEQ ID NO: 30034 - DNA, 20 bp, synthetic construct
  misc_feature 1..20: note = chemically synthesized
  source 1..20: mol_type = other DNA
aagtctgggactccaaacgg

SEQ ID NO: 30035 - DNA, 20 bp, synthetic construct
  misc_feature 1..20: note = chemically synthesized
  source 1..20: mol_type = other DNA
agtctgggactccaaacgga

SEQ ID NO: 30036 - DNA, 20 bp, synthetic construct
  misc_feature 1..20: note = chemically synthesized
  source 1..20: mol_type = other DNA
gggactccaaacggagggat

SEQ ID NO: 30037 - DNA, 20 bp, synthetic construct
  misc_feature 1..20: note = chemically synthesized
  source 1..20: mol_type = other DNA
ccaaacggagggatcagctg

SEQ ID NO: 30038 - DNA, 20 bp, synthetic construct
  misc_feature 1..20: note = chemically synthesized
  source 1..20: mol_type = other DNA
ggagggatcagctgaagcca

SEQ ID NO: 30039 - DNA, 20 bp, synthetic construct
  misc_feature 1..20: note = chemically synthesized
  source 1..20: mol_type = other DNA
gggatcagctgaagccatgg

SEQ ID NO: 30040 - DNA, 20 bp, synthetic construct
  misc_feature 1..20: note = chemically synthesized
  source 1..20: mol_type = other DNA
atcagctgaagccatggcag

SEQ ID NO: 30041 - DNA, 20 bp, synthetic construct
  misc_feature 1..20: note = chemically synthesized
  source 1..20: mol_type = other DNA
gaagccatggcagaagttcg

SEQ ID NO: 30042 - DNA, 20 bp, synthetic construct
  misc_feature 1..20: note = chemically synthesized
  source 1..20: mol_type = other DNA
gcagaagttcgtggattgtg

SEQ ID NO: 30043 - DNA, 20 bp, synthetic construct
  misc_feature 1..20: note = chemically synthesized
  source 1..20: mol_type = other DNA
cgtggattgtgaagatttca

SEQ ID NO: 30044 - DNA, 20 bp, synthetic construct
  misc_feature 1..20: note = chemically synthesized
  source 1..20: mol_type = other DNA
aagatttcatggacatttat

SEQ ID NO: 30045 - DNA, 20 bp, synthetic construct
  misc_feature 1..20: note = chemically synthesized
  source 1..20: mol_type = other DNA
atctctaaacataaattgta

SEQ ID NO: 30046 - DNA, 20 bp, synthetic construct
  misc_feature 1..20: note = chemically synthesized
  source 1..20: mol_type = other DNA
cataaattgtaaagatttca

SEQ ID NO: 30047 - DNA, 20 bp, synthetic construct
  misc_feature 1..20: note = chemically synthesized
  source 1..20: mol_type = other DNA
atggacacttatcacttccc

SEQ ID NO: 30048 - DNA, 20 bp, synthetic construct
  misc_feature 1..20: note = chemically synthesized
  source 1..20: mol_type = other DNA
ctttaatctcttaatcctgt

SEQ ID NO: 30049 - DNA, 20 bp, synthetic construct
  misc_feature 1..20: note = chemically synthesized
  source 1..20: mol_type = other DNA
atctcttaatcctgtcagct

SEQ ID NO: 30050 - DNA, 20 bp, synthetic construct
  misc_feature 1..20: note = chemically synthesized
  source 1..20: mol_type = other DNA
tctcttaatcctgtcagctg

SEQ ID NO: 30051 - DNA, 20 bp, synthetic construct
  misc_feature 1..20: note = chemically synthesized
  source 1..20: mol_type = other DNA
tcttaatcctgtcagctgag

SEQ ID NO: 30052 - DNA, 20 bp, synthetic construct
  misc_feature 1..20: note = chemically synthesized
  source 1..20: mol_type = other DNA
cttaatcctgtcagctgagg

SEQ ID NO: 30053 - DNA, 20 bp, synthetic construct
  misc_feature 1..20: note = chemically synthesized
  source 1..20: mol_type = other DNA
gaggaggatgtatattgcct

SEQ ID NO: 30054 - DNA, 20 bp, synthetic construct
  misc_feature 1..20: note = chemically synthesized
  source 1..20: mol_type = other DNA
aggaggatgtatattgcctc

SEQ ID NO: 30055 - DNA, 20 bp, synthetic construct
  misc_feature 1..20: note = chemically synthesized
  source 1..20: mol_type = other DNA
cattaactgcacaaattgta

SEQ ID NO: 30056 - DNA, 20 bp, synthetic construct
  misc_feature 1..20: note = chemically synthesized
  source 1..20: mol_type = other DNA
attgtacagcatgtgtgttt

SEQ ID NO: 30057 - DNA, 20 bp, synthetic construct
  misc_feature 1..20: note = chemically synthesized
  source 1..20: mol_type = other DNA
tgtttgagcaacatgaaatg

SEQ ID NO: 30058 - DNA, 20 bp, synthetic construct
  misc_feature 1..20: note = chemically synthesized
  source 1..20: mol_type = other DNA
aaatgtggacaccttgaaaa

SEQ ID NO: 30059 - DNA, 20 bp, synthetic construct
  misc_feature 1..20: note = chemically synthesized
  source 1..20: mol_type = other DNA
tggacaccttgaaaaaagaa

SEQ ID NO: 30060 - DNA, 20 bp, synthetic construct
  misc_feature 1..20: note = chemically synthesized
  source 1..20: mol_type = other DNA
ggacaccttgaaaaaagaac

SEQ ID NO: 30061 - DNA, 20 bp, synthetic construct
  misc_feature 1..20: note = chemically synthesized
  source 1..20: mol_type = other DNA
ttgaaaaaagaacaggataa

SEQ ID NO: 30062 - DNA, 20 bp, synthetic construct
  misc_feature 1..20: note = chemically synthesized
  source 1..20: mol_type = other DNA
acaggataacagcaattgtt

SEQ ID NO: 30063 - DNA, 20 bp, synthetic construct
  misc_feature 1..20: note = chemically synthesized
  source 1..20: mol_type = other DNA
caggataacagcaattgttc

SEQ ID NO: 30064 - DNA, 20 bp, synthetic construct
  misc_feature 1..20: note = chemically synthesized
  source 1..20: mol_type = other DNA
aggataacagcaattgttca

SEQ ID NO: 30065 - DNA, 20 bp, synthetic construct
  misc_feature 1..20: note = chemically synthesized
  source 1..20: mol_type = other DNA
acagcaattgttcagggaat

SEQ ID NO: 30066 - DNA, 20 bp, synthetic construct
  misc_feature 1..20: note = chemically synthesized
  source 1..20: mol_type = other DNA
agcaattgttcagggaataa

SEQ ID NO: 30067 - DNA, 20 bp, synthetic construct
  misc_feature 1..20: note = chemically synthesized
  source 1..20: mol_type = other DNA
caattgttcagggaataaga

SEQ ID NO: 30068 - DNA, 20 bp, synthetic construct
  misc_feature 1..20: note = chemically synthesized
  source 1..20: mol_type = other DNA
taaccttaaactctgactgc

SEQ ID NO: 30069 - DNA, 20 bp, synthetic construct
  misc_feature 1..20: note = chemically synthesized
  source 1..20: mol_type = other DNA
cttaaactctgactgctggt

SEQ ID NO: 30070 - DNA, 20 bp, synthetic construct
  misc_feature 1..20: note = chemically synthesized
  source 1..20: mol_type = other DNA
aactctgactgctggtgagc

SEQ ID NO: 30071 - DNA, 20 bp, synthetic construct
  misc_feature 1..20: note = chemically synthesized
  source 1..20: mol_type = other DNA
actctgactgctggtgagcc

SEQ ID NO: 30072 - DNA, 20 bp, synthetic construct
  misc_feature 1..20: note = chemically synthesized
  source 1..20: mol_type = other DNA
ctgactgctggtgagccagg

SEQ ID NO: 30073 - DNA, 20 bp, synthetic construct
  misc_feature 1..20: note = chemically synthesized
  source 1..20: mol_type = other DNA
tgctggtgagccaggcagaa

SEQ ID NO: 30074 - DNA, 20 bp, synthetic construct
  misc_feature 1..20: note = chemically synthesized
  source 1..20: mol_type = other DNA
ctggtgagccaggcagaaca

SEQ ID NO: 30075 - DNA, 20 bp, synthetic construct
  misc_feature 1..20: note = chemically synthesized
  source 1..20: mol_type = other DNA
ccatatttctcttctttcaa

SEQ ID NO: 30076 - DNA, 20 bp, synthetic construct
  misc_feature 1..20: note = chemically synthesized
  source 1..20: mol_type = other DNA
tctcttctttcaaaagcaaa

SEQ ID NO: 30077 - DNA, 20 bp, synthetic construct
  misc_feature 1..20: note = chemically synthesized
  source 1..20: mol_type = other DNA
ctcttctttcaaaagcaaat

SEQ ID NO: 30078 - DNA, 20 bp, synthetic construct
  misc_feature 1..20: note = chemically synthesized
  source 1..20: mol_type = other DNA
cttctttcaaaagcaaatgg

SEQ ID NO: 30079 - DNA, 20 bp, synthetic construct
  misc_feature 1..20: note = chemically synthesized
  source 1..20: mol_type = other DNA
tatcgctgaattctttttct

SEQ ID NO: 30080 - DNA, 20 bp, synthetic construct
  misc_feature 1..20: note = chemically synthesized
  source 1..20: mol_type = other DNA
ctgaattctttttctcagca

SEQ ID NO: 30081 - DNA, 20 bp, synthetic construct
  misc_feature 1..20: note = chemically synthesized
  source 1..20: mol_type = other DNA
tctcagcatggaacatccct

SEQ ID NO: 30082 - DNA, 20 bp, synthetic construct
  misc_feature 1..20: note = chemically synthesized
  source 1..20: mol_type = other DNA
agcatggaacatccctgaga

SEQ ID NO: 30083 - DNA, 20 bp, synthetic construct
  misc_feature 1..20: note = chemically synthesized
  source 1..20: mol_type = other DNA
catggaacatccctgagaaa

SEQ ID NO: 30084 - DNA, 20 bp, synthetic construct
  misc_feature 1..20: note = chemically synthesized
  source 1..20: mol_type = other DNA
atccctgagaaagagaatac

SEQ ID NO: 30085 - DNA, 20 bp, synthetic construct
  misc_feature 1..20: note = chemically synthesized
  source 1..20: mol_type = other DNA
ctgagaaagagaatacgagc

SEQ ID NO: 30086 - DNA, 20 bp, synthetic construct
  misc_feature 1..20: note = chemically synthesized
  source 1..20: mol_type = other DNA
tgagaaagagaatacgagcc

SEQ ID NO: 30087 - DNA, 20 bp, synthetic construct
  misc_feature 1..20: note = chemically synthesized
  source 1..20: mol_type = other DNA
agaaagagaatacgagccag

SEQ ID NO: 30088 - DNA, 20 bp, synthetic construct
  misc_feature 1..20: note = chemically synthesized
  source 1..20: mol_type = other DNA
gaaagagaatacgagccagg

SEQ ID NO: 30089 - DNA, 20 bp, synthetic construct
  misc_feature 1..20: note = chemically synthesized
  source 1..20: mol_type = other DNA
agaatacgagccaggaggta

SEQ ID NO: 30090 - DNA, 20 bp, synthetic construct
  misc_feature 1..20: note = chemically synthesized
  source 1..20: mol_type = other DNA
gaatacgagccaggaggtat

SEQ ID NO: 30091 - DNA, 20 bp, synthetic construct
  misc_feature 1..20: note = chemically synthesized
  source 1..20: mol_type = other DNA
aggaggtataggcttataaa

SEQ ID NO: 30092 - DNA, 20 bp, synthetic construct
  misc_feature 1..20: note = chemically synthesized
  source 1..20: mol_type = other DNA
gcttataaacagcccccctc

SEQ ID NO: 30093 - DNA, 20 bp, synthetic construct
  misc_feature 1..20: note = chemically synthesized
  source 1..20: mol_type = other DNA
cttataaacagcccccctcc

SEQ ID NO: 30094 - DNA, 20 bp, synthetic construct
  misc_feature 1..20: note = chemically synthesized
  source 1..20: mol_type = other DNA
ccaggtgcgcctgtctctta

SEQ ID NO: 30095 - DNA, 20 bp, synthetic construct
  misc_feature 1..20: note = chemically synthesized
  source 1..20: mol_type = other DNA
tgcgcctgtctcttatggtc

SEQ ID NO: 30096 - DNA, 20 bp, synthetic construct
  misc_feature 1..20: note = chemically synthesized
  source 1..20: mol_type = other DNA
gtctcttatggtcgagactg

SEQ ID NO: 30097 - DNA, 20 bp, synthetic construct
  misc_feature 1..20: note = chemically synthesized
  source 1..20: mol_type = other DNA
tctcttatggtcgagactgc

SEQ ID NO: 30098 - DNA, 20 bp, synthetic construct
  misc_feature 1..20: note = chemically synthesized
  source 1..20: mol_type = other DNA
ctcttatggtcgagactgca

SEQ ID NO: 30099 - DNA, 20 bp, synthetic construct
  misc_feature 1..20: note = chemically synthesized
  source 1..20: mol_type = other DNA
tcttatggtcgagactgcag

SEQ ID NO: 30100 - DNA, 20 bp, synthetic construct
  misc_feature 1..20: note = chemically synthesized
  source 1..20: mol_type = other DNA
tcgagactgcaggggtgaaa

SEQ ID NO: 30101 - DNA, 20 bp, synthetic construct
  misc_feature 1..20: note = chemically synthesized
  source 1..20: mol_type = other DNA
tgcaggggtgaaatagaccc

SEQ ID NO: 30102 - DNA, 20 bp, synthetic construct
  misc_feature 1..20: note = chemically synthesized
  source 1..20: mol_type = other DNA
aaatagaccccagtctccca

SEQ ID NO: 30103 - DNA, 20 bp, synthetic construct
  misc_feature 1..20: note = chemically synthesized
  source 1..20: mol_type = other DNA
ccagtctcccacagcgctcc

SEQ ID NO: 30104 - DNA, 20 bp, synthetic construct
  misc_feature 1..20: note = chemically synthesized
  source 1..20: mol_type = other DNA
cagtctcccacagcgctccc

SEQ ID NO: 30105 - DNA, 20 bp, synthetic construct
  misc_feature 1..20: note = chemically synthesized
  source 1..20: mol_type = other DNA
cacagcgctcccaggcttat

SEQ ID NO: 30106 - DNA, 20 bp, synthetic construct
  misc_feature 1..20: note = chemically synthesized
  source 1..20: mol_type = other DNA
acagcgctcccaggcttatt

SEQ ID NO: 30107 - DNA, 20 bp, synthetic construct
  misc_feature 1..20: note = chemically synthesized
  source 1..20: mol_type = other DNA
gcgctcccaggcttattagg

SEQ ID NO: 30108 - DNA, 20 bp, synthetic construct
  misc_feature 1..20: note = chemically synthesized
  source 1..20: mol_type = other DNA
gctcccaggcttattaggaa

SEQ ID NO: 30109 - DNA, 20 bp, synthetic construct
  misc_feature 1..20: note = chemically synthesized
  source 1..20: mol_type = other DNA
ctcccaggcttattaggaag

SEQ ID NO: 30110 - DNA, 20 bp, synthetic construct
  misc_feature 1..20: note = chemically synthesized
  source 1..20: mol_type = other DNA
aattcccgcctaataaattt

SEQ ID NO: 30111 - DNA, 20 bp, synthetic construct
  misc_feature 1..20: note = chemically synthesized
  source 1..20: mol_type = other DNA
cccgcctaataaattttggt

SEQ ID NO: 30112 - DNA, 20 bp, synthetic construct
  misc_feature 1..20: note = chemically synthesized
  source 1..20: mol_type = other DNA
ctaataaattttggtcagac

SEQ ID NO: 30113 - DNA, 20 bp, synthetic construct
  misc_feature 1..20: note = chemically synthesized
  source 1..20: mol_type = other DNA
taaaaaccctgtctcctgat

SEQ ID NO: 30114 - DNA, 20 bp, synthetic construct
  misc_feature 1..20: note = chemically synthesized
  source 1..20: mol_type = other DNA
taagatgttatcaatgacaa

SEQ ID NO: 30115 - DNA, 20 bp, synthetic construct
  misc_feature 1..20: note = chemically synthesized
  source 1..20: mol_type = other DNA
aatggtgcccgaaacttcat

SEQ ID NO: 30116 - DNA, 20 bp, synthetic construct
  misc_feature 1..20: note = chemically synthesized
  source 1..20: mol_type = other DNA
tagcaattttaatttcgcct

SEQ ID NO: 30117 - DNA, 20 bp, synthetic construct
  misc_feature 1..20: note = chemically synthesized
  source 1..20: mol_type = other DNA
ttaatttcgcctcggtcctg

SEQ ID NO: 30118 - DNA, 20 bp, synthetic construct
  misc_feature 1..20: note = chemically synthesized
  source 1..20: mol_type = other DNA
tgatattctattaccttgta

SEQ ID NO: 30119 - DNA, 20 bp, synthetic construct
  misc_feature 1..20: note = chemically synthesized
  source 1..20: mol_type = other DNA
aatccctaatacaaacttgc

SEQ ID NO: 30120 - DNA, 20 bp, synthetic construct
  misc_feature 1..20: note = chemically synthesized
  source 1..20: mol_type = other DNA
tacaaacttgctggtttttg

SEQ ID NO: 30121 - DNA, 20 bp, synthetic construct
  misc_feature 1..20: note = chemically synthesized
  source 1..20: mol_type = other DNA
ttgctggtttttgtggcttg

SEQ ID NO: 30122 - DNA, 20 bp, synthetic construct
  misc_feature 1..20: note = chemically synthesized
  source 1..20: mol_type = other DNA
tgctggtttttgtggcttgt

SEQ ID NO: 30123 - DNA, 20 bp, synthetic construct
  misc_feature 1..20: note = chemically synthesized
  source 1..20: mol_type = other DNA
gctggtttttgtggcttgtg

SEQ ID NO: 30124 - DNA, 20 bp, synthetic construct
  misc_feature 1..20: note = chemically synthesized
  source 1..20: mol_type = other DNA
ttgtggcttgtggggcatca

SEQ ID NO: 30125 - DNA, 20 bp, synthetic construct
  misc_feature 1..20: note = chemically synthesized
  source 1..20: mol_type = other DNA
ccgaaatgtgatgcctcccc

SEQ ID NO: 30126 - DNA, 20 bp, synthetic construct
  misc_feature 1..20: note = chemically synthesized
  source 1..20: mol_type = other DNA
tgatgcctcccccggatgcc

SEQ ID NO: 30127 - DNA, 20 bp, synthetic construct
  misc_feature 1..20: note = chemically synthesized
  source 1..20: mol_type = other DNA
actctgtccctttatttcta

SEQ ID NO: 30128 - DNA, 20 bp, synthetic construct
  misc_feature 1..20: note = chemically synthesized
  source 1..20: mol_type = other DNA
tgtccctttatttctaaagt

SEQ ID NO: 30129 - DNA, 20 bp, synthetic construct
  misc_feature 1..20: note = chemically synthesized
  source 1..20: mol_type = other DNA
ttctaaagttggccgacgct

SEQ ID NO: 30130 - DNA, 20 bp, synthetic construct
  misc_feature 1..20: note = chemically synthesized
  source 1..20: mol_type = other DNA
tctaaagttggccgacgctt

SEQ ID NO: 30131 - DNA, 20 bp, synthetic construct
  misc_feature 1..20: note = chemically synthesized
  source 1..20: mol_type = other DNA
ctaaagttggccgacgctta

SEQ ID NO: 30132 - DNA, 20 bp, synthetic construct
  misc_feature 1..20: note = chemically synthesized
  source 1..20: mol_type = other DNA
tggccgacgcttagggaaaa

SEQ ID NO: 30133 - DNA, 20 bp, synthetic construct
  misc_feature 1..20: note = chemically synthesized
  source 1..20: mol_type = other DNA
gacgcttagggaaaatagaa

SEQ ID NO: 30134 - DNA, 20 bp, synthetic construct
  misc_feature 1..20: note = chemically synthesized
  source 1..20: mol_type = other DNA
aaaagaacctacgtgaatat

SEQ ID NO: 30135 - DNA, 20 bp, synthetic construct
  misc_feature 1..20: note = chemically synthesized
  source 1..20: mol_type = other DNA
aaagaacctacgtgaatatt

SEQ ID NO: 30136 - DNA, 20 bp, synthetic construct
  misc_feature 1..20: note = chemically synthesized
  source 1..20: mol_type = other DNA
aagaacctacgtgaatattg

SEQ ID NO: 30137 - DNA, 20 bp, synthetic construct
  misc_feature 1..20: note = chemically synthesized
  source 1..20: mol_type = other DNA
aacctacgtgaatattgggg

SEQ ID NO: 30138 - DNA, 20 bp, synthetic construct
  misc_feature 1..20: note = chemically synthesized
  source 1..20: mol_type = other DNA
acctacgtgaatattggggc

SEQ ID NO: 30139 - DNA, 20 bp, synthetic construct
  misc_feature 1..20: note = chemically synthesized
  source 1..20: mol_type = other DNA
ggggcaggttccctgatact

SEQ ID NO: 30140 - DNA, 20 bp, synthetic construct
  misc_feature 1..20: note = chemically synthesized
  source 1..20: mol_type = other DNA
gcaggttccctgatactcag

SEQ ID NO: 30141 - DNA, 20 bp, synthetic construct
  misc_feature 1..20: note = chemically synthesized
  source 1..20: mol_type = other DNA
ttccctgatactcagtggcg

SEQ ID NO: 30142 - DNA, 20 bp, synthetic construct
  misc_feature 1..20: note = chemically synthesized
  source 1..20: mol_type = other DNA
ccctgatactcagtggcgtg

SEQ ID NO: 30143 - DNA, 20 bp, synthetic construct
  misc_feature 1..20: note = chemically synthesized
  source 1..20: mol_type = other DNA
cagtggcgtggagatgtaac

SEQ ID NO: 30144 - DNA, 20 bp, synthetic construct
  misc_feature 1..20: note = chemically synthesized
  source 1..20: mol_type = other DNA
gcgtggagatgtaacaagcc

SEQ ID NO: 30145 - DNA, 20 bp, synthetic construct
  misc_feature 1..20: note = chemically synthesized
  source 1..20: mol_type = other DNA
tgtaacaagcctggatgtgt

SEQ ID NO: 30146 - DNA, 20 bp, synthetic construct
  misc_feature 1..20: note = chemically synthesized
  source 1..20: mol_type = other DNA
ctggatgtgtgagtgatgat

SEQ ID NO: 30147 - DNA, 20 bp, synthetic construct
  misc_feature 1..20: note = chemically synthesized
  source 1..20: mol_type = other DNA
tggatgtgtgagtgatgatc

SEQ ID NO: 30148 - DNA, 20 bp, synthetic construct
  misc_feature 1..20: note = chemically synthesized
  source 1..20: mol_type = other DNA
agtgatgatcaggccaacaa

SEQ ID NO: 30149 - DNA, 20 bp, synthetic construct
  misc_feature 1..20: note = chemically synthesized
  source 1..20: mol_type = other DNA
ggccaacaacagtctgtatt

SEQ ID NO: 30150 - DNA, 20 bp, synthetic construct
  misc_feature 1..20: note = chemically synthesized
  source 1..20: mol_type = other DNA
caacaacagtctgtatttgg

SEQ ID NO: 30151 - DNA, 20 bp, synthetic construct
  misc_feature 1..20: note = chemically synthesized
  source 1..20: mol_type = other DNA
tctgtatttggaagaaatat

SEQ ID NO: 30152 - DNA, 20 bp, synthetic construct
  misc_feature 1..20: note = chemically synthesized
  source 1..20: mol_type = other DNA
cagatgtgaatgttatgacc

SEQ ID NO: 30153 - DNA, 20 bp, synthetic construct
  misc_feature 1..20: note = chemically synthesized
  source 1..20: mol_type = other DNA
agatgtgaatgttatgacct

SEQ ID NO: 30154 - DNA, 20 bp, synthetic construct
  misc_feature 1..20: note = chemically synthesized
  source 1..20: mol_type = other DNA
tgtgaatgttatgacctagg

SEQ ID NO: 30155 - DNA, 20 bp, synthetic construct
  misc_feature 1..20: note = chemically synthesized
  source 1..20: mol_type = other DNA
tgttatgacctaggaagcaa

SEQ ID NO: 30156 - DNA, 20 bp, synthetic construct
  misc_feature 1..20: note = chemically synthesized
  source 1..20: mol_type = other DNA
tatgacctaggaagcaatgg

SEQ ID NO: 30157 - DNA, 20 bp, synthetic construct
  misc_feature 1..20: note = chemically synthesized
  source 1..20: mol_type = other DNA
aaaattattctttttgcctt

SEQ ID NO: 30158 - DNA, 20 bp, synthetic construct
  misc_feature 1..20: note = chemically synthesized
  source 1..20: mol_type = other DNA
ttgtcaacacaaaaaatact

SEQ ID NO: 30159 - DNA, 20 bp, synthetic construct
  misc_feature 1..20: note = chemically synthesized
  source 1..20: mol_type = other DNA
gttgtatactgatttgttaa

SEQ ID NO: 30160 - DNA, 20 bp, synthetic construct
  misc_feature 1..20: note = chemically synthesized
  source 1..20: mol_type = other DNA
gtatactgatttgttaaaag

SEQ ID NO: 30161 - DNA, 20 bp, synthetic construct
  misc_feature 1..20: note = chemically synthesized
  source 1..20: mol_type = other DNA
tactgatttgttaaaagcag

SEQ ID NO: 30162 - DNA, 20 bp, synthetic construct
  misc_feature 1..20: note = chemically synthesized
  source 1..20: mol_type = other DNA
ttgttaaaagcagcagcatg

SEQ ID NO: 30163 - DNA, 20 bp, synthetic construct
  misc_feature 1..20: note = chemically synthesized
  source 1..20: mol_type = other DNA
taaaagcagcagcatgcagt

SEQ ID NO: 30164 - DNA, 20 bp, synthetic construct
  misc_feature 1..20: note = chemically synthesized
  source 1..20: mol_type = other DNA
aaaagcagcagcatgcagtt

SEQ ID NO: 30165 - DNA, 20 bp, synthetic construct
  misc_feature 1..20: note = chemically synthesized
  source 1..20: mol_type = other DNA
tgcagttaggatgatatctt

SEQ ID NO: 30166 - DNA, 20 bp, synthetic construct
  misc_feature 1..20: note = chemically synthesized
  source 1..20: mol_type = other DNA
gcagttaggatgatatcttt

SEQ ID NO: 30167 - DNA, 20 bp, synthetic construct
  misc_feature 1..20: note = chemically synthesized
  source 1..20: mol_type = other DNA
cagttaggatgatatctttg

SEQ ID NO: 30168 - DNA, 20 bp, synthetic construct
  misc_feature 1..20: note = chemically synthesized
  source 1..20: mol_type = other DNA
ggatgatatctttggggaaa

SEQ ID NO: 30169 - DNA, 20 bp, synthetic construct
  misc_feature 1..20: note = chemically synthesized
  source 1..20: mol_type = other DNA
tgatatctttggggaaatgg

SEQ ID NO: 30170 - DNA, 20 bp, synthetic construct
  misc_feature 1..20: note = chemically synthesized
  source 1..20: mol_type = other DNA
atatctttggggaaatggca

SEQ ID NO: 30171 - DNA, 20 bp, synthetic construct
  misc_feature 1..20: note = chemically synthesized
  source 1..20: mol_type = other DNA
aaccccatgctcaccatcaa

SEQ ID NO: 30172 - DNA, 20 bp, synthetic construct
  misc_feature 1..20: note = chemically synthesized
  source 1..20: mol_type = other DNA
accccatgctcaccatcaac

SEQ ID NO: 30173 - DNA, 20 bp, synthetic construct
  misc_feature 1..20: note = chemically synthesized
  source 1..20: mol_type = other DNA
ccatcaacgggattgaattt

SEQ ID NO: 30174 - DNA, 20 bp, synthetic construct
  misc_feature 1..20: note = chemically synthesized
  source 1..20: mol_type = other DNA
gggattgaatttgagctgct

SEQ ID NO: 30175 - DNA, 20 bp, synthetic construct
  misc_feature 1..20: note = chemically synthesized
  source 1..20: mol_type = other DNA
gaatttgagctgctgagaat

SEQ ID NO: 30176 - DNA, 20 bp, synthetic construct
  misc_feature 1..20: note = chemically synthesized
  source 1..20: mol_type = other DNA
ttatcttcaattctgtgaaa

SEQ ID NO: 30177 - DNA, 20 bp, synthetic construct
  misc_feature 1..20: note = chemically synthesized
  source 1..20: mol_type = other DNA
aattctgtgaaatggaattt

SEQ ID NO: 30178 - DNA, 20 bp, synthetic construct
  misc_feature 1..20: note = chemically synthesized
  source 1..20: mol_type = other DNA
tgtgaaatggaattttagac

SEQ ID NO: 30179 - DNA, 20 bp, synthetic construct
  misc_feature 1..20: note = chemically synthesized
  source 1..20: mol_type = other DNA
tttagaccagcctgtgactg

SEQ ID NO: 30180 - DNA, 20 bp, synthetic construct
  misc_feature 1..20: note = chemically synthesized
  source 1..20: mol_type = other DNA
cagcctgtgactgaagccac

SEQ ID NO: 30181 - DNA, 20 bp, synthetic construct
  misc_feature 1..20: note = chemically synthesized
  source 1..20: mol_type = other DNA
agcctgtgactgaagccact

SEQ ID NO: 30182 - DNA, 20 bp, synthetic construct
  misc_feature 1..20: note = chemically synthesized
  source 1..20: mol_type = other DNA
actgaagccactgggcatta

SEQ ID NO: 30183 - DNA, 20 bp, synthetic construct
  misc_feature 1..20: note = chemically synthesized
  source 1..20: mol_type = other DNA
gccgcattgtttctctctgc

SEQ ID NO: 30184 - DNA, 20 bp, synthetic construct
  misc_feature 1..20: note = chemically synthesized
  source 1..20: mol_type = other DNA
cgcattgtttctctctgcaa

SEQ ID NO: 30185 - DNA, 20 bp, synthetic construct
  misc_feature 1..20: note = chemically synthesized
  source 1..20: mol_type = other DNA
cattgtttctctctgcaaga

SEQ ID NO: 30186 - DNA, 20 bp, synthetic construct
  misc_feature 1..20: note = chemically synthesized
  source 1..20: mol_type = other DNA
attgtttctctctgcaagag

SEQ ID NO: 30187 - DNA, 20 bp, synthetic construct
  misc_feature 1..20: note = chemically synthesized
  source 1..20: mol_type = other DNA
gtttctctctgcaagagagg

SEQ ID NO: 30188 - DNA, 20 bp, synthetic construct
  misc_feature 1..20: note = chemically synthesized
  source 1..20: mol_type = other DNA
tttctctctgcaagagagga

SEQ ID NO: 30189 - DNA, 20 bp, synthetic construct
  misc_feature 1..20: note = chemically synthesized
  source 1..20: mol_type = other DNA
ctctctgcaagagaggaagg

SEQ ID NO: 30190 - DNA, 20 bp, synthetic construct
  misc_feature 1..20: note = chemically synthesized
  source 1..20: mol_type = other DNA
tctctgcaagagaggaagga

SEQ ID NO: 30191 - DNA, 20 bp, synthetic construct
  misc_feature 1..20: note = chemically synthesized
  source 1..20: mol_type = other DNA
tgcaagagaggaaggaaggc

SEQ ID NO: 30192 - DNA, 20 bp, synthetic construct
  misc_feature 1..20: note = chemically synthesized
  source 1..20: mol_type = other DNA
caagagaggaaggaaggctg

SEQ ID NO: 30193 - DNA, 20 bp, synthetic construct
  misc_feature 1..20: note = chemically synthesized
  source 1..20: mol_type = other DNA
gaggaaggaaggctggagta

SEQ ID NO: 30194 - DNA, 20 bp, synthetic construct
  misc_feature 1..20: note = chemically synthesized
  source 1..20: mol_type = other DNA
aggaaggctggagtacagct

SEQ ID NO: 30195 - DNA, 20 bp, synthetic construct
  misc_feature 1..20: note = chemically synthesized
  source 1..20: mol_type = other DNA
tggagtacagctgagctttc

SEQ ID NO: 30196 - DNA, 20 bp, synthetic construct
  misc_feature 1..20: note = chemically synthesized
  source 1..20: mol_type = other DNA
agtacagctgagctttctgg

SEQ ID NO: 30197 - DNA, 20 bp, synthetic construct
  misc_feature 1..20: note = chemically synthesized
  source 1..20: mol_type = other DNA
gtacagctgagctttctggc

SEQ ID NO: 30198 - DNA, 20 bp, synthetic construct
  misc_feature 1..20: note = chemically synthesized
  source 1..20: mol_type = other DNA
ctgagctttctggcaggcac

SEQ ID NO: 30199 - DNA, 20 bp, synthetic construct
  misc_feature 1..20: note = chemically synthesized
  source 1..20: mol_type = other DNA
agctttctggcaggcactgg

SEQ ID NO: 30200 - DNA, 20 bp, synthetic construct
  misc_feature 1..20: note = chemically synthesized
  source 1..20: mol_type = other DNA
ctttctggcaggcactggtg

SEQ ID NO: 30201 - DNA, 20 bp, synthetic construct
  misc_feature 1..20: note = chemically synthesized
  source 1..20: mol_type = other DNA
ccttccccattctttgtaac

SEQ ID NO: 30202 - DNA, 20 bp, synthetic construct
  misc_feature 1..20: note = chemically synthesized
  source 1..20: mol_type = other DNA
tccccattctttgtaactgg

SEQ ID NO: 30203 - DNA, 20 bp, synthetic construct
  misc_feature 1..20: note = chemically synthesized
  source 1..20: mol_type = other DNA
ttctttgtaactggtggcct

SEQ ID NO: 30204 - DNA, 20 bp, synthetic construct
  misc_feature 1..20: note = chemically synthesized
  source 1..20: mol_type = other DNA
tttgtaactggtggccttag

SEQ ID NO: 30205 - DNA, 20 bp, synthetic construct
  misc_feature 1..20: note = chemically synthesized
  source 1..20: mol_type = other DNA
tgtaactggtggccttagaa

SEQ ID NO: 30206 - DNA, 20 bp, synthetic construct
  misc_feature 1..20: note = chemically synthesized
  source 1..20: mol_type = other DNA
gtaactggtggccttagaag

SEQ ID NO: 30207 - DNA, 20 bp, synthetic construct
  misc_feature 1..20: note = chemically synthesized
  source 1..20: mol_type = other DNA
taactggtggccttagaaga

SEQ ID NO: 30208 - DNA, 20 bp, synthetic construct
  misc_feature 1..20: note = chemically synthesized
  source 1..20: mol_type = other DNA
ggtggccttagaagagggtt

SEQ ID NO: 30209 - DNA, 20 bp, synthetic construct
  misc_feature 1..20: note = chemically synthesized
  source 1..20: mol_type = other DNA
gtggccttagaagagggttc

SEQ ID NO: 30210 - DNA, 20 bp, synthetic construct
  misc_feature 1..20: note = chemically synthesized
  source 1..20: mol_type = other DNA
tggccttagaagagggttca

SEQ ID NO: 30211 - DNA, 20 bp, synthetic construct
  misc_feature 1..20: note = chemically synthesized
  source 1..20: mol_type = other DNA
agggttcagggttatgtgtt

SEQ ID NO: 30212 - DNA, 20 bp, synthetic construct
  misc_feature 1..20: note = chemically synthesized
  source 1..20: mol_type = other DNA
gggttatgtgtttggaacac

SEQ ID NO: 30213 - DNA, 20 bp, synthetic construct
  misc_feature 1..20: note = chemically synthesized
  source 1..20: mol_type = other DNA
tatgtgtttggaacacgagt

SEQ ID NO: 30214 - DNA, 20 bp, synthetic construct
  misc_feature 1..20: note = chemically synthesized
  source 1..20: mol_type = other DNA
ggaacacgagttagtataaa

SEQ ID NO: 30215 - DNA, 20 bp, synthetic construct
  misc_feature 1..20: note = chemically synthesized
  source 1..20: mol_type = other DNA
agttagtataaatggttctg

SEQ ID NO: 30216 - DNA, 20 bp, synthetic construct
  misc_feature 1..20: note = chemically synthesized
  source 1..20: mol_type = other DNA
tggttctgaagcacttgatt

SEQ ID NO: 30217 - DNA, 20 bp, synthetic construct
  misc_feature 1..20: note = chemically synthesized
  source 1..20: mol_type = other DNA
tcagactgtgctttaaaaaa

SEQ ID NO: 30218 - DNA, 20 bp, synthetic construct
  misc_feature 1..20: note = chemically synthesized
  source 1..20: mol_type = other DNA
cagactgtgctttaaaaaat

SEQ ID NO: 30219 - DNA, 20 bp, synthetic construct
  misc_feature 1..20: note = chemically synthesized
  source 1..20: mol_type = other DNA
ctgtgctttaaaaaatagga

SEQ ID NO: 30220 - DNA, 20 bp, synthetic construct
  misc_feature 1..20: note = chemically synthesized
  source 1..20: mol_type = other DNA
gctttaaaaaataggaaaga

SEQ ID NO: 30221 - DNA, 20 bp, synthetic construct
  misc_feature 1..20: note = chemically synthesized
  source 1..20: mol_type = other DNA
ttaaaaaataggaaagaaag

SEQ ID NO: 30222 - DNA, 20 bp, synthetic construct
  misc_feature 1..20: note = chemically synthesized
  source 1..20: mol_type = other DNA
aaaataggaaagaaagtaga

SEQ ID NO: 30223 - DNA, 20 bp, synthetic construct
  misc_feature 1..20: note = chemically synthesized
  source 1..20: mol_type = other DNA
aggaaagaaagtagaaagaa

SEQ ID NO: 30224 - DNA, 20 bp, synthetic construct
  misc_feature 1..20: note = chemically synthesized
  source 1..20: mol_type = other DNA
aaagtagaaagaacagctga

SEQ ID NO: 30225 - DNA, 20 bp, synthetic construct
  misc_feature 1..20: note = chemically synthesized
  source 1..20: mol_type = other DNA
agaaagaacagctgatggtt

SEQ ID NO: 30226 - DNA, 20 bp, synthetic construct
  misc_feature 1..20: note = chemically synthesized
  source 1..20: mol_type = other DNA
aagaacagctgatggtttgg

SEQ ID NO: 30227 - DNA, 20 bp, synthetic construct
  misc_feature 1..20: note = chemically synthesized
  source 1..20: mol_type = other DNA
agaacagctgatggtttgga

SEQ ID NO: 30228 - DNA, 20 bp, synthetic construct
  misc_feature 1..20: note = chemically synthesized
  source 1..20: mol_type = other DNA
gaacagctgatggtttggaa

SEQ ID NO: 30229 - DNA, 20 bp, synthetic construct
  misc_feature 1..20: note = chemically synthesized
  source 1..20: mol_type = other DNA
acagctgatggtttggaagg

SEQ ID NO: 30230 - DNA, 20 bp, synthetic construct
  misc_feature 1..20: note = chemically synthesized
  source 1..20: mol_type = other DNA
tggtttggaagggagccacc

SEQ ID NO: 30231 - DNA, 20 bp, synthetic construct
  misc_feature 1..20: note = chemically synthesized
  source 1..20: mol_type = other DNA
gaagggagccaccaagcacc

SEQ ID NO: 30232 - DNA, 20 bp, synthetic construct
  misc_feature 1..20: note = chemically synthesized
  source 1..20: mol_type = other DNA
agggagccaccaagcaccaa

SEQ ID NO: 30233 - DNA, 20 bp, synthetic construct
  misc_feature 1..20: note = chemically synthesized
  source 1..20: mol_type = other DNA
gggagccaccaagcaccaag

SEQ ID NO: 30234 - DNA, 20 bp, synthetic construct
  misc_feature 1..20: note = chemically synthesized
  source 1..20: mol_type = other DNA
caccaagcaccaagaggtgt

SEQ ID NO: 30235 - DNA, 20 bp, synthetic construct
  misc_feature 1..20: note = chemically synthesized
  source 1..20: mol_type = other DNA
ctgaatccgtttctcaatct

SEQ ID NO: 30236 - DNA, 20 bp, synthetic construct
  misc_feature 1..20: note = chemically synthesized
  source 1..20: mol_type = other DNA
ccgtttctcaatcttagctg

SEQ ID NO: 30237 - DNA, 20 bp, synthetic construct
  misc_feature 1..20: note = chemically synthesized
  source 1..20: mol_type = other DNA
cgtttctcaatcttagctgc

SEQ ID NO: 30238 - DNA, 20 bp, synthetic construct
  misc_feature 1..20: note = chemically synthesized
  source 1..20: mol_type = other DNA
gtttctcaatcttagctgca

SEQ ID NO: 30239 - DNA, 20 bp, synthetic construct
  misc_feature 1..20: note = chemically synthesized
  source 1..20: mol_type = other DNA
caatcttagctgcagggcat

SEQ ID NO: 30240 - DNA, 20 bp, synthetic construct
  misc_feature 1..20: note = chemically synthesized
  source 1..20: mol_type = other DNA
tagctgcagggcattggcta

SEQ ID NO: 30241 - DNA, 20 bp, synthetic construct
  misc_feature 1..20: note = chemically synthesized
  source 1..20: mol_type = other DNA
gctgcagggcattggctaaa

SEQ ID NO: 30242 - DNA, 20 bp, synthetic construct
  misc_feature 1..20: note = chemically synthesized
  source 1..20: mol_type = other DNA
ctgcagggcattggctaaag

SEQ ID NO: 30243 - DNA, 20 bp, synthetic construct
  misc_feature 1..20: note = chemically synthesized
  source 1..20: mol_type = other DNA
cagggcattggctaaagagg

SEQ ID NO: 30244 - DNA, 20 bp, synthetic construct
  misc_feature 1..20: note = chemically synthesized
  source 1..20: mol_type = other DNA
agggcattggctaaagagga

SEQ ID NO: 30245 - DNA, 20 bp, synthetic construct
  misc_feature 1..20: note = chemically synthesized
  source 1..20: mol_type = other DNA
agaggaaggtgaaaactgct

SEQ ID NO: 30246 - DNA, 20 bp, synthetic construct
  misc_feature 1..20: note = chemically synthesized
  source 1..20: mol_type = other DNA
tgagtcactatcaaatcaat

SEQ ID NO: 30247 - DNA, 20 bp, synthetic construct
  misc_feature 1..20: note = chemically synthesized
  source 1..20: mol_type = other DNA
attggtttttctaatcccct

SEQ ID NO: 30248 - DNA, 20 bp, synthetic construct
  misc_feature 1..20: note = chemically synthesized
  source 1..20: mol_type = other DNA
tggtttttctaatcccctga

SEQ ID NO: 30249 - DNA, 20 bp, synthetic construct
  misc_feature 1..20: note = chemically synthesized
  source 1..20: mol_type = other DNA
ttctaatcccctgagagaaa

SEQ ID NO: 30250 - DNA, 20 bp, synthetic construct
  misc_feature 1..20: note = chemically synthesized
  source 1..20: mol_type = other DNA
atcccctgagagaaaaagta

SEQ ID NO: 30251 - DNA, 20 bp, synthetic construct
  misc_feature 1..20: note = chemically synthesized
  source 1..20: mol_type = other DNA
cccctgagagaaaaagtaca

SEQ ID NO: 30252 - DNA, 20 bp, synthetic construct
  misc_feature 1..20: note = chemically synthesized
  source 1..20: mol_type = other DNA
aaaaagtacagagtttattg

SEQ ID NO: 30253 - DNA, 20 bp, synthetic construct
  misc_feature 1..20: note = chemically synthesized
  source 1..20: mol_type = other DNA
ttaaaatgccatgcccctca

SEQ ID NO: 30254 - DNA, 20 bp, synthetic construct
  misc_feature 1..20: note = chemically synthesized
  source 1..20: mol_type = other DNA
tgccatgcccctcacggcca

SEQ ID NO: 30255 - DNA, 20 bp, synthetic construct
  misc_feature 1..20: note = chemically synthesized
  source 1..20: mol_type = other DNA
gccatgcccctcacggccaa

SEQ ID NO: 30256 - DNA, 20 bp, synthetic construct
  misc_feature 1..20: note = chemically synthesized
  source 1..20: mol_type = other DNA
cggccaaaggcatctgaatt

SEQ ID NO: 30257 - DNA, 20 bp, synthetic construct
  misc_feature 1..20: note = chemically synthesized
  source 1..20: mol_type = other DNA
ggccaaaggcatctgaatta

SEQ ID NO: 30258 - DNA, 20 bp, synthetic construct
  misc_feature 1..20: note = chemically synthesized
  source 1..20: mol_type = other DNA
caaaggcatctgaattaagg

SEQ ID NO: 30259 - DNA, 20 bp, synthetic construct
  misc_feature 1..20: note = chemically synthesized
  source 1..20: mol_type = other DNA
aggcatctgaattaaggaag

SEQ ID NO: 30260 - DNA, 20 bp, synthetic construct
  misc_feature 1..20: note = chemically synthesized
  source 1..20: mol_type = other DNA
aattaaggaagcagtattca

SEQ ID NO: 30261 - DNA, 20 bp, synthetic construct
  misc_feature 1..20: note = chemically synthesized
  source 1..20: mol_type = other DNA
gtattcacagctgctttctc

SEQ ID NO: 30262 - DNA, 20 bp, synthetic construct
  misc_feature 1..20: note = chemically synthesized
  source 1..20: mol_type = other DNA
agctgctttctccagacatt

SEQ ID NO: 30263 - DNA, 20 bp, synthetic construct
  misc_feature 1..20: note = chemically synthesized
  source 1..20: mol_type = other DNA
tttctccagacattgagctc

SEQ ID NO: 30264 - DNA, 20 bp, synthetic construct
  misc_feature 1..20: note = chemically synthesized
  source 1..20: mol_type = other DNA
ttctccagacattgagctca

SEQ ID NO: 30265 - DNA, 20 bp, synthetic construct
  misc_feature 1..20: note = chemically synthesized
  source 1..20: mol_type = other DNA
ccagacattgagctcaagga

SEQ ID NO: 30266 - DNA, 20 bp, synthetic construct
  misc_feature 1..20: note = chemically synthesized
  source 1..20: mol_type = other DNA
aatctgaactctgcttttat

SEQ ID NO: 30267 - DNA, 20 bp, synthetic construct
  misc_feature 1..20: note = chemically synthesized
  source 1..20: mol_type = other DNA
tttatcagctgcgaaaatcc

SEQ ID NO: 30268 - DNA, 20 bp, synthetic construct
  misc_feature 1..20: note = chemically synthesized
  source 1..20: mol_type = other DNA
aaaatccaagcattcatttc

SEQ ID NO: 30269 - DNA, 20 bp, synthetic construct
  misc_feature 1..20: note = chemically synthesized
  source 1..20: mol_type = other DNA
tccaagcattcatttccagc

SEQ ID NO: 30270 - DNA, 20 bp, synthetic construct
  misc_feature 1..20: note = chemically synthesized
  source 1..20: mol_type = other DNA
gcattcatttccagctggtt

SEQ ID NO: 30271 - DNA, 20 bp, synthetic construct
  misc_feature 1..20: note = chemically synthesized
  source 1..20: mol_type = other DNA
ctggttcagtgcctatgtaa

SEQ ID NO: 30272 - DNA, 20 bp, synthetic construct
  misc_feature 1..20: note = chemically synthesized
  source 1..20: mol_type = other DNA
agtatactgtgtacaaaaat

SEQ ID NO: 30273 - DNA, 20 bp, synthetic construct
  misc_feature 1..20: note = chemically synthesized
  source 1..20: mol_type = other DNA
tgtacaaaaataagattaaa

SEQ ID NO: 30274 - DNA, 20 bp, synthetic construct
  misc_feature 1..20: note = chemically synthesized
  source 1..20: mol_type = other DNA
aagattaaaaagctaacatt

SEQ ID NO: 30275 - DNA, 20 bp, synthetic construct
  misc_feature 1..20: note = chemically synthesized
  source 1..20: mol_type = other DNA
ttaaaaagctaacattaagc

SEQ ID NO: 30276 - DNA, 20 bp, synthetic construct
  misc_feature 1..20: note = chemically synthesized
  source 1..20: mol_type = other DNA
gtgtgtttgtatgttttcta

SEQ ID NO: 30277 - DNA, 20 bp, synthetic construct
  misc_feature 1..20: note = chemically synthesized
  source 1..20: mol_type = other DNA
tttgtatgttttctacagtt

SEQ ID NO: 30278 - DNA, 20 bp, synthetic construct
  misc_feature 1..20: note = chemically synthesized
  source 1..20: mol_type = other DNA
ttctgaataatttgatccga

SEQ ID NO: 30279 - DNA, 20 bp, synthetic construct
  misc_feature 1..20: note = chemically synthesized
  source 1..20: mol_type = other DNA
atatgatttcatttcttttc

SEQ ID NO: 30280 - DNA, 20 bp, synthetic construct
  misc_feature 1..20: note = chemically synthesized
  source 1..20: mol_type = other DNA
atgatttcatttcttttcga

SEQ ID NO: 30281 - DNA, 20 bp, synthetic construct
  misc_feature 1..20: note = chemically synthesized
  source 1..20: mol_type = other DNA
tatgcatactttctaaatgc

SEQ ID NO: 30282 - DNA, 20 bp, synthetic construct
  misc_feature 1..20: note = chemically synthesized
  source 1..20: mol_type = other DNA
aaatgcaagaataaattcct

SEQ ID NO: 30283 - DNA, 20 bp, synthetic construct
  misc_feature 1..20: note = chemically synthesized
  source 1..20: mol_type = other DNA
tcctgagctccatgtgactt

SEQ ID NO: 30284 - DNA, 20 bp, synthetic construct
  misc_feature 1..20: note = chemically synthesized
  source 1..20: mol_type = other DNA
ccatgtgacttcagtaccat

SEQ ID NO: 30285 - DNA, 20 bp, synthetic construct
  misc_feature 1..20: note = chemically synthesized
  source 1..20: mol_type = other DNA
cttcagtaccatcagctctt

SEQ ID NO: 30286 - DNA, 20 bp, synthetic construct
  misc_feature 1..20: note = chemically synthesized
  source 1..20: mol_type = other DNA
cagtaccatcagctctttgg

SEQ ID NO: 30287 - DNA, 20 bp, synthetic construct
  misc_feature 1..20: note = chemically synthesized
  source 1..20: mol_type = other DNA
tcagctctttggcagcttat

SEQ ID NO: 30288 - DNA, 20 bp, synthetic construct
  misc_feature 1..20: note = chemically synthesized
  source 1..20: mol_type = other DNA
tttggcagcttatgagtata

SEQ ID NO: 30289 - DNA, 20 bp, synthetic construct
  misc_feature 1..20: note = chemically synthesized
  source 1..20: mol_type = other DNA
acagctttttaattctcacc

SEQ ID NO: 30290 - DNA, 20 bp, synthetic construct
  misc_feature 1..20: note = chemically synthesized
  source 1..20: mol_type = other DNA
tttaattctcacctggtccc

SEQ ID NO: 30291 - DNA, 20 bp, synthetic construct
  misc_feature 1..20: note = chemically synthesized
  source 1..20: mol_type = other DNA
ttaattctcacctggtcccc

SEQ ID NO: 30292 - DNA, 20 bp, synthetic construct
  misc_feature 1..20: note = chemically synthesized
  source 1..20: mol_type = other DNA
ctcacctggtccccaggata

SEQ ID NO: 30293 - DNA, 20 bp, synthetic construct
  misc_feature 1..20: note = chemically synthesized
  source 1..20: mol_type = other DNA
ccaggatatggtttacttgt

SEQ ID NO: 30294 - DNA, 20 bp, synthetic construct
  misc_feature 1..20: note = chemically synthesized
  source 1..20: mol_type = other DNA
aggatatggtttacttgtca

SEQ ID NO: 30295 - DNA, 20 bp, synthetic construct
  misc_feature 1..20: note = chemically synthesized
  source 1..20: mol_type = other DNA
atatggtttacttgtcagag

SEQ ID NO: 30296 - DNA, 20 bp, synthetic construct
  misc_feature 1..20: note = chemically synthesized
  source 1..20: mol_type = other DNA
acttgtcagagtagttttat

SEQ ID NO: 30297 - DNA, 20 bp, synthetic construct
  misc_feature 1..20: note = chemically synthesized
  source 1..20: mol_type = other DNA
cttgtcagagtagttttatg

SEQ ID NO: 30298 - DNA, 20 bp, synthetic construct
  misc_feature 1..20: note = chemically synthesized
  source 1..20: mol_type = other DNA
ctttctcctgactctgattc

SEQ ID NO: 30299 - DNA, 20 bp, synthetic construct
  misc_feature 1..20: note = chemically synthesized
  source 1..20: mol_type = other DNA
tttctcctgactctgattct

SEQ ID NO: 30300 - DNA, 20 bp, synthetic construct
  misc_feature 1..20: note = chemically synthesized
  source 1..20: mol_type = other DNA
gattctaggtaacacctgat

SEQ ID NO: 30301 - DNA, 20 bp, synthetic construct
  misc_feature 1..20: note = chemically synthesized
  source 1..20: mol_type = other DNA
gtaacacctgatgagatgaa

SEQ ID NO: 30302 - DNA, 20 bp, synthetic construct
  misc_feature 1..20: note = chemically synthesized
  source 1..20: mol_type = other DNA
cacctgatgagatgaacaga

SEQ ID NO: 30303 - DNA, 20 bp, synthetic construct
  misc_feature 1..20: note = chemically synthesized
  source 1..20: mol_type = other DNA
tgcacctcacttcctcttac

SEQ ID NO: 30304 - DNA, 20 bp, synthetic construct
  misc_feature 1..20: note = chemically synthesized
  source 1..20: mol_type = other DNA
gcacctcacttcctcttact

SEQ ID NO: 30305 - DNA, 20 bp, synthetic construct
  misc_feature 1..20: note = chemically synthesized
  source 1..20: mol_type = other DNA
acttcctcttactgggcatg

SEQ ID NO: 30306 - DNA, 20 bp, synthetic construct
  misc_feature 1..20: note = chemically synthesized
  source 1..20: mol_type = other DNA
cttcctcttactgggcatga

SEQ ID NO: 30307 - DNA, 20 bp, synthetic construct
  misc_feature 1..20: note = chemically synthesized
  source 1..20: mol_type = other DNA
ctcttactgggcatgaagga

SEQ ID NO: 30308 - DNA, 20 bp, synthetic construct
  misc_feature 1..20: note = chemically synthesized
  source 1..20: mol_type = other DNA
cttactgggcatgaaggaaa

SEQ ID NO: 30309 - DNA, 20 bp, synthetic construct
  misc_feature 1..20: note = chemically synthesized
  source 1..20: mol_type = other DNA
tactgggcatgaaggaaaga

SEQ ID NO: 30310 - DNA, 20 bp, synthetic construct
  misc_feature 1..20: note = chemically synthesized
  source 1..20: mol_type = other DNA
ctgggcatgaaggaaagaga

SEQ ID NO: 30311 - DNA, 20 bp, synthetic construct
  misc_feature 1..20: note = chemically synthesized
  source 1..20: mol_type = other DNA
ggcatgaaggaaagagagag

SEQ ID NO: 30312 - DNA, 20 bp, synthetic construct
  misc_feature 1..20: note = chemically synthesized
  source 1..20: mol_type = other DNA
tgaaggaaagagagagaagt

SEQ ID NO: 30313 - DNA, 20 bp, synthetic construct
  misc_feature 1..20: note = chemically synthesized
  source 1..20: mol_type = other DNA
gaaggaaagagagagaagtc

SEQ ID NO: 30314 - DNA, 20 bp, synthetic construct
  misc_feature 1..20: note = chemically synthesized
  source 1..20: mol_type = other DNA
aaggaaagagagagaagtca

SEQ ID NO: 30315 - DNA, 20 bp, synthetic construct
  misc_feature 1..20: note = chemically synthesized
  source 1..20: mol_type = other DNA
gaaagagagagaagtcaggg

SEQ ID NO: 30316 - DNA, 20 bp, synthetic construct
  misc_feature 1..20: note = chemically synthesized
  source 1..20: mol_type = other DNA
aagagagagaagtcagggta

SEQ ID NO: 30317 - DNA, 20 bp, synthetic construct
  misc_feature 1..20: note = chemically synthesized
  source 1..20: mol_type = other DNA
tgctacattttttttttctg

SEQ ID NO: 30318 - DNA, 20 bp, synthetic construct
  misc_feature 1..20: note = chemically synthesized
  source 1..20: mol_type = other DNA
attttttttttctgtggaaa

SEQ ID NO: 30319 - DNA, 20 bp, synthetic construct
  misc_feature 1..20: note = chemically synthesized
  source 1..20: mol_type = other DNA
tttttttttctgtggaaaaa

SEQ ID NO: 30320 - DNA, 20 bp, synthetic construct
  misc_feature 1..20: note = chemically synthesized
  source 1..20: mol_type = other DNA
atatttctaattaaccttga

SEQ ID NO: 30321 - DNA, 20 bp, synthetic construct
  misc_feature 1..20: note = chemically synthesized
  source 1..20: mol_type = other DNA
tatttctaattaaccttgat

SEQ ID NO: 30322 - DNA, 20 bp, synthetic construct
  misc_feature 1..20: note = chemically synthesized
  source 1..20: mol_type = other DNA
aattaaccttgatgggaaca

SEQ ID NO: 30323 - DNA, 20 bp, synthetic construct
  misc_feature 1..20: note = chemically synthesized
  source 1..20: mol_type = other DNA
cttgatgggaacatagaaca

SEQ ID NO: 30324 - DNA, 20 bp, synthetic construct
  misc_feature 1..20: note = chemically synthesized
  source 1..20: mol_type = other DNA
aacatagaacatagattgta

SEQ ID NO: 30325 - DNA, 20 bp, synthetic construct
  misc_feature 1..20: note = chemically synthesized
  source 1..20: mol_type = other DNA
acatagaacatagattgtaa

SEQ ID NO: 30326 - DNA, 20 bp, synthetic construct
  misc_feature 1..20: note = chemically synthesized
  source 1..20: mol_type = other DNA
catagaacatagattgtaaa

SEQ ID NO: 30327 - DNA, 20 bp, synthetic construct
  misc_feature 1..20: note = chemically synthesized
  source 1..20: mol_type = other DNA
agggaacttgcacattatcg

SEQ ID NO: 30328 - DNA, 20 bp, synthetic construct
  misc_feature 1..20: note = chemically synthesized
  source 1..20: mol_type = other DNA
gaacttgcacattatcgcag

SEQ ID NO: 30329 - DNA, 20 bp, synthetic construct
  misc_feature 1..20: note = chemically synthesized
  source 1..20: mol_type = other DNA
aacttgcacattatcgcagt

SEQ ID NO: 30330 - DNA, 20 bp, synthetic construct
  misc_feature 1..20: note = chemically synthesized
  source 1..20: mol_type = other DNA
tatcgcagtaggctgaataa

SEQ ID NO: 30331 - DNA, 20 bp, synthetic construct
  misc_feature 1..20: note = chemically synthesized
  source 1..20: mol_type = other DNA
gtaggctgaataatggctaa

SEQ ID NO: 30332 - DNA, 20 bp, synthetic construct
  misc_feature 1..20: note = chemically synthesized
  source 1..20: mol_type = other DNA
tggctaatggctcactctga

SEQ ID NO: 30333 - DNA, 20 bp, synthetic construct
  misc_feature 1..20: note = chemically synthesized
  source 1..20: mol_type = other DNA
ctcactctgaaagatatgta

SEQ ID NO: 30334 - DNA, 20 bp, synthetic construct
  misc_feature 1..20: note = chemically synthesized
  source 1..20: mol_type = other DNA
gcttaacccctgaaacctgt

SEQ ID NO: 30335 - DNA, 20 bp, synthetic construct
  misc_feature 1..20: note = chemically synthesized
  source 1..20: mol_type = other DNA
cctgtgagtattatcttttc

SEQ ID NO: 30336 - DNA, 20 bp, synthetic construct
  misc_feature 1..20: note = chemically synthesized
  source 1..20: mol_type = other DNA
tattatcttttctagccaaa

SEQ ID NO: 30337 - DNA, 20 bp, synthetic construct
  misc_feature 1..20: note = chemically synthesized
  source 1..20: mol_type = other DNA
agacttttgcatatataatt

SEQ ID NO: 30338 - DNA, 20 bp, synthetic construct
  misc_feature 1..20: note = chemically synthesized
  source 1..20: mol_type = other DNA
gacttttgcatatataatta

SEQ ID NO: 30339 - DNA, 20 bp, synthetic construct
  misc_feature 1..20: note = chemically synthesized
  source 1..20: mol_type = other DNA
gcatatataattaaggatct

SEQ ID NO: 30340 - DNA, 20 bp, synthetic construct
  misc_feature 1..20: note = chemically synthesized
  source 1..20: mol_type = other DNA
catatataattaaggatctt

SEQ ID NO: 30341 - DNA, 20 bp, synthetic construct
  misc_feature 1..20: note = chemically synthesized
  source 1..20: mol_type = other DNA
tataattaaggatcttggga

SEQ ID NO: 30342 - DNA, 20 bp, synthetic construct
  misc_feature 1..20: note = chemically synthesized
  source 1..20: mol_type = other DNA
ataattaaggatcttgggat

SEQ ID NO: 30343 - DNA, 20 bp, synthetic construct
  misc_feature 1..20: note = chemically synthesized
  source 1..20: mol_type = other DNA
taattaaggatcttgggatg

SEQ ID NO: 30344 - DNA, 20 bp, synthetic construct
  misc_feature 1..20: note = chemically synthesized
  source 1..20: mol_type = other DNA
attaaggatcttgggatggg

SEQ ID NO: 30345 - DNA, 20 bp, synthetic construct
  misc_feature 1..20: note = chemically synthesized
  source 1..20: mol_type = other DNA
ggggagatatcctaattatt

SEQ ID NO: 30346 - DNA, 20 bp, synthetic construct
  misc_feature 1..20: note = chemically synthesized
  source 1..20: mol_type = other DNA
gggagatatcctaattattt

SEQ ID NO: 30347 - DNA, 20 bp, synthetic construct
  misc_feature 1..20: note = chemically synthesized
  source 1..20: mol_type = other DNA
tgtatcctaaatgtaatcac

SEQ ID NO: 30348 - DNA, 20 bp, synthetic construct
  misc_feature 1..20: note = chemically synthesized
  source 1..20: mol_type = other DNA
gtaatcacaagtgtcattat

SEQ ID NO: 30349 - DNA, 20 bp, synthetic construct
  misc_feature 1..20: note = chemically synthesized
  source 1..20: mol_type = other DNA
aatcacaagtgtcattataa

SEQ ID NO: 30350 - DNA, 20 bp, synthetic construct
  misc_feature 1..20: note = chemically synthesized
  source 1..20: mol_type = other DNA
atcacaagtgtcattataag

SEQ ID NO: 30351 - DNA, 20 bp, synthetic construct
  misc_feature 1..20: note = chemically synthesized
  source 1..20: mol_type = other DNA
tcacaagtgtcattataaga

SEQ ID NO: 30352 - DNA, 20 bp, synthetic construct
  misc_feature 1..20: note = chemically synthesized
  source 1..20: mol_type = other DNA
acaagtgtcattataagagg

SEQ ID NO: 30353 - DNA, 20 bp, synthetic construct
  misc_feature 1..20: note = chemically synthesized
  source 1..20: mol_type = other DNA
caagtgtcattataagaggg

SEQ ID NO: 30354 - DNA, 20 bp, synthetic construct
  misc_feature 1..20: note = chemically synthesized
  source 1..20: mol_type = other DNA
gtcattataagagggaggca

SEQ ID NO: 30355 - DNA, 20 bp, synthetic construct
  misc_feature 1..20: note = chemically synthesized
  source 1..20: mol_type = other DNA
tcattataagagggaggcaa

SEQ ID NO: 30356 - DNA, 20 bp, synthetic construct
  misc_feature 1..20: note = chemically synthesized
  source 1..20: mol_type = other DNA
cattataagagggaggcaaa

SEQ ID NO: 30357 - DNA, 20 bp, synthetic construct
  misc_feature 1..20: note = chemically synthesized
  source 1..20: mol_type = other DNA
ttataagagggaggcaaagg

SEQ ID NO: 30358 - DNA, 20 bp, synthetic construct
  misc_feature 1..20: note = chemically synthesized
  source 1..20: mol_type = other DNA
caaagggagatttgacttat

SEQ ID NO: 30359 - DNA, 20 bp, synthetic construct
  misc_feature 1..20: note = chemically synthesized
  source 1..20: mol_type = other DNA
aagggagatttgacttataa

SEQ ID NO: 30360 - DNA, 20 bp, synthetic construct
  misc_feature 1..20: note = chemically synthesized
  source 1..20: mol_type = other DNA
agggagatttgacttataag

SEQ ID NO: 30361 - DNA, 20 bp, synthetic construct
  misc_feature 1..20: note = chemically synthesized
  source 1..20: mol_type = other DNA
ggagatttgacttataagag

SEQ ID NO: 30362 - DNA, 20 bp, synthetic construct
  misc_feature 1..20: note = chemically synthesized
  source 1..20: mol_type = other DNA
aaaatgtgacgtgattacaa

SEQ ID NO: 30363 - DNA, 20 bp, synthetic construct
  misc_feature 1..20: note = chemically synthesized
  source 1..20: mol_type = other DNA
atgtgacgtgattacaaaag

SEQ ID NO: 30364 - DNA, 20 bp, synthetic construct
  misc_feature 1..20: note = chemically synthesized
  source 1..20: mol_type = other DNA
gtgacgtgattacaaaagca

SEQ ID NO: 30365 - DNA, 20 bp, synthetic construct
  misc_feature 1..20: note = chemically synthesized
  source 1..20: mol_type = other DNA
agcagagatacatttttttg

SEQ ID NO: 30366 - DNA, 20 bp, synthetic construct
  misc_feature 1..20: note = chemically synthesized
  source 1..20: mol_type = other DNA
gatacatttttttgaagatc

SEQ ID NO: 30367 - DNA, 20 bp, synthetic construct
  misc_feature 1..20: note = chemically synthesized
  source 1..20: mol_type = other DNA
atacatttttttgaagatcg

SEQ ID NO: 30368 - DNA, 20 bp, synthetic construct
  misc_feature 1..20: note = chemically synthesized
  source 1..20: mol_type = other DNA
catttttttgaagatcgagg

SEQ ID NO: 30369 - DNA, 20 bp, synthetic construct
  misc_feature 1..20: note = chemically synthesized
  source 1..20: mol_type = other DNA
tttttttgaagatcgaggaa

SEQ ID NO: 30370 - DNA, 20 bp, synthetic construct
  misc_feature 1..20: note = chemically synthesized
  source 1..20: mol_type = other DNA
ttttttgaagatcgaggaag

SEQ ID NO: 30371 - DNA, 20 bp, synthetic construct
  misc_feature 1..20: note = chemically synthesized
  source 1..20: mol_type = other DNA
cgaggaagaggctacaaacc

SEQ ID NO: 30372 - DNA, 20 bp, synthetic construct
  misc_feature 1..20: note = chemically synthesized
  source 1..20: mol_type = other DNA
gaggaagaggctacaaacca

SEQ ID NO: 30373 - DNA, 20 bp, synthetic construct
  misc_feature 1..20: note = chemically synthesized
  source 1..20: mol_type = other DNA
aggctacaaaccaaggaatg

SEQ ID NO: 30374 - DNA, 20 bp, synthetic construct
  misc_feature 1..20: note = chemically synthesized
  source 1..20: mol_type = other DNA
ggctacaaaccaaggaatgt

SEQ ID NO: 30375 - DNA, 20 bp, synthetic construct
  misc_feature 1..20: note = chemically synthesized
  source 1..20: mol_type = other DNA
tacaaaccaaggaatgtggg

SEQ ID NO: 30376 - DNA, 20 bp, synthetic construct
  misc_feature 1..20: note = chemically synthesized
  source 1..20: mol_type = other DNA
caaggaatgtgggtagcctc

SEQ ID NO: 30377 - DNA, 20 bp, synthetic construct
  misc_feature 1..20: note = chemically synthesized
  source 1..20: mol_type = other DNA
ggaatgtgggtagcctctag

SEQ ID NO: 30378 - DNA, 20 bp, synthetic construct
  misc_feature 1..20: note = chemically synthesized
  source 1..20: mol_type = other DNA
aatgtgggtagcctctagaa

SEQ ID NO: 30379 - DNA, 20 bp, synthetic construct
  misc_feature 1..20: note = chemically synthesized
  source 1..20: mol_type = other DNA
atgtgggtagcctctagaag

SEQ ID NO: 30380 - DNA, 20 bp, synthetic construct
  misc_feature 1..20: note = chemically synthesized
  source 1..20: mol_type = other DNA
gtagcctctagaagaggaaa

SEQ ID NO: 30381 - DNA, 20 bp, synthetic construct
  misc_feature 1..20: note = chemically synthesized
  source 1..20: mol_type = other DNA
agaagaggaaacagaatcca

SEQ ID NO: 30382 - DNA, 20 bp, synthetic construct
  misc_feature 1..20: note = chemically synthesized
  source 1..20: mol_type = other DNA
aggaaacagaatccatggaa

SEQ ID NO: 30383 - DNA, 20 bp, synthetic construct
  misc_feature 1..20: note = chemically synthesized
  source 1..20: mol_type = other DNA
ggaaacagaatccatggaaa

SEQ ID NO: 30384 - DNA, 20 bp, synthetic construct
  misc_feature 1..20: note = chemically synthesized
  source 1..20: mol_type = other DNA
aacagaatccatggaaaagg

SEQ ID NO: 30385 - DNA, 20 bp, synthetic construct
  misc_feature 1..20: note = chemically synthesized
  source 1..20: mol_type = other DNA
acagaatccatggaaaaggc

SEQ ID NO: 30386 - DNA, 20 bp, synthetic construct
  misc_feature 1..20: note = chemically synthesized
  source 1..20: mol_type = other DNA
caggaaaacacaatctctca

SEQ ID NO: 30387 - DNA, 20 bp, synthetic construct
  misc_feature 1..20: note = chemically synthesized
  source 1..20: mol_type = other DNA
ggaaaacacaatctctcata

SEQ ID NO: 30388 - DNA, 20 bp, synthetic construct
  misc_feature 1..20: note = chemically synthesized
  source 1..20: mol_type = other DNA
acaatctctcatagagtctc

SEQ ID NO: 30389 - DNA, 20 bp, synthetic construct
  misc_feature 1..20: note = chemically synthesized
  source 1..20: mol_type = other DNA
atctctcatagagtctccag

SEQ ID NO: 30390 - DNA, 20 bp, synthetic construct
  misc_feature 1..20: note = chemically synthesized
  source 1..20: mol_type = other DNA
catagagtctccagaagaaa

SEQ ID NO: 30391 - DNA, 20 bp, synthetic construct
  misc_feature 1..20: note = chemically synthesized
  source 1..20: mol_type = other DNA
ccacactgacacctcgactt

SEQ ID NO: 30392 - DNA, 20 bp, synthetic construct
  misc_feature 1..20: note = chemically synthesized
  source 1..20: mol_type = other DNA
ctgacacctcgactttagcc

SEQ ID NO: 30393 - DNA, 20 bp, synthetic construct
  misc_feature 1..20: note = chemically synthesized
  source 1..20: mol_type = other DNA
tagcccagtgaaaccgattt

SEQ ID NO: 30394 - DNA, 20 bp, synthetic construct
  misc_feature 1..20: note = chemically synthesized
  source 1..20: mol_type = other DNA
cttctgacctccacaacttc

SEQ ID NO: 30395 - DNA, 20 bp, synthetic construct
  misc_feature 1..20: note = chemically synthesized
  source 1..20: mol_type = other DNA
taatacatttgtgttgtttt

SEQ ID NO: 30396 - DNA, 20 bp, synthetic construct
  misc_feature 1..20: note = chemically synthesized
  source 1..20: mol_type = other DNA
gttttaagccaataaatttg

SEQ ID NO: 30397 - DNA, 20 bp, synthetic construct
  misc_feature 1..20: note = chemically synthesized
  source 1..20: mol_type = other DNA
aaatttgtggtaatttttta

SEQ ID NO: 30398 - DNA, 20 bp, synthetic construct
  misc_feature 1..20: note = chemically synthesized
  source 1..20: mol_type = other DNA
tttgtggtaattttttacag

SEQ ID NO: 30399 - DNA, 20 bp, synthetic construct
  misc_feature 1..20: note = chemically synthesized
  source 1..20: mol_type = other DNA
tggtaattttttacagcagc

SEQ ID NO: 30400 - DNA, 20 bp, synthetic construct
  misc_feature 1..20: note = chemically synthesized
  source 1..20: mol_type = other DNA
gtaattttttacagcagcaa

SEQ ID NO: 30401 - DNA, 20 bp, synthetic construct
  misc_feature 1..20: note = chemically synthesized
  source 1..20: mol_type = other DNA
taattttttacagcagcaag

SEQ ID NO: 30402 - DNA, 20 bp, synthetic construct
  misc_feature 1..20: note = chemically synthesized
  source 1..20: mol_type = other DNA
ttacagcagcaagaggaaat

SEQ ID NO: 30403 - DNA, 20 bp, synthetic construct
  misc_feature 1..20: note = chemically synthesized
  source 1..20: mol_type = other DNA
gcaagaggaaatcagttacg

SEQ ID NO: 30404 - DNA, 20 bp, synthetic construct
  misc_feature 1..20: note = chemically synthesized
  source 1..20: mol_type = other DNA
aggaaatcagttacgtagaa

SEQ ID NO: 30405 - DNA, 20 bp, synthetic construct
  misc_feature 1..20: note = chemically synthesized
  source 1..20: mol_type = other DNA
aaatcagttacgtagaatag

SEQ ID NO: 30406 - DNA, 20 bp, synthetic construct
  misc_feature 1..20: note = chemically synthesized
  source 1..20: mol_type = other DNA
aatcagttacgtagaatagt

SEQ ID NO: 30407 - DNA, 20 bp, synthetic construct
  misc_feature 1..20: note = chemically synthesized
  source 1..20: mol_type = other DNA
agaatagtaggtcctgtctc

SEQ ID NO: 30408 - DNA, 20 bp, synthetic construct
  misc_feature 1..20: note = chemically synthesized
  source 1..20: mol_type = other DNA
tcctgtctctggctaatcat

SEQ ID NO: 30409 - DNA, 20 bp, synthetic construct
  misc_feature 1..20: note = chemically synthesized
  source 1..20: mol_type = other DNA
gctaatcattagaatcactc

SEQ ID NO: 30410 - DNA, 20 bp, synthetic construct
  misc_feature 1..20: note = chemically synthesized
  source 1..20: mol_type = other DNA
aatcattagaatcactccag

SEQ ID NO: 30411 - DNA, 20 bp, synthetic construct
  misc_feature 1..20: note = chemically synthesized
  source 1..20: mol_type = other DNA
ctccagaagcttgttacata

SEQ ID NO: 30412 - DNA, 20 bp, synthetic construct
  misc_feature 1..20: note = chemically synthesized
  source 1..20: mol_type = other DNA
aagcttgttacatacagacc

SEQ ID NO: 30413 - DNA, 20 bp, synthetic construct
  misc_feature 1..20: note = chemically synthesized
  source 1..20: mol_type = other DNA
gcttgttacatacagaccca

SEQ ID NO: 30414 - DNA, 20 bp, synthetic construct
  misc_feature 1..20: note = chemically synthesized
  source 1..20: mol_type = other DNA
gttacatacagacccagagc

SEQ ID NO: 30415 - DNA, 20 bp, synthetic construct
  misc_feature 1..20: note = chemically synthesized
  source 1..20: mol_type = other DNA
agacccagagccagtgaatc

SEQ ID NO: 30416 - DNA, 20 bp, synthetic construct
  misc_feature 1..20: note = chemically synthesized
  source 1..20: mol_type = other DNA
gacccagagccagtgaatca

SEQ ID NO: 30417 - DNA, 20 bp, synthetic construct
  misc_feature 1..20: note = chemically synthesized
  source 1..20: mol_type = other DNA
gagccagtgaatcaaggatt

SEQ ID NO: 30418 - DNA, 20 bp, synthetic construct
  misc_feature 1..20: note = chemically synthesized
  source 1..20: mol_type = other DNA
ccagtgaatcaaggatttgg

SEQ ID NO: 30419 - DNA, 20 bp, synthetic construct
  misc_feature 1..20: note = chemically synthesized
  source 1..20: mol_type = other DNA
gtgaatcaaggatttggtgg

SEQ ID NO: 30420 - DNA, 20 bp, synthetic construct
  misc_feature 1..20: note = chemically synthesized
  source 1..20: mol_type = other DNA
tgaatcaaggatttggtggt

SEQ ID NO: 30421 - DNA, 20 bp, synthetic construct
  misc_feature 1..20: note = chemically synthesized
  source 1..20: mol_type = other DNA
gaatcaaggatttggtggtg

SEQ ID NO: 30422 - DNA, 20 bp, synthetic construct
  misc_feature 1..20: note = chemically synthesized
  source 1..20: mol_type = other DNA
aaggatttggtggtggggcc

SEQ ID NO: 30423 - DNA, 20 bp, synthetic construct
  misc_feature 1..20: note = chemically synthesized
  source 1..20: mol_type = other DNA
ggatttggtggtggggccca

SEQ ID NO: 30424 - DNA, 20 bp, synthetic construct
  misc_feature 1..20: note = chemically synthesized
  source 1..20: mol_type = other DNA
gggcccagagcctgaatatt

SEQ ID NO: 30425 - DNA, 20 bp, synthetic construct
  misc_feature 1..20: note = chemically synthesized
  source 1..20: mol_type = other DNA
ccagagcctgaatattaagc

SEQ ID NO: 30426 - DNA, 20 bp, synthetic construct
  misc_feature 1..20: note = chemically synthesized
  source 1..20: mol_type = other DNA
attaagcaagttcttcgttt

SEQ ID NO: 30427 - DNA, 20 bp, synthetic construct
  misc_feature 1..20: note = chemically synthesized
  source 1..20: mol_type = other DNA
aagttcttcgttttagaaat

SEQ ID NO: 30428 - DNA, 20 bp, synthetic construct
  misc_feature 1..20: note = chemically synthesized
  source 1..20: mol_type = other DNA
agttcttcgttttagaaatg

SEQ ID NO: 30429 - DNA, 20 bp, synthetic construct
  misc_feature 1..20: note = chemically synthesized
  source 1..20: mol_type = other DNA
gttttagaaatgaggaaacc

SEQ ID NO: 30430 - DNA, 20 bp, synthetic construct
  misc_feature 1..20: note = chemically synthesized
  source 1..20: mol_type = other DNA
ttttagaaatgaggaaacca

SEQ ID NO: 30431 - DNA, 20 bp, synthetic construct
  misc_feature 1..20: note = chemically synthesized
  source 1..20: mol_type = other DNA
agaaatgaggaaaccaaggt

SEQ ID NO: 30432 - DNA, 20 bp, synthetic construct
  misc_feature 1..20: note = chemically synthesized
  source 1..20: mol_type = other DNA
gaaatgaggaaaccaaggtt

SEQ ID NO: 30433 - DNA, 20 bp, synthetic construct
  misc_feature 1..20: note = chemically synthesized
  source 1..20: mol_type = other DNA
aatgaggaaaccaaggttgg

SEQ ID NO: 30434 - DNA, 20 bp, synthetic construct
  misc_feature 1..20: note = chemically synthesized
  source 1..20: mol_type = other DNA
gaggaaaccaaggttgggag

SEQ ID NO: 30435 - DNA, 20 bp, synthetic construct
  misc_feature 1..20: note = chemically synthesized
  source 1..20: mol_type = other DNA
aaccaaggttgggagaagct

SEQ ID NO: 30436 - DNA, 20 bp, synthetic construct
  misc_feature 1..20: note = chemically synthesized
  source 1..20: mol_type = other DNA
aagcaacttactcaaataca

SEQ ID NO: 30437 - DNA, 20 bp, synthetic construct
  misc_feature 1..20: note = chemically synthesized
  source 1..20: mol_type = other DNA
agcaacttactcaaatacat

SEQ ID NO: 30438 - DNA, 20 bp, synthetic construct
  misc_feature 1..20: note = chemically synthesized
  source 1..20: mol_type = other DNA
gcaacttactcaaatacata

SEQ ID NO: 30439 - DNA, 20 bp, synthetic construct
  misc_feature 1..20: note = chemically synthesized
  source 1..20: mol_type = other DNA
tcttttgaattttcttaccc

SEQ ID NO: 30440 - DNA, 20 bp, synthetic construct
  misc_feature 1..20: note = chemically synthesized
  source 1..20: mol_type = other DNA
tgtaaatgtgatttcattta

SEQ ID NO: 30441 - DNA, 20 bp, synthetic construct
  misc_feature 1..20: note = chemically synthesized
  source 1..20: mol_type = other DNA
ttgacatattcattaaaatg

SEQ ID NO: 30442 - DNA, 20 bp, synthetic construct
  misc_feature 1..20: note = chemically synthesized
  source 1..20: mol_type = other DNA
tcattaaaatgaagaaataa

SEQ ID NO: 30443 - DNA, 20 bp, synthetic construct
  misc_feature 1..20: note = chemically synthesized
  source 1..20: mol_type = other DNA
aaaatgaagaaataaaagat

SEQ ID NO: 30444 - DNA, 20 bp, synthetic construct
  misc_feature 1..20: note = chemically synthesized
  source 1..20: mol_type = other DNA
aagaaataaaagatgagaaa

SEQ ID NO: 30445 - DNA, 20 bp, synthetic construct
  misc_feature 1..20: note = chemically synthesized
  source 1..20: mol_type = other DNA
attatataatgtttattgat

SEQ ID NO: 30446 - DNA, 20 bp, synthetic construct
  misc_feature 1..20: note = chemically synthesized
  source 1..20: mol_type = other DNA
agaatgaatatgatgcaatc

SEQ ID NO: 30447 - DNA, 20 bp, synthetic construct
  misc_feature 1..20: note = chemically synthesized
  source 1..20: mol_type = other DNA
gcaatctggttttctgtgtt

SEQ ID NO: 30448 - DNA, 20 bp, synthetic construct
  misc_feature 1..20: note = chemically synthesized
  source 1..20: mol_type = other DNA
gtgttcagattcctgacctc

SEQ ID NO: 30449 - DNA, 20 bp, synthetic construct
  misc_feature 1..20: note = chemically synthesized
  source 1..20: mol_type = other DNA
gttcagattcctgacctctg

SEQ ID NO: 30450 - DNA, 20 bp, synthetic construct
  misc_feature 1..20: note = chemically synthesized
  source 1..20: mol_type = other DNA
ggagttaacctttctttgta

SEQ ID NO: 30451 - DNA, 20 bp, synthetic construct
  misc_feature 1..20: note = chemically synthesized
  source 1..20: mol_type = other DNA
taacctttctttgtaaagat

SEQ ID NO: 30452 - DNA, 20 bp, synthetic construct
  misc_feature 1..20: note = chemically synthesized
  source 1..20: mol_type = other DNA
ctttctttgtaaagattaga

SEQ ID NO: 30453 - DNA, 20 bp, synthetic construct
  misc_feature 1..20: note = chemically synthesized
  source 1..20: mol_type = other DNA
tctttgtaaagattagacag

SEQ ID NO: 30454 - DNA, 20 bp, synthetic construct
  misc_feature 1..20: note = chemically synthesized
  source 1..20: mol_type = other DNA
ctttgtaaagattagacagc

SEQ ID NO: 30455 - DNA, 20 bp, synthetic construct
  misc_feature 1..20: note = chemically synthesized
  source 1..20: mol_type = other DNA
tgtaaagattagacagcagg

SEQ ID NO: 30456 - DNA, 20 bp, synthetic construct
  misc_feature 1..20: note = chemically synthesized
  source 1..20: mol_type = other DNA
gtaaagattagacagcaggc

SEQ ID NO: 30457 - DNA, 20 bp, synthetic construct
  misc_feature 1..20: note = chemically synthesized
  source 1..20: mol_type = other DNA
taaagattagacagcaggca

SEQ ID NO: 30458 - DNA, 20 bp, synthetic construct
  misc_feature 1..20: note = chemically synthesized
  source 1..20: mol_type = other DNA
agattagacagcaggcaggg

SEQ ID NO: 30459 - DNA, 20 bp, synthetic construct
  misc_feature 1..20: note = chemically synthesized
  source 1..20: mol_type = other DNA
ggaagaatgcctttgaaact

SEQ ID NO: 30460 - DNA, 20 bp, synthetic construct
  misc_feature 1..20: note = chemically synthesized
  source 1..20: mol_type = other DNA
aagaatgcctttgaaactga

SEQ ID NO: 30461 - DNA, 20 bp, synthetic construct
  misc_feature 1..20: note = chemically synthesized
  source 1..20: mol_type = other DNA
tgcctttgaaactgagagca

SEQ ID NO: 30462 - DNA, 20 bp, synthetic construct
  misc_feature 1..20: note = chemically synthesized
  source 1..20: mol_type = other DNA
ttgaaactgagagcaaagac

SEQ ID NO: 30463 - DNA, 20 bp, synthetic construct
  misc_feature 1..20: note = chemically synthesized
  source 1..20: mol_type = other DNA
tgcaatttacattgatgtcc

SEQ ID NO: 30464 - DNA, 20 bp, synthetic construct
  misc_feature 1..20: note = chemically synthesized
  source 1..20: mol_type = other DNA
gtcctggtgctgtgcataat

SEQ ID NO: 30465 - DNA, 20 bp, synthetic construct
  misc_feature 1..20: note = chemically synthesized
  source 1..20: mol_type = other DNA
aataagttgcttaaacatga

SEQ ID NO: 30466 - DNA, 20 bp, synthetic construct
  misc_feature 1..20: note = chemically synthesized
  source 1..20: mol_type = other DNA
aagttgcttaaacatgacag

SEQ ID NO: 30467 - DNA, 20 bp, synthetic construct
  misc_feature 1..20: note = chemically synthesized
  source 1..20: mol_type = other DNA
agttgcttaaacatgacagc

SEQ ID NO: 30468 - DNA, 20 bp, synthetic construct
  misc_feature 1..20: note = chemically synthesized
  source 1..20: mol_type = other DNA
gcttaaacatgacagcagga

SEQ ID NO: 30469 - DNA, 20 bp, synthetic construct
  misc_feature 1..20: note = chemically synthesized
  source 1..20: mol_type = other DNA
cttaaacatgacagcaggat

SEQ ID NO: 30470 - DNA, 20 bp, synthetic construct
  misc_feature 1..20: note = chemically synthesized
  source 1..20: mol_type = other DNA
acataaaatttatttataaa

SEQ ID NO: 30471 - DNA, 20 bp, synthetic construct
  misc_feature 1..20: note = chemically synthesized
  source 1..20: mol_type = other DNA
aaatttatttataaatggta

SEQ ID NO: 30472 - DNA, 20 bp, synthetic construct
  misc_feature 1..20: note = chemically synthesized
  source 1..20: mol_type = other DNA
acctctgctgaacttcctca

SEQ ID NO: 30473 - DNA, 20 bp, synthetic construct
  misc_feature 1..20: note = chemically synthesized
  source 1..20: mol_type = other DNA
cttcctcatagaatgttcat

SEQ ID NO: 30474 - DNA, 20 bp, synthetic construct
  misc_feature 1..20: note = chemically synthesized
  source 1..20: mol_type = other DNA
agaatgttcatcagaaaaca

SEQ ID NO: 30475 - DNA, 20 bp, synthetic construct
  misc_feature 1..20: note = chemically synthesized
  source 1..20: mol_type = other DNA
ttctatctactctttcttcc

SEQ ID NO: 30476 - DNA, 20 bp, synthetic construct
  misc_feature 1..20: note = chemically synthesized
  source 1..20: mol_type = other DNA
accactgacatcatgaccct

SEQ ID NO: 30477 - DNA, 20 bp, synthetic construct
  misc_feature 1..20: note = chemically synthesized
  source 1..20: mol_type = other DNA
gaccctcagttctattcccc

SEQ ID NO: 30478 - DNA, 20 bp, synthetic construct
  misc_feature 1..20: note = chemically synthesized
  source 1..20: mol_type = other DNA
ctgcccactcccctgaaatc

SEQ ID NO: 30479 - DNA, 20 bp, synthetic construct
  misc_feature 1..20: note = chemically synthesized
  source 1..20: mol_type = other DNA
ccataaatccaaccaccgcc

SEQ ID NO: 30480 - DNA, 20 bp, synthetic construct
  misc_feature 1..20: note = chemically synthesized
  source 1..20: mol_type = other DNA
cataaatccaaccaccgcct

SEQ ID NO: 30481 - DNA, 20 bp, synthetic construct
  misc_feature 1..20: note = chemically synthesized
  source 1..20: mol_type = other DNA
caaccaccgcctgggtatct

SEQ ID NO: 30482 - DNA, 20 bp, synthetic construct
  misc_feature 1..20: note = chemically synthesized
  source 1..20: mol_type = other DNA
accgcctgggtatctcagtt

SEQ ID NO: 30483 - DNA, 20 bp, synthetic construct
  misc_feature 1..20: note = chemically synthesized
  source 1..20: mol_type = other DNA
tccctccatcaactcaaatt

SEQ ID NO: 30484 - DNA, 20 bp, synthetic construct
  misc_feature 1..20: note = chemically synthesized
  source 1..20: mol_type = other DNA
caactcaaatttggctgaca

SEQ ID NO: 30485 - DNA, 20 bp, synthetic construct
  misc_feature 1..20: note = chemically synthesized
  source 1..20: mol_type = other DNA
aaatttggctgacacagttt

SEQ ID NO: 30486 - DNA, 20 bp, synthetic construct
  misc_feature 1..20: note = chemically synthesized
  source 1..20: mol_type = other DNA
gctgacacagttttggattc

SEQ ID NO: 30487 - DNA, 20 bp, synthetic construct
  misc_feature 1..20: note = chemically synthesized
  source 1..20: mol_type = other DNA
tgacacagttttggattcta

SEQ ID NO: 30488 - DNA, 20 bp, synthetic construct
  misc_feature 1..20: note = chemically synthesized
  source 1..20: mol_type = other DNA
gttttggattctagagcatg

SEQ ID NO: 30489 - DNA, 20 bp, synthetic construct
  misc_feature 1..20: note = chemically synthesized
  source 1..20: mol_type = other DNA
ttttggattctagagcatgc

SEQ ID NO: 30490 - DNA, 20 bp, synthetic construct
  misc_feature 1..20: note = chemically synthesized
  source 1..20: mol_type = other DNA
tttgcactcactcttccctc

SEQ ID NO: 30491 - DNA, 20 bp, synthetic construct
  misc_feature 1..20: note = chemically synthesized
  source 1..20: mol_type = other DNA
cccgtccttcctcactttgc

SEQ ID NO: 30492 - DNA, 20 bp, synthetic construct
  misc_feature 1..20: note = chemically synthesized
  source 1..20: mol_type = other DNA
ccagttccaacttctctctg

SEQ ID NO: 30493 - DNA, 20 bp, synthetic construct
  misc_feature 1..20: note = chemically synthesized
  source 1..20: mol_type = other DNA
ccaacttctctctgaagact

SEQ ID NO: 30494 - DNA, 20 bp, synthetic construct
  misc_feature 1..20: note = chemically synthesized
  source 1..20: mol_type = other DNA
ttctctctgaagactcagtt

SEQ ID NO: 30495 - DNA, 20 bp, synthetic construct
  misc_feature 1..20: note = chemically synthesized
  source 1..20: mol_type = other DNA
tctctctgaagactcagttt

SEQ ID NO: 30496 - DNA, 20 bp, synthetic construct
  misc_feature 1..20: note = chemically synthesized
  source 1..20: mol_type = other DNA
ctgaagactcagtttaggta

SEQ ID NO: 30497 - DNA, 20 bp, synthetic construct
  misc_feature 1..20: note = chemically synthesized
  source 1..20: mol_type = other DNA
tgaagactcagtttaggtac

SEQ ID NO: 30498 - DNA, 20 bp, synthetic construct
  misc_feature 1..20: note = chemically synthesized
  source 1..20: mol_type = other DNA
agtttaggtacaggctcctt

SEQ ID NO: 30499 - DNA, 20 bp, synthetic construct
  misc_feature 1..20: note = chemically synthesized
  source 1..20: mol_type = other DNA
gtttaggtacaggctccttt

SEQ ID NO: 30500 - DNA, 20 bp, synthetic construct
  misc_feature 1..20: note = chemically synthesized
  source 1..20: mol_type = other DNA
aatttttttttgactctacc

SEQ ID NO: 30501 - DNA, 20 bp, synthetic construct
  misc_feature 1..20: note = chemically synthesized
  source 1..20: mol_type = other DNA
ttttttgactctacctagcc

SEQ ID NO: 30502 - DNA, 20 bp, synthetic construct
  misc_feature 1..20: note = chemically synthesized
  source 1..20: mol_type = other DNA
gactctacctagcccagact

SEQ ID NO: 30503 - DNA, 20 bp, synthetic construct
  misc_feature 1..20: note = chemically synthesized
  source 1..20: mol_type = other DNA
tcatctacgatattaatctg

SEQ ID NO: 30504 - DNA, 20 bp, synthetic construct
  misc_feature 1..20: note = chemically synthesized
  source 1..20: mol_type = other DNA
taatctgcagtgtcatgcac

SEQ ID NO: 30505 - DNA, 20 bp, synthetic construct
  misc_feature 1..20: note = chemically synthesized
  source 1..20: mol_type = other DNA
acaaaatatttgctgaatga

SEQ ID NO: 30506 - DNA, 20 bp, synthetic construct
  misc_feature 1..20: note = chemically synthesized
  source 1..20: mol_type = other DNA
tatttgctgaatgaaagaat

SEQ ID NO: 30507 - DNA, 20 bp, synthetic construct
  misc_feature 1..20: note = chemically synthesized
  source 1..20: mol_type = other DNA
tttgctgaatgaaagaatga

SEQ ID NO: 30508 - DNA, 20 bp, synthetic construct
  misc_feature 1..20: note = chemically synthesized
  source 1..20: mol_type = other DNA
aaagaatgagagttaacttt

SEQ ID NO: 30509 - DNA, 20 bp, synthetic construct
  misc_feature 1..20: note = chemically synthesized
  source 1..20: mol_type = other DNA
aatgagagttaacttttagt

SEQ ID NO: 30510 - DNA, 20 bp, synthetic construct
  misc_feature 1..20: note = chemically synthesized
  source 1..20: mol_type = other DNA
atgagagttaacttttagtc

SEQ ID NO: 30511 - DNA, 20 bp, synthetic construct
  misc_feature 1..20: note = chemically synthesized
  source 1..20: mol_type = other DNA
ttaacttttagtcaggcata

SEQ ID NO: 30512 - DNA, 20 bp, synthetic construct
  misc_feature 1..20: note = chemically synthesized
  source 1..20: mol_type = other DNA
ggcataaagataaaaaacca

SEQ ID NO: 30513 - DNA, 20 bp, synthetic construct
  misc_feature 1..20: note = chemically synthesized
  source 1..20: mol_type = other DNA
aaaaccaaagtcttttactc

SEQ ID NO: 30514 - DNA, 20 bp, synthetic construct
  misc_feature 1..20: note = chemically synthesized
  source 1..20: mol_type = other DNA
caaagtcttttactccggtg

SEQ ID NO: 30515 - DNA, 20 bp, synthetic construct
  misc_feature 1..20: note = chemically synthesized
  source 1..20: mol_type = other DNA
aagtcttttactccggtgtg

SEQ ID NO: 30516 - DNA, 20 bp, synthetic construct
  misc_feature 1..20: note = chemically synthesized
  source 1..20: mol_type = other DNA
actccggtgtggagtgtttt

SEQ ID NO: 30517 - DNA, 20 bp, synthetic construct
  misc_feature 1..20: note = chemically synthesized
  source 1..20: mol_type = other DNA
ctccggtgtggagtgttttc

SEQ ID NO: 30518 - DNA, 20 bp, synthetic construct
  misc_feature 1..20: note = chemically synthesized
  source 1..20: mol_type = other DNA
ttttcaggattcctaccaat

SEQ ID NO: 30519 - DNA, 20 bp, synthetic construct
  misc_feature 1..20: note = chemically synthesized
  source 1..20: mol_type = other DNA
tttcaggattcctaccaatt

SEQ ID NO: 30520 - DNA, 20 bp, synthetic construct
  misc_feature 1..20: note = chemically synthesized
  source 1..20: mol_type = other DNA
caggattcctaccaattagg

SEQ ID NO: 30521 - DNA, 20 bp, synthetic construct
  misc_feature 1..20: note = chemically synthesized
  source 1..20: mol_type = other DNA
aggattcctaccaattagga

SEQ ID NO: 30522 - DNA, 20 bp, synthetic construct
  misc_feature 1..20: note = chemically synthesized
  source 1..20: mol_type = other DNA
ggtgtttgattcttcaaact

SEQ ID NO: 30523 - DNA, 20 bp, synthetic construct
  misc_feature 1..20: note = chemically synthesized
  source 1..20: mol_type = other DNA
aaacacctccccttaactga

SEQ ID NO: 30524 - DNA, 20 bp, synthetic construct
  misc_feature 1..20: note = chemically synthesized
  source 1..20: mol_type = other DNA
actgatggattcttcaaact

SEQ ID NO: 30525 - DNA, 20 bp, synthetic construct
  misc_feature 1..20: note = chemically synthesized
  source 1..20: mol_type = other DNA
ggattcttcaaactcagcat

SEQ ID NO: 30526 - DNA, 20 bp, synthetic construct
  misc_feature 1..20: note = chemically synthesized
  source 1..20: mol_type = other DNA
tcttcaaactcagcatcagt

SEQ ID NO: 30527 - DNA, 20 bp, synthetic construct
  misc_feature 1..20: note = chemically synthesized
  source 1..20: mol_type = other DNA
ttcaaactcagcatcagtta

SEQ ID NO: 30528 - DNA, 20 bp, synthetic construct
  misc_feature 1..20: note = chemically synthesized
  source 1..20: mol_type = other DNA
tcaaactcagcatcagttag

SEQ ID NO: 30529 - DNA, 20 bp, synthetic construct
  misc_feature 1..20: note = chemically synthesized
  source 1..20: mol_type = other DNA
caaactcagcatcagttaga

SEQ ID NO: 30530 - DNA, 20 bp, synthetic construct
  misc_feature 1..20: note = chemically synthesized
  source 1..20: mol_type = other DNA
cagcatcagttagagggcat

SEQ ID NO: 30531 - DNA, 20 bp, synthetic construct
  misc_feature 1..20: note = chemically synthesized
  source 1..20: mol_type = other DNA
agcatcagttagagggcatt

SEQ ID NO: 30532 - DNA, 20 bp, synthetic construct
  misc_feature 1..20: note = chemically synthesized
  source 1..20: mol_type = other DNA
gcatcagttagagggcatta

SEQ ID NO: 30533 - DNA, 20 bp, synthetic construct
  misc_feature 1..20: note = chemically synthesized
  source 1..20: mol_type = other DNA
cacttctcaaaccctgcatt

SEQ ID NO: 30534 - DNA, 20 bp, synthetic construct
  misc_feature 1..20: note = chemically synthesized
  source 1..20: mol_type = other DNA
acttctcaaaccctgcattc

SEQ ID NO: 30535 - DNA, 20 bp, synthetic construct
  misc_feature 1..20: note = chemically synthesized
  source 1..20: mol_type = other DNA
cttctcaaaccctgcattca

SEQ ID NO: 30536 - DNA, 20 bp, synthetic construct
  misc_feature 1..20: note = chemically synthesized
  source 1..20: mol_type = other DNA
ctcaaaccctgcattcaggg

SEQ ID NO: 30537 - DNA, 20 bp, synthetic construct
  misc_feature 1..20: note = chemically synthesized
  source 1..20: mol_type = other DNA
ttcagggaagatgtctgttg

SEQ ID NO: 30538 - DNA, 20 bp, synthetic construct
  misc_feature 1..20: note = chemically synthesized
  source 1..20: mol_type = other DNA
tcagggaagatgtctgttgt

SEQ ID NO: 30539 - DNA, 20 bp, synthetic construct
  misc_feature 1..20: note = chemically synthesized
  source 1..20: mol_type = other DNA
cagggaagatgtctgttgtg

SEQ ID NO: 30540 - DNA, 20 bp, synthetic construct
  misc_feature 1..20: note = chemically synthesized
  source 1..20: mol_type = other DNA
ggaagatgtctgttgtgggg

SEQ ID NO: 30541 - DNA, 20 bp, synthetic construct
  misc_feature 1..20: note = chemically synthesized
  source 1..20: mol_type = other DNA
atgtctgttgtggggtggtc

SEQ ID NO: 30542 - DNA, 20 bp, synthetic construct
  misc_feature 1..20: note = chemically synthesized
  source 1..20: mol_type = other DNA
gtggggtggtctggcctact

SEQ ID NO: 30543 - DNA, 20 bp, synthetic construct
  misc_feature 1..20: note = chemically synthesized
  source 1..20: mol_type = other DNA
tggtctggcctacttggcct

SEQ ID NO: 30544 - DNA, 20 bp, synthetic construct
  misc_feature 1..20: note = chemically synthesized
  source 1..20: mol_type = other DNA
tggcctacttggcctgagcc

SEQ ID NO: 30545 - DNA, 20 bp, synthetic construct
  misc_feature 1..20: note = chemically synthesized
  source 1..20: mol_type = other DNA
ggcctacttggcctgagcca

SEQ ID NO: 30546 - DNA, 20 bp, synthetic construct
  misc_feature 1..20: note = chemically synthesized
  source 1..20: mol_type = other DNA
cttggcctgagccaaggttc

SEQ ID NO: 30547 - DNA, 20 bp, synthetic construct
  misc_feature 1..20: note = chemically synthesized
  source 1..20: mol_type = other DNA
ttggcctgagccaaggttct

SEQ ID NO: 30548 - DNA, 20 bp, synthetic construct
  misc_feature 1..20: note = chemically synthesized
  source 1..20: mol_type = other DNA
gcctgagccaaggttctggg

SEQ ID NO: 30549 - DNA, 20 bp, synthetic construct
  misc_feature 1..20: note = chemically synthesized
  source 1..20: mol_type = other DNA
aggttctgggcagttctgtt

SEQ ID NO: 30550 - DNA, 20 bp, synthetic construct
  misc_feature 1..20: note = chemically synthesized
  source 1..20: mol_type = other DNA
cagttacacatgcatgcgtt

SEQ ID NO: 30551 - DNA, 20 bp, synthetic construct
  misc_feature 1..20: note = chemically synthesized
  source 1..20: mol_type = other DNA
catgcgttgagcattgattc

SEQ ID NO: 30552 - DNA, 20 bp, synthetic construct
  misc_feature 1..20: note = chemically synthesized
  source 1..20: mol_type = other DNA
gttgagcattgattcaagcc

SEQ ID NO: 30553 - DNA, 20 bp, synthetic construct
  misc_feature 1..20: note = chemically synthesized
  source 1..20: mol_type = other DNA
gcattgattcaagcctggcc

SEQ ID NO: 30554 - DNA, 20 bp, synthetic construct
  misc_feature 1..20: note = chemically synthesized
  source 1..20: mol_type = other DNA
cattgattcaagcctggcct

SEQ ID NO: 30555 - DNA, 20 bp, synthetic construct
  misc_feature 1..20: note = chemically synthesized
  source 1..20: mol_type = other DNA
ttcaagcctggcctgggcac

SEQ ID NO: 30556 - DNA, 20 bp, synthetic construct
  misc_feature 1..20: note = chemically synthesized
  source 1..20: mol_type = other DNA
tcaagcctggcctgggcact

SEQ ID NO: 30557 - DNA, 20 bp, synthetic construct
  misc_feature 1..20: note = chemically synthesized
  source 1..20: mol_type = other DNA
cctggcctgggcactaggca

SEQ ID NO: 30558 - DNA, 20 bp, synthetic construct
  misc_feature 1..20: note = chemically synthesized
  source 1..20: mol_type = other DNA
ctgggcactaggcatggttt

SEQ ID NO: 30559 - DNA, 20 bp, synthetic construct
  misc_feature 1..20: note = chemically synthesized
  source 1..20: mol_type = other DNA
ctaggcatggttttagatat

SEQ ID NO: 30560 - DNA, 20 bp, synthetic construct
  misc_feature 1..20: note = chemically synthesized
  source 1..20: mol_type = other DNA
taggcatggttttagatatt

SEQ ID NO: 30561 - DNA, 20 bp, synthetic construct
  misc_feature 1..20: note = chemically synthesized
  source 1..20: mol_type = other DNA
aggcatggttttagatatta

SEQ ID NO: 30562 - DNA, 20 bp, synthetic construct
  misc_feature 1..20: note = chemically synthesized
  source 1..20: mol_type = other DNA
tattctgttttccttgcctt

SEQ ID NO: 30563 - DNA, 20 bp, synthetic construct
  misc_feature 1..20: note = chemically synthesized
  source 1..20: mol_type = other DNA
ttttccttgccttaagatac

SEQ ID NO: 30564 - DNA, 20 bp, synthetic construct
  misc_feature 1..20: note = chemically synthesized
  source 1..20: mol_type = other DNA
cttgccttaagataccagtc

SEQ ID NO: 30565 - DNA, 20 bp, synthetic construct
  misc_feature 1..20: note = chemically synthesized
  source 1..20: mol_type = other DNA
gccttaagataccagtctag

SEQ ID NO: 30566 - DNA, 20 bp, synthetic construct
  misc_feature 1..20: note = chemically synthesized
  source 1..20: mol_type = other DNA
ccttaagataccagtctagt

SEQ ID NO: 30567 - DNA, 20 bp, synthetic construct
  misc_feature 1..20: note = chemically synthesized
  source 1..20: mol_type = other DNA
ttaagataccagtctagtag

SEQ ID NO: 30568 - DNA, 20 bp, synthetic construct
  misc_feature 1..20: note = chemically synthesized
  source 1..20: mol_type = other DNA
ccagtctagtaggagccact

SEQ ID NO: 30569 - DNA, 20 bp, synthetic construct
  misc_feature 1..20: note = chemically synthesized
  source 1..20: mol_type = other DNA
cagtctagtaggagccacta

SEQ ID NO: 30570 - DNA, 20 bp, synthetic construct
  misc_feature 1..20: note = chemically synthesized
  source 1..20: mol_type = other DNA
agccactaaggccccttttt

SEQ ID NO: 30571 - DNA, 20 bp, synthetic construct
  misc_feature 1..20: note = chemically synthesized
  source 1..20: mol_type = other DNA
ctaaggcccctttttgagcc

SEQ ID NO: 30572 - DNA, 20 bp, synthetic construct
  misc_feature 1..20: note = chemically synthesized
  source 1..20: mol_type = other DNA
aacataccctgcttctaatc

SEQ ID NO: 30573 - DNA, 20 bp, synthetic construct
  misc_feature 1..20: note = chemically synthesized
  source 1..20: mol_type = other DNA
cttctaatcaagtcatctat

SEQ ID NO: 30574 - DNA, 20 bp, synthetic construct
  misc_feature 1..20: note = chemically synthesized
  source 1..20: mol_type = other DNA
ctaatcaagtcatctattgg

SEQ ID NO: 30575 - DNA, 20 bp, synthetic construct
  misc_feature 1..20: note = chemically synthesized
  source 1..20: mol_type = other DNA
tcatctattggcagtgacct

SEQ ID NO: 30576 - DNA, 20 bp, synthetic construct
  misc_feature 1..20: note = chemically synthesized
  source 1..20: mol_type = other DNA
catctattggcagtgacctt

SEQ ID NO: 30577 - DNA, 20 bp, synthetic construct
  misc_feature 1..20: note = chemically synthesized
  source 1..20: mol_type = other DNA
cagtgaccttgggcaaatca

SEQ ID NO: 30578 - DNA, 20 bp, synthetic construct
  misc_feature 1..20: note = chemically synthesized
  source 1..20: mol_type = other DNA
gggcaaatcatagtctctcc

SEQ ID NO: 30579 - DNA, 20 bp, synthetic construct
  misc_feature 1..20: note = chemically synthesized
  source 1..20: mol_type = other DNA
attacttttctaattgaaac

SEQ ID NO: 30580 - DNA, 20 bp, synthetic construct
  misc_feature 1..20: note = chemically synthesized
  source 1..20: mol_type = other DNA
aagaacctctctctataccc

SEQ ID NO: 30581 - DNA, 20 bp, synthetic construct
  misc_feature 1..20: note = chemically synthesized
  source 1..20: mol_type = other DNA
ctataccccagatttatttt

SEQ ID NO: 30582 - DNA, 20 bp, synthetic construct
  misc_feature 1..20: note = chemically synthesized
  source 1..20: mol_type = other DNA
tataccccagatttattttg

SEQ ID NO: 30583 - DNA, 20 bp, synthetic construct
  misc_feature 1..20: note = chemically synthesized
  source 1..20: mol_type = other DNA
agatttattttgaggattat

SEQ ID NO: 30584 - DNA, 20 bp, synthetic construct
  misc_feature 1..20: note = chemically synthesized
  source 1..20: mol_type = other DNA
gaggattatgagttaattca

SEQ ID NO: 30585 - DNA, 20 bp, synthetic construct
  misc_feature 1..20: note = chemically synthesized
  source 1..20: mol_type = other DNA
taattcatagctaaaatgct

SEQ ID NO: 30586 - DNA, 20 bp, synthetic construct
  misc_feature 1..20: note = chemically synthesized
  source 1..20: mol_type = other DNA
ctaaaatgcttagcacctaa

SEQ ID NO: 30587 - DNA, 20 bp, synthetic construct
  misc_feature 1..20: note = chemically synthesized
  source 1..20: mol_type = other DNA
ttcaattgcgtattactaaa

SEQ ID NO: 30588 - DNA, 20 bp, synthetic construct
  misc_feature 1..20: note = chemically synthesized
  source 1..20: mol_type = other DNA
aattgcgtattactaaaaag

SEQ ID NO: 30589 - DNA, 20 bp, synthetic construct
  misc_feature 1..20: note = chemically synthesized
  source 1..20: mol_type = other DNA
attgcgtattactaaaaaga

SEQ ID NO: 30590 - DNA, 20 bp, synthetic construct
  misc_feature 1..20: note = chemically synthesized
  source 1..20: mol_type = other DNA
aaaaagaaggaatgatttcc

SEQ ID NO: 30591 - DNA, 20 bp, synthetic construct
  misc_feature 1..20: note = chemically synthesized
  source 1..20: mol_type = other DNA
aaagaaggaatgatttccta

SEQ ID NO: 30592 - DNA, 20 bp, synthetic construct
  misc_feature 1..20: note = chemically synthesized
  source 1..20: mol_type = other DNA
aagaaggaatgatttcctag

SEQ ID NO: 30593 - DNA, 20 bp, synthetic construct
  misc_feature 1..20: note = chemically synthesized
  source 1..20: mol_type = other DNA
gaaggaatgatttcctagag

SEQ ID NO: 30594 - DNA, 20 bp, synthetic construct
  misc_feature 1..20: note = chemically synthesized
  source 1..20: mol_type = other DNA
aaggaatgatttcctagagg

SEQ ID NO: 30595 - DNA, 20 bp, synthetic construct
  misc_feature 1..20: note = chemically synthesized
  source 1..20: mol_type = other DNA
cctagaggaggtgcttcttc

SEQ ID NO: 30596 - DNA, 20 bp, synthetic construct
  misc_feature 1..20: note = chemically synthesized
  source 1..20: mol_type = other DNA
aggaggtgcttcttctggcc

SEQ ID NO: 30597 - DNA, 20 bp, synthetic construct
  misc_feature 1..20: note = chemically synthesized
  source 1..20: mol_type = other DNA
ggaggtgcttcttctggcca

SEQ ID NO: 30598 - DNA, 20 bp, synthetic construct
  misc_feature 1..20: note = chemically synthesized
  source 1..20: mol_type = other DNA
gaggtgcttcttctggccaa

SEQ ID NO: 30599 - DNA, 20 bp, synthetic construct
  misc_feature 1..20: note = chemically synthesized
  source 1..20: mol_type = other DNA
cttctggccaagggctgatt

SEQ ID NO: 30600 - DNA, 20 bp, synthetic construct
  misc_feature 1..20: note = chemically synthesized
  source 1..20: mol_type = other DNA
tctggccaagggctgattca

SEQ ID NO: 30601 - DNA, 20 bp, synthetic construct
  misc_feature 1..20: note = chemically synthesized
  source 1..20: mol_type = other DNA
cagagccttaattaactaaa

SEQ ID NO: 30602 - DNA, 20 bp, synthetic construct
  misc_feature 1..20: note = chemically synthesized
  source 1..20: mol_type = other DNA
cttaattaactaaatagatc

SEQ ID NO: 30603 - DNA, 20 bp, synthetic construct
  misc_feature 1..20: note = chemically synthesized
  source 1..20: mol_type = other DNA
atagatcaagcatatctaac

SEQ ID NO: 30604 - DNA, 20 bp, synthetic construct
  misc_feature 1..20: note = chemically synthesized
  source 1..20: mol_type = other DNA
aagcatatctaactggtcac

SEQ ID NO: 30605 - DNA, 20 bp, synthetic construct
  misc_feature 1..20: note = chemically synthesized
  source 1..20: mol_type = other DNA
catatctaactggtcaccgg

SEQ ID NO: 30606 - DNA, 20 bp, synthetic construct
  misc_feature 1..20: note = chemically synthesized
  source 1..20: mol_type = other DNA
atctaactggtcaccggaag

SEQ ID NO: 30607 - DNA, 20 bp, synthetic construct
  misc_feature 1..20: note = chemically synthesized
  source 1..20: mol_type = other DNA
ggtcaccggaagtggtccat

SEQ ID NO: 30608 - DNA, 20 bp, synthetic construct
  misc_feature 1..20: note = chemically synthesized
  source 1..20: mol_type = other DNA
gtcaccggaagtggtccatg

SEQ ID NO: 30609 - DNA, 20 bp, synthetic construct
  misc_feature 1..20: note = chemically synthesized
  source 1..20: mol_type = other DNA
ggaagtggtccatgaggctg

SEQ ID NO: 30610 - DNA, 20 bp, synthetic construct
  misc_feature 1..20: note = chemically synthesized
  source 1..20: mol_type = other DNA
ggtccatgaggctgcagcaa

SEQ ID NO: 30611 - DNA, 20 bp, synthetic construct
  misc_feature 1..20: note = chemically synthesized
  source 1..20: mol_type = other DNA
gtccatgaggctgcagcaat

SEQ ID NO: 30612 - DNA, 20 bp, synthetic construct
  misc_feature 1..20: note = chemically synthesized
  source 1..20: mol_type = other DNA
catgaggctgcagcaatggg

SEQ ID NO: 30613 - DNA, 20 bp, synthetic construct
  misc_feature 1..20: note = chemically synthesized
  source 1..20: mol_type = other DNA
atgaggctgcagcaatggga

SEQ ID NO: 30614 - DNA, 20 bp, synthetic construct
  misc_feature 1..20: note = chemically synthesized
  source 1..20: mol_type = other DNA
ctgcagcaatgggaaggtgt

SEQ ID NO: 30615 - DNA, 20 bp, synthetic construct
  misc_feature 1..20: note = chemically synthesized
  source 1..20: mol_type = other DNA
gcagcaatgggaaggtgtca

SEQ ID NO: 30616 - DNA, 20 bp, synthetic construct
  misc_feature 1..20: note = chemically synthesized
  source 1..20: mol_type = other DNA
gcaatgggaaggtgtcagag

SEQ ID NO: 30617 - DNA, 20 bp, synthetic construct
  misc_feature 1..20: note = chemically synthesized
  source 1..20: mol_type = other DNA
caatgggaaggtgtcagagc

SEQ ID NO: 30618 - DNA, 20 bp, synthetic construct
  misc_feature 1..20: note = chemically synthesized
  source 1..20: mol_type = other DNA
aatgggaaggtgtcagagca

SEQ ID NO: 30619 - DNA, 20 bp, synthetic construct
  misc_feature 1..20: note = chemically synthesized
  source 1..20: mol_type = other DNA
atgggaaggtgtcagagcag

SEQ ID NO: 30620 - DNA, 20 bp, synthetic construct
  misc_feature 1..20: note = chemically synthesized
  source 1..20: mol_type = other DNA
gaaggtgtcagagcaggggt

SEQ ID NO: 30621 - DNA, 20 bp, synthetic construct
  misc_feature 1..20: note = chemically synthesized
  source 1..20: mol_type = other DNA
aaggtgtcagagcaggggtt

SEQ ID NO: 30622 - DNA, 20 bp, synthetic construct
  misc_feature 1..20: note = chemically synthesized
  source 1..20: mol_type = other DNA
tcagagcaggggttgggaaa

SEQ ID NO: 30623 - DNA, 20 bp, synthetic construct
  misc_feature 1..20: note = chemically synthesized
  source 1..20: mol_type = other DNA
caggggttgggaaaaagaca

SEQ ID NO: 30624 - DNA, 20 bp, synthetic construct
  misc_feature 1..20: note = chemically synthesized
  source 1..20: mol_type = other DNA
ggggttgggaaaaagacata

SEQ ID NO: 30625 - DNA, 20 bp, synthetic construct
  misc_feature 1..20: note = chemically synthesized
  source 1..20: mol_type = other DNA
ggttgggaaaaagacataga

SEQ ID NO: 30626 - DNA, 20 bp, synthetic construct
  misc_feature 1..20: note = chemically synthesized
  source 1..20: mol_type = other DNA
gagagaaacgtgcatgtccg

SEQ ID NO: 30627 - DNA, 20 bp, synthetic construct
  misc_feature 1..20: note = chemically synthesized
  source 1..20: mol_type = other DNA
agaaacgtgcatgtccgtag

SEQ ID NO: 30628 - DNA, 20 bp, synthetic construct
  misc_feature 1..20: note = chemically synthesized
  source 1..20: mol_type = other DNA
aaacgtgcatgtccgtagtg

SEQ ID NO: 30629 - DNA, 20 bp, synthetic construct
  misc_feature 1..20: note = chemically synthesized
  source 1..20: mol_type = other DNA
aacgtgcatgtccgtagtgg

SEQ ID NO: 30630 - DNA, 20 bp, synthetic construct
  misc_feature 1..20: note = chemically synthesized
  source 1..20: mol_type = other DNA
acgtgcatgtccgtagtgga

SEQ ID NO: 30631 - DNA, 20 bp, synthetic construct
  misc_feature 1..20: note = chemically synthesized
  source 1..20: mol_type = other DNA
cgtgcatgtccgtagtggag

SEQ ID NO: 30632 - DNA, 20 bp, synthetic construct
  misc_feature 1..20: note = chemically synthesized
  source 1..20: mol_type = other DNA
tgcatgtccgtagtggaggg

SEQ ID NO: 30633 - DNA, 20 bp, synthetic construct
  misc_feature 1..20: note = chemically synthesized
  source 1..20: mol_type = other DNA
ccgtagtggaggggagctct

SEQ ID NO: 30634 - DNA, 20 bp, synthetic construct
  misc_feature 1..20: note = chemically synthesized
  source 1..20: mol_type = other DNA
cgtagtggaggggagctctt

SEQ ID NO: 30635 - DNA, 20 bp, synthetic construct
  misc_feature 1..20: note = chemically synthesized
  source 1..20: mol_type = other DNA
gggagctcttaggatgtcta

SEQ ID NO: 30636 - DNA, 20 bp, synthetic construct
  misc_feature 1..20: note = chemically synthesized
  source 1..20: mol_type = other DNA
taggatgtctacagatttcc

SEQ ID NO: 30637 - DNA, 20 bp, synthetic construct
  misc_feature 1..20: note = chemically synthesized
  source 1..20: mol_type = other DNA
gacaataattgaaatgaaca

SEQ ID NO: 30638 - DNA, 20 bp, synthetic construct
  misc_feature 1..20: note = chemically synthesized
  source 1..20: mol_type = other DNA
acaataattgaaatgaacaa

SEQ ID NO: 30639 - DNA, 20 bp, synthetic construct
  misc_feature 1..20: note = chemically synthesized
  source 1..20: mol_type = other DNA
taattgaaatgaacaaaggc

SEQ ID NO: 30640 - DNA, 20 bp, synthetic construct
  misc_feature 1..20: note = chemically synthesized
  source 1..20: mol_type = other DNA
aattgaaatgaacaaaggca

SEQ ID NO: 30641 - DNA, 20 bp, synthetic construct
  misc_feature 1..20: note = chemically synthesized
  source 1..20: mol_type = other DNA
attgaaatgaacaaaggcaa

SEQ ID NO: 30642 - DNA, 20 bp, synthetic construct
  misc_feature 1..20: note = chemically synthesized
  source 1..20: mol_type = other DNA
aaaggcaagggatgaccaat

SEQ ID NO: 30643 - DNA, 20 bp, synthetic construct
  misc_feature 1..20: note = chemically synthesized
  source 1..20: mol_type = other DNA
aggcaagggatgaccaataa

SEQ ID NO: 30644 - DNA, 20 bp, synthetic construct
  misc_feature 1..20: note = chemically synthesized
  source 1..20: mol_type = other DNA
atcacctttcccttgttctt

SEQ ID NO: 30645 - DNA, 20 bp, synthetic construct
  misc_feature 1..20: note = chemically synthesized
  source 1..20: mol_type = other DNA
tttcccttgttcttcagctc

SEQ ID NO: 30646 - DNA, 20 bp, synthetic construct
  misc_feature 1..20: note = chemically synthesized
  source 1..20: mol_type = other DNA
ttcagctccagctgtgccca

SEQ ID NO: 30647 - DNA, 20 bp, synthetic construct
  misc_feature 1..20: note = chemically synthesized
  source 1..20: mol_type = other DNA
agctgtgcccacagacacca

SEQ ID NO: 30648 - DNA, 20 bp, synthetic construct
  misc_feature 1..20: note = chemically synthesized
  source 1..20: mol_type = other DNA
gctgtgcccacagacaccac

SEQ ID NO: 30649 - DNA, 20 bp, synthetic construct
  misc_feature 1..20: note = chemically synthesized
  source 1..20: mol_type = other DNA
ctgtgcccacagacaccaca

SEQ ID NO: 30650 - DNA, 20 bp, synthetic construct
  misc_feature 1..20: note = chemically synthesized
  source 1..20: mol_type = other DNA
tgcccacagacaccacaggg

SEQ ID NO: 30651 - DNA, 20 bp, synthetic construct
  misc_feature 1..20: note = chemically synthesized
  source 1..20: mol_type = other DNA
cacagggaagcctctgaaca

SEQ ID NO: 30652 - DNA, 20 bp, synthetic construct
  misc_feature 1..20: note = chemically synthesized
  source 1..20: mol_type = other DNA
acagggaagcctctgaacac

SEQ ID NO: 30653 - DNA, 20 bp, synthetic construct
  misc_feature 1..20: note = chemically synthesized
  source 1..20: mol_type = other DNA
cagggaagcctctgaacaca

SEQ ID NO: 30654 - DNA, 20 bp, synthetic construct
  misc_feature 1..20: note = chemically synthesized
  source 1..20: mol_type = other DNA
agggaagcctctgaacacag

SEQ ID NO: 30655 - DNA, 20 bp, synthetic construct
  misc_feature 1..20: note = chemically synthesized
  source 1..20: mol_type = other DNA
ctgaacacaggggtttgaac

SEQ ID NO: 30656 - DNA, 20 bp, synthetic construct
  misc_feature 1..20: note = chemically synthesized
  source 1..20: mol_type = other DNA
tgaacacaggggtttgaacc

SEQ ID NO: 30657 - DNA, 20 bp, synthetic construct
  misc_feature 1..20: note = chemically synthesized
  source 1..20: mol_type = other DNA
gaacacaggggtttgaacca

SEQ ID NO: 30658 - DNA, 20 bp, synthetic construct
  misc_feature 1..20: note = chemically synthesized
  source 1..20: mol_type = other DNA
gtttgaaccagggcctctct

SEQ ID NO: 30659 - DNA, 20 bp, synthetic construct
  misc_feature 1..20: note = chemically synthesized
  source 1..20: mol_type = other DNA
tttccaactctgataccctg

SEQ ID NO: 30660 - DNA, 20 bp, synthetic construct
  misc_feature 1..20: note = chemically synthesized
  source 1..20: mol_type = other DNA
ctctgataccctgaagttct

SEQ ID NO: 30661 - DNA, 20 bp, synthetic construct
  misc_feature 1..20: note = chemically synthesized
  source 1..20: mol_type = other DNA
tcagaaacttccataaattt

SEQ ID NO: 30662 - DNA, 20 bp, synthetic construct
  misc_feature 1..20: note = chemically synthesized
  source 1..20: mol_type = other DNA
acttccataaattttggctg

SEQ ID NO: 30663 - DNA, 20 bp, synthetic construct
  misc_feature 1..20: note = chemically synthesized
  source 1..20: mol_type = other DNA
tccataaattttggctgaag

SEQ ID NO: 30664 - DNA, 20 bp, synthetic construct
  misc_feature 1..20: note = chemically synthesized
  source 1..20: mol_type = other DNA
aattttggctgaagaagcca

SEQ ID NO: 30665 - DNA, 20 bp, synthetic construct
  misc_feature 1..20: note = chemically synthesized
  source 1..20: mol_type = other DNA
agaagccatagcaaacttgt

SEQ ID NO: 30666 - DNA, 20 bp, synthetic construct
  misc_feature 1..20: note = chemically synthesized
  source 1..20: mol_type = other DNA
gccatagcaaacttgtcaga

SEQ ID NO: 30667 - DNA, 20 bp, synthetic construct
  misc_feature 1..20: note = chemically synthesized
  source 1..20: mol_type = other DNA
atggtttcttacctttaact

SEQ ID NO: 30668 - DNA, 20 bp, synthetic construct
  misc_feature 1..20: note = chemically synthesized
  source 1..20: mol_type = other DNA
ttttctctctcctctatgtg

SEQ ID NO: 30669 - DNA, 20 bp, synthetic construct
  misc_feature 1..20: note = chemically synthesized
  source 1..20: mol_type = other DNA
tcctctatgtgtggtgactt

SEQ ID NO: 30670 - DNA, 20 bp, synthetic construct
  misc_feature 1..20: note = chemically synthesized
  source 1..20: mol_type = other DNA
cctctatgtgtggtgacttc

SEQ ID NO: 30671 - DNA, 20 bp, synthetic construct
  misc_feature 1..20: note = chemically synthesized
  source 1..20: mol_type = other DNA
tgtggtgacttcaggaaacc

SEQ ID NO: 30672 - DNA, 20 bp, synthetic construct
  misc_feature 1..20: note = chemically synthesized
  source 1..20: mol_type = other DNA
gtggtgacttcaggaaaccc

SEQ ID NO: 30673 - DNA, 20 bp, synthetic construct
  misc_feature 1..20: note = chemically synthesized
  source 1..20: mol_type = other DNA
gacttcaggaaacccaggcc

SEQ ID NO: 30674 - DNA, 20 bp, synthetic construct
  misc_feature 1..20: note = chemically synthesized
  source 1..20: mol_type = other DNA
cttcaggaaacccaggccca

SEQ ID NO: 30675 - DNA, 20 bp, synthetic construct
  misc_feature 1..20: note = chemically synthesized
  source 1..20: mol_type = other DNA
ttcaggaaacccaggcccag

SEQ ID NO: 30676 - DNA, 20 bp, synthetic construct
  misc_feature 1..20: note = chemically synthesized
  source 1..20: mol_type = other DNA
acccaggcccagaggatata

SEQ ID NO: 30677 - DNA, 20 bp, synthetic construct
  misc_feature 1..20: note = chemically synthesized
  source 1..20: mol_type = other DNA
ttctccttcaaaccactctt

SEQ ID NO: 30678 - DNA, 20 bp, synthetic construct
  misc_feature 1..20: note = chemically synthesized
  source 1..20: mol_type = other DNA
aaaccactctttggatattc

SEQ ID NO: 30679 - DNA, 20 bp, synthetic construct
  misc_feature 1..20: note = chemically synthesized
  source 1..20: mol_type = other DNA
actgcttcactgcgcttcac

SEQ ID NO: 30680 - DNA, 20 bp, synthetic construct
  misc_feature 1..20: note = chemically synthesized
  source 1..20: mol_type = other DNA
cttcactgcgcttcactggt

SEQ ID NO: 30681 - DNA, 20 bp, synthetic construct
  misc_feature 1..20: note = chemically synthesized
  source 1..20: mol_type = other DNA
ggtcagtgcgtcactcaaac

SEQ ID NO: 30682 - DNA, 20 bp, synthetic construct
  misc_feature 1..20: note = chemically synthesized
  source 1..20: mol_type = other DNA
gcgtcactcaaactagctga

SEQ ID NO: 30683 - DNA, 20 bp, synthetic construct
  misc_feature 1..20: note = chemically synthesized
  source 1..20: mol_type = other DNA
agaattgtctaactcataca

SEQ ID NO: 30684 - DNA, 20 bp, synthetic construct
  misc_feature 1..20: note = chemically synthesized
  source 1..20: mol_type = other DNA
gaattgtctaactcatacac

SEQ ID NO: 30685 - DNA, 20 bp, synthetic construct
  misc_feature 1..20: note = chemically synthesized
  source 1..20: mol_type = other DNA
aattgtctaactcatacaca

SEQ ID NO: 30686 - DNA, 20 bp, synthetic construct
  misc_feature 1..20: note = chemically synthesized
  source 1..20: mol_type = other DNA
ctaactcatacacagggaca

SEQ ID NO: 30687 - DNA, 20 bp, synthetic construct
  misc_feature 1..20: note = chemically synthesized
  source 1..20: mol_type = other DNA
tcatacacagggacaaagtc

SEQ ID NO: 30688 - DNA, 20 bp, synthetic construct
  misc_feature 1..20: note = chemically synthesized
  source 1..20: mol_type = other DNA
acacagggacaaagtccagc

SEQ ID NO: 30689 - DNA, 20 bp, synthetic construct
  misc_feature 1..20: note = chemically synthesized
  source 1..20: mol_type = other DNA
gtccagcaagcttatttaac

SEQ ID NO: 30690 - DNA, 20 bp, synthetic construct
  misc_feature 1..20: note = chemically synthesized
  source 1..20: mol_type = other DNA
accggttacacaattgcctt

SEQ ID NO: 30691 - DNA, 20 bp, synthetic construct
  misc_feature 1..20: note = chemically synthesized
  source 1..20: mol_type = other DNA
acaattgcctttggttttta

SEQ ID NO: 30692 - DNA, 20 bp, synthetic construct
  misc_feature 1..20: note = chemically synthesized
  source 1..20: mol_type = other DNA
ggtttttacagtttgttcct

SEQ ID NO: 30693 - DNA, 20 bp, synthetic construct
  misc_feature 1..20: note = chemically synthesized
  source 1..20: mol_type = other DNA
agtttgttcctaagtgtttc

SEQ ID NO: 30694 - DNA, 20 bp, synthetic construct
  misc_feature 1..20: note = chemically synthesized
  source 1..20: mol_type = other DNA
tttgttcctaagtgtttcca

SEQ ID NO: 30695 - DNA, 20 bp, synthetic construct
  misc_feature 1..20: note = chemically synthesized
  source 1..20: mol_type = other DNA
ttgttcctaagtgtttccag

SEQ ID NO: 30696 - DNA, 20 bp, synthetic construct
  misc_feature 1..20: note = chemically synthesized
  source 1..20: mol_type = other DNA
cctaagtgtttccagaggct

SEQ ID NO: 30697 - DNA, 20 bp, synthetic construct
  misc_feature 1..20: note = chemically synthesized
  source 1..20: mol_type = other DNA
ggcttggttcctcttcacct

SEQ ID NO: 30698 - DNA, 20 bp, synthetic construct
  misc_feature 1..20: note = chemically synthesized
  source 1..20: mol_type = other DNA
gcttggttcctcttcacctg

SEQ ID NO: 30699 - DNA, 20 bp, synthetic construct
  misc_feature 1..20: note = chemically synthesized
  source 1..20: mol_type = other DNA
tggttcctcttcacctgagg

SEQ ID NO: 30700 - DNA, 20 bp, synthetic construct
  misc_feature 1..20: note = chemically synthesized
  source 1..20: mol_type = other DNA
gttcctcttcacctgaggta

SEQ ID NO: 30701 - DNA, 20 bp, synthetic construct
  misc_feature 1..20: note = chemically synthesized
  source 1..20: mol_type = other DNA
gattgaccaattatttattc

SEQ ID NO: 30702 - DNA, 20 bp, synthetic construct
  misc_feature 1..20: note = chemically synthesized
  source 1..20: mol_type = other DNA
caattatttattccagttaa

SEQ ID NO: 30703 - DNA, 20 bp, synthetic construct
  misc_feature 1..20: note = chemically synthesized
  source 1..20: mol_type = other DNA
ttatttattccagttaaaag

SEQ ID NO: 30704 - DNA, 20 bp, synthetic construct
  misc_feature 1..20: note = chemically synthesized
  source 1..20: mol_type = other DNA
tatttattccagttaaaagt

SEQ ID NO: 30705 - DNA, 20 bp, synthetic construct
  misc_feature 1..20: note = chemically synthesized
  source 1..20: mol_type = other DNA
taaaagtaggcttatttcaa

SEQ ID NO: 30706 - DNA, 20 bp, synthetic construct
  misc_feature 1..20: note = chemically synthesized
  source 1..20: mol_type = other DNA
aaaagtaggcttatttcaaa

SEQ ID NO: 30707 - DNA, 20 bp, synthetic construct
  misc_feature 1..20: note = chemically synthesized
  source 1..20: mol_type = other DNA
agtaggcttatttcaaaagg

SEQ ID NO: 30708 - DNA, 20 bp, synthetic construct
  misc_feature 1..20: note = chemically synthesized
  source 1..20: mol_type = other DNA
taggcttatttcaaaaggca

SEQ ID NO: 30709 - DNA, 20 bp, synthetic construct
  misc_feature 1..20: note = chemically synthesized
  source 1..20: mol_type = other DNA
ttcaaaaggcagagaatttg

SEQ ID NO: 30710 - DNA, 20 bp, synthetic construct
  misc_feature 1..20: note = chemically synthesized
  source 1..20: mol_type = other DNA
ggcagagaatttgaagctat

SEQ ID NO: 30711 - DNA, 20 bp, synthetic construct
  misc_feature 1..20: note = chemically synthesized
  source 1..20: mol_type = other DNA
gcagagaatttgaagctatc

SEQ ID NO: 30712 - DNA, 20 bp, synthetic construct
  misc_feature 1..20: note = chemically synthesized
  source 1..20: mol_type = other DNA
cagagaatttgaagctatcg

SEQ ID NO: 30713 - DNA, 20 bp, synthetic construct
  misc_feature 1..20: note = chemically synthesized
  source 1..20: mol_type = other DNA
gaatttgaagctatcgggga

SEQ ID NO: 30714 - DNA, 20 bp, synthetic construct
  misc_feature 1..20: note = chemically synthesized
  source 1..20: mol_type = other DNA
aatttgaagctatcggggaa

SEQ ID NO: 30715 - DNA, 20 bp, synthetic construct
  misc_feature 1..20: note = chemically synthesized
  source 1..20: mol_type = other DNA
gctatcggggaaaggaactg

SEQ ID NO: 30716 - DNA, 20 bp, synthetic construct
  misc_feature 1..20: note = chemically synthesized
  source 1..20: mol_type = other DNA
atcggggaaaggaactgtgg

SEQ ID NO: 30717 - DNA, 20 bp, synthetic construct
  misc_feature 1..20: note = chemically synthesized
  source 1..20: mol_type = other DNA
gggaaaggaactgtggcaga

SEQ ID NO: 30718 - DNA, 20 bp, synthetic construct
  misc_feature 1..20: note = chemically synthesized
  source 1..20: mol_type = other DNA
cagatagtgcctgctgtgtg

SEQ ID NO: 30719 - DNA, 20 bp, synthetic construct
  misc_feature 1..20: note = chemically synthesized
  source 1..20: mol_type = other DNA
atagtgcctgctgtgtgtgg

SEQ ID NO: 30720 - DNA, 20 bp, synthetic construct
  misc_feature 1..20: note = chemically synthesized
  source 1..20: mol_type = other DNA
agtgcctgctgtgtgtggtg

SEQ ID NO: 30721 - DNA, 20 bp, synthetic construct
  misc_feature 1..20: note = chemically synthesized
  source 1..20: mol_type = other DNA
gtgcctgctgtgtgtggtgg

SEQ ID NO: 30722 - DNA, 20 bp, synthetic construct
  misc_feature 1..20: note = chemically synthesized
  source 1..20: mol_type = other DNA
gtggtggaggattctctgct

SEQ ID NO: 30723 - DNA, 20 bp, synthetic construct
  misc_feature 1..20: note = chemically synthesized
  source 1..20: mol_type = other DNA
ttctctgctcagtcctgact

SEQ ID NO: 30724 - DNA, 20 bp, synthetic construct
  misc_feature 1..20: note = chemically synthesized
  source 1..20: mol_type = other DNA
tctctgctcagtcctgactc

SEQ ID NO: 30725 - DNA, 20 bp, synthetic construct
  misc_feature 1..20: note = chemically synthesized
  source 1..20: mol_type = other DNA
tgctcagtcctgactcaggc

SEQ ID NO: 30726 - DNA, 20 bp, synthetic construct
  misc_feature 1..20: note = chemically synthesized
  source 1..20: mol_type = other DNA
gctcagtcctgactcaggct

SEQ ID NO: 30727 - DNA, 20 bp, synthetic construct
  misc_feature 1..20: note = chemically synthesized
  source 1..20: mol_type = other DNA
cagtcctgactcaggctagg

SEQ ID NO: 30728 - DNA, 20 bp, synthetic construct
  misc_feature 1..20: note = chemically synthesized
  source 1..20: mol_type = other DNA
agtcctgactcaggctagga

SEQ ID NO: 30729 - DNA, 20 bp, synthetic construct
  misc_feature 1..20: note = chemically synthesized
  source 1..20: mol_type = other DNA
tgactcaggctaggaaggaa

SEQ ID NO: 30730 - DNA, 20 bp, synthetic construct
  misc_feature 1..20: note = chemically synthesized
  source 1..20: mol_type = other DNA
gactcaggctaggaaggaac

SEQ ID NO: 30731 - DNA, 20 bp, synthetic construct
  misc_feature 1..20: note = chemically synthesized
  source 1..20: mol_type = other DNA
actcaggctaggaaggaaca

SEQ ID NO: 30732 - DNA, 20 bp, synthetic construct
  misc_feature 1..20: note = chemically synthesized
  source 1..20: mol_type = other DNA
caggctaggaaggaacaggg

SEQ ID NO: 30733 - DNA, 20 bp, synthetic construct
  misc_feature 1..20: note = chemically synthesized
  source 1..20: mol_type = other DNA
ggaaggaacagggcagtgct

SEQ ID NO: 30734 - DNA, 20 bp, synthetic construct
  misc_feature 1..20: note = chemically synthesized
  source 1..20: mol_type = other DNA
cagggcagtgctgagtctcc

SEQ ID NO: 30735 - DNA, 20 bp, synthetic construct
  misc_feature 1..20: note = chemically synthesized
  source 1..20: mol_type = other DNA
gggcagtgctgagtctcctg

SEQ ID NO: 30736 - DNA, 20 bp, synthetic construct
  misc_feature 1..20: note = chemically synthesized
  source 1..20: mol_type = other DNA
agcactgccctgttccttcc

SEQ ID NO: 30737 - DNA, 20 bp, synthetic construct
  misc_feature 1..20: note = chemically synthesized
  source 1..20: mol_type = other DNA
gccctgttccttcctagcct

SEQ ID NO: 30738 - DNA, 20 bp, synthetic construct
  misc_feature 1..20: note = chemically synthesized
  source 1..20: mol_type = other DNA
tgttccttcctagcctgagt

SEQ ID NO: 30739 - DNA, 20 bp, synthetic construct
  misc_feature 1..20: note = chemically synthesized
  source 1..20: mol_type = other DNA
gttccttcctagcctgagtc

SEQ ID NO: 30740 - DNA, 20 bp, synthetic construct
  misc_feature 1..20: note = chemically synthesized
  source 1..20: mol_type = other DNA
tcctagcctgagtcaggact

SEQ ID NO: 30741 - DNA, 20 bp, synthetic construct
  misc_feature 1..20: note = chemically synthesized
  source 1..20: mol_type = other DNA
tagcctgagtcaggactgag

SEQ ID NO: 30742 - DNA, 20 bp, synthetic construct
  misc_feature 1..20: note = chemically synthesized
  source 1..20: mol_type = other DNA
gcctgagtcaggactgagca

SEQ ID NO: 30743 - DNA, 20 bp, synthetic construct
  misc_feature 1..20: note = chemically synthesized
  source 1..20: mol_type = other DNA
agagaatcctccaccacaca

SEQ ID NO: 30744 - DNA, 20 bp, synthetic construct
  misc_feature 1..20: note = chemically synthesized
  source 1..20: mol_type = other DNA
gaatcctccaccacacacag

SEQ ID NO: 30745 - DNA, 20 bp, synthetic construct
  misc_feature 1..20: note = chemically synthesized
  source 1..20: mol_type = other DNA
aatcctccaccacacacagc

SEQ ID NO: 30746 - DNA, 20 bp, synthetic construct
  misc_feature 1..20: note = chemically synthesized
  source 1..20: mol_type = other DNA
acagcaggcactatctgcca

SEQ ID NO: 30747 - DNA, 20 bp, synthetic construct
  misc_feature 1..20: note = chemically synthesized
  source 1..20: mol_type = other DNA
gccacagttcctttccccga

SEQ ID NO: 30748 - DNA, 20 bp, synthetic construct
  misc_feature 1..20: note = chemically synthesized
  source 1..20: mol_type = other DNA
aattctctgccttttgaaat

SEQ ID NO: 30749 - DNA, 20 bp, synthetic construct
  misc_feature 1..20: note = chemically synthesized
  source 1..20: mol_type = other DNA
gaaataagcctacttttaac

SEQ ID NO: 30750 - DNA, 20 bp, synthetic construct
  misc_feature 1..20: note = chemically synthesized
  source 1..20: mol_type = other DNA
ttttaactggaataaataat

SEQ ID NO: 30751 - DNA, 20 bp, synthetic construct
  misc_feature 1..20: note = chemically synthesized
  source 1..20: mol_type = other DNA
taattggtcaatctctacct

SEQ ID NO: 30752 - DNA, 20 bp, synthetic construct
  misc_feature 1..20: note = chemically synthesized
  source 1..20: mol_type = other DNA
aattggtcaatctctacctc

SEQ ID NO: 30753 - DNA, 20 bp, synthetic construct
  misc_feature 1..20: note = chemically synthesized
  source 1..20: mol_type = other DNA
gtcaatctctacctcaggtg

SEQ ID NO: 30754 - DNA, 20 bp, synthetic construct
  misc_feature 1..20: note = chemically synthesized
  source 1..20: mol_type = other DNA
caatctctacctcaggtgaa

SEQ ID NO: 30755 - DNA, 20 bp, synthetic construct
  misc_feature 1..20: note = chemically synthesized
  source 1..20: mol_type = other DNA
aatctctacctcaggtgaag

SEQ ID NO: 30756 - DNA, 20 bp, synthetic construct
  misc_feature 1..20: note = chemically synthesized
  source 1..20: mol_type = other DNA
acctcaggtgaagaggaacc

SEQ ID NO: 30757 - DNA, 20 bp, synthetic construct
  misc_feature 1..20: note = chemically synthesized
  source 1..20: mol_type = other DNA
gtgaagaggaaccaagcctc

SEQ ID NO: 30758 - DNA, 20 bp, synthetic construct
  misc_feature 1..20: note = chemically synthesized
  source 1..20: mol_type = other DNA
accaagcctctggaaacact

SEQ ID NO: 30759 - DNA, 20 bp, synthetic construct
  misc_feature 1..20: note = chemically synthesized
  source 1..20: mol_type = other DNA
ccaagcctctggaaacactt

SEQ ID NO: 30760 - DNA, 20 bp, synthetic construct
  misc_feature 1..20: note = chemically synthesized
  source 1..20: mol_type = other DNA
ggaacaaactgtaaaaacca

SEQ ID NO: 30761 - DNA, 20 bp, synthetic construct
  misc_feature 1..20: note = chemically synthesized
  source 1..20: mol_type = other DNA
gaacaaactgtaaaaaccaa

SEQ ID NO: 30762 - DNA, 20 bp, synthetic construct
  misc_feature 1..20: note = chemically synthesized
  source 1..20: mol_type = other DNA
accaaaggcaattgtgtaac

SEQ ID NO: 30763 - DNA, 20 bp, synthetic construct
  misc_feature 1..20: note = chemically synthesized
  source 1..20: mol_type = other DNA
aattgtgtaaccggttaaat

SEQ ID NO: 30764 - DNA, 20 bp, synthetic construct
  misc_feature 1..20: note = chemically synthesized
  source 1..20: mol_type = other DNA
aaccggttaaataagcttgc

SEQ ID NO: 30765 - DNA, 20 bp, synthetic construct
  misc_feature 1..20: note = chemically synthesized
  source 1..20: mol_type = other DNA
tggactttgtccctgtgtat

SEQ ID NO: 30766 - DNA, 20 bp, synthetic construct
  misc_feature 1..20: note = chemically synthesized
  source 1..20: mol_type = other DNA
ctttgtccctgtgtatgagt

SEQ ID NO: 30767 - DNA, 20 bp, synthetic construct
  misc_feature 1..20: note = chemically synthesized
  source 1..20: mol_type = other DNA
tatgagttagacaattcttt

SEQ ID NO: 30768 - DNA, 20 bp, synthetic construct
  misc_feature 1..20: note = chemically synthesized
  source 1..20: mol_type = other DNA
agttagacaattctttcagc

SEQ ID NO: 30769 - DNA, 20 bp, synthetic construct
  misc_feature 1..20: note = chemically synthesized
  source 1..20: mol_type = other DNA
acaattctttcagctagttt

SEQ ID NO: 30770 - DNA, 20 bp, synthetic construct
  misc_feature 1..20: note = chemically synthesized
  source 1..20: mol_type = other DNA
agtttgagtgacgcactgac

SEQ ID NO: 30771 - DNA, 20 bp, synthetic construct
  misc_feature 1..20: note = chemically synthesized
  source 1..20: mol_type = other DNA
gagtgacgcactgaccagtg

SEQ ID NO: 30772 - DNA, 20 bp, synthetic construct
  misc_feature 1..20: note = chemically synthesized
  source 1..20: mol_type = other DNA
acgcactgaccagtgaagcg

SEQ ID NO: 30773 - DNA, 20 bp, synthetic construct
  misc_feature 1..20: note = chemically synthesized
  source 1..20: mol_type = other DNA
ctgaccagtgaagcgcagtg

SEQ ID NO: 30774 - DNA, 20 bp, synthetic construct
  misc_feature 1..20: note = chemically synthesized
  source 1..20: mol_type = other DNA
accagtgaagcgcagtgaag

SEQ ID NO: 30775 - DNA, 20 bp, synthetic construct
  misc_feature 1..20: note = chemically synthesized
  source 1..20: mol_type = other DNA
agtgaagcgcagtgaagcag

SEQ ID NO: 30776 - DNA, 20 bp, synthetic construct
  misc_feature 1..20: note = chemically synthesized
  source 1..20: mol_type = other DNA
gtgaagcgcagtgaagcagt

SEQ ID NO: 30777 - DNA, 20 bp, synthetic construct
  misc_feature 1..20: note = chemically synthesized
  source 1..20: mol_type = other DNA
cgcagtgaagcagtgggaac

SEQ ID NO: 30778 - DNA, 20 bp, synthetic construct
  misc_feature 1..20: note = chemically synthesized
  source 1..20: mol_type = other DNA
agtgggaaccggaatatcca

SEQ ID NO: 30779 - DNA, 20 bp, synthetic construct
  misc_feature 1..20: note = chemically synthesized
  source 1..20: mol_type = other DNA
tgggaaccggaatatccaaa

SEQ ID NO: 30780 - DNA, 20 bp, synthetic construct
  misc_feature 1..20: note = chemically synthesized
  source 1..20: mol_type = other DNA
gaaccggaatatccaaagag

SEQ ID NO: 30781 - DNA, 20 bp, synthetic construct
  misc_feature 1..20: note = chemically synthesized
  source 1..20: mol_type = other DNA
aatatccaaagagtggtttg

SEQ ID NO: 30782 - DNA, 20 bp, synthetic construct
  misc_feature 1..20: note = chemically synthesized
  source 1..20: mol_type = other DNA
atatccaaagagtggtttga

SEQ ID NO: 30783 - DNA, 20 bp, synthetic construct
  misc_feature 1..20: note = chemically synthesized
  source 1..20: mol_type = other DNA
atccaaagagtggtttgaag

SEQ ID NO: 30784 - DNA, 20 bp, synthetic construct
  misc_feature 1..20: note = chemically synthesized
  source 1..20: mol_type = other DNA
aaagagtggtttgaaggaga

SEQ ID NO: 30785 - DNA, 20 bp, synthetic construct
  misc_feature 1..20: note = chemically synthesized
  source 1..20: mol_type = other DNA
gagtggtttgaaggagaaag

SEQ ID NO: 30786 - DNA, 20 bp, synthetic construct
  misc_feature 1..20: note = chemically synthesized
  source 1..20: mol_type = other DNA
tgaaggagaaagaagcattg

SEQ ID NO: 30787 - DNA, 20 bp, synthetic construct
  misc_feature 1..20: note = chemically synthesized
  source 1..20: mol_type = other DNA
cattgtggctttatatcctc

SEQ ID NO: 30788 - DNA, 20 bp, synthetic construct
  misc_feature 1..20: note = chemically synthesized
  source 1..20: mol_type = other DNA
attgtggctttatatcctct

SEQ ID NO: 30789 - DNA, 20 bp, synthetic construct
  misc_feature 1..20: note = chemically synthesized
  source 1..20: mol_type = other DNA
ggctttatatcctctgggcc

SEQ ID NO: 30790 - DNA, 20 bp, synthetic construct
  misc_feature 1..20: note = chemically synthesized
  source 1..20: mol_type = other DNA
gctttatatcctctgggcct

SEQ ID NO: 30791 - DNA, 20 bp, synthetic construct
  misc_feature 1..20: note = chemically synthesized
  source 1..20: mol_type = other DNA
ctctgggcctgggtttcctg

SEQ ID NO: 30792 - DNA, 20 bp, synthetic construct
  misc_feature 1..20: note = chemically synthesized
  source 1..20: mol_type = other DNA
tttcctgaagtcaccacaca

SEQ ID NO: 30793 - DNA, 20 bp, synthetic construct
  misc_feature 1..20: note = chemically synthesized
  source 1..20: mol_type = other DNA
tcctgaagtcaccacacata

SEQ ID NO: 30794 - DNA, 20 bp, synthetic construct
  misc_feature 1..20: note = chemically synthesized
  source 1..20: mol_type = other DNA
cctgaagtcaccacacatag

SEQ ID NO: 30795 - DNA, 20 bp, synthetic construct
  misc_feature 1..20: note = chemically synthesized
  source 1..20: mol_type = other DNA
tgaagtcaccacacatagag

SEQ ID NO: 30796 - DNA, 20 bp, synthetic construct
  misc_feature 1..20: note = chemically synthesized
  source 1..20: mol_type = other DNA
aagtcaccacacatagagga

SEQ ID NO: 30797 - DNA, 20 bp, synthetic construct
  misc_feature 1..20: note = chemically synthesized
  source 1..20: mol_type = other DNA
gtcaccacacatagaggaga

SEQ ID NO: 30798 - DNA, 20 bp, synthetic construct
  misc_feature 1..20: note = chemically synthesized
  source 1..20: mol_type = other DNA
cacatagaggagagagaaaa

SEQ ID NO: 30799 - DNA, 20 bp, synthetic construct
  misc_feature 1..20: note = chemically synthesized
  source 1..20: mol_type = other DNA
agaggagagagaaaatggct

SEQ ID NO: 30800 - DNA, 20 bp, synthetic construct
  misc_feature 1..20: note = chemically synthesized
  source 1..20: mol_type = other DNA
gagagaaaatggctgagtta

SEQ ID NO: 30801 - DNA, 20 bp, synthetic construct
  misc_feature 1..20: note = chemically synthesized
  source 1..20: mol_type = other DNA
agagaaaatggctgagttaa

SEQ ID NO: 30802 - DNA, 20 bp, synthetic construct
  misc_feature 1..20: note = chemically synthesized
  source 1..20: mol_type = other DNA
aaaatggctgagttaaaggt

SEQ ID NO: 30803 - DNA, 20 bp, synthetic construct
  misc_feature 1..20: note = chemically synthesized
  source 1..20: mol_type = other DNA
aaggtaagaaaccatctgac

SEQ ID NO: 30804 - DNA, 20 bp, synthetic construct
  misc_feature 1..20: note = chemically synthesized
  source 1..20: mol_type = other DNA
accatctgacaagtttgcta

SEQ ID NO: 30805 - DNA, 20 bp, synthetic construct
  misc_feature 1..20: note = chemically synthesized
  source 1..20: mol_type = other DNA
caagtttgctatggcttctt

SEQ ID NO: 30806 - DNA, 20 bp, synthetic construct
  misc_feature 1..20: note = chemically synthesized
  source 1..20: mol_type = other DNA
gcttcttcagccaaaattta

SEQ ID NO: 30807 - DNA, 20 bp, synthetic construct
  misc_feature 1..20: note = chemically synthesized
  source 1..20: mol_type = other DNA
tcttcagccaaaatttatgg

SEQ ID NO: 30808 - DNA, 20 bp, synthetic construct
  misc_feature 1..20: note = chemically synthesized
  source 1..20: mol_type = other DNA
caaaatttatggaagtttct

SEQ ID NO: 30809 - DNA, 20 bp, synthetic construct
  misc_feature 1..20: note = chemically synthesized
  source 1..20: mol_type = other DNA
atggaagtttctgagaactt

SEQ ID NO: 30810 - DNA, 20 bp, synthetic construct
  misc_feature 1..20: note = chemically synthesized
  source 1..20: mol_type = other DNA
tggaagtttctgagaacttc

SEQ ID NO: 30811 - DNA, 20 bp, synthetic construct
  misc_feature 1..20: note = chemically synthesized
  source 1..20: mol_type = other DNA
ggaagtttctgagaacttca

SEQ ID NO: 30812 - DNA, 20 bp, synthetic construct
  misc_feature 1..20: note = chemically synthesized
  source 1..20: mol_type = other DNA
ttctgagaacttcagggtat

SEQ ID NO: 30813 - DNA, 20 bp, synthetic construct
  misc_feature 1..20: note = chemically synthesized
  source 1..20: mol_type = other DNA
ctgagaacttcagggtatca

SEQ ID NO: 30814 - DNA, 20 bp, synthetic construct
  misc_feature 1..20: note = chemically synthesized
  source 1..20: mol_type = other DNA
gaacttcagggtatcagagt

SEQ ID NO: 30815 - DNA, 20 bp, synthetic construct
  misc_feature 1..20: note = chemically synthesized
  source 1..20: mol_type = other DNA
tcagggtatcagagttggaa

SEQ ID NO: 30816 - DNA, 20 bp, synthetic construct
  misc_feature 1..20: note = chemically synthesized
  source 1..20: mol_type = other DNA
tatcagagttggaaaagact

SEQ ID NO: 30817 - DNA, 20 bp, synthetic construct
  misc_feature 1..20: note = chemically synthesized
  source 1..20: mol_type = other DNA
tcagagttggaaaagactta

SEQ ID NO: 30818 - DNA, 20 bp, synthetic construct
  misc_feature 1..20: note = chemically synthesized
  source 1..20: mol_type = other DNA
agagttggaaaagacttaga

SEQ ID NO: 30819 - DNA, 20 bp, synthetic construct
  misc_feature 1..20: note = chemically synthesized
  source 1..20: mol_type = other DNA
gagttggaaaagacttagag

SEQ ID NO: 30820 - DNA, 20 bp, synthetic construct
  misc_feature 1..20: note = chemically synthesized
  source 1..20: mol_type = other DNA
gaaaagacttagagaggccc

SEQ ID NO: 30821 - DNA, 20 bp, synthetic construct
  misc_feature 1..20: note = chemically synthesized
  source 1..20: mol_type = other DNA
ctggttcaaacccctgtgtt

SEQ ID NO: 30822 - DNA, 20 bp, synthetic construct
  misc_feature 1..20: note = chemically synthesized
  source 1..20: mol_type = other DNA
ggttcaaacccctgtgttca

SEQ ID NO: 30823 - DNA, 20 bp, synthetic construct
  misc_feature 1..20: note = chemically synthesized
  source 1..20: mol_type = other DNA
gttcaaacccctgtgttcag

SEQ ID NO: 30824 - DNA, 20 bp, synthetic construct
  misc_feature 1..20: note = chemically synthesized
  source 1..20: mol_type = other DNA
tgtgttcagaggcttccctg

SEQ ID NO: 30825 - DNA, 20 bp, synthetic construct
  misc_feature 1..20: note = chemically synthesized
  source 1..20: mol_type = other DNA
aggcttccctgtggtgtctg

SEQ ID NO: 30826 - DNA, 20 bp, synthetic construct
  misc_feature 1..20: note = chemically synthesized
  source 1..20: mol_type = other DNA
ggcttccctgtggtgtctgt

SEQ ID NO: 30827 - DNA, 20 bp, synthetic construct
  misc_feature 1..20: note = chemically synthesized
  source 1..20: mol_type = other DNA
ccctgtggtgtctgtgggca

SEQ ID NO: 30828 - DNA, 20 bp, synthetic construct
  misc_feature 1..20: note = chemically synthesized
  source 1..20: mol_type = other DNA
gtggtgtctgtgggcacagc

SEQ ID NO: 30829 - DNA, 20 bp, synthetic construct
  misc_feature 1..20: note = chemically synthesized
  source 1..20: mol_type = other DNA
ggtgtctgtgggcacagctg

SEQ ID NO: 30830 - DNA, 20 bp, synthetic construct
  misc_feature 1..20: note = chemically synthesized
  source 1..20: mol_type = other DNA
tgtgggcacagctggagctg

SEQ ID NO: 30831 - DNA, 20 bp, synthetic construct
  misc_feature 1..20: note = chemically synthesized
  source 1..20: mol_type = other DNA
cacagctggagctgaagaac

SEQ ID NO: 30832 - DNA, 20 bp, synthetic construct
  misc_feature 1..20: note = chemically synthesized
  source 1..20: mol_type = other DNA
acagctggagctgaagaaca

SEQ ID NO: 30833 - DNA, 20 bp, synthetic construct
  misc_feature 1..20: note = chemically synthesized
  source 1..20: mol_type = other DNA
cagctggagctgaagaacaa

SEQ ID NO: 30834 - DNA, 20 bp, synthetic construct
  misc_feature 1..20: note = chemically synthesized
  source 1..20: mol_type = other DNA
tggagctgaagaacaaggga

SEQ ID NO: 30835 - DNA, 20 bp, synthetic construct
  misc_feature 1..20: note = chemically synthesized
  source 1..20: mol_type = other DNA
ggagctgaagaacaagggaa

SEQ ID NO: 30836 - DNA, 20 bp, synthetic construct
  misc_feature 1..20: note = chemically synthesized
  source 1..20: mol_type = other DNA
agaacaagggaaaggtgata

SEQ ID NO: 30837 - DNA, 20 bp, synthetic construct
  misc_feature 1..20: note = chemically synthesized
  source 1..20: mol_type = other DNA
gaacaagggaaaggtgataa

SEQ ID NO: 30838 - DNA, 20 bp, synthetic construct
  misc_feature 1..20: note = chemically synthesized
  source 1..20: mol_type = other DNA
aagggaaaggtgataaagga

SEQ ID NO: 30839 - DNA, 20 bp, synthetic construct
  misc_feature 1..20: note = chemically synthesized
  source 1..20: mol_type = other DNA
ggtgataaaggaaagaaatg

SEQ ID NO: 30840 - DNA, 20 bp, synthetic construct
  misc_feature 1..20: note = chemically synthesized
  source 1..20: mol_type = other DNA
gaaagaaatgaagctcttat

SEQ ID NO: 30841 - DNA, 20 bp, synthetic construct
  misc_feature 1..20: note = chemically synthesized
  source 1..20: mol_type = other DNA
gttcatttcaattattgtct

SEQ ID NO: 30842 - DNA, 20 bp, synthetic construct
  misc_feature 1..20: note = chemically synthesized
  source 1..20: mol_type = other DNA
attattgtcttggaaatctg

SEQ ID NO: 30843 - DNA, 20 bp, synthetic construct
  misc_feature 1..20: note = chemically synthesized
  source 1..20: mol_type = other DNA
tggaaatctgtagacatcct

SEQ ID NO: 30844 - DNA, 20 bp, synthetic construct
  misc_feature 1..20: note = chemically synthesized
  source 1..20: mol_type = other DNA
gaaatctgtagacatcctaa

SEQ ID NO: 30845 - DNA, 20 bp, synthetic construct
  misc_feature 1..20: note = chemically synthesized
  source 1..20: mol_type = other DNA
ctaagagctcccctccacta

SEQ ID NO: 30846 - DNA, 20 bp, synthetic construct
  misc_feature 1..20: note = chemically synthesized
  source 1..20: mol_type = other DNA
ctgacaccttcccattgctg

SEQ ID NO: 30847 - DNA, 20 bp, synthetic construct
  misc_feature 1..20: note = chemically synthesized
  source 1..20: mol_type = other DNA
ttcccattgctgcagcctca

SEQ ID NO: 30848 - DNA, 20 bp, synthetic construct
  misc_feature 1..20: note = chemically synthesized
  source 1..20: mol_type = other DNA
gcagcctcatggaccacttc

SEQ ID NO: 30849 - DNA, 20 bp, synthetic construct
  misc_feature 1..20: note = chemically synthesized
  source 1..20: mol_type = other DNA
catggaccacttccggtgac

SEQ ID NO: 30850 - DNA, 20 bp, synthetic construct
  misc_feature 1..20: note = chemically synthesized
  source 1..20: mol_type = other DNA
gaccacttccggtgaccagt

SEQ ID NO: 30851 - DNA, 20 bp, synthetic construct
  misc_feature 1..20: note = chemically synthesized
  source 1..20: mol_type = other DNA
ttagatatgcttgatctatt

SEQ ID NO: 30852 - DNA, 20 bp, synthetic construct
  misc_feature 1..20: note = chemically synthesized
  source 1..20: mol_type = other DNA
cttgatctatttagttaatt

SEQ ID NO: 30853 - DNA, 20 bp, synthetic construct
  misc_feature 1..20: note = chemically synthesized
  source 1..20: mol_type = other DNA
ttgatctatttagttaatta

SEQ ID NO: 30854 - DNA, 20 bp, synthetic construct
  misc_feature 1..20: note = chemically synthesized
  source 1..20: mol_type = other DNA
agttaattaaggctctgaat

SEQ ID NO: 30855 - DNA, 20 bp, synthetic construct
  misc_feature 1..20: note = chemically synthesized
  source 1..20: mol_type = other DNA
taaggctctgaatcagccct

SEQ ID NO: 30856 - DNA, 20 bp, synthetic construct
  misc_feature 1..20: note = chemically synthesized
  source 1..20: mol_type = other DNA
gctctgaatcagcccttggc

SEQ ID NO: 30857 - DNA, 20 bp, synthetic construct
  misc_feature 1..20: note = chemically synthesized
  source 1..20: mol_type = other DNA
ctgaatcagcccttggccag

SEQ ID NO: 30858 - DNA, 20 bp, synthetic construct
  misc_feature 1..20: note = chemically synthesized
  source 1..20: mol_type = other DNA
aatcagcccttggccagaag

SEQ ID NO: 30859 - DNA, 20 bp, synthetic construct
  misc_feature 1..20: note = chemically synthesized
  source 1..20: mol_type = other DNA
gccagaagaagcacctcctc

SEQ ID NO: 30860 - DNA, 20 bp, synthetic construct
  misc_feature 1..20: note = chemically synthesized
  source 1..20: mol_type = other DNA
ccagaagaagcacctcctct

SEQ ID NO: 30861 - DNA, 20 bp, synthetic construct
  misc_feature 1..20: note = chemically synthesized
  source 1..20: mol_type = other DNA
aggaaatcattccttctttt

SEQ ID NO: 30862 - DNA, 20 bp, synthetic construct
  misc_feature 1..20: note = chemically synthesized
  source 1..20: mol_type = other DNA
tttagtaatacgcaattgaa

SEQ ID NO: 30863 - DNA, 20 bp, synthetic construct
  misc_feature 1..20: note = chemically synthesized
  source 1..20: mol_type = other DNA
acgcaattgaaaagtatgtg

SEQ ID NO: 30864 - DNA, 20 bp, synthetic construct
  misc_feature 1..20: note = chemically synthesized
  source 1..20: mol_type = other DNA
cgcaattgaaaagtatgtgt

SEQ ID NO: 30865 - DNA, 20 bp, synthetic construct
  misc_feature 1..20: note = chemically synthesized
  source 1..20: mol_type = other DNA
atgtgtgggttatgtgctgt

SEQ ID NO: 30866 - DNA, 20 bp, synthetic construct
  misc_feature 1..20: note = chemically synthesized
  source 1..20: mol_type = other DNA
tgtgtgggttatgtgctgtt

SEQ ID NO: 30867 - DNA, 20 bp, synthetic construct
  misc_feature 1..20: note = chemically synthesized
  source 1..20: mol_type = other DNA
gttatgtgctgttaggtgct

SEQ ID NO: 30868 - DNA, 20 bp, synthetic construct
  misc_feature 1..20: note = chemically synthesized
  source 1..20: mol_type = other DNA
ctgttaggtgctaagcattt

SEQ ID NO: 30869 - DNA, 20 bp, synthetic construct
  misc_feature 1..20: note = chemically synthesized
  source 1..20: mol_type = other DNA
cataatcctcaaaataaatc

SEQ ID NO: 30870 - DNA, 20 bp, synthetic construct
  misc_feature 1..20: note = chemically synthesized
  source 1..20: mol_type = other DNA
ataatcctcaaaataaatct

SEQ ID NO: 30871 - DNA, 20 bp, synthetic construct
  misc_feature 1..20: note = chemically synthesized
  source 1..20: mol_type = other DNA
taatcctcaaaataaatctg

SEQ ID NO: 30872 - DNA, 20 bp, synthetic construct
  misc_feature 1..20: note = chemically synthesized
  source 1..20: mol_type = other DNA
ctcaaaataaatctggggta

SEQ ID NO: 30873 - DNA, 20 bp, synthetic construct
  misc_feature 1..20: note = chemically synthesized
  source 1..20: mol_type = other DNA
caaaataaatctggggtata

SEQ ID NO: 30874 - DNA, 20 bp, synthetic construct
  misc_feature 1..20: note = chemically synthesized
  source 1..20: mol_type = other DNA
aaataaatctggggtataga

SEQ ID NO: 30875 - DNA, 20 bp, synthetic construct
  misc_feature 1..20: note = chemically synthesized
  source 1..20: mol_type = other DNA
ataaatctggggtatagaga

SEQ ID NO: 30876 - DNA, 20 bp, synthetic construct
  misc_feature 1..20: note = chemically synthesized
  source 1..20: mol_type = other DNA
taaatctggggtatagagag

SEQ ID NO: 30877 - DNA, 20 bp, synthetic construct
  misc_feature 1..20: note = chemically synthesized
  source 1..20: mol_type = other DNA
agagaggttcttgtttcaat

SEQ ID NO: 30878 - DNA, 20 bp, synthetic construct
  misc_feature 1..20: note = chemically synthesized
  source 1..20: mol_type = other DNA
ggttcttgtttcaattagaa

SEQ ID NO: 30879 - DNA, 20 bp, synthetic construct
  misc_feature 1..20: note = chemically synthesized
  source 1..20: mol_type = other DNA
tcaattagaaaagtaatgct

SEQ ID NO: 30880 - DNA, 20 bp, synthetic construct
  misc_feature 1..20: note = chemically synthesized
  source 1..20: mol_type = other DNA
aattagaaaagtaatgcttg

SEQ ID NO: 30881 - DNA, 20 bp, synthetic construct
  misc_feature 1..20: note = chemically synthesized
  source 1..20: mol_type = other DNA
ttagaaaagtaatgcttgga

SEQ ID NO: 30882 - DNA, 20 bp, synthetic construct
  misc_feature 1..20: note = chemically synthesized
  source 1..20: mol_type = other DNA
ggagagactatgatttgccc

SEQ ID NO: 30883 - DNA, 20 bp, synthetic construct
  misc_feature 1..20: note = chemically synthesized
  source 1..20: mol_type = other DNA
gagagactatgatttgccca

SEQ ID NO: 30884 - DNA, 20 bp, synthetic construct
  misc_feature 1..20: note = chemically synthesized
  source 1..20: mol_type = other DNA
ttgcccaaggtcactgccaa

SEQ ID NO: 30885 - DNA, 20 bp, synthetic construct
  misc_feature 1..20: note = chemically synthesized
  source 1..20: mol_type = other DNA
ctgccaatagatgacttgat

SEQ ID NO: 30886 - DNA, 20 bp, synthetic construct
  misc_feature 1..20: note = chemically synthesized
  source 1..20: mol_type = other DNA
ccaatagatgacttgattag

SEQ ID NO: 30887 - DNA, 20 bp, synthetic construct
  misc_feature 1..20: note = chemically synthesized
  source 1..20: mol_type = other DNA
atagatgacttgattagaag

SEQ ID NO: 30888 - DNA, 20 bp, synthetic construct
  misc_feature 1..20: note = chemically synthesized
  source 1..20: mol_type = other DNA
tagatgacttgattagaagc

SEQ ID NO: 30889 - DNA, 20 bp, synthetic construct
  misc_feature 1..20: note = chemically synthesized
  source 1..20: mol_type = other DNA
agatgacttgattagaagca

SEQ ID NO: 30890 - DNA, 20 bp, synthetic construct
  misc_feature 1..20: note = chemically synthesized
  source 1..20: mol_type = other DNA
gcagggtatgtttgaatgcg

SEQ ID NO: 30891 - DNA, 20 bp, synthetic construct
  misc_feature 1..20: note = chemically synthesized
  source 1..20: mol_type = other DNA
gtatgtttgaatgcgaagtc

SEQ ID NO: 30892 - DNA, 20 bp, synthetic construct
  misc_feature 1..20: note = chemically synthesized
  source 1..20: mol_type = other DNA
tatgtttgaatgcgaagtcc

SEQ ID NO: 30893 - DNA, 20 bp, synthetic construct
  misc_feature 1..20: note = chemically synthesized
  source 1..20: mol_type = other DNA
atgcgaagtccaggctcaaa

SEQ ID NO: 30894 - DNA, 20 bp, synthetic construct
  misc_feature 1..20: note = chemically synthesized
  source 1..20: mol_type = other DNA
tgcgaagtccaggctcaaaa

SEQ ID NO: 30895 - DNA, 20 bp, synthetic construct
  misc_feature 1..20: note = chemically synthesized
  source 1..20: mol_type = other DNA
gcgaagtccaggctcaaaaa

SEQ ID NO: 30896 - DNA, 20 bp, synthetic construct
  misc_feature 1..20: note = chemically synthesized
  source 1..20: mol_type = other DNA
cgaagtccaggctcaaaaag

SEQ ID NO: 30897 - DNA, 20 bp, synthetic construct
  misc_feature 1..20: note = chemically synthesized
  source 1..20: mol_type = other DNA
ccaggctcaaaaaggggcct

SEQ ID NO: 30898 - DNA, 20 bp, synthetic construct
  misc_feature 1..20: note = chemically synthesized
  source 1..20: mol_type = other DNA
ggctcaaaaaggggccttag

SEQ ID NO: 30899 - DNA, 20 bp, synthetic construct
  misc_feature 1..20: note = chemically synthesized
  source 1..20: mol_type = other DNA
ggggccttagtggctcctac

SEQ ID NO: 30900 - DNA, 20 bp, synthetic construct
  misc_feature 1..20: note = chemically synthesized
  source 1..20: mol_type = other DNA
cttagtggctcctactagac

SEQ ID NO: 30901 - DNA, 20 bp, synthetic construct
  misc_feature 1..20: note = chemically synthesized
  source 1..20: mol_type = other DNA
tcctactagactggtatctt

SEQ ID NO: 30902 - DNA, 20 bp, synthetic construct
  misc_feature 1..20: note = chemically synthesized
  source 1..20: mol_type = other DNA
cctactagactggtatctta

SEQ ID NO: 30903 - DNA, 20 bp, synthetic construct
  misc_feature 1..20: note = chemically synthesized
  source 1..20: mol_type = other DNA
ctagactggtatcttaaggc

SEQ ID NO: 30904 - DNA, 20 bp, synthetic construct
  misc_feature 1..20: note = chemically synthesized
  source 1..20: mol_type = other DNA
tagactggtatcttaaggca

SEQ ID NO: 30905 - DNA, 20 bp, synthetic construct
  misc_feature 1..20: note = chemically synthesized
  source 1..20: mol_type = other DNA
gtatcttaaggcaaggaaaa

SEQ ID NO: 30906 - DNA, 20 bp, synthetic construct
  misc_feature 1..20: note = chemically synthesized
  source 1..20: mol_type = other DNA
ctaatatctaaaaccatgcc

SEQ ID NO: 30907 - DNA, 20 bp, synthetic construct
  misc_feature 1..20: note = chemically synthesized
  source 1..20: mol_type = other DNA
ctaaaaccatgcctagtgcc

SEQ ID NO: 30908 - DNA, 20 bp, synthetic construct
  misc_feature 1..20: note = chemically synthesized
  source 1..20: mol_type = other DNA
taaaaccatgcctagtgccc

SEQ ID NO: 30909 - DNA, 20 bp, synthetic construct
  misc_feature 1..20: note = chemically synthesized
  source 1..20: mol_type = other DNA
accatgcctagtgcccaggc

SEQ ID NO: 30910 - DNA, 20 bp, synthetic construct
  misc_feature 1..20: note = chemically synthesized
  source 1..20: mol_type = other DNA
ccatgcctagtgcccaggcc

SEQ ID NO: 30911 - DNA, 20 bp, synthetic construct
  misc_feature 1..20: note = chemically synthesized
  source 1..20: mol_type = other DNA
cgcatgcatgtgtaactgaa

SEQ ID NO: 30912 - DNA, 20 bp, synthetic construct
  misc_feature 1..20: note = chemically synthesized
  source 1..20: mol_type = other DNA
tgtaactgaacagaactgcc

SEQ ID NO: 30913 - DNA, 20 bp, synthetic construct
  misc_feature 1..20: note = chemically synthesized
  source 1..20: mol_type = other DNA
aacagaactgcccagaacct

SEQ ID NO: 30914 - DNA, 20 bp, synthetic construct
  misc_feature 1..20: note = chemically synthesized
  source 1..20: mol_type = other DNA
aactgcccagaaccttggct

SEQ ID NO: 30915 - DNA, 20 bp, synthetic construct
  misc_feature 1..20: note = chemically synthesized
  source 1..20: mol_type = other DNA
actgcccagaaccttggctc

SEQ ID NO: 30916 - DNA, 20 bp, synthetic construct
  misc_feature 1..20: note = chemically synthesized
  source 1..20: mol_type = other DNA
ccagaaccttggctcaggcc

SEQ ID NO: 30917 - DNA, 20 bp, synthetic construct
  misc_feature 1..20: note = chemically synthesized
  source 1..20: mol_type = other DNA
gaaccttggctcaggccaag

SEQ ID NO: 30918 - DNA, 20 bp, synthetic construct
  misc_feature 1..20: note = chemically synthesized
  source 1..20: mol_type = other DNA
aaccttggctcaggccaagt

SEQ ID NO: 30919 - DNA, 20 bp, synthetic construct
  misc_feature 1..20: note = chemically synthesized
  source 1..20: mol_type = other DNA
ttggctcaggccaagtaggc

SEQ ID NO: 30920 - DNA, 20 bp, synthetic construct
  misc_feature 1..20: note = chemically synthesized
  source 1..20: mol_type = other DNA
taggccagaccaccccacaa

SEQ ID NO: 30921 - DNA, 20 bp, synthetic construct
  misc_feature 1..20: note = chemically synthesized
  source 1..20: mol_type = other DNA
acagacatcttccctgaatg

SEQ ID NO: 30922 - DNA, 20 bp, synthetic construct
  misc_feature 1..20: note = chemically synthesized
  source 1..20: mol_type = other DNA
cagacatcttccctgaatgc

SEQ ID NO: 30923 - DNA, 20 bp, synthetic construct
  misc_feature 1..20: note = chemically synthesized
  source 1..20: mol_type = other DNA
agacatcttccctgaatgca

SEQ ID NO: 30924 - DNA, 20 bp, synthetic construct
  misc_feature 1..20: note = chemically synthesized
  source 1..20: mol_type = other DNA
cttccctgaatgcagggttt

SEQ ID NO: 30925 - DNA, 20 bp, synthetic construct
  misc_feature 1..20: note = chemically synthesized
  source 1..20: mol_type = other DNA
ccctgaatgcagggtttgag

SEQ ID NO: 30926 - DNA, 20 bp, synthetic construct
  misc_feature 1..20: note = chemically synthesized
  source 1..20: mol_type = other DNA
aatgccctctaactgatgct

SEQ ID NO: 30927 - DNA, 20 bp, synthetic construct
  misc_feature 1..20: note = chemically synthesized
  source 1..20: mol_type = other DNA
tctaactgatgctgagtttg

SEQ ID NO: 30928 - DNA, 20 bp, synthetic construct
  misc_feature 1..20: note = chemically synthesized
  source 1..20: mol_type = other DNA
gctgagtttgaagaatccat

SEQ ID NO: 30929 - DNA, 20 bp, synthetic construct
  misc_feature 1..20: note = chemically synthesized
  source 1..20: mol_type = other DNA
gtttgaagaatccatcagtt

SEQ ID NO: 30930 - DNA, 20 bp, synthetic construct
  misc_feature 1..20: note = chemically synthesized
  source 1..20: mol_type = other DNA
tttgaagaatccatcagtta

SEQ ID NO: 30931 - DNA, 20 bp, synthetic construct
  misc_feature 1..20: note = chemically synthesized
  source 1..20: mol_type = other DNA
ttgaagaatccatcagttaa

SEQ ID NO: 30932 - DNA, 20 bp, synthetic construct
  misc_feature 1..20: note = chemically synthesized
  source 1..20: mol_type = other DNA
tgaagaatccatcagttaag

SEQ ID NO: 30933 - DNA, 20 bp, synthetic construct
  misc_feature 1..20: note = chemically synthesized
  source 1..20: mol_type = other DNA
aagaatccatcagttaaggg

SEQ ID NO: 30934 - DNA, 20 bp, synthetic construct
  misc_feature 1..20: note = chemically synthesized
  source 1..20: mol_type = other DNA
agaatccatcagttaagggg

SEQ ID NO: 30935 - DNA, 20 bp, synthetic construct
  misc_feature 1..20: note = chemically synthesized
  source 1..20: mol_type = other DNA
agttaaggggaggtgtttct

SEQ ID NO: 30936 - DNA, 20 bp, synthetic construct
  misc_feature 1..20: note = chemically synthesized
  source 1..20: mol_type = other DNA
gggaggtgtttctgagtttg

SEQ ID NO: 30937 - DNA, 20 bp, synthetic construct
  misc_feature 1..20: note = chemically synthesized
  source 1..20: mol_type = other DNA
gaatcaaacaccttcctaat

SEQ ID NO: 30938 - DNA, 20 bp, synthetic construct
  misc_feature 1..20: note = chemically synthesized
  source 1..20: mol_type = other DNA
tcaaacaccttcctaattgg

SEQ ID NO: 30939 - DNA, 20 bp, synthetic construct
  misc_feature 1..20: note = chemically synthesized
  source 1..20: mol_type = other DNA
caaacaccttcctaattggt

SEQ ID NO: 30940 - DNA, 20 bp, synthetic construct
  misc_feature 1..20: note = chemically synthesized
  source 1..20: mol_type = other DNA
atcctgaaaacactccacac

SEQ ID NO: 30941 - DNA, 20 bp, synthetic construct
  misc_feature 1..20: note = chemically synthesized
  source 1..20: mol_type = other DNA
cctgaaaacactccacaccg

SEQ ID NO: 30942 - DNA, 20 bp, synthetic construct
  misc_feature 1..20: note = chemically synthesized
  source 1..20: mol_type = other DNA
aacactccacaccggagtaa

SEQ ID NO: 30943 - DNA, 20 bp, synthetic construct
  misc_feature 1..20: note = chemically synthesized
  source 1..20: mol_type = other DNA
cacaccggagtaaaagactt

SEQ ID NO: 30944 - DNA, 20 bp, synthetic construct
  misc_feature 1..20: note = chemically synthesized
  source 1..20: mol_type = other DNA
ttatctttatgcctgactaa

SEQ ID NO: 30945 - DNA, 20 bp, synthetic construct
  misc_feature 1..20: note = chemically synthesized
  source 1..20: mol_type = other DNA
ttaactctcattctttcatt

SEQ ID NO: 30946 - DNA, 20 bp, synthetic construct
  misc_feature 1..20: note = chemically synthesized
  source 1..20: mol_type = other DNA
attcagcaaatattttgtgc

SEQ ID NO: 30947 - DNA, 20 bp, synthetic construct
  misc_feature 1..20: note = chemically synthesized
  source 1..20: mol_type = other DNA
tgtgctagtgcatgacactg

SEQ ID NO: 30948 - DNA, 20 bp, synthetic construct
  misc_feature 1..20: note = chemically synthesized
  source 1..20: mol_type = other DNA
gacactgcagattaatatcg

SEQ ID NO: 30949 - DNA, 20 bp, synthetic construct
  misc_feature 1..20: note = chemically synthesized
  source 1..20: mol_type = other DNA
attaatatcgtagatgaact

SEQ ID NO: 30950 - DNA, 20 bp, synthetic construct
  misc_feature 1..20: note = chemically synthesized
  source 1..20: mol_type = other DNA
tatcgtagatgaactgagtc

SEQ ID NO: 30951 - DNA, 20 bp, synthetic construct
  misc_feature 1..20: note = chemically synthesized
  source 1..20: mol_type = other DNA
atcgtagatgaactgagtct

SEQ ID NO: 30952 - DNA, 20 bp, synthetic construct
  misc_feature 1..20: note = chemically synthesized
  source 1..20: mol_type = other DNA
tagatgaactgagtctgggc

SEQ ID NO: 30953 - DNA, 20 bp, synthetic construct
  misc_feature 1..20: note = chemically synthesized
  source 1..20: mol_type = other DNA
agatgaactgagtctgggct

SEQ ID NO: 30954 - DNA, 20 bp, synthetic construct
  misc_feature 1..20: note = chemically synthesized
  source 1..20: mol_type = other DNA
tgaactgagtctgggctagg

SEQ ID NO: 30955 - DNA, 20 bp, synthetic construct
  misc_feature 1..20: note = chemically synthesized
  source 1..20: mol_type = other DNA
aactgagtctgggctaggta

SEQ ID NO: 30956 - DNA, 20 bp, synthetic construct
  misc_feature 1..20: note = chemically synthesized
  source 1..20: mol_type = other DNA
agtcaaaaaaaaatttccta

SEQ ID NO: 30957 - DNA, 20 bp, synthetic construct
  misc_feature 1..20: note = chemically synthesized
  source 1..20: mol_type = other DNA
gtcaaaaaaaaatttcctaa

SEQ ID NO: 30958 - DNA, 20 bp, synthetic construct
  misc_feature 1..20: note = chemically synthesized
  source 1..20: mol_type = other DNA
caaaaaaaaatttcctaaag

SEQ ID NO: 30959 - DNA, 20 bp, synthetic construct
  misc_feature 1..20: note = chemically synthesized
  source 1..20: mol_type = other DNA
aaggagcctgtacctaaact

SEQ ID NO: 30960 - DNA, 20 bp, synthetic construct
  misc_feature 1..20: note = chemically synthesized
  source 1..20: mol_type = other DNA
ctgtacctaaactgagtctt

SEQ ID NO: 30961 - DNA, 20 bp, synthetic construct
  misc_feature 1..20: note = chemically synthesized
  source 1..20: mol_type = other DNA
gtacctaaactgagtcttca

SEQ ID NO: 30962 - DNA, 20 bp, synthetic construct
  misc_feature 1..20: note = chemically synthesized
  source 1..20: mol_type = other DNA
acctaaactgagtcttcaga

SEQ ID NO: 30963 - DNA, 20 bp, synthetic construct
  misc_feature 1..20: note = chemically synthesized
  source 1..20: mol_type = other DNA
taaactgagtcttcagagag

SEQ ID NO: 30964 - DNA, 20 bp, synthetic construct
  misc_feature 1..20: note = chemically synthesized
  source 1..20: mol_type = other DNA
ctgagtcttcagagagaagt

SEQ ID NO: 30965 - DNA, 20 bp, synthetic construct
  misc_feature 1..20: note = chemically synthesized
  source 1..20: mol_type = other DNA
cttcagagagaagttggaac

SEQ ID NO: 30966 - DNA, 20 bp, synthetic construct
  misc_feature 1..20: note = chemically synthesized
  source 1..20: mol_type = other DNA
gagagaagttggaactggca

SEQ ID NO: 30967 - DNA, 20 bp, synthetic construct
  misc_feature 1..20: note = chemically synthesized
  source 1..20: mol_type = other DNA
gaagttggaactggcaaagt

SEQ ID NO: 30968 - DNA, 20 bp, synthetic construct
  misc_feature 1..20: note = chemically synthesized
  source 1..20: mol_type = other DNA
aagttggaactggcaaagtg

SEQ ID NO: 30969 - DNA, 20 bp, synthetic construct
  misc_feature 1..20: note = chemically synthesized
  source 1..20: mol_type = other DNA
ttggaactggcaaagtgagg

SEQ ID NO: 30970 - DNA, 20 bp, synthetic construct
  misc_feature 1..20: note = chemically synthesized
  source 1..20: mol_type = other DNA
tggaactggcaaagtgagga

SEQ ID NO: 30971 - DNA, 20 bp, synthetic construct
  misc_feature 1..20: note = chemically synthesized
  source 1..20: mol_type = other DNA
actggcaaagtgaggaagga

SEQ ID NO: 30972 - DNA, 20 bp, synthetic construct
  misc_feature 1..20: note = chemically synthesized
  source 1..20: mol_type = other DNA
ctggcaaagtgaggaaggac

SEQ ID NO: 30973 - DNA, 20 bp, synthetic construct
  misc_feature 1..20: note = chemically synthesized
  source 1..20: mol_type = other DNA
tggcaaagtgaggaaggacg

SEQ ID NO: 30974 - DNA, 20 bp, synthetic construct
  misc_feature 1..20: note = chemically synthesized
  source 1..20: mol_type = other DNA
aagtgaggaaggacggggtc

SEQ ID NO: 30975 - DNA, 20 bp, synthetic construct
  misc_feature 1..20: note = chemically synthesized
  source 1..20: mol_type = other DNA
gtgaggaaggacggggtctg

SEQ ID NO: 30976 - DNA, 20 bp, synthetic construct
  misc_feature 1..20: note = chemically synthesized
  source 1..20: mol_type = other DNA
tgaggaaggacggggtctgg

SEQ ID NO: 30977 - DNA, 20 bp, synthetic construct
  misc_feature 1..20: note = chemically synthesized
  source 1..20: mol_type = other DNA
gaggaaggacggggtctgga

SEQ ID NO: 30978 - DNA, 20 bp, synthetic construct
  misc_feature 1..20: note = chemically synthesized
  source 1..20: mol_type = other DNA
gaaggacggggtctggaggg

SEQ ID NO: 30979 - DNA, 20 bp, synthetic construct
  misc_feature 1..20: note = chemically synthesized
  source 1..20: mol_type = other DNA
aggacggggtctggagggaa

SEQ ID NO: 30980 - DNA, 20 bp, synthetic construct
  misc_feature 1..20: note = chemically synthesized
  source 1..20: mol_type = other DNA
cggggtctggagggaagagt

SEQ ID NO: 30981 - DNA, 20 bp, synthetic construct
  misc_feature 1..20: note = chemically synthesized
  source 1..20: mol_type = other DNA
tggagggaagagtgagtgca

SEQ ID NO: 30982 - DNA, 20 bp, synthetic construct
  misc_feature 1..20: note = chemically synthesized
  source 1..20: mol_type = other DNA
ggagggaagagtgagtgcaa

SEQ ID NO: 30983 - DNA, 20 bp, synthetic construct
  misc_feature 1..20: note = chemically synthesized
  source 1..20: mol_type = other DNA
gaagagtgagtgcaaaggca

SEQ ID NO: 30984 - DNA, 20 bp, synthetic construct
  misc_feature 1..20: note = chemically synthesized
  source 1..20: mol_type = other DNA
gtgcaaaggcacagcacata

SEQ ID NO: 30985 - DNA, 20 bp, synthetic construct
  misc_feature 1..20: note = chemically synthesized
  source 1..20: mol_type = other DNA
tacagaatgcctgcatgctc

SEQ ID NO: 30986 - DNA, 20 bp, synthetic construct
  misc_feature 1..20: note = chemically synthesized
  source 1..20: mol_type = other DNA
tctagaatccaaaactgtgt

SEQ ID NO: 30987 - DNA, 20 bp, synthetic construct
  misc_feature 1..20: note = chemically synthesized
  source 1..20: mol_type = other DNA
aaactgtgtcagccaaattt

SEQ ID NO: 30988 - DNA, 20 bp, synthetic construct
  misc_feature 1..20: note = chemically synthesized
  source 1..20: mol_type = other DNA
gtcagccaaatttgagttga

SEQ ID NO: 30989 - DNA, 20 bp, synthetic construct
  misc_feature 1..20: note = chemically synthesized
  source 1..20: mol_type = other DNA
cagccaaatttgagttgatg

SEQ ID NO: 30990 - DNA, 20 bp, synthetic construct
  misc_feature 1..20: note = chemically synthesized
  source 1..20: mol_type = other DNA
agccaaatttgagttgatgg

SEQ ID NO: 30991 - DNA, 20 bp, synthetic construct
  misc_feature 1..20: note = chemically synthesized
  source 1..20: mol_type = other DNA
gccaaatttgagttgatgga

SEQ ID NO: 30992 - DNA, 20 bp, synthetic construct
  misc_feature 1..20: note = chemically synthesized
  source 1..20: mol_type = other DNA
aatttgagttgatggaggga

SEQ ID NO: 30993 - DNA, 20 bp, synthetic construct
  misc_feature 1..20: note = chemically synthesized
  source 1..20: mol_type = other DNA
gatggagggacagccaaact

SEQ ID NO: 30994 - DNA, 20 bp, synthetic construct
  misc_feature 1..20: note = chemically synthesized
  source 1..20: mol_type = other DNA
gacagccaaactgagatacc

SEQ ID NO: 30995 - DNA, 20 bp, synthetic construct
  misc_feature 1..20: note = chemically synthesized
  source 1..20: mol_type = other DNA
acagccaaactgagataccc

SEQ ID NO: 30996 - DNA, 20 bp, synthetic construct
  misc_feature 1..20: note = chemically synthesized
  source 1..20: mol_type = other DNA
gccaaactgagatacccagg

SEQ ID NO: 30997 - DNA, 20 bp, synthetic construct
  misc_feature 1..20: note = chemically synthesized
  source 1..20: mol_type = other DNA
aaactgagatacccaggcgg

SEQ ID NO: 30998 - DNA, 20 bp, synthetic construct
  misc_feature 1..20: note = chemically synthesized
  source 1..20: mol_type = other DNA
tgagatacccaggcggtggt

SEQ ID NO: 30999 - DNA, 20 bp, synthetic construct
  misc_feature 1..20: note = chemically synthesized
  source 1..20: mol_type = other DNA
ccaggcggtggttggattta

SEQ ID NO: 31000 - DNA, 20 bp, synthetic construct
  misc_feature 1..20: note = chemically synthesized
  source 1..20: mol_type = other DNA
ggtggttggatttatggatc

SEQ ID NO: 31001 - DNA, 20 bp, synthetic construct
  misc_feature 1..20: note = chemically synthesized
  source 1..20: mol_type = other DNA
ggatttatggatctggattt

SEQ ID NO: 31002 - DNA, 20 bp, synthetic construct
  misc_feature 1..20: note = chemically synthesized
  source 1..20: mol_type = other DNA
gatttatggatctggatttc

SEQ ID NO: 31003 - DNA, 20 bp, synthetic construct
  misc_feature 1..20: note = chemically synthesized
  source 1..20: mol_type = other DNA
atttatggatctggatttca

SEQ ID NO: 31004 - DNA, 20 bp, synthetic construct
  misc_feature 1..20: note = chemically synthesized
  source 1..20: mol_type = other DNA
tttatggatctggatttcag

SEQ ID NO: 31005 - DNA, 20 bp, synthetic construct
  misc_feature 1..20: note = chemically synthesized
  source 1..20: mol_type = other DNA
tatggatctggatttcaggg

SEQ ID NO: 31006 - DNA, 20 bp, synthetic construct
  misc_feature 1..20: note = chemically synthesized
  source 1..20: mol_type = other DNA
ggatctggatttcaggggag

SEQ ID NO: 31007 - DNA, 20 bp, synthetic construct
  misc_feature 1..20: note = chemically synthesized
  source 1..20: mol_type = other DNA
gatctggatttcaggggagt

SEQ ID NO: 31008 - DNA, 20 bp, synthetic construct
  misc_feature 1..20: note = chemically synthesized
  source 1..20: mol_type = other DNA
ctggatttcaggggagtggg

SEQ ID NO: 31009 - DNA, 20 bp, synthetic construct
  misc_feature 1..20: note = chemically synthesized
  source 1..20: mol_type = other DNA
tggatttcaggggagtgggc

SEQ ID NO: 31010 - DNA, 20 bp, synthetic construct
  misc_feature 1..20: note = chemically synthesized
  source 1..20: mol_type = other DNA
ggatttcaggggagtgggca

SEQ ID NO: 31011 - DNA, 20 bp, synthetic construct
  misc_feature 1..20: note = chemically synthesized
  source 1..20: mol_type = other DNA
ttcaggggagtgggcagggc

SEQ ID NO: 31012 - DNA, 20 bp, synthetic construct
  misc_feature 1..20: note = chemically synthesized
  source 1..20: mol_type = other DNA
tcaggggagtgggcagggct

SEQ ID NO: 31013 - DNA, 20 bp, synthetic construct
  misc_feature 1..20: note = chemically synthesized
  source 1..20: mol_type = other DNA
caggggagtgggcagggcta

SEQ ID NO: 31014 - DNA, 20 bp, synthetic construct
  misc_feature 1..20: note = chemically synthesized
  source 1..20: mol_type = other DNA
aggggagtgggcagggctag

SEQ ID NO: 31015 - DNA, 20 bp, synthetic construct
  misc_feature 1..20: note = chemically synthesized
  source 1..20: mol_type = other DNA
agtgggcagggctaggggaa

SEQ ID NO: 31016 - DNA, 20 bp, synthetic construct
  misc_feature 1..20: note = chemically synthesized
  source 1..20: mol_type = other DNA
agggctaggggaatagaact

SEQ ID NO: 31017 - DNA, 20 bp, synthetic construct
  misc_feature 1..20: note = chemically synthesized
  source 1..20: mol_type = other DNA
gggctaggggaatagaactg

SEQ ID NO: 31018 - DNA, 20 bp, synthetic construct
  misc_feature 1..20: note = chemically synthesized
  source 1..20: mol_type = other DNA
ggctaggggaatagaactga

SEQ ID NO: 31019 - DNA, 20 bp, synthetic construct
  misc_feature 1..20: note = chemically synthesized
  source 1..20: mol_type = other DNA
agaactgagggtcatgatgt

SEQ ID NO: 31020 - DNA, 20 bp, synthetic construct
  misc_feature 1..20: note = chemically synthesized
  source 1..20: mol_type = other DNA
actgagggtcatgatgtcag

SEQ ID NO: 31021 - DNA, 20 bp, synthetic construct
  misc_feature 1..20: note = chemically synthesized
  source 1..20: mol_type = other DNA
gagggtcatgatgtcagtgg

SEQ ID NO: 31022 - DNA, 20 bp, synthetic construct
  misc_feature 1..20: note = chemically synthesized
  source 1..20: mol_type = other DNA
agggtcatgatgtcagtggt

SEQ ID NO: 31023 - DNA, 20 bp, synthetic construct
  misc_feature 1..20: note = chemically synthesized
  source 1..20: mol_type = other DNA
ggtcatgatgtcagtggtag

SEQ ID NO: 31024 - DNA, 20 bp, synthetic construct
  misc_feature 1..20: note = chemically synthesized
  source 1..20: mol_type = other DNA
gatgtcagtggtaggagttg

SEQ ID NO: 31025 - DNA, 20 bp, synthetic construct
  misc_feature 1..20: note = chemically synthesized
  source 1..20: mol_type = other DNA
agtggtaggagttgaagtct

SEQ ID NO: 31026 - DNA, 20 bp, synthetic construct
  misc_feature 1..20: note = chemically synthesized
  source 1..20: mol_type = other DNA
ggtaggagttgaagtcttgg

SEQ ID NO: 31027 - DNA, 20 bp, synthetic construct
  misc_feature 1..20: note = chemically synthesized
  source 1..20: mol_type = other DNA
ggagttgaagtcttggaaga

SEQ ID NO: 31028 - DNA, 20 bp, synthetic construct
  misc_feature 1..20: note = chemically synthesized
  source 1..20: mol_type = other DNA
agttgaagtcttggaagaaa

SEQ ID NO: 31029 - DNA, 20 bp, synthetic construct
  misc_feature 1..20: note = chemically synthesized
  source 1..20: mol_type = other DNA
tgaagtcttggaagaaagag

SEQ ID NO: 31030 - DNA, 20 bp, synthetic construct
  misc_feature 1..20: note = chemically synthesized
  source 1..20: mol_type = other DNA
gtcttggaagaaagagtaga

SEQ ID NO: 31031 - DNA, 20 bp, synthetic construct
  misc_feature 1..20: note = chemically synthesized
  source 1..20: mol_type = other DNA
ttttctgatgaacattctat

SEQ ID NO: 31032 - DNA, 20 bp, synthetic construct
  misc_feature 1..20: note = chemically synthesized
  source 1..20: mol_type = other DNA
tttctgatgaacattctatg

SEQ ID NO: 31033 - DNA, 20 bp, synthetic construct
  misc_feature 1..20: note = chemically synthesized
  source 1..20: mol_type = other DNA
ctgatgaacattctatgagg

SEQ ID NO: 31034 - DNA, 20 bp, synthetic construct
  misc_feature 1..20: note = chemically synthesized
  source 1..20: mol_type = other DNA
gaacattctatgaggaagtt

SEQ ID NO: 31035 - DNA, 20 bp, synthetic construct
  misc_feature 1..20: note = chemically synthesized
  source 1..20: mol_type = other DNA
cattctatgaggaagttcag

SEQ ID NO: 31036 - DNA, 20 bp, synthetic construct
  misc_feature 1..20: note = chemically synthesized
  source 1..20: mol_type = other DNA
ttctatgaggaagttcagca

SEQ ID NO: 31037 - DNA, 20 bp, synthetic construct
  misc_feature 1..20: note = chemically synthesized
  source 1..20: mol_type = other DNA
tctatgaggaagttcagcag

SEQ ID NO: 31038 - DNA, 20 bp, synthetic construct
  misc_feature 1..20: note = chemically synthesized
  source 1..20: mol_type = other DNA
tgaggaagttcagcagaggt

SEQ ID NO: 31039 - DNA, 20 bp, synthetic construct
  misc_feature 1..20: note = chemically synthesized
  source 1..20: mol_type = other DNA
cctatcctgctgtcatgttt

SEQ ID NO: 31040 - DNA, 20 bp, synthetic construct
  misc_feature 1..20: note = chemically synthesized
  source 1..20: mol_type = other DNA
tttaagcaacttattatgca

SEQ ID NO: 31041 - DNA, 20 bp, synthetic construct
  misc_feature 1..20: note = chemically synthesized
  source 1..20: mol_type = other DNA
caacttattatgcacagcac

SEQ ID NO: 31042 - DNA, 20 bp, synthetic construct
  misc_feature 1..20: note = chemically synthesized
  source 1..20: mol_type = other DNA
aacttattatgcacagcacc

SEQ ID NO: 31043 - DNA, 20 bp, synthetic construct
  misc_feature 1..20: note = chemically synthesized
  source 1..20: mol_type = other DNA
catcaatgtaaattgcatgc

SEQ ID NO: 31044 - DNA, 20 bp, synthetic construct
  misc_feature 1..20: note = chemically synthesized
  source 1..20: mol_type = other DNA
tgcatgccagtctttgctct

SEQ ID NO: 31045 - DNA, 20 bp, synthetic construct
  misc_feature 1..20: note = chemically synthesized
  source 1..20: mol_type = other DNA
agtctttgctctcagtttca

SEQ ID NO: 31046 - DNA, 20 bp, synthetic construct
  misc_feature 1..20: note = chemically synthesized
  source 1..20: mol_type = other DNA
gtctttgctctcagtttcaa

SEQ ID NO: 31047 - DNA, 20 bp, synthetic construct
  misc_feature 1..20: note = chemically synthesized
  source 1..20: mol_type = other DNA
cctgctgtctaatctttaca

SEQ ID NO: 31048 - DNA, 20 bp, synthetic construct
  misc_feature 1..20: note = chemically synthesized
  source 1..20: mol_type = other DNA
ctgtctaatctttacaaaga

SEQ ID NO: 31049 - DNA, 20 bp, synthetic construct
  misc_feature 1..20: note = chemically synthesized
  source 1..20: mol_type = other DNA
tgtctaatctttacaaagaa

SEQ ID NO: 31050 - DNA, 20 bp, synthetic construct
  misc_feature 1..20: note = chemically synthesized
  source 1..20: mol_type = other DNA
ttacaaagaaaggttaactc

SEQ ID NO: 31051 - DNA, 20 bp, synthetic construct
  misc_feature 1..20: note = chemically synthesized
  source 1..20: mol_type = other DNA
acaaagaaaggttaactcca

SEQ ID NO: 31052 - DNA, 20 bp, synthetic construct
  misc_feature 1..20: note = chemically synthesized
  source 1..20: mol_type = other DNA
caaagaaaggttaactccag

SEQ ID NO: 31053 - DNA, 20 bp, synthetic construct
  misc_feature 1..20: note = chemically synthesized
  source 1..20: mol_type = other DNA
gaaaggttaactccagaggt

SEQ ID NO: 31054 - DNA, 20 bp, synthetic construct
  misc_feature 1..20: note = chemically synthesized
  source 1..20: mol_type = other DNA
aaaggttaactccagaggtc

SEQ ID NO: 31055 - DNA, 20 bp, synthetic construct
  misc_feature 1..20: note = chemically synthesized
  source 1..20: mol_type = other DNA
agaggtcaggaatctgaaca

SEQ ID NO: 31056 - DNA, 20 bp, synthetic construct
  misc_feature 1..20: note = chemically synthesized
  source 1..20: mol_type = other DNA
ggaatctgaacacagaaaac

SEQ ID NO: 31057 - DNA, 20 bp, synthetic construct
  misc_feature 1..20: note = chemically synthesized
  source 1..20: mol_type = other DNA
ttaatgaatatgtcaacaca

SEQ ID NO: 31058 - DNA, 20 bp, synthetic construct
  misc_feature 1..20: note = chemically synthesized
  source 1..20: mol_type = other DNA
atgaaatcacatttacacaa

SEQ ID NO: 31059 - DNA, 20 bp, synthetic construct
  misc_feature 1..20: note = chemically synthesized
  source 1..20: mol_type = other DNA
catttacacaaaagtacaac

SEQ ID NO: 31060 - DNA, 20 bp, synthetic construct
  misc_feature 1..20: note = chemically synthesized
  source 1..20: mol_type = other DNA
atttacacaaaagtacaact

SEQ ID NO: 31061 - DNA, 20 bp, synthetic construct
  misc_feature 1..20: note = chemically synthesized
  source 1..20: mol_type = other DNA
tttacacaaaagtacaactg

SEQ ID NO: 31062 - DNA, 20 bp, synthetic construct
  misc_feature 1..20: note = chemically synthesized
  source 1..20: mol_type = other DNA
cacaaaagtacaactggggt

SEQ ID NO: 31063 - DNA, 20 bp, synthetic construct
  misc_feature 1..20: note = chemically synthesized
  source 1..20: mol_type = other DNA
actggggtaagaaaattcaa

SEQ ID NO: 31064 - DNA, 20 bp, synthetic construct
  misc_feature 1..20: note = chemically synthesized
  source 1..20: mol_type = other DNA
gtaagaaaattcaaaagata

SEQ ID NO: 31065 - DNA, 20 bp, synthetic construct
  misc_feature 1..20: note = chemically synthesized
  source 1..20: mol_type = other DNA
atgaaataccctatgtattt

SEQ ID NO: 31066 - DNA, 20 bp, synthetic construct
  misc_feature 1..20: note = chemically synthesized
  source 1..20: mol_type = other DNA
aataccctatgtatttgagt

SEQ ID NO: 31067 - DNA, 20 bp, synthetic construct
  misc_feature 1..20: note = chemically synthesized
  source 1..20: mol_type = other DNA
atgtatttgagtaagttgct

SEQ ID NO: 31068 - DNA, 20 bp, synthetic construct
  misc_feature 1..20: note = chemically synthesized
  source 1..20: mol_type = other DNA
tgcttagcttctcccaacct

SEQ ID NO: 31069 - DNA, 20 bp, synthetic construct
  misc_feature 1..20: note = chemically synthesized
  source 1..20: mol_type = other DNA
gtttcctcatttctaaaacg

SEQ ID NO: 31070 - DNA, 20 bp, synthetic construct
  misc_feature 1..20: note = chemically synthesized
  source 1..20: mol_type = other DNA
cgaagaacttgcttaatatt

SEQ ID NO: 31071 - DNA, 20 bp, synthetic construct
  misc_feature 1..20: note = chemically synthesized
  source 1..20: mol_type = other DNA
gaagaacttgcttaatattc

SEQ ID NO: 31072 - DNA, 20 bp, synthetic construct
  misc_feature 1..20: note = chemically synthesized
  source 1..20: mol_type = other DNA
cttgcttaatattcaggctc

SEQ ID NO: 31073 - DNA, 20 bp, synthetic construct
  misc_feature 1..20: note = chemically synthesized
  source 1..20: mol_type = other DNA
ttgcttaatattcaggctct

SEQ ID NO: 31074 - DNA, 20 bp, synthetic construct
  misc_feature 1..20: note = chemically synthesized
  source 1..20: mol_type = other DNA
ccaccaaatccttgattcac

SEQ ID NO: 31075 - DNA, 20 bp, synthetic construct
  misc_feature 1..20: note = chemically synthesized
  source 1..20: mol_type = other DNA
aatccttgattcactggctc

SEQ ID NO: 31076 - DNA, 20 bp, synthetic construct
  misc_feature 1..20: note = chemically synthesized
  source 1..20: mol_type = other DNA
atccttgattcactggctct

SEQ ID NO: 31077 - DNA, 20 bp, synthetic construct
  misc_feature 1..20: note = chemically synthesized
  source 1..20: mol_type = other DNA
gctctgggtctgtatgtaac

SEQ ID NO: 31078 - DNA, 20 bp, synthetic construct
  misc_feature 1..20: note = chemically synthesized
  source 1..20: mol_type = other DNA
gtctgtatgtaacaagcttc

SEQ ID NO: 31079 - DNA, 20 bp, synthetic construct
  misc_feature 1..20: note = chemically synthesized
  source 1..20: mol_type = other DNA
ctgtatgtaacaagcttctg

SEQ ID NO: 31080 - DNA, 20 bp, synthetic construct
  misc_feature 1..20: note = chemically synthesized
  source 1..20: mol_type = other DNA
tctggagtgattctaatgat

SEQ ID NO: 31081 - DNA, 20 bp, synthetic construct
  misc_feature 1..20: note = chemically synthesized
  source 1..20: mol_type = other DNA
gagtgattctaatgattagc

SEQ ID NO: 31082 - DNA, 20 bp, synthetic construct
  misc_feature 1..20: note = chemically synthesized
  source 1..20: mol_type = other DNA
gtgattctaatgattagcca

SEQ ID NO: 31083 - DNA, 20 bp, synthetic construct
  misc_feature 1..20: note = chemically synthesized
  source 1..20: mol_type = other DNA
ttctaatgattagccagaga

SEQ ID NO: 31084 - DNA, 20 bp, synthetic construct
  misc_feature 1..20: note = chemically synthesized
  source 1..20: mol_type = other DNA
tctaatgattagccagagac

SEQ ID NO: 31085 - DNA, 20 bp, synthetic construct
  misc_feature 1..20: note = chemically synthesized
  source 1..20: mol_type = other DNA
aaaaattaccacaaatttat

SEQ ID NO: 31086 - DNA, 20 bp, synthetic construct
  misc_feature 1..20: note = chemically synthesized
  source 1..20: mol_type = other DNA
aacacaaatgtattatcttg

SEQ ID NO: 31087 - DNA, 20 bp, synthetic construct
  misc_feature 1..20: note = chemically synthesized
  source 1..20: mol_type = other DNA
aatgtattatcttgaagttg

SEQ ID NO: 31088 - DNA, 20 bp, synthetic construct
  misc_feature 1..20: note = chemically synthesized
  source 1..20: mol_type = other DNA
tgtattatcttgaagttgtg

SEQ ID NO: 31089 - DNA, 20 bp, synthetic construct
  misc_feature 1..20: note = chemically synthesized
  source 1..20: mol_type = other DNA
gtattatcttgaagttgtgg

SEQ ID NO: 31090 - DNA, 20 bp, synthetic construct
  misc_feature 1..20: note = chemically synthesized
  source 1..20: mol_type = other DNA
tatcttgaagttgtggaggt

SEQ ID NO: 31091 - DNA, 20 bp, synthetic construct
  misc_feature 1..20: note = chemically synthesized
  source 1..20: mol_type = other DNA
cttgaagttgtggaggtcag

SEQ ID NO: 31092 - DNA, 20 bp, synthetic construct
  misc_feature 1..20: note = chemically synthesized
  source 1..20: mol_type = other DNA
ggaggtcagaagtctgaaat

SEQ ID NO: 31093 - DNA, 20 bp, synthetic construct
  misc_feature 1..20: note = chemically synthesized
  source 1..20: mol_type = other DNA
aagtctgaaatcggtttcac

SEQ ID NO: 31094 - DNA, 20 bp, synthetic construct
  misc_feature 1..20: note = chemically synthesized
  source 1..20: mol_type = other DNA
agtctgaaatcggtttcact

SEQ ID NO: 31095 - DNA, 20 bp, synthetic construct
  misc_feature 1..20: note = chemically synthesized
  source 1..20: mol_type = other DNA
aaatcggtttcactgggcta

SEQ ID NO: 31096 - DNA, 20 bp, synthetic construct
  misc_feature 1..20: note = chemically synthesized
  source 1..20: mol_type = other DNA
ggtttcactgggctaaagtc

SEQ ID NO: 31097 - DNA, 20 bp, synthetic construct
  misc_feature 1..20: note = chemically synthesized
  source 1..20: mol_type = other DNA
gtttcactgggctaaagtcg

SEQ ID NO: 31098 - DNA, 20 bp, synthetic construct
  misc_feature 1..20: note = chemically synthesized
  source 1..20: mol_type = other DNA
ctgggctaaagtcgaggtgt

SEQ ID NO: 31099 - DNA, 20 bp, synthetic construct
  misc_feature 1..20: note = chemically synthesized
  source 1..20: mol_type = other DNA
ctaaagtcgaggtgtcagtg

SEQ ID NO: 31100 - DNA, 20 bp, synthetic construct
  misc_feature 1..20: note = chemically synthesized
  source 1..20: mol_type = other DNA
gtcagtgtggctgtttcttc

SEQ ID NO: 31101 - DNA, 20 bp, synthetic construct
  misc_feature 1..20: note = chemically synthesized
  source 1..20: mol_type = other DNA
cagtgtggctgtttcttctg

SEQ ID NO: 31102 - DNA, 20 bp, synthetic construct
  misc_feature 1..20: note = chemically synthesized
  source 1..20: mol_type = other DNA
gtttcttctggagactctat

SEQ ID NO: 31103 - DNA, 20 bp, synthetic construct
  misc_feature 1..20: note = chemically synthesized
  source 1..20: mol_type = other DNA
ttcttctggagactctatga

SEQ ID NO: 31104 - DNA, 20 bp, synthetic construct
  misc_feature 1..20: note = chemically synthesized
  source 1..20: mol_type = other DNA
gtgttttcctgccttttcca

SEQ ID NO: 31105 - DNA, 20 bp, synthetic construct
  misc_feature 1..20: note = chemically synthesized
  source 1..20: mol_type = other DNA
atggattctgtttcctcttc

SEQ ID NO: 31106 - DNA, 20 bp, synthetic construct
  misc_feature 1..20: note = chemically synthesized
  source 1..20: mol_type = other DNA
ggattctgtttcctcttcta

SEQ ID NO: 31107 - DNA, 20 bp, synthetic construct
  misc_feature 1..20: note = chemically synthesized
  source 1..20: mol_type = other DNA
gattctgtttcctcttctag

SEQ ID NO: 31108 - DNA, 20 bp, synthetic construct
  misc_feature 1..20: note = chemically synthesized
  source 1..20: mol_type = other DNA
tagaggctacccacattcct

SEQ ID NO: 31109 - DNA, 20 bp, synthetic construct
  misc_feature 1..20: note = chemically synthesized
  source 1..20: mol_type = other DNA
tacccacattccttggtttg

SEQ ID NO: 31110 - DNA, 20 bp, synthetic construct
  misc_feature 1..20: note = chemically synthesized
  source 1..20: mol_type = other DNA
gtcacattttctcctcttat

SEQ ID NO: 31111 - DNA, 20 bp, synthetic construct
  misc_feature 1..20: note = chemically synthesized
  source 1..20: mol_type = other DNA
atgacacttgtgattacatt

SEQ ID NO: 31112 - DNA, 20 bp, synthetic construct
  misc_feature 1..20: note = chemically synthesized
  source 1..20: mol_type = other DNA
tgacacttgtgattacattt

SEQ ID NO: 31113 - DNA, 20 bp, synthetic construct
  misc_feature 1..20: note = chemically synthesized
  source 1..20: mol_type = other DNA
ttaggatacacccaaataat

SEQ ID NO: 31114 - DNA, 20 bp, synthetic construct
  misc_feature 1..20: note = chemically synthesized
  source 1..20: mol_type = other DNA
taggatacacccaaataatt

SEQ ID NO: 31115 - DNA, 20 bp, synthetic construct
  misc_feature 1..20: note = chemically synthesized
  source 1..20: mol_type = other DNA
ttaggatatctccccatccc

SEQ ID NO: 31116 - DNA, 20 bp, synthetic construct
  misc_feature 1..20: note = chemically synthesized
  source 1..20: mol_type = other DNA
atccttaattatatatgcaa

SEQ ID NO: 31117 - DNA, 20 bp, synthetic construct
  misc_feature 1..20: note = chemically synthesized
  source 1..20: mol_type = other DNA
tatatatgcaaaagtctgtt

SEQ ID NO: 31118 - DNA, 20 bp, synthetic construct
  misc_feature 1..20: note = chemically synthesized
  source 1..20: mol_type = other DNA
tatgcaaaagtctgtttggc

SEQ ID NO: 31119 - DNA, 20 bp, synthetic construct
  misc_feature 1..20: note = chemically synthesized
  source 1..20: mol_type = other DNA
aaaagtctgtttggctagaa

SEQ ID NO: 31120 - DNA, 20 bp, synthetic construct
  misc_feature 1..20: note = chemically synthesized
  source 1..20: mol_type = other DNA
gctagaaaagataatactca

SEQ ID NO: 31121 - DNA, 20 bp, synthetic construct
  misc_feature 1..20: note = chemically synthesized
  source 1..20: mol_type = other DNA
ctagaaaagataatactcac

SEQ ID NO: 31122 - DNA, 20 bp, synthetic construct
  misc_feature 1..20: note = chemically synthesized
  source 1..20: mol_type = other DNA
aagataatactcacaggttt

SEQ ID NO: 31123 - DNA, 20 bp, synthetic construct
  misc_feature 1..20: note = chemically synthesized
  source 1..20: mol_type = other DNA
agataatactcacaggtttc

SEQ ID NO: 31124 - DNA, 20 bp, synthetic construct
  misc_feature 1..20: note = chemically synthesized
  source 1..20: mol_type = other DNA
gataatactcacaggtttca

SEQ ID NO: 31125 - DNA, 20 bp, synthetic construct
  misc_feature 1..20: note = chemically synthesized
  source 1..20: mol_type = other DNA
ataatactcacaggtttcag

SEQ ID NO: 31126 - DNA, 20 bp, synthetic construct
  misc_feature 1..20: note = chemically synthesized
  source 1..20: mol_type = other DNA
actcacaggtttcaggggtt

SEQ ID NO: 31127 - DNA, 20 bp, synthetic construct
  misc_feature 1..20: note = chemically synthesized
  source 1..20: mol_type = other DNA
gttaagccatacatatcttt

SEQ ID NO: 31128 - DNA, 20 bp, synthetic construct
  misc_feature 1..20: note = chemically synthesized
  source 1..20: mol_type = other DNA
taagccatacatatctttca

SEQ ID NO: 31129 - DNA, 20 bp, synthetic construct
  misc_feature 1..20: note = chemically synthesized
  source 1..20: mol_type = other DNA
ccatacatatctttcagagt

SEQ ID NO: 31130 - DNA, 20 bp, synthetic construct
  misc_feature 1..20: note = chemically synthesized
  source 1..20: mol_type = other DNA
tatctttcagagtgagccat

SEQ ID NO: 31131 - DNA, 20 bp, synthetic construct
  misc_feature 1..20: note = chemically synthesized
  source 1..20: mol_type = other DNA
gtgagccattagccattatt

SEQ ID NO: 31132 - DNA, 20 bp, synthetic construct
  misc_feature 1..20: note = chemically synthesized
  source 1..20: mol_type = other DNA
agcctactgcgataatgtgc

SEQ ID NO: 31133 - DNA, 20 bp, synthetic construct
  misc_feature 1..20: note = chemically synthesized
  source 1..20: mol_type = other DNA
ctatgttctatgttcccatc

SEQ ID NO: 31134 - DNA, 20 bp, synthetic construct
  misc_feature 1..20: note = chemically synthesized
  source 1..20: mol_type = other DNA
tatgttctatgttcccatca

SEQ ID NO: 31135 - DNA, 20 bp, synthetic construct
  misc_feature 1..20: note = chemically synthesized
  source 1..20: mol_type = other DNA
atgttcccatcaaggttaat

SEQ ID NO: 31136 - DNA, 20 bp, synthetic construct
  misc_feature 1..20: note = chemically synthesized
  source 1..20: mol_type = other DNA
tcaaggttaattagaaatat

SEQ ID NO: 31137 - DNA, 20 bp, synthetic construct
  misc_feature 1..20: note = chemically synthesized
  source 1..20: mol_type = other DNA
aatattagactctttttcca

SEQ ID NO: 31138 - DNA, 20 bp, synthetic construct
  misc_feature 1..20: note = chemically synthesized
  source 1..20: mol_type = other DNA
ttccacagaaaaaaaaaatg

SEQ ID NO: 31139 - DNA, 20 bp, synthetic construct
  misc_feature 1..20: note = chemically synthesized
  source 1..20: mol_type = other DNA
cacagaaaaaaaaaatgtag

SEQ ID NO: 31140 - DNA, 20 bp, synthetic construct
  misc_feature 1..20: note = chemically synthesized
  source 1..20: mol_type = other DNA
agaaaaaaaaaatgtagcag

SEQ ID NO: 31141 - DNA, 20 bp, synthetic construct
  misc_feature 1..20: note = chemically synthesized
  source 1..20: mol_type = other DNA
ctctctctttccttcatgcc

SEQ ID NO: 31142 - DNA, 20 bp, synthetic construct
  misc_feature 1..20: note = chemically synthesized
  source 1..20: mol_type = other DNA
ctctttccttcatgcccagt

SEQ ID NO: 31143 - DNA, 20 bp, synthetic construct
  misc_feature 1..20: note = chemically synthesized
  source 1..20: mol_type = other DNA
ctttccttcatgcccagtaa

SEQ ID NO: 31144 - DNA, 20 bp, synthetic construct
  misc_feature 1..20: note = chemically synthesized
  source 1..20: mol_type = other DNA
tttccttcatgcccagtaag

SEQ ID NO: 31145 - DNA, 20 bp, synthetic construct
  misc_feature 1..20: note = chemically synthesized
  source 1..20: mol_type = other DNA
ccttcatgcccagtaagagg

SEQ ID NO: 31146 - DNA, 20 bp, synthetic construct
  misc_feature 1..20: note = chemically synthesized
  source 1..20: mol_type = other DNA
catgcccagtaagaggaagt

SEQ ID NO: 31147 - DNA, 20 bp, synthetic construct
  misc_feature 1..20: note = chemically synthesized
  source 1..20: mol_type = other DNA
atgcccagtaagaggaagtg

SEQ ID NO: 31148 - DNA, 20 bp, synthetic construct
  misc_feature 1..20: note = chemically synthesized
  source 1..20: mol_type = other DNA
gcaccatctgttcatctcat

SEQ ID NO: 31149 - DNA, 20 bp, synthetic construct
  misc_feature 1..20: note = chemically synthesized
  source 1..20: mol_type = other DNA
caccatctgttcatctcatc

SEQ ID NO: 31150 - DNA, 20 bp, synthetic construct
  misc_feature 1..20: note = chemically synthesized
  source 1..20: mol_type = other DNA
tcatctcatcaggtgttacc

SEQ ID NO: 31151 - DNA, 20 bp, synthetic construct
  misc_feature 1..20: note = chemically synthesized
  source 1..20: mol_type = other DNA
catcaggtgttacctagaat

SEQ ID NO: 31152 - DNA, 20 bp, synthetic construct
  misc_feature 1..20: note = chemically synthesized
  source 1..20: mol_type = other DNA
tcaggtgttacctagaatca

SEQ ID NO: 31153 - DNA, 20 bp, synthetic construct
  misc_feature 1..20: note = chemically synthesized
  source 1..20: mol_type = other DNA
gtgttacctagaatcagagt

SEQ ID NO: 31154 - DNA, 20 bp, synthetic construct
  misc_feature 1..20: note = chemically synthesized
  source 1..20: mol_type = other DNA
tgttacctagaatcagagtc

SEQ ID NO: 31155 - DNA, 20 bp, synthetic construct
  misc_feature 1..20: note = chemically synthesized
  source 1..20: mol_type = other DNA
ttacctagaatcagagtcag

SEQ ID NO: 31156 - DNA, 20 bp, synthetic construct
  misc_feature 1..20: note = chemically synthesized
  source 1..20: mol_type = other DNA
ctagaatcagagtcaggaga

SEQ ID NO: 31157 - DNA, 20 bp, synthetic construct
  misc_feature 1..20: note = chemically synthesized
  source 1..20: mol_type = other DNA
cctcataaaactactctgac

SEQ ID NO: 31158 - DNA, 20 bp, synthetic construct
  misc_feature 1..20: note = chemically synthesized
  source 1..20: mol_type = other DNA
ctgacaagtaaaccatatcc

SEQ ID NO: 31159 - DNA, 20 bp, synthetic construct
  misc_feature 1..20: note = chemically synthesized
  source 1..20: mol_type = other DNA
tgacaagtaaaccatatcct

SEQ ID NO: 31160 - DNA, 20 bp, synthetic construct
  misc_feature 1..20: note = chemically synthesized
  source 1..20: mol_type = other DNA
gacaagtaaaccatatcctg

SEQ ID NO: 31161 - DNA, 20 bp, synthetic construct
  misc_feature 1..20: note = chemically synthesized
  source 1..20: mol_type = other DNA
gtaaaccatatcctggggac

SEQ ID NO: 31162 - DNA, 20 bp, synthetic construct
  misc_feature 1..20: note = chemically synthesized
  source 1..20: mol_type = other DNA
taaaccatatcctggggacc

SEQ ID NO: 31163 - DNA, 20 bp, synthetic construct
  misc_feature 1..20: note = chemically synthesized
  source 1..20: mol_type = other DNA
ccatatcctggggaccaggt

SEQ ID NO: 31164 - DNA, 20 bp, synthetic construct
  misc_feature 1..20: note = chemically synthesized
  source 1..20: mol_type = other DNA
gggaccaggtgagaattaaa

SEQ ID NO: 31165 - DNA, 20 bp, synthetic construct
  misc_feature 1..20: note = chemically synthesized
  source 1..20: mol_type = other DNA
ttaaaaagctgtatactcat

SEQ ID NO: 31166 - DNA, 20 bp, synthetic construct
  misc_feature 1..20: note = chemically synthesized
  source 1..20: mol_type = other DNA
tgtatactcataagctgcca

SEQ ID NO: 31167 - DNA, 20 bp, synthetic construct
  misc_feature 1..20: note = chemically synthesized
  source 1..20: mol_type = other DNA
tatactcataagctgccaaa

SEQ ID NO: 31168 - DNA, 20 bp, synthetic construct
  misc_feature 1..20: note = chemically synthesized
  source 1..20: mol_type = other DNA
ataagctgccaaagagctga

SEQ ID NO: 31169 - DNA, 20 bp, synthetic construct
  misc_feature 1..20: note = chemically synthesized
  source 1..20: mol_type = other DNA
ccaaagagctgatggtactg

SEQ ID NO: 31170 - DNA, 20 bp, synthetic construct
  misc_feature 1..20: note = chemically synthesized
  source 1..20: mol_type = other DNA
ctgatggtactgaagtcaca

SEQ ID NO: 31171 - DNA, 20 bp, synthetic construct
  misc_feature 1..20: note = chemically synthesized
  source 1..20: mol_type = other DNA
gatggtactgaagtcacatg

SEQ ID NO: 31172 - DNA, 20 bp, synthetic construct
  misc_feature 1..20: note = chemically synthesized
  source 1..20: mol_type = other DNA
tactgaagtcacatggagct

SEQ ID NO: 31173 - DNA, 20 bp, synthetic construct
  misc_feature 1..20: note = chemically synthesized
  source 1..20: mol_type = other DNA
actgaagtcacatggagctc

SEQ ID NO: 31174 - DNA, 20 bp, synthetic construct
  misc_feature 1..20: note = chemically synthesized
  source 1..20: mol_type = other DNA
caggaatttattcttgcatt

SEQ ID NO: 31175 - DNA, 20 bp, synthetic construct
  misc_feature 1..20: note = chemically synthesized
  source 1..20: mol_type = other DNA
aatttattcttgcatttaga

SEQ ID NO: 31176 - DNA, 20 bp, synthetic construct
  misc_feature 1..20: note = chemically synthesized
  source 1..20: mol_type = other DNA
atgcatataattctctcgaa

SEQ ID NO: 31177 - DNA, 20 bp, synthetic construct
  misc_feature 1..20: note = chemically synthesized
  source 1..20: mol_type = other DNA
atgaaatcatatttttctgt

SEQ ID NO: 31178 - DNA, 20 bp, synthetic construct
  misc_feature 1..20: note = chemically synthesized
  source 1..20: mol_type = other DNA
ttctgtcggatcaaattatt

SEQ ID NO: 31179 - DNA, 20 bp, synthetic construct
  misc_feature 1..20: note = chemically synthesized
  source 1..20: mol_type = other DNA
ttattcagaaatccgaactg

SEQ ID NO: 31180 - DNA, 20 bp, synthetic construct
  misc_feature 1..20: note = chemically synthesized
  source 1..20: mol_type = other DNA
caaacacacttgcttaatgt

SEQ ID NO: 31181 - DNA, 20 bp, synthetic construct
  misc_feature 1..20: note = chemically synthesized
  source 1..20: mol_type = other DNA
tttaatcttatttttgtaca

SEQ ID NO: 31182 - DNA, 20 bp, synthetic construct
  misc_feature 1..20: note = chemically synthesized
  source 1..20: mol_type = other DNA
gtacacagtatacttttaca

SEQ ID NO: 31183 - DNA, 20 bp, synthetic construct
  misc_feature 1..20: note = chemically synthesized
  source 1..20: mol_type = other DNA
tacacagtatacttttacat

SEQ ID NO: 31184 - DNA, 20 bp, synthetic construct
  misc_feature 1..20: note = chemically synthesized
  source 1..20: mol_type = other DNA
cttttacataggcactgaac

SEQ ID NO: 31185 - DNA, 20 bp, synthetic construct
  misc_feature 1..20: note = chemically synthesized
  source 1..20: mol_type = other DNA
tacataggcactgaaccagc

SEQ ID NO: 31186 - DNA, 20 bp, synthetic construct
  misc_feature 1..20: note = chemically synthesized
  source 1..20: mol_type = other DNA
accagctggaaatgaatgct

SEQ ID NO: 31187 - DNA, 20 bp, synthetic construct
  misc_feature 1..20: note = chemically synthesized
  source 1..20: mol_type = other DNA
aatgaatgcttggattttcg

SEQ ID NO: 31188 - DNA, 20 bp, synthetic construct
  misc_feature 1..20: note = chemically synthesized
  source 1..20: mol_type = other DNA
tggattttcgcagctgataa

SEQ ID NO: 31189 - DNA, 20 bp, synthetic construct
  misc_feature 1..20: note = chemically synthesized
  source 1..20: mol_type = other DNA
attttcgcagctgataaaag

SEQ ID NO: 31190 - DNA, 20 bp, synthetic construct
  misc_feature 1..20: note = chemically synthesized
  source 1..20: mol_type = other DNA
tttcgcagctgataaaagca

SEQ ID NO: 31191 - DNA, 20 bp, synthetic construct
  misc_feature 1..20: note = chemically synthesized
  source 1..20: mol_type = other DNA
cagctgataaaagcagagtt

SEQ ID NO: 31192 - DNA, 20 bp, synthetic construct
  misc_feature 1..20: note = chemically synthesized
  source 1..20: mol_type = other DNA
agagttcagattctgtcctt

SEQ ID NO: 31193 - DNA, 20 bp, synthetic construct
  misc_feature 1..20: note = chemically synthesized
  source 1..20: mol_type = other DNA
ctgtccttgagctcaatgtc

SEQ ID NO: 31194 - DNA, 20 bp, synthetic construct
  misc_feature 1..20: note = chemically synthesized
  source 1..20: mol_type = other DNA
gtccttgagctcaatgtctg

SEQ ID NO: 31195 - DNA, 20 bp, synthetic construct
  misc_feature 1..20: note = chemically synthesized
  source 1..20: mol_type = other DNA
ttgagctcaatgtctggaga

SEQ ID NO: 31196 - DNA, 20 bp, synthetic construct
  misc_feature 1..20: note = chemically synthesized
  source 1..20: mol_type = other DNA
agctcaatgtctggagaaag

SEQ ID NO: 31197 - DNA, 20 bp, synthetic construct
  misc_feature 1..20: note = chemically synthesized
  source 1..20: mol_type = other DNA
tgaatactgcttccttaatt

SEQ ID NO: 31198 - DNA, 20 bp, synthetic construct
  misc_feature 1..20: note = chemically synthesized
  source 1..20: mol_type = other DNA
ttccttaattcagatgcctt

SEQ ID NO: 31199 - DNA, 20 bp, synthetic construct
  misc_feature 1..20: note = chemically synthesized
  source 1..20: mol_type = other DNA
attcagatgcctttggccgt

SEQ ID NO: 31200 - DNA, 20 bp, synthetic construct
  misc_feature 1..20: note = chemically synthesized
  source 1..20: mol_type = other DNA
ttcagatgcctttggccgtg

SEQ ID NO: 31201 - DNA, 20 bp, synthetic construct
  misc_feature 1..20: note = chemically synthesized
  source 1..20: mol_type = other DNA
tcagatgcctttggccgtga

SEQ ID NO: 31202 - DNA, 20 bp, synthetic construct
  misc_feature 1..20: note = chemically synthesized
  source 1..20: mol_type = other DNA
cagatgcctttggccgtgag

SEQ ID NO: 31203 - DNA, 20 bp, synthetic construct
  misc_feature 1..20: note = chemically synthesized
  source 1..20: mol_type = other DNA
gcctttggccgtgaggggca

SEQ ID NO: 31204 - DNA, 20 bp, synthetic construct
  misc_feature 1..20: note = chemically synthesized
  source 1..20: mol_type = other DNA
gtgaggggcatggcatttta

SEQ ID NO: 31205 - DNA, 20 bp, synthetic construct
  misc_feature 1..20: note = chemically synthesized
  source 1..20: mol_type = other DNA
aaactctgtactttttctct

SEQ ID NO: 31206 - DNA, 20 bp, synthetic construct
  misc_feature 1..20: note = chemically synthesized
  source 1..20: mol_type = other DNA
aactctgtactttttctctc

SEQ ID NO: 31207 - DNA, 20 bp, synthetic construct
  misc_feature 1..20: note = chemically synthesized
  source 1..20: mol_type = other DNA
actctgtactttttctctca

SEQ ID NO: 31208 - DNA, 20 bp, synthetic construct
  misc_feature 1..20: note = chemically synthesized
  source 1..20: mol_type = other DNA
ctctgtactttttctctcag

SEQ ID NO: 31209 - DNA, 20 bp, synthetic construct
  misc_feature 1..20: note = chemically synthesized
  source 1..20: mol_type = other DNA
tactttttctctcaggggat

SEQ ID NO: 31210 - DNA, 20 bp, synthetic construct
  misc_feature 1..20: note = chemically synthesized
  source 1..20: mol_type = other DNA
agaaaaaccaattgatttga

SEQ ID NO: 31211 - DNA, 20 bp, synthetic construct
  misc_feature 1..20: note = chemically synthesized
  source 1..20: mol_type = other DNA
caattgatttgatagtgact

SEQ ID NO: 31212 - DNA, 20 bp, synthetic construct
  misc_feature 1..20: note = chemically synthesized
  source 1..20: mol_type = other DNA
ttgatttgatagtgactcag

SEQ ID NO: 31213 - DNA, 20 bp, synthetic construct
  misc_feature 1..20: note = chemically synthesized
  source 1..20: mol_type = other DNA
gcagttttcaccttcctctt

SEQ ID NO: 31214 - DNA, 20 bp, synthetic construct
  misc_feature 1..20: note = chemically synthesized
  source 1..20: mol_type = other DNA
cctctttagccaatgccctg

SEQ ID NO: 31215 - DNA, 20 bp, synthetic construct
  misc_feature 1..20: note = chemically synthesized
  source 1..20: mol_type = other DNA
ttagccaatgccctgcagct

SEQ ID NO: 31216 - DNA, 20 bp, synthetic construct
  misc_feature 1..20: note = chemically synthesized
  source 1..20: mol_type = other DNA
aatgccctgcagctaagatt

SEQ ID NO: 31217 - DNA, 20 bp, synthetic construct
  misc_feature 1..20: note = chemically synthesized
  source 1..20: mol_type = other DNA
ctgcagctaagattgagaaa

SEQ ID NO: 31218 - DNA, 20 bp, synthetic construct
  misc_feature 1..20: note = chemically synthesized
  source 1..20: mol_type = other DNA
ctaagattgagaaacggatt

SEQ ID NO: 31219 - DNA, 20 bp, synthetic construct
  misc_feature 1..20: note = chemically synthesized
  source 1..20: mol_type = other DNA
gattcagaactcacacctct

SEQ ID NO: 31220 - DNA, 20 bp, synthetic construct
  misc_feature 1..20: note = chemically synthesized
  source 1..20: mol_type = other DNA
aactcacacctcttggtgct

SEQ ID NO: 31221 - DNA, 20 bp, synthetic construct
  misc_feature 1..20: note = chemically synthesized
  source 1..20: mol_type = other DNA
tcacacctcttggtgcttgg

SEQ ID NO: 31222 - DNA, 20 bp, synthetic construct
  misc_feature 1..20: note = chemically synthesized
  source 1..20: mol_type = other DNA
gtggctcccttccaaaccat

SEQ ID NO: 31223 - DNA, 20 bp, synthetic construct
  misc_feature 1..20: note = chemically synthesized
  source 1..20: mol_type = other DNA
actttctttcctatttttta

SEQ ID NO: 31224 - DNA, 20 bp, synthetic construct
  misc_feature 1..20: note = chemically synthesized
  source 1..20: mol_type = other DNA
ctttcctattttttaaagca

SEQ ID NO: 31225 - DNA, 20 bp, synthetic construct
  misc_feature 1..20: note = chemically synthesized
  source 1..20: mol_type = other DNA
tttaaagcacagtctgaatc

SEQ ID NO: 31226 - DNA, 20 bp, synthetic construct
  misc_feature 1..20: note = chemically synthesized
  source 1..20: mol_type = other DNA
acagtctgaatcaagtgctt

SEQ ID NO: 31227 - DNA, 20 bp, synthetic construct
  misc_feature 1..20: note = chemically synthesized
  source 1..20: mol_type = other DNA
ataaccctgaaccctcttct

SEQ ID NO: 31228 - DNA, 20 bp, synthetic construct
  misc_feature 1..20: note = chemically synthesized
  source 1..20: mol_type = other DNA
taaccctgaaccctcttcta

SEQ ID NO: 31229 - DNA, 20 bp, synthetic construct
  misc_feature 1..20: note = chemically synthesized
  source 1..20: mol_type = other DNA
gaaccctcttctaaggccac

SEQ ID NO: 31230 - DNA, 20 bp, synthetic construct
  misc_feature 1..20: note = chemically synthesized
  source 1..20: mol_type = other DNA
ttctaaggccaccagttaca

SEQ ID NO: 31231 - DNA, 20 bp, synthetic construct
  misc_feature 1..20: note = chemically synthesized
  source 1..20: mol_type = other DNA
aggccaccagttacaaagaa

SEQ ID NO: 31232 - DNA, 20 bp, synthetic construct
  misc_feature 1..20: note = chemically synthesized
  source 1..20: mol_type = other DNA
ggccaccagttacaaagaat

SEQ ID NO: 31233 - DNA, 20 bp, synthetic construct
  misc_feature 1..20: note = chemically synthesized
  source 1..20: mol_type = other DNA
gccaccagttacaaagaatg

SEQ ID NO: 31234 - DNA, 20 bp, synthetic construct
  misc_feature 1..20: note = chemically synthesized
  source 1..20: mol_type = other DNA
accagttacaaagaatgggg

SEQ ID NO: 31235 - DNA, 20 bp, synthetic construct
  misc_feature 1..20: note = chemically synthesized
  source 1..20: mol_type = other DNA
ccagttacaaagaatgggga

SEQ ID NO: 31236 - DNA, 20 bp, synthetic construct
  misc_feature 1..20: note = chemically synthesized
  source 1..20: mol_type = other DNA
aaagaatggggaaggttaat

SEQ ID NO: 31237 - DNA, 20 bp, synthetic construct
  misc_feature 1..20: note = chemically synthesized
  source 1..20: mol_type = other DNA
aggttaatgagtaactccac

SEQ ID NO: 31238 - DNA, 20 bp, synthetic construct
  misc_feature 1..20: note = chemically synthesized
  source 1..20: mol_type = other DNA
gtaactccaccagtgcctgc

SEQ ID NO: 31239 - DNA, 20 bp, synthetic construct
  misc_feature 1..20: note = chemically synthesized
  source 1..20: mol_type = other DNA
ctccaccagtgcctgccaga

SEQ ID NO: 31240 - DNA, 20 bp, synthetic construct
  misc_feature 1..20: note = chemically synthesized
  source 1..20: mol_type = other DNA
ccagtgcctgccagaaagct

SEQ ID NO: 31241 - DNA, 20 bp, synthetic construct
  misc_feature 1..20: note = chemically synthesized
  source 1..20: mol_type = other DNA
cagaaagctcagctgtactc

SEQ ID NO: 31242 - DNA, 20 bp, synthetic construct
  misc_feature 1..20: note = chemically synthesized
  source 1..20: mol_type = other DNA
cagccttccttcctctcttg

SEQ ID NO: 31243 - DNA, 20 bp, synthetic construct
  misc_feature 1..20: note = chemically synthesized
  source 1..20: mol_type = other DNA
gccttccttcctctcttgca

SEQ ID NO: 31244 - DNA, 20 bp, synthetic construct
  misc_feature 1..20: note = chemically synthesized
  source 1..20: mol_type = other DNA
cttccttcctctcttgcaga

SEQ ID NO: 31245 - DNA, 20 bp, synthetic construct
  misc_feature 1..20: note = chemically synthesized
  source 1..20: mol_type = other DNA
tcttgcagagagaaacaatg

SEQ ID NO: 31246 - DNA, 20 bp, synthetic construct
  misc_feature 1..20: note = chemically synthesized
  source 1..20: mol_type = other DNA
tgcagagagaaacaatgcgg

SEQ ID NO: 31247 - DNA, 20 bp, synthetic construct
  misc_feature 1..20: note = chemically synthesized
  source 1..20: mol_type = other DNA
aacaatgcggcagttgaaca

SEQ ID NO: 31248 - DNA, 20 bp, synthetic construct
  misc_feature 1..20: note = chemically synthesized
  source 1..20: mol_type = other DNA
tgcggcagttgaacaaagcg

SEQ ID NO: 31249 - DNA, 20 bp, synthetic construct
  misc_feature 1..20: note = chemically synthesized
  source 1..20: mol_type = other DNA
gcggcagttgaacaaagcga

SEQ ID NO: 31250 - DNA, 20 bp, synthetic construct
  misc_feature 1..20: note = chemically synthesized
  source 1..20: mol_type = other DNA
agcgaaggcactgtaatgcc

SEQ ID NO: 31251 - DNA, 20 bp, synthetic construct
  misc_feature 1..20: note = chemically synthesized
  source 1..20: mol_type = other DNA
gaaggcactgtaatgcccag

SEQ ID NO: 31252 - DNA, 20 bp, synthetic construct
  misc_feature 1..20: note = chemically synthesized
  source 1..20: mol_type = other DNA
actgtaatgcccagtggctt

SEQ ID NO: 31253 - DNA, 20 bp, synthetic construct
  misc_feature 1..20: note = chemically synthesized
  source 1..20: mol_type = other DNA
atgcccagtggcttcagtca

SEQ ID NO: 31254 - DNA, 20 bp, synthetic construct
  misc_feature 1..20: note = chemically synthesized
  source 1..20: mol_type = other DNA
tgcccagtggcttcagtcac

SEQ ID NO: 31255 - DNA, 20 bp, synthetic construct
  misc_feature 1..20: note = chemically synthesized
  source 1..20: mol_type = other DNA
cagtggcttcagtcacaggc

SEQ ID NO: 31256 - DNA, 20 bp, synthetic construct
  misc_feature 1..20: note = chemically synthesized
  source 1..20: mol_type = other DNA
tggtctaaaattccatttca

SEQ ID NO: 31257 - DNA, 20 bp, synthetic construct
  misc_feature 1..20: note = chemically synthesized
  source 1..20: mol_type = other DNA
aattccatttcacagaattg

SEQ ID NO: 31258 - DNA, 20 bp, synthetic construct
  misc_feature 1..20: note = chemically synthesized
  source 1..20: mol_type = other DNA
tcacagaattgaagataatt

SEQ ID NO: 31259 - DNA, 20 bp, synthetic construct
  misc_feature 1..20: note = chemically synthesized
  source 1..20: mol_type = other DNA
cacagaattgaagataattt

SEQ ID NO: 31260 - DNA, 20 bp, synthetic construct
  misc_feature 1..20: note = chemically synthesized
  source 1..20: mol_type = other DNA
acagaattgaagataatttg

SEQ ID NO: 31261 - DNA, 20 bp, synthetic construct
  misc_feature 1..20: note = chemically synthesized
  source 1..20: mol_type = other DNA
ttggggttattaccaattct

SEQ ID NO: 31262 - DNA, 20 bp, synthetic construct
  misc_feature 1..20: note = chemically synthesized
  source 1..20: mol_type = other DNA
gggttattaccaattctcag

SEQ ID NO: 31263 - DNA, 20 bp, synthetic construct
  misc_feature 1..20: note = chemically synthesized
  source 1..20: mol_type = other DNA
ctcaaattcaatcccgttga

SEQ ID NO: 31264 - DNA, 20 bp, synthetic construct
  misc_feature 1..20: note = chemically synthesized
  source 1..20: mol_type = other DNA
aattcaatcccgttgatggt

SEQ ID NO: 31265 - DNA, 20 bp, synthetic construct
  misc_feature 1..20: note = chemically synthesized
  source 1..20: mol_type = other DNA
aatcccgttgatggtgagca

SEQ ID NO: 31266 - DNA, 20 bp, synthetic construct
  misc_feature 1..20: note = chemically synthesized
  source 1..20: mol_type = other DNA
atcccgttgatggtgagcat

SEQ ID NO: 31267 - DNA, 20 bp, synthetic construct
  misc_feature 1..20: note = chemically synthesized
  source 1..20: mol_type = other DNA
tcccgttgatggtgagcatg

SEQ ID NO: 31268 - DNA, 20 bp, synthetic construct
  misc_feature 1..20: note = chemically synthesized
  source 1..20: mol_type = other DNA
gtgagcatggggttcatttt

SEQ ID NO: 31269 - DNA, 20 bp, synthetic construct
  misc_feature 1..20: note = chemically synthesized
  source 1..20: mol_type = other DNA
gagcatggggttcattttga

SEQ ID NO: 31270 - DNA, 20 bp, synthetic construct
  misc_feature 1..20: note = chemically synthesized
  source 1..20: mol_type = other DNA
catggggttcattttgagag

SEQ ID NO: 31271 - DNA, 20 bp, synthetic construct
  misc_feature 1..20: note = chemically synthesized
  source 1..20: mol_type = other DNA
tcattttgagagtagaaaat

SEQ ID NO: 31272 - DNA, 20 bp, synthetic construct
  misc_feature 1..20: note = chemically synthesized
  source 1..20: mol_type = other DNA
tgagagtagaaaattggatg

SEQ ID NO: 31273 - DNA, 20 bp, synthetic construct
  misc_feature 1..20: note = chemically synthesized
  source 1..20: mol_type = other DNA
gagtagaaaattggatgcag

SEQ ID NO: 31274 - DNA, 20 bp, synthetic construct
  misc_feature 1..20: note = chemically synthesized
  source 1..20: mol_type = other DNA
gtagaaaattggatgcagtg

SEQ ID NO: 31275 - DNA, 20 bp, synthetic construct
  misc_feature 1..20: note = chemically synthesized
  source 1..20: mol_type = other DNA
aattggatgcagtggagaat

SEQ ID NO: 31276 - DNA, 20 bp, synthetic construct
  misc_feature 1..20: note = chemically synthesized
  source 1..20: mol_type = other DNA
gcagtggagaatcagaatgt

SEQ ID NO: 31277 - DNA, 20 bp, synthetic construct
  misc_feature 1..20: note = chemically synthesized
  source 1..20: mol_type = other DNA
tggagaatcagaatgttgga

SEQ ID NO: 31278 - DNA, 20 bp, synthetic construct
  misc_feature 1..20: note = chemically synthesized
  source 1..20: mol_type = other DNA
tggtctctgccatttcccca

SEQ ID NO: 31279 - DNA, 20 bp, synthetic construct
  misc_feature 1..20: note = chemically synthesized
  source 1..20: mol_type = other DNA
tgctgctgcttttaacaaat

SEQ ID NO: 31280 - DNA, 20 bp, synthetic construct
  misc_feature 1..20: note = chemically synthesized
  source 1..20: mol_type = other DNA
taacaaatcagtatacaact

SEQ ID NO: 31281 - DNA, 20 bp, synthetic construct
  misc_feature 1..20: note = chemically synthesized
  source 1..20: mol_type = other DNA
tttcaaatatacaaaatatt

SEQ ID NO: 31282 - DNA, 20 bp, synthetic construct
  misc_feature 1..20: note = chemically synthesized
  source 1..20: mol_type = other DNA
tatacaaaatattgagtctg

SEQ ID NO: 31283 - DNA, 20 bp, synthetic construct
  misc_feature 1..20: note = chemically synthesized
  source 1..20: mol_type = other DNA
atacaaaatattgagtctga

SEQ ID NO: 31284 - DNA, 20 bp, synthetic construct
  misc_feature 1..20: note = chemically synthesized
  source 1..20: mol_type = other DNA
atattgagtctgaaggcaaa

SEQ ID NO: 31285 - DNA, 20 bp, synthetic construct
  misc_feature 1..20: note = chemically synthesized
  source 1..20: mol_type = other DNA
ttttcacttccattgcttcc

SEQ ID NO: 31286 - DNA, 20 bp, synthetic construct
  misc_feature 1..20: note = chemically synthesized
  source 1..20: mol_type = other DNA
tttcacttccattgcttcct

SEQ ID NO: 31287 - DNA, 20 bp, synthetic construct
  misc_feature 1..20: note = chemically synthesized
  source 1..20: mol_type = other DNA
tctgatatttcttccaaata

SEQ ID NO: 31288 - DNA, 20 bp, synthetic construct
  misc_feature 1..20: note = chemically synthesized
  source 1..20: mol_type = other DNA
ttccaaatacagactgttgt

SEQ ID NO: 31289 - DNA, 20 bp, synthetic construct
  misc_feature 1..20: note = chemically synthesized
  source 1..20: mol_type = other DNA
ctgatcatcactcacacatc

SEQ ID NO: 31290 - DNA, 20 bp, synthetic construct
  misc_feature 1..20: note = chemically synthesized
  source 1..20: mol_type = other DNA
tgatcatcactcacacatcc

SEQ ID NO: 31291 - DNA, 20 bp, synthetic construct
  misc_feature 1..20: note = chemically synthesized
  source 1..20: mol_type = other DNA
tgttacatctccacgccact

SEQ ID NO: 31292 - DNA, 20 bp, synthetic construct
  misc_feature 1..20: note = chemically synthesized
  source 1..20: mol_type = other DNA
atctccacgccactgagtat

SEQ ID NO: 31293 - DNA, 20 bp, synthetic construct
  misc_feature 1..20: note = chemically synthesized
  source 1..20: mol_type = other DNA
tctccacgccactgagtatc

SEQ ID NO: 31294 - DNA, 20 bp, synthetic construct
  misc_feature 1..20: note = chemically synthesized
  source 1..20: mol_type = other DNA
ctccacgccactgagtatca

SEQ ID NO: 31295 - DNA, 20 bp, synthetic construct
  misc_feature 1..20: note = chemically synthesized
  source 1..20: mol_type = other DNA
aacctgccccaatattcacg

SEQ ID NO: 31296 - DNA, 20 bp, synthetic construct
  misc_feature 1..20: note = chemically synthesized
  source 1..20: mol_type = other DNA
acctgccccaatattcacgt

SEQ ID NO: 31297 - DNA, 20 bp, synthetic construct
  misc_feature 1..20: note = chemically synthesized
  source 1..20: mol_type = other DNA
ggttcttttctattttccct

SEQ ID NO: 31298 - DNA, 20 bp, synthetic construct
  misc_feature 1..20: note = chemically synthesized
  source 1..20: mol_type = other DNA
tttctattttccctaagcgt

SEQ ID NO: 31299 - DNA, 20 bp, synthetic construct
  misc_feature 1..20: note = chemically synthesized
  source 1..20: mol_type = other DNA
ccctaagcgtcggccaactt

SEQ ID NO: 31300 - DNA, 20 bp, synthetic construct
  misc_feature 1..20: note = chemically synthesized
  source 1..20: mol_type = other DNA
gtcggccaactttagaaata

SEQ ID NO: 31301 - DNA, 20 bp, synthetic construct
  misc_feature 1..20: note = chemically synthesized
  source 1..20: mol_type = other DNA
tcggccaactttagaaataa

SEQ ID NO: 31302 - DNA, 20 bp, synthetic construct
  misc_feature 1..20: note = chemically synthesized
  source 1..20: mol_type = other DNA
cggccaactttagaaataaa

SEQ ID NO: 31303 - DNA, 20 bp, synthetic construct
  misc_feature 1..20: note = chemically synthesized
  source 1..20: mol_type = other DNA
caactttagaaataaaggga

SEQ ID NO: 31304 - DNA, 20 bp, synthetic construct
  misc_feature 1..20: note = chemically synthesized
  source 1..20: mol_type = other DNA
actttagaaataaagggaca

SEQ ID NO: 31305 - DNA, 20 bp, synthetic construct
  misc_feature 1..20: note = chemically synthesized
  source 1..20: mol_type = other DNA
aataaagggacagagtacaa

SEQ ID NO: 31306 - DNA, 20 bp, synthetic construct
  misc_feature 1..20: note = chemically synthesized
  source 1..20: mol_type = other DNA
taaagggacagagtacaaaa

SEQ ID NO: 31307 - DNA, 20 bp, synthetic construct
  misc_feature 1..20: note = chemically synthesized
  source 1..20: mol_type = other DNA
aagggacagagtacaaaaga

SEQ ID NO: 31308 - DNA, 20 bp, synthetic construct
  misc_feature 1..20: note = chemically synthesized
  source 1..20: mol_type = other DNA
tacaaaagagagaaatttta

SEQ ID NO: 31309 - DNA, 20 bp, synthetic construct
  misc_feature 1..20: note = chemically synthesized
  source 1..20: mol_type = other DNA
aaagagagaaattttaaagc

SEQ ID NO: 31310 - DNA, 20 bp, synthetic construct
  misc_feature 1..20: note = chemically synthesized
  source 1..20: mol_type = other DNA
aagagagaaattttaaagcc

SEQ ID NO: 31311 - DNA, 20 bp, synthetic construct
  misc_feature 1..20: note = chemically synthesized
  source 1..20: mol_type = other DNA
aaattttaaagccgggcatc

SEQ ID NO: 31312 - DNA, 20 bp, synthetic construct
  misc_feature 1..20: note = chemically synthesized
  source 1..20: mol_type = other DNA
aattttaaagccgggcatcc

SEQ ID NO: 31313 - DNA, 20 bp, synthetic construct
  misc_feature 1..20: note = chemically synthesized
  source 1..20: mol_type = other DNA
attttaaagccgggcatccg

SEQ ID NO: 31314 - DNA, 20 bp, synthetic construct
  misc_feature 1..20: note = chemically synthesized
  source 1..20: mol_type = other DNA
ttttaaagccgggcatccgg

SEQ ID NO: 31315 - DNA, 20 bp, synthetic construct
  misc_feature 1..20: note = chemically synthesized
  source 1..20: mol_type = other DNA
ttaaagccgggcatccgggg

SEQ ID NO: 31316 - DNA, 20 bp, synthetic construct
  misc_feature 1..20: note = chemically synthesized
  source 1..20: mol_type = other DNA
taaagccgggcatccggggg

SEQ ID NO: 31317 - DNA, 20 bp, synthetic construct
  misc_feature 1..20: note = chemically synthesized
  source 1..20: mol_type = other DNA
ccgggggaggcatcacattt

SEQ ID NO: 31318 - DNA, 20 bp, synthetic construct
  misc_feature 1..20: note = chemically synthesized
  source 1..20: mol_type = other DNA
ggggaggcatcacatttcgg

SEQ ID NO: 31319 - DNA, 20 bp, synthetic construct
  misc_feature 1..20: note = chemically synthesized
  source 1..20: mol_type = other DNA
gggaggcatcacatttcggt

SEQ ID NO: 31320 - DNA, 20 bp, synthetic construct
  misc_feature 1..20: note = chemically synthesized
  source 1..20: mol_type = other DNA
taggttccgtgatgccccac

SEQ ID NO: 31321 - DNA, 20 bp, synthetic construct
  misc_feature 1..20: note = chemically synthesized
  source 1..20: mol_type = other DNA
gccccacaagccacaaaaac

SEQ ID NO: 31322 - DNA, 20 bp, synthetic construct
  misc_feature 1..20: note = chemically synthesized
  source 1..20: mol_type = other DNA
cacaagccacaaaaaccagc

SEQ ID NO: 31323 - DNA, 20 bp, synthetic construct
  misc_feature 1..20: note = chemically synthesized
  source 1..20: mol_type = other DNA
aaaaaccagcaagtttgtat

SEQ ID NO: 31324 - DNA, 20 bp, synthetic construct
  misc_feature 1..20: note = chemically synthesized
  source 1..20: mol_type = other DNA
aaaaccagcaagtttgtatt

SEQ ID NO: 31325 - DNA, 20 bp, synthetic construct
  misc_feature 1..20: note = chemically synthesized
  source 1..20: mol_type = other DNA
aaaccagcaagtttgtatta

SEQ ID NO: 31326 - DNA, 20 bp, synthetic construct
  misc_feature 1..20: note = chemically synthesized
  source 1..20: mol_type = other DNA
ttgtattagggattttcaaa

SEQ ID NO: 31327 - DNA, 20 bp, synthetic construct
  misc_feature 1..20: note = chemically synthesized
  source 1..20: mol_type = other DNA
tgtattagggattttcaaat

SEQ ID NO: 31328 - DNA, 20 bp, synthetic construct
  misc_feature 1..20: note = chemically synthesized
  source 1..20: mol_type = other DNA
gtattagggattttcaaatg

SEQ ID NO: 31329 - DNA, 20 bp, synthetic construct
  misc_feature 1..20: note = chemically synthesized
  source 1..20: mol_type = other DNA
attagggattttcaaatggg

SEQ ID NO: 31330 - DNA, 20 bp, synthetic construct
  misc_feature 1..20: note = chemically synthesized
  source 1..20: mol_type = other DNA
ttagggattttcaaatgggg

SEQ ID NO: 31331 - DNA, 20 bp, synthetic construct
  misc_feature 1..20: note = chemically synthesized
  source 1..20: mol_type = other DNA
gggattttcaaatggggagg

SEQ ID NO: 31332 - DNA, 20 bp, synthetic construct
  misc_feature 1..20: note = chemically synthesized
  source 1..20: mol_type = other DNA
atggggaggcagtgtgcaaa

SEQ ID NO: 31333 - DNA, 20 bp, synthetic construct
  misc_feature 1..20: note = chemically synthesized
  source 1..20: mol_type = other DNA
tggggaggcagtgtgcaaat

SEQ ID NO: 31334 - DNA, 20 bp, synthetic construct
  misc_feature 1..20: note = chemically synthesized
  source 1..20: mol_type = other DNA
aggcagtgtgcaaataggtg

SEQ ID NO: 31335 - DNA, 20 bp, synthetic construct
  misc_feature 1..20: note = chemically synthesized
  source 1..20: mol_type = other DNA
ggcagtgtgcaaataggtgt

SEQ ID NO: 31336 - DNA, 20 bp, synthetic construct
  misc_feature 1..20: note = chemically synthesized
  source 1..20: mol_type = other DNA
gtgcaaataggtgtgggtca

SEQ ID NO: 31337 - DNA, 20 bp, synthetic construct
  misc_feature 1..20: note = chemically synthesized
  source 1..20: mol_type = other DNA
aggtgtgggtcacagacatc

SEQ ID NO: 31338 - DNA, 20 bp, synthetic construct
  misc_feature 1..20: note = chemically synthesized
  source 1..20: mol_type = other DNA
acagacatcaagtactttac

SEQ ID NO: 31339 - DNA, 20 bp, synthetic construct
  misc_feature 1..20: note = chemically synthesized
  source 1..20: mol_type = other DNA
cagacatcaagtactttaca

SEQ ID NO: 31340 - DNA, 20 bp, synthetic construct
  misc_feature 1..20: note = chemically synthesized
  source 1..20: mol_type = other DNA
tcaagtactttacaaggtaa

SEQ ID NO: 31341 - DNA, 20 bp, synthetic construct
  misc_feature 1..20: note = chemically synthesized
  source 1..20: mol_type = other DNA
acaaggtaatagaatatcac

SEQ ID NO: 31342 - DNA, 20 bp, synthetic construct
  misc_feature 1..20: note = chemically synthesized
  source 1..20: mol_type = other DNA
caaggtaatagaatatcaca

SEQ ID NO: 31343 - DNA, 20 bp, synthetic construct
  misc_feature 1..20: note = chemically synthesized
  source 1..20: mol_type = other DNA
gtaatagaatatcacaaggc

SEQ ID NO: 31344 - DNA, 20 bp, synthetic construct
  misc_feature 1..20: note = chemically synthesized
  source 1..20: mol_type = other DNA
atagaatatcacaaggcaag

SEQ ID NO: 31345 - DNA, 20 bp, synthetic construct
  misc_feature 1..20: note = chemically synthesized
  source 1..20: mol_type = other DNA
agaatatcacaaggcaagtg

SEQ ID NO: 31346 - DNA, 20 bp, synthetic construct
  misc_feature 1..20: note = chemically synthesized
  source 1..20: mol_type = other DNA
gaatatcacaaggcaagtgg

SEQ ID NO: 31347 - DNA, 20 bp, synthetic construct
  misc_feature 1..20: note = chemically synthesized
  source 1..20: mol_type = other DNA
tatcacaaggcaagtggagg

SEQ ID NO: 31348 - DNA, 20 bp, synthetic construct
  misc_feature 1..20: note = chemically synthesized
  source 1..20: mol_type = other DNA
atcacaaggcaagtggaggc

SEQ ID NO: 31349 - DNA, 20 bp, synthetic construct
  misc_feature 1..20: note = chemically synthesized
  source 1..20: mol_type = other DNA
tcacaaggcaagtggaggca

SEQ ID NO: 31350 - DNA, 20 bp, synthetic construct
  misc_feature 1..20: note = chemically synthesized
  source 1..20: mol_type = other DNA
aaggcaagtggaggcagggt

SEQ ID NO: 31351 - DNA, 20 bp, synthetic construct
  misc_feature 1..20: note = chemically synthesized
  source 1..20: mol_type = other DNA
gtggaggcagggtgagatca

SEQ ID NO: 31352 - DNA, 20 bp, synthetic construct
  misc_feature 1..20: note = chemically synthesized
  source 1..20: mol_type = other DNA
tggaggcagggtgagatcac

SEQ ID NO: 31353 - DNA, 20 bp, synthetic construct
  misc_feature 1..20: note = chemically synthesized
  source 1..20: mol_type = other DNA
agggtgagatcacaggacca

SEQ ID NO: 31354 - DNA, 20 bp, synthetic construct
  misc_feature 1..20: note = chemically synthesized
  source 1..20: mol_type = other DNA
gggtgagatcacaggaccac

SEQ ID NO: 31355 - DNA, 20 bp, synthetic construct
  misc_feature 1..20: note = chemically synthesized
  source 1..20: mol_type = other DNA
gatcacaggaccacaggacc

SEQ ID NO: 31356 - DNA, 20 bp, synthetic construct
  misc_feature 1..20: note = chemically synthesized
  source 1..20: mol_type = other DNA
atcacaggaccacaggaccg

SEQ ID NO: 31357 - DNA, 20 bp, synthetic construct
  misc_feature 1..20: note = chemically synthesized
  source 1..20: mol_type = other DNA
cgaaattaaaattgctaatg

SEQ ID NO: 31358 - DNA, 20 bp, synthetic construct
  misc_feature 1..20: note = chemically synthesized
  source 1..20: mol_type = other DNA
taaaattgctaatgaagttt

SEQ ID NO: 31359 - DNA, 20 bp, synthetic construct
  misc_feature 1..20: note = chemically synthesized
  source 1..20: mol_type = other DNA
aaaattgctaatgaagtttc

SEQ ID NO: 31360 - DNA, 20 bp, synthetic construct
  misc_feature 1..20: note = chemically synthesized
  source 1..20: mol_type = other DNA
tgtcattgataacatcttat

SEQ ID NO: 31361 - DNA, 20 bp, synthetic construct
  misc_feature 1..20: note = chemically synthesized
  source 1..20: mol_type = other DNA
gtcattgataacatcttatc

SEQ ID NO: 31362 - DNA, 20 bp, synthetic construct
  misc_feature 1..20: note = chemically synthesized
  source 1..20: mol_type = other DNA
cattgataacatcttatcag

SEQ ID NO: 31363 - DNA, 20 bp, synthetic construct
  misc_feature 1..20: note = chemically synthesized
  source 1..20: mol_type = other DNA
gataacatcttatcaggaga

SEQ ID NO: 31364 - DNA, 20 bp, synthetic construct
  misc_feature 1..20: note = chemically synthesized
  source 1..20: mol_type = other DNA
ataacatcttatcaggagac

SEQ ID NO: 31365 - DNA, 20 bp, synthetic construct
  misc_feature 1..20: note = chemically synthesized
  source 1..20: mol_type = other DNA
taacatcttatcaggagaca

SEQ ID NO: 31366 - DNA, 20 bp, synthetic construct
  misc_feature 1..20: note = chemically synthesized
  source 1..20: mol_type = other DNA
ttatcaggagacagggtttt

SEQ ID NO: 31367 - DNA, 20 bp, synthetic construct
  misc_feature 1..20: note = chemically synthesized
  source 1..20: mol_type = other DNA
tatcaggagacagggttttt

SEQ ID NO: 31368 - DNA, 20 bp, synthetic construct
  misc_feature 1..20: note = chemically synthesized
  source 1..20: mol_type = other DNA
acagggtttttaggatcaac

SEQ ID NO: 31369 - DNA, 20 bp, synthetic construct
  misc_feature 1..20: note = chemically synthesized
  source 1..20: mol_type = other DNA
ctggtctgaccaaaatttat

SEQ ID NO: 31370 - DNA, 20 bp, synthetic construct
  misc_feature 1..20: note = chemically synthesized
  source 1..20: mol_type = other DNA
tggtctgaccaaaatttatt

SEQ ID NO: 31371 - DNA, 20 bp, synthetic construct
  misc_feature 1..20: note = chemically synthesized
  source 1..20: mol_type = other DNA
tctgaccaaaatttattagg

SEQ ID NO: 31372 - DNA, 20 bp, synthetic construct
  misc_feature 1..20: note = chemically synthesized
  source 1..20: mol_type = other DNA
ctgaccaaaatttattaggc

SEQ ID NO: 31373 - DNA, 20 bp, synthetic construct
  misc_feature 1..20: note = chemically synthesized
  source 1..20: mol_type = other DNA
gggaatttcctcttcctaat

SEQ ID NO: 31374 - DNA, 20 bp, synthetic construct
  misc_feature 1..20: note = chemically synthesized
  source 1..20: mol_type = other DNA
tttcctcttcctaataagcc

SEQ ID NO: 31375 - DNA, 20 bp, synthetic construct
  misc_feature 1..20: note = chemically synthesized
  source 1..20: mol_type = other DNA
ttcctcttcctaataagcct

SEQ ID NO: 31376 - DNA, 20 bp, synthetic construct
  misc_feature 1..20: note = chemically synthesized
  source 1..20: mol_type = other DNA
cctcttcctaataagcctgg

SEQ ID NO: 31377 - DNA, 20 bp, synthetic construct
  misc_feature 1..20: note = chemically synthesized
  source 1..20: mol_type = other DNA
taataagcctgggagcgctg

SEQ ID NO: 31378 - DNA, 20 bp, synthetic construct
  misc_feature 1..20: note = chemically synthesized
  source 1..20: mol_type = other DNA
aataagcctgggagcgctgt

SEQ ID NO: 31379 - DNA, 20 bp, synthetic construct
  misc_feature 1..20: note = chemically synthesized
  source 1..20: mol_type = other DNA
taagcctgggagcgctgtgg

SEQ ID NO: 31380 - DNA, 20 bp, synthetic construct
  misc_feature 1..20: note = chemically synthesized
  source 1..20: mol_type = other DNA
ctgggagcgctgtgggagac

SEQ ID NO: 31381 - DNA, 20 bp, synthetic construct
  misc_feature 1..20: note = chemically synthesized
  source 1..20: mol_type = other DNA
tgggagcgctgtgggagact

SEQ ID NO: 31382 - DNA, 20 bp, synthetic construct
  misc_feature 1..20: note = chemically synthesized
  source 1..20: mol_type = other DNA
gggagcgctgtgggagactg

SEQ ID NO: 31383 - DNA, 20 bp, synthetic construct
  misc_feature 1..20: note = chemically synthesized
  source 1..20: mol_type = other DNA
tggggtctatttcacccctg

SEQ ID NO: 31384 - DNA, 20 bp, synthetic construct
  misc_feature 1..20: note = chemically synthesized
  source 1..20: mol_type = other DNA
acccctgcagtctcgaccat

SEQ ID NO: 31385 - DNA, 20 bp, synthetic construct
  misc_feature 1..20: note = chemically synthesized
  source 1..20: mol_type = other DNA
ccctgcagtctcgaccataa

SEQ ID NO: 31386 - DNA, 20 bp, synthetic construct
  misc_feature 1..20: note = chemically synthesized
  source 1..20: mol_type = other DNA
gcagtctcgaccataagaga

SEQ ID NO: 31387 - DNA, 20 bp, synthetic construct
  misc_feature 1..20: note = chemically synthesized
  source 1..20: mol_type = other DNA
cagtctcgaccataagagac

SEQ ID NO: 31388 - DNA, 20 bp, synthetic construct
  misc_feature 1..20: note = chemically synthesized
  source 1..20: mol_type = other DNA
ccataagagacaggcgcacc

SEQ ID NO: 31389 - DNA, 20 bp, synthetic construct
  misc_feature 1..20: note = chemically synthesized
  source 1..20: mol_type = other DNA
ataagagacaggcgcacctg

SEQ ID NO: 31390 - DNA, 20 bp, synthetic construct
  misc_feature 1..20: note = chemically synthesized
  source 1..20: mol_type = other DNA
taagagacaggcgcacctgg

SEQ ID NO: 31391 - DNA, 20 bp, synthetic construct
  misc_feature 1..20: note = chemically synthesized
  source 1..20: mol_type = other DNA
aagagacaggcgcacctgga

SEQ ID NO: 31392 - DNA, 20 bp, synthetic construct
  misc_feature 1..20: note = chemically synthesized
  source 1..20: mol_type = other DNA
agagacaggcgcacctggag

SEQ ID NO: 31393 - DNA, 20 bp, synthetic construct
  misc_feature 1..20: note = chemically synthesized
  source 1..20: mol_type = other DNA
gagacaggcgcacctggagg

SEQ ID NO: 31394 - DNA, 20 bp, synthetic construct
  misc_feature 1..20: note = chemically synthesized
  source 1..20: mol_type = other DNA
agacaggcgcacctggaggg

SEQ ID NO: 31395 - DNA, 20 bp, synthetic construct
  misc_feature 1..20: note = chemically synthesized
  source 1..20: mol_type = other DNA
cctggaggggggctgtttat

SEQ ID NO: 31396 - DNA, 20 bp, synthetic construct
  misc_feature 1..20: note = chemically synthesized
  source 1..20: mol_type = other DNA
gtttataagcctatacctcc

SEQ ID NO: 31397 - DNA, 20 bp, synthetic construct
  misc_feature 1..20: note = chemically synthesized
  source 1..20: mol_type = other DNA
ctggctcgtattctctttct

SEQ ID NO: 31398 - DNA, 20 bp, synthetic construct
  misc_feature 1..20: note = chemically synthesized
  source 1..20: mol_type = other DNA
tggctcgtattctctttctc

SEQ ID NO: 31399 - DNA, 20 bp, synthetic construct
  misc_feature 1..20: note = chemically synthesized
  source 1..20: mol_type = other DNA
ggctcgtattctctttctca

SEQ ID NO: 31400 - DNA, 20 bp, synthetic construct
  misc_feature 1..20: note = chemically synthesized
  source 1..20: mol_type = other DNA
tctcagggatgttccatgct

SEQ ID NO: 31401 - DNA, 20 bp, synthetic construct
  misc_feature 1..20: note = chemically synthesized
  source 1..20: mol_type = other DNA
ggatgttccatgctgagaaa

SEQ ID NO: 31402 - DNA, 20 bp, synthetic construct
  misc_feature 1..20: note = chemically synthesized
  source 1..20: mol_type = other DNA
ccatgctgagaaaaagaatt

SEQ ID NO: 31403 - DNA, 20 bp, synthetic construct
  misc_feature 1..20: note = chemically synthesized
  source 1..20: mol_type = other DNA
tttctcccatttgcttttga

SEQ ID NO: 31404 - DNA, 20 bp, synthetic construct
  misc_feature 1..20: note = chemically synthesized
  source 1..20: mol_type = other DNA
ctcccatttgcttttgaaag

SEQ ID NO: 31405 - DNA, 20 bp, synthetic construct
  misc_feature 1..20: note = chemically synthesized
  source 1..20: mol_type = other DNA
cccatttgcttttgaaagaa

SEQ ID NO: 31406 - DNA, 20 bp, synthetic construct
  misc_feature 1..20: note = chemically synthesized
  source 1..20: mol_type = other DNA
cttttgaaagaagagaaata

SEQ ID NO: 31407 - DNA, 20 bp, synthetic construct
  misc_feature 1..20: note = chemically synthesized
  source 1..20: mol_type = other DNA
aaatatggctctgttctgcc

SEQ ID NO: 31408 - DNA, 20 bp, synthetic construct
  misc_feature 1..20: note = chemically synthesized
  source 1..20: mol_type = other DNA
ctctgttctgcctggctcac

SEQ ID NO: 31409 - DNA, 20 bp, synthetic construct
  misc_feature 1..20: note = chemically synthesized
  source 1..20: mol_type = other DNA
tgttctgcctggctcaccag

SEQ ID NO: 31410 - DNA, 20 bp, synthetic construct
  misc_feature 1..20: note = chemically synthesized
  source 1..20: mol_type = other DNA
ctgcctggctcaccagcagt

SEQ ID NO: 31411 - DNA, 20 bp, synthetic construct
  misc_feature 1..20: note = chemically synthesized
  source 1..20: mol_type = other DNA
gcctggctcaccagcagtca

SEQ ID NO: 31412 - DNA, 20 bp, synthetic construct
  misc_feature 1..20: note = chemically synthesized
  source 1..20: mol_type = other DNA
ctcaccagcagtcagagttt

SEQ ID NO: 31413 - DNA, 20 bp, synthetic construct
  misc_feature 1..20: note = chemically synthesized
  source 1..20: mol_type = other DNA
tcaccagcagtcagagttta

SEQ ID NO: 31414 - DNA, 20 bp, synthetic construct
  misc_feature 1..20: note = chemically synthesized
  source 1..20: mol_type = other DNA
tgttatcctgttcttttttc

SEQ ID NO: 31415 - DNA, 20 bp, synthetic construct
  misc_feature 1..20: note = chemically synthesized
  source 1..20: mol_type = other DNA
gttatcctgttcttttttca

SEQ ID NO: 31416 - DNA, 20 bp, synthetic construct
  misc_feature 1..20: note = chemically synthesized
  source 1..20: mol_type = other DNA
cacatgctgtacaatttgtg

SEQ ID NO: 31417 - DNA, 20 bp, synthetic construct
  misc_feature 1..20: note = chemically synthesized
  source 1..20: mol_type = other DNA
tgcagttaatgcaattatta

SEQ ID NO: 31418 - DNA, 20 bp, synthetic construct
  misc_feature 1..20: note = chemically synthesized
  source 1..20: mol_type = other DNA
gcagttaatgcaattattac

SEQ ID NO: 31419 - DNA, 20 bp, synthetic construct
  misc_feature 1..20: note = chemically synthesized
  source 1..20: mol_type = other DNA
cagttaatgcaattattaca

SEQ ID NO: 31420 - DNA, 20 bp, synthetic construct
  misc_feature 1..20: note = chemically synthesized
  source 1..20: mol_type = other DNA
tgcaattattacagggtcct

SEQ ID NO: 31421 - DNA, 20 bp, synthetic construct
  misc_feature 1..20: note = chemically synthesized
  source 1..20: mol_type = other DNA
gcaattattacagggtcctg

SEQ ID NO: 31422 - DNA, 20 bp, synthetic construct
  misc_feature 1..20: note = chemically synthesized
  source 1..20: mol_type = other DNA
gaggcaatatacatcctcct

SEQ ID NO: 31423 - DNA, 20 bp, synthetic construct
  misc_feature 1..20: note = chemically synthesized
  source 1..20: mol_type = other DNA
tatacatcctcctcagctga

SEQ ID NO: 31424 - DNA, 20 bp, synthetic construct
  misc_feature 1..20: note = chemically synthesized
  source 1..20: mol_type = other DNA
atacatcctcctcagctgac

SEQ ID NO: 31425 - DNA, 20 bp, synthetic construct
  misc_feature 1..20: note = chemically synthesized
  source 1..20: mol_type = other DNA
cctcctcagctgacaggatt

SEQ ID NO: 31426 - DNA, 20 bp, synthetic construct
  misc_feature 1..20: note = chemically synthesized
  source 1..20: mol_type = other DNA
tcctcagctgacaggattaa

SEQ ID NO: 31427 - DNA, 20 bp, synthetic construct
  misc_feature 1..20: note = chemically synthesized
  source 1..20: mol_type = other DNA
ctgacaggattaagagatta

SEQ ID NO: 31428 - DNA, 20 bp, synthetic construct
  misc_feature 1..20: note = chemically synthesized
  source 1..20: mol_type = other DNA
aggattaagagattaaagta

SEQ ID NO: 31429 - DNA, 20 bp, synthetic construct
  misc_feature 1..20: note = chemically synthesized
  source 1..20: mol_type = other DNA
ttaagagattaaagtaaaga

SEQ ID NO: 31430 - DNA, 20 bp, synthetic construct
  misc_feature 1..20: note = chemically synthesized
  source 1..20: mol_type = other DNA
taagagattaaagtaaagac

SEQ ID NO: 31431 - DNA, 20 bp, synthetic construct
  misc_feature 1..20: note = chemically synthesized
  source 1..20: mol_type = other DNA
taaagacaggcataaatcac

SEQ ID NO: 31432 - DNA, 20 bp, synthetic construct
  misc_feature 1..20: note = chemically synthesized
  source 1..20: mol_type = other DNA
aaagacaggcataaatcaca

SEQ ID NO: 31433 - DNA, 20 bp, synthetic construct
  misc_feature 1..20: note = chemically synthesized
  source 1..20: mol_type = other DNA
taaatcacaaggatattgac

SEQ ID NO: 31434 - DNA, 20 bp, synthetic construct
  misc_feature 1..20: note = chemically synthesized
  source 1..20: mol_type = other DNA
aaatcacaaggatattgact

SEQ ID NO: 31435 - DNA, 20 bp, synthetic construct
  misc_feature 1..20: note = chemically synthesized
  source 1..20: mol_type = other DNA
aatcacaaggatattgactg

SEQ ID NO: 31436 - DNA, 20 bp, synthetic construct
  misc_feature 1..20: note = chemically synthesized
  source 1..20: mol_type = other DNA
cacaaggatattgactgggg

SEQ ID NO: 31437 - DNA, 20 bp, synthetic construct
  misc_feature 1..20: note = chemically synthesized
  source 1..20: mol_type = other DNA
atattgactggggaagtgat

SEQ ID NO: 31438 - DNA, 20 bp, synthetic construct
  misc_feature 1..20: note = chemically synthesized
  source 1..20: mol_type = other DNA
aaatctttacaatttatgtt

SEQ ID NO: 31439 - DNA, 20 bp, synthetic construct
  misc_feature 1..20: note = chemically synthesized
  source 1..20: mol_type = other DNA
atctttacaatttatgttta

SEQ ID NO: 31440 - DNA, 20 bp, synthetic construct
  misc_feature 1..20: note = chemically synthesized
  source 1..20: mol_type = other DNA
caatttatgtttagagattg

SEQ ID NO: 31441 - DNA, 20 bp, synthetic construct
  misc_feature 1..20: note = chemically synthesized
  source 1..20: mol_type = other DNA
tatgtttagagattgcagta

SEQ ID NO: 31442 - DNA, 20 bp, synthetic construct
  misc_feature 1..20: note = chemically synthesized
  source 1..20: mol_type = other DNA
tttagagattgcagtaaaga

SEQ ID NO: 31443 - DNA, 20 bp, synthetic construct
  misc_feature 1..20: note = chemically synthesized
  source 1..20: mol_type = other DNA
ttagagattgcagtaaagac

SEQ ID NO: 31444 - DNA, 20 bp, synthetic construct
  misc_feature 1..20: note = chemically synthesized
  source 1..20: mol_type = other DNA
attgcagtaaagacaggcat

SEQ ID NO: 31445 - DNA, 20 bp, synthetic construct
  misc_feature 1..20: note = chemically synthesized
  source 1..20: mol_type = other DNA
acaggcataagaaattacaa

SEQ ID NO: 31446 - DNA, 20 bp, synthetic construct
  misc_feature 1..20: note = chemically synthesized
  source 1..20: mol_type = other DNA
aaattacaaaagtattaatt

SEQ ID NO: 31447 - DNA, 20 bp, synthetic construct
  misc_feature 1..20: note = chemically synthesized
  source 1..20: mol_type = other DNA
aattacaaaagtattaattt

SEQ ID NO: 31448 - DNA, 20 bp, synthetic construct
  misc_feature 1..20: note = chemically synthesized
  source 1..20: mol_type = other DNA
attacaaaagtattaatttg

SEQ ID NO: 31449 - DNA, 20 bp, synthetic construct
  misc_feature 1..20: note = chemically synthesized
  source 1..20: mol_type = other DNA
caatccacgaacttctgcca

SEQ ID NO: 31450 - DNA, 20 bp, synthetic construct
  misc_feature 1..20: note = chemically synthesized
  source 1..20: mol_type = other DNA
acgaacttctgccatggctt

SEQ ID NO: 31451 - DNA, 20 bp, synthetic construct
  misc_feature 1..20: note = chemically synthesized
  source 1..20: mol_type = other DNA
cttcagctgatccctccgtt

SEQ ID NO: 31452 - DNA, 20 bp, synthetic construct
  misc_feature 1..20: note = chemically synthesized
  source 1..20: mol_type = other DNA
tcagctgatccctccgtttg

SEQ ID NO: 31453 - DNA, 20 bp, synthetic construct
  misc_feature 1..20: note = chemically synthesized
  source 1..20: mol_type = other DNA
gatccctccgtttggagtcc

SEQ ID NO: 31454 - DNA, 20 bp, synthetic construct
  misc_feature 1..20: note = chemically synthesized
  source 1..20: mol_type = other DNA
ccagacttcccgcaacaact

SEQ ID NO: 31455 - DNA, 20 bp, synthetic construct
  misc_feature 1..20: note = chemically synthesized
  source 1..20: mol_type = other DNA
cccgcaacaactgagaactc

SEQ ID NO: 31456 - DNA, 20 bp, synthetic construct
  misc_feature 1..20: note = chemically synthesized
  source 1..20: mol_type = other DNA
cgcaacaactgagaactctg

SEQ ID NO: 31457 - DNA, 20 bp, synthetic construct
  misc_feature 1..20: note = chemically synthesized
  source 1..20: mol_type = other DNA
gcaacaactgagaactctgg

SEQ ID NO: 31458 - DNA, 20 bp, synthetic construct
  misc_feature 1..20: note = chemically synthesized
  source 1..20: mol_type = other DNA
caacaactgagaactctgga

SEQ ID NO: 31459 - DNA, 20 bp, synthetic construct
  misc_feature 1..20: note = chemically synthesized
  source 1..20: mol_type = other DNA
ccacccttcttatatctctt

SEQ ID NO: 31460 - DNA, 20 bp, synthetic construct
  misc_feature 1..20: note = chemically synthesized
  source 1..20: mol_type = other DNA
cacccttcttatatctctta

SEQ ID NO: 31461 - DNA, 20 bp, synthetic construct
  misc_feature 1..20: note = chemically synthesized
  source 1..20: mol_type = other DNA
cccttcttatatctcttaag

SEQ ID NO: 31462 - DNA, 20 bp, synthetic construct
  misc_feature 1..20: note = chemically synthesized
  source 1..20: mol_type = other DNA
atctcttaaggagctgtgtt

SEQ ID NO: 31463 - DNA, 20 bp, synthetic construct
  misc_feature 1..20: note = chemically synthesized
  source 1..20: mol_type = other DNA
cttaaggagctgtgttcaga

SEQ ID NO: 31464 - DNA, 20 bp, synthetic construct
  misc_feature 1..20: note = chemically synthesized
  source 1..20: mol_type = other DNA
atggttacatttcgcttgct

SEQ ID NO: 31465 - DNA, 20 bp, synthetic construct
  misc_feature 1..20: note = chemically synthesized
  source 1..20: mol_type = other DNA
ttacatttcgcttgctgagc

SEQ ID NO: 31466 - DNA, 20 bp, synthetic construct
  misc_feature 1..20: note = chemically synthesized
  source 1..20: mol_type = other DNA
agactgcattttcattatcc

SEQ ID NO: 31467 - DNA, 20 bp, synthetic construct
  misc_feature 1..20: note = chemically synthesized
  source 1..20: mol_type = other DNA
gactgcattttcattatcct

SEQ ID NO: 31468 - DNA, 20 bp, synthetic construct
  misc_feature 1..20: note = chemically synthesized
  source 1..20: mol_type = other DNA
tatcctgggctaaaatcaat

SEQ ID NO: 31469 - DNA, 20 bp, synthetic construct
  misc_feature 1..20: note = chemically synthesized
  source 1..20: mol_type = other DNA
gctaaaatcaattggtattt

SEQ ID NO: 31470 - DNA, 20 bp, synthetic construct
  misc_feature 1..20: note = chemically synthesized
  source 1..20: mol_type = other DNA
aaatcaattggtatttaagt

SEQ ID NO: 31471 - DNA, 20 bp, synthetic construct
  misc_feature 1..20: note = chemically synthesized
  source 1..20: mol_type = other DNA
atcaattggtatttaagtta

SEQ ID NO: 31472 - DNA, 20 bp, synthetic construct
  misc_feature 1..20: note = chemically synthesized
  source 1..20: mol_type = other DNA
ggtatttaagttagagcaaa

SEQ ID NO: 31473 - DNA, 20 bp, synthetic construct
  misc_feature 1..20: note = chemically synthesized
  source 1..20: mol_type = other DNA
gtatttaagttagagcaaaa

SEQ ID NO: 31474 - DNA, 20 bp, synthetic construct
  misc_feature 1..20: note = chemically synthesized
  source 1..20: mol_type = other DNA
tatttaagttagagcaaaaa

SEQ ID NO: 31475 - DNA, 20 bp, synthetic construct
  misc_feature 1..20: note = chemically synthesized
  source 1..20: mol_type = other DNA
aagggttctaaccctattta

SEQ ID NO: 31476 - DNA, 20 bp, synthetic construct
  misc_feature 1..20: note = chemically synthesized
  source 1..20: mol_type = other DNA
ggttctaaccctatttacag

SEQ ID NO: 31477 - DNA, 20 bp, synthetic construct
  misc_feature 1..20: note = chemically synthesized
  source 1..20: mol_type = other DNA
cagcacacatacacttacat

SEQ ID NO: 31478 - DNA, 20 bp, synthetic construct
  misc_feature 1..20: note = chemically synthesized
  source 1..20: mol_type = other DNA
acatacacttacattagaat

SEQ ID NO: 31479 - DNA, 20 bp, synthetic construct
  misc_feature 1..20: note = chemically synthesized
  source 1..20: mol_type = other DNA
cttacattagaattggcttt

SEQ ID NO: 31480 - DNA, 20 bp, synthetic construct
  misc_feature 1..20: note = chemically synthesized
  source 1..20: mol_type = other DNA
ttacattagaattggcttta

SEQ ID NO: 31481 - DNA, 20 bp, synthetic construct
  misc_feature 1..20: note = chemically synthesized
  source 1..20: mol_type = other DNA
tacattagaattggctttaa

SEQ ID NO: 31482 - DNA, 20 bp, synthetic construct
  misc_feature 1..20: note = chemically synthesized
  source 1..20: mol_type = other DNA
ttccactgattaccttctat

SEQ ID NO: 31483 - DNA, 20 bp, synthetic construct
  misc_feature 1..20: note = chemically synthesized
  source 1..20: mol_type = other DNA
ctgattaccttctatgagcc

SEQ ID NO: 31484 - DNA, 20 bp, synthetic construct
  misc_feature 1..20: note = chemically synthesized
  source 1..20: mol_type = other DNA
tctatgagccaagactgcca

SEQ ID NO: 31485 - DNA, 20 bp, synthetic construct
  misc_feature 1..20: note = chemically synthesized
  source 1..20: mol_type = other DNA
agccaagactgccatagtct

SEQ ID NO: 31486 - DNA, 20 bp, synthetic construct
  misc_feature 1..20: note = chemically synthesized
  source 1..20: mol_type = other DNA
ccatagtctcagccttcatg

SEQ ID NO: 31487 - DNA, 20 bp, synthetic construct
  misc_feature 1..20: note = chemically synthesized
  source 1..20: mol_type = other DNA
ctcagccttcatgcagctta

SEQ ID NO: 31488 - DNA, 20 bp, synthetic construct
  misc_feature 1..20: note = chemically synthesized
  source 1..20: mol_type = other DNA
tcagccttcatgcagcttat

SEQ ID NO: 31489 - DNA, 20 bp, synthetic construct
  misc_feature 1..20: note = chemically synthesized
  source 1..20: mol_type = other DNA
ccttcatgcagcttataggc

SEQ ID NO: 31490 - DNA, 20 bp, synthetic construct
  misc_feature 1..20: note = chemically synthesized
  source 1..20: mol_type = other DNA
cagcttataggctagcaaaa

SEQ ID NO: 31491 - DNA, 20 bp, synthetic construct
  misc_feature 1..20: note = chemically synthesized
  source 1..20: mol_type = other DNA
ttataggctagcaaaaaagc

SEQ ID NO: 31492 - DNA, 20 bp, synthetic construct
  misc_feature 1..20: note = chemically synthesized
  source 1..20: mol_type = other DNA
aggctagcaaaaaagccaga

SEQ ID NO: 31493 - DNA, 20 bp, synthetic construct
  misc_feature 1..20: note = chemically synthesized
  source 1..20: mol_type = other DNA
aaaaaagccagacagtgcac

SEQ ID NO: 31494 - DNA, 20 bp, synthetic construct
  misc_feature 1..20: note = chemically synthesized
  source 1..20: mol_type = other DNA
gacagtgcacaagaactcac

SEQ ID NO: 31495 - DNA, 20 bp, synthetic construct
  misc_feature 1..20: note = chemically synthesized
  source 1..20: mol_type = other DNA
caagaactcacaagtgtgtt

SEQ ID NO: 31496 - DNA, 20 bp, synthetic construct
  misc_feature 1..20: note = chemically synthesized
  source 1..20: mol_type = other DNA
acaagtgtgttgagtgttgc

SEQ ID NO: 31497 - DNA, 20 bp, synthetic construct
  misc_feature 1..20: note = chemically synthesized
  source 1..20: mol_type = other DNA
aagtgtgttgagtgttgcaa

SEQ ID NO: 31498 - DNA, 20 bp, synthetic construct
  misc_feature 1..20: note = chemically synthesized
  source 1..20: mol_type = other DNA
gtgttgagtgttgcaagagt

SEQ ID NO: 31499 - DNA, 20 bp, synthetic construct
  misc_feature 1..20: note = chemically synthesized
  source 1..20: mol_type = other DNA
agtgttgcaagagtaagttt

SEQ ID NO: 31500 - DNA, 20 bp, synthetic construct
  misc_feature 1..20: note = chemically synthesized
  source 1..20: mol_type = other DNA
gtgttgcaagagtaagtttc

SEQ ID NO: 31501 - DNA, 20 bp, synthetic construct
  misc_feature 1..20: note = chemically synthesized
  source 1..20: mol_type = other DNA
tgttgcaagagtaagtttca

SEQ ID NO: 31502 - DNA, 20 bp, synthetic construct
  misc_feature 1..20: note = chemically synthesized
  source 1..20: mol_type = other DNA
gttgcaagagtaagtttcag

SEQ ID NO: 31503 - DNA, 20 bp, synthetic construct
  misc_feature 1..20: note = chemically synthesized
  source 1..20: mol_type = other DNA
ggggctctccatgacttacc

SEQ ID NO: 31504 - DNA, 20 bp, synthetic construct
  misc_feature 1..20: note = chemically synthesized
  source 1..20: mol_type = other DNA
tctccatgacttacctggtt

SEQ ID NO: 31505 - DNA, 20 bp, synthetic construct
  misc_feature 1..20: note = chemically synthesized
  source 1..20: mol_type = other DNA
ctttaactttttttttcctc

SEQ ID NO: 31506 - DNA, 20 bp, synthetic construct
  misc_feature 1..20: note = chemically synthesized
  source 1..20: mol_type = other DNA
tttaactttttttttcctct

SEQ ID NO: 31507 - DNA, 20 bp, synthetic construct
  misc_feature 1..20: note = chemically synthesized
  source 1..20: mol_type = other DNA
ttttttttcctctgggtgta

SEQ ID NO: 31508 - DNA, 20 bp, synthetic construct
  misc_feature 1..20: note = chemically synthesized
  source 1..20: mol_type = other DNA
tttcctctgggtgtaaagtg

SEQ ID NO: 31509 - DNA, 20 bp, synthetic construct
  misc_feature 1..20: note = chemically synthesized
  source 1..20: mol_type = other DNA
tcctctgggtgtaaagtgaa

SEQ ID NO: 31510 - DNA, 20 bp, synthetic construct
  misc_feature 1..20: note = chemically synthesized
  source 1..20: mol_type = other DNA
ctgggtgtaaagtgaagaga

SEQ ID NO: 31511 - DNA, 20 bp, synthetic construct
  misc_feature 1..20: note = chemically synthesized
  source 1..20: mol_type = other DNA
taaagtgaagagatggcaat

SEQ ID NO: 31512 - DNA, 20 bp, synthetic construct
  misc_feature 1..20: note = chemically synthesized
  source 1..20: mol_type = other DNA
aagtgaagagatggcaatca

SEQ ID NO: 31513 - DNA, 20 bp, synthetic construct
  misc_feature 1..20: note = chemically synthesized
  source 1..20: mol_type = other DNA
tgaagagatggcaatcagag

SEQ ID NO: 31514 - DNA, 20 bp, synthetic construct
  misc_feature 1..20: note = chemically synthesized
  source 1..20: mol_type = other DNA
gaagagatggcaatcagagt

SEQ ID NO: 31515 - DNA, 20 bp, synthetic construct
  misc_feature 1..20: note = chemically synthesized
  source 1..20: mol_type = other DNA
ttccattgtgtcattgtgaa

SEQ ID NO: 31516 - DNA, 20 bp, synthetic construct
  misc_feature 1..20: note = chemically synthesized
  source 1..20: mol_type = other DNA
gtgtcattgtgaaaagatgc

SEQ ID NO: 31517 - DNA, 20 bp, synthetic construct
  misc_feature 1..20: note = chemically synthesized
  source 1..20: mol_type = other DNA
tgtcattgtgaaaagatgct

SEQ ID NO: 31518 - DNA, 20 bp, synthetic construct
  misc_feature 1..20: note = chemically synthesized
  source 1..20: mol_type = other DNA
attgtgaaaagatgctgggc

SEQ ID NO: 31519 - DNA, 20 bp, synthetic construct
  misc_feature 1..20: note = chemically synthesized
  source 1..20: mol_type = other DNA
ctgggctggcgtgtctcctg

SEQ ID NO: 31520 - DNA, 20 bp, synthetic construct
  misc_feature 1..20: note = chemically synthesized
  source 1..20: mol_type = other DNA
tgggctggcgtgtctcctga

SEQ ID NO: 31521 - DNA, 20 bp, synthetic construct
  misc_feature 1..20: note = chemically synthesized
  source 1..20: mol_type = other DNA
ttcatgcattcgcacaaata

SEQ ID NO: 31522 - DNA, 20 bp, synthetic construct
  misc_feature 1..20: note = chemically synthesized
  source 1..20: mol_type = other DNA
acaaatatagatgtgttcca

SEQ ID NO: 31523 - DNA, 20 bp, synthetic construct
  misc_feature 1..20: note = chemically synthesized
  source 1..20: mol_type = other DNA
tatagatgtgttccatagat

SEQ ID NO: 31524 - DNA, 20 bp, synthetic construct
  misc_feature 1..20: note = chemically synthesized
  source 1..20: mol_type = other DNA
atagatgtgttccatagatg

SEQ ID NO: 31525 - DNA, 20 bp, synthetic construct
  misc_feature 1..20: note = chemically synthesized
  source 1..20: mol_type = other DNA
gatgtgttccatagatgagg

SEQ ID NO: 31526 - DNA, 20 bp, synthetic construct
  misc_feature 1..20: note = chemically synthesized
  source 1..20: mol_type = other DNA
tgttccatagatgaggcaga

SEQ ID NO: 31527 - DNA, 20 bp, synthetic construct
  misc_feature 1..20: note = chemically synthesized
  source 1..20: mol_type = other DNA
tccatagatgaggcagatag

SEQ ID NO: 31528 - DNA, 20 bp, synthetic construct
  misc_feature 1..20: note = chemically synthesized
  source 1..20: mol_type = other DNA
catagatgaggcagatagca

SEQ ID NO: 31529 - DNA, 20 bp, synthetic construct
  misc_feature 1..20: note = chemically synthesized
  source 1..20: mol_type = other DNA
atagatgaggcagatagcag

SEQ ID NO: 31530 - DNA, 20 bp, synthetic construct
  misc_feature 1..20: note = chemically synthesized
  source 1..20: mol_type = other DNA
atagcagaggcttctgccta

SEQ ID NO: 31531 - DNA, 20 bp, synthetic construct
  misc_feature 1..20: note = chemically synthesized
  source 1..20: mol_type = other DNA
cagaggcttctgcctacagc

SEQ ID NO: 31532 - DNA, 20 bp, synthetic construct
  misc_feature 1..20: note = chemically synthesized
  source 1..20: mol_type = other DNA
agaggcttctgcctacagca

SEQ ID NO: 31533 - DNA, 20 bp, synthetic construct
  misc_feature 1..20: note = chemically synthesized
  source 1..20: mol_type = other DNA
gcttctgcctacagcaaggc

SEQ ID NO: 31534 - DNA, 20 bp, synthetic construct
  misc_feature 1..20: note = chemically synthesized
  source 1..20: mol_type = other DNA
tgcctacagcaaggctagtt

SEQ ID NO: 31535 - DNA, 20 bp, synthetic construct
  misc_feature 1..20: note = chemically synthesized
  source 1..20: mol_type = other DNA
cctacagcaaggctagtttg

SEQ ID NO: 31536 - DNA, 20 bp, synthetic construct
  misc_feature 1..20: note = chemically synthesized
  source 1..20: mol_type = other DNA
tacagcaaggctagtttgga

SEQ ID NO: 31537 - DNA, 20 bp, synthetic construct
  misc_feature 1..20: note = chemically synthesized
  source 1..20: mol_type = other DNA
acagcaaggctagtttggag

SEQ ID NO: 31538 - DNA, 20 bp, synthetic construct
  misc_feature 1..20: note = chemically synthesized
  source 1..20: mol_type = other DNA
cagcaaggctagtttggaga

SEQ ID NO: 31539 - DNA, 20 bp, synthetic construct
  misc_feature 1..20: note = chemically synthesized
  source 1..20: mol_type = other DNA
tttggagagggttttgctgt

SEQ ID NO: 31540 - DNA, 20 bp, synthetic construct
  misc_feature 1..20: note = chemically synthesized
  source 1..20: mol_type = other DNA
ttggagagggttttgctgtc

SEQ ID NO: 31541 - DNA, 20 bp, synthetic construct
  misc_feature 1..20: note = chemically synthesized
  source 1..20: mol_type = other DNA
tggagagggttttgctgtca

SEQ ID NO: 31542 - DNA, 20 bp, synthetic construct
  misc_feature 1..20: note = chemically synthesized
  source 1..20: mol_type = other DNA
gagggttttgctgtcagggt

SEQ ID NO: 31543 - DNA, 20 bp, synthetic construct
  misc_feature 1..20: note = chemically synthesized
  source 1..20: mol_type = other DNA
tggacccacacacctcttca

SEQ ID NO: 31544 - DNA, 20 bp, synthetic construct
  misc_feature 1..20: note = chemically synthesized
  source 1..20: mol_type = other DNA
atgctttttcttttttttcc

SEQ ID NO: 31545 - DNA, 20 bp, synthetic construct
  misc_feature 1..20: note = chemically synthesized
  source 1..20: mol_type = other DNA
gctttttcttttttttccca

SEQ ID NO: 31546 - DNA, 20 bp, synthetic construct
  misc_feature 1..20: note = chemically synthesized
  source 1..20: mol_type = other DNA
ttttttttcccagagtttga

SEQ ID NO: 31547 - DNA, 20 bp, synthetic construct
  misc_feature 1..20: note = chemically synthesized
  source 1..20: mol_type = other DNA
tttttttcccagagtttgaa

SEQ ID NO: 31548 - DNA, 20 bp, synthetic construct
  misc_feature 1..20: note = chemically synthesized
  source 1..20: mol_type = other DNA
ttttttcccagagtttgaaa

SEQ ID NO: 31549 - DNA, 20 bp, synthetic construct
  misc_feature 1..20: note = chemically synthesized
  source 1..20: mol_type = other DNA
cccagagtttgaaagggaaa

SEQ ID NO: 31550 - DNA, 20 bp, synthetic construct
  misc_feature 1..20: note = chemically synthesized
  source 1..20: mol_type = other DNA
cagagtttgaaagggaaatg

SEQ ID NO: 31551 - DNA, 20 bp, synthetic construct
  misc_feature 1..20: note = chemically synthesized
  source 1..20: mol_type = other DNA
tgaaagggaaatggagtctc

SEQ ID NO: 31552 - DNA, 20 bp, synthetic construct
  misc_feature 1..20: note = chemically synthesized
  source 1..20: mol_type = other DNA
gggaaatggagtctcaagtt

SEQ ID NO: 31553 - DNA, 20 bp, synthetic construct
  misc_feature 1..20: note = chemically synthesized
  source 1..20: mol_type = other DNA
ggaaatggagtctcaagttc

SEQ ID NO: 31554 - DNA, 20 bp, synthetic construct
  misc_feature 1..20: note = chemically synthesized
  source 1..20: mol_type = other DNA
gaaatggagtctcaagttca

SEQ ID NO: 31555 - DNA, 20 bp, synthetic construct
  misc_feature 1..20: note = chemically synthesized
  source 1..20: mol_type = other DNA
aatggagtctcaagttcagg

SEQ ID NO: 31556 - DNA, 20 bp, synthetic construct
  misc_feature 1..20: note = chemically synthesized
  source 1..20: mol_type = other DNA
atggagtctcaagttcaggg

SEQ ID NO: 31557 - DNA, 20 bp, synthetic construct
  misc_feature 1..20: note = chemically synthesized
  source 1..20: mol_type = other DNA
tctcaagttcagggaggtta

SEQ ID NO: 31558 - DNA, 20 bp, synthetic construct
  misc_feature 1..20: note = chemically synthesized
  source 1..20: mol_type = other DNA
agttcagggaggttacagtg

SEQ ID NO: 31559 - DNA, 20 bp, synthetic construct
  misc_feature 1..20: note = chemically synthesized
  source 1..20: mol_type = other DNA
tacagtgtagacccacaaat

SEQ ID NO: 31560 - DNA, 20 bp, synthetic construct
  misc_feature 1..20: note = chemically synthesized
  source 1..20: mol_type = other DNA
tgtagacccacaaatcagct

SEQ ID NO: 31561 - DNA, 20 bp, synthetic construct
  misc_feature 1..20: note = chemically synthesized
  source 1..20: mol_type = other DNA
acccacaaatcagctaagta

SEQ ID NO: 31562 - DNA, 20 bp, synthetic construct
  misc_feature 1..20: note = chemically synthesized
  source 1..20: mol_type = other DNA
caaatcagctaagtacagct

SEQ ID NO: 31563 - DNA, 20 bp, synthetic construct
  misc_feature 1..20: note = chemically synthesized
  source 1..20: mol_type = other DNA
aaatcagctaagtacagcta

SEQ ID NO: 31564 - DNA, 20 bp, synthetic construct
  misc_feature 1..20: note = chemically synthesized
  source 1..20: mol_type = other DNA
aatcagctaagtacagctaa

SEQ ID NO: 31565 - DNA, 20 bp, synthetic construct
  misc_feature 1..20: note = chemically synthesized
  source 1..20: mol_type = other DNA
cagctaagtacagctaaggg

SEQ ID NO: 31566 - DNA, 20 bp, synthetic construct
  misc_feature 1..20: note = chemically synthesized
  source 1..20: mol_type = other DNA
gctaagtacagctaagggtg

SEQ ID NO: 31567 - DNA, 20 bp, synthetic construct
  misc_feature 1..20: note = chemically synthesized
  source 1..20: mol_type = other DNA
aagtacagctaagggtggag

SEQ ID NO: 31568 - DNA, 20 bp, synthetic construct
  misc_feature 1..20: note = chemically synthesized
  source 1..20: mol_type = other DNA
ggagaagtctatgcaatatc

SEQ ID NO: 31569 - DNA, 20 bp, synthetic construct
  misc_feature 1..20: note = chemically synthesized
  source 1..20: mol_type = other DNA
ccagcactcttctgattaat

SEQ ID NO: 31570 - DNA, 20 bp, synthetic construct
  misc_feature 1..20: note = chemically synthesized
  source 1..20: mol_type = other DNA
gcactcttctgattaattag

SEQ ID NO: 31571 - DNA, 20 bp, synthetic construct
  misc_feature 1..20: note = chemically synthesized
  source 1..20: mol_type = other DNA
ttagaagtctttaaaattca

SEQ ID NO: 31572 - DNA, 20 bp, synthetic construct
  misc_feature 1..20: note = chemically synthesized
  source 1..20: mol_type = other DNA
ccctaaatgattcatatgtc

SEQ ID NO: 31573 - DNA, 20 bp, synthetic construct
  misc_feature 1..20: note = chemically synthesized
  source 1..20: mol_type = other DNA
atgattcatatgtcaagaca

SEQ ID NO: 31574 - DNA, 20 bp, synthetic construct
  misc_feature 1..20: note = chemically synthesized
  source 1..20: mol_type = other DNA
tcatatgtcaagacacagta

SEQ ID NO: 31575 - DNA, 20 bp, synthetic construct
  misc_feature 1..20: note = chemically synthesized
  source 1..20: mol_type = other DNA
cacagtaaagatattatatg

SEQ ID NO: 31576 - DNA, 20 bp, synthetic construct
  misc_feature 1..20: note = chemically synthesized
  source 1..20: mol_type = other DNA
tggaacatcatacacaaaca

SEQ ID NO: 31577 - DNA, 20 bp, synthetic construct
  misc_feature 1..20: note = chemically synthesized
  source 1..20: mol_type = other DNA
ggaacatcatacacaaacat

SEQ ID NO: 31578 - DNA, 20 bp, synthetic construct
  misc_feature 1..20: note = chemically synthesized
  source 1..20: mol_type = other DNA
tacacaaacataggtccata

SEQ ID NO: 31579 - DNA, 20 bp, synthetic construct
  misc_feature 1..20: note = chemically synthesized
  source 1..20: mol_type = other DNA
ccatatagaaattcttacct

SEQ ID NO: 31580 - DNA, 20 bp, synthetic construct
  misc_feature 1..20: note = chemically synthesized
  source 1..20: mol_type = other DNA
tgctctttaaatcctgctaa

SEQ ID NO: 31581 - DNA, 20 bp, synthetic construct
  misc_feature 1..20: note = chemically synthesized
  source 1..20: mol_type = other DNA
tctttaaatcctgctaatgg

SEQ ID NO: 31582 - DNA, 20 bp, synthetic construct
  misc_feature 1..20: note = chemically synthesized
  source 1..20: mol_type = other DNA
atttgtgtctttgtcaccta

SEQ ID NO: 31583 - DNA, 20 bp, synthetic construct
  misc_feature 1..20: note = chemically synthesized
  source 1..20: mol_type = other DNA
tgtcacctacagtacatttc

SEQ ID NO: 31584 - DNA, 20 bp, synthetic construct
  misc_feature 1..20: note = chemically synthesized
  source 1..20: mol_type = other DNA
ctacagtacatttctggatt

SEQ ID NO: 31585 - DNA, 20 bp, synthetic construct
  misc_feature 1..20: note = chemically synthesized
  source 1..20: mol_type = other DNA
tacagtacatttctggattt

SEQ ID NO: 31586 - DNA, 20 bp, synthetic construct
  misc_feature 1..20: note = chemically synthesized
  source 1..20: mol_type = other DNA
acatttctggatttgggaat

SEQ ID NO: 31587 - DNA, 20 bp, synthetic construct
  misc_feature 1..20: note = chemically synthesized
  source 1..20: mol_type = other DNA
atttgggaatgagtgttctt

SEQ ID NO: 31588 - DNA, 20 bp, synthetic construct
  misc_feature 1..20: note = chemically synthesized
  source 1..20: mol_type = other DNA
ttgggaatgagtgttcttca

SEQ ID NO: 31589 - DNA, 20 bp, synthetic construct
  misc_feature 1..20: note = chemically synthesized
  source 1..20: mol_type = other DNA
tgggaatgagtgttcttcag

SEQ ID NO: 31590 - DNA, 20 bp, synthetic construct
  misc_feature 1..20: note = chemically synthesized
  source 1..20: mol_type = other DNA
ttcagaggatcctcgctgcc

SEQ ID NO: 31591 - DNA, 20 bp, synthetic construct
  misc_feature 1..20: note = chemically synthesized
  source 1..20: mol_type = other DNA
tcagaggatcctcgctgccc

SEQ ID NO: 31592 - DNA, 20 bp, synthetic construct
  misc_feature 1..20: note = chemically synthesized
  source 1..20: mol_type = other DNA
tcgctgcccaggttccctgc

SEQ ID NO: 31593 - DNA, 20 bp, synthetic construct
  misc_feature 1..20: note = chemically synthesized
  source 1..20: mol_type = other DNA
ctgcccaggttccctgccag

SEQ ID NO: 31594 - DNA, 20 bp, synthetic construct
  misc_feature 1..20: note = chemically synthesized
  source 1..20: mol_type = other DNA
tgcccaggttccctgccaga

SEQ ID NO: 31595 - DNA, 20 bp, synthetic construct
  misc_feature 1..20: note = chemically synthesized
  source 1..20: mol_type = other DNA
caggttccctgccagaagga

SEQ ID NO: 31596 - DNA, 20 bp, synthetic construct
  misc_feature 1..20: note = chemically synthesized
  source 1..20: mol_type = other DNA
tggcagggaacctgggcagc

SEQ ID NO: 31597 - DNA, 20 bp, synthetic construct
  misc_feature 1..20: note = chemically synthesized
  source 1..20: mol_type = other DNA
gacacaaatgccaccattag

SEQ ID NO: 31598 - DNA, 20 bp, synthetic construct
  misc_feature 1..20: note = chemically synthesized
  source 1..20: mol_type = other DNA
aattggcagtttactaaggt

SEQ ID NO: 31599 - DNA, 20 bp, synthetic construct
  misc_feature 1..20: note = chemically synthesized
  source 1..20: mol_type = other DNA
tctttactgtgtcttgacat

SEQ ID NO: 31600 - DNA, 20 bp, synthetic construct
  misc_feature 1..20: note = chemically synthesized
  source 1..20: mol_type = other DNA
gggaagacaatatggtttct

SEQ ID NO: 31601 - DNA, 20 bp, synthetic construct
  misc_feature 1..20: note = chemically synthesized
  source 1..20: mol_type = other DNA
aaagacttctaattaatcag

SEQ ID NO: 31602 - DNA, 20 bp, synthetic construct
  misc_feature 1..20: note = chemically synthesized
  source 1..20: mol_type = other DNA
tctaattaatcagaagagtg

SEQ ID NO: 31603 - DNA, 20 bp, synthetic construct
  misc_feature 1..20: note = chemically synthesized
  source 1..20: mol_type = other DNA
tagctgtacttagctgattt

SEQ ID NO: 31604 - DNA, 20 bp, synthetic construct
  misc_feature 1..20: note = chemically synthesized
  source 1..20: mol_type = other DNA
aagcatctatgaagaggtgt

SEQ ID NO: 31605 - DNA, 20 bp, synthetic construct
  misc_feature 1..20: note = chemically synthesized
  source 1..20: mol_type = other DNA
tggaacacatctatatttgt

SEQ ID NO: 31606 - DNA, 20 bp, synthetic construct
  misc_feature 1..20: note = chemically synthesized
  source 1..20: mol_type = other DNA
tgaaaataaagtttaaagat

SEQ ID NO: 31607 - DNA, 20 bp, synthetic construct
  misc_feature 1..20: note = chemically synthesized
  source 1..20: mol_type = other DNA
ccagaggaaaaaaaaagtta

SEQ ID NO: 31608 - DNA, 20 bp, synthetic construct
  misc_feature 1..20: note = chemically synthesized
  source 1..20: mol_type = other DNA
ttgcaacactcaacacactt

SEQ ID NO: 31609 - DNA, 20 bp, synthetic construct
  misc_feature 1..20: note = chemically synthesized
  source 1..20: mol_type = other DNA
agtggaaatttgtcgattga

SEQ ID NO: 31610 - DNA, 20 bp, synthetic construct
  misc_feature 1..20: note = chemically synthesized
  source 1..20: mol_type = other DNA
tgtatgtgtgctgctgtaaa

SEQ ID NO: 31611 - DNA, 20 bp, synthetic construct
  misc_feature 1..20: note = chemically synthesized
  source 1..20: mol_type = other DNA
aataccaattgattttagcc

SEQ ID NO: 31612 - DNA, 20 bp, synthetic construct
  misc_feature 1..20: note = chemically synthesized
  source 1..20: mol_type = other DNA
agctccttaagagatataag

SEQ ID NO: 31613 - DNA, 20 bp, synthetic construct
  misc_feature 1..20: note = chemically synthesized
  source 1..20: mol_type = other DNA
gagatataagaagggtggaa

SEQ ID NO: 31614 - DNA, 20 bp, synthetic construct
  misc_feature 1..20: note = chemically synthesized
  source 1..20: mol_type = other DNA
aagaagggtggaagtgggtg

SEQ ID NO: 31615 - DNA, 20 bp, synthetic construct
  misc_feature 1..20: note = chemically synthesized
  source 1..20: mol_type = other DNA
tgggtgaagggtaggccctc

SEQ ID NO: 31616 - DNA, 20 bp, synthetic construct
  misc_feature 1..20: note = chemically synthesized
  source 1..20: mol_type = other DNA
aagtctgggactccaaacgg

SEQ ID NO: 31617 - DNA, 20 bp, synthetic construct
  misc_feature 1..20: note = chemically synthesized
  source 1..20: mol_type = other DNA
tgaagccatggcagaagttc

SEQ ID NO: 31618 - DNA, 20 bp, synthetic construct
  misc_feature 1..20: note = chemically synthesized
  source 1..20: mol_type = other DNA
tcttaatcctgtcagctgag

SEQ ID NO: 31619 - DNA, 20 bp, synthetic construct
  misc_feature 1..20: note = chemically synthesized
  source 1..20: mol_type = other DNA
tggacaccttgaaaaaagaa

SEQ ID NO: 31620 - DNA, 20 bp, synthetic construct
  misc_feature 1..20: note = chemically synthesized
  source 1..20: mol_type = other DNA
aggataacagcaattgttca

SEQ ID NO: 31621 - DNA, 20 bp, synthetic construct
  misc_feature 1..20: note = chemically synthesized
  source 1..20: mol_type = other DNA
agcaaatgggagaaatatcg

SEQ ID NO: 31622 - DNA, 20 bp, synthetic construct
  misc_feature 1..20: note = chemically synthesized
  source 1..20: mol_type = other DNA
catggaacatccctgagaaa

SEQ ID NO: 31623 - DNA, 20 bp, synthetic construct
  misc_feature 1..20: note = chemically synthesized
  source 1..20: mol_type = other DNA
tctcttatggtcgagactgc

SEQ ID NO: 31624 - DNA, 20 bp, synthetic construct
  misc_feature 1..20: note = chemically synthesized
  source 1..20: mol_type = other DNA
accgaaatgtgatgcctccc

SEQ ID NO: 31625 - DNA, 20 bp, synthetic construct
  misc_feature 1..20: note = chemically synthesized
  source 1..20: mol_type = other DNA
gaaaatagaaaagaacctac

SEQ ID NO: 31626 - DNA, 20 bp, synthetic construct
  misc_feature 1..20: note = chemically synthesized
  source 1..20: mol_type = other DNA
ggcgtggagatgtaacaagc

SEQ ID NO: 31627 - DNA, 20 bp, synthetic construct
  misc_feature 1..20: note = chemically synthesized
  source 1..20: mol_type = other DNA
gatgtaacaagcctggatgt

SEQ ID NO: 31628 - DNA, 20 bp, synthetic construct
  misc_feature 1..20: note = chemically synthesized
  source 1..20: mol_type = other DNA
atttggaagaaatatcagat

SEQ ID NO: 31629 - DNA, 20 bp, synthetic construct
  misc_feature 1..20: note = chemically synthesized
  source 1..20: mol_type = other DNA
taaaagcagcagcatgcagt

SEQ ID NO: 31630 - DNA, 20 bp, synthetic construct
  misc_feature 1..20: note = chemically synthesized
  source 1..20: mol_type = other DNA
aaccccatgctcaccatcaa

SEQ ID NO: 31631 - DNA, 20 bp, synthetic construct
  misc_feature 1..20: note = chemically synthesized
  source 1..20: mol_type = other DNA
catgctcaccatcaacggga

SEQ ID NO: 31632 - DNA, 20 bp, synthetic construct
  misc_feature 1..20: note = chemically synthesized
  source 1..20: mol_type = other DNA
gggattgaatttgagctgct

SEQ ID NO: 31633 - DNA, 20 bp, synthetic construct
  misc_feature 1..20: note = chemically synthesized
  source 1..20: mol_type = other DNA
ttatcttcaattctgtgaaa

SEQ ID NO: 31634 - DNA, 20 bp, synthetic construct
  misc_feature 1..20: note = chemically synthesized
  source 1..20: mol_type = other DNA
tgcaagagaggaaggaaggc

SEQ ID NO: 31635 - DNA, 20 bp, synthetic construct
  misc_feature 1..20: note = chemically synthesized
  source 1..20: mol_type = other DNA
agctttctggcaggcactgg

SEQ ID NO: 31636 - DNA, 20 bp, synthetic construct
  misc_feature 1..20: note = chemically synthesized
  source 1..20: mol_type = other DNA
tgtaactggtggccttagaa

SEQ ID NO: 31637 - DNA, 20 bp, synthetic construct
  misc_feature 1..20: note = chemically synthesized
  source 1..20: mol_type = other DNA
ggtggccttagaagagggtt

SEQ ID NO: 31638 - DNA, 20 bp, synthetic construct
  misc_feature 1..20: note = chemically synthesized
  source 1..20: mol_type = other DNA
cagggttatgtgtttggaac

SEQ ID NO: 31639 - DNA, 20 bp, synthetic construct
  misc_feature 1..20: note = chemically synthesized
  source 1..20: mol_type = other DNA
gccaccaagcaccaagaggt

SEQ ID NO: 31640 - DNA, 20 bp, synthetic construct
  misc_feature 1..20: note = chemically synthesized
  source 1..20: mol_type = other DNA
agcaccaagaggtgtgagtt

SEQ ID NO: 31641 - DNA, 20 bp, synthetic construct
  misc_feature 1..20: note = chemically synthesized
  source 1..20: mol_type = other DNA
aaagaggaaggtgaaaactg

SEQ ID NO: 31642 - DNA, 20 bp, synthetic construct
  misc_feature 1..20: note = chemically synthesized
  source 1..20: mol_type = other DNA
atcccctgagagaaaaagta

SEQ ID NO: 31643 - DNA, 20 bp, synthetic construct
  misc_feature 1..20: note = chemically synthesized
  source 1..20: mol_type = other DNA
cccctcacggccaaaggcat

SEQ ID NO: 31644 - DNA, 20 bp, synthetic construct
  misc_feature 1..20: note = chemically synthesized
  source 1..20: mol_type = other DNA
ccagacattgagctcaagga

SEQ ID NO: 31645 - DNA, 20 bp, synthetic construct
  misc_feature 1..20: note = chemically synthesized
  source 1..20: mol_type = other DNA
gtttgtatgttttctacagt

SEQ ID NO: 31646 - DNA, 20 bp, synthetic construct
  misc_feature 1..20: note = chemically synthesized
  source 1..20: mol_type = other DNA
gttttctacagttcggattt

SEQ ID NO: 31647 - DNA, 20 bp, synthetic construct
  misc_feature 1..20: note = chemically synthesized
  source 1..20: mol_type = other DNA
atgatttcatttcttttcga

SEQ ID NO: 31648 - DNA, 20 bp, synthetic construct
  misc_feature 1..20: note = chemically synthesized
  source 1..20: mol_type = other DNA
tatgcatactttctaaatgc

SEQ ID NO: 31649 - DNA, 20 bp, synthetic construct
  misc_feature 1..20: note = chemically synthesized
  source 1..20: mol_type = other DNA
catcagctctttggcagctt

SEQ ID NO: 31650 - DNA, 20 bp, synthetic construct
  misc_feature 1..20: note = chemically synthesized
  source 1..20: mol_type = other DNA
tttaattctcacctggtccc

SEQ ID NO: 31651 - DNA, 20 bp, synthetic construct
  misc_feature 1..20: note = chemically synthesized
  source 1..20: mol_type = other DNA
ccaggatatggtttacttgt

SEQ ID NO: 31652 - DNA, 20 bp, synthetic construct
  misc_feature 1..20: note = chemically synthesized
  source 1..20: mol_type = other DNA
tgaaggaaagagagagaagt

SEQ ID NO: 31653 - DNA, 20 bp, synthetic construct
  misc_feature 1..20: note = chemically synthesized
  source 1..20: mol_type = other DNA
attttttttttctgtggaaa

SEQ ID NO: 31654 - DNA, 20 bp, synthetic construct
  misc_feature 1..20: note = chemically synthesized
  source 1..20: mol_type = other DNA
ttgcacattatcgcagtagg

SEQ ID NO: 31655 - DNA, 20 bp, synthetic construct
  misc_feature 1..20: note = chemically synthesized
  source 1..20: mol_type = other DNA
tggcttaacccctgaaacct

SEQ ID NO: 31656 - DNA, 20 bp, synthetic construct
  misc_feature 1..20: note = chemically synthesized
  source 1..20: mol_type = other DNA
agacttttgcatatataatt

SEQ ID NO: 31657 - DNA, 20 bp, synthetic construct
  misc_feature 1..20: note = chemically synthesized
  source 1..20: mol_type = other DNA
gcatatataattaaggatct

SEQ ID NO: 31658 - DNA, 20 bp, synthetic construct
  misc_feature 1..20: note = chemically synthesized
  source 1..20: mol_type = other DNA
tggggagatatcctaattat

SEQ ID NO: 31659 - DNA, 20 bp, synthetic construct
  misc_feature 1..20: note = chemically synthesized
  source 1..20: mol_type = other DNA
gaggaagaggctacaaacca

SEQ ID NO: 31660 - DNA, 20 bp, synthetic construct
  misc_feature 1..20: note = chemically synthesized
  source 1..20: mol_type = other DNA
gaggctacaaaccaaggaat

SEQ ID NO: 31661 - DNA, 20 bp, synthetic construct
  misc_feature 1..20: note = chemically synthesized
  source 1..20: mol_type = other DNA
gtagcctctagaagaggaaa

SEQ ID NO: 31662 - DNA, 20 bp, synthetic construct
  misc_feature 1..20: note = chemically synthesized
  source 1..20: mol_type = other DNA
caggaaaacacaatctctca

SEQ ID NO: 31663 - DNA, 20 bp, synthetic construct
  misc_feature 1..20: note = chemically synthesized
  source 1..20: mol_type = other DNA
gcaagaggaaatcagttacg

SEQ ID NO: 31664 - DNA, 20 bp, synthetic construct
  misc_feature 1..20: note = chemically synthesized
  source 1..20: mol_type = other DNA
tcctgtctctggctaatcat

SEQ ID NO: 31665 - DNA, 20 bp, synthetic construct
  misc_feature 1..20: note = chemically synthesized
  source 1..20: mol_type = other DNA
tacatacagacccagagcca

SEQ ID NO: 31666 - DNA, 20 bp, synthetic construct
  misc_feature 1..20: note = chemically synthesized
  source 1..20: mol_type = other DNA
agacccagagccagtgaatc

SEQ ID NO: 31667 - DNA, 20 bp, synthetic construct
  misc_feature 1..20: note = chemically synthesized
  source 1..20: mol_type = other DNA
ttggtggtggggcccagagc

SEQ ID NO: 31668 - DNA, 20 bp, synthetic construct
  misc_feature 1..20: note = chemically synthesized
  source 1..20: mol_type = other DNA
aagcaacttactcaaataca

SEQ ID NO: 31669 - DNA, 20 bp, synthetic construct
  misc_feature 1..20: note = chemically synthesized
  source 1..20: mol_type = other DNA
taattttattactttatctt

SEQ ID NO: 31670 - DNA, 20 bp, synthetic construct
  misc_feature 1..20: note = chemically synthesized
  source 1..20: mol_type = other DNA
attatataatgtttattgat

SEQ ID NO: 31671 - DNA, 20 bp, synthetic construct
  misc_feature 1..20: note = chemically synthesized
  source 1..20: mol_type = other DNA
tataatgtttattgattaga

SEQ ID NO: 31672 - DNA, 20 bp, synthetic construct
  misc_feature 1..20: note = chemically synthesized
  source 1..20: mol_type = other DNA
gtgttcagattcctgacctc

SEQ ID NO: 31673 - DNA, 20 bp, synthetic construct
  misc_feature 1..20: note = chemically synthesized
  source 1..20: mol_type = other DNA
agattagacagcaggcaggg

SEQ ID NO: 31674 - DNA, 20 bp, synthetic construct
  misc_feature 1..20: note = chemically synthesized
  source 1..20: mol_type = other DNA
aagttgcttaaacatgacag

SEQ ID NO: 31675 - DNA, 20 bp, synthetic construct
  misc_feature 1..20: note = chemically synthesized
  source 1..20: mol_type = other DNA
gcttaaacatgacagcagga

SEQ ID NO: 31676 - DNA, 20 bp, synthetic construct
  misc_feature 1..20: note = chemically synthesized
  source 1..20: mol_type = other DNA
acctctgctgaacttcctca

SEQ ID NO: 31677 - DNA, 20 bp, synthetic construct
  misc_feature 1..20: note = chemically synthesized
  source 1..20: mol_type = other DNA
tccataaatccaaccaccgc

SEQ ID NO: 31678 - DNA, 20 bp, synthetic construct
  misc_feature 1..20: note = chemically synthesized
  source 1..20: mol_type = other DNA
caaatttggctgacacagtt

SEQ ID NO: 31679 - DNA, 20 bp, synthetic construct
  misc_feature 1..20: note = chemically synthesized
  source 1..20: mol_type = other DNA
gcactagcacaaaatatttg

SEQ ID NO: 31680 - DNA, 20 bp, synthetic construct
  misc_feature 1..20: note = chemically synthesized
  source 1..20: mol_type = other DNA
acaaaatatttgctgaatga

SEQ ID NO: 31681 - DNA, 20 bp, synthetic construct
  misc_feature 1..20: note = chemically synthesized
  source 1..20: mol_type = other DNA
tatttgctgaatgaaagaat

SEQ ID NO: 31682 - DNA, 20 bp, synthetic construct
  misc_feature 1..20: note = chemically synthesized
  source 1..20: mol_type = other DNA
caaagtcttttactccggtg

SEQ ID NO: 31683 - DNA, 20 bp, synthetic construct
  misc_feature 1..20: note = chemically synthesized
  source 1..20: mol_type = other DNA
actccggtgtggagtgtttt

SEQ ID NO: 31684 - DNA, 20 bp, synthetic construct
  misc_feature 1..20: note = chemically synthesized
  source 1..20: mol_type = other DNA
gaaacacctccccttaactg

SEQ ID NO: 31685 - DNA, 20 bp, synthetic construct
  misc_feature 1..20: note = chemically synthesized
  source 1..20: mol_type = other DNA
ttcagggaagatgtctgttg

SEQ ID NO: 31686 - DNA, 20 bp, synthetic construct
  misc_feature 1..20: note = chemically synthesized
  source 1..20: mol_type = other DNA
ctataccccagatttatttt

SEQ ID NO: 31687 - DNA, 20 bp, synthetic construct
  misc_feature 1..20: note = chemically synthesized
  source 1..20: mol_type = other DNA
ccagatttattttgaggatt

SEQ ID NO: 31688 - DNA, 20 bp, synthetic construct
  misc_feature 1..20: note = chemically synthesized
  source 1..20: mol_type = other DNA
attgcgtattactaaaaaga

SEQ ID NO: 31689 - DNA, 20 bp, synthetic construct
  misc_feature 1..20: note = chemically synthesized
  source 1..20: mol_type = other DNA
caatgggaaggtgtcagagc

SEQ ID NO: 31690 - DNA, 20 bp, synthetic construct
  misc_feature 1..20: note = chemically synthesized
  source 1..20: mol_type = other DNA
ccgtagtggaggggagctct

SEQ ID NO: 31691 - DNA, 20 bp, synthetic construct
  misc_feature 1..20: note = chemically synthesized
  source 1..20: mol_type = other DNA
aattgaaatgaacaaaggca

SEQ ID NO: 31692 - DNA, 20 bp, synthetic construct
  misc_feature 1..20: note = chemically synthesized
  source 1..20: mol_type = other DNA
acagggaagcctctgaacac

SEQ ID NO: 31693 - DNA, 20 bp, synthetic construct
  misc_feature 1..20: note = chemically synthesized
  source 1..20: mol_type = other DNA
cttcaggaaacccaggccca

SEQ ID NO: 31694 - DNA, 20 bp, synthetic construct
  misc_feature 1..20: note = chemically synthesized
  source 1..20: mol_type = other DNA
tttctccttcaaaccactct

SEQ ID NO: 31695 - DNA, 20 bp, synthetic construct
  misc_feature 1..20: note = chemically synthesized
  source 1..20: mol_type = other DNA
gcgtcactcaaactagctga

SEQ ID NO: 31696 - DNA, 20 bp, synthetic construct
  misc_feature 1..20: note = chemically synthesized
  source 1..20: mol_type = other DNA
taggcttatttcaaaaggca

SEQ ID NO: 31697 - DNA, 20 bp, synthetic construct
  misc_feature 1..20: note = chemically synthesized
  source 1..20: mol_type = other DNA
agtgcctgctgtgtgtggtg

SEQ ID NO: 31698 - DNA, 20 bp, synthetic construct
  misc_feature 1..20: note = chemically synthesized
  source 1..20: mol_type = other DNA
taggaaggaacagggcagtg

SEQ ID NO: 31699 - DNA, 20 bp, synthetic construct
  misc_feature 1..20: note = chemically synthesized
  source 1..20: mol_type = other DNA
ctgccctgttccttcctagc

SEQ ID NO: 31700 - DNA, 20 bp, synthetic construct
  misc_feature 1..20: note = chemically synthesized
  source 1..20: mol_type = other DNA
gcctgagtcaggactgagca

SEQ ID NO: 31701 - DNA, 20 bp, synthetic construct
  misc_feature 1..20: note = chemically synthesized
  source 1..20: mol_type = other DNA
gaaataagcctacttttaac

SEQ ID NO: 31702 - DNA, 20 bp, synthetic construct
  misc_feature 1..20: note = chemically synthesized
  source 1..20: mol_type = other DNA
gctggactttgtccctgtgt

SEQ ID NO: 31703 - DNA, 20 bp, synthetic construct
  misc_feature 1..20: note = chemically synthesized
  source 1..20: mol_type = other DNA
agacaattctttcagctagt

SEQ ID NO: 31704 - DNA, 20 bp, synthetic construct
  misc_feature 1..20: note = chemically synthesized
  source 1..20: mol_type = other DNA
cgcagtgaagcagtgggaac

SEQ ID NO: 31705 - DNA, 20 bp, synthetic construct
  misc_feature 1..20: note = chemically synthesized
  source 1..20: mol_type = other DNA
agtgggaaccggaatatcca

SEQ ID NO: 31706 - DNA, 20 bp, synthetic construct
  misc_feature 1..20: note = chemically synthesized
  source 1..20: mol_type = other DNA
tggctttatatcctctgggc

SEQ ID NO: 31707 - DNA, 20 bp, synthetic construct
  misc_feature 1..20: note = chemically synthesized
  source 1..20: mol_type = other DNA
atagaggagagagaaaatgg

SEQ ID NO: 31708 - DNA, 20 bp, synthetic construct
  misc_feature 1..20: note = chemically synthesized
  source 1..20: mol_type = other DNA
atggaagtttctgagaactt

SEQ ID NO: 31709 - DNA, 20 bp, synthetic construct
  misc_feature 1..20: note = chemically synthesized
  source 1..20: mol_type = other DNA
ttctgagaacttcagggtat

SEQ ID NO: 31710 - DNA, 20 bp, synthetic construct
  misc_feature 1..20: note = chemically synthesized
  source 1..20: mol_type = other DNA
ctatttagttaattaaggct

SEQ ID NO: 31711 - DNA, 20 bp, synthetic construct
  misc_feature 1..20: note = chemically synthesized
  source 1..20: mol_type = other DNA
tacgcaattgaaaagtatgt

SEQ ID NO: 31712 - DNA, 20 bp, synthetic construct
  misc_feature 1..20: note = chemically synthesized
  source 1..20: mol_type = other DNA
aggtgctaagcattttagct

SEQ ID NO: 31713 - DNA, 20 bp, synthetic construct
  misc_feature 1..20: note = chemically synthesized
  source 1..20: mol_type = other DNA
cataatcctcaaaataaatc

SEQ ID NO: 31714 - DNA, 20 bp, synthetic construct
  misc_feature 1..20: note = chemically synthesized
  source 1..20: mol_type = other DNA
atagatgacttgattagaag

SEQ ID NO: 31715 - DNA, 20 bp, synthetic construct
  misc_feature 1..20: note = chemically synthesized
  source 1..20: mol_type = other DNA
tgattagaagcagggtatgt

SEQ ID NO: 31716 - DNA, 20 bp, synthetic construct
  misc_feature 1..20: note = chemically synthesized
  source 1..20: mol_type = other DNA
gtatcttaaggcaaggaaaa

SEQ ID NO: 31717 - DNA, 20 bp, synthetic construct
  misc_feature 1..20: note = chemically synthesized
  source 1..20: mol_type = other DNA
gcctagtgcccaggccaggc

SEQ ID NO: 31718 - DNA, 20 bp, synthetic construct
  misc_feature 1..20: note = chemically synthesized
  source 1..20: mol_type = other DNA
ccccacaacagacatcttcc

SEQ ID NO: 31719 - DNA, 20 bp, synthetic construct
  misc_feature 1..20: note = chemically synthesized
  source 1..20: mol_type = other DNA
acagacatcttccctgaatg

SEQ ID NO: 31720 - DNA, 20 bp, synthetic construct
  misc_feature 1..20: note = chemically synthesized
  source 1..20: mol_type = other DNA
ctaatgccctctaactgatg

SEQ ID NO: 31721 - DNA, 20 bp, synthetic construct
  misc_feature 1..20: note = chemically synthesized
  source 1..20: mol_type = other DNA
tctaactgatgctgagtttg

SEQ ID NO: 31722 - DNA, 20 bp, synthetic construct
  misc_feature 1..20: note = chemically synthesized
  source 1..20: mol_type = other DNA
tcagttaaggggaggtgttt

SEQ ID NO: 31723 - DNA, 20 bp, synthetic construct
  misc_feature 1..20: note = chemically synthesized
  source 1..20: mol_type = other DNA
gggaggtgtttctgagtttg

SEQ ID NO: 31724 - DNA, 20 bp, synthetic construct
  misc_feature 1..20: note = chemically synthesized
  source 1..20: mol_type = other DNA
caaacaccttcctaattggt

SEQ ID NO: 31725 - DNA, 20 bp, synthetic construct
  misc_feature 1..20: note = chemically synthesized
  source 1..20: mol_type = other DNA
atcctgaaaacactccacac

SEQ ID NO: 31726 - DNA, 20 bp, synthetic construct
  misc_feature 1..20: note = chemically synthesized
  source 1..20: mol_type = other DNA
agattaatatcgtagatgaa

SEQ ID NO: 31727 - DNA, 20 bp, synthetic construct
  misc_feature 1..20: note = chemically synthesized
  source 1..20: mol_type = other DNA
tgaactgagtctgggctagg

SEQ ID NO: 31728 - DNA, 20 bp, synthetic construct
  misc_feature 1..20: note = chemically synthesized
  source 1..20: mol_type = other DNA
taaaggagcctgtacctaaa

SEQ ID NO: 31729 - DNA, 20 bp, synthetic construct
  misc_feature 1..20: note = chemically synthesized
  source 1..20: mol_type = other DNA
actggcaaagtgaggaagga

SEQ ID NO: 31730 - DNA, 20 bp, synthetic construct
  misc_feature 1..20: note = chemically synthesized
  source 1..20: mol_type = other DNA
gaaggacggggtctggaggg

SEQ ID NO: 31731 - DNA, 20 bp, synthetic construct
  misc_feature 1..20: note = chemically synthesized
  source 1..20: mol_type = other DNA
gacggggtctggagggaaga

SEQ ID NO: 31732 - DNA, 20 bp, synthetic construct
  misc_feature 1..20: note = chemically synthesized
  source 1..20: mol_type = other DNA
gtgcaaaggcacagcacata

SEQ ID NO: 31733 - DNA, 20 bp, synthetic construct
  misc_feature 1..20: note = chemically synthesized
  source 1..20: mol_type = other DNA
tacagaatgcctgcatgctc

SEQ ID NO: 31734 - DNA, 20 bp, synthetic construct
  misc_feature 1..20: note = chemically synthesized
  source 1..20: mol_type = other DNA
caaaactgtgtcagccaaat

SEQ ID NO: 31735 - DNA, 20 bp, synthetic construct
  misc_feature 1..20: note = chemically synthesized
  source 1..20: mol_type = other DNA
ctgagatacccaggcggtgg

SEQ ID NO: 31736 - DNA, 20 bp, synthetic construct
  misc_feature 1..20: note = chemically synthesized
  source 1..20: mol_type = other DNA
cccaggcggtggttggattt

SEQ ID NO: 31737 - DNA, 20 bp, synthetic construct
  misc_feature 1..20: note = chemically synthesized
  source 1..20: mol_type = other DNA
cggtggttggatttatggat

SEQ ID NO: 31738 - DNA, 20 bp, synthetic construct
  misc_feature 1..20: note = chemically synthesized
  source 1..20: mol_type = other DNA
tttatggatctggatttcag

SEQ ID NO: 31739 - DNA, 20 bp, synthetic construct
  misc_feature 1..20: note = chemically synthesized
  source 1..20: mol_type = other DNA
aggggagtgggcagggctag

SEQ ID NO: 31740 - DNA, 20 bp, synthetic construct
  misc_feature 1..20: note = chemically synthesized
  source 1..20: mol_type = other DNA
agggctaggggaatagaact

SEQ ID NO: 31741 - DNA, 20 bp, synthetic construct
  misc_feature 1..20: note = chemically synthesized
  source 1..20: mol_type = other DNA
agggtcatgatgtcagtggt

SEQ ID NO: 31742 - DNA, 20 bp, synthetic construct
  misc_feature 1..20: note = chemically synthesized
  source 1..20: mol_type = other DNA
ggagttgaagtcttggaaga

SEQ ID NO: 31743 - DNA, 20 bp, synthetic construct
  misc_feature 1..20: note = chemically synthesized
  source 1..20: mol_type = other DNA
aaaggttaactccagaggtc

SEQ ID NO: 31744 - DNA, 20 bp, synthetic construct
  misc_feature 1..20: note = chemically synthesized
  source 1..20: mol_type = other DNA
tcttttatttcttcatttta

SEQ ID NO: 31745 - DNA, 20 bp, synthetic construct
  misc_feature 1..20: note = chemically synthesized
  source 1..20: mol_type = other DNA
catttacacaaaagtacaac

SEQ ID NO: 31746 - DNA, 20 bp, synthetic construct
  misc_feature 1..20: note = chemically synthesized
  source 1..20: mol_type = other DNA
aaatgaaataccctatgtat

SEQ ID NO: 31747 - DNA, 20 bp, synthetic construct
  misc_feature 1..20: note = chemically synthesized
  source 1..20: mol_type = other DNA
aaatccttgattcactggct

SEQ ID NO: 31748 - DNA, 20 bp, synthetic construct
  misc_feature 1..20: note = chemically synthesized
  source 1..20: mol_type = other DNA
gtctgtatgtaacaagcttc

SEQ ID NO: 31749 - DNA, 20 bp, synthetic construct
  misc_feature 1..20: note = chemically synthesized
  source 1..20: mol_type = other DNA
tgtgttttcctgccttttcc

SEQ ID NO: 31750 - DNA, 20 bp, synthetic construct
  misc_feature 1..20: note = chemically synthesized
  source 1..20: mol_type = other DNA
atgacacttgtgattacatt

SEQ ID NO: 31751 - DNA, 20 bp, synthetic construct
  misc_feature 1..20: note = chemically synthesized
  source 1..20: mol_type = other DNA
ttaggatacacccaaataat

SEQ ID NO: 31752 - DNA, 20 bp, synthetic construct
  misc_feature 1..20: note = chemically synthesized
  source 1..20: mol_type = other DNA
agataatactcacaggtttc

SEQ ID NO: 31753 - DNA, 20 bp, synthetic construct
  misc_feature 1..20: note = chemically synthesized
  source 1..20: mol_type = other DNA
gttaagccatacatatcttt

SEQ ID NO: 31754 - DNA, 20 bp, synthetic construct
  misc_feature 1..20: note = chemically synthesized
  source 1..20: mol_type = other DNA
tcatctcatcaggtgttacc

SEQ ID NO: 31755 - DNA, 20 bp, synthetic construct
  misc_feature 1..20: note = chemically synthesized
  source 1..20: mol_type = other DNA
catcaggtgttacctagaat

SEQ ID NO: 31756 - DNA, 20 bp, synthetic construct
  misc_feature 1..20: note = chemically synthesized
  source 1..20: mol_type = other DNA
ccatatcctggggaccaggt

SEQ ID NO: 31757 - DNA, 20 bp, synthetic construct
  misc_feature 1..20: note = chemically synthesized
  source 1..20: mol_type = other DNA
actgaagtcacatggagctc

SEQ ID NO: 31758 - DNA, 20 bp, synthetic construct
  misc_feature 1..20: note = chemically synthesized
  source 1..20: mol_type = other DNA
aatgaaatcatatttttctg

SEQ ID NO: 31759 - DNA, 20 bp, synthetic construct
  misc_feature 1..20: note = chemically synthesized
  source 1..20: mol_type = other DNA
aggcactgaaccagctggaa

SEQ ID NO: 31760 - DNA, 20 bp, synthetic construct
  misc_feature 1..20: note = chemically synthesized
  source 1..20: mol_type = other DNA
aaccagctggaaatgaatgc

SEQ ID NO: 31761 - DNA, 20 bp, synthetic construct
  misc_feature 1..20: note = chemically synthesized
  source 1..20: mol_type = other DNA
attttcgcagctgataaaag

SEQ ID NO: 31762 - DNA, 20 bp, synthetic construct
  misc_feature 1..20: note = chemically synthesized
  source 1..20: mol_type = other DNA
aatgtctggagaaagcagct

SEQ ID NO: 31763 - DNA, 20 bp, synthetic construct
  misc_feature 1..20: note = chemically synthesized
  source 1..20: mol_type = other DNA
actctgtactttttctctca

SEQ ID NO: 31764 - DNA, 20 bp, synthetic construct
  misc_feature 1..20: note = chemically synthesized
  source 1..20: mol_type = other DNA
cctgcagctaagattgagaa

SEQ ID NO: 31765 - DNA, 20 bp, synthetic construct
  misc_feature 1..20: note = chemically synthesized
  source 1..20: mol_type = other DNA
cctattttttaaagcacagt

SEQ ID NO: 31766 - DNA, 20 bp, synthetic construct
  misc_feature 1..20: note = chemically synthesized
  source 1..20: mol_type = other DNA
ttctaaggccaccagttaca

SEQ ID NO: 31767 - DNA, 20 bp, synthetic construct
  misc_feature 1..20: note = chemically synthesized
  source 1..20: mol_type = other DNA
acaaagaatggggaaggtta

SEQ ID NO: 31768 - DNA, 20 bp, synthetic construct
  misc_feature 1..20: note = chemically synthesized
  source 1..20: mol_type = other DNA
tggtctaaaattccatttca

SEQ ID NO: 31769 - DNA, 20 bp, synthetic construct
  misc_feature 1..20: note = chemically synthesized
  source 1..20: mol_type = other DNA
tcacagaattgaagataatt

SEQ ID NO: 31770 - DNA, 20 bp, synthetic construct
  misc_feature 1..20: note = chemically synthesized
  source 1..20: mol_type = other DNA
aatcccgttgatggtgagca

SEQ ID NO: 31771 - DNA, 20 bp, synthetic construct
  misc_feature 1..20: note = chemically synthesized
  source 1..20: mol_type = other DNA
gtgagcatggggttcatttt

SEQ ID NO: 31772 - DNA, 20 bp, synthetic construct
  misc_feature 1..20: note = chemically synthesized
  source 1..20: mol_type = other DNA
ttcattttgagagtagaaaa

SEQ ID NO: 31773 - DNA, 20 bp, synthetic construct
  misc_feature 1..20: note = chemically synthesized
  source 1..20: mol_type = other DNA
gtagaaaattggatgcagtg

SEQ ID NO: 31774 - DNA, 20 bp, synthetic construct
  misc_feature 1..20: note = chemically synthesized
  source 1..20: mol_type = other DNA
aattggatgcagtggagaat

SEQ ID NO: 31775 - DNA, 20 bp, synthetic construct
  misc_feature 1..20: note = chemically synthesized
  source 1..20: mol_type = other DNA
tgcagtggagaatcagaatg

SEQ ID NO: 31776 - DNA, 20 bp, synthetic construct
  misc_feature 1..20: note = chemically synthesized
  source 1..20: mol_type = other DNA
attttcaaatatacaaaata

SEQ ID NO: 31777 - DNA, 20 bp, synthetic construct
  misc_feature 1..20: note = chemically synthesized
  source 1..20: mol_type = other DNA
atattgagtctgaaggcaaa

SEQ ID NO: 31778 - DNA, 20 bp, synthetic construct
  misc_feature 1..20: note = chemically synthesized
  source 1..20: mol_type = other DNA
cttgttacatctccacgcca

SEQ ID NO: 31779 - DNA, 20 bp, synthetic construct
  misc_feature 1..20: note = chemically synthesized
  source 1..20: mol_type = other DNA
caactttagaaataaaggga

SEQ ID NO: 31780 - DNA, 20 bp, synthetic construct
  misc_feature 1..20: note = chemically synthesized
  source 1..20: mol_type = other DNA
aaaaccagcaagtttgtatt

SEQ ID NO: 31781 - DNA, 20 bp, synthetic construct
  misc_feature 1..20: note = chemically synthesized
  source 1..20: mol_type = other DNA
gaggcagtgtgcaaataggt

SEQ ID NO: 31782 - DNA, 20 bp, synthetic construct
  misc_feature 1..20: note = chemically synthesized
  source 1..20: mol_type = other DNA
tcaagtactttacaaggtaa

SEQ ID NO: 31783 - DNA, 20 bp, synthetic construct
  misc_feature 1..20: note = chemically synthesized
  source 1..20: mol_type = other DNA
tatcacaaggcaagtggagg

SEQ ID NO: 31784 - DNA, 20 bp, synthetic construct
  misc_feature 1..20: note = chemically synthesized
  source 1..20: mol_type = other DNA
gataacatcttatcaggaga

SEQ ID NO: 31785 - DNA, 20 bp, synthetic construct
  misc_feature 1..20: note = chemically synthesized
  source 1..20: mol_type = other DNA
ttatcaggagacagggtttt

SEQ ID NO: 31786 - DNA, 20 bp, synthetic construct
  misc_feature 1..20: note = chemically synthesized
  source 1..20: mol_type = other DNA
ctgaccaaaatttattaggc

SEQ ID NO: 31787 - DNA, 20 bp, synthetic construct
  misc_feature 1..20: note = chemically synthesized
  source 1..20: mol_type = other DNA
ctgggagcgctgtgggagac

SEQ ID NO: 31788 - DNA, 20 bp, synthetic construct
  misc_feature 1..20: note = chemically synthesized
  source 1..20: mol_type = other DNA
tggctcgtattctctttctc

SEQ ID NO: 31789 - DNA, 20 bp, synthetic construct
  misc_feature 1..20: note = chemically synthesized
  source 1..20: mol_type = other DNA
ggatgttccatgctgagaaa

SEQ ID NO: 31790 - DNA, 20 bp, synthetic construct
  misc_feature 1..20: note = chemically synthesized
  source 1..20: mol_type = other DNA
ctgcctggctcaccagcagt

SEQ ID NO: 31791 - DNA, 20 bp, synthetic construct
  misc_feature 1..20: note = chemically synthesized
  source 1..20: mol_type = other DNA
tgcagttaatgcaattatta

SEQ ID NO: 31792 - DNA, 20 bp, synthetic construct
  misc_feature 1..20: note = chemically synthesized
  source 1..20: mol_type = other DNA
tatacatcctcctcagctga

SEQ ID NO: 31793 - DNA, 20 bp, synthetic construct
  misc_feature 1..20: note = chemically synthesized
  source 1..20: mol_type = other DNA
taaagacaggcataaatcac

SEQ ID NO: 31794 - DNA, 20 bp, synthetic construct
  misc_feature 1..20: note = chemically synthesized
  source 1..20: mol_type = other DNA
cttcagctgatccctccgtt

SEQ ID NO: 31795 - DNA, 20 bp, synthetic construct
  misc_feature 1..20: note = chemically synthesized
  source 1..20: mol_type = other DNA
ggtatttaagttagagcaaa

SEQ ID NO: 31796 - DNA, 20 bp, synthetic construct
  misc_feature 1..20: note = chemically synthesized
  source 1..20: mol_type = other DNA
cagcacacatacacttacat

SEQ ID NO: 31797 - DNA, 20 bp, synthetic construct
  misc_feature 1..20: note = chemically synthesized
  source 1..20: mol_type = other DNA
cacaagaactcacaagtgtg

SEQ ID NO: 31798 - DNA, 20 bp, synthetic construct
  misc_feature 1..20: note = chemically synthesized
  source 1..20: mol_type = other DNA
acaagtgtgttgagtgttgc

SEQ ID NO: 31799 - DNA, 20 bp, synthetic construct
  misc_feature 1..20: note = chemically synthesized
  source 1..20: mol_type = other DNA
cctttaactttttttttcct

SEQ ID NO: 31800 - DNA, 20 bp, synthetic construct
  misc_feature 1..20: note = chemically synthesized
  source 1..20: mol_type = other DNA
taaagtgaagagatggcaat

SEQ ID NO: 31801 - DNA, 20 bp, synthetic construct
  misc_feature 1..20: note = chemically synthesized
  source 1..20: mol_type = other DNA
tacagcaaggctagtttgga

SEQ ID NO: 31802 - DNA, 20 bp, synthetic construct
  misc_feature 1..20: note = chemically synthesized
  source 1..20: mol_type = other DNA
tttggagagggttttgctgt

SEQ ID NO: 31803 - DNA, 20 bp, synthetic construct
  misc_feature 1..20: note = chemically synthesized
  source 1..20: mol_type = other DNA
atgctttttcttttttttcc

SEQ ID NO: 31804 - DNA, 20 bp, synthetic construct
  misc_feature 1..20: note = chemically synthesized
  source 1..20: mol_type = other DNA
cccagagtttgaaagggaaa

SEQ ID NO: 31805 - DNA, 20 bp, synthetic construct
  misc_feature 1..20: note = chemically synthesized
  source 1..20: mol_type = other DNA
caaatcagctaagtacagct

SEQ ID NO: 31806 - DNA, 20 bp, synthetic construct
  misc_feature 1..20: note = chemically synthesized
  source 1..20: mol_type = other DNA
ttgtcacctacagtacattt

SEQ ID NO: 31807 - DNA, 20 bp, synthetic construct
  misc_feature 1..20: note = chemically synthesized
  source 1..20: mol_type = other DNA
tacagtacatttctggattt

SEQ ID NO: 31808 - DNA, 20 bp, synthetic construct
  misc_feature 1..20: note = chemically synthesized
  source 1..20: mol_type = other DNA
gtacatttctggatttggga

SEQ ID NO: 31809 - DNA, 20 bp, synthetic construct
  misc_feature 1..20: note = chemically synthesized
  source 1..20: mol_type = other DNA
ttgggaatgagtgttcttca

SEQ ID NO: 31810 - DNA, 20 bp, synthetic construct
  misc_feature 1..20: note = chemically synthesized
  source 1..20: mol_type = other DNA
aagaacactcattcccaaat

SEQ ID NO: 31811 - DNA, 20 bp, synthetic construct
  misc_feature 1..20: note = chemically synthesized
  source 1..20: mol_type = other DNA
agcaggatttaaagagcatt

SEQ ID NO: 31812 - DNA, 20 bp, synthetic construct
  misc_feature 1..20: note = chemically synthesized
  source 1..20: mol_type = other DNA
aaattggcagtttactaagg

SEQ ID NO: 31813 - DNA, 20 bp, synthetic construct
  misc_feature 1..20: note = chemically synthesized
  source 1..20: mol_type = other DNA
ctttcaaactctgggaaaaa

SEQ ID NO: 31814 - DNA, 20 bp, synthetic construct
  misc_feature 1..20: note = chemically synthesized
  source 1..20: mol_type = other DNA
tcttctttcaaaagcaaatg

SEQ ID NO: 31815 - DNA, 20 bp, synthetic construct
  misc_feature 1..20: note = chemically synthesized
  source 1..20: mol_type = other DNA
ttctcagcatggaacatccc

SEQ ID NO: 31816 - DNA, 20 bp, synthetic construct
  misc_feature 1..20: note = chemically synthesized
  source 1..20: mol_type = other DNA
gcatggaacatccctgagaa

SEQ ID NO: 31817 - DNA, 20 bp, synthetic construct
  misc_feature 1..20: note = chemically synthesized
  source 1..20: mol_type = other DNA
ttggccgacgcttagggaaa

SEQ ID NO: 31818 - DNA, 20 bp, synthetic construct
  misc_feature 1..20: note = chemically synthesized
  source 1..20: mol_type = other DNA
ccaacaacagtctgtatttg

SEQ ID NO: 31819 - DNA, 20 bp, synthetic construct
  misc_feature 1..20: note = chemically synthesized
  source 1..20: mol_type = other DNA
cgggattgaatttgagctgc

SEQ ID NO: 31820 - DNA, 20 bp, synthetic construct
  misc_feature 1..20: note = chemically synthesized
  source 1..20: mol_type = other DNA
actgtgctttaaaaaatagg

SEQ ID NO: 31821 - DNA, 20 bp, synthetic construct
  misc_feature 1..20: note = chemically synthesized
  source 1..20: mol_type = other DNA
tttaaaaaataggaaagaaa

SEQ ID NO: 31822 - DNA, 20 bp, synthetic construct
  misc_feature 1..20: note = chemically synthesized
  source 1..20: mol_type = other DNA
ttggtttttctaatcccctg

SEQ ID NO: 31823 - DNA, 20 bp, synthetic construct
  misc_feature 1..20: note = chemically synthesized
  source 1..20: mol_type = other DNA
tccagacattgagctcaagg

SEQ ID NO: 31824 - DNA, 20 bp, synthetic construct
  misc_feature 1..20: note = chemically synthesized
  source 1..20: mol_type = other DNA
tttctgaataatttgatccg

SEQ ID NO: 31825 - DNA, 20 bp, synthetic construct
  misc_feature 1..20: note = chemically synthesized
  source 1..20: mol_type = other DNA
tatgatttcatttcttttcg

SEQ ID NO: 31826 - DNA, 20 bp, synthetic construct
  misc_feature 1..20: note = chemically synthesized
  source 1..20: mol_type = other DNA
atatgcatactttctaaatg

SEQ ID NO: 31827 - DNA, 20 bp, synthetic construct
  misc_feature 1..20: note = chemically synthesized
  source 1..20: mol_type = other DNA
gggagatttgacttataaga

SEQ ID NO: 31828 - DNA, 20 bp, synthetic construct
  misc_feature 1..20: note = chemically synthesized
  source 1..20: mol_type = other DNA
ggtagcctctagaagaggaa

SEQ ID NO: 31829 - DNA, 20 bp, synthetic construct
  misc_feature 1..20: note = chemically synthesized
  source 1..20: mol_type = other DNA
aatctctcatagagtctcca

SEQ ID NO: 31830 - DNA, 20 bp, synthetic construct
  misc_feature 1..20: note = chemically synthesized
  source 1..20: mol_type = other DNA
agcaagaggaaatcagttac

SEQ ID NO: 31831 - DNA, 20 bp, synthetic construct
  misc_feature 1..20: note = chemically synthesized
  source 1..20: mol_type = other DNA
gtcctgtctctggctaatca

SEQ ID NO: 31832 - DNA, 20 bp, synthetic construct
  misc_feature 1..20: note = chemically synthesized
  source 1..20: mol_type = other DNA
tattaagcaagttcttcgtt

SEQ ID NO: 31833 - DNA, 20 bp, synthetic construct
  misc_feature 1..20: note = chemically synthesized
  source 1..20: mol_type = other DNA
gttgacatattcattaaaat

SEQ ID NO: 31834 - DNA, 20 bp, synthetic construct
  misc_feature 1..20: note = chemically synthesized
  source 1..20: mol_type = other DNA
taaaatgaagaaataaaaga

SEQ ID NO: 31835 - DNA, 20 bp, synthetic construct
  misc_feature 1..20: note = chemically synthesized
  source 1..20: mol_type = other DNA
aattatataatgtttattga

SEQ ID NO: 31836 - DNA, 20 bp, synthetic construct
  misc_feature 1..20: note = chemically synthesized
  source 1..20: mol_type = other DNA
aagattagacagcaggcagg

SEQ ID NO: 31837 - DNA, 20 bp, synthetic construct
  misc_feature 1..20: note = chemically synthesized
  source 1..20: mol_type = other DNA
aacctctgctgaacttcctc

SEQ ID NO: 31838 - DNA, 20 bp, synthetic construct
  misc_feature 1..20: note = chemically synthesized
  source 1..20: mol_type = other DNA
acttcctcatagaatgttca

SEQ ID NO: 31839 - DNA, 20 bp, synthetic construct
  misc_feature 1..20: note = chemically synthesized
  source 1..20: mol_type = other DNA
cacaaaatatttgctgaatg

SEQ ID NO: 31840 - DNA, 20 bp, synthetic construct
  misc_feature 1..20: note = chemically synthesized
  source 1..20: mol_type = other DNA
aggtgtttgattcttcaaac

SEQ ID NO: 31841 - DNA, 20 bp, synthetic construct
  misc_feature 1..20: note = chemically synthesized
  source 1..20: mol_type = other DNA
gggttgggaaaaagacatag

SEQ ID NO: 31842 - DNA, 20 bp, synthetic construct
  misc_feature 1..20: note = chemically synthesized
  source 1..20: mol_type = other DNA
actctgataccctgaagttc

SEQ ID NO: 31843 - DNA, 20 bp, synthetic construct
  misc_feature 1..20: note = chemically synthesized
  source 1..20: mol_type = other DNA
tgcgtcactcaaactagctg

SEQ ID NO: 31844 - DNA, 20 bp, synthetic construct
  misc_feature 1..20: note = chemically synthesized
  source 1..20: mol_type = other DNA
gtaggcttatttcaaaaggc

SEQ ID NO: 31845 - DNA, 20 bp, synthetic construct
  misc_feature 1..20: note = chemically synthesized
  source 1..20: mol_type = other DNA
agcctgagtcaggactgagc

SEQ ID NO: 31846 - DNA, 20 bp, synthetic construct
  misc_feature 1..20: note = chemically synthesized
  source 1..20: mol_type = other DNA
tatccaaagagtggtttgaa

SEQ ID NO: 31847 - DNA, 20 bp, synthetic construct
  misc_feature 1..20: note = chemically synthesized
  source 1..20: mol_type = other DNA
agtcaccacacatagaggag

SEQ ID NO: 31848 - DNA, 20 bp, synthetic construct
  misc_feature 1..20: note = chemically synthesized
  source 1..20: mol_type = other DNA
gaaaatggctgagttaaagg

SEQ ID NO: 31849 - DNA, 20 bp, synthetic construct
  misc_feature 1..20: note = chemically synthesized
  source 1..20: mol_type = other DNA
caagggaaaggtgataaagg

SEQ ID NO: 31850 - DNA, 20 bp, synthetic construct
  misc_feature 1..20: note = chemically synthesized
  source 1..20: mol_type = other DNA
gagagaggttcttgtttcaa

SEQ ID NO: 31851 - DNA, 20 bp, synthetic construct
  misc_feature 1..20: note = chemically synthesized
  source 1..20: mol_type = other DNA
ggtatcttaaggcaaggaaa

SEQ ID NO: 31852 - DNA, 20 bp, synthetic construct
  misc_feature 1..20: note = chemically synthesized
  source 1..20: mol_type = other DNA
ctctaactgatgctgagttt

SEQ ID NO: 31853 - DNA, 20 bp, synthetic construct
  misc_feature 1..20: note = chemically synthesized
  source 1..20: mol_type = other DNA
ggggaggtgtttctgagttt

SEQ ID NO: 31854 - DNA, 20 bp, synthetic construct
  misc_feature 1..20: note = chemically synthesized
  source 1..20: mol_type = other DNA
agtgcaaaggcacagcacat

SEQ ID NO: 31855 - DNA, 20 bp, synthetic construct
  misc_feature 1..20: note = chemically synthesized
  source 1..20: mol_type = other DNA
atacagaatgcctgcatgct

SEQ ID NO: 31856 - DNA, 20 bp, synthetic construct
  misc_feature 1..20: note = chemically synthesized
  source 1..20: mol_type = other DNA
tggtaggagttgaagtcttg

SEQ ID NO: 31857 - DNA, 20 bp, synthetic construct
  misc_feature 1..20: note = chemically synthesized
  source 1..20: mol_type = other DNA
agtcttggaagaaagagtag

SEQ ID NO: 31858 - DNA, 20 bp, synthetic construct
  misc_feature 1..20: note = chemically synthesized
  source 1..20: mol_type = other DNA
gcctgctgtctaatctttac

SEQ ID NO: 31859 - DNA, 20 bp, synthetic construct
  misc_feature 1..20: note = chemically synthesized
  source 1..20: mol_type = other DNA
cagaggtcaggaatctgaac

SEQ ID NO: 31860 - DNA, 20 bp, synthetic construct
  misc_feature 1..20: note = chemically synthesized
  source 1..20: mol_type = other DNA
acacaaaagtacaactgggg

SEQ ID NO: 31861 - DNA, 20 bp, synthetic construct
  misc_feature 1..20: note = chemically synthesized
  source 1..20: mol_type = other DNA
atatgcaaaagtctgtttgg

SEQ ID NO: 31862 - DNA, 20 bp, synthetic construct
  misc_feature 1..20: note = chemically synthesized
  source 1..20: mol_type = other DNA
tatgttcccatcaaggttaa

SEQ ID NO: 31863 - DNA, 20 bp, synthetic construct
  misc_feature 1..20: note = chemically synthesized
  source 1..20: mol_type = other DNA
aaatattagactctttttcc

SEQ ID NO: 31864 - DNA, 20 bp, synthetic construct
  misc_feature 1..20: note = chemically synthesized
  source 1..20: mol_type = other DNA
ttcatctcatcaggtgttac

SEQ ID NO: 31865 - DNA, 20 bp, synthetic construct
  misc_feature 1..20: note = chemically synthesized
  source 1..20: mol_type = other DNA
gttacctagaatcagagtca

SEQ ID NO: 31866 - DNA, 20 bp, synthetic construct
  misc_feature 1..20: note = chemically synthesized
  source 1..20: mol_type = other DNA
accatatcctggggaccagg

SEQ ID NO: 31867 - DNA, 20 bp, synthetic construct
  misc_feature 1..20: note = chemically synthesized
  source 1..20: mol_type = other DNA
tcaggaatttattcttgcat

SEQ ID NO: 31868 - DNA, 20 bp, synthetic construct
  misc_feature 1..20: note = chemically synthesized
  source 1..20: mol_type = other DNA
tatgcatataattctctcga

SEQ ID NO: 31869 - DNA, 20 bp, synthetic construct
  misc_feature 1..20: note = chemically synthesized
  source 1..20: mol_type = other DNA
tttctgtcggatcaaattat

SEQ ID NO: 31870 - DNA, 20 bp, synthetic construct
  misc_feature 1..20: note = chemically synthesized
  source 1..20: mol_type = other DNA
attattcagaaatccgaact

SEQ ID NO: 31871 - DNA, 20 bp, synthetic construct
  misc_feature 1..20: note = chemically synthesized
  source 1..20: mol_type = other DNA
tgtccttgagctcaatgtct

SEQ ID NO: 31872 - DNA, 20 bp, synthetic construct
  misc_feature 1..20: note = chemically synthesized
  source 1..20: mol_type = other DNA
gtactttttctctcagggga

SEQ ID NO: 31873 - DNA, 20 bp, synthetic construct
  misc_feature 1..20: note = chemically synthesized
  source 1..20: mol_type = other DNA
caatgccctgcagctaagat

SEQ ID NO: 31874 - DNA, 20 bp, synthetic construct
  misc_feature 1..20: note = chemically synthesized
  source 1..20: mol_type = other DNA
cttctaaggccaccagttac

SEQ ID NO: 31875 - DNA, 20 bp, synthetic construct
  misc_feature 1..20: note = chemically synthesized
  source 1..20: mol_type = other DNA
agtaactccaccagtgcctg

SEQ ID NO: 31876 - DNA, 20 bp, synthetic construct
  misc_feature 1..20: note = chemically synthesized
  source 1..20: mol_type = other DNA
ccttccttcctctcttgcag

SEQ ID NO: 31877 - DNA, 20 bp, synthetic construct
  misc_feature 1..20: note = chemically synthesized
  source 1..20: mol_type = other DNA
ctggtctaaaattccatttc

SEQ ID NO: 31878 - DNA, 20 bp, synthetic construct
  misc_feature 1..20: note = chemically synthesized
  source 1..20: mol_type = other DNA
gcatggggttcattttgaga

SEQ ID NO: 31879 - DNA, 20 bp, synthetic construct
  misc_feature 1..20: note = chemically synthesized
  source 1..20: mol_type = other DNA
agtagaaaattggatgcagt

SEQ ID NO: 31880 - DNA, 20 bp, synthetic construct
  misc_feature 1..20: note = chemically synthesized
  source 1..20: mol_type = other DNA
aaattggatgcagtggagaa

SEQ ID NO: 31881 - DNA, 20 bp, synthetic construct
  misc_feature 1..20: note = chemically synthesized
  source 1..20: mol_type = other DNA
aatattgagtctgaaggcaa

SEQ ID NO: 31882 - DNA, 20 bp, synthetic construct
  misc_feature 1..20: note = chemically synthesized
  source 1..20: mol_type = other DNA
tccctaagcgtcggccaact

SEQ ID NO: 31883 - DNA, 20 bp, synthetic construct
  misc_feature 1..20: note = chemically synthesized
  source 1..20: mol_type = other DNA
aaagggacagagtacaaaag

SEQ ID NO: 31884 - DNA, 20 bp, synthetic construct
  misc_feature 1..20: note = chemically synthesized
  source 1..20: mol_type = other DNA
atcaagtactttacaaggta

SEQ ID NO: 31885 - DNA, 20 bp, synthetic construct
  misc_feature 1..20: note = chemically synthesized
  source 1..20: mol_type = other DNA
ttctcagggatgttccatgc

SEQ ID NO: 31886 - DNA, 20 bp, synthetic construct
  misc_feature 1..20: note = chemically synthesized
  source 1..20: mol_type = other DNA
gggatgttccatgctgagaa

SEQ ID NO: 31887 - DNA, 20 bp, synthetic construct
  misc_feature 1..20: note = chemically synthesized
  source 1..20: mol_type = other DNA
tcccatttgcttttgaaaga

SEQ ID NO: 31888 - DNA, 20 bp, synthetic construct
  misc_feature 1..20: note = chemically synthesized
  source 1..20: mol_type = other DNA
gattgcagtaaagacaggca

SEQ ID NO: 31889 - DNA, 20 bp, synthetic construct
  misc_feature 1..20: note = chemically synthesized
  source 1..20: mol_type = other DNA
gcagcacacatacacttaca

SEQ ID NO: 31890 - DNA, 20 bp, synthetic construct
  misc_feature 1..20: note = chemically synthesized
  source 1..20: mol_type = other DNA
ctctccatgacttacctggt

SEQ ID NO: 31891 - DNA, 20 bp, synthetic construct
  misc_feature 1..20: note = chemically synthesized
  source 1..20: mol_type = other DNA
attagaagtctttaaaattc

SEQ ID NO: 31892 - DNA, 20 bp, synthetic construct
  misc_feature 1..20: note = chemically synthesized
  source 1..20: mol_type = other DNA
atacacaaacataggtccat

SEQ ID NO: 31893 - DNA, 20 bp, synthetic construct
  misc_feature 1..20: note = chemically synthesized
  source 1..20: mol_type = other DNA
tgtgggtccaaccctgacag

SEQ ID NO: 31894 - DNA, 20 bp, synthetic construct
  misc_feature 1..20: note = chemically synthesized
  source 1..20: mol_type = other DNA
tggtcagaccagttgatcct

SEQ ID NO: 31895 - DNA, 20 bp, synthetic construct
  misc_feature 1..20: note = chemically synthesized
  source 1..20: mol_type = other DNA
cattggctaaagaggaaggt

SEQ ID NO: 31896 - DNA, 20 bp, synthetic construct
  misc_feature 1..20: note = chemically synthesized
  source 1..20: mol_type = other DNA
agaatccatggaaaaggcag

SEQ ID NO: 31897 - DNA, 20 bp, synthetic construct
  misc_feature 1..20: note = chemically synthesized
  source 1..20: mol_type = other DNA
tcctcatagaatgttcatca

SEQ ID NO: 31898 - DNA, 20 bp, synthetic construct
  misc_feature 1..20: note = chemically synthesized
  source 1..20: mol_type = other DNA
tttagtcaggcataaagata

SEQ ID NO: 31899 - DNA, 20 bp, synthetic construct
  misc_feature 1..20: note = chemically synthesized
  source 1..20: mol_type = other DNA
aacacttaggaacaaactgt

SEQ ID NO: 31900 - DNA, 20 bp, synthetic construct
  misc_feature 1..20: note = chemically synthesized
  source 1..20: mol_type = other DNA
gactggtatcttaaggcaag

SEQ ID NO: 31901 - DNA, 20 bp, synthetic construct
  misc_feature 1..20: note = chemically synthesized
  source 1..20: mol_type = other DNA
cagaatatgtccctaatatc

SEQ ID NO: 31902 - DNA, 20 bp, synthetic construct
  misc_feature 1..20: note = chemically synthesized
  source 1..20: mol_type = other DNA
tcctaattggtaggaatcct

SEQ ID NO: 31903 - DNA, 20 bp, synthetic construct
  misc_feature 1..20: note = chemically synthesized
  source 1..20: mol_type = other DNA
tgcctgcatgctctagaatc

SEQ ID NO: 31904 - DNA, 20 bp, synthetic construct
  misc_feature 1..20: note = chemically synthesized
  source 1..20: mol_type = other DNA
aggtcaggaatctgaacaca

SEQ ID NO: 31905 - DNA, 20 bp, synthetic construct
  misc_feature 1..20: note = chemically synthesized
  source 1..20: mol_type = other DNA
aataaacattatataatttt

SEQ ID NO: 31906 - DNA, 20 bp, synthetic construct
  misc_feature 1..20: note = chemically synthesized
  source 1..20: mol_type = other DNA
aaccttggtttcctcatttc

SEQ ID NO: 31907 - DNA, 20 bp, synthetic construct
  misc_feature 1..20: note = chemically synthesized
  source 1..20: mol_type = other DNA
ttaccacaaatttattggct

SEQ ID NO: 31908 - DNA, 20 bp, synthetic construct
  misc_feature 1..20: note = chemically synthesized
  source 1..20: mol_type = other DNA
agtcaggagaaagcacctca

SEQ ID NO: 31909 - DNA, 20 bp, synthetic construct
  misc_feature 1..20: note = chemically synthesized
  source 1..20: mol_type = other DNA
attcagaaatccgaactgta

SEQ ID NO: 31910 - DNA, 20 bp, synthetic construct
  misc_feature 1..20: note = chemically synthesized
  source 1..20: mol_type = other DNA
tttttctctcaggggattag

SEQ ID NO: 31911 - DNA, 20 bp, synthetic construct
  misc_feature 1..20: note = chemically synthesized
  source 1..20: mol_type = other DNA
cgtgatgccccacaagccac

SEQ ID NO: 31912 - DNA, 20 bp, synthetic construct
  misc_feature 1..20: note = chemically synthesized
  source 1..20: mol_type = other DNA
agacacaaatgccaccatta

SEQ ID NO: 31913 - DNA, 20 bp, synthetic construct
  misc_feature 1..20: note = chemically synthesized
  source 1..20: mol_type = other DNA
aaagagcatttcagaaaatt

SEQ ID NO: 31914 - DNA, 20 bp, synthetic construct
  misc_feature 1..20: note = chemically synthesized
  source 1..20: mol_type = other DNA
gtaagaatttctatatggac

SEQ ID NO: 31915 - DNA, 20 bp, synthetic construct
  misc_feature 1..20: note = chemically synthesized
  source 1..20: mol_type = other DNA
gaatcatttagggaagacaa

SEQ ID NO: 31916 - DNA, 20 bp, synthetic construct
  misc_feature 1..20: note = chemically synthesized
  source 1..20: mol_type = other DNA
ctccacccttagctgtactt

SEQ ID NO: 31917 - DNA, 20 bp, synthetic construct
  misc_feature 1..20: note = chemically synthesized
  source 1..20: mol_type = other DNA
tttgtgcgaatgcatgaaaa

SEQ ID NO: 31918 - DNA, 20 bp, synthetic construct
  misc_feature 1..20: note = chemically synthesized
  source 1..20: mol_type = other DNA
caatgacacaatggaaccta

SEQ ID NO: 31919 - DNA, 20 bp, synthetic construct
  misc_feature 1..20: note = chemically synthesized
  source 1..20: mol_type = other DNA
ccagaggaaaaaaaaagtta

SEQ ID NO: 31920 - DNA, 20 bp, synthetic construct
  misc_feature 1..20: note = chemically synthesized
  source 1..20: mol_type = other DNA
ttgtgagttcttgtgcactg

SEQ ID NO: 31921 - DNA, 20 bp, synthetic construct
  misc_feature 1..20: note = chemically synthesized
  source 1..20: mol_type = other DNA
gaaggtaatcagtggaaatt

SEQ ID NO: 31922 - DNA, 20 bp, synthetic construct
  misc_feature 1..20: note = chemically synthesized
  source 1..20: mol_type = other DNA
gtaatcagtggaaatttgtc

SEQ ID NO: 31923 - DNA, 20 bp, synthetic construct
  misc_feature 1..20: note = chemically synthesized
  source 1..20: mol_type = other DNA
tttgctctaacttaaatacc

SEQ ID NO: 31924 - DNA, 20 bp, synthetic construct
  misc_feature 1..20: note = chemically synthesized
  source 1..20: mol_type = other DNA
ctgaagccatggcagaagtt

SEQ ID NO: 31925 - DNA, 20 bp, synthetic construct
  misc_feature 1..20: note = chemically synthesized
  source 1..20: mol_type = other DNA
tggcagaagttcgtggattg

SEQ ID NO: 31926 - DNA, 20 bp, synthetic construct
  misc_feature 1..20: note = chemically synthesized
  source 1..20: mol_type = other DNA
caatctctaaacataaattg

SEQ ID NO: 31927 - DNA, 20 bp, synthetic construct
  misc_feature 1..20: note = chemically synthesized
  source 1..20: mol_type = other DNA
cacttccccagtcaatatcc

SEQ ID NO: 31928 - DNA, 20 bp, synthetic construct
  misc_feature 1..20: note = chemically synthesized
  source 1..20: mol_type = other DNA
ctgcacaaattgtacagcat

SEQ ID NO: 31929 - DNA, 20 bp, synthetic construct
  misc_feature 1..20: note = chemically synthesized
  source 1..20: mol_type = other DNA
gagaatacgagccaggaggt

SEQ ID NO: 31930 - DNA, 20 bp, synthetic construct
  misc_feature 1..20: note = chemically synthesized
  source 1..20: mol_type = other DNA
cccagtctcccacagcgctc

SEQ ID NO: 31931 - DNA, 20 bp, synthetic construct
  misc_feature 1..20: note = chemically synthesized
  source 1..20: mol_type = other DNA
aaaatccctaatacaaactt

SEQ ID NO: 31932 - DNA, 20 bp, synthetic construct
  misc_feature 1..20: note = chemically synthesized
  source 1..20: mol_type = other DNA
aatacaaacttgctggtttt

SEQ ID NO: 31933 - DNA, 20 bp, synthetic construct
  misc_feature 1..20: note = chemically synthesized
  source 1..20: mol_type = other DNA
tgtgatgcctcccccggatg

SEQ ID NO: 31934 - DNA, 20 bp, synthetic construct
  misc_feature 1..20: note = chemically synthesized
  source 1..20: mol_type = other DNA
cctttatttctaaagttggc

SEQ ID NO: 31935 - DNA, 20 bp, synthetic construct
  misc_feature 1..20: note = chemically synthesized
  source 1..20: mol_type = other DNA
acaaaaaatactaagttgta

SEQ ID NO: 31936 - DNA, 20 bp, synthetic construct
  misc_feature 1..20: note = chemically synthesized
  source 1..20: mol_type = other DNA
atggcagagaccatccaaca

SEQ ID NO: 31937 - DNA, 20 bp, synthetic construct
  misc_feature 1..20: note = chemically synthesized
  source 1..20: mol_type = other DNA
gaaccccatgctcaccatca

SEQ ID NO: 31938 - DNA, 20 bp, synthetic construct
  misc_feature 1..20: note = chemically synthesized
  source 1..20: mol_type = other DNA
gccactgggcattacagtgc

SEQ ID NO: 31939 - DNA, 20 bp, synthetic construct
  misc_feature 1..20: note = chemically synthesized
  source 1..20: mol_type = other DNA
ttcgctttgttcaactgccg

SEQ ID NO: 31940 - DNA, 20 bp, synthetic construct
  misc_feature 1..20: note = chemically synthesized
  source 1..20: mol_type = other DNA
gaaggaaggctggagtacag

SEQ ID NO: 31941 - DNA, 20 bp, synthetic construct
  misc_feature 1..20: note = chemically synthesized
  source 1..20: mol_type = other DNA
ttagaagagggttcagggtt

SEQ ID NO: 31942 - DNA, 20 bp, synthetic construct
  misc_feature 1..20: note = chemically synthesized
  source 1..20: mol_type = other DNA
agtataaatggttctgaagc

SEQ ID NO: 31943 - DNA, 20 bp, synthetic construct
  misc_feature 1..20: note = chemically synthesized
  source 1..20: mol_type = other DNA
tctgaagcacttgattcaga

SEQ ID NO: 31944 - DNA, 20 bp, synthetic construct
  misc_feature 1..20: note = chemically synthesized
  source 1..20: mol_type = other DNA
agaaagtagaaagaacagct

SEQ ID NO: 31945 - DNA, 20 bp, synthetic construct
  misc_feature 1..20: note = chemically synthesized
  source 1..20: mol_type = other DNA
ccaagaggtgtgagttctga

SEQ ID NO: 31946 - DNA, 20 bp, synthetic construct
  misc_feature 1..20: note = chemically synthesized
  source 1..20: mol_type = other DNA
gctgagtcactatcaaatca

SEQ ID NO: 31947 - DNA, 20 bp, synthetic construct
  misc_feature 1..20: note = chemically synthesized
  source 1..20: mol_type = other DNA
atcccctgagagaaaaagta

SEQ ID NO: 31948 - DNA, 20 bp, synthetic construct
  misc_feature 1..20: note = chemically synthesized
  source 1..20: mol_type = other DNA
agaaaaagtacagagtttat

SEQ ID NO: 31949 - DNA, 20 bp, synthetic construct
  misc_feature 1..20: note = chemically synthesized
  source 1..20: mol_type = other DNA
attaaggaagcagtattcac

SEQ ID NO: 31950 - DNA, 20 bp, synthetic construct
  misc_feature 1..20: note = chemically synthesized
  source 1..20: mol_type = other DNA
gctcaaggacagaatctgaa

SEQ ID NO: 31951 - DNA, 20 bp, synthetic construct
  misc_feature 1..20: note = chemically synthesized
  source 1..20: mol_type = other DNA
aaagtatactgtgtacaaaa

SEQ ID NO: 31952 - DNA, 20 bp, synthetic construct
  misc_feature 1..20: note = chemically synthesized
  source 1..20: mol_type = other DNA
aaaaagctaacattaagcaa

SEQ ID NO: 31953 - DNA, 20 bp, synthetic construct
  misc_feature 1..20: note = chemically synthesized
  source 1..20: mol_type = other DNA
aacattaagcaagtgtgttt

SEQ ID NO: 31954 - DNA, 20 bp, synthetic construct
  misc_feature 1..20: note = chemically synthesized
  source 1..20: mol_type = other DNA
tgtttgtatgttttctacag

SEQ ID NO: 31955 - DNA, 20 bp, synthetic construct
  misc_feature 1..20: note = chemically synthesized
  source 1..20: mol_type = other DNA
taatttgatccgacagaaaa

SEQ ID NO: 31956 - DNA, 20 bp, synthetic construct
  misc_feature 1..20: note = chemically synthesized
  source 1..20: mol_type = other DNA
ttcagtaccatcagctcttt

SEQ ID NO: 31957 - DNA, 20 bp, synthetic construct
  misc_feature 1..20: note = chemically synthesized
  source 1..20: mol_type = other DNA
tctttggcagcttatgagta

SEQ ID NO: 31958 - DNA, 20 bp, synthetic construct
  misc_feature 1..20: note = chemically synthesized
  source 1..20: mol_type = other DNA
ttctcacctggtccccagga

SEQ ID NO: 31959 - DNA, 20 bp, synthetic construct
  misc_feature 1..20: note = chemically synthesized
  source 1..20: mol_type = other DNA
ggatatggtttacttgtcag

SEQ ID NO: 31960 - DNA, 20 bp, synthetic construct
  misc_feature 1..20: note = chemically synthesized
  source 1..20: mol_type = other DNA
cttgtcagagtagttttatg

SEQ ID NO: 31961 - DNA, 20 bp, synthetic construct
  misc_feature 1..20: note = chemically synthesized
  source 1..20: mol_type = other DNA
tatgaggtgctttctcctga

SEQ ID NO: 31962 - DNA, 20 bp, synthetic construct
  misc_feature 1..20: note = chemically synthesized
  source 1..20: mol_type = other DNA
accttgatgggaacatagaa

SEQ ID NO: 31963 - DNA, 20 bp, synthetic construct
  misc_feature 1..20: note = chemically synthesized
  source 1..20: mol_type = other DNA
ggctcactctgaaagatatg

SEQ ID NO: 31964 - DNA, 20 bp, synthetic construct
  misc_feature 1..20: note = chemically synthesized
  source 1..20: mol_type = other DNA
cattataagagggaggcaaa

SEQ ID NO: 31965 - DNA, 20 bp, synthetic construct
  misc_feature 1..20: note = chemically synthesized
  source 1..20: mol_type = other DNA
ttataagaggagaaaatgtg

SEQ ID NO: 31966 - DNA, 20 bp, synthetic construct
  misc_feature 1..20: note = chemically synthesized
  source 1..20: mol_type = other DNA
cctcgactttagcccagtga

SEQ ID NO: 31967 - DNA, 20 bp, synthetic construct
  misc_feature 1..20: note = chemically synthesized
  source 1..20: mol_type = other DNA
acttcaagataatacatttg

SEQ ID NO: 31968 - DNA, 20 bp, synthetic construct
  misc_feature 1..20: note = chemically synthesized
  source 1..20: mol_type = other DNA
ctaatcattagaatcactcc

SEQ ID NO: 31969 - DNA, 20 bp, synthetic construct
  misc_feature 1..20: note = chemically synthesized
  source 1..20: mol_type = other DNA
cagacccagagccagtgaat

SEQ ID NO: 31970 - DNA, 20 bp, synthetic construct
  misc_feature 1..20: note = chemically synthesized
  source 1..20: mol_type = other DNA
gcctgaatattaagcaagtt

SEQ ID NO: 31971 - DNA, 20 bp, synthetic construct
  misc_feature 1..20: note = chemically synthesized
  source 1..20: mol_type = other DNA
ccagttgtacttttgtgtaa

SEQ ID NO: 31972 - DNA, 20 bp, synthetic construct
  misc_feature 1..20: note = chemically synthesized
  source 1..20: mol_type = other DNA
tgtgtaaatgtgatttcatt

SEQ ID NO: 31973 - DNA, 20 bp, synthetic construct
  misc_feature 1..20: note = chemically synthesized
  source 1..20: mol_type = other DNA
tgaagaaataaaagatgaga

SEQ ID NO: 31974 - DNA, 20 bp, synthetic construct
  misc_feature 1..20: note = chemically synthesized
  source 1..20: mol_type = other DNA
aaacagttttaaaaattata

SEQ ID NO: 31975 - DNA, 20 bp, synthetic construct
  misc_feature 1..20: note = chemically synthesized
  source 1..20: mol_type = other DNA
tttaaaaattatataatgtt

SEQ ID NO: 31976 - DNA, 20 bp, synthetic construct
  misc_feature 1..20: note = chemically synthesized
  source 1..20: mol_type = other DNA
ttagaatgaatatgatgcaa

SEQ ID NO: 31977 - DNA, 20 bp, synthetic construct
  misc_feature 1..20: note = chemically synthesized
  source 1..20: mol_type = other DNA
atgcaatctggttttctgtg

SEQ ID NO: 31978 - DNA, 20 bp, synthetic construct
  misc_feature 1..20: note = chemically synthesized
  source 1..20: mol_type = other DNA
ctggagttaacctttctttg

SEQ ID NO: 31979 - DNA, 20 bp, synthetic construct
  misc_feature 1..20: note = chemically synthesized
  source 1..20: mol_type = other DNA
tcctggtgctgtgcataata

SEQ ID NO: 31980 - DNA, 20 bp, synthetic construct
  misc_feature 1..20: note = chemically synthesized
  source 1..20: mol_type = other DNA
tgcttaaacatgacagcagg

SEQ ID NO: 31981 - DNA, 20 bp, synthetic construct
  misc_feature 1..20: note = chemically synthesized
  source 1..20: mol_type = other DNA
aatttatttataaatggtaa

SEQ ID NO: 31982 - DNA, 20 bp, synthetic construct
  misc_feature 1..20: note = chemically synthesized
  source 1..20: mol_type = other DNA
atagaatgttcatcagaaaa

SEQ ID NO: 31983 - DNA, 20 bp, synthetic construct
  misc_feature 1..20: note = chemically synthesized
  source 1..20: mol_type = other DNA
tccaaccaccgcctgggtat

SEQ ID NO: 31984 - DNA, 20 bp, synthetic construct
  misc_feature 1..20: note = chemically synthesized
  source 1..20: mol_type = other DNA
atcaactcaaatttggctga

SEQ ID NO: 31985 - DNA, 20 bp, synthetic construct
  misc_feature 1..20: note = chemically synthesized
  source 1..20: mol_type = other DNA
tcaaatttggctgacacagt

SEQ ID NO: 31986 - DNA, 20 bp, synthetic construct
  misc_feature 1..20: note = chemically synthesized
  source 1..20: mol_type = other DNA
ttccaacttctctctgaaga

SEQ ID NO: 31987 - DNA, 20 bp, synthetic construct
  misc_feature 1..20: note = chemically synthesized
  source 1..20: mol_type = other DNA
aagtcttttactccggtgtg

SEQ ID NO: 31988 - DNA, 20 bp, synthetic construct
  misc_feature 1..20: note = chemically synthesized
  source 1..20: mol_type = other DNA
tactccggtgtggagtgttt

SEQ ID NO: 31989 - DNA, 20 bp, synthetic construct
  misc_feature 1..20: note = chemically synthesized
  source 1..20: mol_type = other DNA
aggattcctaccaattagga

SEQ ID NO: 31990 - DNA, 20 bp, synthetic construct
  misc_feature 1..20: note = chemically synthesized
  source 1..20: mol_type = other DNA
ttcctaccaattaggaaggt

SEQ ID NO: 31991 - DNA, 20 bp, synthetic construct
  misc_feature 1..20: note = chemically synthesized
  source 1..20: mol_type = other DNA
agaaacacctccccttaact

SEQ ID NO: 31992 - DNA, 20 bp, synthetic construct
  misc_feature 1..20: note = chemically synthesized
  source 1..20: mol_type = other DNA
ttacacatgcatgcgttgag

SEQ ID NO: 31993 - DNA, 20 bp, synthetic construct
  misc_feature 1..20: note = chemically synthesized
  source 1..20: mol_type = other DNA
agcctggcctgggcactagg

SEQ ID NO: 31994 - DNA, 20 bp, synthetic construct
  misc_feature 1..20: note = chemically synthesized
  source 1..20: mol_type = other DNA
ttttagatattagggacata

SEQ ID NO: 31995 - DNA, 20 bp, synthetic construct
  misc_feature 1..20: note = chemically synthesized
  source 1..20: mol_type = other DNA
ggacttcgcattcaaacata

SEQ ID NO: 31996 - DNA, 20 bp, synthetic construct
  misc_feature 1..20: note = chemically synthesized
  source 1..20: mol_type = other DNA
acaagaacctctctctatac

SEQ ID NO: 31997 - DNA, 20 bp, synthetic construct
  misc_feature 1..20: note = chemically synthesized
  source 1..20: mol_type = other DNA
tctataccccagatttattt

SEQ ID NO: 31998 - DNA, 20 bp, synthetic construct
  misc_feature 1..20: note = chemically synthesized
  source 1..20: mol_type = other DNA
tatgagttaattcatagcta

SEQ ID NO: 31999 - DNA, 20 bp, synthetic construct
  misc_feature 1..20: note = chemically synthesized
  source 1..20: mol_type = other DNA
tgcgtattactaaaaagaag

SEQ ID NO: 32000 - DNA, 20 bp, synthetic construct
  misc_feature 1..20: note = chemically synthesized
  source 1..20: mol_type = other DNA
aaggaatgatttcctagagg

SEQ ID NO: 32001 - DNA, 20 bp, synthetic construct
  misc_feature 1..20: note = chemically synthesized
  source 1..20: mol_type = other DNA
aggtgcttcttctggccaag

SEQ ID NO: 32002 - DNA, 20 bp, synthetic construct
  misc_feature 1..20: note = chemically synthesized
  source 1..20: mol_type = other DNA
aggggagctcttaggatgtc

SEQ ID NO: 32003 - DNA, 20 bp, synthetic construct
  misc_feature 1..20: note = chemically synthesized
  source 1..20: mol_type = other DNA
aaaggcaagggatgaccaat

SEQ ID NO: 32004 - DNA, 20 bp, synthetic construct
  misc_feature 1..20: note = chemically synthesized
  source 1..20: mol_type = other DNA
acagggaagcctctgaacac

SEQ ID NO: 32005 - DNA, 20 bp, synthetic construct
  misc_feature 1..20: note = chemically synthesized
  source 1..20: mol_type = other DNA
aagccatagcaaacttgtca

SEQ ID NO: 32006 - DNA, 20 bp, synthetic construct
  misc_feature 1..20: note = chemically synthesized
  source 1..20: mol_type = other DNA
gcccagaggatataaagcca

SEQ ID NO: 32007 - DNA, 20 bp, synthetic construct
  misc_feature 1..20: note = chemically synthesized
  source 1..20: mol_type = other DNA
tctttggatattccggttcc

SEQ ID NO: 32008 - DNA, 20 bp, synthetic construct
  misc_feature 1..20: note = chemically synthesized
  source 1..20: mol_type = other DNA
ttccggttcccactgcttca

SEQ ID NO: 32009 - DNA, 20 bp, synthetic construct
  misc_feature 1..20: note = chemically synthesized
  source 1..20: mol_type = other DNA
atacacagggacaaagtcca

SEQ ID NO: 32010 - DNA, 20 bp, synthetic construct
  misc_feature 1..20: note = chemically synthesized
  source 1..20: mol_type = other DNA
taaccggttacacaattgcc

SEQ ID NO: 32011 - DNA, 20 bp, synthetic construct
  misc_feature 1..20: note = chemically synthesized
  source 1..20: mol_type = other DNA
acacaattgcctttggtttt

SEQ ID NO: 32012 - DNA, 20 bp, synthetic construct
  misc_feature 1..20: note = chemically synthesized
  source 1..20: mol_type = other DNA
ggtttttacagtttgttcct

SEQ ID NO: 32013 - DNA, 20 bp, synthetic construct
  misc_feature 1..20: note = chemically synthesized
  source 1..20: mol_type = other DNA
gtttgttcctaagtgtttcc

SEQ ID NO: 32014 - DNA, 20 bp, synthetic construct
  misc_feature 1..20: note = chemically synthesized
  source 1..20: mol_type = other DNA
tggttcctcttcacctgagg

SEQ ID NO: 32015 - DNA, 20 bp, synthetic construct
  misc_feature 1..20: note = chemically synthesized
  source 1..20: mol_type = other DNA
attatttattccagttaaaa

SEQ ID NO: 32016 - DNA, 20 bp, synthetic construct
  misc_feature 1..20: note = chemically synthesized
  source 1..20: mol_type = other DNA
tagtgcctgctgtgtgtggt

SEQ ID NO: 32017 - DNA, 20 bp, synthetic construct
  misc_feature 1..20: note = chemically synthesized
  source 1..20: mol_type = other DNA
ctgccacagttcctttcccc

SEQ ID NO: 32018 - DNA, 20 bp, synthetic construct
  misc_feature 1..20: note = chemically synthesized
  source 1..20: mol_type = other DNA
gcaattgtgtaaccggttaa

SEQ ID NO: 32019 - DNA, 20 bp, synthetic construct
  misc_feature 1..20: note = chemically synthesized
  source 1..20: mol_type = other DNA
tgagttagacaattctttca

SEQ ID NO: 32020 - DNA, 20 bp, synthetic construct
  misc_feature 1..20: note = chemically synthesized
  source 1..20: mol_type = other DNA
gggaaccggaatatccaaag

SEQ ID NO: 32021 - DNA, 20 bp, synthetic construct
  misc_feature 1..20: note = chemically synthesized
  source 1..20: mol_type = other DNA
tttgaaggagaaagaagcat

SEQ ID NO: 32022 - DNA, 20 bp, synthetic construct
  misc_feature 1..20: note = chemically synthesized
  source 1..20: mol_type = other DNA
tggctttatatcctctgggc

SEQ ID NO: 32023 - DNA, 20 bp, synthetic construct
  misc_feature 1..20: note = chemically synthesized
  source 1..20: mol_type = other DNA
taaaggtaagaaaccatctg

SEQ ID NO: 32024 - DNA, 20 bp, synthetic construct
  misc_feature 1..20: note = chemically synthesized
  source 1..20: mol_type = other DNA
aaaccatctgacaagtttgc

SEQ ID NO: 32025 - DNA, 20 bp, synthetic construct
  misc_feature 1..20: note = chemically synthesized
  source 1..20: mol_type = other DNA
cttcttcagccaaaatttat

SEQ ID NO: 32026 - DNA, 20 bp, synthetic construct
  misc_feature 1..20: note = chemically synthesized
  source 1..20: mol_type = other DNA
tggttcaaacccctgtgttc

SEQ ID NO: 32027 - DNA, 20 bp, synthetic construct
  misc_feature 1..20: note = chemically synthesized
  source 1..20: mol_type = other DNA
ctcccctccactacggacat

SEQ ID NO: 32028 - DNA, 20 bp, synthetic construct
  misc_feature 1..20: note = chemically synthesized
  source 1..20: mol_type = other DNA
cacttccggtgaccagttag

SEQ ID NO: 32029 - DNA, 20 bp, synthetic construct
  misc_feature 1..20: note = chemically synthesized
  source 1..20: mol_type = other DNA
tctggggtatagagagaggt

SEQ ID NO: 32030 - DNA, 20 bp, synthetic construct
  misc_feature 1..20: note = chemically synthesized
  source 1..20: mol_type = other DNA
tcttgtttcaattagaaaag

SEQ ID NO: 32031 - DNA, 20 bp, synthetic construct
  misc_feature 1..20: note = chemically synthesized
  source 1..20: mol_type = other DNA
aaaagtaatgcttggagaga

SEQ ID NO: 32032 - DNA, 20 bp, synthetic construct
  misc_feature 1..20: note = chemically synthesized
  source 1..20: mol_type = other DNA
aaggtcactgccaatagatg

SEQ ID NO: 32033 - DNA, 20 bp, synthetic construct
  misc_feature 1..20: note = chemically synthesized
  source 1..20: mol_type = other DNA
atgacttgattagaagcagg

SEQ ID NO: 32034 - DNA, 20 bp, synthetic construct
  misc_feature 1..20: note = chemically synthesized
  source 1..20: mol_type = other DNA
aaccatgcctagtgcccagg

SEQ ID NO: 32035 - DNA, 20 bp, synthetic construct
  misc_feature 1..20: note = chemically synthesized
  source 1..20: mol_type = other DNA
acagacatcttccctgaatg

SEQ ID NO: 32036 - DNA, 20 bp, synthetic construct
  misc_feature 1..20: note = chemically synthesized
  source 1..20: mol_type = other DNA
ctaatgccctctaactgatg

SEQ ID NO: 32037 - DNA, 20 bp, synthetic construct
  misc_feature 1..20: note = chemically synthesized
  source 1..20: mol_type = other DNA
agaatccatcagttaagggg

SEQ ID NO: 32038 - DNA, 20 bp, synthetic construct
  misc_feature 1..20: note = chemically synthesized
  source 1..20: mol_type = other DNA
tcagttaaggggaggtgttt

SEQ ID NO: 32039 - DNA, 20 bp, synthetic construct
  misc_feature 1..20: note = chemically synthesized
  source 1..20: mol_type = other DNA
tccacaccggagtaaaagac

SEQ ID NO: 32040 - DNA, 20 bp, synthetic construct
  misc_feature 1..20: note = chemically synthesized
  source 1..20: mol_type = other DNA
tttgtgctagtgcatgacac

SEQ ID NO: 32041 - DNA, 20 bp, synthetic construct
  misc_feature 1..20: note = chemically synthesized
  source 1..20: mol_type = other DNA
actgagatacccaggcggtg

SEQ ID NO: 32042 - DNA, 20 bp, synthetic construct
  misc_feature 1..20: note = chemically synthesized
  source 1..20: mol_type = other DNA
gcggtggttggatttatgga

SEQ ID NO: 32043 - DNA, 20 bp, synthetic construct
  misc_feature 1..20: note = chemically synthesized
  source 1..20: mol_type = other DNA
gaagaaagagtagatagaaa

SEQ ID NO: 32044 - DNA, 20 bp, synthetic construct
  misc_feature 1..20: note = chemically synthesized
  source 1..20: mol_type = other DNA
tgtaaaatcctatcctgctg

SEQ ID NO: 32045 - DNA, 20 bp, synthetic construct
  misc_feature 1..20: note = chemically synthesized
  source 1..20: mol_type = other DNA
attgcatgccagtctttgct

SEQ ID NO: 32046 - DNA, 20 bp, synthetic construct
  misc_feature 1..20: note = chemically synthesized
  source 1..20: mol_type = other DNA
caggaatctgaacacagaaa

SEQ ID NO: 32047 - DNA, 20 bp, synthetic construct
  misc_feature 1..20: note = chemically synthesized
  source 1..20: mol_type = other DNA
aaacattatataatttttaa

SEQ ID NO: 32048 - DNA, 20 bp, synthetic construct
  misc_feature 1..20: note = chemically synthesized
  source 1..20: mol_type = other DNA
ataccctatgtatttgagta

SEQ ID NO: 32049 - DNA, 20 bp, synthetic construct
  misc_feature 1..20: note = chemically synthesized
  source 1..20: mol_type = other DNA
ctatgtatttgagtaagttg

SEQ ID NO: 32050 - DNA, 20 bp, synthetic construct
  misc_feature 1..20: note = chemically synthesized
  source 1..20: mol_type = other DNA
gttgcttagcttctcccaac

SEQ ID NO: 32051 - DNA, 20 bp, synthetic construct
  misc_feature 1..20: note = chemically synthesized
  source 1..20: mol_type = other DNA
cctcatttctaaaacgaaga

SEQ ID NO: 32052 - DNA, 20 bp, synthetic construct
  misc_feature 1..20: note = chemically synthesized
  source 1..20: mol_type = other DNA
tctgggccccaccaccaaat

SEQ ID NO: 32053 - DNA, 20 bp, synthetic construct
  misc_feature 1..20: note = chemically synthesized
  source 1..20: mol_type = other DNA
tggctctgggtctgtatgta

SEQ ID NO: 32054 - DNA, 20 bp, synthetic construct
  misc_feature 1..20: note = chemically synthesized
  source 1..20: mol_type = other DNA
ctgtatgtaacaagcttctg

SEQ ID NO: 32055 - DNA, 20 bp, synthetic construct
  misc_feature 1..20: note = chemically synthesized
  source 1..20: mol_type = other DNA
acaagcttctggagtgattc

SEQ ID NO: 32056 - DNA, 20 bp, synthetic construct
  misc_feature 1..20: note = chemically synthesized
  source 1..20: mol_type = other DNA
caggacctactattctacgt

SEQ ID NO: 32057 - DNA, 20 bp, synthetic construct
  misc_feature 1..20: note = chemically synthesized
  source 1..20: mol_type = other DNA
taaaaaattaccacaaattt

SEQ ID NO: 32058 - DNA, 20 bp, synthetic construct
  misc_feature 1..20: note = chemically synthesized
  source 1..20: mol_type = other DNA
gtggaggtcagaagtctgaa

SEQ ID NO: 32059 - DNA, 20 bp, synthetic construct
  misc_feature 1..20: note = chemically synthesized
  source 1..20: mol_type = other DNA
taaagtcgaggtgtcagtgt

SEQ ID NO: 32060 - DNA, 20 bp, synthetic construct
  misc_feature 1..20: note = chemically synthesized
  source 1..20: mol_type = other DNA
gtttcttctggagactctat

SEQ ID NO: 32061 - DNA, 20 bp, synthetic construct
  misc_feature 1..20: note = chemically synthesized
  source 1..20: mol_type = other DNA
tctggagactctatgagaga

SEQ ID NO: 32062 - DNA, 20 bp, synthetic construct
  misc_feature 1..20: note = chemically synthesized
  source 1..20: mol_type = other DNA
ttgtgttttcctgccttttc

SEQ ID NO: 32063 - DNA, 20 bp, synthetic construct
  misc_feature 1..20: note = chemically synthesized
  source 1..20: mol_type = other DNA
tttcctgccttttccatgga

SEQ ID NO: 32064 - DNA, 20 bp, synthetic construct
  misc_feature 1..20: note = chemically synthesized
  source 1..20: mol_type = other DNA
tctagaggctacccacattc

SEQ ID NO: 32065 - DNA, 20 bp, synthetic construct
  misc_feature 1..20: note = chemically synthesized
  source 1..20: mol_type = other DNA
cgatcttcaaaaaaatgtat

SEQ ID NO: 32066 - DNA, 20 bp, synthetic construct
  misc_feature 1..20: note = chemically synthesized
  source 1..20: mol_type = other DNA
cctccctcttataatgacac

SEQ ID NO: 32067 - DNA, 20 bp, synthetic construct
  misc_feature 1..20: note = chemically synthesized
  source 1..20: mol_type = other DNA
ccttaattatatatgcaaaa

SEQ ID NO: 32068 - DNA, 20 bp, synthetic construct
  misc_feature 1..20: note = chemically synthesized
  source 1..20: mol_type = other DNA
ggctagaaaagataatactc

SEQ ID NO: 32069 - DNA, 20 bp, synthetic construct
  misc_feature 1..20: note = chemically synthesized
  source 1..20: mol_type = other DNA
acagaaaaaaaaaatgtagc

SEQ ID NO: 32070 - DNA, 20 bp, synthetic construct
  misc_feature 1..20: note = chemically synthesized
  source 1..20: mol_type = other DNA
tgtagaaaacatacaaacac

SEQ ID NO: 32071 - DNA, 20 bp, synthetic construct
  misc_feature 1..20: note = chemically synthesized
  source 1..20: mol_type = other DNA
tacaaacacacttgcttaat

SEQ ID NO: 32072 - DNA, 20 bp, synthetic construct
  misc_feature 1..20: note = chemically synthesized
  source 1..20: mol_type = other DNA
gcactgaaccagctggaaat

SEQ ID NO: 32073 - DNA, 20 bp, synthetic construct
  misc_feature 1..20: note = chemically synthesized
  source 1..20: mol_type = other DNA
gaaccagctggaaatgaatg

SEQ ID NO: 32074 - DNA, 20 bp, synthetic construct
  misc_feature 1..20: note = chemically synthesized
  source 1..20: mol_type = other DNA
cgcagctgataaaagcagag

SEQ ID NO: 32075 - DNA, 20 bp, synthetic construct
  misc_feature 1..20: note = chemically synthesized
  source 1..20: mol_type = other DNA
ctggagaaagcagctgtgaa

SEQ ID NO: 32076 - DNA, 20 bp, synthetic construct
  misc_feature 1..20: note = chemically synthesized
  source 1..20: mol_type = other DNA
aactctgtactttttctctc

SEQ ID NO: 32077 - DNA, 20 bp, synthetic construct
  misc_feature 1..20: note = chemically synthesized
  source 1..20: mol_type = other DNA
ctcaggggattagaaaaacc

SEQ ID NO: 32078 - DNA, 20 bp, synthetic construct
  misc_feature 1..20: note = chemically synthesized
  source 1..20: mol_type = other DNA
aattgatttgatagtgactc

SEQ ID NO: 32079 - DNA, 20 bp, synthetic construct
  misc_feature 1..20: note = chemically synthesized
  source 1..20: mol_type = other DNA
ctttagccaatgccctgcag

SEQ ID NO: 32080 - DNA, 20 bp, synthetic construct
  misc_feature 1..20: note = chemically synthesized
  source 1..20: mol_type = other DNA
ccctgcagctaagattgaga

SEQ ID NO: 32081 - DNA, 20 bp, synthetic construct
  misc_feature 1..20: note = chemically synthesized
  source 1..20: mol_type = other DNA
gattcagaactcacacctct

SEQ ID NO: 32082 - DNA, 20 bp, synthetic construct
  misc_feature 1..20: note = chemically synthesized
  source 1..20: mol_type = other DNA
tttaaagcacagtctgaatc

SEQ ID NO: 32083 - DNA, 20 bp, synthetic construct
  misc_feature 1..20: note = chemically synthesized
  source 1..20: mol_type = other DNA
gcgaaggcactgtaatgccc

SEQ ID NO: 32084 - DNA, 20 bp, synthetic construct
  misc_feature 1..20: note = chemically synthesized
  source 1..20: mol_type = other DNA
atatcatcctaactgcatgc

SEQ ID NO: 32085 - DNA, 20 bp, synthetic construct
  misc_feature 1..20: note = chemically synthesized
  source 1..20: mol_type = other DNA
aaagaataatttttcacttc

SEQ ID NO: 32086 - DNA, 20 bp, synthetic construct
  misc_feature 1..20: note = chemically synthesized
  source 1..20: mol_type = other DNA
cctgatcatcactcacacat

SEQ ID NO: 32087 - DNA, 20 bp, synthetic construct
  misc_feature 1..20: note = chemically synthesized
  source 1..20: mol_type = other DNA
cccacaagccacaaaaacca

SEQ ID NO: 32088 - DNA, 20 bp, synthetic construct
  misc_feature 1..20: note = chemically synthesized
  source 1..20: mol_type = other DNA
aaaaaccagcaagtttgtat

SEQ ID NO: 32089 - DNA, 20 bp, synthetic construct
  misc_feature 1..20: note = chemically synthesized
  source 1..20: mol_type = other DNA
ggcgaaattaaaattgctaa

SEQ ID NO: 32090 - DNA, 20 bp, synthetic construct
  misc_feature 1..20: note = chemically synthesized
  source 1..20: mol_type = other DNA
gataacatcttatcaggaga

SEQ ID NO: 32091 - DNA, 20 bp, synthetic construct
  misc_feature 1..20: note = chemically synthesized
  source 1..20: mol_type = other DNA
gacaggcgcacctggagggg

SEQ ID NO: 32092 - DNA, 20 bp, synthetic construct
  misc_feature 1..20: note = chemically synthesized
  source 1..20: mol_type = other DNA
aattcagcgatatttctccc

SEQ ID NO: 32093 - DNA, 20 bp, synthetic construct
  misc_feature 1..20: note = chemically synthesized
  source 1..20: mol_type = other DNA
ctgcctggctcaccagcagt

SEQ ID NO: 32094 - DNA, 20 bp, synthetic construct
  misc_feature 1..20: note = chemically synthesized
  source 1..20: mol_type = other DNA
atatacatcctcctcagctg

SEQ ID NO: 32095 - DNA, 20 bp, synthetic construct
  misc_feature 1..20: note = chemically synthesized
  source 1..20: mol_type = other DNA
cctcctcagctgacaggatt

SEQ ID NO: 32096 - DNA, 20 bp, synthetic construct
  misc_feature 1..20: note = chemically synthesized
  source 1..20: mol_type = other DNA
gtccatgaaatctttacaat

SEQ ID NO: 32097 - DNA, 20 bp, synthetic construct
  misc_feature 1..20: note = chemically synthesized
  source 1..20: mol_type = other DNA
aaatctttacaatttatgtt

SEQ ID NO: 32098 - DNA, 20 bp, synthetic construct
  misc_feature 1..20: note = chemically synthesized
  source 1..20: mol_type = other DNA
cacaatccacgaacttctgc

SEQ ID NO: 32099 - DNA, 20 bp, synthetic construct
  misc_feature 1..20: note = chemically synthesized
  source 1..20: mol_type = other DNA
gccatggcttcagctgatcc

SEQ ID NO: 32100 - DNA, 20 bp, synthetic construct
  misc_feature 1..20: note = chemically synthesized
  source 1..20: mol_type = other DNA
gctgtgttcagatggttaca

SEQ ID NO: 32101 - DNA, 20 bp, synthetic construct
  misc_feature 1..20: note = chemically synthesized
  source 1..20: mol_type = other DNA
acacatacacttacattaga

SEQ ID NO: 32102 - DNA, 20 bp, synthetic construct
  misc_feature 1..20: note = chemically synthesized
  source 1..20: mol_type = other DNA
tcaatcaatcgacaaatttc

SEQ ID NO: 32103 - DNA, 20 bp, synthetic construct
  misc_feature 1..20: note = chemically synthesized
  source 1..20: mol_type = other DNA
tgccatagtctcagccttca

SEQ ID NO: 32104 - DNA, 20 bp, synthetic construct
  misc_feature 1..20: note = chemically synthesized
  source 1..20: mol_type = other DNA
gtgtgttgagtgttgcaaga

SEQ ID NO: 32105 - DNA, 20 bp, synthetic construct
  misc_feature 1..20: note = chemically synthesized
  source 1..20: mol_type = other DNA
ccatagatgaggcagatagc

SEQ ID NO: 32106 - DNA, 20 bp, synthetic construct
  misc_feature 1..20: note = chemically synthesized
  source 1..20: mol_type = other DNA
aggcttctgcctacagcaag

SEQ ID NO: 32107 - DNA, 20 bp, synthetic construct
  misc_feature 1..20: note = chemically synthesized
  source 1..20: mol_type = other DNA
tacagcaaggctagtttgga

SEQ ID NO: 32108 - DNA, 20 bp, synthetic construct
  misc_feature 1..20: note = chemically synthesized
  source 1..20: mol_type = other DNA
ggacccacacacctcttcat

SEQ ID NO: 32109 - DNA, 20 bp, synthetic construct
  misc_feature 1..20: note = chemically synthesized
  source 1..20: mol_type = other DNA
atgctttttcttttttttcc

SEQ ID NO: 32110 - DNA, 20 bp, synthetic construct
  misc_feature 1..20: note = chemically synthesized
  source 1..20: mol_type = other DNA
ctatgcaatatccagcactc

SEQ ID NO: 32111 - DNA, 20 bp, synthetic construct
  misc_feature 1..20: note = chemically synthesized
  source 1..20: mol_type = other DNA
gaaaccatattgtcttccct

SEQ ID NO: 32112 - DNA, 20 bp, synthetic construct
  misc_feature 1..20: note = chemically synthesized
  source 1..20: mol_type = other DNA
tttgtcacctacagtacatt

SEQ ID NO: 32113 - DNA, 22 bp, synthetic construct
  misc_feature 1..22: note = chemically synthesized
  source 1..22: mol_type = other DNA
tccttctggcagggaacctggg

SEQ ID NO: 32114 - DNA, 22 bp, synthetic construct
  misc_feature 1..22: note = chemically synthesized
  source 1..22: mol_type = other DNA
ctggcagggaacctgggcagcg

SEQ ID NO: 32115 - DNA, 22 bp, synthetic construct
  misc_feature 1..22: note = chemically synthesized
  source 1..22: mol_type = other DNA
tggcagggaacctgggcagcga

SEQ ID NO: 32116 - DNA, 22 bp, synthetic construct
  misc_feature 1..22: note = chemically synthesized
  source 1..22: mol_type = other DNA
gcagggaacctgggcagcgagg

SEQ ID NO: 32117 - DNA, 22 bp, synthetic construct
  misc_feature 1..22: note = chemically synthesized
  source 1..22: mol_type = other DNA
ggcagcgaggatcctctgaaga

SEQ ID NO: 32118 - DNA, 22 bp, synthetic construct
  misc_feature 1..22: note = chemically synthesized
  source 1..22: mol_type = other DNA
tgaagaacactcattcccaaat

SEQ ID NO: 32119 - DNA, 22 bp, synthetic construct
  misc_feature 1..22: note = chemically synthesized
  source 1..22: mol_type = other DNA
aagaacactcattcccaaatcc

SEQ ID NO: 32120 - DNA, 22 bp, synthetic construct
  misc_feature 1..22: note = chemically synthesized
  source 1..22: mol_type = other DNA
attcccaaatccagaaatgtac

SEQ ID NO: 32121 - DNA, 22 bp, synthetic construct
  misc_feature 1..22: note = chemically synthesized
  source 1..22: mol_type = other DNA
ccaaatccagaaatgtactgta

SEQ ID NO: 32122 - DNA, 22 bp, synthetic construct
  misc_feature 1..22: note = chemically synthesized
  source 1..22: mol_type = other DNA
taggtgacaaagacacaaatgc

SEQ ID NO: 32123 - DNA, 22 bp, synthetic construct
  misc_feature 1..22: note = chemically synthesized
  source 1..22: mol_type = other DNA
gcaggatttaaagagcatttca

SEQ ID NO: 32124 - DNA, 22 bp, synthetic construct
  misc_feature 1..22: note = chemically synthesized
  source 1..22: mol_type = other DNA
aaagagcatttcagaaaattgg

SEQ ID NO: 32125 - DNA, 22 bp, synthetic construct
  misc_feature 1..22: note = chemically synthesized
  source 1..22: mol_type = other DNA
aagagcatttcagaaaattggc

SEQ ID NO: 32126 - DNA, 22 bp, synthetic construct
  misc_feature 1..22: note = chemically synthesized
  source 1..22: mol_type = other DNA
cagaaaattggcagtttactaa

SEQ ID NO: 32127 - DNA, 22 bp, synthetic construct
  misc_feature 1..22: note = chemically synthesized
  source 1..22: mol_type = other DNA
agaaaattggcagtttactaag

SEQ ID NO: 32128 - DNA, 22 bp, synthetic construct
  misc_feature 1..22: note = chemically synthesized
  source 1..22: mol_type = other DNA
gcagtttactaaggtaagaatt

SEQ ID NO: 32129 - DNA, 22 bp, synthetic construct
  misc_feature 1..22: note = chemically synthesized
  source 1..22: mol_type = other DNA
actaaggtaagaatttctatat

SEQ ID NO: 32130 - DNA, 22 bp, synthetic construct
  misc_feature 1..22: note = chemically synthesized
  source 1..22: mol_type = other DNA
ctaaggtaagaatttctatatg

SEQ ID NO: 32131 - DNA, 22 bp, synthetic construct
  misc_feature 1..22: note = chemically synthesized
  source 1..22: mol_type = other DNA
aggtaagaatttctatatggac

SEQ ID NO: 32132 - DNA, 22 bp, synthetic construct
  misc_feature 1..22: note = chemically synthesized
  source 1..22: mol_type = other DNA
ctatatggacctatgtttgtgt

SEQ ID NO: 32133 - DNA, 22 bp, synthetic construct
  misc_feature 1..22: note = chemically synthesized
  source 1..22: mol_type = other DNA
tatatggacctatgtttgtgta

SEQ ID NO: 32134 - DNA, 22 bp, synthetic construct
  misc_feature 1..22: note = chemically synthesized
  source 1..22: mol_type = other DNA
tatggacctatgtttgtgtatg

SEQ ID NO: 32135 - DNA, 22 bp, synthetic construct
  misc_feature 1..22: note = chemically synthesized
  source 1..22: mol_type = other DNA
tgtttgtgtatgatgttccaca

SEQ ID NO: 32136 - DNA, 22 bp, synthetic construct
  misc_feature 1..22: note = chemically synthesized
  source 1..22: mol_type = other DNA
gtgtatgatgttccacatataa

SEQ ID NO: 32137 - DNA, 22 bp, synthetic construct
  misc_feature 1..22: note = chemically synthesized
  source 1..22: mol_type = other DNA
tgtatgatgttccacatataat

SEQ ID NO: 32138 - DNA, 22 bp, synthetic construct
  misc_feature 1..22: note = chemically synthesized
  source 1..22: mol_type = other DNA
cacatataatatctttactgtg

SEQ ID NO: 32139 - DNA, 22 bp, synthetic construct
  misc_feature 1..22: note = chemically synthesized
  source 1..22: mol_type = other DNA
tactgtgtcttgacatatgaat

SEQ ID NO: 32140 - DNA, 22 bp, synthetic construct
  misc_feature 1..22: note = chemically synthesized
  source 1..22: mol_type = other DNA
actgtgtcttgacatatgaatc

SEQ ID NO: 32141 - DNA, 22 bp, synthetic construct
  misc_feature 1..22: note = chemically synthesized
  source 1..22: mol_type = other DNA
ctgtgtcttgacatatgaatca

SEQ ID NO: 32142 - DNA, 22 bp, synthetic construct
  misc_feature 1..22: note = chemically synthesized
  source 1..22: mol_type = other DNA
tgtcttgacatatgaatcattt

SEQ ID NO: 32143 - DNA, 22 bp, synthetic construct
  misc_feature 1..22: note = chemically synthesized
  source 1..22: mol_type = other DNA
gacatatgaatcatttagggaa

SEQ ID NO: 32144 - DNA, 22 bp, synthetic construct
  misc_feature 1..22: note = chemically synthesized
  source 1..22: mol_type = other DNA
acatatgaatcatttagggaag

SEQ ID NO: 32145 - DNA, 22 bp, synthetic construct
  misc_feature 1..22: note = chemically synthesized
  source 1..22: mol_type = other DNA
agggaagacaatatggtttctg

SEQ ID NO: 32146 - DNA, 22 bp, synthetic construct
  misc_feature 1..22: note = chemically synthesized
  source 1..22: mol_type = other DNA
gggaagacaatatggtttctgt

SEQ ID NO: 32147 - DNA, 22 bp, synthetic construct
  misc_feature 1..22: note = chemically synthesized
  source 1..22: mol_type = other DNA
ctgtgaattttaaagacttcta

SEQ ID NO: 32148 - DNA, 22 bp, synthetic construct
  misc_feature 1..22: note = chemically synthesized
  source 1..22: mol_type = other DNA
tgtgaattttaaagacttctaa

SEQ ID NO: 32149 - DNA, 22 bp, synthetic construct
  misc_feature 1..22: note = chemically synthesized
  source 1..22: mol_type = other DNA
tgaattttaaagacttctaatt

SEQ ID NO: 32150 - DNA, 22 bp, synthetic construct
  misc_feature 1..22: note = chemically synthesized
  source 1..22: mol_type = other DNA
taaagacttctaattaatcaga

SEQ ID NO: 32151 - DNA, 22 bp, synthetic construct
  misc_feature 1..22: note = chemically synthesized
  source 1..22: mol_type = other DNA
aaagacttctaattaatcagaa

SEQ ID NO: 32152 - DNA, 22 bp, synthetic construct
  misc_feature 1..22: note = chemically synthesized
  source 1..22: mol_type = other DNA
aagacttctaattaatcagaag

SEQ ID NO: 32153 - DNA, 22 bp, synthetic construct
  misc_feature 1..22: note = chemically synthesized
  source 1..22: mol_type = other DNA
ctaattaatcagaagagtgctg

SEQ ID NO: 32154 - DNA, 22 bp, synthetic construct
  misc_feature 1..22: note = chemically synthesized
  source 1..22: mol_type = other DNA
taattaatcagaagagtgctgg

SEQ ID NO: 32155 - DNA, 22 bp, synthetic construct
  misc_feature 1..22: note = chemically synthesized
  source 1..22: mol_type = other DNA
attaatcagaagagtgctggat

SEQ ID NO: 32156 - DNA, 22 bp, synthetic construct
  misc_feature 1..22: note = chemically synthesized
  source 1..22: mol_type = other DNA
atcagaagagtgctggatattg

SEQ ID NO: 32157 - DNA, 22 bp, synthetic construct
  misc_feature 1..22: note = chemically synthesized
  source 1..22: mol_type = other DNA
gatattgcatagacttctccac

SEQ ID NO: 32158 - DNA, 22 bp, synthetic construct
  misc_feature 1..22: note = chemically synthesized
  source 1..22: mol_type = other DNA
catagacttctccacccttagc

SEQ ID NO: 32159 - DNA, 22 bp, synthetic construct
  misc_feature 1..22: note = chemically synthesized
  source 1..22: mol_type = other DNA
ctccacccttagctgtacttag

SEQ ID NO: 32160 - DNA, 22 bp, synthetic construct
  misc_feature 1..22: note = chemically synthesized
  source 1..22: mol_type = other DNA
tccacccttagctgtacttagc

SEQ ID NO: 32161 - DNA, 22 bp, synthetic construct
  misc_feature 1..22: note = chemically synthesized
  source 1..22: mol_type = other DNA
cacccttagctgtacttagctg

SEQ ID NO: 32162 - DNA, 22 bp, synthetic construct
  misc_feature 1..22: note = chemically synthesized
  source 1..22: mol_type = other DNA
agctgtacttagctgatttgtg

SEQ ID NO: 32163 - DNA, 22 bp, synthetic construct
  misc_feature 1..22: note = chemically synthesized
  source 1..22: mol_type = other DNA
gctgtacttagctgatttgtgg

SEQ ID NO: 32164 - DNA, 22 bp, synthetic construct
  misc_feature 1..22: note = chemically synthesized
  source 1..22: mol_type = other DNA
tacttagctgatttgtgggtct

SEQ ID NO: 32165 - DNA, 22 bp, synthetic construct
  misc_feature 1..22: note = chemically synthesized
  source 1..22: mol_type = other DNA
agctgatttgtgggtctacact

SEQ ID NO: 32166 - DNA, 22 bp, synthetic construct
  misc_feature 1..22: note = chemically synthesized
  source 1..22: mol_type = other DNA
gctgatttgtgggtctacactg

SEQ ID NO: 32167 - DNA, 22 bp, synthetic construct
  misc_feature 1..22: note = chemically synthesized
  source 1..22: mol_type = other DNA
atttgtgggtctacactgtaac

SEQ ID NO: 32168 - DNA, 22 bp, synthetic construct
  misc_feature 1..22: note = chemically synthesized
  source 1..22: mol_type = other DNA
gtgggtctacactgtaacctcc

SEQ ID NO: 32169 - DNA, 22 bp, synthetic construct
  misc_feature 1..22: note = chemically synthesized
  source 1..22: mol_type = other DNA
tgggtctacactgtaacctccc

SEQ ID NO: 32170 - DNA, 22 bp, synthetic construct
  misc_feature 1..22: note = chemically synthesized
  source 1..22: mol_type = other DNA
cactgtaacctccctgaacttg

SEQ ID NO: 32171 - DNA, 22 bp, synthetic construct
  misc_feature 1..22: note = chemically synthesized
  source 1..22: mol_type = other DNA
taacctccctgaacttgagact

SEQ ID NO: 32172 - DNA, 22 bp, synthetic construct
  misc_feature 1..22: note = chemically synthesized
  source 1..22: mol_type = other DNA
cctgaacttgagactccatttc

SEQ ID NO: 32173 - DNA, 22 bp, synthetic construct
  misc_feature 1..22: note = chemically synthesized
  source 1..22: mol_type = other DNA
aacttgagactccatttccctt

SEQ ID NO: 32174 - DNA, 22 bp, synthetic construct
  misc_feature 1..22: note = chemically synthesized
  source 1..22: mol_type = other DNA
gagactccatttccctttcaaa

SEQ ID NO: 32175 - DNA, 22 bp, synthetic construct
  misc_feature 1..22: note = chemically synthesized
  source 1..22: mol_type = other DNA
agactccatttccctttcaaac

SEQ ID NO: 32176 - DNA, 22 bp, synthetic construct
  misc_feature 1..22: note = chemically synthesized
  source 1..22: mol_type = other DNA
catttccctttcaaactctggg

SEQ ID NO: 32177 - DNA, 22 bp, synthetic construct
  misc_feature 1..22: note = chemically synthesized
  source 1..22: mol_type = other DNA
ccctttcaaactctgggaaaaa

SEQ ID NO: 32178 - DNA, 22 bp, synthetic construct
  misc_feature 1..22: note = chemically synthesized
  source 1..22: mol_type = other DNA
cctttcaaactctgggaaaaaa

SEQ ID NO: 32179 - DNA, 22 bp, synthetic construct
  misc_feature 1..22: note = chemically synthesized
  source 1..22: mol_type = other DNA
tcaaactctgggaaaaaaaaga

SEQ ID NO: 32180 - DNA, 22 bp, synthetic construct
  misc_feature 1..22: note = chemically synthesized
  source 1..22: mol_type = other DNA
caaactctgggaaaaaaaagaa

SEQ ID NO: 32181 - DNA, 22 bp, synthetic construct
  misc_feature 1..22: note = chemically synthesized
  source 1..22: mol_type = other DNA
aaactctgggaaaaaaaagaaa

SEQ ID NO: 32182 - DNA, 22 bp, synthetic construct
  misc_feature 1..22: note = chemically synthesized
  source 1..22: mol_type = other DNA
tgggaaaaaaaagaaaaagcat

SEQ ID NO: 32183 - DNA, 22 bp, synthetic construct
  misc_feature 1..22: note = chemically synthesized
  source 1..22: mol_type = other DNA
ggaaaaaaaagaaaaagcatct

SEQ ID NO: 32184 - DNA, 22 bp, synthetic construct
  misc_feature 1..22: note = chemically synthesized
  source 1..22: mol_type = other DNA
tgaagaggtgtgtgggtccaac

SEQ ID NO: 32185 - DNA, 22 bp, synthetic construct
  misc_feature 1..22: note = chemically synthesized
  source 1..22: mol_type = other DNA
acagcaaaaccctctccaaact

SEQ ID NO: 32186 - DNA, 22 bp, synthetic construct
  misc_feature 1..22: note = chemically synthesized
  source 1..22: mol_type = other DNA
tccaaactagccttgctgtagg

SEQ ID NO: 32187 - DNA, 22 bp, synthetic construct
  misc_feature 1..22: note = chemically synthesized
  source 1..22: mol_type = other DNA
caaactagccttgctgtaggca

SEQ ID NO: 32188 - DNA, 22 bp, synthetic construct
  misc_feature 1..22: note = chemically synthesized
  source 1..22: mol_type = other DNA
gccttgctgtaggcagaagcct

SEQ ID NO: 32189 - DNA, 22 bp, synthetic construct
  misc_feature 1..22: note = chemically synthesized
  source 1..22: mol_type = other DNA
gctgtaggcagaagcctctgct

SEQ ID NO: 32190 - DNA, 22 bp, synthetic construct
  misc_feature 1..22: note = chemically synthesized
  source 1..22: mol_type = other DNA
ctgtaggcagaagcctctgcta

SEQ ID NO: 32191 - DNA, 22 bp, synthetic construct
  misc_feature 1..22: note = chemically synthesized
  source 1..22: mol_type = other DNA
taggcagaagcctctgctatct

SEQ ID NO: 32192 - DNA, 22 bp, synthetic construct
  misc_feature 1..22: note = chemically synthesized
  source 1..22: mol_type = other DNA
tgctatctgcctcatctatgga

SEQ ID NO: 32193 - DNA, 22 bp, synthetic construct
  misc_feature 1..22: note = chemically synthesized
  source 1..22: mol_type = other DNA
ctatctgcctcatctatggaac

SEQ ID NO: 32194 - DNA, 22 bp, synthetic construct
  misc_feature 1..22: note = chemically synthesized
  source 1..22: mol_type = other DNA
tctgcctcatctatggaacaca

SEQ ID NO: 32195 - DNA, 22 bp, synthetic construct
  misc_feature 1..22: note = chemically synthesized
  source 1..22: mol_type = other DNA
cctcatctatggaacacatcta

SEQ ID NO: 32196 - DNA, 22 bp, synthetic construct
  misc_feature 1..22: note = chemically synthesized
  source 1..22: mol_type = other DNA
atctatggaacacatctatatt

SEQ ID NO: 32197 - DNA, 22 bp, synthetic construct
  misc_feature 1..22: note = chemically synthesized
  source 1..22: mol_type = other DNA
tggaacacatctatatttgtgc

SEQ ID NO: 32198 - DNA, 22 bp, synthetic construct
  misc_feature 1..22: note = chemically synthesized
  source 1..22: mol_type = other DNA
tatttgtgcgaatgcatgaaaa

SEQ ID NO: 32199 - DNA, 22 bp, synthetic construct
  misc_feature 1..22: note = chemically synthesized
  source 1..22: mol_type = other DNA
gtgcgaatgcatgaaaataaag

SEQ ID NO: 32200 - DNA, 22 bp, synthetic construct
  misc_feature 1..22: note = chemically synthesized
  source 1..22: mol_type = other DNA
tgcgaatgcatgaaaataaagt

SEQ ID NO: 32201 - DNA, 22 bp, synthetic construct
  misc_feature 1..22: note = chemically synthesized
  source 1..22: mol_type = other DNA
aaagatatgggtggccttcagg

SEQ ID NO: 32202 - DNA, 22 bp, synthetic construct
  misc_feature 1..22: note = chemically synthesized
  source 1..22: mol_type = other DNA
aagatatgggtggccttcagga

SEQ ID NO: 32203 - DNA, 22 bp, synthetic construct
  misc_feature 1..22: note = chemically synthesized
  source 1..22: mol_type = other DNA
caggagacacgccagcccagca

SEQ ID NO: 32204 - DNA, 22 bp, synthetic construct
  misc_feature 1..22: note = chemically synthesized
  source 1..22: mol_type = other DNA
aggagacacgccagcccagcat

SEQ ID NO: 32205 - DNA, 22 bp, synthetic construct
  misc_feature 1..22: note = chemically synthesized
  source 1..22: mol_type = other DNA
ttcacaatgacacaatggaacc

SEQ ID NO: 32206 - DNA, 22 bp, synthetic construct
  misc_feature 1..22: note = chemically synthesized
  source 1..22: mol_type = other DNA
tcacaatgacacaatggaacct

SEQ ID NO: 32207 - DNA, 22 bp, synthetic construct
  misc_feature 1..22: note = chemically synthesized
  source 1..22: mol_type = other DNA
cacaatgacacaatggaaccta

SEQ ID NO: 32208 - DNA, 22 bp, synthetic construct
  misc_feature 1..22: note = chemically synthesized
  source 1..22: mol_type = other DNA
acaatgacacaatggaacctac

SEQ ID NO: 32209 - DNA, 22 bp, synthetic construct
  misc_feature 1..22: note = chemically synthesized
  source 1..22: mol_type = other DNA
ctctgattgccatctcttcact

SEQ ID NO: 32210 - DNA, 22 bp, synthetic construct
  misc_feature 1..22: note = chemically synthesized
  source 1..22: mol_type = other DNA
tgattgccatctcttcacttta

SEQ ID NO: 32211 - DNA, 22 bp, synthetic construct
  misc_feature 1..22: note = chemically synthesized
  source 1..22: mol_type = other DNA
attgccatctcttcactttaca

SEQ ID NO: 32212 - DNA, 22 bp, synthetic construct
  misc_feature 1..22: note = chemically synthesized
  source 1..22: mol_type = other DNA
ccatctcttcactttacaccca

SEQ ID NO: 32213 - DNA, 22 bp, synthetic construct
  misc_feature 1..22: note = chemically synthesized
  source 1..22: mol_type = other DNA
ttcactttacacccagaggaaa

SEQ ID NO: 32214 - DNA, 22 bp, synthetic construct
  misc_feature 1..22: note = chemically synthesized
  source 1..22: mol_type = other DNA
cactttacacccagaggaaaaa

SEQ ID NO: 32215 - DNA, 22 bp, synthetic construct
  misc_feature 1..22: note = chemically synthesized
  source 1..22: mol_type = other DNA
actttacacccagaggaaaaaa

SEQ ID NO: 32216 - DNA, 22 bp, synthetic construct
  misc_feature 1..22: note = chemically synthesized
  source 1..22: mol_type = other DNA
tacacccagaggaaaaaaaaag

SEQ ID NO: 32217 - DNA, 22 bp, synthetic construct
  misc_feature 1..22: note = chemically synthesized
  source 1..22: mol_type = other DNA
acacccagaggaaaaaaaaagt

SEQ ID NO: 32218 - DNA, 22 bp, synthetic construct
  misc_feature 1..22: note = chemically synthesized
  source 1..22: mol_type = other DNA
cacccagaggaaaaaaaaagtt

SEQ ID NO: 32219 - DNA, 22 bp, synthetic construct
  misc_feature 1..22: note = chemically synthesized
  source 1..22: mol_type = other DNA
aagggtttctcaaccaggtaag

SEQ ID NO: 32220 - DNA, 22 bp, synthetic construct
  misc_feature 1..22: note = chemically synthesized
  source 1..22: mol_type = other DNA
ctcaaccaggtaagtcatggag

SEQ ID NO: 32221 - DNA, 22 bp, synthetic construct
  misc_feature 1..22: note = chemically synthesized
  source 1..22: mol_type = other DNA
tcaaccaggtaagtcatggaga

SEQ ID NO: 32222 - DNA, 22 bp, synthetic construct
  misc_feature 1..22: note = chemically synthesized
  source 1..22: mol_type = other DNA
aaccaggtaagtcatggagagc

SEQ ID NO: 32223 - DNA, 22 bp, synthetic construct
  misc_feature 1..22: note = chemically synthesized
  source 1..22: mol_type = other DNA
aaacttactcttgcaacactca

SEQ ID NO: 32224 - DNA, 22 bp, synthetic construct
  misc_feature 1..22: note = chemically synthesized
  source 1..22: mol_type = other DNA
actcttgcaacactcaacacac

SEQ ID NO: 32225 - DNA, 22 bp, synthetic construct
  misc_feature 1..22: note = chemically synthesized
  source 1..22: mol_type = other DNA
ctcttgcaacactcaacacact

SEQ ID NO: 32226 - DNA, 22 bp, synthetic construct
  misc_feature 1..22: note = chemically synthesized
  source 1..22: mol_type = other DNA
ttgcaacactcaacacacttgt

SEQ ID NO: 32227 - DNA, 22 bp, synthetic construct
  misc_feature 1..22: note = chemically synthesized
  source 1..22: mol_type = other DNA
gcaacactcaacacacttgtga

SEQ ID NO: 32228 - DNA, 22 bp, synthetic construct
  misc_feature 1..22: note = chemically synthesized
  source 1..22: mol_type = other DNA
caacactcaacacacttgtgag

SEQ ID NO: 32229 - DNA, 22 bp, synthetic construct
  misc_feature 1..22: note = chemically synthesized
  source 1..22: mol_type = other DNA
aacacacttgtgagttcttgtg

SEQ ID NO: 32230 - DNA, 22 bp, synthetic construct
  misc_feature 1..22: note = chemically synthesized
  source 1..22: mol_type = other DNA
gtgagttcttgtgcactgtctg

SEQ ID NO: 32231 - DNA, 22 bp, synthetic construct
  misc_feature 1..22: note = chemically synthesized
  source 1..22: mol_type = other DNA
tgagttcttgtgcactgtctgg

SEQ ID NO: 32232 - DNA, 22 bp, synthetic construct
  misc_feature 1..22: note = chemically synthesized
  source 1..22: mol_type = other DNA
ttgtgcactgtctggctttttt

SEQ ID NO: 32233 - DNA, 22 bp, synthetic construct
  misc_feature 1..22: note = chemically synthesized
  source 1..22: mol_type = other DNA
gtgcactgtctggcttttttgc

SEQ ID NO: 32234 - DNA, 22 bp, synthetic construct
  misc_feature 1..22: note = chemically synthesized
  source 1..22: mol_type = other DNA
tgcactgtctggcttttttgct

SEQ ID NO: 32235 - DNA, 22 bp, synthetic construct
  misc_feature 1..22: note = chemically synthesized
  source 1..22: mol_type = other DNA
tctggcttttttgctagcctat

SEQ ID NO: 32236 - DNA, 22 bp, synthetic construct
  misc_feature 1..22: note = chemically synthesized
  source 1..22: mol_type = other DNA
gcttttttgctagcctataagc

SEQ ID NO: 32237 - DNA, 22 bp, synthetic construct
  misc_feature 1..22: note = chemically synthesized
  source 1..22: mol_type = other DNA
ttttgctagcctataagctgca

SEQ ID NO: 32238 - DNA, 22 bp, synthetic construct
  misc_feature 1..22: note = chemically synthesized
  source 1..22: mol_type = other DNA
tttgctagcctataagctgcat

SEQ ID NO: 32239 - DNA, 22 bp, synthetic construct
  misc_feature 1..22: note = chemically synthesized
  source 1..22: mol_type = other DNA
ttgctagcctataagctgcatg

SEQ ID NO: 32240 - DNA, 22 bp, synthetic construct
  misc_feature 1..22: note = chemically synthesized
  source 1..22: mol_type = other DNA
tgctagcctataagctgcatga

SEQ ID NO: 32241 - DNA, 22 bp, synthetic construct
  misc_feature 1..22: note = chemically synthesized
  source 1..22: mol_type = other DNA
gctagcctataagctgcatgaa

SEQ ID NO: 32242 - DNA, 22 bp, synthetic construct
  misc_feature 1..22: note = chemically synthesized
  source 1..22: mol_type = other DNA
ctagcctataagctgcatgaag

SEQ ID NO: 32243 - DNA, 22 bp, synthetic construct
  misc_feature 1..22: note = chemically synthesized
  source 1..22: mol_type = other DNA
gcctataagctgcatgaaggct

SEQ ID NO: 32244 - DNA, 22 bp, synthetic construct
  misc_feature 1..22: note = chemically synthesized
  source 1..22: mol_type = other DNA
taagctgcatgaaggctgagac

SEQ ID NO: 32245 - DNA, 22 bp, synthetic construct
  misc_feature 1..22: note = chemically synthesized
  source 1..22: mol_type = other DNA
catgaaggctgagactatggca

SEQ ID NO: 32246 - DNA, 22 bp, synthetic construct
  misc_feature 1..22: note = chemically synthesized
  source 1..22: mol_type = other DNA
agactatggcagtcttggctca

SEQ ID NO: 32247 - DNA, 22 bp, synthetic construct
  misc_feature 1..22: note = chemically synthesized
  source 1..22: mol_type = other DNA
tggcagtcttggctcatagaag

SEQ ID NO: 32248 - DNA, 22 bp, synthetic construct
  misc_feature 1..22: note = chemically synthesized
  source 1..22: mol_type = other DNA
ggctcatagaaggtaatcagtg

SEQ ID NO: 32249 - DNA, 22 bp, synthetic construct
  misc_feature 1..22: note = chemically synthesized
  source 1..22: mol_type = other DNA
gctcatagaaggtaatcagtgg

SEQ ID NO: 32250 - DNA, 22 bp, synthetic construct
  misc_feature 1..22: note = chemically synthesized
  source 1..22: mol_type = other DNA
atagaaggtaatcagtggaaat

SEQ ID NO: 32251 - DNA, 22 bp, synthetic construct
  misc_feature 1..22: note = chemically synthesized
  source 1..22: mol_type = other DNA
gtcgattgattgaatttttccc

SEQ ID NO: 32252 - DNA, 22 bp, synthetic construct
  misc_feature 1..22: note = chemically synthesized
  source 1..22: mol_type = other DNA
tcgattgattgaatttttccct

SEQ ID NO: 32253 - DNA, 22 bp, synthetic construct
  misc_feature 1..22: note = chemically synthesized
  source 1..22: mol_type = other DNA
attgaatttttcccttaaagcc

SEQ ID NO: 32254 - DNA, 22 bp, synthetic construct
  misc_feature 1..22: note = chemically synthesized
  source 1..22: mol_type = other DNA
aatttttcccttaaagccaatt

SEQ ID NO: 32255 - DNA, 22 bp, synthetic construct
  misc_feature 1..22: note = chemically synthesized
  source 1..22: mol_type = other DNA
ttcccttaaagccaattctaat

SEQ ID NO: 32256 - DNA, 22 bp, synthetic construct
  misc_feature 1..22: note = chemically synthesized
  source 1..22: mol_type = other DNA
tcccttaaagccaattctaatg

SEQ ID NO: 32257 - DNA, 22 bp, synthetic construct
  misc_feature 1..22: note = chemically synthesized
  source 1..22: mol_type = other DNA
cccttaaagccaattctaatgt

SEQ ID NO: 32258 - DNA, 22 bp, synthetic construct
  misc_feature 1..22: note = chemically synthesized
  source 1..22: mol_type = other DNA
ccttaaagccaattctaatgta

SEQ ID NO: 32259 - DNA, 22 bp, synthetic construct
  misc_feature 1..22: note = chemically synthesized
  source 1..22: mol_type = other DNA
aaagccaattctaatgtaagtg

SEQ ID NO: 32260 - DNA, 22 bp, synthetic construct
  misc_feature 1..22: note = chemically synthesized
  source 1..22: mol_type = other DNA
aagccaattctaatgtaagtgt

SEQ ID NO: 32261 - DNA, 22 bp, synthetic construct
  misc_feature 1..22: note = chemically synthesized
  source 1..22: mol_type = other DNA
taatgtaagtgtatgtgtgctg

SEQ ID NO: 32262 - DNA, 22 bp, synthetic construct
  misc_feature 1..22: note = chemically synthesized
  source 1..22: mol_type = other DNA
atgtaagtgtatgtgtgctgct

SEQ ID NO: 32263 - DNA, 22 bp, synthetic construct
  misc_feature 1..22: note = chemically synthesized
  source 1..22: mol_type = other DNA
ctgtaaatagggttagaaccct

SEQ ID NO: 32264 - DNA, 22 bp, synthetic construct
  misc_feature 1..22: note = chemically synthesized
  source 1..22: mol_type = other DNA
taaatagggttagaaccctttt

SEQ ID NO: 32265 - DNA, 22 bp, synthetic construct
  misc_feature 1..22: note = chemically synthesized
  source 1..22: mol_type = other DNA
gaaccctttttgctctaactta

SEQ ID NO: 32266 - DNA, 22 bp, synthetic construct
  misc_feature 1..22: note = chemically synthesized
  source 1..22: mol_type = other DNA
tttgctctaacttaaataccaa

SEQ ID NO: 32267 - DNA, 22 bp, synthetic construct
  misc_feature 1..22: note = chemically synthesized
  source 1..22: mol_type = other DNA
ttgctctaacttaaataccaat

SEQ ID NO: 32268 - DNA, 22 bp, synthetic construct
  misc_feature 1..22: note = chemically synthesized
  source 1..22: mol_type = other DNA
tgctctaacttaaataccaatt

SEQ ID NO: 32269 - DNA, 22 bp, synthetic construct
  misc_feature 1..22: note = chemically synthesized
  source 1..22: mol_type = other DNA
gctctaacttaaataccaattg

SEQ ID NO: 32270 - DNA, 22 bp, synthetic construct
  misc_feature 1..22: note = chemically synthesized
  source 1..22: mol_type = other DNA
ctctaacttaaataccaattga

SEQ ID NO: 32271 - DNA, 22 bp, synthetic construct
  misc_feature 1..22: note = chemically synthesized
  source 1..22: mol_type = other DNA
taacttaaataccaattgattt

SEQ ID NO: 32272 - DNA, 22 bp, synthetic construct
  misc_feature 1..22: note = chemically synthesized
  source 1..22: mol_type = other DNA
acttaaataccaattgatttta

SEQ ID NO: 32273 - DNA, 22 bp, synthetic construct
  misc_feature 1..22: note = chemically synthesized
  source 1..22: mol_type = other DNA
aaataccaattgattttagccc

SEQ ID NO: 32274 - DNA, 22 bp, synthetic construct
  misc_feature 1..22: note = chemically synthesized
  source 1..22: mol_type = other DNA
aataccaattgattttagccca

SEQ ID NO: 32275 - DNA, 22 bp, synthetic construct
  misc_feature 1..22: note = chemically synthesized
  source 1..22: mol_type = other DNA
attttagcccaggataatgaaa

SEQ ID NO: 32276 - DNA, 22 bp, synthetic construct
  misc_feature 1..22: note = chemically synthesized
  source 1..22: mol_type = other DNA
tagcccaggataatgaaaatgc

SEQ ID NO: 32277 - DNA, 22 bp, synthetic construct
  misc_feature 1..22: note = chemically synthesized
  source 1..22: mol_type = other DNA
agcccaggataatgaaaatgca

SEQ ID NO: 32278 - DNA, 22 bp, synthetic construct
  misc_feature 1..22: note = chemically synthesized
  source 1..22: mol_type = other DNA
gcccaggataatgaaaatgcag

SEQ ID NO: 32279 - DNA, 22 bp, synthetic construct
  misc_feature 1..22: note = chemically synthesized
  source 1..22: mol_type = other DNA
gctcagcaagcgaaatgtaacc

SEQ ID NO: 32280 - DNA, 22 bp, synthetic construct
  misc_feature 1..22: note = chemically synthesized
  source 1..22: mol_type = other DNA
ctcagcaagcgaaatgtaacca

SEQ ID NO: 32281 - DNA, 22 bp, synthetic construct
  misc_feature 1..22: note = chemically synthesized
  source 1..22: mol_type = other DNA
agcaagcgaaatgtaaccatct

SEQ ID NO: 32282 - DNA, 22 bp, synthetic construct
  misc_feature 1..22: note = chemically synthesized
  source 1..22: mol_type = other DNA
aacacagctccttaagagatat

SEQ ID NO: 32283 - DNA, 22 bp, synthetic construct
  misc_feature 1..22: note = chemically synthesized
  source 1..22: mol_type = other DNA
cttaagagatataagaagggtg

SEQ ID NO: 32284 - DNA, 22 bp, synthetic construct
  misc_feature 1..22: note = chemically synthesized
  source 1..22: mol_type = other DNA
aagagatataagaagggtggaa

SEQ ID NO: 32285 - DNA, 22 bp, synthetic construct
  misc_feature 1..22: note = chemically synthesized
  source 1..22: mol_type = other DNA
agagatataagaagggtggaag

SEQ ID NO: 32286 - DNA, 22 bp, synthetic construct
  misc_feature 1..22: note = chemically synthesized
  source 1..22: mol_type = other DNA
cagagttctcagttgttgcggg

SEQ ID NO: 32287 - DNA, 22 bp, synthetic construct
  misc_feature 1..22: note = chemically synthesized
  source 1..22: mol_type = other DNA
tcagttgttgcgggaagtctgg

SEQ ID NO: 32288 - DNA, 22 bp, synthetic construct
  misc_feature 1..22: note = chemically synthesized
  source 1..22: mol_type = other DNA
agttgttgcgggaagtctggga

SEQ ID NO: 32289 - DNA, 22 bp, synthetic construct
  misc_feature 1..22: note = chemically synthesized
  source 1..22: mol_type = other DNA
ttgcgggaagtctgggactcca

SEQ ID NO: 32290 - DNA, 22 bp, synthetic construct
  misc_feature 1..22: note = chemically synthesized
  source 1..22: mol_type = other DNA
cgggaagtctgggactccaaac

SEQ ID NO: 32291 - DNA, 22 bp, synthetic construct
  misc_feature 1..22: note = chemically synthesized
  source 1..22: mol_type = other DNA
ggactccaaacggagggatcag

SEQ ID NO: 32292 - DNA, 22 bp, synthetic construct
  misc_feature 1..22: note = chemically synthesized
  source 1..22: mol_type = other DNA
caaacggagggatcagctgaag

SEQ ID NO: 32293 - DNA, 22 bp, synthetic construct
  misc_feature 1..22: note = chemically synthesized
  source 1..22: mol_type = other DNA
aagccatggcagaagttcgtgg

SEQ ID NO: 32294 - DNA, 22 bp, synthetic construct
  misc_feature 1..22: note = chemically synthesized
  source 1..22: mol_type = other DNA
gtggattgtgaagatttcatgg

SEQ ID NO: 32295 - DNA, 22 bp, synthetic construct
  misc_feature 1..22: note = chemically synthesized
  source 1..22: mol_type = other DNA
tgaagatttcatggacatttat

SEQ ID NO: 32296 - DNA, 22 bp, synthetic construct
  misc_feature 1..22: note = chemically synthesized
  source 1..22: mol_type = other DNA
catggacatttattagttcccc

SEQ ID NO: 32297 - DNA, 22 bp, synthetic construct
  misc_feature 1..22: note = chemically synthesized
  source 1..22: mol_type = other DNA
atggacatttattagttcccca

SEQ ID NO: 32298 - DNA, 22 bp, synthetic construct
  misc_feature 1..22: note = chemically synthesized
  source 1..22: mol_type = other DNA
attagttccccaaattaatact

SEQ ID NO: 32299 - DNA, 22 bp, synthetic construct
  misc_feature 1..22: note = chemically synthesized
  source 1..22: mol_type = other DNA
ttagttccccaaattaatactt

SEQ ID NO: 32300 - DNA, 22 bp, synthetic construct
  misc_feature 1..22: note = chemically synthesized
  source 1..22: mol_type = other DNA
gttccccaaattaatacttttg

SEQ ID NO: 32301 - DNA, 22 bp, synthetic construct
  misc_feature 1..22: note = chemically synthesized
  source 1..22: mol_type = other DNA
cccaaattaatacttttgtaat

SEQ ID NO: 32302 - DNA, 22 bp, synthetic construct
  misc_feature 1..22: note = chemically synthesized
  source 1..22: mol_type = other DNA
atacttttgtaatttcttatgc

SEQ ID NO: 32303 - DNA, 22 bp, synthetic construct
  misc_feature 1..22: note = chemically synthesized
  source 1..22: mol_type = other DNA
ttgtaatttcttatgcctgtct

SEQ ID NO: 32304 - DNA, 22 bp, synthetic construct
  misc_feature 1..22: note = chemically synthesized
  source 1..22: mol_type = other DNA
tgtaatttcttatgcctgtctt

SEQ ID NO: 32305 - DNA, 22 bp, synthetic construct
  misc_feature 1..22: note = chemically synthesized
  source 1..22: mol_type = other DNA
gtaatttcttatgcctgtcttt

SEQ ID NO: 32306 - DNA, 22 bp, synthetic construct
  misc_feature 1..22: note = chemically synthesized
  source 1..22: mol_type = other DNA
taatttcttatgcctgtcttta

SEQ ID NO: 32307 - DNA, 22 bp, synthetic construct
  misc_feature 1..22: note = chemically synthesized
  source 1..22: mol_type = other DNA
cttatgcctgtctttactgcaa

SEQ ID NO: 32308 - DNA, 22 bp, synthetic construct
  misc_feature 1..22: note = chemically synthesized
  source 1..22: mol_type = other DNA
ttatgcctgtctttactgcaat

SEQ ID NO: 32309 - DNA, 22 bp, synthetic construct
  misc_feature 1..22: note = chemically synthesized
  source 1..22: mol_type = other DNA
atgcctgtctttactgcaatct

SEQ ID NO: 32310 - DNA, 22 bp, synthetic construct
  misc_feature 1..22: note = chemically synthesized
  source 1..22: mol_type = other DNA
tgcctgtctttactgcaatctc

SEQ ID NO: 32311 - DNA, 22 bp, synthetic construct
  misc_feature 1..22: note = chemically synthesized
  source 1..22: mol_type = other DNA
tctttactgcaatctctaaaca

SEQ ID NO: 32312 - DNA, 22 bp, synthetic construct
  misc_feature 1..22: note = chemically synthesized
  source 1..22: mol_type = other DNA
tactgcaatctctaaacataaa

SEQ ID NO: 32313 - DNA, 22 bp, synthetic construct
  misc_feature 1..22: note = chemically synthesized
  source 1..22: mol_type = other DNA
actgcaatctctaaacataaat

SEQ ID NO: 32314 - DNA, 22 bp, synthetic construct
  misc_feature 1..22: note = chemically synthesized
  source 1..22: mol_type = other DNA
ctgcaatctctaaacataaatt

SEQ ID NO: 32315 - DNA, 22 bp, synthetic construct
  misc_feature 1..22: note = chemically synthesized
  source 1..22: mol_type = other DNA
caatctctaaacataaattgta

SEQ ID NO: 32316 - DNA, 22 bp, synthetic construct
  misc_feature 1..22: note = chemically synthesized
  source 1..22: mol_type = other DNA
taaacataaattgtaaagattt

SEQ ID NO: 32317 - DNA, 22 bp, synthetic construct
  misc_feature 1..22: note = chemically synthesized
  source 1..22: mol_type = other DNA
aacataaattgtaaagatttca

SEQ ID NO: 32318 - DNA, 22 bp, synthetic construct
  misc_feature 1..22: note = chemically synthesized
  source 1..22: mol_type = other DNA
taaagatttcatggacacttat

SEQ ID NO: 32319 - DNA, 22 bp, synthetic construct
  misc_feature 1..22: note = chemically synthesized
  source 1..22: mol_type = other DNA
catggacacttatcacttcccc

SEQ ID NO: 32320 - DNA, 22 bp, synthetic construct
  misc_feature 1..22: note = chemically synthesized
  source 1..22: mol_type = other DNA
atggacacttatcacttcccca

SEQ ID NO: 32321 - DNA, 22 bp, synthetic construct
  misc_feature 1..22: note = chemically synthesized
  source 1..22: mol_type = other DNA
atcacttccccagtcaatatcc

SEQ ID NO: 32322 - DNA, 22 bp, synthetic construct
  misc_feature 1..22: note = chemically synthesized
  source 1..22: mol_type = other DNA
tcacttccccagtcaatatcct

SEQ ID NO: 32323 - DNA, 22 bp, synthetic construct
  misc_feature 1..22: note = chemically synthesized
  source 1..22: mol_type = other DNA
ccccagtcaatatccttgtgat

SEQ ID NO: 32324 - DNA, 22 bp, synthetic construct
  misc_feature 1..22: note = chemically synthesized
  source 1..22: mol_type = other DNA
cccagtcaatatccttgtgatt

SEQ ID NO: 32325 - DNA, 22 bp, synthetic construct
  misc_feature 1..22: note = chemically synthesized
  source 1..22: mol_type = other DNA
gtgatttatgcctgtctttact

SEQ ID NO: 32326 - DNA, 22 bp, synthetic construct
  misc_feature 1..22: note = chemically synthesized
  source 1..22: mol_type = other DNA
tgatttatgcctgtctttactt

SEQ ID NO: 32327 - DNA, 22 bp, synthetic construct
  misc_feature 1..22: note = chemically synthesized
  source 1..22: mol_type = other DNA
atgcctgtctttactttaatct

SEQ ID NO: 32328 - DNA, 22 bp, synthetic construct
  misc_feature 1..22: note = chemically synthesized
  source 1..22: mol_type = other DNA
tgcctgtctttactttaatctc

SEQ ID NO: 32329 - DNA, 22 bp, synthetic construct
  misc_feature 1..22: note = chemically synthesized
  source 1..22: mol_type = other DNA
tctttactttaatctcttaatc

SEQ ID NO: 32330 - DNA, 22 bp, synthetic construct
  misc_feature 1..22: note = chemically synthesized
  source 1..22: mol_type = other DNA
tactttaatctcttaatcctgt

SEQ ID NO: 32331 - DNA, 22 bp, synthetic construct
  misc_feature 1..22: note = chemically synthesized
  source 1..22: mol_type = other DNA
actttaatctcttaatcctgtc

SEQ ID NO: 32332 - DNA, 22 bp, synthetic construct
  misc_feature 1..22: note = chemically synthesized
  source 1..22: mol_type = other DNA
ctttaatctcttaatcctgtca

SEQ ID NO: 32333 - DNA, 22 bp, synthetic construct
  misc_feature 1..22: note = chemically synthesized
  source 1..22: mol_type = other DNA
taatctcttaatcctgtcagct

SEQ ID NO: 32334 - DNA, 22 bp, synthetic construct
  misc_feature 1..22: note = chemically synthesized
  source 1..22: mol_type = other DNA
aatctcttaatcctgtcagctg

SEQ ID NO: 32335 - DNA, 22 bp, synthetic construct
  misc_feature 1..22: note = chemically synthesized
  source 1..22: mol_type = other DNA
atctcttaatcctgtcagctga

SEQ ID NO: 32336 - DNA, 22 bp, synthetic construct
  misc_feature 1..22: note = chemically synthesized
  source 1..22: mol_type = other DNA
ttaatcctgtcagctgaggagg

SEQ ID NO: 32337 - DNA, 22 bp, synthetic construct
  misc_feature 1..22: note = chemically synthesized
  source 1..22: mol_type = other DNA
aatcctgtcagctgaggaggat

SEQ ID NO: 32338 - DNA, 22 bp, synthetic construct
  misc_feature 1..22: note = chemically synthesized
  source 1..22: mol_type = other DNA
atcctgtcagctgaggaggatg

SEQ ID NO: 32339 - DNA, 22 bp, synthetic construct
  misc_feature 1..22: note = chemically synthesized
  source 1..22: mol_type = other DNA
tcagctgaggaggatgtatatt

SEQ ID NO: 32340 - DNA, 22 bp, synthetic construct
  misc_feature 1..22: note = chemically synthesized
  source 1..22: mol_type = other DNA
aggaggatgtatattgcctcag

SEQ ID NO: 32341 - DNA, 22 bp, synthetic construct
  misc_feature 1..22: note = chemically synthesized
  source 1..22: mol_type = other DNA
cctcaggaccctgtaataattg

SEQ ID NO: 32342 - DNA, 22 bp, synthetic construct
  misc_feature 1..22: note = chemically synthesized
  source 1..22: mol_type = other DNA
aggaccctgtaataattgcatt

SEQ ID NO: 32343 - DNA, 22 bp, synthetic construct
  misc_feature 1..22: note = chemically synthesized
  source 1..22: mol_type = other DNA
taataattgcattaactgcaca

SEQ ID NO: 32344 - DNA, 22 bp, synthetic construct
  misc_feature 1..22: note = chemically synthesized
  source 1..22: mol_type = other DNA
cattaactgcacaaattgtaca

SEQ ID NO: 32345 - DNA, 22 bp, synthetic construct
  misc_feature 1..22: note = chemically synthesized
  source 1..22: mol_type = other DNA
actgcacaaattgtacagcatg

SEQ ID NO: 32346 - DNA, 22 bp, synthetic construct
  misc_feature 1..22: note = chemically synthesized
  source 1..22: mol_type = other DNA
cacaaattgtacagcatgtgtg

SEQ ID NO: 32347 - DNA, 22 bp, synthetic construct
  misc_feature 1..22: note = chemically synthesized
  source 1..22: mol_type = other DNA
tacagcatgtgtgtttgagcaa

SEQ ID NO: 32348 - DNA, 22 bp, synthetic construct
  misc_feature 1..22: note = chemically synthesized
  source 1..22: mol_type = other DNA
gagcaacatgaaatgtggacac

SEQ ID NO: 32349 - DNA, 22 bp, synthetic construct
  misc_feature 1..22: note = chemically synthesized
  source 1..22: mol_type = other DNA
agcaacatgaaatgtggacacc

SEQ ID NO: 32350 - DNA, 22 bp, synthetic construct
  misc_feature 1..22: note = chemically synthesized
  source 1..22: mol_type = other DNA
gaaaaaagaacaggataacagc

SEQ ID NO: 32351 - DNA, 22 bp, synthetic construct
  misc_feature 1..22: note = chemically synthesized
  source 1..22: mol_type = other DNA
aaaaaagaacaggataacagca

SEQ ID NO: 32352 - DNA, 22 bp, synthetic construct
  misc_feature 1..22: note = chemically synthesized
  source 1..22: mol_type = other DNA
ttcagggaataagagagataac

SEQ ID NO: 32353 - DNA, 22 bp, synthetic construct
  misc_feature 1..22: note = chemically synthesized
  source 1..22: mol_type = other DNA
agggaataagagagataacctt

SEQ ID NO: 32354 - DNA, 22 bp, synthetic construct
  misc_feature 1..22: note = chemically synthesized
  source 1..22: mol_type = other DNA
aaactctgactgctggtgagcc

SEQ ID NO: 32355 - DNA, 22 bp, synthetic construct
  misc_feature 1..22: note = chemically synthesized
  source 1..22: mol_type = other DNA
aactctgactgctggtgagcca

SEQ ID NO: 32356 - DNA, 22 bp, synthetic construct
  misc_feature 1..22: note = chemically synthesized
  source 1..22: mol_type = other DNA
tgactgctggtgagccaggcag

SEQ ID NO: 32357 - DNA, 22 bp, synthetic construct
  misc_feature 1..22: note = chemically synthesized
  source 1..22: mol_type = other DNA
actgctggtgagccaggcagaa

SEQ ID NO: 32358 - DNA, 22 bp, synthetic construct
  misc_feature 1..22: note = chemically synthesized
  source 1..22: mol_type = other DNA
ctggtgagccaggcagaacaga

SEQ ID NO: 32359 - DNA, 22 bp, synthetic construct
  misc_feature 1..22: note = chemically synthesized
  source 1..22: mol_type = other DNA
gtgagccaggcagaacagagcc

SEQ ID NO: 32360 - DNA, 22 bp, synthetic construct
  misc_feature 1..22: note = chemically synthesized
  source 1..22: mol_type = other DNA
ctcttctttcaaaagcaaatgg

SEQ ID NO: 32361 - DNA, 22 bp, synthetic construct
  misc_feature 1..22: note = chemically synthesized
  source 1..22: mol_type = other DNA
tcttctttcaaaagcaaatggg

SEQ ID NO: 32362 - DNA, 22 bp, synthetic construct
  misc_feature 1..22: note = chemically synthesized
  source 1..22: mol_type = other DNA
ttctttcaaaagcaaatgggag

SEQ ID NO: 32363 - DNA, 22 bp, synthetic construct
  misc_feature 1..22: note = chemically synthesized
  source 1..22: mol_type = other DNA
ctttcaaaagcaaatgggagaa

SEQ ID NO: 32364 - DNA, 22 bp, synthetic construct
  misc_feature 1..22: note = chemically synthesized
  source 1..22: mol_type = other DNA
tttcaaaagcaaatgggagaaa

SEQ ID NO: 32365 - DNA, 22 bp, synthetic construct
  misc_feature 1..22: note = chemically synthesized
  source 1..22: mol_type = other DNA
tcaaaagcaaatgggagaaata

SEQ ID NO: 32366 - DNA, 22 bp, synthetic construct
  misc_feature 1..22: note = chemically synthesized
  source 1..22: mol_type = other DNA
caaaagcaaatgggagaaatat

SEQ ID NO: 32367 - DNA, 22 bp, synthetic construct
  misc_feature 1..22: note = chemically synthesized
  source 1..22: mol_type = other DNA
aaaagcaaatgggagaaatatc

SEQ ID NO: 32368 - DNA, 22 bp, synthetic construct
  misc_feature 1..22: note = chemically synthesized
  source 1..22: mol_type = other DNA
aattctttttctcagcatggaa

SEQ ID NO: 32369 - DNA, 22 bp, synthetic construct
  misc_feature 1..22: note = chemically synthesized
  source 1..22: mol_type = other DNA
tttttctcagcatggaacatcc

SEQ ID NO: 32370 - DNA, 22 bp, synthetic construct
  misc_feature 1..22: note = chemically synthesized
  source 1..22: mol_type = other DNA
tttctcagcatggaacatccct

SEQ ID NO: 32371 - DNA, 22 bp, synthetic construct
  misc_feature 1..22: note = chemically synthesized
  source 1..22: mol_type = other DNA
ttctcagcatggaacatccctg

SEQ ID NO: 32372 - DNA, 22 bp, synthetic construct
  misc_feature 1..22: note = chemically synthesized
  source 1..22: mol_type = other DNA
tctcagcatggaacatccctga

SEQ ID NO: 32373 - DNA, 22 bp, synthetic construct
  misc_feature 1..22: note = chemically synthesized
  source 1..22: mol_type = other DNA
ctcagcatggaacatccctgag

SEQ ID NO: 32374 - DNA, 22 bp, synthetic construct
  misc_feature 1..22: note = chemically synthesized
  source 1..22: mol_type = other DNA
tcagcatggaacatccctgaga

SEQ ID NO: 32375 - DNA, 22 bp, synthetic construct
  misc_feature 1..22: note = chemically synthesized
  source 1..22: mol_type = other DNA
agcatggaacatccctgagaaa

SEQ ID NO: 32376 - DNA, 22 bp, synthetic construct
  misc_feature 1..22: note = chemically synthesized
  source 1..22: mol_type = other DNA
agaaagagaatacgagccagga

SEQ ID NO: 32377 - DNA, 22 bp, synthetic construct
  misc_feature 1..22: note = chemically synthesized
  source 1..22: mol_type = other DNA
ataaacagcccccctccaggtg

SEQ ID NO: 32378 - DNA, 22 bp, synthetic construct
  misc_feature 1..22: note = chemically synthesized
  source 1..22: mol_type = other DNA
taaacagcccccctccaggtgc

SEQ ID NO: 32379 - DNA, 22 bp, synthetic construct
  misc_feature 1..22: note = chemically synthesized
  source 1..22: mol_type = other DNA
caggtgcgcctgtctcttatgg

SEQ ID NO: 32380 - DNA, 22 bp, synthetic construct
  misc_feature 1..22: note = chemically synthesized
  source 1..22: mol_type = other DNA
tctcttatggtcgagactgcag

SEQ ID NO: 32381 - DNA, 22 bp, synthetic construct
  misc_feature 1..22: note = chemically synthesized
  source 1..22: mol_type = other DNA
ttatggtcgagactgcaggggt

SEQ ID NO: 32382 - DNA, 22 bp, synthetic construct
  misc_feature 1..22: note = chemically synthesized
  source 1..22: mol_type = other DNA
atggtcgagactgcaggggtga

SEQ ID NO: 32383 - DNA, 22 bp, synthetic construct
  misc_feature 1..22: note = chemically synthesized
  source 1..22: mol_type = other DNA
tggtcgagactgcaggggtgaa

SEQ ID NO: 32384 - DNA, 22 bp, synthetic construct
  misc_feature 1..22: note = chemically synthesized
  source 1..22: mol_type = other DNA
caggggtgaaatagaccccagt

SEQ ID NO: 32385 - DNA, 22 bp, synthetic construct
  misc_feature 1..22: note = chemically synthesized
  source 1..22: mol_type = other DNA
ccacagcgctcccaggcttatt

SEQ ID NO: 32386 - DNA, 22 bp, synthetic construct
  misc_feature 1..22: note = chemically synthesized
  source 1..22: mol_type = other DNA
ccaggcttattaggaagaggaa

SEQ ID NO: 32387 - DNA, 22 bp, synthetic construct
  misc_feature 1..22: note = chemically synthesized
  source 1..22: mol_type = other DNA
attaggaagaggaaattcccgc

SEQ ID NO: 32388 - DNA, 22 bp, synthetic construct
  misc_feature 1..22: note = chemically synthesized
  source 1..22: mol_type = other DNA
ttaggaagaggaaattcccgcc

SEQ ID NO: 32389 - DNA, 22 bp, synthetic construct
  misc_feature 1..22: note = chemically synthesized
  source 1..22: mol_type = other DNA
ggaagaggaaattcccgcctaa

SEQ ID NO: 32390 - DNA, 22 bp, synthetic construct
  misc_feature 1..22: note = chemically synthesized
  source 1..22: mol_type = other DNA
ccgcctaataaattttggtcag

SEQ ID NO: 32391 - DNA, 22 bp, synthetic construct
  misc_feature 1..22: note = chemically synthesized
  source 1..22: mol_type = other DNA
ataaattttggtcagaccagtt

SEQ ID NO: 32392 - DNA, 22 bp, synthetic construct
  misc_feature 1..22: note = chemically synthesized
  source 1..22: mol_type = other DNA
tggtcagaccagttgatcctaa

SEQ ID NO: 32393 - DNA, 22 bp, synthetic construct
  misc_feature 1..22: note = chemically synthesized
  source 1..22: mol_type = other DNA
ggtcagaccagttgatcctaaa

SEQ ID NO: 32394 - DNA, 22 bp, synthetic construct
  misc_feature 1..22: note = chemically synthesized
  source 1..22: mol_type = other DNA
gtcagaccagttgatcctaaaa

SEQ ID NO: 32395 - DNA, 22 bp, synthetic construct
  misc_feature 1..22: note = chemically synthesized
  source 1..22: mol_type = other DNA
atcctaaaaaccctgtctcctg

SEQ ID NO: 32396 - DNA, 22 bp, synthetic construct
  misc_feature 1..22: note = chemically synthesized
  source 1..22: mol_type = other DNA
aaaaccctgtctcctgataaga

SEQ ID NO: 32397 - DNA, 22 bp, synthetic construct
  misc_feature 1..22: note = chemically synthesized
  source 1..22: mol_type = other DNA
tctcctgataagatgttatcaa

SEQ ID NO: 32398 - DNA, 22 bp, synthetic construct
  misc_feature 1..22: note = chemically synthesized
  source 1..22: mol_type = other DNA
ctgataagatgttatcaatgac

SEQ ID NO: 32399 - DNA, 22 bp, synthetic construct
  misc_feature 1..22: note = chemically synthesized
  source 1..22: mol_type = other DNA
ataagatgttatcaatgacaat

SEQ ID NO: 32400 - DNA, 22 bp, synthetic construct
  misc_feature 1..22: note = chemically synthesized
  source 1..22: mol_type = other DNA
tcaatgacaatggtgcccgaaa

SEQ ID NO: 32401 - DNA, 22 bp, synthetic construct
  misc_feature 1..22: note = chemically synthesized
  source 1..22: mol_type = other DNA
cattagcaattttaatttcgcc

SEQ ID NO: 32402 - DNA, 22 bp, synthetic construct
  misc_feature 1..22: note = chemically synthesized
  source 1..22: mol_type = other DNA
attagcaattttaatttcgcct

SEQ ID NO: 32403 - DNA, 22 bp, synthetic construct
  misc_feature 1..22: note = chemically synthesized
  source 1..22: mol_type = other DNA
gcaattttaatttcgcctcggt

SEQ ID NO: 32404 - DNA, 22 bp, synthetic construct
  misc_feature 1..22: note = chemically synthesized
  source 1..22: mol_type = other DNA
taatttcgcctcggtcctgtgg

SEQ ID NO: 32405 - DNA, 22 bp, synthetic construct
  misc_feature 1..22: note = chemically synthesized
  source 1..22: mol_type = other DNA
aatttcgcctcggtcctgtggt

SEQ ID NO: 32406 - DNA, 22 bp, synthetic construct
  misc_feature 1..22: note = chemically synthesized
  source 1..22: mol_type = other DNA
atttcgcctcggtcctgtggtc

SEQ ID NO: 32407 - DNA, 22 bp, synthetic construct
  misc_feature 1..22: note = chemically synthesized
  source 1..22: mol_type = other DNA
cgcctcggtcctgtggtcctgt

SEQ ID NO: 32408 - DNA, 22 bp, synthetic construct
  misc_feature 1..22: note = chemically synthesized
  source 1..22: mol_type = other DNA
gcctcggtcctgtggtcctgtg

SEQ ID NO: 32409 - DNA, 22 bp, synthetic construct
  misc_feature 1..22: note = chemically synthesized
  source 1..22: mol_type = other DNA
ggtcctgtggtcctgtgatctc

SEQ ID NO: 32410 - DNA, 22 bp, synthetic construct
  misc_feature 1..22: note = chemically synthesized
  source 1..22: mol_type = other DNA
tggtcctgtgatctcaccctgc

SEQ ID NO: 32411 - DNA, 22 bp, synthetic construct
  misc_feature 1..22: note = chemically synthesized
  source 1..22: mol_type = other DNA
tgatctcaccctgcctccactt

SEQ ID NO: 32412 - DNA, 22 bp, synthetic construct
  misc_feature 1..22: note = chemically synthesized
  source 1..22: mol_type = other DNA
accctgcctccacttgccttgt

SEQ ID NO: 32413 - DNA, 22 bp, synthetic construct
  misc_feature 1..22: note = chemically synthesized
  source 1..22: mol_type = other DNA
cctccacttgccttgtgatatt

SEQ ID NO: 32414 - DNA, 22 bp, synthetic construct
  misc_feature 1..22: note = chemically synthesized
  source 1..22: mol_type = other DNA
cacttgccttgtgatattctat

SEQ ID NO: 32415 - DNA, 22 bp, synthetic construct
  misc_feature 1..22: note = chemically synthesized
  source 1..22: mol_type = other DNA
gccttgtgatattctattacct

SEQ ID NO: 32416 - DNA, 22 bp, synthetic construct
  misc_feature 1..22: note = chemically synthesized
  source 1..22: mol_type = other DNA
ccttgtgatattctattacctt

SEQ ID NO: 32417 - DNA, 22 bp, synthetic construct
  misc_feature 1..22: note = chemically synthesized
  source 1..22: mol_type = other DNA
gtgatattctattaccttgtaa

SEQ ID NO: 32418 - DNA, 22 bp, synthetic construct
  misc_feature 1..22: note = chemically synthesized
  source 1..22: mol_type = other DNA
tgatattctattaccttgtaaa

SEQ ID NO: 32419 - DNA, 22 bp, synthetic construct
  misc_feature 1..22: note = chemically synthesized
  source 1..22: mol_type = other DNA
tattaccttgtaaagtacttga

SEQ ID NO: 32420 - DNA, 22 bp, synthetic construct
  misc_feature 1..22: note = chemically synthesized
  source 1..22: mol_type = other DNA
ttaccttgtaaagtacttgatg

SEQ ID NO: 32421 - DNA, 22 bp, synthetic construct
  misc_feature 1..22: note = chemically synthesized
  source 1..22: mol_type = other DNA
ccttgtaaagtacttgatgtct

SEQ ID NO: 32422 - DNA, 22 bp, synthetic construct
  misc_feature 1..22: note = chemically synthesized
  source 1..22: mol_type = other DNA
gtaaagtacttgatgtctgtga

SEQ ID NO: 32423 - DNA, 22 bp, synthetic construct
  misc_feature 1..22: note = chemically synthesized
  source 1..22: mol_type = other DNA
taaagtacttgatgtctgtgac

SEQ ID NO: 32424 - DNA, 22 bp, synthetic construct
  misc_feature 1..22: note = chemically synthesized
  source 1..22: mol_type = other DNA
gatgtctgtgacccacacctat

SEQ ID NO: 32425 - DNA, 22 bp, synthetic construct
  misc_feature 1..22: note = chemically synthesized
  source 1..22: mol_type = other DNA
atgtctgtgacccacacctatt

SEQ ID NO: 32426 - DNA, 22 bp, synthetic construct
  misc_feature 1..22: note = chemically synthesized
  source 1..22: mol_type = other DNA
tgacccacacctatttgcacac

SEQ ID NO: 32427 - DNA, 22 bp, synthetic construct
  misc_feature 1..22: note = chemically synthesized
  source 1..22: mol_type = other DNA
tttgcacactgcctccccattt

SEQ ID NO: 32428 - DNA, 22 bp, synthetic construct
  misc_feature 1..22: note = chemically synthesized
  source 1..22: mol_type = other DNA
gcacactgcctccccatttgaa

SEQ ID NO: 32429 - DNA, 22 bp, synthetic construct
  misc_feature 1..22: note = chemically synthesized
  source 1..22: mol_type = other DNA
cacactgcctccccatttgaaa

SEQ ID NO: 32430 - DNA, 22 bp, synthetic construct
  misc_feature 1..22: note = chemically synthesized
  source 1..22: mol_type = other DNA
cctccccatttgaaaatcccta

SEQ ID NO: 32431 - DNA, 22 bp, synthetic construct
  misc_feature 1..22: note = chemically synthesized
  source 1..22: mol_type = other DNA
cccatttgaaaatccctaatac

SEQ ID NO: 32432 - DNA, 22 bp, synthetic construct
  misc_feature 1..22: note = chemically synthesized
  source 1..22: mol_type = other DNA
gaaaatccctaatacaaacttg

SEQ ID NO: 32433 - DNA, 22 bp, synthetic construct
  misc_feature 1..22: note = chemically synthesized
  source 1..22: mol_type = other DNA
aaaatccctaatacaaacttgc

SEQ ID NO: 32434 - DNA, 22 bp, synthetic construct
  misc_feature 1..22: note = chemically synthesized
  source 1..22: mol_type = other DNA
atacaaacttgctggtttttgt

SEQ ID NO: 32435 - DNA, 22 bp, synthetic construct
  misc_feature 1..22: note = chemically synthesized
  source 1..22: mol_type = other DNA
gctggtttttgtggcttgtggg

SEQ ID NO: 32436 - DNA, 22 bp, synthetic construct
  misc_feature 1..22: note = chemically synthesized
  source 1..22: mol_type = other DNA
ctggtttttgtggcttgtgggg

SEQ ID NO: 32437 - DNA, 22 bp, synthetic construct
  misc_feature 1..22: note = chemically synthesized
  source 1..22: mol_type = other DNA
gtttttgtggcttgtggggcat

SEQ ID NO: 32438 - DNA, 22 bp, synthetic construct
  misc_feature 1..22: note = chemically synthesized
  source 1..22: mol_type = other DNA
ttgtggcttgtggggcatcacg

SEQ ID NO: 32439 - DNA, 22 bp, synthetic construct
  misc_feature 1..22: note = chemically synthesized
  source 1..22: mol_type = other DNA
tgtggcttgtggggcatcacgg

SEQ ID NO: 32440 - DNA, 22 bp, synthetic construct
  misc_feature 1..22: note = chemically synthesized
  source 1..22: mol_type = other DNA
gtggcttgtggggcatcacgga

SEQ ID NO: 32441 - DNA, 22 bp, synthetic construct
  misc_feature 1..22: note = chemically synthesized
  source 1..22: mol_type = other DNA
tggcttgtggggcatcacggaa

SEQ ID NO: 32442 - DNA, 22 bp, synthetic construct
  misc_feature 1..22: note = chemically synthesized
  source 1..22: mol_type = other DNA
gtggggcatcacggaacctacc

SEQ ID NO: 32443 - DNA, 22 bp, synthetic construct
  misc_feature 1..22: note = chemically synthesized
  source 1..22: mol_type = other DNA
tggggcatcacggaacctaccg

SEQ ID NO: 32444 - DNA, 22 bp, synthetic construct
  misc_feature 1..22: note = chemically synthesized
  source 1..22: mol_type = other DNA
ccgaaatgtgatgcctcccccg

SEQ ID NO: 32445 - DNA, 22 bp, synthetic construct
  misc_feature 1..22: note = chemically synthesized
  source 1..22: mol_type = other DNA
ccccggatgcccggctttaaaa

SEQ ID NO: 32446 - DNA, 22 bp, synthetic construct
  misc_feature 1..22: note = chemically synthesized
  source 1..22: mol_type = other DNA
taaaatttctctcttttgtact

SEQ ID NO: 32447 - DNA, 22 bp, synthetic construct
  misc_feature 1..22: note = chemically synthesized
  source 1..22: mol_type = other DNA
aaaatttctctcttttgtactc

SEQ ID NO: 32448 - DNA, 22 bp, synthetic construct
  misc_feature 1..22: note = chemically synthesized
  source 1..22: mol_type = other DNA
aaatttctctcttttgtactct

SEQ ID NO: 32449 - DNA, 22 bp, synthetic construct
  misc_feature 1..22: note = chemically synthesized
  source 1..22: mol_type = other DNA
ctctcttttgtactctgtccct

SEQ ID NO: 32450 - DNA, 22 bp, synthetic construct
  misc_feature 1..22: note = chemically synthesized
  source 1..22: mol_type = other DNA
tctcttttgtactctgtccctt

SEQ ID NO: 32451 - DNA, 22 bp, synthetic construct
  misc_feature 1..22: note = chemically synthesized
  source 1..22: mol_type = other DNA
tcttttgtactctgtcccttta

SEQ ID NO: 32452 - DNA, 22 bp, synthetic construct
  misc_feature 1..22: note = chemically synthesized
  source 1..22: mol_type = other DNA
ttttgtactctgtccctttatt

SEQ ID NO: 32453 - DNA, 22 bp, synthetic construct
  misc_feature 1..22: note = chemically synthesized
  source 1..22: mol_type = other DNA
ttgtactctgtccctttatttc

SEQ ID NO: 32454 - DNA, 22 bp, synthetic construct
  misc_feature 1..22: note = chemically synthesized
  source 1..22: mol_type = other DNA
tgtactctgtccctttatttct

SEQ ID NO: 32455 - DNA, 22 bp, synthetic construct
  misc_feature 1..22: note = chemically synthesized
  source 1..22: mol_type = other DNA
gtactctgtccctttatttcta

SEQ ID NO: 32456 - DNA, 22 bp, synthetic construct
  misc_feature 1..22: note = chemically synthesized
  source 1..22: mol_type = other DNA
tactctgtccctttatttctaa

SEQ ID NO: 32457 - DNA, 22 bp, synthetic construct
  misc_feature 1..22: note = chemically synthesized
  source 1..22: mol_type = other DNA
tgtccctttatttctaaagttg

SEQ ID NO: 32458 - DNA, 22 bp, synthetic construct
  misc_feature 1..22: note = chemically synthesized
  source 1..22: mol_type = other DNA
tccctttatttctaaagttggc

SEQ ID NO: 32459 - DNA, 22 bp, synthetic construct
  misc_feature 1..22: note = chemically synthesized
  source 1..22: mol_type = other DNA
tatttctaaagttggccgacgc

SEQ ID NO: 32460 - DNA, 22 bp, synthetic construct
  misc_feature 1..22: note = chemically synthesized
  source 1..22: mol_type = other DNA
atttctaaagttggccgacgct

SEQ ID NO: 32461 - DNA, 22 bp, synthetic construct
  misc_feature 1..22: note = chemically synthesized
  source 1..22: mol_type = other DNA
tttctaaagttggccgacgctt

SEQ ID NO: 32462 - DNA, 22 bp, synthetic construct
  misc_feature 1..22: note = chemically synthesized
  source 1..22: mol_type = other DNA
ctaaagttggccgacgcttagg

SEQ ID NO: 32463 - DNA, 22 bp, synthetic construct
  misc_feature 1..22: note = chemically synthesized
  source 1..22: mol_type = other DNA
taaagttggccgacgcttaggg

SEQ ID NO: 32464 - DNA, 22 bp, synthetic construct
  misc_feature 1..22: note = chemically synthesized
  source 1..22: mol_type = other DNA
aagttggccgacgcttagggaa

SEQ ID NO: 32465 - DNA, 22 bp, synthetic construct
  misc_feature 1..22: note = chemically synthesized
  source 1..22: mol_type = other DNA
gccgacgcttagggaaaataga

SEQ ID NO: 32466 - DNA, 22 bp, synthetic construct
  misc_feature 1..22: note = chemically synthesized
  source 1..22: mol_type = other DNA
agggaaaatagaaaagaaccta

SEQ ID NO: 32467 - DNA, 22 bp, synthetic construct
  misc_feature 1..22: note = chemically synthesized
  source 1..22: mol_type = other DNA
gggaaaatagaaaagaacctac

SEQ ID NO: 32468 - DNA, 22 bp, synthetic construct
  misc_feature 1..22: note = chemically synthesized
  source 1..22: mol_type = other DNA
cgtgaatattggggcaggttcc

SEQ ID NO: 32469 - DNA, 22 bp, synthetic construct
  misc_feature 1..22: note = chemically synthesized
  source 1..22: mol_type = other DNA
gggcaggttccctgatactcag

SEQ ID NO: 32470 - DNA, 22 bp, synthetic construct
  misc_feature 1..22: note = chemically synthesized
  source 1..22: mol_type = other DNA
cctgatactcagtggcgtggag

SEQ ID NO: 32471 - DNA, 22 bp, synthetic construct
  misc_feature 1..22: note = chemically synthesized
  source 1..22: mol_type = other DNA
atactcagtggcgtggagatgt

SEQ ID NO: 32472 - DNA, 22 bp, synthetic construct
  misc_feature 1..22: note = chemically synthesized
  source 1..22: mol_type = other DNA
agtggcgtggagatgtaacaag

SEQ ID NO: 32473 - DNA, 22 bp, synthetic construct
  misc_feature 1..22: note = chemically synthesized
  source 1..22: mol_type = other DNA
gatgtgtgagtgatgatcaggc

SEQ ID NO: 32474 - DNA, 22 bp, synthetic construct
  misc_feature 1..22: note = chemically synthesized
  source 1..22: mol_type = other DNA
tatttggaagaaatatcagatg

SEQ ID NO: 32475 - DNA, 22 bp, synthetic construct
  misc_feature 1..22: note = chemically synthesized
  source 1..22: mol_type = other DNA
ggaagaaatatcagatgtgaat

SEQ ID NO: 32476 - DNA, 22 bp, synthetic construct
  misc_feature 1..22: note = chemically synthesized
  source 1..22: mol_type = other DNA
gaagaaatatcagatgtgaatg

SEQ ID NO: 32477 - DNA, 22 bp, synthetic construct
  misc_feature 1..22: note = chemically synthesized
  source 1..22: mol_type = other DNA
tgacctaggaagcaatggaagt

SEQ ID NO: 32478 - DNA, 22 bp, synthetic construct
  misc_feature 1..22: note = chemically synthesized
  source 1..22: mol_type = other DNA
ggaagcaatggaagtgaaaaat

SEQ ID NO: 32479 - DNA, 22 bp, synthetic construct
  misc_feature 1..22: note = chemically synthesized
  source 1..22: mol_type = other DNA
ttctttttgccttcagactcaa

SEQ ID NO: 32480 - DNA, 22 bp, synthetic construct
  misc_feature 1..22: note = chemically synthesized
  source 1..22: mol_type = other DNA
tttttgccttcagactcaatat

SEQ ID NO: 32481 - DNA, 22 bp, synthetic construct
  misc_feature 1..22: note = chemically synthesized
  source 1..22: mol_type = other DNA
tttgccttcagactcaatattt

SEQ ID NO: 32482 - DNA, 22 bp, synthetic construct
  misc_feature 1..22: note = chemically synthesized
  source 1..22: mol_type = other DNA
ttgccttcagactcaatatttt

SEQ ID NO: 32483 - DNA, 22 bp, synthetic construct
  misc_feature 1..22: note = chemically synthesized
  source 1..22: mol_type = other DNA
tgccttcagactcaatattttg

SEQ ID NO: 32484 - DNA, 22 bp, synthetic construct
  misc_feature 1..22: note = chemically synthesized
  source 1..22: mol_type = other DNA
gccttcagactcaatattttgt

SEQ ID NO: 32485 - DNA, 22 bp, synthetic construct
  misc_feature 1..22: note = chemically synthesized
  source 1..22: mol_type = other DNA
ccttcagactcaatattttgta

SEQ ID NO: 32486 - DNA, 22 bp, synthetic construct
  misc_feature 1..22: note = chemically synthesized
  source 1..22: mol_type = other DNA
cagactcaatattttgtatatt

SEQ ID NO: 32487 - DNA, 22 bp, synthetic construct
  misc_feature 1..22: note = chemically synthesized
  source 1..22: mol_type = other DNA
agactcaatattttgtatattt

SEQ ID NO: 32488 - DNA, 22 bp, synthetic construct
  misc_feature 1..22: note = chemically synthesized
  source 1..22: mol_type = other DNA
aatattttgtatatttgaaaat

SEQ ID NO: 32489 - DNA, 22 bp, synthetic construct
  misc_feature 1..22: note = chemically synthesized
  source 1..22: mol_type = other DNA
tgtatatttgaaaatttgtcaa

SEQ ID NO: 32490 - DNA, 22 bp, synthetic construct
  misc_feature 1..22: note = chemically synthesized
  source 1..22: mol_type = other DNA
gtatatttgaaaatttgtcaac

SEQ ID NO: 32491 - DNA, 22 bp, synthetic construct
  misc_feature 1..22: note = chemically synthesized
  source 1..22: mol_type = other DNA
tatatttgaaaatttgtcaaca

SEQ ID NO: 32492 - DNA, 22 bp, synthetic construct
  misc_feature 1..22: note = chemically synthesized
  source 1..22: mol_type = other DNA
gaaaatttgtcaacacaaaaaa

SEQ ID NO: 32493 - DNA, 22 bp, synthetic construct
  misc_feature 1..22: note = chemically synthesized
  source 1..22: mol_type = other DNA
aaaatttgtcaacacaaaaaat

SEQ ID NO: 32494 - DNA, 22 bp, synthetic construct
  misc_feature 1..22: note = chemically synthesized
  source 1..22: mol_type = other DNA
gtcaacacaaaaaatactaagt

SEQ ID NO: 32495 - DNA, 22 bp, synthetic construct
  misc_feature 1..22: note = chemically synthesized
  source 1..22: mol_type = other DNA
tcaacacaaaaaatactaagtt

SEQ ID NO: 32496 - DNA, 22 bp, synthetic construct
  misc_feature 1..22: note = chemically synthesized
  source 1..22: mol_type = other DNA
agttgtatactgatttgttaaa

SEQ ID NO: 32497 - DNA, 22 bp, synthetic construct
  misc_feature 1..22: note = chemically synthesized
  source 1..22: mol_type = other DNA
tatactgatttgttaaaagcag

SEQ ID NO: 32498 - DNA, 22 bp, synthetic construct
  misc_feature 1..22: note = chemically synthesized
  source 1..22: mol_type = other DNA
atttgttaaaagcagcagcatg

SEQ ID NO: 32499 - DNA, 22 bp, synthetic construct
  misc_feature 1..22: note = chemically synthesized
  source 1..22: mol_type = other DNA
gttaaaagcagcagcatgcagt

SEQ ID NO: 32500 - DNA, 22 bp, synthetic construct
  misc_feature 1..22: note = chemically synthesized
  source 1..22: mol_type = other DNA
ttaaaagcagcagcatgcagtt

SEQ ID NO: 32501 - DNA, 22 bp, synthetic construct
  misc_feature 1..22: note = chemically synthesized
  source 1..22: mol_type = other DNA
aaagcagcagcatgcagttagg

SEQ ID NO: 32502 - DNA, 22 bp, synthetic construct
  misc_feature 1..22: note = chemically synthesized
  source 1..22: mol_type = other DNA
ggatgatatctttggggaaatg

SEQ ID NO: 32503 - DNA, 22 bp, synthetic construct
  misc_feature 1..22: note = chemically synthesized
  source 1..22: mol_type = other DNA
tggggaaatggcagagaccatc

SEQ ID NO: 32504 - DNA, 22 bp, synthetic construct
  misc_feature 1..22: note = chemically synthesized
  source 1..22: mol_type = other DNA
ggggaaatggcagagaccatcc

SEQ ID NO: 32505 - DNA, 22 bp, synthetic construct
  misc_feature 1..22: note = chemically synthesized
  source 1..22: mol_type = other DNA
gggaaatggcagagaccatcca

SEQ ID NO: 32506 - DNA, 22 bp, synthetic construct
  misc_feature 1..22: note = chemically synthesized
  source 1..22: mol_type = other DNA
tgattctccactgcatccaatt

SEQ ID NO: 32507 - DNA, 22 bp, synthetic construct
  misc_feature 1..22: note = chemically synthesized
  source 1..22: mol_type = other DNA
attctccactgcatccaatttt

SEQ ID NO: 32508 - DNA, 22 bp, synthetic construct
  misc_feature 1..22: note = chemically synthesized
  source 1..22: mol_type = other DNA
tccactgcatccaattttctac

SEQ ID NO: 32509 - DNA, 22 bp, synthetic construct
  misc_feature 1..22: note = chemically synthesized
  source 1..22: mol_type = other DNA
cactgcatccaattttctactc

SEQ ID NO: 32510 - DNA, 22 bp, synthetic construct
  misc_feature 1..22: note = chemically synthesized
  source 1..22: mol_type = other DNA
catccaattttctactctcaaa

SEQ ID NO: 32511 - DNA, 22 bp, synthetic construct
  misc_feature 1..22: note = chemically synthesized
  source 1..22: mol_type = other DNA
tctactctcaaaatgaacccca

SEQ ID NO: 32512 - DNA, 22 bp, synthetic construct
  misc_feature 1..22: note = chemically synthesized
  source 1..22: mol_type = other DNA
ctactctcaaaatgaaccccat

SEQ ID NO: 32513 - DNA, 22 bp, synthetic construct
  misc_feature 1..22: note = chemically synthesized
  source 1..22: mol_type = other DNA
tactctcaaaatgaaccccatg

SEQ ID NO: 32514 - DNA, 22 bp, synthetic construct
  misc_feature 1..22: note = chemically synthesized
  source 1..22: mol_type = other DNA
ctctcaaaatgaaccccatgct

SEQ ID NO: 32515 - DNA, 22 bp, synthetic construct
  misc_feature 1..22: note = chemically synthesized
  source 1..22: mol_type = other DNA
tcaaaatgaaccccatgctcac

SEQ ID NO: 32516 - DNA, 22 bp, synthetic construct
  misc_feature 1..22: note = chemically synthesized
  source 1..22: mol_type = other DNA
aaaatgaaccccatgctcacca

SEQ ID NO: 32517 - DNA, 22 bp, synthetic construct
  misc_feature 1..22: note = chemically synthesized
  source 1..22: mol_type = other DNA
accatcaacgggattgaatttg

SEQ ID NO: 32518 - DNA, 22 bp, synthetic construct
  misc_feature 1..22: note = chemically synthesized
  source 1..22: mol_type = other DNA
aatttgagctgctgagaattgg

SEQ ID NO: 32519 - DNA, 22 bp, synthetic construct
  misc_feature 1..22: note = chemically synthesized
  source 1..22: mol_type = other DNA
gagctgctgagaattggtaata

SEQ ID NO: 32520 - DNA, 22 bp, synthetic construct
  misc_feature 1..22: note = chemically synthesized
  source 1..22: mol_type = other DNA
agctgctgagaattggtaataa

SEQ ID NO: 32521 - DNA, 22 bp, synthetic construct
  misc_feature 1..22: note = chemically synthesized
  source 1..22: mol_type = other DNA
ctgagaattggtaataacccca

SEQ ID NO: 32522 - DNA, 22 bp, synthetic construct
  misc_feature 1..22: note = chemically synthesized
  source 1..22: mol_type = other DNA
agaattggtaataaccccaaat

SEQ ID NO: 32523 - DNA, 22 bp, synthetic construct
  misc_feature 1..22: note = chemically synthesized
  source 1..22: mol_type = other DNA
gtaataaccccaaattatcttc

SEQ ID NO: 32524 - DNA, 22 bp, synthetic construct
  misc_feature 1..22: note = chemically synthesized
  source 1..22: mol_type = other DNA
tcttcaattctgtgaaatggaa

SEQ ID NO: 32525 - DNA, 22 bp, synthetic construct
  misc_feature 1..22: note = chemically synthesized
  source 1..22: mol_type = other DNA
caattctgtgaaatggaatttt

SEQ ID NO: 32526 - DNA, 22 bp, synthetic construct
  misc_feature 1..22: note = chemically synthesized
  source 1..22: mol_type = other DNA
aattctgtgaaatggaatttta

SEQ ID NO: 32527 - DNA, 22 bp, synthetic construct
  misc_feature 1..22: note = chemically synthesized
  source 1..22: mol_type = other DNA
tgtgaaatggaattttagacca

SEQ ID NO: 32528 - DNA, 22 bp, synthetic construct
  misc_feature 1..22: note = chemically synthesized
  source 1..22: mol_type = other DNA
tgaaatggaattttagaccagc

SEQ ID NO: 32529 - DNA, 22 bp, synthetic construct
  misc_feature 1..22: note = chemically synthesized
  source 1..22: mol_type = other DNA
tagaccagcctgtgactgaagc

SEQ ID NO: 32530 - DNA, 22 bp, synthetic construct
  misc_feature 1..22: note = chemically synthesized
  source 1..22: mol_type = other DNA
agaccagcctgtgactgaagcc

SEQ ID NO: 32531 - DNA, 22 bp, synthetic construct
  misc_feature 1..22: note = chemically synthesized
  source 1..22: mol_type = other DNA
gaccagcctgtgactgaagcca

SEQ ID NO: 32532 - DNA, 22 bp, synthetic construct
  misc_feature 1..22: note = chemically synthesized
  source 1..22: mol_type = other DNA
tgactgaagccactgggcatta

SEQ ID NO: 32533 - DNA, 22 bp, synthetic construct
  misc_feature 1..22: note = chemically synthesized
  source 1..22: mol_type = other DNA
aagccactgggcattacagtgc

SEQ ID NO: 32534 - DNA, 22 bp, synthetic construct
  misc_feature 1..22: note = chemically synthesized
  source 1..22: mol_type = other DNA
ggcattacagtgccttcgcttt

SEQ ID NO: 32535 - DNA, 22 bp, synthetic construct
  misc_feature 1..22: note = chemically synthesized
  source 1..22: mol_type = other DNA
cagtgccttcgctttgttcaac

SEQ ID NO: 32536 - DNA, 22 bp, synthetic construct
  misc_feature 1..22: note = chemically synthesized
  source 1..22: mol_type = other DNA
cgctttgttcaactgccgcatt

SEQ ID NO: 32537 - DNA, 22 bp, synthetic construct
  misc_feature 1..22: note = chemically synthesized
  source 1..22: mol_type = other DNA
gctttgttcaactgccgcattg

SEQ ID NO: 32538 - DNA, 22 bp, synthetic construct
  misc_feature 1..22: note = chemically synthesized
  source 1..22: mol_type = other DNA
tgttcaactgccgcattgtttc

SEQ ID NO: 32539 - DNA, 22 bp, synthetic construct
  misc_feature 1..22: note = chemically synthesized
  source 1..22: mol_type = other DNA
gttcaactgccgcattgtttct

SEQ ID NO: 32540 - DNA, 22 bp, synthetic construct
  misc_feature 1..22: note = chemically synthesized
  source 1..22: mol_type = other DNA
ttcaactgccgcattgtttctc

SEQ ID NO: 32541 - DNA, 22 bp, synthetic construct
  misc_feature 1..22: note = chemically synthesized
  source 1..22: mol_type = other DNA
aactgccgcattgtttctctct

SEQ ID NO: 32542 - DNA, 22 bp, synthetic construct
  misc_feature 1..22: note = chemically synthesized
  source 1..22: mol_type = other DNA
ccgcattgtttctctctgcaag

SEQ ID NO: 32543 - DNA, 22 bp, synthetic construct
  misc_feature 1..22: note = chemically synthesized
  source 1..22: mol_type = other DNA
tttctctctgcaagagaggaag

SEQ ID NO: 32544 - DNA, 22 bp, synthetic construct
  misc_feature 1..22: note = chemically synthesized
  source 1..22: mol_type = other DNA
ctctctgcaagagaggaaggaa

SEQ ID NO: 32545 - DNA, 22 bp, synthetic construct
  misc_feature 1..22: note = chemically synthesized
  source 1..22: mol_type = other DNA
tctctgcaagagaggaaggaag

SEQ ID NO: 32546 - DNA, 22 bp, synthetic construct
  misc_feature 1..22: note = chemically synthesized
  source 1..22: mol_type = other DNA
tctgcaagagaggaaggaaggc

SEQ ID NO: 32547 - DNA, 22 bp, synthetic construct
  misc_feature 1..22: note = chemically synthesized
  source 1..22: mol_type = other DNA
tgcaagagaggaaggaaggctg

SEQ ID NO: 32548 - DNA, 22 bp, synthetic construct
  misc_feature 1..22: note = chemically synthesized
  source 1..22: mol_type = other DNA
caagagaggaaggaaggctgga

SEQ ID NO: 32549 - DNA, 22 bp, synthetic construct
  misc_feature 1..22: note = chemically synthesized
  source 1..22: mol_type = other DNA
gagtacagctgagctttctggc

SEQ ID NO: 32550 - DNA, 22 bp, synthetic construct
  misc_feature 1..22: note = chemically synthesized
  source 1..22: mol_type = other DNA
agctttctggcaggcactggtg

SEQ ID NO: 32551 - DNA, 22 bp, synthetic construct
  misc_feature 1..22: note = chemically synthesized
  source 1..22: mol_type = other DNA
tctggcaggcactggtggagtt

SEQ ID NO: 32552 - DNA, 22 bp, synthetic construct
  misc_feature 1..22: note = chemically synthesized
  source 1..22: mol_type = other DNA
ctggcaggcactggtggagtta

SEQ ID NO: 32553 - DNA, 22 bp, synthetic construct
  misc_feature 1..22: note = chemically synthesized
  source 1..22: mol_type = other DNA
tggcaggcactggtggagttac

SEQ ID NO: 32554 - DNA, 22 bp, synthetic construct
  misc_feature 1..22: note = chemically synthesized
  source 1..22: mol_type = other DNA
gcaggcactggtggagttactc

SEQ ID NO: 32555 - DNA, 22 bp, synthetic construct
  misc_feature 1..22: note = chemically synthesized
  source 1..22: mol_type = other DNA
gtggagttactcattaaccttc

SEQ ID NO: 32556 - DNA, 22 bp, synthetic construct
  misc_feature 1..22: note = chemically synthesized
  source 1..22: mol_type = other DNA
ctcattaaccttccccattctt

SEQ ID NO: 32557 - DNA, 22 bp, synthetic construct
  misc_feature 1..22: note = chemically synthesized
  source 1..22: mol_type = other DNA
attaaccttccccattctttgt

SEQ ID NO: 32558 - DNA, 22 bp, synthetic construct
  misc_feature 1..22: note = chemically synthesized
  source 1..22: mol_type = other DNA
accttccccattctttgtaact

SEQ ID NO: 32559 - DNA, 22 bp, synthetic construct
  misc_feature 1..22: note = chemically synthesized
  source 1..22: mol_type = other DNA
ccccattctttgtaactggtgg

SEQ ID NO: 32560 - DNA, 22 bp, synthetic construct
  misc_feature 1..22: note = chemically synthesized
  source 1..22: mol_type = other DNA
cccattctttgtaactggtggc

SEQ ID NO: 32561 - DNA, 22 bp, synthetic construct
  misc_feature 1..22: note = chemically synthesized
  source 1..22: mol_type = other DNA
tttgtaactggtggccttagaa

SEQ ID NO: 32562 - DNA, 22 bp, synthetic construct
  misc_feature 1..22: note = chemically synthesized
  source 1..22: mol_type = other DNA
tgtaactggtggccttagaaga

SEQ ID NO: 32563 - DNA, 22 bp, synthetic construct
  misc_feature 1..22: note = chemically synthesized
  source 1..22: mol_type = other DNA
gtaactggtggccttagaagag

SEQ ID NO: 32564 - DNA, 22 bp, synthetic construct
  misc_feature 1..22: note = chemically synthesized
  source 1..22: mol_type = other DNA
taactggtggccttagaagagg

SEQ ID NO: 32565 - DNA, 22 bp, synthetic construct
  misc_feature 1..22: note = chemically synthesized
  source 1..22: mol_type = other DNA
gtggccttagaagagggttcag

SEQ ID NO: 32566 - DNA, 22 bp, synthetic construct
  misc_feature 1..22: note = chemically synthesized
  source 1..22: mol_type = other DNA
agaagagggttcagggttatgt

SEQ ID NO: 32567 - DNA, 22 bp, synthetic construct
  misc_feature 1..22: note = chemically synthesized
  source 1..22: mol_type = other DNA
gaagagggttcagggttatgtg

SEQ ID NO: 32568 - DNA, 22 bp, synthetic construct
  misc_feature 1..22: note = chemically synthesized
  source 1..22: mol_type = other DNA
agggttatgtgtttggaacacg

SEQ ID NO: 32569 - DNA, 22 bp, synthetic construct
  misc_feature 1..22: note = chemically synthesized
  source 1..22: mol_type = other DNA
tgtgtttggaacacgagttagt

SEQ ID NO: 32570 - DNA, 22 bp, synthetic construct
  misc_feature 1..22: note = chemically synthesized
  source 1..22: mol_type = other DNA
ggaacacgagttagtataaatg

SEQ ID NO: 32571 - DNA, 22 bp, synthetic construct
  misc_feature 1..22: note = chemically synthesized
  source 1..22: mol_type = other DNA
gaacacgagttagtataaatgg

SEQ ID NO: 32572 - DNA, 22 bp, synthetic construct
  misc_feature 1..22: note = chemically synthesized
  source 1..22: mol_type = other DNA
gtataaatggttctgaagcact

SEQ ID NO: 32573 - DNA, 22 bp, synthetic construct
  misc_feature 1..22: note = chemically synthesized
  source 1..22: mol_type = other DNA
tgaagcacttgattcagactgt

SEQ ID NO: 32574 - DNA, 22 bp, synthetic construct
  misc_feature 1..22: note = chemically synthesized
  source 1..22: mol_type = other DNA
aagcacttgattcagactgtgc

SEQ ID NO: 32575 - DNA, 22 bp, synthetic construct
  misc_feature 1..22: note = chemically synthesized
  source 1..22: mol_type = other DNA
gattcagactgtgctttaaaaa

SEQ ID NO: 32576 - DNA, 22 bp, synthetic construct
  misc_feature 1..22: note = chemically synthesized
  source 1..22: mol_type = other DNA
attcagactgtgctttaaaaaa

SEQ ID NO: 32577 - DNA, 22 bp, synthetic construct
  misc_feature 1..22: note = chemically synthesized
  source 1..22: mol_type = other DNA
agactgtgctttaaaaaatagg

SEQ ID NO: 32578 - DNA, 22 bp, synthetic construct
  misc_feature 1..22: note = chemically synthesized
  source 1..22: mol_type = other DNA
tgctttaaaaaataggaaagaa

SEQ ID NO: 32579 - DNA, 22 bp, synthetic construct
  misc_feature 1..22: note = chemically synthesized
  source 1..22: mol_type = other DNA
taaaaaataggaaagaaagtag

SEQ ID NO: 32580 - DNA, 22 bp, synthetic construct
  misc_feature 1..22: note = chemically synthesized
  source 1..22: mol_type = other DNA
aaaaaataggaaagaaagtaga

SEQ ID NO: 32581 - DNA, 22 bp, synthetic construct
  misc_feature 1..22: note = chemically synthesized
  source 1..22: mol_type = other DNA
aaaaataggaaagaaagtagaa

SEQ ID NO: 32582 - DNA, 22 bp, synthetic construct
  misc_feature 1..22: note = chemically synthesized
  source 1..22: mol_type = other DNA
atggtttggaagggagccacca

SEQ ID NO: 32583 - DNA, 22 bp, synthetic construct
  misc_feature 1..22: note = chemically synthesized
  source 1..22: mol_type = other DNA
ggaagggagccaccaagcacca

SEQ ID NO: 32584 - DNA, 22 bp, synthetic construct
  misc_feature 1..22: note = chemically synthesized
  source 1..22: mol_type = other DNA
gaagggagccaccaagcaccaa

SEQ ID NO: 32585 - DNA, 22 bp, synthetic construct
  misc_feature 1..22: note = chemically synthesized
  source 1..22: mol_type = other DNA
tgaatccgtttctcaatcttag

SEQ ID NO: 32586 - DNA, 22 bp, synthetic construct
  misc_feature 1..22: note = chemically synthesized
  source 1..22: mol_type = other DNA
aatccgtttctcaatcttagct

SEQ ID NO: 32587 - DNA, 22 bp, synthetic construct
  misc_feature 1..22: note = chemically synthesized
  source 1..22: mol_type = other DNA
ctcaatcttagctgcagggcat

SEQ ID NO: 32588 - DNA, 22 bp, synthetic construct
  misc_feature 1..22: note = chemically synthesized
  source 1..22: mol_type = other DNA
tcaatcttagctgcagggcatt

SEQ ID NO: 32589 - DNA, 22 bp, synthetic construct
  misc_feature 1..22: note = chemically synthesized
  source 1..22: mol_type = other DNA
aatcttagctgcagggcattgg

SEQ ID NO: 32590 - DNA, 22 bp, synthetic construct
  misc_feature 1..22: note = chemically synthesized
  source 1..22: mol_type = other DNA
agctgcagggcattggctaaag

SEQ ID NO: 32591 - DNA, 22 bp, synthetic construct
  misc_feature 1..22: note = chemically synthesized
  source 1..22: mol_type = other DNA
gctgcagggcattggctaaaga

SEQ ID NO: 32592 - DNA, 22 bp, synthetic construct
  misc_feature 1..22: note = chemically synthesized
  source 1..22: mol_type = other DNA
cagggcattggctaaagaggaa

SEQ ID NO: 32593 - DNA, 22 bp, synthetic construct
  misc_feature 1..22: note = chemically synthesized
  source 1..22: mol_type = other DNA
gctaaagaggaaggtgaaaact

SEQ ID NO: 32594 - DNA, 22 bp, synthetic construct
  misc_feature 1..22: note = chemically synthesized
  source 1..22: mol_type = other DNA
aagaggaaggtgaaaactgctg

SEQ ID NO: 32595 - DNA, 22 bp, synthetic construct
  misc_feature 1..22: note = chemically synthesized
  source 1..22: mol_type = other DNA
ctgagtcactatcaaatcaatt

SEQ ID NO: 32596 - DNA, 22 bp, synthetic construct
  misc_feature 1..22: note = chemically synthesized
  source 1..22: mol_type = other DNA
agtcactatcaaatcaattggt

SEQ ID NO: 32597 - DNA, 22 bp, synthetic construct
  misc_feature 1..22: note = chemically synthesized
  source 1..22: mol_type = other DNA
tcaaatcaattggtttttctaa

SEQ ID NO: 32598 - DNA, 22 bp, synthetic construct
  misc_feature 1..22: note = chemically synthesized
  source 1..22: mol_type = other DNA
gtttttctaatcccctgagaga

SEQ ID NO: 32599 - DNA, 22 bp, synthetic construct
  misc_feature 1..22: note = chemically synthesized
  source 1..22: mol_type = other DNA
ttctaatcccctgagagaaaaa

SEQ ID NO: 32600 - DNA, 22 bp, synthetic construct
  misc_feature 1..22: note = chemically synthesized
  source 1..22: mol_type = other DNA
tctaatcccctgagagaaaaag

SEQ ID NO: 32601 - DNA, 22 bp, synthetic construct
  misc_feature 1..22: note = chemically synthesized
  source 1..22: mol_type = other DNA
ctaatcccctgagagaaaaagt

SEQ ID NO: 32602 - DNA, 22 bp, synthetic construct
  misc_feature 1..22: note = chemically synthesized
  source 1..22: mol_type = other DNA
taatcccctgagagaaaaagta

SEQ ID NO: 32603 - DNA, 22 bp, synthetic construct
  misc_feature 1..22: note = chemically synthesized
  source 1..22: mol_type = other DNA
atcccctgagagaaaaagtaca

SEQ ID NO: 32604 - DNA, 22 bp, synthetic construct
  misc_feature 1..22: note = chemically synthesized
  source 1..22: mol_type = other DNA
agagaaaaagtacagagtttat

SEQ ID NO: 32605 - DNA, 22 bp, synthetic construct
  misc_feature 1..22: note = chemically synthesized
  source 1..22: mol_type = other DNA
attgcagctttaaaatgccatg

SEQ ID NO: 32606 - DNA, 22 bp, synthetic construct
  misc_feature 1..22: note = chemically synthesized
  source 1..22: mol_type = other DNA
ttgcagctttaaaatgccatgc

SEQ ID NO: 32607 - DNA, 22 bp, synthetic construct
  misc_feature 1..22: note = chemically synthesized
  source 1..22: mol_type = other DNA
cagctttaaaatgccatgcccc

SEQ ID NO: 32608 - DNA, 22 bp, synthetic construct
  misc_feature 1..22: note = chemically synthesized
  source 1..22: mol_type = other DNA
taaaatgccatgcccctcacgg

SEQ ID NO: 32609 - DNA, 22 bp, synthetic construct
  misc_feature 1..22: note = chemically synthesized
  source 1..22: mol_type = other DNA
aaaatgccatgcccctcacggc

SEQ ID NO: 32610 - DNA, 22 bp, synthetic construct
  misc_feature 1..22: note = chemically synthesized
  source 1..22: mol_type = other DNA
aaatgccatgcccctcacggcc

SEQ ID NO: 32611 - DNA, 22 bp, synthetic construct
  misc_feature 1..22: note = chemically synthesized
  source 1..22: mol_type = other DNA
acggccaaaggcatctgaatta

SEQ ID NO: 32612 - DNA, 22 bp, synthetic construct
  misc_feature 1..22: note = chemically synthesized
  source 1..22: mol_type = other DNA
aattaaggaagcagtattcaca

SEQ ID NO: 32613 - DNA, 22 bp, synthetic construct
  misc_feature 1..22: note = chemically synthesized
  source 1..22: mol_type = other DNA
aggaagcagtattcacagctgc

SEQ ID NO: 32614 - DNA, 22 bp, synthetic construct
  misc_feature 1..22: note = chemically synthesized
  source 1..22: mol_type = other DNA
acagctgctttctccagacatt

SEQ ID NO: 32615 - DNA, 22 bp, synthetic construct
  misc_feature 1..22: note = chemically synthesized
  source 1..22: mol_type = other DNA
ctttctccagacattgagctca

SEQ ID NO: 32616 - DNA, 22 bp, synthetic construct
  misc_feature 1..22: note = chemically synthesized
  source 1..22: mol_type = other DNA
tctccagacattgagctcaagg

SEQ ID NO: 32617 - DNA, 22 bp, synthetic construct
  misc_feature 1..22: note = chemically synthesized
  source 1..22: mol_type = other DNA
ctccagacattgagctcaagga

SEQ ID NO: 32618 - DNA, 22 bp, synthetic construct
  misc_feature 1..22: note = chemically synthesized
  source 1..22: mol_type = other DNA
tccagacattgagctcaaggac

SEQ ID NO: 32619 - DNA, 22 bp, synthetic construct
  misc_feature 1..22: note = chemically synthesized
  source 1..22: mol_type = other DNA
cagacattgagctcaaggacag

SEQ ID NO: 32620 - DNA, 22 bp, synthetic construct
  misc_feature 1..22: note = chemically synthesized
  source 1..22: mol_type = other DNA
agctcaaggacagaatctgaac

SEQ ID NO: 32621 - DNA, 22 bp, synthetic construct
  misc_feature 1..22: note = chemically synthesized
  source 1..22: mol_type = other DNA
aaggacagaatctgaactctgc

SEQ ID NO: 32622 - DNA, 22 bp, synthetic construct
  misc_feature 1..22: note = chemically synthesized
  source 1..22: mol_type = other DNA
aactctgcttttatcagctgcg

SEQ ID NO: 32623 - DNA, 22 bp, synthetic construct
  misc_feature 1..22: note = chemically synthesized
  source 1..22: mol_type = other DNA
tgcttttatcagctgcgaaaat

SEQ ID NO: 32624 - DNA, 22 bp, synthetic construct
  misc_feature 1..22: note = chemically synthesized
  source 1..22: mol_type = other DNA
cttttatcagctgcgaaaatcc

SEQ ID NO: 32625 - DNA, 22 bp, synthetic construct
  misc_feature 1..22: note = chemically synthesized
  source 1..22: mol_type = other DNA
ttatcagctgcgaaaatccaag

SEQ ID NO: 32626 - DNA, 22 bp, synthetic construct
  misc_feature 1..22: note = chemically synthesized
  source 1..22: mol_type = other DNA
tatcagctgcgaaaatccaagc

SEQ ID NO: 32627 - DNA, 22 bp, synthetic construct
  misc_feature 1..22: note = chemically synthesized
  source 1..22: mol_type = other DNA
atcagctgcgaaaatccaagca

SEQ ID NO: 32628 - DNA, 22 bp, synthetic construct
  misc_feature 1..22: note = chemically synthesized
  source 1..22: mol_type = other DNA
tcagctgcgaaaatccaagcat

SEQ ID NO: 32629 - DNA, 22 bp, synthetic construct
  misc_feature 1..22: note = chemically synthesized
  source 1..22: mol_type = other DNA
cgaaaatccaagcattcatttc

SEQ ID NO: 32630 - DNA, 22 bp, synthetic construct
  misc_feature 1..22: note = chemically synthesized
  source 1..22: mol_type = other DNA
atttccagctggttcagtgcct

SEQ ID NO: 32631 - DNA, 22 bp, synthetic construct
  misc_feature 1..22: note = chemically synthesized
  source 1..22: mol_type = other DNA
ccagctggttcagtgcctatgt

SEQ ID NO: 32632 - DNA, 22 bp, synthetic construct
  misc_feature 1..22: note = chemically synthesized
  source 1..22: mol_type = other DNA
cagctggttcagtgcctatgta

SEQ ID NO: 32633 - DNA, 22 bp, synthetic construct
  misc_feature 1..22: note = chemically synthesized
  source 1..22: mol_type = other DNA
gttcagtgcctatgtaaaagta

SEQ ID NO: 32634 - DNA, 22 bp, synthetic construct
  misc_feature 1..22: note = chemically synthesized
  source 1..22: mol_type = other DNA
agtgcctatgtaaaagtatact

SEQ ID NO: 32635 - DNA, 22 bp, synthetic construct
  misc_feature 1..22: note = chemically synthesized
  source 1..22: mol_type = other DNA
tgtaaaagtatactgtgtacaa

SEQ ID NO: 32636 - DNA, 22 bp, synthetic construct
  misc_feature 1..22: note = chemically synthesized
  source 1..22: mol_type = other DNA
tgtacaaaaataagattaaaaa

SEQ ID NO: 32637 - DNA, 22 bp, synthetic construct
  misc_feature 1..22: note = chemically synthesized
  source 1..22: mol_type = other DNA
aaaagctaacattaagcaagtg

SEQ ID NO: 32638 - DNA, 22 bp, synthetic construct
  misc_feature 1..22: note = chemically synthesized
  source 1..22: mol_type = other DNA
acattaagcaagtgtgtttgta

SEQ ID NO: 32639 - DNA, 22 bp, synthetic construct
  misc_feature 1..22: note = chemically synthesized
  source 1..22: mol_type = other DNA
agcaagtgtgtttgtatgtttt

SEQ ID NO: 32640 - DNA, 22 bp, synthetic construct
  misc_feature 1..22: note = chemically synthesized
  source 1..22: mol_type = other DNA
gtatgttttctacagttcggat

SEQ ID NO: 32641 - DNA, 22 bp, synthetic construct
  misc_feature 1..22: note = chemically synthesized
  source 1..22: mol_type = other DNA
tatgttttctacagttcggatt

SEQ ID NO: 32642 - DNA, 22 bp, synthetic construct
  misc_feature 1..22: note = chemically synthesized
  source 1..22: mol_type = other DNA
tctacagttcggatttctgaat

SEQ ID NO: 32643 - DNA, 22 bp, synthetic construct
  misc_feature 1..22: note = chemically synthesized
  source 1..22: mol_type = other DNA
ctacagttcggatttctgaata

SEQ ID NO: 32644 - DNA, 22 bp, synthetic construct
  misc_feature 1..22: note = chemically synthesized
  source 1..22: mol_type = other DNA
tacagttcggatttctgaataa

SEQ ID NO: 32645 - DNA, 22 bp, synthetic construct
  misc_feature 1..22: note = chemically synthesized
  source 1..22: mol_type = other DNA
cagttcggatttctgaataatt

SEQ ID NO: 32646 - DNA, 22 bp, synthetic construct
  misc_feature 1..22: note = chemically synthesized
  source 1..22: mol_type = other DNA
ggatttctgaataatttgatcc

SEQ ID NO: 32647 - DNA, 22 bp, synthetic construct
  misc_feature 1..22: note = chemically synthesized
  source 1..22: mol_type = other DNA
ctgaataatttgatccgacaga

SEQ ID NO: 32648 - DNA, 22 bp, synthetic construct
  misc_feature 1..22: note = chemically synthesized
  source 1..22: mol_type = other DNA
tgaataatttgatccgacagaa

SEQ ID NO: 32649 - DNA, 22 bp, synthetic construct
  misc_feature 1..22: note = chemically synthesized
  source 1..22: mol_type = other DNA
aataatttgatccgacagaaaa

SEQ ID NO: 32650 - DNA, 22 bp, synthetic construct
  misc_feature 1..22: note = chemically synthesized
  source 1..22: mol_type = other DNA
gatccgacagaaaaatatgatt

SEQ ID NO: 32651 - DNA, 22 bp, synthetic construct
  misc_feature 1..22: note = chemically synthesized
  source 1..22: mol_type = other DNA
atccgacagaaaaatatgattt

SEQ ID NO: 32652 - DNA, 22 bp, synthetic construct
  misc_feature 1..22: note = chemically synthesized
  source 1..22: mol_type = other DNA
catttcttttcgagagaattat

SEQ ID NO: 32653 - DNA, 22 bp, synthetic construct
  misc_feature 1..22: note = chemically synthesized
  source 1..22: mol_type = other DNA
atttcttttcgagagaattata

SEQ ID NO: 32654 - DNA, 22 bp, synthetic construct
  misc_feature 1..22: note = chemically synthesized
  source 1..22: mol_type = other DNA
cttttcgagagaattatatgca

SEQ ID NO: 32655 - DNA, 22 bp, synthetic construct
  misc_feature 1..22: note = chemically synthesized
  source 1..22: mol_type = other DNA
ttttcgagagaattatatgcat

SEQ ID NO: 32656 - DNA, 22 bp, synthetic construct
  misc_feature 1..22: note = chemically synthesized
  source 1..22: mol_type = other DNA
ttcgagagaattatatgcatac

SEQ ID NO: 32657 - DNA, 22 bp, synthetic construct
  misc_feature 1..22: note = chemically synthesized
  source 1..22: mol_type = other DNA
tcgagagaattatatgcatact

SEQ ID NO: 32658 - DNA, 22 bp, synthetic construct
  misc_feature 1..22: note = chemically synthesized
  source 1..22: mol_type = other DNA
cgagagaattatatgcatactt

SEQ ID NO: 32659 - DNA, 22 bp, synthetic construct
  misc_feature 1..22: note = chemically synthesized
  source 1..22: mol_type = other DNA
gagagaattatatgcatacttt

SEQ ID NO: 32660 - DNA, 22 bp, synthetic construct
  misc_feature 1..22: note = chemically synthesized
  source 1..22: mol_type = other DNA
tatgcatactttctaaatgcaa

SEQ ID NO: 32661 - DNA, 22 bp, synthetic construct
  misc_feature 1..22: note = chemically synthesized
  source 1..22: mol_type = other DNA
tctaaatgcaagaataaattcc

SEQ ID NO: 32662 - DNA, 22 bp, synthetic construct
  misc_feature 1..22: note = chemically synthesized
  source 1..22: mol_type = other DNA
ctaaatgcaagaataaattcct

SEQ ID NO: 32663 - DNA, 22 bp, synthetic construct
  misc_feature 1..22: note = chemically synthesized
  source 1..22: mol_type = other DNA
taaatgcaagaataaattcctg

SEQ ID NO: 32664 - DNA, 22 bp, synthetic construct
  misc_feature 1..22: note = chemically synthesized
  source 1..22: mol_type = other DNA
aatgcaagaataaattcctgag

SEQ ID NO: 32665 - DNA, 22 bp, synthetic construct
  misc_feature 1..22: note = chemically synthesized
  source 1..22: mol_type = other DNA
ctgagctccatgtgacttcagt

SEQ ID NO: 32666 - DNA, 22 bp, synthetic construct
  misc_feature 1..22: note = chemically synthesized
  source 1..22: mol_type = other DNA
agctccatgtgacttcagtacc

SEQ ID NO: 32667 - DNA, 22 bp, synthetic construct
  misc_feature 1..22: note = chemically synthesized
  source 1..22: mol_type = other DNA
catgtgacttcagtaccatcag

SEQ ID NO: 32668 - DNA, 22 bp, synthetic construct
  misc_feature 1..22: note = chemically synthesized
  source 1..22: mol_type = other DNA
cagtaccatcagctctttggca

SEQ ID NO: 32669 - DNA, 22 bp, synthetic construct
  misc_feature 1..22: note = chemically synthesized
  source 1..22: mol_type = other DNA
agtaccatcagctctttggcag

SEQ ID NO: 32670 - DNA, 22 bp, synthetic construct
  misc_feature 1..22: note = chemically synthesized
  source 1..22: mol_type = other DNA
tttggcagcttatgagtataca

SEQ ID NO: 32671 - DNA, 22 bp, synthetic construct
  misc_feature 1..22: note = chemically synthesized
  source 1..22: mol_type = other DNA
tggcagcttatgagtatacagc

SEQ ID NO: 32672 - DNA, 22 bp, synthetic construct
  misc_feature 1..22: note = chemically synthesized
  source 1..22: mol_type = other DNA
ggcagcttatgagtatacagct

SEQ ID NO: 32673 - DNA, 22 bp, synthetic construct
  misc_feature 1..22: note = chemically synthesized
  source 1..22: mol_type = other DNA
gcagcttatgagtatacagctt

SEQ ID NO: 32674 - DNA, 22 bp, synthetic construct
  misc_feature 1..22: note = chemically synthesized
  source 1..22: mol_type = other DNA
atgagtatacagctttttaatt

SEQ ID NO: 32675 - DNA, 22 bp, synthetic construct
  misc_feature 1..22: note = chemically synthesized
  source 1..22: mol_type = other DNA
tgagtatacagctttttaattc

SEQ ID NO: 32676 - DNA, 22 bp, synthetic construct
  misc_feature 1..22: note = chemically synthesized
  source 1..22: mol_type = other DNA
tttaattctcacctggtcccca

SEQ ID NO: 32677 - DNA, 22 bp, synthetic construct
  misc_feature 1..22: note = chemically synthesized
  source 1..22: mol_type = other DNA
ttaattctcacctggtccccag

SEQ ID NO: 32678 - DNA, 22 bp, synthetic construct
  misc_feature 1..22: note = chemically synthesized
  source 1..22: mol_type = other DNA
taattctcacctggtccccagg

SEQ ID NO: 32679 - DNA, 22 bp, synthetic construct
  misc_feature 1..22: note = chemically synthesized
  source 1..22: mol_type = other DNA
aattctcacctggtccccagga

SEQ ID NO: 32680 - DNA, 22 bp, synthetic construct
  misc_feature 1..22: note = chemically synthesized
  source 1..22: mol_type = other DNA
attctcacctggtccccaggat

SEQ ID NO: 32681 - DNA, 22 bp, synthetic construct
  misc_feature 1..22: note = chemically synthesized
  source 1..22: mol_type = other DNA
tcacctggtccccaggatatgg

SEQ ID NO: 32682 - DNA, 22 bp, synthetic construct
  misc_feature 1..22: note = chemically synthesized
  source 1..22: mol_type = other DNA
acctggtccccaggatatggtt

SEQ ID NO: 32683 - DNA, 22 bp, synthetic construct
  misc_feature 1..22: note = chemically synthesized
  source 1..22: mol_type = other DNA
gtccccaggatatggtttactt

SEQ ID NO: 32684 - DNA, 22 bp, synthetic construct
  misc_feature 1..22: note = chemically synthesized
  source 1..22: mol_type = other DNA
acttgtcagagtagttttatga

SEQ ID NO: 32685 - DNA, 22 bp, synthetic construct
  misc_feature 1..22: note = chemically synthesized
  source 1..22: mol_type = other DNA
cttgtcagagtagttttatgag

SEQ ID NO: 32686 - DNA, 22 bp, synthetic construct
  misc_feature 1..22: note = chemically synthesized
  source 1..22: mol_type = other DNA
gtcagagtagttttatgaggtg

SEQ ID NO: 32687 - DNA, 22 bp, synthetic construct
  misc_feature 1..22: note = chemically synthesized
  source 1..22: mol_type = other DNA
tcagagtagttttatgaggtgc

SEQ ID NO: 32688 - DNA, 22 bp, synthetic construct
  misc_feature 1..22: note = chemically synthesized
  source 1..22: mol_type = other DNA
tatgaggtgctttctcctgact

SEQ ID NO: 32689 - DNA, 22 bp, synthetic construct
  misc_feature 1..22: note = chemically synthesized
  source 1..22: mol_type = other DNA
atgaggtgctttctcctgactc

SEQ ID NO: 32690 - DNA, 22 bp, synthetic construct
  misc_feature 1..22: note = chemically synthesized
  source 1..22: mol_type = other DNA
tgaggtgctttctcctgactct

SEQ ID NO: 32691 - DNA, 22 bp, synthetic construct
  misc_feature 1..22: note = chemically synthesized
  source 1..22: mol_type = other DNA
tctcctgactctgattctaggt

SEQ ID NO: 32692 - DNA, 22 bp, synthetic construct
  misc_feature 1..22: note = chemically synthesized
  source 1..22: mol_type = other DNA
ctcctgactctgattctaggta

SEQ ID NO: 32693 - DNA, 22 bp, synthetic construct
  misc_feature 1..22: note = chemically synthesized
  source 1..22: mol_type = other DNA
tcctgactctgattctaggtaa

SEQ ID NO: 32694 - DNA, 22 bp, synthetic construct
  misc_feature 1..22: note = chemically synthesized
  source 1..22: mol_type = other DNA
ctgactctgattctaggtaaca

SEQ ID NO: 32695 - DNA, 22 bp, synthetic construct
  misc_feature 1..22: note = chemically synthesized
  source 1..22: mol_type = other DNA
actctgattctaggtaacacct

SEQ ID NO: 32696 - DNA, 22 bp, synthetic construct
  misc_feature 1..22: note = chemically synthesized
  source 1..22: mol_type = other DNA
tgattctaggtaacacctgatg

SEQ ID NO: 32697 - DNA, 22 bp, synthetic construct
  misc_feature 1..22: note = chemically synthesized
  source 1..22: mol_type = other DNA
attctaggtaacacctgatgag

SEQ ID NO: 32698 - DNA, 22 bp, synthetic construct
  misc_feature 1..22: note = chemically synthesized
  source 1..22: mol_type = other DNA
taggtaacacctgatgagatga

SEQ ID NO: 32699 - DNA, 22 bp, synthetic construct
  misc_feature 1..22: note = chemically synthesized
  source 1..22: mol_type = other DNA
ggtaacacctgatgagatgaac

SEQ ID NO: 32700 - DNA, 22 bp, synthetic construct
  misc_feature 1..22: note = chemically synthesized
  source 1..22: mol_type = other DNA
atgagatgaacagatggtgcac

SEQ ID NO: 32701 - DNA, 22 bp, synthetic construct
  misc_feature 1..22: note = chemically synthesized
  source 1..22: mol_type = other DNA
acttcctcttactgggcatgaa

SEQ ID NO: 32702 - DNA, 22 bp, synthetic construct
  misc_feature 1..22: note = chemically synthesized
  source 1..22: mol_type = other DNA
cctcttactgggcatgaaggaa

SEQ ID NO: 32703 - DNA, 22 bp, synthetic construct
  misc_feature 1..22: note = chemically synthesized
  source 1..22: mol_type = other DNA
ctcttactgggcatgaaggaaa

SEQ ID NO: 32704 - DNA, 22 bp, synthetic construct
  misc_feature 1..22: note = chemically synthesized
  source 1..22: mol_type = other DNA
ttactgggcatgaaggaaagag

SEQ ID NO: 32705 - DNA, 22 bp, synthetic construct
  misc_feature 1..22: note = chemically synthesized
  source 1..22: mol_type = other DNA
actgggcatgaaggaaagagag

SEQ ID NO: 32706 - DNA, 22 bp, synthetic construct
  misc_feature 1..22: note = chemically synthesized
  source 1..22: mol_type = other DNA
ctgggcatgaaggaaagagaga

SEQ ID NO: 32707 - DNA, 22 bp, synthetic construct
  misc_feature 1..22: note = chemically synthesized
  source 1..22: mol_type = other DNA
ggcatgaaggaaagagagagaa

SEQ ID NO: 32708 - DNA, 22 bp, synthetic construct
  misc_feature 1..22: note = chemically synthesized
  source 1..22: mol_type = other DNA
ctgctacattttttttttctgt

SEQ ID NO: 32709 - DNA, 22 bp, synthetic construct
  misc_feature 1..22: note = chemically synthesized
  source 1..22: mol_type = other DNA
ctacattttttttttctgtgga

SEQ ID NO: 32710 - DNA, 22 bp, synthetic construct
  misc_feature 1..22: note = chemically synthesized
  source 1..22: mol_type = other DNA
cattttttttttctgtggaaaa

SEQ ID NO: 32711 - DNA, 22 bp, synthetic construct
  misc_feature 1..22: note = chemically synthesized
  source 1..22: mol_type = other DNA
tttttttctgtggaaaaagagt

SEQ ID NO: 32712 - DNA, 22 bp, synthetic construct
  misc_feature 1..22: note = chemically synthesized
  source 1..22: mol_type = other DNA
ttttttctgtggaaaaagagtc

SEQ ID NO: 32713 - DNA, 22 bp, synthetic construct
  misc_feature 1..22: note = chemically synthesized
  source 1..22: mol_type = other DNA
tttttctgtggaaaaagagtct

SEQ ID NO: 32714 - DNA, 22 bp, synthetic construct
  misc_feature 1..22: note = chemically synthesized
  source 1..22: mol_type = other DNA
ttttctgtggaaaaagagtcta

SEQ ID NO: 32715 - DNA, 22 bp, synthetic construct
  misc_feature 1..22: note = chemically synthesized
  source 1..22: mol_type = other DNA
tttctgtggaaaaagagtctaa

SEQ ID NO: 32716 - DNA, 22 bp, synthetic construct
  misc_feature 1..22: note = chemically synthesized
  source 1..22: mol_type = other DNA
ttctgtggaaaaagagtctaat

SEQ ID NO: 32717 - DNA, 22 bp, synthetic construct
  misc_feature 1..22: note = chemically synthesized
  source 1..22: mol_type = other DNA
tctgtggaaaaagagtctaata

SEQ ID NO: 32718 - DNA, 22 bp, synthetic construct
  misc_feature 1..22: note = chemically synthesized
  source 1..22: mol_type = other DNA
ctgtggaaaaagagtctaatat

SEQ ID NO: 32719 - DNA, 22 bp, synthetic construct
  misc_feature 1..22: note = chemically synthesized
  source 1..22: mol_type = other DNA
tgtggaaaaagagtctaatatt

SEQ ID NO: 32720 - DNA, 22 bp, synthetic construct
  misc_feature 1..22: note = chemically synthesized
  source 1..22: mol_type = other DNA
tggaaaaagagtctaatatttc

SEQ ID NO: 32721 - DNA, 22 bp, synthetic construct
  misc_feature 1..22: note = chemically synthesized
  source 1..22: mol_type = other DNA
atatttctaattaaccttgatg

SEQ ID NO: 32722 - DNA, 22 bp, synthetic construct
  misc_feature 1..22: note = chemically synthesized
  source 1..22: mol_type = other DNA
ctaattaaccttgatgggaaca

SEQ ID NO: 32723 - DNA, 22 bp, synthetic construct
  misc_feature 1..22: note = chemically synthesized
  source 1..22: mol_type = other DNA
taattaaccttgatgggaacat

SEQ ID NO: 32724 - DNA, 22 bp, synthetic construct
  misc_feature 1..22: note = chemically synthesized
  source 1..22: mol_type = other DNA
attaaccttgatgggaacatag

SEQ ID NO: 32725 - DNA, 22 bp, synthetic construct
  misc_feature 1..22: note = chemically synthesized
  source 1..22: mol_type = other DNA
accttgatgggaacatagaaca

SEQ ID NO: 32726 - DNA, 22 bp, synthetic construct
  misc_feature 1..22: note = chemically synthesized
  source 1..22: mol_type = other DNA
gatgggaacatagaacatagat

SEQ ID NO: 32727 - DNA, 22 bp, synthetic construct
  misc_feature 1..22: note = chemically synthesized
  source 1..22: mol_type = other DNA
atgggaacatagaacatagatt

SEQ ID NO: 32728 - DNA, 22 bp, synthetic construct
  misc_feature 1..22: note = chemically synthesized
  source 1..22: mol_type = other DNA
taaagggaacttgcacattatc

SEQ ID NO: 32729 - DNA, 22 bp, synthetic construct
  misc_feature 1..22: note = chemically synthesized
  source 1..22: mol_type = other DNA
gcacattatcgcagtaggctga

SEQ ID NO: 32730 - DNA, 22 bp, synthetic construct
  misc_feature 1..22: note = chemically synthesized
  source 1..22: mol_type = other DNA
cacattatcgcagtaggctgaa

SEQ ID NO: 32731 - DNA, 22 bp, synthetic construct
  misc_feature 1..22: note = chemically synthesized
  source 1..22: mol_type = other DNA
tcgcagtaggctgaataatggc

SEQ ID NO: 32732 - DNA, 22 bp, synthetic construct
  misc_feature 1..22: note = chemically synthesized
  source 1..22: mol_type = other DNA
aataatggctaatggctcactc

SEQ ID NO: 32733 - DNA, 22 bp, synthetic construct
  misc_feature 1..22: note = chemically synthesized
  source 1..22: mol_type = other DNA
atggctcactctgaaagatatg

SEQ ID NO: 32734 - DNA, 22 bp, synthetic construct
  misc_feature 1..22: note = chemically synthesized
  source 1..22: mol_type = other DNA
actctgaaagatatgtatggct

SEQ ID NO: 32735 - DNA, 22 bp, synthetic construct
  misc_feature 1..22: note = chemically synthesized
  source 1..22: mol_type = other DNA
tgaaagatatgtatggcttaac

SEQ ID NO: 32736 - DNA, 22 bp, synthetic construct
  misc_feature 1..22: note = chemically synthesized
  source 1..22: mol_type = other DNA
aaagatatgtatggcttaaccc

SEQ ID NO: 32737 - DNA, 22 bp, synthetic construct
  misc_feature 1..22: note = chemically synthesized
  source 1..22: mol_type = other DNA
aacccctgaaacctgtgagtat

SEQ ID NO: 32738 - DNA, 22 bp, synthetic construct
  misc_feature 1..22: note = chemically synthesized
  source 1..22: mol_type = other DNA
acccctgaaacctgtgagtatt

SEQ ID NO: 32739 - DNA, 22 bp, synthetic construct
  misc_feature 1..22: note = chemically synthesized
  source 1..22: mol_type = other DNA
aaacctgtgagtattatctttt

SEQ ID NO: 32740 - DNA, 22 bp, synthetic construct
  misc_feature 1..22: note = chemically synthesized
  source 1..22: mol_type = other DNA
tgagtattatcttttctagcca

SEQ ID NO: 32741 - DNA, 22 bp, synthetic construct
  misc_feature 1..22: note = chemically synthesized
  source 1..22: mol_type = other DNA
tcttttctagccaaacagactt

SEQ ID NO: 32742 - DNA, 22 bp, synthetic construct
  misc_feature 1..22: note = chemically synthesized
  source 1..22: mol_type = other DNA
ttctagccaaacagacttttgc

SEQ ID NO: 32743 - DNA, 22 bp, synthetic construct
  misc_feature 1..22: note = chemically synthesized
  source 1..22: mol_type = other DNA
tctagccaaacagacttttgca

SEQ ID NO: 32744 - DNA, 22 bp, synthetic construct
  misc_feature 1..22: note = chemically synthesized
  source 1..22: mol_type = other DNA
ctagccaaacagacttttgcat

SEQ ID NO: 32745 - DNA, 22 bp, synthetic construct
  misc_feature 1..22: note = chemically synthesized
  source 1..22: mol_type = other DNA
tagccaaacagacttttgcata

SEQ ID NO: 32746 - DNA, 22 bp, synthetic construct
  misc_feature 1..22: note = chemically synthesized
  source 1..22: mol_type = other DNA
gccaaacagacttttgcatata

SEQ ID NO: 32747 - DNA, 22 bp, synthetic construct
  misc_feature 1..22: note = chemically synthesized
  source 1..22: mol_type = other DNA
ttgcatatataattaaggatct

SEQ ID NO: 32748 - DNA, 22 bp, synthetic construct
  misc_feature 1..22: note = chemically synthesized
  source 1..22: mol_type = other DNA
tgcatatataattaaggatctt

SEQ ID NO: 32749 - DNA, 22 bp, synthetic construct
  misc_feature 1..22: note = chemically synthesized
  source 1..22: mol_type = other DNA
gcatatataattaaggatcttg

SEQ ID NO: 32750 - DNA, 22 bp, synthetic construct
  misc_feature 1..22: note = chemically synthesized
  source 1..22: mol_type = other DNA
catatataattaaggatcttgg

SEQ ID NO: 32751 - DNA, 22 bp, synthetic construct
  misc_feature 1..22: note = chemically synthesized
  source 1..22: mol_type = other DNA
aggatcttgggatggggagata

SEQ ID NO: 32752 - DNA, 22 bp, synthetic construct
  misc_feature 1..22: note = chemically synthesized
  source 1..22: mol_type = other DNA
gggatggggagatatcctaatt

SEQ ID NO: 32753 - DNA, 22 bp, synthetic construct
  misc_feature 1..22: note = chemically synthesized
  source 1..22: mol_type = other DNA
ggatggggagatatcctaatta

SEQ ID NO: 32754 - DNA, 22 bp, synthetic construct
  misc_feature 1..22: note = chemically synthesized
  source 1..22: mol_type = other DNA
attatttgggtgtatcctaaat

SEQ ID NO: 32755 - DNA, 22 bp, synthetic construct
  misc_feature 1..22: note = chemically synthesized
  source 1..22: mol_type = other DNA
tttgggtgtatcctaaatgtaa

SEQ ID NO: 32756 - DNA, 22 bp, synthetic construct
  misc_feature 1..22: note = chemically synthesized
  source 1..22: mol_type = other DNA
gggtgtatcctaaatgtaatca

SEQ ID NO: 32757 - DNA, 22 bp, synthetic construct
  misc_feature 1..22: note = chemically synthesized
  source 1..22: mol_type = other DNA
ggtgtatcctaaatgtaatcac

SEQ ID NO: 32758 - DNA, 22 bp, synthetic construct
  misc_feature 1..22: note = chemically synthesized
  source 1..22: mol_type = other DNA
aatgtaatcacaagtgtcatta

SEQ ID NO: 32759 - DNA, 22 bp, synthetic construct
  misc_feature 1..22: note = chemically synthesized
  source 1..22: mol_type = other DNA
taagagggaggcaaagggagat

SEQ ID NO: 32760 - DNA, 22 bp, synthetic construct
  misc_feature 1..22: note = chemically synthesized
  source 1..22: mol_type = other DNA
gacttataagaggagaaaatgt

SEQ ID NO: 32761 - DNA, 22 bp, synthetic construct
  misc_feature 1..22: note = chemically synthesized
  source 1..22: mol_type = other DNA
acttataagaggagaaaatgtg

SEQ ID NO: 32762 - DNA, 22 bp, synthetic construct
  misc_feature 1..22: note = chemically synthesized
  source 1..22: mol_type = other DNA
ataagaggagaaaatgtgacgt

SEQ ID NO: 32763 - DNA, 22 bp, synthetic construct
  misc_feature 1..22: note = chemically synthesized
  source 1..22: mol_type = other DNA
taagaggagaaaatgtgacgtg

SEQ ID NO: 32764 - DNA, 22 bp, synthetic construct
  misc_feature 1..22: note = chemically synthesized
  source 1..22: mol_type = other DNA
caaaagcagagatacatttttt

SEQ ID NO: 32765 - DNA, 22 bp, synthetic construct
  misc_feature 1..22: note = chemically synthesized
  source 1..22: mol_type = other DNA
ttttgaagatcgaggaagaggc

SEQ ID NO: 32766 - DNA, 22 bp, synthetic construct
  misc_feature 1..22: note = chemically synthesized
  source 1..22: mol_type = other DNA
tttgaagatcgaggaagaggct

SEQ ID NO: 32767 - DNA, 22 bp, synthetic construct
  misc_feature 1..22: note = chemically synthesized
  source 1..22: mol_type = other DNA
ttgaagatcgaggaagaggcta

SEQ ID NO: 32768 - DNA, 22 bp, synthetic construct
  misc_feature 1..22: note = chemically synthesized
  source 1..22: mol_type = other DNA
tgaagatcgaggaagaggctac

SEQ ID NO: 32769 - DNA, 22 bp, synthetic construct
  misc_feature 1..22: note = chemically synthesized
  source 1..22: mol_type = other DNA
gaagatcgaggaagaggctaca

SEQ ID NO: 32770 - DNA, 22 bp, synthetic construct
  misc_feature 1..22: note = chemically synthesized
  source 1..22: mol_type = other DNA
aagatcgaggaagaggctacaa

SEQ ID NO: 32771 - DNA, 22 bp, synthetic construct
  misc_feature 1..22: note = chemically synthesized
  source 1..22: mol_type = other DNA
caaaccaaggaatgtgggtagc

SEQ ID NO: 32772 - DNA, 22 bp, synthetic construct
  misc_feature 1..22: note = chemically synthesized
  source 1..22: mol_type = other DNA
tagaagaggaaacagaatccat

SEQ ID NO: 32773 - DNA, 22 bp, synthetic construct
  misc_feature 1..22: note = chemically synthesized
  source 1..22: mol_type = other DNA
gaagaggaaacagaatccatgg

SEQ ID NO: 32774 - DNA, 22 bp, synthetic construct
  misc_feature 1..22: note = chemically synthesized
  source 1..22: mol_type = other DNA
tcatagagtctccagaagaaac

SEQ ID NO: 32775 - DNA, 22 bp, synthetic construct
  misc_feature 1..22: note = chemically synthesized
  source 1..22: mol_type = other DNA
atagagtctccagaagaaacag

SEQ ID NO: 32776 - DNA, 22 bp, synthetic construct
  misc_feature 1..22: note = chemically synthesized
  source 1..22: mol_type = other DNA
cagaagaaacagccacactgac

SEQ ID NO: 32777 - DNA, 22 bp, synthetic construct
  misc_feature 1..22: note = chemically synthesized
  source 1..22: mol_type = other DNA
acacctcgactttagcccagtg

SEQ ID NO: 32778 - DNA, 22 bp, synthetic construct
  misc_feature 1..22: note = chemically synthesized
  source 1..22: mol_type = other DNA
gactttagcccagtgaaaccga

SEQ ID NO: 32779 - DNA, 22 bp, synthetic construct
  misc_feature 1..22: note = chemically synthesized
  source 1..22: mol_type = other DNA
tagcccagtgaaaccgatttca

SEQ ID NO: 32780 - DNA, 22 bp, synthetic construct
  misc_feature 1..22: note = chemically synthesized
  source 1..22: mol_type = other DNA
agcccagtgaaaccgatttcag

SEQ ID NO: 32781 - DNA, 22 bp, synthetic construct
  misc_feature 1..22: note = chemically synthesized
  source 1..22: mol_type = other DNA
gcccagtgaaaccgatttcaga

SEQ ID NO: 32782 - DNA, 22 bp, synthetic construct
  misc_feature 1..22: note = chemically synthesized
  source 1..22: mol_type = other DNA
cagacttctgacctccacaact

SEQ ID NO: 32783 - DNA, 22 bp, synthetic construct
  misc_feature 1..22: note = chemically synthesized
  source 1..22: mol_type = other DNA
agacttctgacctccacaactt

SEQ ID NO: 32784 - DNA, 22 bp, synthetic construct
  misc_feature 1..22: note = chemically synthesized
  source 1..22: mol_type = other DNA
ctgacctccacaacttcaagat

SEQ ID NO: 32785 - DNA, 22 bp, synthetic construct
  misc_feature 1..22: note = chemically synthesized
  source 1..22: mol_type = other DNA
tgacctccacaacttcaagata

SEQ ID NO: 32786 - DNA, 22 bp, synthetic construct
  misc_feature 1..22: note = chemically synthesized
  source 1..22: mol_type = other DNA
acctccacaacttcaagataat

SEQ ID NO: 32787 - DNA, 22 bp, synthetic construct
  misc_feature 1..22: note = chemically synthesized
  source 1..22: mol_type = other DNA
cacaacttcaagataatacatt

SEQ ID NO: 32788 - DNA, 22 bp, synthetic construct
  misc_feature 1..22: note = chemically synthesized
  source 1..22: mol_type = other DNA
caagataatacatttgtgttgt

SEQ ID NO: 32789 - DNA, 22 bp, synthetic construct
  misc_feature 1..22: note = chemically synthesized
  source 1..22: mol_type = other DNA
aagataatacatttgtgttgtt

SEQ ID NO: 32790 - DNA, 22 bp, synthetic construct
  misc_feature 1..22: note = chemically synthesized
  source 1..22: mol_type = other DNA
gtgttgttttaagccaataaat

SEQ ID NO: 32791 - DNA, 22 bp, synthetic construct
  misc_feature 1..22: note = chemically synthesized
  source 1..22: mol_type = other DNA
tgttgttttaagccaataaatt

SEQ ID NO: 32792 - DNA, 22 bp, synthetic construct
  misc_feature 1..22: note = chemically synthesized
  source 1..22: mol_type = other DNA
ttttaagccaataaatttgtgg

SEQ ID NO: 32793 - DNA, 22 bp, synthetic construct
  misc_feature 1..22: note = chemically synthesized
  source 1..22: mol_type = other DNA
taagccaataaatttgtggtaa

SEQ ID NO: 32794 - DNA, 22 bp, synthetic construct
  misc_feature 1..22: note = chemically synthesized
  source 1..22: mol_type = other DNA
aagccaataaatttgtggtaat

SEQ ID NO: 32795 - DNA, 22 bp, synthetic construct
  misc_feature 1..22: note = chemically synthesized
  source 1..22: mol_type = other DNA
agccaataaatttgtggtaatt

SEQ ID NO: 32796 - DNA, 22 bp, synthetic construct
  misc_feature 1..22: note = chemically synthesized
  source 1..22: mol_type = other DNA
gtggtaattttttacagcagca

SEQ ID NO: 32797 - DNA, 22 bp, synthetic construct
  misc_feature 1..22: note = chemically synthesized
  source 1..22: mol_type = other DNA
tggtaattttttacagcagcaa

SEQ ID NO: 32798 - DNA, 22 bp, synthetic construct
  misc_feature 1..22: note = chemically synthesized
  source 1..22: mol_type = other DNA
tttacagcagcaagaggaaatc

SEQ ID NO: 32799 - DNA, 22 bp, synthetic construct
  misc_feature 1..22: note = chemically synthesized
  source 1..22: mol_type = other DNA
ttacagcagcaagaggaaatca

SEQ ID NO: 32800 - DNA, 22 bp, synthetic construct
  misc_feature 1..22: note = chemically synthesized
  source 1..22: mol_type = other DNA
tacagcagcaagaggaaatcag

SEQ ID NO: 32801 - DNA, 22 bp, synthetic construct
  misc_feature 1..22: note = chemically synthesized
  source 1..22: mol_type = other DNA
acagcagcaagaggaaatcagt

SEQ ID NO: 32802 - DNA, 22 bp, synthetic construct
  misc_feature 1..22: note = chemically synthesized
  source 1..22: mol_type = other DNA
cagcagcaagaggaaatcagtt

SEQ ID NO: 32803 - DNA, 22 bp, synthetic construct
  misc_feature 1..22: note = chemically synthesized
  source 1..22: mol_type = other DNA
cgtagaatagtaggtcctgtct

SEQ ID NO: 32804 - DNA, 22 bp, synthetic construct
  misc_feature 1..22: note = chemically synthesized
  source 1..22: mol_type = other DNA
tctctggctaatcattagaatc

SEQ ID NO: 32805 - DNA, 22 bp, synthetic construct
  misc_feature 1..22: note = chemically synthesized
  source 1..22: mol_type = other DNA
tggctaatcattagaatcactc

SEQ ID NO: 32806 - DNA, 22 bp, synthetic construct
  misc_feature 1..22: note = chemically synthesized
  source 1..22: mol_type = other DNA
gctaatcattagaatcactcca

SEQ ID NO: 32807 - DNA, 22 bp, synthetic construct
  misc_feature 1..22: note = chemically synthesized
  source 1..22: mol_type = other DNA
atcattagaatcactccagaag

SEQ ID NO: 32808 - DNA, 22 bp, synthetic construct
  misc_feature 1..22: note = chemically synthesized
  source 1..22: mol_type = other DNA
gaatcactccagaagcttgtta

SEQ ID NO: 32809 - DNA, 22 bp, synthetic construct
  misc_feature 1..22: note = chemically synthesized
  source 1..22: mol_type = other DNA
cagaagcttgttacatacagac

SEQ ID NO: 32810 - DNA, 22 bp, synthetic construct
  misc_feature 1..22: note = chemically synthesized
  source 1..22: mol_type = other DNA
gttacatacagacccagagcca

SEQ ID NO: 32811 - DNA, 22 bp, synthetic construct
  misc_feature 1..22: note = chemically synthesized
  source 1..22: mol_type = other DNA
ttacatacagacccagagccag

SEQ ID NO: 32812 - DNA, 22 bp, synthetic construct
  misc_feature 1..22: note = chemically synthesized
  source 1..22: mol_type = other DNA
catacagacccagagccagtga

SEQ ID NO: 32813 - DNA, 22 bp, synthetic construct
  misc_feature 1..22: note = chemically synthesized
  source 1..22: mol_type = other DNA
ggtggtggggcccagagcctga

SEQ ID NO: 32814 - DNA, 22 bp, synthetic construct
  misc_feature 1..22: note = chemically synthesized
  source 1..22: mol_type = other DNA
gtggtggggcccagagcctgaa

SEQ ID NO: 32815 - DNA, 22 bp, synthetic construct
  misc_feature 1..22: note = chemically synthesized
  source 1..22: mol_type = other DNA
aatattaagcaagttcttcgtt

SEQ ID NO: 32816 - DNA, 22 bp, synthetic construct
  misc_feature 1..22: note = chemically synthesized
  source 1..22: mol_type = other DNA
agcaagttcttcgttttagaaa

SEQ ID NO: 32817 - DNA, 22 bp, synthetic construct
  misc_feature 1..22: note = chemically synthesized
  source 1..22: mol_type = other DNA
ttcgttttagaaatgaggaaac

SEQ ID NO: 32818 - DNA, 22 bp, synthetic construct
  misc_feature 1..22: note = chemically synthesized
  source 1..22: mol_type = other DNA
cgttttagaaatgaggaaacca

SEQ ID NO: 32819 - DNA, 22 bp, synthetic construct
  misc_feature 1..22: note = chemically synthesized
  source 1..22: mol_type = other DNA
gttttagaaatgaggaaaccaa

SEQ ID NO: 32820 - DNA, 22 bp, synthetic construct
  misc_feature 1..22: note = chemically synthesized
  source 1..22: mol_type = other DNA
tagaaatgaggaaaccaaggtt

SEQ ID NO: 32821 - DNA, 22 bp, synthetic construct
  misc_feature 1..22: note = chemically synthesized
  source 1..22: mol_type = other DNA
agaaatgaggaaaccaaggttg

SEQ ID NO: 32822 - DNA, 22 bp, synthetic construct
  misc_feature 1..22: note = chemically synthesized
  source 1..22: mol_type = other DNA
gaaatgaggaaaccaaggttgg

SEQ ID NO: 32823 - DNA, 22 bp, synthetic construct
  misc_feature 1..22: note = chemically synthesized
  source 1..22: mol_type = other DNA
ggagaagctaagcaacttactc

SEQ ID NO: 32824 - DNA, 22 bp, synthetic construct
  misc_feature 1..22: note = chemically synthesized
  source 1..22: mol_type = other DNA
agcaacttactcaaatacatag

SEQ ID NO: 32825 - DNA, 22 bp, synthetic construct
  misc_feature 1..22: note = chemically synthesized
  source 1..22: mol_type = other DNA
actcaaatacatagggtatttc

SEQ ID NO: 32826 - DNA, 22 bp, synthetic construct
  misc_feature 1..22: note = chemically synthesized
  source 1..22: mol_type = other DNA
ctcaaatacatagggtatttca

SEQ ID NO: 32827 - DNA, 22 bp, synthetic construct
  misc_feature 1..22: note = chemically synthesized
  source 1..22: mol_type = other DNA
aaatacatagggtatttcattt

SEQ ID NO: 32828 - DNA, 22 bp, synthetic construct
  misc_feature 1..22: note = chemically synthesized
  source 1..22: mol_type = other DNA
cattttaaatttaattttatta

SEQ ID NO: 32829 - DNA, 22 bp, synthetic construct
  misc_feature 1..22: note = chemically synthesized
  source 1..22: mol_type = other DNA
attttaaatttaattttattac

SEQ ID NO: 32830 - DNA, 22 bp, synthetic construct
  misc_feature 1..22: note = chemically synthesized
  source 1..22: mol_type = other DNA
taaatttaattttattacttta

SEQ ID NO: 32831 - DNA, 22 bp, synthetic construct
  misc_feature 1..22: note = chemically synthesized
  source 1..22: mol_type = other DNA
aaatttaattttattactttat

SEQ ID NO: 32832 - DNA, 22 bp, synthetic construct
  misc_feature 1..22: note = chemically synthesized
  source 1..22: mol_type = other DNA
aatttaattttattactttatc

SEQ ID NO: 32833 - DNA, 22 bp, synthetic construct
  misc_feature 1..22: note = chemically synthesized
  source 1..22: mol_type = other DNA
aattttattactttatcttttg

SEQ ID NO: 32834 - DNA, 22 bp, synthetic construct
  misc_feature 1..22: note = chemically synthesized
  source 1..22: mol_type = other DNA
attttattactttatcttttga

SEQ ID NO: 32835 - DNA, 22 bp, synthetic construct
  misc_feature 1..22: note = chemically synthesized
  source 1..22: mol_type = other DNA
tattactttatcttttgaattt

SEQ ID NO: 32836 - DNA, 22 bp, synthetic construct
  misc_feature 1..22: note = chemically synthesized
  source 1..22: mol_type = other DNA
attactttatcttttgaatttt

SEQ ID NO: 32837 - DNA, 22 bp, synthetic construct
  misc_feature 1..22: note = chemically synthesized
  source 1..22: mol_type = other DNA
ttactttatcttttgaattttc

SEQ ID NO: 32838 - DNA, 22 bp, synthetic construct
  misc_feature 1..22: note = chemically synthesized
  source 1..22: mol_type = other DNA
ctttatcttttgaattttctta

SEQ ID NO: 32839 - DNA, 22 bp, synthetic construct
  misc_feature 1..22: note = chemically synthesized
  source 1..22: mol_type = other DNA
tatcttttgaattttcttaccc

SEQ ID NO: 32840 - DNA, 22 bp, synthetic construct
  misc_feature 1..22: note = chemically synthesized
  source 1..22: mol_type = other DNA
atcttttgaattttcttacccc

SEQ ID NO: 32841 - DNA, 22 bp, synthetic construct
  misc_feature 1..22: note = chemically synthesized
  source 1..22: mol_type = other DNA
tcttttgaattttcttacccca

SEQ ID NO: 32842 - DNA, 22 bp, synthetic construct
  misc_feature 1..22: note = chemically synthesized
  source 1..22: mol_type = other DNA
ttgaattttcttaccccagttg

SEQ ID NO: 32843 - DNA, 22 bp, synthetic construct
  misc_feature 1..22: note = chemically synthesized
  source 1..22: mol_type = other DNA
tgaattttcttaccccagttgt

SEQ ID NO: 32844 - DNA, 22 bp, synthetic construct
  misc_feature 1..22: note = chemically synthesized
  source 1..22: mol_type = other DNA
gaattttcttaccccagttgta

SEQ ID NO: 32845 - DNA, 22 bp, synthetic construct
  misc_feature 1..22: note = chemically synthesized
  source 1..22: mol_type = other DNA
aattttcttaccccagttgtac

SEQ ID NO: 32846 - DNA, 22 bp, synthetic construct
  misc_feature 1..22: note = chemically synthesized
  source 1..22: mol_type = other DNA
tcttaccccagttgtacttttg

SEQ ID NO: 32847 - DNA, 22 bp, synthetic construct
  misc_feature 1..22: note = chemically synthesized
  source 1..22: mol_type = other DNA
cttaccccagttgtacttttgt

SEQ ID NO: 32848 - DNA, 22 bp, synthetic construct
  misc_feature 1..22: note = chemically synthesized
  source 1..22: mol_type = other DNA
ttaccccagttgtacttttgtg

SEQ ID NO: 32849 - DNA, 22 bp, synthetic construct
  misc_feature 1..22: note = chemically synthesized
  source 1..22: mol_type = other DNA
accccagttgtacttttgtgta

SEQ ID NO: 32850 - DNA, 22 bp, synthetic construct
  misc_feature 1..22: note = chemically synthesized
  source 1..22: mol_type = other DNA
ccccagttgtacttttgtgtaa

SEQ ID NO: 32851 - DNA, 22 bp, synthetic construct
  misc_feature 1..22: note = chemically synthesized
  source 1..22: mol_type = other DNA
tacttttgtgtaaatgtgattt

SEQ ID NO: 32852 - DNA, 22 bp, synthetic construct
  misc_feature 1..22: note = chemically synthesized
  source 1..22: mol_type = other DNA
ttgtgtaaatgtgatttcattt

SEQ ID NO: 32853 - DNA, 22 bp, synthetic construct
  misc_feature 1..22: note = chemically synthesized
  source 1..22: mol_type = other DNA
tgtgtaaatgtgatttcattta

SEQ ID NO: 32854 - DNA, 22 bp, synthetic construct
  misc_feature 1..22: note = chemically synthesized
  source 1..22: mol_type = other DNA
gtgtaaatgtgatttcatttac

SEQ ID NO: 32855 - DNA, 22 bp, synthetic construct
  misc_feature 1..22: note = chemically synthesized
  source 1..22: mol_type = other DNA
tgtaaatgtgatttcatttacg

SEQ ID NO: 32856 - DNA, 22 bp, synthetic construct
  misc_feature 1..22: note = chemically synthesized
  source 1..22: mol_type = other DNA
catttacggctttgtgttgaca

SEQ ID NO: 32857 - DNA, 22 bp, synthetic construct
  misc_feature 1..22: note = chemically synthesized
  source 1..22: mol_type = other DNA
atttacggctttgtgttgacat

SEQ ID NO: 32858 - DNA, 22 bp, synthetic construct
  misc_feature 1..22: note = chemically synthesized
  source 1..22: mol_type = other DNA
acggctttgtgttgacatattc

SEQ ID NO: 32859 - DNA, 22 bp, synthetic construct
  misc_feature 1..22: note = chemically synthesized
  source 1..22: mol_type = other DNA
cggctttgtgttgacatattca

SEQ ID NO: 32860 - DNA, 22 bp, synthetic construct
  misc_feature 1..22: note = chemically synthesized
  source 1..22: mol_type = other DNA
tgtgttgacatattcattaaaa

SEQ ID NO: 32861 - DNA, 22 bp, synthetic construct
  misc_feature 1..22: note = chemically synthesized
  source 1..22: mol_type = other DNA
gtgttgacatattcattaaaat

SEQ ID NO: 32862 - DNA, 22 bp, synthetic construct
  misc_feature 1..22: note = chemically synthesized
  source 1..22: mol_type = other DNA
tgttgacatattcattaaaatg

SEQ ID NO: 32863 - DNA, 22 bp, synthetic construct
  misc_feature 1..22: note = chemically synthesized
  source 1..22: mol_type = other DNA
acatattcattaaaatgaagaa

SEQ ID NO: 32864 - DNA, 22 bp, synthetic construct
  misc_feature 1..22: note = chemically synthesized
  source 1..22: mol_type = other DNA
attaaaatgaagaaataaaaga

SEQ ID NO: 32865 - DNA, 22 bp, synthetic construct
  misc_feature 1..22: note = chemically synthesized
  source 1..22: mol_type = other DNA
aaatgaagaaataaaagatgag

SEQ ID NO: 32866 - DNA, 22 bp, synthetic construct
  misc_feature 1..22: note = chemically synthesized
  source 1..22: mol_type = other DNA
taaaaattatataatgtttatt

SEQ ID NO: 32867 - DNA, 22 bp, synthetic construct
  misc_feature 1..22: note = chemically synthesized
  source 1..22: mol_type = other DNA
aaaaattatataatgtttattg

SEQ ID NO: 32868 - DNA, 22 bp, synthetic construct
  misc_feature 1..22: note = chemically synthesized
  source 1..22: mol_type = other DNA
aaaattatataatgtttattga

SEQ ID NO: 32869 - DNA, 22 bp, synthetic construct
  misc_feature 1..22: note = chemically synthesized
  source 1..22: mol_type = other DNA
tataatgtttattgattagaat

SEQ ID NO: 32870 - DNA, 22 bp, synthetic construct
  misc_feature 1..22: note = chemically synthesized
  source 1..22: mol_type = other DNA
attgattagaatgaatatgatg

SEQ ID NO: 32871 - DNA, 22 bp, synthetic construct
  misc_feature 1..22: note = chemically synthesized
  source 1..22: mol_type = other DNA
ttgattagaatgaatatgatgc

SEQ ID NO: 32872 - DNA, 22 bp, synthetic construct
  misc_feature 1..22: note = chemically synthesized
  source 1..22: mol_type = other DNA
attagaatgaatatgatgcaat

SEQ ID NO: 32873 - DNA, 22 bp, synthetic construct
  misc_feature 1..22: note = chemically synthesized
  source 1..22: mol_type = other DNA
gaatgaatatgatgcaatctgg

SEQ ID NO: 32874 - DNA, 22 bp, synthetic construct
  misc_feature 1..22: note = chemically synthesized
  source 1..22: mol_type = other DNA
gttttctgtgttcagattcctg

SEQ ID NO: 32875 - DNA, 22 bp, synthetic construct
  misc_feature 1..22: note = chemically synthesized
  source 1..22: mol_type = other DNA
tctgtgttcagattcctgacct

SEQ ID NO: 32876 - DNA, 22 bp, synthetic construct
  misc_feature 1..22: note = chemically synthesized
  source 1..22: mol_type = other DNA
ctgtgttcagattcctgacctc

SEQ ID NO: 32877 - DNA, 22 bp, synthetic construct
  misc_feature 1..22: note = chemically synthesized
  source 1..22: mol_type = other DNA
tgtgttcagattcctgacctct

SEQ ID NO: 32878 - DNA, 22 bp, synthetic construct
  misc_feature 1..22: note = chemically synthesized
  source 1..22: mol_type = other DNA
tgttcagattcctgacctctgg

SEQ ID NO: 32879 - DNA, 22 bp, synthetic construct
  misc_feature 1..22: note = chemically synthesized
  source 1..22: mol_type = other DNA
agattcctgacctctggagtta

SEQ ID NO: 32880 - DNA, 22 bp, synthetic construct
  misc_feature 1..22: note = chemically synthesized
  source 1..22: mol_type = other DNA
ctgacctctggagttaaccttt

SEQ ID NO: 32881 - DNA, 22 bp, synthetic construct
  misc_feature 1..22: note = chemically synthesized
  source 1..22: mol_type = other DNA
acctctggagttaacctttctt

SEQ ID NO: 32882 - DNA, 22 bp, synthetic construct
  misc_feature 1..22: note = chemically synthesized
  source 1..22: mol_type = other DNA
tggagttaacctttctttgtaa

SEQ ID NO: 32883 - DNA, 22 bp, synthetic construct
  misc_feature 1..22: note = chemically synthesized
  source 1..22: mol_type = other DNA
gagttaacctttctttgtaaag

SEQ ID NO: 32884 - DNA, 22 bp, synthetic construct
  misc_feature 1..22: note = chemically synthesized
  source 1..22: mol_type = other DNA
acctttctttgtaaagattaga

SEQ ID NO: 32885 - DNA, 22 bp, synthetic construct
  misc_feature 1..22: note = chemically synthesized
  source 1..22: mol_type = other DNA
tctttgtaaagattagacagca

SEQ ID NO: 32886 - DNA, 22 bp, synthetic construct
  misc_feature 1..22: note = chemically synthesized
  source 1..22: mol_type = other DNA
ctttgtaaagattagacagcag

SEQ ID NO: 32887 - DNA, 22 bp, synthetic construct
  misc_feature 1..22: note = chemically synthesized
  source 1..22: mol_type = other DNA
tttgtaaagattagacagcagg

SEQ ID NO: 32888 - DNA, 22 bp, synthetic construct
  misc_feature 1..22: note = chemically synthesized
  source 1..22: mol_type = other DNA
tgtaaagattagacagcaggca

SEQ ID NO: 32889 - DNA, 22 bp, synthetic construct
  misc_feature 1..22: note = chemically synthesized
  source 1..22: mol_type = other DNA
gtaaagattagacagcaggcag

SEQ ID NO: 32890 - DNA, 22 bp, synthetic construct
  misc_feature 1..22: note = chemically synthesized
  source 1..22: mol_type = other DNA
taaagattagacagcaggcagg

SEQ ID NO: 32891 - DNA, 22 bp, synthetic construct
  misc_feature 1..22: note = chemically synthesized
  source 1..22: mol_type = other DNA
gacagcaggcagggaagaatgc

SEQ ID NO: 32892 - DNA, 22 bp, synthetic construct
  misc_feature 1..22: note = chemically synthesized
  source 1..22: mol_type = other DNA
tgaaactgagagcaaagactgg

SEQ ID NO: 32893 - DNA, 22 bp, synthetic construct
  misc_feature 1..22: note = chemically synthesized
  source 1..22: mol_type = other DNA
gaaactgagagcaaagactggc

SEQ ID NO: 32894 - DNA, 22 bp, synthetic construct
  misc_feature 1..22: note = chemically synthesized
  source 1..22: mol_type = other DNA
aaactgagagcaaagactggca

SEQ ID NO: 32895 - DNA, 22 bp, synthetic construct
  misc_feature 1..22: note = chemically synthesized
  source 1..22: mol_type = other DNA
agagcaaagactggcatgcaat

SEQ ID NO: 32896 - DNA, 22 bp, synthetic construct
  misc_feature 1..22: note = chemically synthesized
  source 1..22: mol_type = other DNA
gcatgcaatttacattgatgtc

SEQ ID NO: 32897 - DNA, 22 bp, synthetic construct
  misc_feature 1..22: note = chemically synthesized
  source 1..22: mol_type = other DNA
acattgatgtcctggtgctgtg

SEQ ID NO: 32898 - DNA, 22 bp, synthetic construct
  misc_feature 1..22: note = chemically synthesized
  source 1..22: mol_type = other DNA
cattgatgtcctggtgctgtgc

SEQ ID NO: 32899 - DNA, 22 bp, synthetic construct
  misc_feature 1..22: note = chemically synthesized
  source 1..22: mol_type = other DNA
atgtcctggtgctgtgcataat

SEQ ID NO: 32900 - DNA, 22 bp, synthetic construct
  misc_feature 1..22: note = chemically synthesized
  source 1..22: mol_type = other DNA
gtgctgtgcataataagttgct

SEQ ID NO: 32901 - DNA, 22 bp, synthetic construct
  misc_feature 1..22: note = chemically synthesized
  source 1..22: mol_type = other DNA
tgcataataagttgcttaaaca

SEQ ID NO: 32902 - DNA, 22 bp, synthetic construct
  misc_feature 1..22: note = chemically synthesized
  source 1..22: mol_type = other DNA
cttaaacatgacagcaggatag

SEQ ID NO: 32903 - DNA, 22 bp, synthetic construct
  misc_feature 1..22: note = chemically synthesized
  source 1..22: mol_type = other DNA
aaacatgacagcaggataggat

SEQ ID NO: 32904 - DNA, 22 bp, synthetic construct
  misc_feature 1..22: note = chemically synthesized
  source 1..22: mol_type = other DNA
aacatgacagcaggataggatt

SEQ ID NO: 32905 - DNA, 22 bp, synthetic construct
  misc_feature 1..22: note = chemically synthesized
  source 1..22: mol_type = other DNA
tacataaaatttatttataaat

SEQ ID NO: 32906 - DNA, 22 bp, synthetic construct
  misc_feature 1..22: note = chemically synthesized
  source 1..22: mol_type = other DNA
acataaaatttatttataaatg

SEQ ID NO: 32907 - DNA, 22 bp, synthetic construct
  misc_feature 1..22: note = chemically synthesized
  source 1..22: mol_type = other DNA
cataaaatttatttataaatgg

SEQ ID NO: 32908 - DNA, 22 bp, synthetic construct
  misc_feature 1..22: note = chemically synthesized
  source 1..22: mol_type = other DNA
atttataaatggtaaagatgtt

SEQ ID NO: 32909 - DNA, 22 bp, synthetic construct
  misc_feature 1..22: note = chemically synthesized
  source 1..22: mol_type = other DNA
tttataaatggtaaagatgttt

SEQ ID NO: 32910 - DNA, 22 bp, synthetic construct
  misc_feature 1..22: note = chemically synthesized
  source 1..22: mol_type = other DNA
ataaatggtaaagatgtttcca

SEQ ID NO: 32911 - DNA, 22 bp, synthetic construct
  misc_feature 1..22: note = chemically synthesized
  source 1..22: mol_type = other DNA
taaatggtaaagatgtttccaa

SEQ ID NO: 32912 - DNA, 22 bp, synthetic construct
  misc_feature 1..22: note = chemically synthesized
  source 1..22: mol_type = other DNA
ccaacctctgctgaacttcctc

SEQ ID NO: 32913 - DNA, 22 bp, synthetic construct
  misc_feature 1..22: note = chemically synthesized
  source 1..22: mol_type = other DNA
caacctctgctgaacttcctca

SEQ ID NO: 32914 - DNA, 22 bp, synthetic construct
  misc_feature 1..22: note = chemically synthesized
  source 1..22: mol_type = other DNA
tgctgaacttcctcatagaatg

SEQ ID NO: 32915 - DNA, 22 bp, synthetic construct
  misc_feature 1..22: note = chemically synthesized
  source 1..22: mol_type = other DNA
ctgaacttcctcatagaatgtt

SEQ ID NO: 32916 - DNA, 22 bp, synthetic construct
  misc_feature 1..22: note = chemically synthesized
  source 1..22: mol_type = other DNA
aacttcctcatagaatgttcat

SEQ ID NO: 32917 - DNA, 22 bp, synthetic construct
  misc_feature 1..22: note = chemically synthesized
  source 1..22: mol_type = other DNA
cctcatagaatgttcatcagaa

SEQ ID NO: 32918 - DNA, 22 bp, synthetic construct
  misc_feature 1..22: note = chemically synthesized
  source 1..22: mol_type = other DNA
ctcatagaatgttcatcagaaa

SEQ ID NO: 32919 - DNA, 22 bp, synthetic construct
  misc_feature 1..22: note = chemically synthesized
  source 1..22: mol_type = other DNA
atagaatgttcatcagaaaaca

SEQ ID NO: 32920 - DNA, 22 bp, synthetic construct
  misc_feature 1..22: note = chemically synthesized
  source 1..22: mol_type = other DNA
atcagaaaacaaagtttctatc

SEQ ID NO: 32921 - DNA, 22 bp, synthetic construct
  misc_feature 1..22: note = chemically synthesized
  source 1..22: mol_type = other DNA
ctatctactctttcttccaaga

SEQ ID NO: 32922 - DNA, 22 bp, synthetic construct
  misc_feature 1..22: note = chemically synthesized
  source 1..22: mol_type = other DNA
tatctactctttcttccaagac

SEQ ID NO: 32923 - DNA, 22 bp, synthetic construct
  misc_feature 1..22: note = chemically synthesized
  source 1..22: mol_type = other DNA
tctactctttcttccaagactt

SEQ ID NO: 32924 - DNA, 22 bp, synthetic construct
  misc_feature 1..22: note = chemically synthesized
  source 1..22: mol_type = other DNA
ctctttcttccaagacttcaac

SEQ ID NO: 32925 - DNA, 22 bp, synthetic construct
  misc_feature 1..22: note = chemically synthesized
  source 1..22: mol_type = other DNA
tttcttccaagacttcaactcc

SEQ ID NO: 32926 - DNA, 22 bp, synthetic construct
  misc_feature 1..22: note = chemically synthesized
  source 1..22: mol_type = other DNA
tcttccaagacttcaactccta

SEQ ID NO: 32927 - DNA, 22 bp, synthetic construct
  misc_feature 1..22: note = chemically synthesized
  source 1..22: mol_type = other DNA
cttccaagacttcaactcctac

SEQ ID NO: 32928 - DNA, 22 bp, synthetic construct
  misc_feature 1..22: note = chemically synthesized
  source 1..22: mol_type = other DNA
ttccaagacttcaactcctacc

SEQ ID NO: 32929 - DNA, 22 bp, synthetic construct
  misc_feature 1..22: note = chemically synthesized
  source 1..22: mol_type = other DNA
ccaagacttcaactcctaccac

SEQ ID NO: 32930 - DNA, 22 bp, synthetic construct
  misc_feature 1..22: note = chemically synthesized
  source 1..22: mol_type = other DNA
caagacttcaactcctaccact

SEQ ID NO: 32931 - DNA, 22 bp, synthetic construct
  misc_feature 1..22: note = chemically synthesized
  source 1..22: mol_type = other DNA
caactcctaccactgacatcat

SEQ ID NO: 32932 - DNA, 22 bp, synthetic construct
  misc_feature 1..22: note = chemically synthesized
  source 1..22: mol_type = other DNA
aactcctaccactgacatcatg

SEQ ID NO: 32933 - DNA, 22 bp, synthetic construct
  misc_feature 1..22: note = chemically synthesized
  source 1..22: mol_type = other DNA
ctaccactgacatcatgaccct

SEQ ID NO: 32934 - DNA, 22 bp, synthetic construct
  misc_feature 1..22: note = chemically synthesized
  source 1..22: mol_type = other DNA
ccactgacatcatgaccctcag

SEQ ID NO: 32935 - DNA, 22 bp, synthetic construct
  misc_feature 1..22: note = chemically synthesized
  source 1..22: mol_type = other DNA
acatcatgaccctcagttctat

SEQ ID NO: 32936 - DNA, 22 bp, synthetic construct
  misc_feature 1..22: note = chemically synthesized
  source 1..22: mol_type = other DNA
agttctattcccctagccctgc

SEQ ID NO: 32937 - DNA, 22 bp, synthetic construct
  misc_feature 1..22: note = chemically synthesized
  source 1..22: mol_type = other DNA
tattcccctagccctgcccact

SEQ ID NO: 32938 - DNA, 22 bp, synthetic construct
  misc_feature 1..22: note = chemically synthesized
  source 1..22: mol_type = other DNA
ttcccctagccctgcccactcc

SEQ ID NO: 32939 - DNA, 22 bp, synthetic construct
  misc_feature 1..22: note = chemically synthesized
  source 1..22: mol_type = other DNA
ccctagccctgcccactcccct

SEQ ID NO: 32940 - DNA, 22 bp, synthetic construct
  misc_feature 1..22: note = chemically synthesized
  source 1..22: mol_type = other DNA
gccctgcccactcccctgaaat

SEQ ID NO: 32941 - DNA, 22 bp, synthetic construct
  misc_feature 1..22: note = chemically synthesized
  source 1..22: mol_type = other DNA
cccactcccctgaaatccagat

SEQ ID NO: 32942 - DNA, 22 bp, synthetic construct
  misc_feature 1..22: note = chemically synthesized
  source 1..22: mol_type = other DNA
ccctgaaatccagatccataaa

SEQ ID NO: 32943 - DNA, 22 bp, synthetic construct
  misc_feature 1..22: note = chemically synthesized
  source 1..22: mol_type = other DNA
aaatccagatccataaatccaa

SEQ ID NO: 32944 - DNA, 22 bp, synthetic construct
  misc_feature 1..22: note = chemically synthesized
  source 1..22: mol_type = other DNA
ggtatctcagtttggctgtccc

SEQ ID NO: 32945 - DNA, 22 bp, synthetic construct
  misc_feature 1..22: note = chemically synthesized
  source 1..22: mol_type = other DNA
agtttggctgtccctccatcaa

SEQ ID NO: 32946 - DNA, 22 bp, synthetic construct
  misc_feature 1..22: note = chemically synthesized
  source 1..22: mol_type = other DNA
ggctgtccctccatcaactcaa

SEQ ID NO: 32947 - DNA, 22 bp, synthetic construct
  misc_feature 1..22: note = chemically synthesized
  source 1..22: mol_type = other DNA
gctgtccctccatcaactcaaa

SEQ ID NO: 32948 - DNA, 22 bp, synthetic construct
  misc_feature 1..22: note = chemically synthesized
  source 1..22: mol_type = other DNA
tccctccatcaactcaaatttg

SEQ ID NO: 32949 - DNA, 22 bp, synthetic construct
  misc_feature 1..22: note = chemically synthesized
  source 1..22: mol_type = other DNA
catcaactcaaatttggctgac

SEQ ID NO: 32950 - DNA, 22 bp, synthetic construct
  misc_feature 1..22: note = chemically synthesized
  source 1..22: mol_type = other DNA
aaatttggctgacacagttttg

SEQ ID NO: 32951 - DNA, 22 bp, synthetic construct
  misc_feature 1..22: note = chemically synthesized
  source 1..22: mol_type = other DNA
ggctgacacagttttggattct

SEQ ID NO: 32952 - DNA, 22 bp, synthetic construct
  misc_feature 1..22: note = chemically synthesized
  source 1..22: mol_type = other DNA
gctgacacagttttggattcta

SEQ ID NO: 32953 - DNA, 22 bp, synthetic construct
  misc_feature 1..22: note = chemically synthesized
  source 1..22: mol_type = other DNA
acacagttttggattctagagc

SEQ ID NO: 32954 - DNA, 22 bp, synthetic construct
  misc_feature 1..22: note = chemically synthesized
  source 1..22: mol_type = other DNA
tggattctagagcatgcaggca

SEQ ID NO: 32955 - DNA, 22 bp, synthetic construct
  misc_feature 1..22: note = chemically synthesized
  source 1..22: mol_type = other DNA
ggattctagagcatgcaggcat

SEQ ID NO: 32956 - DNA, 22 bp, synthetic construct
  misc_feature 1..22: note = chemically synthesized
  source 1..22: mol_type = other DNA
gattctagagcatgcaggcatt

SEQ ID NO: 32957 - DNA, 22 bp, synthetic construct
  misc_feature 1..22: note = chemically synthesized
  source 1..22: mol_type = other DNA
tagagcatgcaggcattctgta

SEQ ID NO: 32958 - DNA, 22 bp, synthetic construct
  misc_feature 1..22: note = chemically synthesized
  source 1..22: mol_type = other DNA
gagcatgcaggcattctgtatg

SEQ ID NO: 32959 - DNA, 22 bp, synthetic construct
  misc_feature 1..22: note = chemically synthesized
  source 1..22: mol_type = other DNA
tgtatgtgctgtgcctttgcac

SEQ ID NO: 32960 - DNA, 22 bp, synthetic construct
  misc_feature 1..22: note = chemically synthesized
  source 1..22: mol_type = other DNA
tatgtgctgtgcctttgcactc

SEQ ID NO: 32961 - DNA, 22 bp, synthetic construct
  misc_feature 1..22: note = chemically synthesized
  source 1..22: mol_type = other DNA
tgcctttgcactcactcttccc

SEQ ID NO: 32962 - DNA, 22 bp, synthetic construct
  misc_feature 1..22: note = chemically synthesized
  source 1..22: mol_type = other DNA
tgcactcactcttccctccaga

SEQ ID NO: 32963 - DNA, 22 bp, synthetic construct
  misc_feature 1..22: note = chemically synthesized
  source 1..22: mol_type = other DNA
gcactcactcttccctccagac

SEQ ID NO: 32964 - DNA, 22 bp, synthetic construct
  misc_feature 1..22: note = chemically synthesized
  source 1..22: mol_type = other DNA
cactcactcttccctccagacc

SEQ ID NO: 32965 - DNA, 22 bp, synthetic construct
  misc_feature 1..22: note = chemically synthesized
  source 1..22: mol_type = other DNA
actcttccctccagaccccgtc

SEQ ID NO: 32966 - DNA, 22 bp, synthetic construct
  misc_feature 1..22: note = chemically synthesized
  source 1..22: mol_type = other DNA
ttccctccagaccccgtccttc

SEQ ID NO: 32967 - DNA, 22 bp, synthetic construct
  misc_feature 1..22: note = chemically synthesized
  source 1..22: mol_type = other DNA
ccctccagaccccgtccttcct

SEQ ID NO: 32968 - DNA, 22 bp, synthetic construct
  misc_feature 1..22: note = chemically synthesized
  source 1..22: mol_type = other DNA
cctccagaccccgtccttcctc

SEQ ID NO: 32969 - DNA, 22 bp, synthetic construct
  misc_feature 1..22: note = chemically synthesized
  source 1..22: mol_type = other DNA
cagaccccgtccttcctcactt

SEQ ID NO: 32970 - DNA, 22 bp, synthetic construct
  misc_feature 1..22: note = chemically synthesized
  source 1..22: mol_type = other DNA
cctcactttgccagttccaact

SEQ ID NO: 32971 - DNA, 22 bp, synthetic construct
  misc_feature 1..22: note = chemically synthesized
  source 1..22: mol_type = other DNA
ctcactttgccagttccaactt

SEQ ID NO: 32972 - DNA, 22 bp, synthetic construct
  misc_feature 1..22: note = chemically synthesized
  source 1..22: mol_type = other DNA
actttgccagttccaacttctc

SEQ ID NO: 32973 - DNA, 22 bp, synthetic construct
  misc_feature 1..22: note = chemically synthesized
  source 1..22: mol_type = other DNA
tgccagttccaacttctctctg

SEQ ID NO: 32974 - DNA, 22 bp, synthetic construct
  misc_feature 1..22: note = chemically synthesized
  source 1..22: mol_type = other DNA
gccagttccaacttctctctga

SEQ ID NO: 32975 - DNA, 22 bp, synthetic construct
  misc_feature 1..22: note = chemically synthesized
  source 1..22: mol_type = other DNA
ccagttccaacttctctctgaa

SEQ ID NO: 32976 - DNA, 22 bp, synthetic construct
  misc_feature 1..22: note = chemically synthesized
  source 1..22: mol_type = other DNA
caacttctctctgaagactcag

SEQ ID NO: 32977 - DNA, 22 bp, synthetic construct
  misc_feature 1..22: note = chemically synthesized
  source 1..22: mol_type = other DNA
ctctctgaagactcagtttagg

SEQ ID NO: 32978 - DNA, 22 bp, synthetic construct
  misc_feature 1..22: note = chemically synthesized
  source 1..22: mol_type = other DNA
tctctgaagactcagtttaggt

SEQ ID NO: 32979 - DNA, 22 bp, synthetic construct
  misc_feature 1..22: note = chemically synthesized
  source 1..22: mol_type = other DNA
tctgaagactcagtttaggtac

SEQ ID NO: 32980 - DNA, 22 bp, synthetic construct
  misc_feature 1..22: note = chemically synthesized
  source 1..22: mol_type = other DNA
tgaagactcagtttaggtacag

SEQ ID NO: 32981 - DNA, 22 bp, synthetic construct
  misc_feature 1..22: note = chemically synthesized
  source 1..22: mol_type = other DNA
aagactcagtttaggtacaggc

SEQ ID NO: 32982 - DNA, 22 bp, synthetic construct
  misc_feature 1..22: note = chemically synthesized
  source 1..22: mol_type = other DNA
agtttaggtacaggctccttta

SEQ ID NO: 32983 - DNA, 22 bp, synthetic construct
  misc_feature 1..22: note = chemically synthesized
  source 1..22: mol_type = other DNA
aggtacaggctcctttaggaaa

SEQ ID NO: 32984 - DNA, 22 bp, synthetic construct
  misc_feature 1..22: note = chemically synthesized
  source 1..22: mol_type = other DNA
ggtacaggctcctttaggaaat

SEQ ID NO: 32985 - DNA, 22 bp, synthetic construct
  misc_feature 1..22: note = chemically synthesized
  source 1..22: mol_type = other DNA
ctttaggaaatttttttttgac

SEQ ID NO: 32986 - DNA, 22 bp, synthetic construct
  misc_feature 1..22: note = chemically synthesized
  source 1..22: mol_type = other DNA
taggaaatttttttttgactct

SEQ ID NO: 32987 - DNA, 22 bp, synthetic construct
  misc_feature 1..22: note = chemically synthesized
  source 1..22: mol_type = other DNA
aggaaatttttttttgactcta

SEQ ID NO: 32988 - DNA, 22 bp, synthetic construct
  misc_feature 1..22: note = chemically synthesized
  source 1..22: mol_type = other DNA
ggaaatttttttttgactctac

SEQ ID NO: 32989 - DNA, 22 bp, synthetic construct
  misc_feature 1..22: note = chemically synthesized
  source 1..22: mol_type = other DNA
ttttttgactctacctagccca

SEQ ID NO: 32990 - DNA, 22 bp, synthetic construct
  misc_feature 1..22: note = chemically synthesized
  source 1..22: mol_type = other DNA
tttttgactctacctagcccag

SEQ ID NO: 32991 - DNA, 22 bp, synthetic construct
  misc_feature 1..22: note = chemically synthesized
  source 1..22: mol_type = other DNA
ttttgactctacctagcccaga

SEQ ID NO: 32992 - DNA, 22 bp, synthetic construct
  misc_feature 1..22: note = chemically synthesized
  source 1..22: mol_type = other DNA
tttgactctacctagcccagac

SEQ ID NO: 32993 - DNA, 22 bp, synthetic construct
  misc_feature 1..22: note = chemically synthesized
  source 1..22: mol_type = other DNA
ttgactctacctagcccagact

SEQ ID NO: 32994 - DNA, 22 bp, synthetic construct
  misc_feature 1..22: note = chemically synthesized
  source 1..22: mol_type = other DNA
tgactctacctagcccagactc

SEQ ID NO: 32995 - DNA, 22 bp, synthetic construct
  misc_feature 1..22: note = chemically synthesized
  source 1..22: mol_type = other DNA
gactctacctagcccagactca

SEQ ID NO: 32996 - DNA, 22 bp, synthetic construct
  misc_feature 1..22: note = chemically synthesized
  source 1..22: mol_type = other DNA
actctacctagcccagactcag

SEQ ID NO: 32997 - DNA, 22 bp, synthetic construct
  misc_feature 1..22: note = chemically synthesized
  source 1..22: mol_type = other DNA
tacctagcccagactcagttca

SEQ ID NO: 32998 - DNA, 22 bp, synthetic construct
  misc_feature 1..22: note = chemically synthesized
  source 1..22: mol_type = other DNA
cctagcccagactcagttcatc

SEQ ID NO: 32999 - DNA, 22 bp, synthetic construct
  misc_feature 1..22: note = chemically synthesized
  source 1..22: mol_type = other DNA
gcccagactcagttcatctacg

SEQ ID NO: 33000 - DNA, 22 bp, synthetic construct
  misc_feature 1..22: note = chemically synthesized
  source 1..22: mol_type = other DNA
agttcatctacgatattaatct

SEQ ID NO: 33001 - DNA, 22 bp, synthetic construct
  misc_feature 1..22: note = chemically synthesized
  source 1..22: mol_type = other DNA
atctacgatattaatctgcagt

SEQ ID NO: 33002 - DNA, 22 bp, synthetic construct
  misc_feature 1..22: note = chemically synthesized
  source 1..22: mol_type = other DNA
cgatattaatctgcagtgtcat

SEQ ID NO: 33003 - DNA, 22 bp, synthetic construct
  misc_feature 1..22: note = chemically synthesized
  source 1..22: mol_type = other DNA
atctgcagtgtcatgcactagc

SEQ ID NO: 33004 - DNA, 22 bp, synthetic construct
  misc_feature 1..22: note = chemically synthesized
  source 1..22: mol_type = other DNA
cagtgtcatgcactagcacaaa

SEQ ID NO: 33005 - DNA, 22 bp, synthetic construct
  misc_feature 1..22: note = chemically synthesized
  source 1..22: mol_type = other DNA
gcacaaaatatttgctgaatga

SEQ ID NO: 33006 - DNA, 22 bp, synthetic construct
  misc_feature 1..22: note = chemically synthesized
  source 1..22: mol_type = other DNA
gctgaatgaaagaatgagagtt

SEQ ID NO: 33007 - DNA, 22 bp, synthetic construct
  misc_feature 1..22: note = chemically synthesized
  source 1..22: mol_type = other DNA
ctgaatgaaagaatgagagtta

SEQ ID NO: 33008 - DNA, 22 bp, synthetic construct
  misc_feature 1..22: note = chemically synthesized
  source 1..22: mol_type = other DNA
aatgaaagaatgagagttaact

SEQ ID NO: 33009 - DNA, 22 bp, synthetic construct
  misc_feature 1..22: note = chemically synthesized
  source 1..22: mol_type = other DNA
acttttagtcaggcataaagat

SEQ ID NO: 33010 - DNA, 22 bp, synthetic construct
  misc_feature 1..22: note = chemically synthesized
  source 1..22: mol_type = other DNA
ttagtcaggcataaagataaaa

SEQ ID NO: 33011 - DNA, 22 bp, synthetic construct
  misc_feature 1..22: note = chemically synthesized
  source 1..22: mol_type = other DNA
tagtcaggcataaagataaaaa

SEQ ID NO: 33012 - DNA, 22 bp, synthetic construct
  misc_feature 1..22: note = chemically synthesized
  source 1..22: mol_type = other DNA
agtcaggcataaagataaaaaa

SEQ ID NO: 33013 - DNA, 22 bp, synthetic construct
  misc_feature 1..22: note = chemically synthesized
  source 1..22: mol_type = other DNA
gtcaggcataaagataaaaaac

SEQ ID NO: 33014 - DNA, 22 bp, synthetic construct
  misc_feature 1..22: note = chemically synthesized
  source 1..22: mol_type = other DNA
ttactccggtgtggagtgtttt

SEQ ID NO: 33015 - DNA, 22 bp, synthetic construct
  misc_feature 1..22: note = chemically synthesized
  source 1..22: mol_type = other DNA
tactccggtgtggagtgttttc

SEQ ID NO: 33016 - DNA, 22 bp, synthetic construct
  misc_feature 1..22: note = chemically synthesized
  source 1..22: mol_type = other DNA
actccggtgtggagtgttttca

SEQ ID NO: 33017 - DNA, 22 bp, synthetic construct
  misc_feature 1..22: note = chemically synthesized
  source 1..22: mol_type = other DNA
ctccggtgtggagtgttttcag

SEQ ID NO: 33018 - DNA, 22 bp, synthetic construct
  misc_feature 1..22: note = chemically synthesized
  source 1..22: mol_type = other DNA
cggtgtggagtgttttcaggat

SEQ ID NO: 33019 - DNA, 22 bp, synthetic construct
  misc_feature 1..22: note = chemically synthesized
  source 1..22: mol_type = other DNA
tcaggattcctaccaattagga

SEQ ID NO: 33020 - DNA, 22 bp, synthetic construct
  misc_feature 1..22: note = chemically synthesized
  source 1..22: mol_type = other DNA
caggattcctaccaattaggaa

SEQ ID NO: 33021 - DNA, 22 bp, synthetic construct
  misc_feature 1..22: note = chemically synthesized
  source 1..22: mol_type = other DNA
aggattcctaccaattaggaag

SEQ ID NO: 33022 - DNA, 22 bp, synthetic construct
  misc_feature 1..22: note = chemically synthesized
  source 1..22: mol_type = other DNA
ctaccaattaggaaggtgtttg

SEQ ID NO: 33023 - DNA, 22 bp, synthetic construct
  misc_feature 1..22: note = chemically synthesized
  source 1..22: mol_type = other DNA
ccaattaggaaggtgtttgatt

SEQ ID NO: 33024 - DNA, 22 bp, synthetic construct
  misc_feature 1..22: note = chemically synthesized
  source 1..22: mol_type = other DNA
ggaaggtgtttgattcttcaaa

SEQ ID NO: 33025 - DNA, 22 bp, synthetic construct
  misc_feature 1..22: note = chemically synthesized
  source 1..22: mol_type = other DNA
gattcttcaaactcagaaacac

SEQ ID NO: 33026 - DNA, 22 bp, synthetic construct
  misc_feature 1..22: note = chemically synthesized
  source 1..22: mol_type = other DNA
attcttcaaactcagaaacacc

SEQ ID NO: 33027 - DNA, 22 bp, synthetic construct
  misc_feature 1..22: note = chemically synthesized
  source 1..22: mol_type = other DNA
ttcaaactcagaaacacctccc

SEQ ID NO: 33028 - DNA, 22 bp, synthetic construct
  misc_feature 1..22: note = chemically synthesized
  source 1..22: mol_type = other DNA
caaactcagaaacacctcccct

SEQ ID NO: 33029 - DNA, 22 bp, synthetic construct
  misc_feature 1..22: note = chemically synthesized
  source 1..22: mol_type = other DNA
aaactcagaaacacctcccctt

SEQ ID NO: 33030 - DNA, 22 bp, synthetic construct
  misc_feature 1..22: note = chemically synthesized
  source 1..22: mol_type = other DNA
agaaacacctccccttaactga

SEQ ID NO: 33031 - DNA, 22 bp, synthetic construct
  misc_feature 1..22: note = chemically synthesized
  source 1..22: mol_type = other DNA
cccttaactgatggattcttca

SEQ ID NO: 33032 - DNA, 22 bp, synthetic construct
  misc_feature 1..22: note = chemically synthesized
  source 1..22: mol_type = other DNA
aactgatggattcttcaaactc

SEQ ID NO: 33033 - DNA, 22 bp, synthetic construct
  misc_feature 1..22: note = chemically synthesized
  source 1..22: mol_type = other DNA
actgatggattcttcaaactca

SEQ ID NO: 33034 - DNA, 22 bp, synthetic construct
  misc_feature 1..22: note = chemically synthesized
  source 1..22: mol_type = other DNA
atggattcttcaaactcagcat

SEQ ID NO: 33035 - DNA, 22 bp, synthetic construct
  misc_feature 1..22: note = chemically synthesized
  source 1..22: mol_type = other DNA
ttcaaactcagcatcagttaga

SEQ ID NO: 33036 - DNA, 22 bp, synthetic construct
  misc_feature 1..22: note = chemically synthesized
  source 1..22: mol_type = other DNA
caaactcagcatcagttagagg

SEQ ID NO: 33037 - DNA, 22 bp, synthetic construct
  misc_feature 1..22: note = chemically synthesized
  source 1..22: mol_type = other DNA
aaactcagcatcagttagaggg

SEQ ID NO: 33038 - DNA, 22 bp, synthetic construct
  misc_feature 1..22: note = chemically synthesized
  source 1..22: mol_type = other DNA
agcatcagttagagggcattag

SEQ ID NO: 33039 - DNA, 22 bp, synthetic construct
  misc_feature 1..22: note = chemically synthesized
  source 1..22: mol_type = other DNA
gagggcattagggcacttctca

SEQ ID NO: 33040 - DNA, 22 bp, synthetic construct
  misc_feature 1..22: note = chemically synthesized
  source 1..22: mol_type = other DNA
gggcacttctcaaaccctgcat

SEQ ID NO: 33041 - DNA, 22 bp, synthetic construct
  misc_feature 1..22: note = chemically synthesized
  source 1..22: mol_type = other DNA
ctcaaaccctgcattcagggaa

SEQ ID NO: 33042 - DNA, 22 bp, synthetic construct
  misc_feature 1..22: note = chemically synthesized
  source 1..22: mol_type = other DNA
tcaaaccctgcattcagggaag

SEQ ID NO: 33043 - DNA, 22 bp, synthetic construct
  misc_feature 1..22: note = chemically synthesized
  source 1..22: mol_type = other DNA
aaaccctgcattcagggaagat

SEQ ID NO: 33044 - DNA, 22 bp, synthetic construct
  misc_feature 1..22: note = chemically synthesized
  source 1..22: mol_type = other DNA
cattcagggaagatgtctgttg

SEQ ID NO: 33045 - DNA, 22 bp, synthetic construct
  misc_feature 1..22: note = chemically synthesized
  source 1..22: mol_type = other DNA
agggaagatgtctgttgtgggg

SEQ ID NO: 33046 - DNA, 22 bp, synthetic construct
  misc_feature 1..22: note = chemically synthesized
  source 1..22: mol_type = other DNA
ttgtggggtggtctggcctact

SEQ ID NO: 33047 - DNA, 22 bp, synthetic construct
  misc_feature 1..22: note = chemically synthesized
  source 1..22: mol_type = other DNA
tggggtggtctggcctacttgg

SEQ ID NO: 33048 - DNA, 22 bp, synthetic construct
  misc_feature 1..22: note = chemically synthesized
  source 1..22: mol_type = other DNA
gcctacttggcctgagccaagg

SEQ ID NO: 33049 - DNA, 22 bp, synthetic construct
  misc_feature 1..22: note = chemically synthesized
  source 1..22: mol_type = other DNA
cttggcctgagccaaggttctg

SEQ ID NO: 33050 - DNA, 22 bp, synthetic construct
  misc_feature 1..22: note = chemically synthesized
  source 1..22: mol_type = other DNA
ggcctgagccaaggttctgggc

SEQ ID NO: 33051 - DNA, 22 bp, synthetic construct
  misc_feature 1..22: note = chemically synthesized
  source 1..22: mol_type = other DNA
gcctgagccaaggttctgggca

SEQ ID NO: 33052 - DNA, 22 bp, synthetic construct
  misc_feature 1..22: note = chemically synthesized
  source 1..22: mol_type = other DNA
agccaaggttctgggcagttct

SEQ ID NO: 33053 - DNA, 22 bp, synthetic construct
  misc_feature 1..22: note = chemically synthesized
  source 1..22: mol_type = other DNA
tgggcagttctgttcagttaca

SEQ ID NO: 33054 - DNA, 22 bp, synthetic construct
  misc_feature 1..22: note = chemically synthesized
  source 1..22: mol_type = other DNA
ggcagttctgttcagttacaca

SEQ ID NO: 33055 - DNA, 22 bp, synthetic construct
  misc_feature 1..22: note = chemically synthesized
  source 1..22: mol_type = other DNA
tgttcagttacacatgcatgcg

SEQ ID NO: 33056 - DNA, 22 bp, synthetic construct
  misc_feature 1..22: note = chemically synthesized
  source 1..22: mol_type = other DNA
ttcagttacacatgcatgcgtt

SEQ ID NO: 33057 - DNA, 22 bp, synthetic construct
  misc_feature 1..22: note = chemically synthesized
  source 1..22: mol_type = other DNA
agttacacatgcatgcgttgag

SEQ ID NO: 33058 - DNA, 22 bp, synthetic construct
  misc_feature 1..22: note = chemically synthesized
  source 1..22: mol_type = other DNA
cacatgcatgcgttgagcattg

SEQ ID NO: 33059 - DNA, 22 bp, synthetic construct
  misc_feature 1..22: note = chemically synthesized
  source 1..22: mol_type = other DNA
agcattgattcaagcctggcct

SEQ ID NO: 33060 - DNA, 22 bp, synthetic construct
  misc_feature 1..22: note = chemically synthesized
  source 1..22: mol_type = other DNA
attcaagcctggcctgggcact

SEQ ID NO: 33061 - DNA, 22 bp, synthetic construct
  misc_feature 1..22: note = chemically synthesized
  source 1..22: mol_type = other DNA
aagcctggcctgggcactaggc

SEQ ID NO: 33062 - DNA, 22 bp, synthetic construct
  misc_feature 1..22: note = chemically synthesized
  source 1..22: mol_type = other DNA
gcctgggcactaggcatggttt

SEQ ID NO: 33063 - DNA, 22 bp, synthetic construct
  misc_feature 1..22: note = chemically synthesized
  source 1..22: mol_type = other DNA
ggcactaggcatggttttagat

SEQ ID NO: 33064 - DNA, 22 bp, synthetic construct
  misc_feature 1..22: note = chemically synthesized
  source 1..22: mol_type = other DNA
ggcatggttttagatattaggg

SEQ ID NO: 33065 - DNA, 22 bp, synthetic construct
  misc_feature 1..22: note = chemically synthesized
  source 1..22: mol_type = other DNA
tagatattagggacatattctg

SEQ ID NO: 33066 - DNA, 22 bp, synthetic construct
  misc_feature 1..22: note = chemically synthesized
  source 1..22: mol_type = other DNA
agatattagggacatattctgt

SEQ ID NO: 33067 - DNA, 22 bp, synthetic construct
  misc_feature 1..22: note = chemically synthesized
  source 1..22: mol_type = other DNA
gatattagggacatattctgtt

SEQ ID NO: 33068 - DNA, 22 bp, synthetic construct
  misc_feature 1..22: note = chemically synthesized
  source 1..22: mol_type = other DNA
gggacatattctgttttccttg

SEQ ID NO: 33069 - DNA, 22 bp, synthetic construct
  misc_feature 1..22: note = chemically synthesized
  source 1..22: mol_type = other DNA
tgttttccttgccttaagatac

SEQ ID NO: 33070 - DNA, 22 bp, synthetic construct
  misc_feature 1..22: note = chemically synthesized
  source 1..22: mol_type = other DNA
ttttccttgccttaagatacca

SEQ ID NO: 33071 - DNA, 22 bp, synthetic construct
  misc_feature 1..22: note = chemically synthesized
  source 1..22: mol_type = other DNA
tccttgccttaagataccagtc

SEQ ID NO: 33072 - DNA, 22 bp, synthetic construct
  misc_feature 1..22: note = chemically synthesized
  source 1..22: mol_type = other DNA
ccttgccttaagataccagtct

SEQ ID NO: 33073 - DNA, 22 bp, synthetic construct
  misc_feature 1..22: note = chemically synthesized
  source 1..22: mol_type = other DNA
cttgccttaagataccagtcta

SEQ ID NO: 33074 - DNA, 22 bp, synthetic construct
  misc_feature 1..22: note = chemically synthesized
  source 1..22: mol_type = other DNA
gccttaagataccagtctagta

SEQ ID NO: 33075 - DNA, 22 bp, synthetic construct
  misc_feature 1..22: note = chemically synthesized
  source 1..22: mol_type = other DNA
ccttaagataccagtctagtag

SEQ ID NO: 33076 - DNA, 22 bp, synthetic construct
  misc_feature 1..22: note = chemically synthesized
  source 1..22: mol_type = other DNA
aagataccagtctagtaggagc

SEQ ID NO: 33077 - DNA, 22 bp, synthetic construct
  misc_feature 1..22: note = chemically synthesized
  source 1..22: mol_type = other DNA
agataccagtctagtaggagcc

SEQ ID NO: 33078 - DNA, 22 bp, synthetic construct
  misc_feature 1..22: note = chemically synthesized
  source 1..22: mol_type = other DNA
gtaggagccactaaggcccctt

SEQ ID NO: 33079 - DNA, 22 bp, synthetic construct
  misc_feature 1..22: note = chemically synthesized
  source 1..22: mol_type = other DNA
aggcccctttttgagcctggac

SEQ ID NO: 33080 - DNA, 22 bp, synthetic construct
  misc_feature 1..22: note = chemically synthesized
  source 1..22: mol_type = other DNA
tttgagcctggacttcgcattc

SEQ ID NO: 33081 - DNA, 22 bp, synthetic construct
  misc_feature 1..22: note = chemically synthesized
  source 1..22: mol_type = other DNA
ttgagcctggacttcgcattca

SEQ ID NO: 33082 - DNA, 22 bp, synthetic construct
  misc_feature 1..22: note = chemically synthesized
  source 1..22: mol_type = other DNA
tgagcctggacttcgcattcaa

SEQ ID NO: 33083 - DNA, 22 bp, synthetic construct
  misc_feature 1..22: note = chemically synthesized
  source 1..22: mol_type = other DNA
gagcctggacttcgcattcaaa

SEQ ID NO: 33084 - DNA, 22 bp, synthetic construct
  misc_feature 1..22: note = chemically synthesized
  source 1..22: mol_type = other DNA
agcctggacttcgcattcaaac

SEQ ID NO: 33085 - DNA, 22 bp, synthetic construct
  misc_feature 1..22: note = chemically synthesized
  source 1..22: mol_type = other DNA
gacttcgcattcaaacataccc

SEQ ID NO: 33086 - DNA, 22 bp, synthetic construct
  misc_feature 1..22: note = chemically synthesized
  source 1..22: mol_type = other DNA
cgcattcaaacataccctgctt

SEQ ID NO: 33087 - DNA, 22 bp, synthetic construct
  misc_feature 1..22: note = chemically synthesized
  source 1..22: mol_type = other DNA
gcattcaaacataccctgcttc

SEQ ID NO: 33088 - DNA, 22 bp, synthetic construct
  misc_feature 1..22: note = chemically synthesized
  source 1..22: mol_type = other DNA
aaacataccctgcttctaatca

SEQ ID NO: 33089 - DNA, 22 bp, synthetic construct
  misc_feature 1..22: note = chemically synthesized
  source 1..22: mol_type = other DNA
cttctaatcaagtcatctattg

SEQ ID NO: 33090 - DNA, 22 bp, synthetic construct
  misc_feature 1..22: note = chemically synthesized
  source 1..22: mol_type = other DNA
ctaatcaagtcatctattggca

SEQ ID NO: 33091 - DNA, 22 bp, synthetic construct
  misc_feature 1..22: note = chemically synthesized
  source 1..22: mol_type = other DNA
taatcaagtcatctattggcag

SEQ ID NO: 33092 - DNA, 22 bp, synthetic construct
  misc_feature 1..22: note = chemically synthesized
  source 1..22: mol_type = other DNA
atcaagtcatctattggcagtg

SEQ ID NO: 33093 - DNA, 22 bp, synthetic construct
  misc_feature 1..22: note = chemically synthesized
  source 1..22: mol_type = other DNA
ttggcagtgaccttgggcaaat

SEQ ID NO: 33094 - DNA, 22 bp, synthetic construct
  misc_feature 1..22: note = chemically synthesized
  source 1..22: mol_type = other DNA
gcagtgaccttgggcaaatcat

SEQ ID NO: 33095 - DNA, 22 bp, synthetic construct
  misc_feature 1..22: note = chemically synthesized
  source 1..22: mol_type = other DNA
gggcaaatcatagtctctccaa

SEQ ID NO: 33096 - DNA, 22 bp, synthetic construct
  misc_feature 1..22: note = chemically synthesized
  source 1..22: mol_type = other DNA
ggcaaatcatagtctctccaag

SEQ ID NO: 33097 - DNA, 22 bp, synthetic construct
  misc_feature 1..22: note = chemically synthesized
  source 1..22: mol_type = other DNA
tccaagcattacttttctaatt

SEQ ID NO: 33098 - DNA, 22 bp, synthetic construct
  misc_feature 1..22: note = chemically synthesized
  source 1..22: mol_type = other DNA
caagcattacttttctaattga

SEQ ID NO: 33099 - DNA, 22 bp, synthetic construct
  misc_feature 1..22: note = chemically synthesized
  source 1..22: mol_type = other DNA
cttttctaattgaaacaagaac

SEQ ID NO: 33100 - DNA, 22 bp, synthetic construct
  misc_feature 1..22: note = chemically synthesized
  source 1..22: mol_type = other DNA
ttctaattgaaacaagaacctc

SEQ ID NO: 33101 - DNA, 22 bp, synthetic construct
  misc_feature 1..22: note = chemically synthesized
  source 1..22: mol_type = other DNA
tctaattgaaacaagaacctct

SEQ ID NO: 33102 - DNA, 22 bp, synthetic construct
  misc_feature 1..22: note = chemically synthesized
  source 1..22: mol_type = other DNA
ctaattgaaacaagaacctctc

SEQ ID NO: 33103 - DNA, 22 bp, synthetic construct
  misc_feature 1..22: note = chemically synthesized
  source 1..22: mol_type = other DNA
taattgaaacaagaacctctct

SEQ ID NO: 33104 - DNA, 22 bp, synthetic construct
  misc_feature 1..22: note = chemically synthesized
  source 1..22: mol_type = other DNA
attgaaacaagaacctctctct

SEQ ID NO: 33105 - DNA, 22 bp, synthetic construct
  misc_feature 1..22: note = chemically synthesized
  source 1..22: mol_type = other DNA
aaacaagaacctctctctatac

SEQ ID NO: 33106 - DNA, 22 bp, synthetic construct
  misc_feature 1..22: note = chemically synthesized
  source 1..22: mol_type = other DNA
tctctataccccagatttattt

SEQ ID NO: 33107 - DNA, 22 bp, synthetic construct
  misc_feature 1..22: note = chemically synthesized
  source 1..22: mol_type = other DNA
tctataccccagatttattttg

SEQ ID NO: 33108 - DNA, 22 bp, synthetic construct
  misc_feature 1..22: note = chemically synthesized
  source 1..22: mol_type = other DNA
tataccccagatttattttgag

SEQ ID NO: 33109 - DNA, 22 bp, synthetic construct
  misc_feature 1..22: note = chemically synthesized
  source 1..22: mol_type = other DNA
taccccagatttattttgagga

SEQ ID NO: 33110 - DNA, 22 bp, synthetic construct
  misc_feature 1..22: note = chemically synthesized
  source 1..22: mol_type = other DNA
attttgaggattatgagttaat

SEQ ID NO: 33111 - DNA, 22 bp, synthetic construct
  misc_feature 1..22: note = chemically synthesized
  source 1..22: mol_type = other DNA
ttttgaggattatgagttaatt

SEQ ID NO: 33112 - DNA, 22 bp, synthetic construct
  misc_feature 1..22: note = chemically synthesized
  source 1..22: mol_type = other DNA
tgaggattatgagttaattcat

SEQ ID NO: 33113 - DNA, 22 bp, synthetic construct
  misc_feature 1..22: note = chemically synthesized
  source 1..22: mol_type = other DNA
gaggattatgagttaattcata

SEQ ID NO: 33114 - DNA, 22 bp, synthetic construct
  misc_feature 1..22: note = chemically synthesized
  source 1..22: mol_type = other DNA
aggattatgagttaattcatag

SEQ ID NO: 33115 - DNA, 22 bp, synthetic construct
  misc_feature 1..22: note = chemically synthesized
  source 1..22: mol_type = other DNA
tgagttaattcatagctaaaat

SEQ ID NO: 33116 - DNA, 22 bp, synthetic construct
  misc_feature 1..22: note = chemically synthesized
  source 1..22: mol_type = other DNA
attcatagctaaaatgcttagc

SEQ ID NO: 33117 - DNA, 22 bp, synthetic construct
  misc_feature 1..22: note = chemically synthesized
  source 1..22: mol_type = other DNA
atagctaaaatgcttagcacct

SEQ ID NO: 33118 - DNA, 22 bp, synthetic construct
  misc_feature 1..22: note = chemically synthesized
  source 1..22: mol_type = other DNA
aaatgcttagcacctaacagca

SEQ ID NO: 33119 - DNA, 22 bp, synthetic construct
  misc_feature 1..22: note = chemically synthesized
  source 1..22: mol_type = other DNA
agcacctaacagcacataaccc

SEQ ID NO: 33120 - DNA, 22 bp, synthetic construct
  misc_feature 1..22: note = chemically synthesized
  source 1..22: mol_type = other DNA
gcacctaacagcacataaccca

SEQ ID NO: 33121 - DNA, 22 bp, synthetic construct
  misc_feature 1..22: note = chemically synthesized
  source 1..22: mol_type = other DNA
acagcacataacccacacatac

SEQ ID NO: 33122 - DNA, 22 bp, synthetic construct
  misc_feature 1..22: note = chemically synthesized
  source 1..22: mol_type = other DNA
ttcaattgcgtattactaaaaa

SEQ ID NO: 33123 - DNA, 22 bp, synthetic construct
  misc_feature 1..22: note = chemically synthesized
  source 1..22: mol_type = other DNA
tcaattgcgtattactaaaaag

SEQ ID NO: 33124 - DNA, 22 bp, synthetic construct
  misc_feature 1..22: note = chemically synthesized
  source 1..22: mol_type = other DNA
caattgcgtattactaaaaaga

SEQ ID NO: 33125 - DNA, 22 bp, synthetic construct
  misc_feature 1..22: note = chemically synthesized
  source 1..22: mol_type = other DNA
aattgcgtattactaaaaagaa

SEQ ID NO: 33126 - DNA, 22 bp, synthetic construct
  misc_feature 1..22: note = chemically synthesized
  source 1..22: mol_type = other DNA
cgtattactaaaaagaaggaat

SEQ ID NO: 33127 - DNA, 22 bp, synthetic construct
  misc_feature 1..22: note = chemically synthesized
  source 1..22: mol_type = other DNA
ctaaaaagaaggaatgatttcc

SEQ ID NO: 33128 - DNA, 22 bp, synthetic construct
  misc_feature 1..22: note = chemically synthesized
  source 1..22: mol_type = other DNA
aaaagaaggaatgatttcctag

SEQ ID NO: 33129 - DNA, 22 bp, synthetic construct
  misc_feature 1..22: note = chemically synthesized
  source 1..22: mol_type = other DNA
cctagaggaggtgcttcttctg

SEQ ID NO: 33130 - DNA, 22 bp, synthetic construct
  misc_feature 1..22: note = chemically synthesized
  source 1..22: mol_type = other DNA
ctagaggaggtgcttcttctgg

SEQ ID NO: 33131 - DNA, 22 bp, synthetic construct
  misc_feature 1..22: note = chemically synthesized
  source 1..22: mol_type = other DNA
gaggaggtgcttcttctggcca

SEQ ID NO: 33132 - DNA, 22 bp, synthetic construct
  misc_feature 1..22: note = chemically synthesized
  source 1..22: mol_type = other DNA
cttctggccaagggctgattca

SEQ ID NO: 33133 - DNA, 22 bp, synthetic construct
  misc_feature 1..22: note = chemically synthesized
  source 1..22: mol_type = other DNA
ttctggccaagggctgattcag

SEQ ID NO: 33134 - DNA, 22 bp, synthetic construct
  misc_feature 1..22: note = chemically synthesized
  source 1..22: mol_type = other DNA
ctggccaagggctgattcagag

SEQ ID NO: 33135 - DNA, 22 bp, synthetic construct
  misc_feature 1..22: note = chemically synthesized
  source 1..22: mol_type = other DNA
tggccaagggctgattcagagc

SEQ ID NO: 33136 - DNA, 22 bp, synthetic construct
  misc_feature 1..22: note = chemically synthesized
  source 1..22: mol_type = other DNA
gccaagggctgattcagagcct

SEQ ID NO: 33137 - DNA, 22 bp, synthetic construct
  misc_feature 1..22: note = chemically synthesized
  source 1..22: mol_type = other DNA
attcagagccttaattaactaa

SEQ ID NO: 33138 - DNA, 22 bp, synthetic construct
  misc_feature 1..22: note = chemically synthesized
  source 1..22: mol_type = other DNA
agagccttaattaactaaatag

SEQ ID NO: 33139 - DNA, 22 bp, synthetic construct
  misc_feature 1..22: note = chemically synthesized
  source 1..22: mol_type = other DNA
aattaactaaatagatcaagca

SEQ ID NO: 33140 - DNA, 22 bp, synthetic construct
  misc_feature 1..22: note = chemically synthesized
  source 1..22: mol_type = other DNA
attaactaaatagatcaagcat

SEQ ID NO: 33141 - DNA, 22 bp, synthetic construct
  misc_feature 1..22: note = chemically synthesized
  source 1..22: mol_type = other DNA
actaaatagatcaagcatatct

SEQ ID NO: 33142 - DNA, 22 bp, synthetic construct
  misc_feature 1..22: note = chemically synthesized
  source 1..22: mol_type = other DNA
aatagatcaagcatatctaact

SEQ ID NO: 33143 - DNA, 22 bp, synthetic construct
  misc_feature 1..22: note = chemically synthesized
  source 1..22: mol_type = other DNA
actggtcaccggaagtggtcca

SEQ ID NO: 33144 - DNA, 22 bp, synthetic construct
  misc_feature 1..22: note = chemically synthesized
  source 1..22: mol_type = other DNA
gtcaccggaagtggtccatgag

SEQ ID NO: 33145 - DNA, 22 bp, synthetic construct
  misc_feature 1..22: note = chemically synthesized
  source 1..22: mol_type = other DNA
cagcaatgggaaggtgtcagag

SEQ ID NO: 33146 - DNA, 22 bp, synthetic construct
  misc_feature 1..22: note = chemically synthesized
  source 1..22: mol_type = other DNA
ggaaaaagacatagagagaaac

SEQ ID NO: 33147 - DNA, 22 bp, synthetic construct
  misc_feature 1..22: note = chemically synthesized
  source 1..22: mol_type = other DNA
ttaggatgtctacagatttcca

SEQ ID NO: 33148 - DNA, 22 bp, synthetic construct
  misc_feature 1..22: note = chemically synthesized
  source 1..22: mol_type = other DNA
aggatgtctacagatttccaag

SEQ ID NO: 33149 - DNA, 22 bp, synthetic construct
  misc_feature 1..22: note = chemically synthesized
  source 1..22: mol_type = other DNA
ggatgtctacagatttccaaga

SEQ ID NO: 33150 - DNA, 22 bp, synthetic construct
  misc_feature 1..22: note = chemically synthesized
  source 1..22: mol_type = other DNA
cagatttccaagacaataattg

SEQ ID NO: 33151 - DNA, 22 bp, synthetic construct
  misc_feature 1..22: note = chemically synthesized
  source 1..22: mol_type = other DNA
ccaagacaataattgaaatgaa

SEQ ID NO: 33152 - DNA, 22 bp, synthetic construct
  misc_feature 1..22: note = chemically synthesized
  source 1..22: mol_type = other DNA
caagacaataattgaaatgaac

SEQ ID NO: 33153 - DNA, 22 bp, synthetic construct
  misc_feature 1..22: note = chemically synthesized
  source 1..22: mol_type = other DNA
aaatgaacaaaggcaagggatg

SEQ ID NO: 33154 - DNA, 22 bp, synthetic construct
  misc_feature 1..22: note = chemically synthesized
  source 1..22: mol_type = other DNA
catttctttcctttatcacctt

SEQ ID NO: 33155 - DNA, 22 bp, synthetic construct
  misc_feature 1..22: note = chemically synthesized
  source 1..22: mol_type = other DNA
atttctttcctttatcaccttt

SEQ ID NO: 33156 - DNA, 22 bp, synthetic construct
  misc_feature 1..22: note = chemically synthesized
  source 1..22: mol_type = other DNA
ctttcctttatcacctttccct

SEQ ID NO: 33157 - DNA, 22 bp, synthetic construct
  misc_feature 1..22: note = chemically synthesized
  source 1..22: mol_type = other DNA
tttcctttatcacctttccctt

SEQ ID NO: 33158 - DNA, 22 bp, synthetic construct
  misc_feature 1..22: note = chemically synthesized
  source 1..22: mol_type = other DNA
tcctttatcacctttcccttgt

SEQ ID NO: 33159 - DNA, 22 bp, synthetic construct
  misc_feature 1..22: note = chemically synthesized
  source 1..22: mol_type = other DNA
cctttatcacctttcccttgtt

SEQ ID NO: 33160 - DNA, 22 bp, synthetic construct
  misc_feature 1..22: note = chemically synthesized
  source 1..22: mol_type = other DNA
ctttatcacctttcccttgttc

SEQ ID NO: 33161 - DNA, 22 bp, synthetic construct
  misc_feature 1..22: note = chemically synthesized
  source 1..22: mol_type = other DNA
tatcacctttcccttgttcttc

SEQ ID NO: 33162 - DNA, 22 bp, synthetic construct
  misc_feature 1..22: note = chemically synthesized
  source 1..22: mol_type = other DNA
atcacctttcccttgttcttca

SEQ ID NO: 33163 - DNA, 22 bp, synthetic construct
  misc_feature 1..22: note = chemically synthesized
  source 1..22: mol_type = other DNA
tcacctttcccttgttcttcag

SEQ ID NO: 33164 - DNA, 22 bp, synthetic construct
  misc_feature 1..22: note = chemically synthesized
  source 1..22: mol_type = other DNA
tcccttgttcttcagctccagc

SEQ ID NO: 33165 - DNA, 22 bp, synthetic construct
  misc_feature 1..22: note = chemically synthesized
  source 1..22: mol_type = other DNA
cccttgttcttcagctccagct

SEQ ID NO: 33166 - DNA, 22 bp, synthetic construct
  misc_feature 1..22: note = chemically synthesized
  source 1..22: mol_type = other DNA
ccttgttcttcagctccagctg

SEQ ID NO: 33167 - DNA, 22 bp, synthetic construct
  misc_feature 1..22: note = chemically synthesized
  source 1..22: mol_type = other DNA
gttcttcagctccagctgtgcc

SEQ ID NO: 33168 - DNA, 22 bp, synthetic construct
  misc_feature 1..22: note = chemically synthesized
  source 1..22: mol_type = other DNA
ttcttcagctccagctgtgccc

SEQ ID NO: 33169 - DNA, 22 bp, synthetic construct
  misc_feature 1..22: note = chemically synthesized
  source 1..22: mol_type = other DNA
ttcagctccagctgtgcccaca

SEQ ID NO: 33170 - DNA, 22 bp, synthetic construct
  misc_feature 1..22: note = chemically synthesized
  source 1..22: mol_type = other DNA
cagctccagctgtgcccacaga

SEQ ID NO: 33171 - DNA, 22 bp, synthetic construct
  misc_feature 1..22: note = chemically synthesized
  source 1..22: mol_type = other DNA
agctccagctgtgcccacagac

SEQ ID NO: 33172 - DNA, 22 bp, synthetic construct
  misc_feature 1..22: note = chemically synthesized
  source 1..22: mol_type = other DNA
cagctgtgcccacagacaccac

SEQ ID NO: 33173 - DNA, 22 bp, synthetic construct
  misc_feature 1..22: note = chemically synthesized
  source 1..22: mol_type = other DNA
tgcccacagacaccacagggaa

SEQ ID NO: 33174 - DNA, 22 bp, synthetic construct
  misc_feature 1..22: note = chemically synthesized
  source 1..22: mol_type = other DNA
tgaacacaggggtttgaaccag

SEQ ID NO: 33175 - DNA, 22 bp, synthetic construct
  misc_feature 1..22: note = chemically synthesized
  source 1..22: mol_type = other DNA
aacacaggggtttgaaccaggg

SEQ ID NO: 33176 - DNA, 22 bp, synthetic construct
  misc_feature 1..22: note = chemically synthesized
  source 1..22: mol_type = other DNA
gaaccagggcctctctaagtct

SEQ ID NO: 33177 - DNA, 22 bp, synthetic construct
  misc_feature 1..22: note = chemically synthesized
  source 1..22: mol_type = other DNA
aaccagggcctctctaagtctt

SEQ ID NO: 33178 - DNA, 22 bp, synthetic construct
  misc_feature 1..22: note = chemically synthesized
  source 1..22: mol_type = other DNA
tctaagtcttttccaactctga

SEQ ID NO: 33179 - DNA, 22 bp, synthetic construct
  misc_feature 1..22: note = chemically synthesized
  source 1..22: mol_type = other DNA
taagtcttttccaactctgata

SEQ ID NO: 33180 - DNA, 22 bp, synthetic construct
  misc_feature 1..22: note = chemically synthesized
  source 1..22: mol_type = other DNA
agtcttttccaactctgatacc

SEQ ID NO: 33181 - DNA, 22 bp, synthetic construct
  misc_feature 1..22: note = chemically synthesized
  source 1..22: mol_type = other DNA
ttccaactctgataccctgaag

SEQ ID NO: 33182 - DNA, 22 bp, synthetic construct
  misc_feature 1..22: note = chemically synthesized
  source 1..22: mol_type = other DNA
tccaactctgataccctgaagt

SEQ ID NO: 33183 - DNA, 22 bp, synthetic construct
  misc_feature 1..22: note = chemically synthesized
  source 1..22: mol_type = other DNA
ccaactctgataccctgaagtt

SEQ ID NO: 33184 - DNA, 22 bp, synthetic construct
  misc_feature 1..22: note = chemically synthesized
  source 1..22: mol_type = other DNA
caactctgataccctgaagttc

SEQ ID NO: 33185 - DNA, 22 bp, synthetic construct
  misc_feature 1..22: note = chemically synthesized
  source 1..22: mol_type = other DNA
tgataccctgaagttctcagaa

SEQ ID NO: 33186 - DNA, 22 bp, synthetic construct
  misc_feature 1..22: note = chemically synthesized
  source 1..22: mol_type = other DNA
ataccctgaagttctcagaaac

SEQ ID NO: 33187 - DNA, 22 bp, synthetic construct
  misc_feature 1..22: note = chemically synthesized
  source 1..22: mol_type = other DNA
aagttctcagaaacttccataa

SEQ ID NO: 33188 - DNA, 22 bp, synthetic construct
  misc_feature 1..22: note = chemically synthesized
  source 1..22: mol_type = other DNA
tcagaaacttccataaattttg

SEQ ID NO: 33189 - DNA, 22 bp, synthetic construct
  misc_feature 1..22: note = chemically synthesized
  source 1..22: mol_type = other DNA
agaaacttccataaattttggc

SEQ ID NO: 33190 - DNA, 22 bp, synthetic construct
  misc_feature 1..22: note = chemically synthesized
  source 1..22: mol_type = other DNA
ccataaattttggctgaagaag

SEQ ID NO: 33191 - DNA, 22 bp, synthetic construct
  misc_feature 1..22: note = chemically synthesized
  source 1..22: mol_type = other DNA
cataaattttggctgaagaagc

SEQ ID NO: 33192 - DNA, 22 bp, synthetic construct
  misc_feature 1..22: note = chemically synthesized
  source 1..22: mol_type = other DNA
tggctgaagaagccatagcaaa

SEQ ID NO: 33193 - DNA, 22 bp, synthetic construct
  misc_feature 1..22: note = chemically synthesized
  source 1..22: mol_type = other DNA
ggctgaagaagccatagcaaac

SEQ ID NO: 33194 - DNA, 22 bp, synthetic construct
  misc_feature 1..22: note = chemically synthesized
  source 1..22: mol_type = other DNA
gctgaagaagccatagcaaact

SEQ ID NO: 33195 - DNA, 22 bp, synthetic construct
  misc_feature 1..22: note = chemically synthesized
  source 1..22: mol_type = other DNA
aagaagccatagcaaacttgtc

SEQ ID NO: 33196 - DNA, 22 bp, synthetic construct
  misc_feature 1..22: note = chemically synthesized
  source 1..22: mol_type = other DNA
gtcagatggtttcttaccttta

SEQ ID NO: 33197 - DNA, 22 bp, synthetic construct
  misc_feature 1..22: note = chemically synthesized
  source 1..22: mol_type = other DNA
tcagatggtttcttacctttaa

SEQ ID NO: 33198 - DNA, 22 bp, synthetic construct
  misc_feature 1..22: note = chemically synthesized
  source 1..22: mol_type = other DNA
cttacctttaactcagccattt

SEQ ID NO: 33199 - DNA, 22 bp, synthetic construct
  misc_feature 1..22: note = chemically synthesized
  source 1..22: mol_type = other DNA
ttacctttaactcagccatttt

SEQ ID NO: 33200 - DNA, 22 bp, synthetic construct
  misc_feature 1..22: note = chemically synthesized
  source 1..22: mol_type = other DNA
acctttaactcagccattttct

SEQ ID NO: 33201 - DNA, 22 bp, synthetic construct
  misc_feature 1..22: note = chemically synthesized
  source 1..22: mol_type = other DNA
cctttaactcagccattttctc

SEQ ID NO: 33202 - DNA, 22 bp, synthetic construct
  misc_feature 1..22: note = chemically synthesized
  source 1..22: mol_type = other DNA
taactcagccattttctctctc

SEQ ID NO: 33203 - DNA, 22 bp, synthetic construct
  misc_feature 1..22: note = chemically synthesized
  source 1..22: mol_type = other DNA
aactcagccattttctctctcc

SEQ ID NO: 33204 - DNA, 22 bp, synthetic construct
  misc_feature 1..22: note = chemically synthesized
  source 1..22: mol_type = other DNA
actcagccattttctctctcct

SEQ ID NO: 33205 - DNA, 22 bp, synthetic construct
  misc_feature 1..22: note = chemically synthesized
  source 1..22: mol_type = other DNA
agccattttctctctcctctat

SEQ ID NO: 33206 - DNA, 22 bp, synthetic construct
  misc_feature 1..22: note = chemically synthesized
  source 1..22: mol_type = other DNA
tctctctcctctatgtgtggtg

SEQ ID NO: 33207 - DNA, 22 bp, synthetic construct
  misc_feature 1..22: note = chemically synthesized
  source 1..22: mol_type = other DNA
ctctctcctctatgtgtggtga

SEQ ID NO: 33208 - DNA, 22 bp, synthetic construct
  misc_feature 1..22: note = chemically synthesized
  source 1..22: mol_type = other DNA
tctctcctctatgtgtggtgac

SEQ ID NO: 33209 - DNA, 22 bp, synthetic construct
  misc_feature 1..22: note = chemically synthesized
  source 1..22: mol_type = other DNA
tctcctctatgtgtggtgactt

SEQ ID NO: 33210 - DNA, 22 bp, synthetic construct
  misc_feature 1..22: note = chemically synthesized
  source 1..22: mol_type = other DNA
tcctctatgtgtggtgacttca

SEQ ID NO: 33211 - DNA, 22 bp, synthetic construct
  misc_feature 1..22: note = chemically synthesized
  source 1..22: mol_type = other DNA
ctctatgtgtggtgacttcagg

SEQ ID NO: 33212 - DNA, 22 bp, synthetic construct
  misc_feature 1..22: note = chemically synthesized
  source 1..22: mol_type = other DNA
tatgtgtggtgacttcaggaaa

SEQ ID NO: 33213 - DNA, 22 bp, synthetic construct
  misc_feature 1..22: note = chemically synthesized
  source 1..22: mol_type = other DNA
tgtgtggtgacttcaggaaacc

SEQ ID NO: 33214 - DNA, 22 bp, synthetic construct
  misc_feature 1..22: note = chemically synthesized
  source 1..22: mol_type = other DNA
caggaaacccaggcccagagga

SEQ ID NO: 33215 - DNA, 22 bp, synthetic construct
  misc_feature 1..22: note = chemically synthesized
  source 1..22: mol_type = other DNA
aggaaacccaggcccagaggat

SEQ ID NO: 33216 - DNA, 22 bp, synthetic construct
  misc_feature 1..22: note = chemically synthesized
  source 1..22: mol_type = other DNA
ctttctccttcaaaccactctt

SEQ ID NO: 33217 - DNA, 22 bp, synthetic construct
  misc_feature 1..22: note = chemically synthesized
  source 1..22: mol_type = other DNA
tttctccttcaaaccactcttt

SEQ ID NO: 33218 - DNA, 22 bp, synthetic construct
  misc_feature 1..22: note = chemically synthesized
  source 1..22: mol_type = other DNA
tctccttcaaaccactctttgg

SEQ ID NO: 33219 - DNA, 22 bp, synthetic construct
  misc_feature 1..22: note = chemically synthesized
  source 1..22: mol_type = other DNA
ctccttcaaaccactctttgga

SEQ ID NO: 33220 - DNA, 22 bp, synthetic construct
  misc_feature 1..22: note = chemically synthesized
  source 1..22: mol_type = other DNA
tccttcaaaccactctttggat

SEQ ID NO: 33221 - DNA, 22 bp, synthetic construct
  misc_feature 1..22: note = chemically synthesized
  source 1..22: mol_type = other DNA
cttcaaaccactctttggatat

SEQ ID NO: 33222 - DNA, 22 bp, synthetic construct
  misc_feature 1..22: note = chemically synthesized
  source 1..22: mol_type = other DNA
caaaccactctttggatattcc

SEQ ID NO: 33223 - DNA, 22 bp, synthetic construct
  misc_feature 1..22: note = chemically synthesized
  source 1..22: mol_type = other DNA
aaaccactctttggatattccg

SEQ ID NO: 33224 - DNA, 22 bp, synthetic construct
  misc_feature 1..22: note = chemically synthesized
  source 1..22: mol_type = other DNA
tttggatattccggttcccact

SEQ ID NO: 33225 - DNA, 22 bp, synthetic construct
  misc_feature 1..22: note = chemically synthesized
  source 1..22: mol_type = other DNA
tggatattccggttcccactgc

SEQ ID NO: 33226 - DNA, 22 bp, synthetic construct
  misc_feature 1..22: note = chemically synthesized
  source 1..22: mol_type = other DNA
ggatattccggttcccactgct

SEQ ID NO: 33227 - DNA, 22 bp, synthetic construct
  misc_feature 1..22: note = chemically synthesized
  source 1..22: mol_type = other DNA
gatattccggttcccactgctt

SEQ ID NO: 33228 - DNA, 22 bp, synthetic construct
  misc_feature 1..22: note = chemically synthesized
  source 1..22: mol_type = other DNA
cggttcccactgcttcactgcg

SEQ ID NO: 33229 - DNA, 22 bp, synthetic construct
  misc_feature 1..22: note = chemically synthesized
  source 1..22: mol_type = other DNA
ccactgcttcactgcgcttcac

SEQ ID NO: 33230 - DNA, 22 bp, synthetic construct
  misc_feature 1..22: note = chemically synthesized
  source 1..22: mol_type = other DNA
cttcactgcgcttcactggtca

SEQ ID NO: 33231 - DNA, 22 bp, synthetic construct
  misc_feature 1..22: note = chemically synthesized
  source 1..22: mol_type = other DNA
cactgcgcttcactggtcagtg

SEQ ID NO: 33232 - DNA, 22 bp, synthetic construct
  misc_feature 1..22: note = chemically synthesized
  source 1..22: mol_type = other DNA
actgcgcttcactggtcagtgc

SEQ ID NO: 33233 - DNA, 22 bp, synthetic construct
  misc_feature 1..22: note = chemically synthesized
  source 1..22: mol_type = other DNA
cgcttcactggtcagtgcgtca

SEQ ID NO: 33234 - DNA, 22 bp, synthetic construct
  misc_feature 1..22: note = chemically synthesized
  source 1..22: mol_type = other DNA
cactggtcagtgcgtcactcaa

SEQ ID NO: 33235 - DNA, 22 bp, synthetic construct
  misc_feature 1..22: note = chemically synthesized
  source 1..22: mol_type = other DNA
actggtcagtgcgtcactcaaa

SEQ ID NO: 33236 - DNA, 22 bp, synthetic construct
  misc_feature 1..22: note = chemically synthesized
  source 1..22: mol_type = other DNA
gtcagtgcgtcactcaaactag

SEQ ID NO: 33237 - DNA, 22 bp, synthetic construct
  misc_feature 1..22: note = chemically synthesized
  source 1..22: mol_type = other DNA
aaactagctgaaagaattgtct

SEQ ID NO: 33238 - DNA, 22 bp, synthetic construct
  misc_feature 1..22: note = chemically synthesized
  source 1..22: mol_type = other DNA
gctgaaagaattgtctaactca

SEQ ID NO: 33239 - DNA, 22 bp, synthetic construct
  misc_feature 1..22: note = chemically synthesized
  source 1..22: mol_type = other DNA
aaagaattgtctaactcataca

SEQ ID NO: 33240 - DNA, 22 bp, synthetic construct
  misc_feature 1..22: note = chemically synthesized
  source 1..22: mol_type = other DNA
tctaactcatacacagggacaa

SEQ ID NO: 33241 - DNA, 22 bp, synthetic construct
  misc_feature 1..22: note = chemically synthesized
  source 1..22: mol_type = other DNA
actcatacacagggacaaagtc

SEQ ID NO: 33242 - DNA, 22 bp, synthetic construct
  misc_feature 1..22: note = chemically synthesized
  source 1..22: mol_type = other DNA
atacacagggacaaagtccagc

SEQ ID NO: 33243 - DNA, 22 bp, synthetic construct
  misc_feature 1..22: note = chemically synthesized
  source 1..22: mol_type = other DNA
atttaaccggttacacaattgc

SEQ ID NO: 33244 - DNA, 22 bp, synthetic construct
  misc_feature 1..22: note = chemically synthesized
  source 1..22: mol_type = other DNA
tttaaccggttacacaattgcc

SEQ ID NO: 33245 - DNA, 22 bp, synthetic construct
  misc_feature 1..22: note = chemically synthesized
  source 1..22: mol_type = other DNA
aaccggttacacaattgccttt

SEQ ID NO: 33246 - DNA, 22 bp, synthetic construct
  misc_feature 1..22: note = chemically synthesized
  source 1..22: mol_type = other DNA
accggttacacaattgcctttg

SEQ ID NO: 33247 - DNA, 22 bp, synthetic construct
  misc_feature 1..22: note = chemically synthesized
  source 1..22: mol_type = other DNA
cacaattgcctttggtttttac

SEQ ID NO: 33248 - DNA, 22 bp, synthetic construct
  misc_feature 1..22: note = chemically synthesized
  source 1..22: mol_type = other DNA
cctttggtttttacagtttgtt

SEQ ID NO: 33249 - DNA, 22 bp, synthetic construct
  misc_feature 1..22: note = chemically synthesized
  source 1..22: mol_type = other DNA
tggtttttacagtttgttccta

SEQ ID NO: 33250 - DNA, 22 bp, synthetic construct
  misc_feature 1..22: note = chemically synthesized
  source 1..22: mol_type = other DNA
ggtttttacagtttgttcctaa

SEQ ID NO: 33251 - DNA, 22 bp, synthetic construct
  misc_feature 1..22: note = chemically synthesized
  source 1..22: mol_type = other DNA
gtttttacagtttgttcctaag

SEQ ID NO: 33252 - DNA, 22 bp, synthetic construct
  misc_feature 1..22: note = chemically synthesized
  source 1..22: mol_type = other DNA
ttacagtttgttcctaagtgtt

SEQ ID NO: 33253 - DNA, 22 bp, synthetic construct
  misc_feature 1..22: note = chemically synthesized
  source 1..22: mol_type = other DNA
tacagtttgttcctaagtgttt

SEQ ID NO: 33254 - DNA, 22 bp, synthetic construct
  misc_feature 1..22: note = chemically synthesized
  source 1..22: mol_type = other DNA
acagtttgttcctaagtgtttc

SEQ ID NO: 33255 - DNA, 22 bp, synthetic construct
  misc_feature 1..22: note = chemically synthesized
  source 1..22: mol_type = other DNA
cagtttgttcctaagtgtttcc

SEQ ID NO: 33256 - DNA, 22 bp, synthetic construct
  misc_feature 1..22: note = chemically synthesized
  source 1..22: mol_type = other DNA
gttcctaagtgtttccagaggc

SEQ ID NO: 33257 - DNA, 22 bp, synthetic construct
  misc_feature 1..22: note = chemically synthesized
  source 1..22: mol_type = other DNA
ttcctaagtgtttccagaggct

SEQ ID NO: 33258 - DNA, 22 bp, synthetic construct
  misc_feature 1..22: note = chemically synthesized
  source 1..22: mol_type = other DNA
ctaagtgtttccagaggcttgg

SEQ ID NO: 33259 - DNA, 22 bp, synthetic construct
  misc_feature 1..22: note = chemically synthesized
  source 1..22: mol_type = other DNA
agtgtttccagaggcttggttc

SEQ ID NO: 33260 - DNA, 22 bp, synthetic construct
  misc_feature 1..22: note = chemically synthesized
  source 1..22: mol_type = other DNA
ccagaggcttggttcctcttca

SEQ ID NO: 33261 - DNA, 22 bp, synthetic construct
  misc_feature 1..22: note = chemically synthesized
  source 1..22: mol_type = other DNA
cagaggcttggttcctcttcac

SEQ ID NO: 33262 - DNA, 22 bp, synthetic construct
  misc_feature 1..22: note = chemically synthesized
  source 1..22: mol_type = other DNA
ggttcctcttcacctgaggtag

SEQ ID NO: 33263 - DNA, 22 bp, synthetic construct
  misc_feature 1..22: note = chemically synthesized
  source 1..22: mol_type = other DNA
gttcctcttcacctgaggtaga

SEQ ID NO: 33264 - DNA, 22 bp, synthetic construct
  misc_feature 1..22: note = chemically synthesized
  source 1..22: mol_type = other DNA
ctcttcacctgaggtagagatt

SEQ ID NO: 33265 - DNA, 22 bp, synthetic construct
  misc_feature 1..22: note = chemically synthesized
  source 1..22: mol_type = other DNA
ttcacctgaggtagagattgac

SEQ ID NO: 33266 - DNA, 22 bp, synthetic construct
  misc_feature 1..22: note = chemically synthesized
  source 1..22: mol_type = other DNA
cacctgaggtagagattgacca

SEQ ID NO: 33267 - DNA, 22 bp, synthetic construct
  misc_feature 1..22: note = chemically synthesized
  source 1..22: mol_type = other DNA
acctgaggtagagattgaccaa

SEQ ID NO: 33268 - DNA, 22 bp, synthetic construct
  misc_feature 1..22: note = chemically synthesized
  source 1..22: mol_type = other DNA
aggtagagattgaccaattatt

SEQ ID NO: 33269 - DNA, 22 bp, synthetic construct
  misc_feature 1..22: note = chemically synthesized
  source 1..22: mol_type = other DNA
accaattatttattccagttaa

SEQ ID NO: 33270 - DNA, 22 bp, synthetic construct
  misc_feature 1..22: note = chemically synthesized
  source 1..22: mol_type = other DNA
tttattccagttaaaagtaggc

SEQ ID NO: 33271 - DNA, 22 bp, synthetic construct
  misc_feature 1..22: note = chemically synthesized
  source 1..22: mol_type = other DNA
attccagttaaaagtaggctta

SEQ ID NO: 33272 - DNA, 22 bp, synthetic construct
  misc_feature 1..22: note = chemically synthesized
  source 1..22: mol_type = other DNA
ttccagttaaaagtaggcttat

SEQ ID NO: 33273 - DNA, 22 bp, synthetic construct
  misc_feature 1..22: note = chemically synthesized
  source 1..22: mol_type = other DNA
cagttaaaagtaggcttatttc

SEQ ID NO: 33274 - DNA, 22 bp, synthetic construct
  misc_feature 1..22: note = chemically synthesized
  source 1..22: mol_type = other DNA
aaagtaggcttatttcaaaagg

SEQ ID NO: 33275 - DNA, 22 bp, synthetic construct
  misc_feature 1..22: note = chemically synthesized
  source 1..22: mol_type = other DNA
atttcaaaaggcagagaatttg

SEQ ID NO: 33276 - DNA, 22 bp, synthetic construct
  misc_feature 1..22: note = chemically synthesized
  source 1..22: mol_type = other DNA
tttcaaaaggcagagaatttga

SEQ ID NO: 33277 - DNA, 22 bp, synthetic construct
  misc_feature 1..22: note = chemically synthesized
  source 1..22: mol_type = other DNA
caaaaggcagagaatttgaagc

SEQ ID NO: 33278 - DNA, 22 bp, synthetic construct
  misc_feature 1..22: note = chemically synthesized
  source 1..22: mol_type = other DNA
aaaaggcagagaatttgaagct

SEQ ID NO: 33279 - DNA, 22 bp, synthetic construct
  misc_feature 1..22: note = chemically synthesized
  source 1..22: mol_type = other DNA
gaagctatcggggaaaggaact

SEQ ID NO: 33280 - DNA, 22 bp, synthetic construct
  misc_feature 1..22: note = chemically synthesized
  source 1..22: mol_type = other DNA
aagctatcggggaaaggaactg

SEQ ID NO: 33281 - DNA, 22 bp, synthetic construct
  misc_feature 1..22: note = chemically synthesized
  source 1..22: mol_type = other DNA
tcggggaaaggaactgtggcag

SEQ ID NO: 33282 - DNA, 22 bp, synthetic construct
  misc_feature 1..22: note = chemically synthesized
  source 1..22: mol_type = other DNA
tggcagatagtgcctgctgtgt

SEQ ID NO: 33283 - DNA, 22 bp, synthetic construct
  misc_feature 1..22: note = chemically synthesized
  source 1..22: mol_type = other DNA
ctgtgtgtggtggaggattctc

SEQ ID NO: 33284 - DNA, 22 bp, synthetic construct
  misc_feature 1..22: note = chemically synthesized
  source 1..22: mol_type = other DNA
tgtgtggtggaggattctctgc

SEQ ID NO: 33285 - DNA, 22 bp, synthetic construct
  misc_feature 1..22: note = chemically synthesized
  source 1..22: mol_type = other DNA
tctgctcagtcctgactcaggc

SEQ ID NO: 33286 - DNA, 22 bp, synthetic construct
  misc_feature 1..22: note = chemically synthesized
  source 1..22: mol_type = other DNA
tgctcagtcctgactcaggcta

SEQ ID NO: 33287 - DNA, 22 bp, synthetic construct
  misc_feature 1..22: note = chemically synthesized
  source 1..22: mol_type = other DNA
ctcagtcctgactcaggctagg

SEQ ID NO: 33288 - DNA, 22 bp, synthetic construct
  misc_feature 1..22: note = chemically synthesized
  source 1..22: mol_type = other DNA
agtcctgactcaggctaggaag

SEQ ID NO: 33289 - DNA, 22 bp, synthetic construct
  misc_feature 1..22: note = chemically synthesized
  source 1..22: mol_type = other DNA
actcaggctaggaaggaacagg

SEQ ID NO: 33290 - DNA, 22 bp, synthetic construct
  misc_feature 1..22: note = chemically synthesized
  source 1..22: mol_type = other DNA
aggctaggaaggaacagggcag

SEQ ID NO: 33291 - DNA, 22 bp, synthetic construct
  misc_feature 1..22: note = chemically synthesized
  source 1..22: mol_type = other DNA
ggaaggaacagggcagtgctga

SEQ ID NO: 33292 - DNA, 22 bp, synthetic construct
  misc_feature 1..22: note = chemically synthesized
  source 1..22: mol_type = other DNA
caggagactcagcactgccctg

SEQ ID NO: 33293 - DNA, 22 bp, synthetic construct
  misc_feature 1..22: note = chemically synthesized
  source 1..22: mol_type = other DNA
agcactgccctgttccttccta

SEQ ID NO: 33294 - DNA, 22 bp, synthetic construct
  misc_feature 1..22: note = chemically synthesized
  source 1..22: mol_type = other DNA
ccctgttccttcctagcctgag

SEQ ID NO: 33295 - DNA, 22 bp, synthetic construct
  misc_feature 1..22: note = chemically synthesized
  source 1..22: mol_type = other DNA
ttccttcctagcctgagtcagg

SEQ ID NO: 33296 - DNA, 22 bp, synthetic construct
  misc_feature 1..22: note = chemically synthesized
  source 1..22: mol_type = other DNA
cttcctagcctgagtcaggact

SEQ ID NO: 33297 - DNA, 22 bp, synthetic construct
  misc_feature 1..22: note = chemically synthesized
  source 1..22: mol_type = other DNA
cctagcctgagtcaggactgag

SEQ ID NO: 33298 - DNA, 22 bp, synthetic construct
  misc_feature 1..22: note = chemically synthesized
  source 1..22: mol_type = other DNA
ctagcctgagtcaggactgagc

SEQ ID NO: 33299 - DNA, 22 bp, synthetic construct
  misc_feature 1..22: note = chemically synthesized
  source 1..22: mol_type = other DNA
gcctgagtcaggactgagcaga

SEQ ID NO: 33300 - DNA, 22 bp, synthetic construct
  misc_feature 1..22: note = chemically synthesized
  source 1..22: mol_type = other DNA
agtcaggactgagcagagaatc

SEQ ID NO: 33301 - DNA, 22 bp, synthetic construct
  misc_feature 1..22: note = chemically synthesized
  source 1..22: mol_type = other DNA
agcagagaatcctccaccacac

SEQ ID NO: 33302 - DNA, 22 bp, synthetic construct
  misc_feature 1..22: note = chemically synthesized
  source 1..22: mol_type = other DNA
caccacacacagcaggcactat

SEQ ID NO: 33303 - DNA, 22 bp, synthetic construct
  misc_feature 1..22: note = chemically synthesized
  source 1..22: mol_type = other DNA
tctgccacagttcctttccccg

SEQ ID NO: 33304 - DNA, 22 bp, synthetic construct
  misc_feature 1..22: note = chemically synthesized
  source 1..22: mol_type = other DNA
ccacagttcctttccccgatag

SEQ ID NO: 33305 - DNA, 22 bp, synthetic construct
  misc_feature 1..22: note = chemically synthesized
  source 1..22: mol_type = other DNA
ctttccccgatagcttcaaatt

SEQ ID NO: 33306 - DNA, 22 bp, synthetic construct
  misc_feature 1..22: note = chemically synthesized
  source 1..22: mol_type = other DNA
tccccgatagcttcaaattctc

SEQ ID NO: 33307 - DNA, 22 bp, synthetic construct
  misc_feature 1..22: note = chemically synthesized
  source 1..22: mol_type = other DNA
ccccgatagcttcaaattctct

SEQ ID NO: 33308 - DNA, 22 bp, synthetic construct
  misc_feature 1..22: note = chemically synthesized
  source 1..22: mol_type = other DNA
cccgatagcttcaaattctctg

SEQ ID NO: 33309 - DNA, 22 bp, synthetic construct
  misc_feature 1..22: note = chemically synthesized
  source 1..22: mol_type = other DNA
caaattctctgccttttgaaat

SEQ ID NO: 33310 - DNA, 22 bp, synthetic construct
  misc_feature 1..22: note = chemically synthesized
  source 1..22: mol_type = other DNA
aaattctctgccttttgaaata

SEQ ID NO: 33311 - DNA, 22 bp, synthetic construct
  misc_feature 1..22: note = chemically synthesized
  source 1..22: mol_type = other DNA
tctgccttttgaaataagccta

SEQ ID NO: 33312 - DNA, 22 bp, synthetic construct
  misc_feature 1..22: note = chemically synthesized
  source 1..22: mol_type = other DNA
tgccttttgaaataagcctact

SEQ ID NO: 33313 - DNA, 22 bp, synthetic construct
  misc_feature 1..22: note = chemically synthesized
  source 1..22: mol_type = other DNA
ccttttgaaataagcctacttt

SEQ ID NO: 33314 - DNA, 22 bp, synthetic construct
  misc_feature 1..22: note = chemically synthesized
  source 1..22: mol_type = other DNA
ttgaaataagcctacttttaac

SEQ ID NO: 33315 - DNA, 22 bp, synthetic construct
  misc_feature 1..22: note = chemically synthesized
  source 1..22: mol_type = other DNA
tgaaataagcctacttttaact

SEQ ID NO: 33316 - DNA, 22 bp, synthetic construct
  misc_feature 1..22: note = chemically synthesized
  source 1..22: mol_type = other DNA
gaaataagcctacttttaactg

SEQ ID NO: 33317 - DNA, 22 bp, synthetic construct
  misc_feature 1..22: note = chemically synthesized
  source 1..22: mol_type = other DNA
aaataagcctacttttaactgg

SEQ ID NO: 33318 - DNA, 22 bp, synthetic construct
  misc_feature 1..22: note = chemically synthesized
  source 1..22: mol_type = other DNA
cttttaactggaataaataatt

SEQ ID NO: 33319 - DNA, 22 bp, synthetic construct
  misc_feature 1..22: note = chemically synthesized
  source 1..22: mol_type = other DNA
ttaactggaataaataattggt

SEQ ID NO: 33320 - DNA, 22 bp, synthetic construct
  misc_feature 1..22: note = chemically synthesized
  source 1..22: mol_type = other DNA
taactggaataaataattggtc

SEQ ID NO: 33321 - DNA, 22 bp, synthetic construct
  misc_feature 1..22: note = chemically synthesized
  source 1..22: mol_type = other DNA
aactggaataaataattggtca

SEQ ID NO: 33322 - DNA, 22 bp, synthetic construct
  misc_feature 1..22: note = chemically synthesized
  source 1..22: mol_type = other DNA
actggaataaataattggtcaa

SEQ ID NO: 33323 - DNA, 22 bp, synthetic construct
  misc_feature 1..22: note = chemically synthesized
  source 1..22: mol_type = other DNA
gaataaataattggtcaatctc

SEQ ID NO: 33324 - DNA, 22 bp, synthetic construct
  misc_feature 1..22: note = chemically synthesized
  source 1..22: mol_type = other DNA
gtcaatctctacctcaggtgaa

SEQ ID NO: 33325 - DNA, 22 bp, synthetic construct
  misc_feature 1..22: note = chemically synthesized
  source 1..22: mol_type = other DNA
tacctcaggtgaagaggaacca

SEQ ID NO: 33326 - DNA, 22 bp, synthetic construct
  misc_feature 1..22: note = chemically synthesized
  source 1..22: mol_type = other DNA
cctcaggtgaagaggaaccaag

SEQ ID NO: 33327 - DNA, 22 bp, synthetic construct
  misc_feature 1..22: note = chemically synthesized
  source 1..22: mol_type = other DNA
aggtgaagaggaaccaagcctc

SEQ ID NO: 33328 - DNA, 22 bp, synthetic construct
  misc_feature 1..22: note = chemically synthesized
  source 1..22: mol_type = other DNA
tggaaacacttaggaacaaact

SEQ ID NO: 33329 - DNA, 22 bp, synthetic construct
  misc_feature 1..22: note = chemically synthesized
  source 1..22: mol_type = other DNA
gaaacacttaggaacaaactgt

SEQ ID NO: 33330 - DNA, 22 bp, synthetic construct
  misc_feature 1..22: note = chemically synthesized
  source 1..22: mol_type = other DNA
aggaacaaactgtaaaaaccaa

SEQ ID NO: 33331 - DNA, 22 bp, synthetic construct
  misc_feature 1..22: note = chemically synthesized
  source 1..22: mol_type = other DNA
ggaacaaactgtaaaaaccaaa

SEQ ID NO: 33332 - DNA, 22 bp, synthetic construct
  misc_feature 1..22: note = chemically synthesized
  source 1..22: mol_type = other DNA
taaaaaccaaaggcaattgtgt

SEQ ID NO: 33333 - DNA, 22 bp, synthetic construct
  misc_feature 1..22: note = chemically synthesized
  source 1..22: mol_type = other DNA
tgtaaccggttaaataagcttg

SEQ ID NO: 33334 - DNA, 22 bp, synthetic construct
  misc_feature 1..22: note = chemically synthesized
  source 1..22: mol_type = other DNA
aataagcttgctggactttgtc

SEQ ID NO: 33335 - DNA, 22 bp, synthetic construct
  misc_feature 1..22: note = chemically synthesized
  source 1..22: mol_type = other DNA
gctggactttgtccctgtgtat

SEQ ID NO: 33336 - DNA, 22 bp, synthetic construct
  misc_feature 1..22: note = chemically synthesized
  source 1..22: mol_type = other DNA
ctggactttgtccctgtgtatg

SEQ ID NO: 33337 - DNA, 22 bp, synthetic construct
  misc_feature 1..22: note = chemically synthesized
  source 1..22: mol_type = other DNA
gactttgtccctgtgtatgagt

SEQ ID NO: 33338 - DNA, 22 bp, synthetic construct
  misc_feature 1..22: note = chemically synthesized
  source 1..22: mol_type = other DNA
tgtccctgtgtatgagttagac

SEQ ID NO: 33339 - DNA, 22 bp, synthetic construct
  misc_feature 1..22: note = chemically synthesized
  source 1..22: mol_type = other DNA
gtccctgtgtatgagttagaca

SEQ ID NO: 33340 - DNA, 22 bp, synthetic construct
  misc_feature 1..22: note = chemically synthesized
  source 1..22: mol_type = other DNA
tccctgtgtatgagttagacaa

SEQ ID NO: 33341 - DNA, 22 bp, synthetic construct
  misc_feature 1..22: note = chemically synthesized
  source 1..22: mol_type = other DNA
tgtatgagttagacaattcttt

SEQ ID NO: 33342 - DNA, 22 bp, synthetic construct
  misc_feature 1..22: note = chemically synthesized
  source 1..22: mol_type = other DNA
gacaattctttcagctagtttg

SEQ ID NO: 33343 - DNA, 22 bp, synthetic construct
  misc_feature 1..22: note = chemically synthesized
  source 1..22: mol_type = other DNA
tttcagctagtttgagtgacgc

SEQ ID NO: 33344 - DNA, 22 bp, synthetic construct
  misc_feature 1..22: note = chemically synthesized
  source 1..22: mol_type = other DNA
tcagctagtttgagtgacgcac

SEQ ID NO: 33345 - DNA, 22 bp, synthetic construct
  misc_feature 1..22: note = chemically synthesized
  source 1..22: mol_type = other DNA
cagctagtttgagtgacgcact

SEQ ID NO: 33346 - DNA, 22 bp, synthetic construct
  misc_feature 1..22: note = chemically synthesized
  source 1..22: mol_type = other DNA
agctagtttgagtgacgcactg

SEQ ID NO: 33347 - DNA, 22 bp, synthetic construct
  misc_feature 1..22: note = chemically synthesized
  source 1..22: mol_type = other DNA
gtttgagtgacgcactgaccag

SEQ ID NO: 33348 - DNA, 22 bp, synthetic construct
  misc_feature 1..22: note = chemically synthesized
  source 1..22: mol_type = other DNA
gagtgacgcactgaccagtgaa

SEQ ID NO: 33349 - DNA, 22 bp, synthetic construct
  misc_feature 1..22: note = chemically synthesized
  source 1..22: mol_type = other DNA
agtgacgcactgaccagtgaag

SEQ ID NO: 33350 - DNA, 22 bp, synthetic construct
  misc_feature 1..22: note = chemically synthesized
  source 1..22: mol_type = other DNA
accagtgaagcgcagtgaagca

SEQ ID NO: 33351 - DNA, 22 bp, synthetic construct
  misc_feature 1..22: note = chemically synthesized
  source 1..22: mol_type = other DNA
gaaggagaaagaagcattgtgg

SEQ ID NO: 33352 - DNA, 22 bp, synthetic construct
  misc_feature 1..22: note = chemically synthesized
  source 1..22: mol_type = other DNA
aaggagaaagaagcattgtggc

SEQ ID NO: 33353 - DNA, 22 bp, synthetic construct
  misc_feature 1..22: note = chemically synthesized
  source 1..22: mol_type = other DNA
tggctttatatcctctgggcct

SEQ ID NO: 33354 - DNA, 22 bp, synthetic construct
  misc_feature 1..22: note = chemically synthesized
  source 1..22: mol_type = other DNA
tatatcctctgggcctgggttt

SEQ ID NO: 33355 - DNA, 22 bp, synthetic construct
  misc_feature 1..22: note = chemically synthesized
  source 1..22: mol_type = other DNA
atatcctctgggcctgggtttc

SEQ ID NO: 33356 - DNA, 22 bp, synthetic construct
  misc_feature 1..22: note = chemically synthesized
  source 1..22: mol_type = other DNA
tatcctctgggcctgggtttcc

SEQ ID NO: 33357 - DNA, 22 bp, synthetic construct
  misc_feature 1..22: note = chemically synthesized
  source 1..22: mol_type = other DNA
tgggcctgggtttcctgaagtc

SEQ ID NO: 33358 - DNA, 22 bp, synthetic construct
  misc_feature 1..22: note = chemically synthesized
  source 1..22: mol_type = other DNA
ggcctgggtttcctgaagtcac

SEQ ID NO: 33359 - DNA, 22 bp, synthetic construct
  misc_feature 1..22: note = chemically synthesized
  source 1..22: mol_type = other DNA
ggtttcctgaagtcaccacaca

SEQ ID NO: 33360 - DNA, 22 bp, synthetic construct
  misc_feature 1..22: note = chemically synthesized
  source 1..22: mol_type = other DNA
cctgaagtcaccacacatagag

SEQ ID NO: 33361 - DNA, 22 bp, synthetic construct
  misc_feature 1..22: note = chemically synthesized
  source 1..22: mol_type = other DNA
ctgaagtcaccacacatagagg

SEQ ID NO: 33362 - DNA, 22 bp, synthetic construct
  misc_feature 1..22: note = chemically synthesized
  source 1..22: mol_type = other DNA
aagtcaccacacatagaggaga

SEQ ID NO: 33363 - DNA, 22 bp, synthetic construct
  misc_feature 1..22: note = chemically synthesized
  source 1..22: mol_type = other DNA
agttaaaggtaagaaaccatct

SEQ ID NO: 33364 - DNA, 22 bp, synthetic construct
  misc_feature 1..22: note = chemically synthesized
  source 1..22: mol_type = other DNA
aaggtaagaaaccatctgacaa

SEQ ID NO: 33365 - DNA, 22 bp, synthetic construct
  misc_feature 1..22: note = chemically synthesized
  source 1..22: mol_type = other DNA
acaagtttgctatggcttcttc

SEQ ID NO: 33366 - DNA, 22 bp, synthetic construct
  misc_feature 1..22: note = chemically synthesized
  source 1..22: mol_type = other DNA
gctatggcttcttcagccaaaa

SEQ ID NO: 33367 - DNA, 22 bp, synthetic construct
  misc_feature 1..22: note = chemically synthesized
  source 1..22: mol_type = other DNA
ctatggcttcttcagccaaaat

SEQ ID NO: 33368 - DNA, 22 bp, synthetic construct
  misc_feature 1..22: note = chemically synthesized
  source 1..22: mol_type = other DNA
tggcttcttcagccaaaattta

SEQ ID NO: 33369 - DNA, 22 bp, synthetic construct
  misc_feature 1..22: note = chemically synthesized
  source 1..22: mol_type = other DNA
cttcagccaaaatttatggaag

SEQ ID NO: 33370 - DNA, 22 bp, synthetic construct
  misc_feature 1..22: note = chemically synthesized
  source 1..22: mol_type = other DNA
ttcagccaaaatttatggaagt

SEQ ID NO: 33371 - DNA, 22 bp, synthetic construct
  misc_feature 1..22: note = chemically synthesized
  source 1..22: mol_type = other DNA
cagccaaaatttatggaagttt

SEQ ID NO: 33372 - DNA, 22 bp, synthetic construct
  misc_feature 1..22: note = chemically synthesized
  source 1..22: mol_type = other DNA
agccaaaatttatggaagtttc

SEQ ID NO: 33373 - DNA, 22 bp, synthetic construct
  misc_feature 1..22: note = chemically synthesized
  source 1..22: mol_type = other DNA
atggaagtttctgagaacttca

SEQ ID NO: 33374 - DNA, 22 bp, synthetic construct
  misc_feature 1..22: note = chemically synthesized
  source 1..22: mol_type = other DNA
tggaagtttctgagaacttcag

SEQ ID NO: 33375 - DNA, 22 bp, synthetic construct
  misc_feature 1..22: note = chemically synthesized
  source 1..22: mol_type = other DNA
ctgagaacttcagggtatcaga

SEQ ID NO: 33376 - DNA, 22 bp, synthetic construct
  misc_feature 1..22: note = chemically synthesized
  source 1..22: mol_type = other DNA
tgagaacttcagggtatcagag

SEQ ID NO: 33377 - DNA, 22 bp, synthetic construct
  misc_feature 1..22: note = chemically synthesized
  source 1..22: mol_type = other DNA
agaacttcagggtatcagagtt

SEQ ID NO: 33378 - DNA, 22 bp, synthetic construct
  misc_feature 1..22: note = chemically synthesized
  source 1..22: mol_type = other DNA
cagggtatcagagttggaaaag

SEQ ID NO: 33379 - DNA, 22 bp, synthetic construct
  misc_feature 1..22: note = chemically synthesized
  source 1..22: mol_type = other DNA
agggtatcagagttggaaaaga

SEQ ID NO: 33380 - DNA, 22 bp, synthetic construct
  misc_feature 1..22: note = chemically synthesized
  source 1..22: mol_type = other DNA
gaaaagacttagagaggccctg

SEQ ID NO: 33381 - DNA, 22 bp, synthetic construct
  misc_feature 1..22: note = chemically synthesized
  source 1..22: mol_type = other DNA
agagaggccctggttcaaaccc

SEQ ID NO: 33382 - DNA, 22 bp, synthetic construct
  misc_feature 1..22: note = chemically synthesized
  source 1..22: mol_type = other DNA
gagaggccctggttcaaacccc

SEQ ID NO: 33383 - DNA, 22 bp, synthetic construct
  misc_feature 1..22: note = chemically synthesized
  source 1..22: mol_type = other DNA
gttcaaacccctgtgttcagag

SEQ ID NO: 33384 - DNA, 22 bp, synthetic construct
  misc_feature 1..22: note = chemically synthesized
  source 1..22: mol_type = other DNA
aaacccctgtgttcagaggctt

SEQ ID NO: 33385 - DNA, 22 bp, synthetic construct
  misc_feature 1..22: note = chemically synthesized
  source 1..22: mol_type = other DNA
tgttcagaggcttccctgtggt

SEQ ID NO: 33386 - DNA, 22 bp, synthetic construct
  misc_feature 1..22: note = chemically synthesized
  source 1..22: mol_type = other DNA
agaggcttccctgtggtgtctg

SEQ ID NO: 33387 - DNA, 22 bp, synthetic construct
  misc_feature 1..22: note = chemically synthesized
  source 1..22: mol_type = other DNA
ccctgtggtgtctgtgggcaca

SEQ ID NO: 33388 - DNA, 22 bp, synthetic construct
  misc_feature 1..22: note = chemically synthesized
  source 1..22: mol_type = other DNA
cctgtggtgtctgtgggcacag

SEQ ID NO: 33389 - DNA, 22 bp, synthetic construct
  misc_feature 1..22: note = chemically synthesized
  source 1..22: mol_type = other DNA
tggtgtctgtgggcacagctgg

SEQ ID NO: 33390 - DNA, 22 bp, synthetic construct
  misc_feature 1..22: note = chemically synthesized
  source 1..22: mol_type = other DNA
tgggcacagctggagctgaaga

SEQ ID NO: 33391 - DNA, 22 bp, synthetic construct
  misc_feature 1..22: note = chemically synthesized
  source 1..22: mol_type = other DNA
gagctgaagaacaagggaaagg

SEQ ID NO: 33392 - DNA, 22 bp, synthetic construct
  misc_feature 1..22: note = chemically synthesized
  source 1..22: mol_type = other DNA
aagaacaagggaaaggtgataa

SEQ ID NO: 33393 - DNA, 22 bp, synthetic construct
  misc_feature 1..22: note = chemically synthesized
  source 1..22: mol_type = other DNA
ttattggtcatcccttgccttt

SEQ ID NO: 33394 - DNA, 22 bp, synthetic construct
  misc_feature 1..22: note = chemically synthesized
  source 1..22: mol_type = other DNA
attggtcatcccttgcctttgt

SEQ ID NO: 33395 - DNA, 22 bp, synthetic construct
  misc_feature 1..22: note = chemically synthesized
  source 1..22: mol_type = other DNA
ttggtcatcccttgcctttgtt

SEQ ID NO: 33396 - DNA, 22 bp, synthetic construct
  misc_feature 1..22: note = chemically synthesized
  source 1..22: mol_type = other DNA
gtcatcccttgcctttgttcat

SEQ ID NO: 33397 - DNA, 22 bp, synthetic construct
  misc_feature 1..22: note = chemically synthesized
  source 1..22: mol_type = other DNA
gcctttgttcatttcaattatt

SEQ ID NO: 33398 - DNA, 22 bp, synthetic construct
  misc_feature 1..22: note = chemically synthesized
  source 1..22: mol_type = other DNA
cctttgttcatttcaattattg

SEQ ID NO: 33399 - DNA, 22 bp, synthetic construct
  misc_feature 1..22: note = chemically synthesized
  source 1..22: mol_type = other DNA
tgttcatttcaattattgtctt

SEQ ID NO: 33400 - DNA, 22 bp, synthetic construct
  misc_feature 1..22: note = chemically synthesized
  source 1..22: mol_type = other DNA
gttcatttcaattattgtcttg

SEQ ID NO: 33401 - DNA, 22 bp, synthetic construct
  misc_feature 1..22: note = chemically synthesized
  source 1..22: mol_type = other DNA
ttcatttcaattattgtcttgg

SEQ ID NO: 33402 - DNA, 22 bp, synthetic construct
  misc_feature 1..22: note = chemically synthesized
  source 1..22: mol_type = other DNA
atttcaattattgtcttggaaa

SEQ ID NO: 33403 - DNA, 22 bp, synthetic construct
  misc_feature 1..22: note = chemically synthesized
  source 1..22: mol_type = other DNA
caattattgtcttggaaatctg

SEQ ID NO: 33404 - DNA, 22 bp, synthetic construct
  misc_feature 1..22: note = chemically synthesized
  source 1..22: mol_type = other DNA
aattattgtcttggaaatctgt

SEQ ID NO: 33405 - DNA, 22 bp, synthetic construct
  misc_feature 1..22: note = chemically synthesized
  source 1..22: mol_type = other DNA
ttgtcttggaaatctgtagaca

SEQ ID NO: 33406 - DNA, 22 bp, synthetic construct
  misc_feature 1..22: note = chemically synthesized
  source 1..22: mol_type = other DNA
tcttggaaatctgtagacatcc

SEQ ID NO: 33407 - DNA, 22 bp, synthetic construct
  misc_feature 1..22: note = chemically synthesized
  source 1..22: mol_type = other DNA
ggaaatctgtagacatcctaag

SEQ ID NO: 33408 - DNA, 22 bp, synthetic construct
  misc_feature 1..22: note = chemically synthesized
  source 1..22: mol_type = other DNA
gaaatctgtagacatcctaaga

SEQ ID NO: 33409 - DNA, 22 bp, synthetic construct
  misc_feature 1..22: note = chemically synthesized
  source 1..22: mol_type = other DNA
tagacatcctaagagctcccct

SEQ ID NO: 33410 - DNA, 22 bp, synthetic construct
  misc_feature 1..22: note = chemically synthesized
  source 1..22: mol_type = other DNA
agagctcccctccactacggac

SEQ ID NO: 33411 - DNA, 22 bp, synthetic construct
  misc_feature 1..22: note = chemically synthesized
  source 1..22: mol_type = other DNA
ccctccactacggacatgcacg

SEQ ID NO: 33412 - DNA, 22 bp, synthetic construct
  misc_feature 1..22: note = chemically synthesized
  source 1..22: mol_type = other DNA
cactacggacatgcacgtttct

SEQ ID NO: 33413 - DNA, 22 bp, synthetic construct
  misc_feature 1..22: note = chemically synthesized
  source 1..22: mol_type = other DNA
cggacatgcacgtttctctcta

SEQ ID NO: 33414 - DNA, 22 bp, synthetic construct
  misc_feature 1..22: note = chemically synthesized
  source 1..22: mol_type = other DNA
ctctctatgtctttttcccaac

SEQ ID NO: 33415 - DNA, 22 bp, synthetic construct
  misc_feature 1..22: note = chemically synthesized
  source 1..22: mol_type = other DNA
tctctatgtctttttcccaacc

SEQ ID NO: 33416 - DNA, 22 bp, synthetic construct
  misc_feature 1..22: note = chemically synthesized
  source 1..22: mol_type = other DNA
tctatgtctttttcccaacccc

SEQ ID NO: 33417 - DNA, 22 bp, synthetic construct
  misc_feature 1..22: note = chemically synthesized
  source 1..22: mol_type = other DNA
tatgtctttttcccaacccctg

SEQ ID NO: 33418 - DNA, 22 bp, synthetic construct
  misc_feature 1..22: note = chemically synthesized
  source 1..22: mol_type = other DNA
tgtctttttcccaacccctgct

SEQ ID NO: 33419 - DNA, 22 bp, synthetic construct
  misc_feature 1..22: note = chemically synthesized
  source 1..22: mol_type = other DNA
tttcccaacccctgctctgaca

SEQ ID NO: 33420 - DNA, 22 bp, synthetic construct
  misc_feature 1..22: note = chemically synthesized
  source 1..22: mol_type = other DNA
ttcccaacccctgctctgacac

SEQ ID NO: 33421 - DNA, 22 bp, synthetic construct
  misc_feature 1..22: note = chemically synthesized
  source 1..22: mol_type = other DNA
tcccaacccctgctctgacacc

SEQ ID NO: 33422 - DNA, 22 bp, synthetic construct
  misc_feature 1..22: note = chemically synthesized
  source 1..22: mol_type = other DNA
cccaacccctgctctgacacct

SEQ ID NO: 33423 - DNA, 22 bp, synthetic construct
  misc_feature 1..22: note = chemically synthesized
  source 1..22: mol_type = other DNA
ccaacccctgctctgacacctt

SEQ ID NO: 33424 - DNA, 22 bp, synthetic construct
  misc_feature 1..22: note = chemically synthesized
  source 1..22: mol_type = other DNA
ctctgacaccttcccattgctg

SEQ ID NO: 33425 - DNA, 22 bp, synthetic construct
  misc_feature 1..22: note = chemically synthesized
  source 1..22: mol_type = other DNA
tgacaccttcccattgctgcag

SEQ ID NO: 33426 - DNA, 22 bp, synthetic construct
  misc_feature 1..22: note = chemically synthesized
  source 1..22: mol_type = other DNA
acaccttcccattgctgcagcc

SEQ ID NO: 33427 - DNA, 22 bp, synthetic construct
  misc_feature 1..22: note = chemically synthesized
  source 1..22: mol_type = other DNA
cccattgctgcagcctcatgga

SEQ ID NO: 33428 - DNA, 22 bp, synthetic construct
  misc_feature 1..22: note = chemically synthesized
  source 1..22: mol_type = other DNA
ccattgctgcagcctcatggac

SEQ ID NO: 33429 - DNA, 22 bp, synthetic construct
  misc_feature 1..22: note = chemically synthesized
  source 1..22: mol_type = other DNA
ctgcagcctcatggaccacttc

SEQ ID NO: 33430 - DNA, 22 bp, synthetic construct
  misc_feature 1..22: note = chemically synthesized
  source 1..22: mol_type = other DNA
cagcctcatggaccacttccgg

SEQ ID NO: 33431 - DNA, 22 bp, synthetic construct
  misc_feature 1..22: note = chemically synthesized
  source 1..22: mol_type = other DNA
atggaccacttccggtgaccag

SEQ ID NO: 33432 - DNA, 22 bp, synthetic construct
  misc_feature 1..22: note = chemically synthesized
  source 1..22: mol_type = other DNA
ccggtgaccagttagatatgct

SEQ ID NO: 33433 - DNA, 22 bp, synthetic construct
  misc_feature 1..22: note = chemically synthesized
  source 1..22: mol_type = other DNA
cggtgaccagttagatatgctt

SEQ ID NO: 33434 - DNA, 22 bp, synthetic construct
  misc_feature 1..22: note = chemically synthesized
  source 1..22: mol_type = other DNA
gatatgcttgatctatttagtt

SEQ ID NO: 33435 - DNA, 22 bp, synthetic construct
  misc_feature 1..22: note = chemically synthesized
  source 1..22: mol_type = other DNA
gatctatttagttaattaaggc

SEQ ID NO: 33436 - DNA, 22 bp, synthetic construct
  misc_feature 1..22: note = chemically synthesized
  source 1..22: mol_type = other DNA
atctatttagttaattaaggct

SEQ ID NO: 33437 - DNA, 22 bp, synthetic construct
  misc_feature 1..22: note = chemically synthesized
  source 1..22: mol_type = other DNA
tttagttaattaaggctctgaa

SEQ ID NO: 33438 - DNA, 22 bp, synthetic construct
  misc_feature 1..22: note = chemically synthesized
  source 1..22: mol_type = other DNA
agttaattaaggctctgaatca

SEQ ID NO: 33439 - DNA, 22 bp, synthetic construct
  misc_feature 1..22: note = chemically synthesized
  source 1..22: mol_type = other DNA
gttaattaaggctctgaatcag

SEQ ID NO: 33440 - DNA, 22 bp, synthetic construct
  misc_feature 1..22: note = chemically synthesized
  source 1..22: mol_type = other DNA
attaaggctctgaatcagccct

SEQ ID NO: 33441 - DNA, 22 bp, synthetic construct
  misc_feature 1..22: note = chemically synthesized
  source 1..22: mol_type = other DNA
aggctctgaatcagcccttggc

SEQ ID NO: 33442 - DNA, 22 bp, synthetic construct
  misc_feature 1..22: note = chemically synthesized
  source 1..22: mol_type = other DNA
tgaatcagcccttggccagaag

SEQ ID NO: 33443 - DNA, 22 bp, synthetic construct
  misc_feature 1..22: note = chemically synthesized
  source 1..22: mol_type = other DNA
aatcagcccttggccagaagaa

SEQ ID NO: 33444 - DNA, 22 bp, synthetic construct
  misc_feature 1..22: note = chemically synthesized
  source 1..22: mol_type = other DNA
ggccagaagaagcacctcctct

SEQ ID NO: 33445 - DNA, 22 bp, synthetic construct
  misc_feature 1..22: note = chemically synthesized
  source 1..22: mol_type = other DNA
gccagaagaagcacctcctcta

SEQ ID NO: 33446 - DNA, 22 bp, synthetic construct
  misc_feature 1..22: note = chemically synthesized
  source 1..22: mol_type = other DNA
ctctaggaaatcattccttctt

SEQ ID NO: 33447 - DNA, 22 bp, synthetic construct
  misc_feature 1..22: note = chemically synthesized
  source 1..22: mol_type = other DNA
taggaaatcattccttcttttt

SEQ ID NO: 33448 - DNA, 22 bp, synthetic construct
  misc_feature 1..22: note = chemically synthesized
  source 1..22: mol_type = other DNA
ggaaatcattccttctttttag

SEQ ID NO: 33449 - DNA, 22 bp, synthetic construct
  misc_feature 1..22: note = chemically synthesized
  source 1..22: mol_type = other DNA
cttctttttagtaatacgcaat

SEQ ID NO: 33450 - DNA, 22 bp, synthetic construct
  misc_feature 1..22: note = chemically synthesized
  source 1..22: mol_type = other DNA
ctttttagtaatacgcaattga

SEQ ID NO: 33451 - DNA, 22 bp, synthetic construct
  misc_feature 1..22: note = chemically synthesized
  source 1..22: mol_type = other DNA
tttttagtaatacgcaattgaa

SEQ ID NO: 33452 - DNA, 22 bp, synthetic construct
  misc_feature 1..22: note = chemically synthesized
  source 1..22: mol_type = other DNA
tttagtaatacgcaattgaaaa

SEQ ID NO: 33453 - DNA, 22 bp, synthetic construct
  misc_feature 1..22: note = chemically synthesized
  source 1..22: mol_type = other DNA
ttagtaatacgcaattgaaaag

SEQ ID NO: 33454 - DNA, 22 bp, synthetic construct
  misc_feature 1..22: note = chemically synthesized
  source 1..22: mol_type = other DNA
tagtaatacgcaattgaaaagt

SEQ ID NO: 33455 - DNA, 22 bp, synthetic construct
  misc_feature 1..22: note = chemically synthesized
  source 1..22: mol_type = other DNA
agtaatacgcaattgaaaagta

SEQ ID NO: 33456 - DNA, 22 bp, synthetic construct
  misc_feature 1..22: note = chemically synthesized
  source 1..22: mol_type = other DNA
gtaatacgcaattgaaaagtat

SEQ ID NO: 33457 - DNA, 22 bp, synthetic construct
  misc_feature 1..22: note = chemically synthesized
  source 1..22: mol_type = other DNA
aaaagtatgtgtgggttatgtg

SEQ ID NO: 33458 - DNA, 22 bp, synthetic construct
  misc_feature 1..22: note = chemically synthesized
  source 1..22: mol_type = other DNA
tgtgctgttaggtgctaagcat

SEQ ID NO: 33459 - DNA, 22 bp, synthetic construct
  misc_feature 1..22: note = chemically synthesized
  source 1..22: mol_type = other DNA
ttaggtgctaagcattttagct

SEQ ID NO: 33460 - DNA, 22 bp, synthetic construct
  misc_feature 1..22: note = chemically synthesized
  source 1..22: mol_type = other DNA
ggtgctaagcattttagctatg

SEQ ID NO: 33461 - DNA, 22 bp, synthetic construct
  misc_feature 1..22: note = chemically synthesized
  source 1..22: mol_type = other DNA
agcattttagctatgaattaac

SEQ ID NO: 33462 - DNA, 22 bp, synthetic construct
  misc_feature 1..22: note = chemically synthesized
  source 1..22: mol_type = other DNA
tagctatgaattaactcataat

SEQ ID NO: 33463 - DNA, 22 bp, synthetic construct
  misc_feature 1..22: note = chemically synthesized
  source 1..22: mol_type = other DNA
agctatgaattaactcataatc

SEQ ID NO: 33464 - DNA, 22 bp, synthetic construct
  misc_feature 1..22: note = chemically synthesized
  source 1..22: mol_type = other DNA
gctatgaattaactcataatcc

SEQ ID NO: 33465 - DNA, 22 bp, synthetic construct
  misc_feature 1..22: note = chemically synthesized
  source 1..22: mol_type = other DNA
tgaattaactcataatcctcaa

SEQ ID NO: 33466 - DNA, 22 bp, synthetic construct
  misc_feature 1..22: note = chemically synthesized
  source 1..22: mol_type = other DNA
actcataatcctcaaaataaat

SEQ ID NO: 33467 - DNA, 22 bp, synthetic construct
  misc_feature 1..22: note = chemically synthesized
  source 1..22: mol_type = other DNA
ataatcctcaaaataaatctgg

SEQ ID NO: 33468 - DNA, 22 bp, synthetic construct
  misc_feature 1..22: note = chemically synthesized
  source 1..22: mol_type = other DNA
aaaataaatctggggtatagag

SEQ ID NO: 33469 - DNA, 22 bp, synthetic construct
  misc_feature 1..22: note = chemically synthesized
  source 1..22: mol_type = other DNA
gggtatagagagaggttcttgt

SEQ ID NO: 33470 - DNA, 22 bp, synthetic construct
  misc_feature 1..22: note = chemically synthesized
  source 1..22: mol_type = other DNA
ttgtttcaattagaaaagtaat

SEQ ID NO: 33471 - DNA, 22 bp, synthetic construct
  misc_feature 1..22: note = chemically synthesized
  source 1..22: mol_type = other DNA
gtttcaattagaaaagtaatgc

SEQ ID NO: 33472 - DNA, 22 bp, synthetic construct
  misc_feature 1..22: note = chemically synthesized
  source 1..22: mol_type = other DNA
tttcaattagaaaagtaatgct

SEQ ID NO: 33473 - DNA, 22 bp, synthetic construct
  misc_feature 1..22: note = chemically synthesized
  source 1..22: mol_type = other DNA
caattagaaaagtaatgcttgg

SEQ ID NO: 33474 - DNA, 22 bp, synthetic construct
  misc_feature 1..22: note = chemically synthesized
  source 1..22: mol_type = other DNA
aattagaaaagtaatgcttgga

SEQ ID NO: 33475 - DNA, 22 bp, synthetic construct
  misc_feature 1..22: note = chemically synthesized
  source 1..22: mol_type = other DNA
gaaaagtaatgcttggagagac

SEQ ID NO: 33476 - DNA, 22 bp, synthetic construct
  misc_feature 1..22: note = chemically synthesized
  source 1..22: mol_type = other DNA
ggagagactatgatttgcccaa

SEQ ID NO: 33477 - DNA, 22 bp, synthetic construct
  misc_feature 1..22: note = chemically synthesized
  source 1..22: mol_type = other DNA
gagagactatgatttgcccaag

SEQ ID NO: 33478 - DNA, 22 bp, synthetic construct
  misc_feature 1..22: note = chemically synthesized
  source 1..22: mol_type = other DNA
tgatttgcccaaggtcactgcc

SEQ ID NO: 33479 - DNA, 22 bp, synthetic construct
  misc_feature 1..22: note = chemically synthesized
  source 1..22: mol_type = other DNA
gcccaaggtcactgccaataga

SEQ ID NO: 33480 - DNA, 22 bp, synthetic construct
  misc_feature 1..22: note = chemically synthesized
  source 1..22: mol_type = other DNA
cccaaggtcactgccaatagat

SEQ ID NO: 33481 - DNA, 22 bp, synthetic construct
  misc_feature 1..22: note = chemically synthesized
  source 1..22: mol_type = other DNA
ccaatagatgacttgattagaa

SEQ ID NO: 33482 - DNA, 22 bp, synthetic construct
  misc_feature 1..22: note = chemically synthesized
  source 1..22: mol_type = other DNA
gattagaagcagggtatgtttg

SEQ ID NO: 33483 - DNA, 22 bp, synthetic construct
  misc_feature 1..22: note = chemically synthesized
  source 1..22: mol_type = other DNA
attagaagcagggtatgtttga

SEQ ID NO: 33484 - DNA, 22 bp, synthetic construct
  misc_feature 1..22: note = chemically synthesized
  source 1..22: mol_type = other DNA
gaagcagggtatgtttgaatgc

SEQ ID NO: 33485 - DNA, 22 bp, synthetic construct
  misc_feature 1..22: note = chemically synthesized
  source 1..22: mol_type = other DNA
gaatgcgaagtccaggctcaaa

SEQ ID NO: 33486 - DNA, 22 bp, synthetic construct
  misc_feature 1..22: note = chemically synthesized
  source 1..22: mol_type = other DNA
aatgcgaagtccaggctcaaaa

SEQ ID NO: 33487 - DNA, 22 bp, synthetic construct
  misc_feature 1..22: note = chemically synthesized
  source 1..22: mol_type = other DNA
aaaaaggggccttagtggctcc

SEQ ID NO: 33488 - DNA, 22 bp, synthetic construct
  misc_feature 1..22: note = chemically synthesized
  source 1..22: mol_type = other DNA
agtggctcctactagactggta

SEQ ID NO: 33489 - DNA, 22 bp, synthetic construct
  misc_feature 1..22: note = chemically synthesized
  source 1..22: mol_type = other DNA
gtggctcctactagactggtat

SEQ ID NO: 33490 - DNA, 22 bp, synthetic construct
  misc_feature 1..22: note = chemically synthesized
  source 1..22: mol_type = other DNA
ctactagactggtatcttaagg

SEQ ID NO: 33491 - DNA, 22 bp, synthetic construct
  misc_feature 1..22: note = chemically synthesized
  source 1..22: mol_type = other DNA
ctagactggtatcttaaggcaa

SEQ ID NO: 33492 - DNA, 22 bp, synthetic construct
  misc_feature 1..22: note = chemically synthesized
  source 1..22: mol_type = other DNA
gactggtatcttaaggcaagga

SEQ ID NO: 33493 - DNA, 22 bp, synthetic construct
  misc_feature 1..22: note = chemically synthesized
  source 1..22: mol_type = other DNA
gtatcttaaggcaaggaaaaca

SEQ ID NO: 33494 - DNA, 22 bp, synthetic construct
  misc_feature 1..22: note = chemically synthesized
  source 1..22: mol_type = other DNA
aaggcaaggaaaacagaatatg

SEQ ID NO: 33495 - DNA, 22 bp, synthetic construct
  misc_feature 1..22: note = chemically synthesized
  source 1..22: mol_type = other DNA
aggcaaggaaaacagaatatgt

SEQ ID NO: 33496 - DNA, 22 bp, synthetic construct
  misc_feature 1..22: note = chemically synthesized
  source 1..22: mol_type = other DNA
atatctaaaaccatgcctagtg

SEQ ID NO: 33497 - DNA, 22 bp, synthetic construct
  misc_feature 1..22: note = chemically synthesized
  source 1..22: mol_type = other DNA
aaaccatgcctagtgcccaggc

SEQ ID NO: 33498 - DNA, 22 bp, synthetic construct
  misc_feature 1..22: note = chemically synthesized
  source 1..22: mol_type = other DNA
gtgcccaggccaggcttgaatc

SEQ ID NO: 33499 - DNA, 22 bp, synthetic construct
  misc_feature 1..22: note = chemically synthesized
  source 1..22: mol_type = other DNA
gaatcaatgctcaacgcatgca

SEQ ID NO: 33500 - DNA, 22 bp, synthetic construct
  misc_feature 1..22: note = chemically synthesized
  source 1..22: mol_type = other DNA
aatcaatgctcaacgcatgcat

SEQ ID NO: 33501 - DNA, 22 bp, synthetic construct
  misc_feature 1..22: note = chemically synthesized
  source 1..22: mol_type = other DNA
aacgcatgcatgtgtaactgaa

SEQ ID NO: 33502 - DNA, 22 bp, synthetic construct
  misc_feature 1..22: note = chemically synthesized
  source 1..22: mol_type = other DNA
aacagaactgcccagaaccttg

SEQ ID NO: 33503 - DNA, 22 bp, synthetic construct
  misc_feature 1..22: note = chemically synthesized
  source 1..22: mol_type = other DNA
cccagaaccttggctcaggcca

SEQ ID NO: 33504 - DNA, 22 bp, synthetic construct
  misc_feature 1..22: note = chemically synthesized
  source 1..22: mol_type = other DNA
ggctcaggccaagtaggccaga

SEQ ID NO: 33505 - DNA, 22 bp, synthetic construct
  misc_feature 1..22: note = chemically synthesized
  source 1..22: mol_type = other DNA
gctcaggccaagtaggccagac

SEQ ID NO: 33506 - DNA, 22 bp, synthetic construct
  misc_feature 1..22: note = chemically synthesized
  source 1..22: mol_type = other DNA
aggccaagtaggccagaccacc

SEQ ID NO: 33507 - DNA, 22 bp, synthetic construct
  misc_feature 1..22: note = chemically synthesized
  source 1..22: mol_type = other DNA
ccctgaatgcagggtttgagaa

SEQ ID NO: 33508 - DNA, 22 bp, synthetic construct
  misc_feature 1..22: note = chemically synthesized
  source 1..22: mol_type = other DNA
cctgaatgcagggtttgagaag

SEQ ID NO: 33509 - DNA, 22 bp, synthetic construct
  misc_feature 1..22: note = chemically synthesized
  source 1..22: mol_type = other DNA
aatgcagggtttgagaagtgcc

SEQ ID NO: 33510 - DNA, 22 bp, synthetic construct
  misc_feature 1..22: note = chemically synthesized
  source 1..22: mol_type = other DNA
gagaagtgccctaatgccctct

SEQ ID NO: 33511 - DNA, 22 bp, synthetic construct
  misc_feature 1..22: note = chemically synthesized
  source 1..22: mol_type = other DNA
agaagtgccctaatgccctcta

SEQ ID NO: 33512 - DNA, 22 bp, synthetic construct
  misc_feature 1..22: note = chemically synthesized
  source 1..22: mol_type = other DNA
atgccctctaactgatgctgag

SEQ ID NO: 33513 - DNA, 22 bp, synthetic construct
  misc_feature 1..22: note = chemically synthesized
  source 1..22: mol_type = other DNA
taactgatgctgagtttgaaga

SEQ ID NO: 33514 - DNA, 22 bp, synthetic construct
  misc_feature 1..22: note = chemically synthesized
  source 1..22: mol_type = other DNA
actgatgctgagtttgaagaat

SEQ ID NO: 33515 - DNA, 22 bp, synthetic construct
  misc_feature 1..22: note = chemically synthesized
  source 1..22: mol_type = other DNA
atgctgagtttgaagaatccat

SEQ ID NO: 33516 - DNA, 22 bp, synthetic construct
  misc_feature 1..22: note = chemically synthesized
  source 1..22: mol_type = other DNA
agtttgaagaatccatcagtta

SEQ ID NO: 33517 - DNA, 22 bp, synthetic construct
  misc_feature 1..22: note = chemically synthesized
  source 1..22: mol_type = other DNA
gaagaatccatcagttaagggg

SEQ ID NO: 33518 - DNA, 22 bp, synthetic construct
  misc_feature 1..22: note = chemically synthesized
  source 1..22: mol_type = other DNA
aagaatccatcagttaagggga

SEQ ID NO: 33519 - DNA, 22 bp, synthetic construct
  misc_feature 1..22: note = chemically synthesized
  source 1..22: mol_type = other DNA
aggggaggtgtttctgagtttg

SEQ ID NO: 33520 - DNA, 22 bp, synthetic construct
  misc_feature 1..22: note = chemically synthesized
  source 1..22: mol_type = other DNA
ctgagtttgaagaatcaaacac

SEQ ID NO: 33521 - DNA, 22 bp, synthetic construct
  misc_feature 1..22: note = chemically synthesized
  source 1..22: mol_type = other DNA
tgagtttgaagaatcaaacacc

SEQ ID NO: 33522 - DNA, 22 bp, synthetic construct
  misc_feature 1..22: note = chemically synthesized
  source 1..22: mol_type = other DNA
agtttgaagaatcaaacacctt

SEQ ID NO: 33523 - DNA, 22 bp, synthetic construct
  misc_feature 1..22: note = chemically synthesized
  source 1..22: mol_type = other DNA
gaagaatcaaacaccttcctaa

SEQ ID NO: 33524 - DNA, 22 bp, synthetic construct
  misc_feature 1..22: note = chemically synthesized
  source 1..22: mol_type = other DNA
aagaatcaaacaccttcctaat

SEQ ID NO: 33525 - DNA, 22 bp, synthetic construct
  misc_feature 1..22: note = chemically synthesized
  source 1..22: mol_type = other DNA
cctaattggtaggaatcctgaa

SEQ ID NO: 33526 - DNA, 22 bp, synthetic construct
  misc_feature 1..22: note = chemically synthesized
  source 1..22: mol_type = other DNA
ctaattggtaggaatcctgaaa

SEQ ID NO: 33527 - DNA, 22 bp, synthetic construct
  misc_feature 1..22: note = chemically synthesized
  source 1..22: mol_type = other DNA
attggtaggaatcctgaaaaca

SEQ ID NO: 33528 - DNA, 22 bp, synthetic construct
  misc_feature 1..22: note = chemically synthesized
  source 1..22: mol_type = other DNA
gtaggaatcctgaaaacactcc

SEQ ID NO: 33529 - DNA, 22 bp, synthetic construct
  misc_feature 1..22: note = chemically synthesized
  source 1..22: mol_type = other DNA
aaaacactccacaccggagtaa

SEQ ID NO: 33530 - DNA, 22 bp, synthetic construct
  misc_feature 1..22: note = chemically synthesized
  source 1..22: mol_type = other DNA
cacaccggagtaaaagactttg

SEQ ID NO: 33531 - DNA, 22 bp, synthetic construct
  misc_feature 1..22: note = chemically synthesized
  source 1..22: mol_type = other DNA
tggttttttatctttatgcctg

SEQ ID NO: 33532 - DNA, 22 bp, synthetic construct
  misc_feature 1..22: note = chemically synthesized
  source 1..22: mol_type = other DNA
ggttttttatctttatgcctga

SEQ ID NO: 33533 - DNA, 22 bp, synthetic construct
  misc_feature 1..22: note = chemically synthesized
  source 1..22: mol_type = other DNA
gttttttatctttatgcctgac

SEQ ID NO: 33534 - DNA, 22 bp, synthetic construct
  misc_feature 1..22: note = chemically synthesized
  source 1..22: mol_type = other DNA
tttatctttatgcctgactaaa

SEQ ID NO: 33535 - DNA, 22 bp, synthetic construct
  misc_feature 1..22: note = chemically synthesized
  source 1..22: mol_type = other DNA
ttatctttatgcctgactaaaa

SEQ ID NO: 33536 - DNA, 22 bp, synthetic construct
  misc_feature 1..22: note = chemically synthesized
  source 1..22: mol_type = other DNA
tatctttatgcctgactaaaag

SEQ ID NO: 33537 - DNA, 22 bp, synthetic construct
  misc_feature 1..22: note = chemically synthesized
  source 1..22: mol_type = other DNA
atctttatgcctgactaaaagt

SEQ ID NO: 33538 - DNA, 22 bp, synthetic construct
  misc_feature 1..22: note = chemically synthesized
  source 1..22: mol_type = other DNA
tctttatgcctgactaaaagtt

SEQ ID NO: 33539 - DNA, 22 bp, synthetic construct
  misc_feature 1..22: note = chemically synthesized
  source 1..22: mol_type = other DNA
tatgcctgactaaaagttaact

SEQ ID NO: 33540 - DNA, 22 bp, synthetic construct
  misc_feature 1..22: note = chemically synthesized
  source 1..22: mol_type = other DNA
atgcctgactaaaagttaactc

SEQ ID NO: 33541 - DNA, 22 bp, synthetic construct
  misc_feature 1..22: note = chemically synthesized
  source 1..22: mol_type = other DNA
tgcctgactaaaagttaactct

SEQ ID NO: 33542 - DNA, 22 bp, synthetic construct
  misc_feature 1..22: note = chemically synthesized
  source 1..22: mol_type = other DNA
actaaaagttaactctcattct

SEQ ID NO: 33543 - DNA, 22 bp, synthetic construct
  misc_feature 1..22: note = chemically synthesized
  source 1..22: mol_type = other DNA
aaagttaactctcattctttca

SEQ ID NO: 33544 - DNA, 22 bp, synthetic construct
  misc_feature 1..22: note = chemically synthesized
  source 1..22: mol_type = other DNA
actctcattctttcattcagca

SEQ ID NO: 33545 - DNA, 22 bp, synthetic construct
  misc_feature 1..22: note = chemically synthesized
  source 1..22: mol_type = other DNA
tcattctttcattcagcaaata

SEQ ID NO: 33546 - DNA, 22 bp, synthetic construct
  misc_feature 1..22: note = chemically synthesized
  source 1..22: mol_type = other DNA
attctttcattcagcaaatatt

SEQ ID NO: 33547 - DNA, 22 bp, synthetic construct
  misc_feature 1..22: note = chemically synthesized
  source 1..22: mol_type = other DNA
tttcattcagcaaatattttgt

SEQ ID NO: 33548 - DNA, 22 bp, synthetic construct
  misc_feature 1..22: note = chemically synthesized
  source 1..22: mol_type = other DNA
tcattcagcaaatattttgtgc

SEQ ID NO: 33549 - DNA, 22 bp, synthetic construct
  misc_feature 1..22: note = chemically synthesized
  source 1..22: mol_type = other DNA
cattcagcaaatattttgtgct

SEQ ID NO: 33550 - DNA, 22 bp, synthetic construct
  misc_feature 1..22: note = chemically synthesized
  source 1..22: mol_type = other DNA
attcagcaaatattttgtgcta

SEQ ID NO: 33551 - DNA, 22 bp, synthetic construct
  misc_feature 1..22: note = chemically synthesized
  source 1..22: mol_type = other DNA
agcaaatattttgtgctagtgc

SEQ ID NO: 33552 - DNA, 22 bp, synthetic construct
  misc_feature 1..22: note = chemically synthesized
  source 1..22: mol_type = other DNA
tgtgctagtgcatgacactgca

SEQ ID NO: 33553 - DNA, 22 bp, synthetic construct
  misc_feature 1..22: note = chemically synthesized
  source 1..22: mol_type = other DNA
gtgctagtgcatgacactgcag

SEQ ID NO: 33554 - DNA, 22 bp, synthetic construct
  misc_feature 1..22: note = chemically synthesized
  source 1..22: mol_type = other DNA
tgctagtgcatgacactgcaga

SEQ ID NO: 33555 - DNA, 22 bp, synthetic construct
  misc_feature 1..22: note = chemically synthesized
  source 1..22: mol_type = other DNA
gtgcatgacactgcagattaat

SEQ ID NO: 33556 - DNA, 22 bp, synthetic construct
  misc_feature 1..22: note = chemically synthesized
  source 1..22: mol_type = other DNA
cagattaatatcgtagatgaac

SEQ ID NO: 33557 - DNA, 22 bp, synthetic construct
  misc_feature 1..22: note = chemically synthesized
  source 1..22: mol_type = other DNA
atatcgtagatgaactgagtct

SEQ ID NO: 33558 - DNA, 22 bp, synthetic construct
  misc_feature 1..22: note = chemically synthesized
  source 1..22: mol_type = other DNA
agtctgggctaggtagagtcaa

SEQ ID NO: 33559 - DNA, 22 bp, synthetic construct
  misc_feature 1..22: note = chemically synthesized
  source 1..22: mol_type = other DNA
ggctaggtagagtcaaaaaaaa

SEQ ID NO: 33560 - DNA, 22 bp, synthetic construct
  misc_feature 1..22: note = chemically synthesized
  source 1..22: mol_type = other DNA
ggtagagtcaaaaaaaaatttc

SEQ ID NO: 33561 - DNA, 22 bp, synthetic construct
  misc_feature 1..22: note = chemically synthesized
  source 1..22: mol_type = other DNA
cctaaaggagcctgtacctaaa

SEQ ID NO: 33562 - DNA, 22 bp, synthetic construct
  misc_feature 1..22: note = chemically synthesized
  source 1..22: mol_type = other DNA
ctaaaggagcctgtacctaaac

SEQ ID NO: 33563 - DNA, 22 bp, synthetic construct
  misc_feature 1..22: note = chemically synthesized
  source 1..22: mol_type = other DNA
aaggagcctgtacctaaactga

SEQ ID NO: 33564 - DNA, 22 bp, synthetic construct
  misc_feature 1..22: note = chemically synthesized
  source 1..22: mol_type = other DNA
tacctaaactgagtcttcagag

SEQ ID NO: 33565 - DNA, 22 bp, synthetic construct
  misc_feature 1..22: note = chemically synthesized
  source 1..22: mol_type = other DNA
aactgagtcttcagagagaagt

SEQ ID NO: 33566 - DNA, 22 bp, synthetic construct
  misc_feature 1..22: note = chemically synthesized
  source 1..22: mol_type = other DNA
agtcttcagagagaagttggaa

SEQ ID NO: 33567 - DNA, 22 bp, synthetic construct
  misc_feature 1..22: note = chemically synthesized
  source 1..22: mol_type = other DNA
cagagagaagttggaactggca

SEQ ID NO: 33568 - DNA, 22 bp, synthetic construct
  misc_feature 1..22: note = chemically synthesized
  source 1..22: mol_type = other DNA
agagagaagttggaactggcaa

SEQ ID NO: 33569 - DNA, 22 bp, synthetic construct
  misc_feature 1..22: note = chemically synthesized
  source 1..22: mol_type = other DNA
gaactggcaaagtgaggaagga

SEQ ID NO: 33570 - DNA, 22 bp, synthetic construct
  misc_feature 1..22: note = chemically synthesized
  source 1..22: mol_type = other DNA
gcaaagtgaggaaggacggggt

SEQ ID NO: 33571 - DNA, 22 bp, synthetic construct
  misc_feature 1..22: note = chemically synthesized
  source 1..22: mol_type = other DNA
gagggaagagtgagtgcaaagg

SEQ ID NO: 33572 - DNA, 22 bp, synthetic construct
  misc_feature 1..22: note = chemically synthesized
  source 1..22: mol_type = other DNA
catgctctagaatccaaaactg

SEQ ID NO: 33573 - DNA, 22 bp, synthetic construct
  misc_feature 1..22: note = chemically synthesized
  source 1..22: mol_type = other DNA
tagaatccaaaactgtgtcagc

SEQ ID NO: 33574 - DNA, 22 bp, synthetic construct
  misc_feature 1..22: note = chemically synthesized
  source 1..22: mol_type = other DNA
gaatccaaaactgtgtcagcca

SEQ ID NO: 33575 - DNA, 22 bp, synthetic construct
  misc_feature 1..22: note = chemically synthesized
  source 1..22: mol_type = other DNA
tgtcagccaaatttgagttgat

SEQ ID NO: 33576 - DNA, 22 bp, synthetic construct
  misc_feature 1..22: note = chemically synthesized
  source 1..22: mol_type = other DNA
gagttgatggagggacagccaa

SEQ ID NO: 33577 - DNA, 22 bp, synthetic construct
  misc_feature 1..22: note = chemically synthesized
  source 1..22: mol_type = other DNA
agttgatggagggacagccaaa

SEQ ID NO: 33578 - DNA, 22 bp, synthetic construct
  misc_feature 1..22: note = chemically synthesized
  source 1..22: mol_type = other DNA
atggagggacagccaaactgag

SEQ ID NO: 33579 - DNA, 22 bp, synthetic construct
  misc_feature 1..22: note = chemically synthesized
  source 1..22: mol_type = other DNA
agatacccaggcggtggttgga

SEQ ID NO: 33580 - DNA, 22 bp, synthetic construct
  misc_feature 1..22: note = chemically synthesized
  source 1..22: mol_type = other DNA
gatttatggatctggatttcag

SEQ ID NO: 33581 - DNA, 22 bp, synthetic construct
  misc_feature 1..22: note = chemically synthesized
  source 1..22: mol_type = other DNA
atggatctggatttcaggggag

SEQ ID NO: 33582 - DNA, 22 bp, synthetic construct
  misc_feature 1..22: note = chemically synthesized
  source 1..22: mol_type = other DNA
tggatctggatttcaggggagt

SEQ ID NO: 33583 - DNA, 22 bp, synthetic construct
  misc_feature 1..22: note = chemically synthesized
  source 1..22: mol_type = other DNA
gatttcaggggagtgggcaggg

SEQ ID NO: 33584 - DNA, 22 bp, synthetic construct
  misc_feature 1..22: note = chemically synthesized
  source 1..22: mol_type = other DNA
caggggagtgggcagggctagg

SEQ ID NO: 33585 - DNA, 22 bp, synthetic construct
  misc_feature 1..22: note = chemically synthesized
  source 1..22: mol_type = other DNA
aggggagtgggcagggctaggg

SEQ ID NO: 33586 - DNA, 22 bp, synthetic construct
  misc_feature 1..22: note = chemically synthesized
  source 1..22: mol_type = other DNA
ggggaatagaactgagggtcat

SEQ ID NO: 33587 - DNA, 22 bp, synthetic construct
  misc_feature 1..22: note = chemically synthesized
  source 1..22: mol_type = other DNA
agggtcatgatgtcagtggtag

SEQ ID NO: 33588 - DNA, 22 bp, synthetic construct
  misc_feature 1..22: note = chemically synthesized
  source 1..22: mol_type = other DNA
aagtcttggaagaaagagtaga

SEQ ID NO: 33589 - DNA, 22 bp, synthetic construct
  misc_feature 1..22: note = chemically synthesized
  source 1..22: mol_type = other DNA
ggaagaaagagtagatagaaac

SEQ ID NO: 33590 - DNA, 22 bp, synthetic construct
  misc_feature 1..22: note = chemically synthesized
  source 1..22: mol_type = other DNA
gaagaaagagtagatagaaact

SEQ ID NO: 33591 - DNA, 22 bp, synthetic construct
  misc_feature 1..22: note = chemically synthesized
  source 1..22: mol_type = other DNA
tgttttctgatgaacattctat

SEQ ID NO: 33592 - DNA, 22 bp, synthetic construct
  misc_feature 1..22: note = chemically synthesized
  source 1..22: mol_type = other DNA
gttttctgatgaacattctatg

SEQ ID NO: 33593 - DNA, 22 bp, synthetic construct
  misc_feature 1..22: note = chemically synthesized
  source 1..22: mol_type = other DNA
ttttctgatgaacattctatga

SEQ ID NO: 33594 - DNA, 22 bp, synthetic construct
  misc_feature 1..22: note = chemically synthesized
  source 1..22: mol_type = other DNA
tctgatgaacattctatgagga

SEQ ID NO: 33595 - DNA, 22 bp, synthetic construct
  misc_feature 1..22: note = chemically synthesized
  source 1..22: mol_type = other DNA
ctgatgaacattctatgaggaa

SEQ ID NO: 33596 - DNA, 22 bp, synthetic construct
  misc_feature 1..22: note = chemically synthesized
  source 1..22: mol_type = other DNA
tgatgaacattctatgaggaag

SEQ ID NO: 33597 - DNA, 22 bp, synthetic construct
  misc_feature 1..22: note = chemically synthesized
  source 1..22: mol_type = other DNA
atgaacattctatgaggaagtt

SEQ ID NO: 33598 - DNA, 22 bp, synthetic construct
  misc_feature 1..22: note = chemically synthesized
  source 1..22: mol_type = other DNA
tatgaggaagttcagcagaggt

SEQ ID NO: 33599 - DNA, 22 bp, synthetic construct
  misc_feature 1..22: note = chemically synthesized
  source 1..22: mol_type = other DNA
tgaggaagttcagcagaggttg

SEQ ID NO: 33600 - DNA, 22 bp, synthetic construct
  misc_feature 1..22: note = chemically synthesized
  source 1..22: mol_type = other DNA
agcagaggttggaaacatcttt

SEQ ID NO: 33601 - DNA, 22 bp, synthetic construct
  misc_feature 1..22: note = chemically synthesized
  source 1..22: mol_type = other DNA
gaaacatctttaccatttataa

SEQ ID NO: 33602 - DNA, 22 bp, synthetic construct
  misc_feature 1..22: note = chemically synthesized
  source 1..22: mol_type = other DNA
taccatttataaataaatttta

SEQ ID NO: 33603 - DNA, 22 bp, synthetic construct
  misc_feature 1..22: note = chemically synthesized
  source 1..22: mol_type = other DNA
accatttataaataaattttat

SEQ ID NO: 33604 - DNA, 22 bp, synthetic construct
  misc_feature 1..22: note = chemically synthesized
  source 1..22: mol_type = other DNA
ccatttataaataaattttatg

SEQ ID NO: 33605 - DNA, 22 bp, synthetic construct
  misc_feature 1..22: note = chemically synthesized
  source 1..22: mol_type = other DNA
ataaataaattttatgtaaaat

SEQ ID NO: 33606 - DNA, 22 bp, synthetic construct
  misc_feature 1..22: note = chemically synthesized
  source 1..22: mol_type = other DNA
taaataaattttatgtaaaatc

SEQ ID NO: 33607 - DNA, 22 bp, synthetic construct
  misc_feature 1..22: note = chemically synthesized
  source 1..22: mol_type = other DNA
tatgtaaaatcctatcctgctg

SEQ ID NO: 33608 - DNA, 22 bp, synthetic construct
  misc_feature 1..22: note = chemically synthesized
  source 1..22: mol_type = other DNA
atgtaaaatcctatcctgctgt

SEQ ID NO: 33609 - DNA, 22 bp, synthetic construct
  misc_feature 1..22: note = chemically synthesized
  source 1..22: mol_type = other DNA
tgtaaaatcctatcctgctgtc

SEQ ID NO: 33610 - DNA, 22 bp, synthetic construct
  misc_feature 1..22: note = chemically synthesized
  source 1..22: mol_type = other DNA
tcctgctgtcatgtttaagcaa

SEQ ID NO: 33611 - DNA, 22 bp, synthetic construct
  misc_feature 1..22: note = chemically synthesized
  source 1..22: mol_type = other DNA
ctgtcatgtttaagcaacttat

SEQ ID NO: 33612 - DNA, 22 bp, synthetic construct
  misc_feature 1..22: note = chemically synthesized
  source 1..22: mol_type = other DNA
tcatgtttaagcaacttattat

SEQ ID NO: 33613 - DNA, 22 bp, synthetic construct
  misc_feature 1..22: note = chemically synthesized
  source 1..22: mol_type = other DNA
aagcaacttattatgcacagca

SEQ ID NO: 33614 - DNA, 22 bp, synthetic construct
  misc_feature 1..22: note = chemically synthesized
  source 1..22: mol_type = other DNA
agcaacttattatgcacagcac

SEQ ID NO: 33615 - DNA, 22 bp, synthetic construct
  misc_feature 1..22: note = chemically synthesized
  source 1..22: mol_type = other DNA
attatgcacagcaccaggacat

SEQ ID NO: 33616 - DNA, 22 bp, synthetic construct
  misc_feature 1..22: note = chemically synthesized
  source 1..22: mol_type = other DNA
ttatgcacagcaccaggacatc

SEQ ID NO: 33617 - DNA, 22 bp, synthetic construct
  misc_feature 1..22: note = chemically synthesized
  source 1..22: mol_type = other DNA
tgcacagcaccaggacatcaat

SEQ ID NO: 33618 - DNA, 22 bp, synthetic construct
  misc_feature 1..22: note = chemically synthesized
  source 1..22: mol_type = other DNA
catgccagtctttgctctcagt

SEQ ID NO: 33619 - DNA, 22 bp, synthetic construct
  misc_feature 1..22: note = chemically synthesized
  source 1..22: mol_type = other DNA
tgctctcagtttcaaaggcatt

SEQ ID NO: 33620 - DNA, 22 bp, synthetic construct
  misc_feature 1..22: note = chemically synthesized
  source 1..22: mol_type = other DNA
gctctcagtttcaaaggcattc

SEQ ID NO: 33621 - DNA, 22 bp, synthetic construct
  misc_feature 1..22: note = chemically synthesized
  source 1..22: mol_type = other DNA
ctctcagtttcaaaggcattct

SEQ ID NO: 33622 - DNA, 22 bp, synthetic construct
  misc_feature 1..22: note = chemically synthesized
  source 1..22: mol_type = other DNA
tcagtttcaaaggcattcttcc

SEQ ID NO: 33623 - DNA, 22 bp, synthetic construct
  misc_feature 1..22: note = chemically synthesized
  source 1..22: mol_type = other DNA
agtttcaaaggcattcttccct

SEQ ID NO: 33624 - DNA, 22 bp, synthetic construct
  misc_feature 1..22: note = chemically synthesized
  source 1..22: mol_type = other DNA
caaaggcattcttccctgcctg

SEQ ID NO: 33625 - DNA, 22 bp, synthetic construct
  misc_feature 1..22: note = chemically synthesized
  source 1..22: mol_type = other DNA
aaaggcattcttccctgcctgc

SEQ ID NO: 33626 - DNA, 22 bp, synthetic construct
  misc_feature 1..22: note = chemically synthesized
  source 1..22: mol_type = other DNA
ttccctgcctgctgtctaatct

SEQ ID NO: 33627 - DNA, 22 bp, synthetic construct
  misc_feature 1..22: note = chemically synthesized
  source 1..22: mol_type = other DNA
ccctgcctgctgtctaatcttt

SEQ ID NO: 33628 - DNA, 22 bp, synthetic construct
  misc_feature 1..22: note = chemically synthesized
  source 1..22: mol_type = other DNA
cctgcctgctgtctaatcttta

SEQ ID NO: 33629 - DNA, 22 bp, synthetic construct
  misc_feature 1..22: note = chemically synthesized
  source 1..22: mol_type = other DNA
cctgctgtctaatctttacaaa

SEQ ID NO: 33630 - DNA, 22 bp, synthetic construct
  misc_feature 1..22: note = chemically synthesized
  source 1..22: mol_type = other DNA
ctgtctaatctttacaaagaaa

SEQ ID NO: 33631 - DNA, 22 bp, synthetic construct
  misc_feature 1..22: note = chemically synthesized
  source 1..22: mol_type = other DNA
tctaatctttacaaagaaaggt

SEQ ID NO: 33632 - DNA, 22 bp, synthetic construct
  misc_feature 1..22: note = chemically synthesized
  source 1..22: mol_type = other DNA
atctttacaaagaaaggttaac

SEQ ID NO: 33633 - DNA, 22 bp, synthetic construct
  misc_feature 1..22: note = chemically synthesized
  source 1..22: mol_type = other DNA
tacaaagaaaggttaactccag

SEQ ID NO: 33634 - DNA, 22 bp, synthetic construct
  misc_feature 1..22: note = chemically synthesized
  source 1..22: mol_type = other DNA
acaaagaaaggttaactccaga

SEQ ID NO: 33635 - DNA, 22 bp, synthetic construct
  misc_feature 1..22: note = chemically synthesized
  source 1..22: mol_type = other DNA
caaagaaaggttaactccagag

SEQ ID NO: 33636 - DNA, 22 bp, synthetic construct
  misc_feature 1..22: note = chemically synthesized
  source 1..22: mol_type = other DNA
actccagaggtcaggaatctga

SEQ ID NO: 33637 - DNA, 22 bp, synthetic construct
  misc_feature 1..22: note = chemically synthesized
  source 1..22: mol_type = other DNA
cagaggtcaggaatctgaacac

SEQ ID NO: 33638 - DNA, 22 bp, synthetic construct
  misc_feature 1..22: note = chemically synthesized
  source 1..22: mol_type = other DNA
aacacagaaaaccagattgcat

SEQ ID NO: 33639 - DNA, 22 bp, synthetic construct
  misc_feature 1..22: note = chemically synthesized
  source 1..22: mol_type = other DNA
catcatattcattctaatcaat

SEQ ID NO: 33640 - DNA, 22 bp, synthetic construct
  misc_feature 1..22: note = chemically synthesized
  source 1..22: mol_type = other DNA
attctaatcaataaacattata

SEQ ID NO: 33641 - DNA, 22 bp, synthetic construct
  misc_feature 1..22: note = chemically synthesized
  source 1..22: mol_type = other DNA
taatcaataaacattatataat

SEQ ID NO: 33642 - DNA, 22 bp, synthetic construct
  misc_feature 1..22: note = chemically synthesized
  source 1..22: mol_type = other DNA
atcaataaacattatataattt

SEQ ID NO: 33643 - DNA, 22 bp, synthetic construct
  misc_feature 1..22: note = chemically synthesized
  source 1..22: mol_type = other DNA
tataatttttaaaactgtttct

SEQ ID NO: 33644 - DNA, 22 bp, synthetic construct
  misc_feature 1..22: note = chemically synthesized
  source 1..22: mol_type = other DNA
ttaaaactgtttctcatctttt

SEQ ID NO: 33645 - DNA, 22 bp, synthetic construct
  misc_feature 1..22: note = chemically synthesized
  source 1..22: mol_type = other DNA
taaaactgtttctcatctttta

SEQ ID NO: 33646 - DNA, 22 bp, synthetic construct
  misc_feature 1..22: note = chemically synthesized
  source 1..22: mol_type = other DNA
aaaactgtttctcatcttttat

SEQ ID NO: 33647 - DNA, 22 bp, synthetic construct
  misc_feature 1..22: note = chemically synthesized
  source 1..22: mol_type = other DNA
aaactgtttctcatcttttatt

SEQ ID NO: 33648 - DNA, 22 bp, synthetic construct
  misc_feature 1..22: note = chemically synthesized
  source 1..22: mol_type = other DNA
tttctcatcttttatttcttca

SEQ ID NO: 33649 - DNA, 22 bp, synthetic construct
  misc_feature 1..22: note = chemically synthesized
  source 1..22: mol_type = other DNA
ctcatcttttatttcttcattt

SEQ ID NO: 33650 - DNA, 22 bp, synthetic construct
  misc_feature 1..22: note = chemically synthesized
  source 1..22: mol_type = other DNA
tcatcttttatttcttcatttt

SEQ ID NO: 33651 - DNA, 22 bp, synthetic construct
  misc_feature 1..22: note = chemically synthesized
  source 1..22: mol_type = other DNA
atcttttatttcttcattttaa

SEQ ID NO: 33652 - DNA, 22 bp, synthetic construct
  misc_feature 1..22: note = chemically synthesized
  source 1..22: mol_type = other DNA
ttatttcttcattttaatgaat

SEQ ID NO: 33653 - DNA, 22 bp, synthetic construct
  misc_feature 1..22: note = chemically synthesized
  source 1..22: mol_type = other DNA
tatttcttcattttaatgaata

SEQ ID NO: 33654 - DNA, 22 bp, synthetic construct
  misc_feature 1..22: note = chemically synthesized
  source 1..22: mol_type = other DNA
atttcttcattttaatgaatat

SEQ ID NO: 33655 - DNA, 22 bp, synthetic construct
  misc_feature 1..22: note = chemically synthesized
  source 1..22: mol_type = other DNA
tttcttcattttaatgaatatg

SEQ ID NO: 33656 - DNA, 22 bp, synthetic construct
  misc_feature 1..22: note = chemically synthesized
  source 1..22: mol_type = other DNA
cttcattttaatgaatatgtca

SEQ ID NO: 33657 - DNA, 22 bp, synthetic construct
  misc_feature 1..22: note = chemically synthesized
  source 1..22: mol_type = other DNA
ttcattttaatgaatatgtcaa

SEQ ID NO: 33658 - DNA, 22 bp, synthetic construct
  misc_feature 1..22: note = chemically synthesized
  source 1..22: mol_type = other DNA
cattttaatgaatatgtcaaca

SEQ ID NO: 33659 - DNA, 22 bp, synthetic construct
  misc_feature 1..22: note = chemically synthesized
  source 1..22: mol_type = other DNA
attttaatgaatatgtcaacac

SEQ ID NO: 33660 - DNA, 22 bp, synthetic construct
  misc_feature 1..22: note = chemically synthesized
  source 1..22: mol_type = other DNA
taatgaatatgtcaacacaaag

SEQ ID NO: 33661 - DNA, 22 bp, synthetic construct
  misc_feature 1..22: note = chemically synthesized
  source 1..22: mol_type = other DNA
aatgaatatgtcaacacaaagc

SEQ ID NO: 33662 - DNA, 22 bp, synthetic construct
  misc_feature 1..22: note = chemically synthesized
  source 1..22: mol_type = other DNA
atgaatatgtcaacacaaagcc

SEQ ID NO: 33663 - DNA, 22 bp, synthetic construct
  misc_feature 1..22: note = chemically synthesized
  source 1..22: mol_type = other DNA
acacaaaagtacaactggggta

SEQ ID NO: 33664 - DNA, 22 bp, synthetic construct
  misc_feature 1..22: note = chemically synthesized
  source 1..22: mol_type = other DNA
cacaaaagtacaactggggtaa

SEQ ID NO: 33665 - DNA, 22 bp, synthetic construct
  misc_feature 1..22: note = chemically synthesized
  source 1..22: mol_type = other DNA
gggtaagaaaattcaaaagata

SEQ ID NO: 33666 - DNA, 22 bp, synthetic construct
  misc_feature 1..22: note = chemically synthesized
  source 1..22: mol_type = other DNA
aaaagataaagtaataaaatta

SEQ ID NO: 33667 - DNA, 22 bp, synthetic construct
  misc_feature 1..22: note = chemically synthesized
  source 1..22: mol_type = other DNA
aatttaaaatgaaataccctat

SEQ ID NO: 33668 - DNA, 22 bp, synthetic construct
  misc_feature 1..22: note = chemically synthesized
  source 1..22: mol_type = other DNA
aaaatgaaataccctatgtatt

SEQ ID NO: 33669 - DNA, 22 bp, synthetic construct
  misc_feature 1..22: note = chemically synthesized
  source 1..22: mol_type = other DNA
aaatgaaataccctatgtattt

SEQ ID NO: 33670 - DNA, 22 bp, synthetic construct
  misc_feature 1..22: note = chemically synthesized
  source 1..22: mol_type = other DNA
tgtatttgagtaagttgcttag

SEQ ID NO: 33671 - DNA, 22 bp, synthetic construct
  misc_feature 1..22: note = chemically synthesized
  source 1..22: mol_type = other DNA
gagtaagttgcttagcttctcc

SEQ ID NO: 33672 - DNA, 22 bp, synthetic construct
  misc_feature 1..22: note = chemically synthesized
  source 1..22: mol_type = other DNA
agtaagttgcttagcttctccc

SEQ ID NO: 33673 - DNA, 22 bp, synthetic construct
  misc_feature 1..22: note = chemically synthesized
  source 1..22: mol_type = other DNA
cttagcttctcccaaccttggt

SEQ ID NO: 33674 - DNA, 22 bp, synthetic construct
  misc_feature 1..22: note = chemically synthesized
  source 1..22: mol_type = other DNA
agcttctcccaaccttggtttc

SEQ ID NO: 33675 - DNA, 22 bp, synthetic construct
  misc_feature 1..22: note = chemically synthesized
  source 1..22: mol_type = other DNA
gcttctcccaaccttggtttcc

SEQ ID NO: 33676 - DNA, 22 bp, synthetic construct
  misc_feature 1..22: note = chemically synthesized
  source 1..22: mol_type = other DNA
ctcccaaccttggtttcctcat

SEQ ID NO: 33677 - DNA, 22 bp, synthetic construct
  misc_feature 1..22: note = chemically synthesized
  source 1..22: mol_type = other DNA
tcccaaccttggtttcctcatt

SEQ ID NO: 33678 - DNA, 22 bp, synthetic construct
  misc_feature 1..22: note = chemically synthesized
  source 1..22: mol_type = other DNA
ccaaccttggtttcctcatttc

SEQ ID NO: 33679 - DNA, 22 bp, synthetic construct
  misc_feature 1..22: note = chemically synthesized
  source 1..22: mol_type = other DNA
ggtttcctcatttctaaaacga

SEQ ID NO: 33680 - DNA, 22 bp, synthetic construct
  misc_feature 1..22: note = chemically synthesized
  source 1..22: mol_type = other DNA
gtttcctcatttctaaaacgaa

SEQ ID NO: 33681 - DNA, 22 bp, synthetic construct
  misc_feature 1..22: note = chemically synthesized
  source 1..22: mol_type = other DNA
cctcatttctaaaacgaagaac

SEQ ID NO: 33682 - DNA, 22 bp, synthetic construct
  misc_feature 1..22: note = chemically synthesized
  source 1..22: mol_type = other DNA
ctcatttctaaaacgaagaact

SEQ ID NO: 33683 - DNA, 22 bp, synthetic construct
  misc_feature 1..22: note = chemically synthesized
  source 1..22: mol_type = other DNA
atttctaaaacgaagaacttgc

SEQ ID NO: 33684 - DNA, 22 bp, synthetic construct
  misc_feature 1..22: note = chemically synthesized
  source 1..22: mol_type = other DNA
ctaaaacgaagaacttgcttaa

SEQ ID NO: 33685 - DNA, 22 bp, synthetic construct
  misc_feature 1..22: note = chemically synthesized
  source 1..22: mol_type = other DNA
taaaacgaagaacttgcttaat

SEQ ID NO: 33686 - DNA, 22 bp, synthetic construct
  misc_feature 1..22: note = chemically synthesized
  source 1..22: mol_type = other DNA
aaacgaagaacttgcttaatat

SEQ ID NO: 33687 - DNA, 22 bp, synthetic construct
  misc_feature 1..22: note = chemically synthesized
  source 1..22: mol_type = other DNA
gcttaatattcaggctctgggc

SEQ ID NO: 33688 - DNA, 22 bp, synthetic construct
  misc_feature 1..22: note = chemically synthesized
  source 1..22: mol_type = other DNA
cttaatattcaggctctgggcc

SEQ ID NO: 33689 - DNA, 22 bp, synthetic construct
  misc_feature 1..22: note = chemically synthesized
  source 1..22: mol_type = other DNA
aatattcaggctctgggcccca

SEQ ID NO: 33690 - DNA, 22 bp, synthetic construct
  misc_feature 1..22: note = chemically synthesized
  source 1..22: mol_type = other DNA
atattcaggctctgggccccac

SEQ ID NO: 33691 - DNA, 22 bp, synthetic construct
  misc_feature 1..22: note = chemically synthesized
  source 1..22: mol_type = other DNA
aggctctgggccccaccaccaa

SEQ ID NO: 33692 - DNA, 22 bp, synthetic construct
  misc_feature 1..22: note = chemically synthesized
  source 1..22: mol_type = other DNA
tgggccccaccaccaaatcctt

SEQ ID NO: 33693 - DNA, 22 bp, synthetic construct
  misc_feature 1..22: note = chemically synthesized
  source 1..22: mol_type = other DNA
ggccccaccaccaaatccttga

SEQ ID NO: 33694 - DNA, 22 bp, synthetic construct
  misc_feature 1..22: note = chemically synthesized
  source 1..22: mol_type = other DNA
gattcactggctctgggtctgt

SEQ ID NO: 33695 - DNA, 22 bp, synthetic construct
  misc_feature 1..22: note = chemically synthesized
  source 1..22: mol_type = other DNA
attcactggctctgggtctgta

SEQ ID NO: 33696 - DNA, 22 bp, synthetic construct
  misc_feature 1..22: note = chemically synthesized
  source 1..22: mol_type = other DNA
actggctctgggtctgtatgta

SEQ ID NO: 33697 - DNA, 22 bp, synthetic construct
  misc_feature 1..22: note = chemically synthesized
  source 1..22: mol_type = other DNA
gctctgggtctgtatgtaacaa

SEQ ID NO: 33698 - DNA, 22 bp, synthetic construct
  misc_feature 1..22: note = chemically synthesized
  source 1..22: mol_type = other DNA
tgggtctgtatgtaacaagctt

SEQ ID NO: 33699 - DNA, 22 bp, synthetic construct
  misc_feature 1..22: note = chemically synthesized
  source 1..22: mol_type = other DNA
ggtctgtatgtaacaagcttct

SEQ ID NO: 33700 - DNA, 22 bp, synthetic construct
  misc_feature 1..22: note = chemically synthesized
  source 1..22: mol_type = other DNA
tatgtaacaagcttctggagtg

SEQ ID NO: 33701 - DNA, 22 bp, synthetic construct
  misc_feature 1..22: note = chemically synthesized
  source 1..22: mol_type = other DNA
ctggagtgattctaatgattag

SEQ ID NO: 33702 - DNA, 22 bp, synthetic construct
  misc_feature 1..22: note = chemically synthesized
  source 1..22: mol_type = other DNA
tggagtgattctaatgattagc

SEQ ID NO: 33703 - DNA, 22 bp, synthetic construct
  misc_feature 1..22: note = chemically synthesized
  source 1..22: mol_type = other DNA
gagtgattctaatgattagcca

SEQ ID NO: 33704 - DNA, 22 bp, synthetic construct
  misc_feature 1..22: note = chemically synthesized
  source 1..22: mol_type = other DNA
taatgattagccagagacagga

SEQ ID NO: 33705 - DNA, 22 bp, synthetic construct
  misc_feature 1..22: note = chemically synthesized
  source 1..22: mol_type = other DNA
atgattagccagagacaggacc

SEQ ID NO: 33706 - DNA, 22 bp, synthetic construct
  misc_feature 1..22: note = chemically synthesized
  source 1..22: mol_type = other DNA
gccagagacaggacctactatt

SEQ ID NO: 33707 - DNA, 22 bp, synthetic construct
  misc_feature 1..22: note = chemically synthesized
  source 1..22: mol_type = other DNA
ctattctacgtaactgatttcc

SEQ ID NO: 33708 - DNA, 22 bp, synthetic construct
  misc_feature 1..22: note = chemically synthesized
  source 1..22: mol_type = other DNA
ttctacgtaactgatttcctct

SEQ ID NO: 33709 - DNA, 22 bp, synthetic construct
  misc_feature 1..22: note = chemically synthesized
  source 1..22: mol_type = other DNA
tacgtaactgatttcctcttgc

SEQ ID NO: 33710 - DNA, 22 bp, synthetic construct
  misc_feature 1..22: note = chemically synthesized
  source 1..22: mol_type = other DNA
cgtaactgatttcctcttgctg

SEQ ID NO: 33711 - DNA, 22 bp, synthetic construct
  misc_feature 1..22: note = chemically synthesized
  source 1..22: mol_type = other DNA
atttcctcttgctgctgtaaaa

SEQ ID NO: 33712 - DNA, 22 bp, synthetic construct
  misc_feature 1..22: note = chemically synthesized
  source 1..22: mol_type = other DNA
cctcttgctgctgtaaaaaatt

SEQ ID NO: 33713 - DNA, 22 bp, synthetic construct
  misc_feature 1..22: note = chemically synthesized
  source 1..22: mol_type = other DNA
ctcttgctgctgtaaaaaatta

SEQ ID NO: 33714 - DNA, 22 bp, synthetic construct
  misc_feature 1..22: note = chemically synthesized
  source 1..22: mol_type = other DNA
ttgctgctgtaaaaaattacca

SEQ ID NO: 33715 - DNA, 22 bp, synthetic construct
  misc_feature 1..22: note = chemically synthesized
  source 1..22: mol_type = other DNA
gctgctgtaaaaaattaccaca

SEQ ID NO: 33716 - DNA, 22 bp, synthetic construct
  misc_feature 1..22: note = chemically synthesized
  source 1..22: mol_type = other DNA
ctgctgtaaaaaattaccacaa

SEQ ID NO: 33717 - DNA, 22 bp, synthetic construct
  misc_feature 1..22: note = chemically synthesized
  source 1..22: mol_type = other DNA
ctgtaaaaaattaccacaaatt

SEQ ID NO: 33718 - DNA, 22 bp, synthetic construct
  misc_feature 1..22: note = chemically synthesized
  source 1..22: mol_type = other DNA
taaaaaattaccacaaatttat

SEQ ID NO: 33719 - DNA, 22 bp, synthetic construct
  misc_feature 1..22: note = chemically synthesized
  source 1..22: mol_type = other DNA
ccacaaatttattggcttaaaa

SEQ ID NO: 33720 - DNA, 22 bp, synthetic construct
  misc_feature 1..22: note = chemically synthesized
  source 1..22: mol_type = other DNA
attggcttaaaacaacacaaat

SEQ ID NO: 33721 - DNA, 22 bp, synthetic construct
  misc_feature 1..22: note = chemically synthesized
  source 1..22: mol_type = other DNA
ttggcttaaaacaacacaaatg

SEQ ID NO: 33722 - DNA, 22 bp, synthetic construct
  misc_feature 1..22: note = chemically synthesized
  source 1..22: mol_type = other DNA
gcttaaaacaacacaaatgtat

SEQ ID NO: 33723 - DNA, 22 bp, synthetic construct
  misc_feature 1..22: note = chemically synthesized
  source 1..22: mol_type = other DNA
aaaacaacacaaatgtattatc

SEQ ID NO: 33724 - DNA, 22 bp, synthetic construct
  misc_feature 1..22: note = chemically synthesized
  source 1..22: mol_type = other DNA
aaacaacacaaatgtattatct

SEQ ID NO: 33725 - DNA, 22 bp, synthetic construct
  misc_feature 1..22: note = chemically synthesized
  source 1..22: mol_type = other DNA
tcttgaagttgtggaggtcaga

SEQ ID NO: 33726 - DNA, 22 bp, synthetic construct
  misc_feature 1..22: note = chemically synthesized
  source 1..22: mol_type = other DNA
gaagttgtggaggtcagaagtc

SEQ ID NO: 33727 - DNA, 22 bp, synthetic construct
  misc_feature 1..22: note = chemically synthesized
  source 1..22: mol_type = other DNA
aagttgtggaggtcagaagtct

SEQ ID NO: 33728 - DNA, 22 bp, synthetic construct
  misc_feature 1..22: note = chemically synthesized
  source 1..22: mol_type = other DNA
tggaggtcagaagtctgaaatc

SEQ ID NO: 33729 - DNA, 22 bp, synthetic construct
  misc_feature 1..22: note = chemically synthesized
  source 1..22: mol_type = other DNA
aaatcggtttcactgggctaaa

SEQ ID NO: 33730 - DNA, 22 bp, synthetic construct
  misc_feature 1..22: note = chemically synthesized
  source 1..22: mol_type = other DNA
cactgggctaaagtcgaggtgt

SEQ ID NO: 33731 - DNA, 22 bp, synthetic construct
  misc_feature 1..22: note = chemically synthesized
  source 1..22: mol_type = other DNA
actgggctaaagtcgaggtgtc

SEQ ID NO: 33732 - DNA, 22 bp, synthetic construct
  misc_feature 1..22: note = chemically synthesized
  source 1..22: mol_type = other DNA
ggctaaagtcgaggtgtcagtg

SEQ ID NO: 33733 - DNA, 22 bp, synthetic construct
  misc_feature 1..22: note = chemically synthesized
  source 1..22: mol_type = other DNA
aagtcgaggtgtcagtgtggct

SEQ ID NO: 33734 - DNA, 22 bp, synthetic construct
  misc_feature 1..22: note = chemically synthesized
  source 1..22: mol_type = other DNA
tttcttctggagactctatgag

SEQ ID NO: 33735 - DNA, 22 bp, synthetic construct
  misc_feature 1..22: note = chemically synthesized
  source 1..22: mol_type = other DNA
cttctggagactctatgagaga

SEQ ID NO: 33736 - DNA, 22 bp, synthetic construct
  misc_feature 1..22: note = chemically synthesized
  source 1..22: mol_type = other DNA
ttctggagactctatgagagat

SEQ ID NO: 33737 - DNA, 22 bp, synthetic construct
  misc_feature 1..22: note = chemically synthesized
  source 1..22: mol_type = other DNA
ctggagactctatgagagattg

SEQ ID NO: 33738 - DNA, 22 bp, synthetic construct
  misc_feature 1..22: note = chemically synthesized
  source 1..22: mol_type = other DNA
tggagactctatgagagattgt

SEQ ID NO: 33739 - DNA, 22 bp, synthetic construct
  misc_feature 1..22: note = chemically synthesized
  source 1..22: mol_type = other DNA
gagactctatgagagattgtgt

SEQ ID NO: 33740 - DNA, 22 bp, synthetic construct
  misc_feature 1..22: note = chemically synthesized
  source 1..22: mol_type = other DNA
tatgagagattgtgttttcctg

SEQ ID NO: 33741 - DNA, 22 bp, synthetic construct
  misc_feature 1..22: note = chemically synthesized
  source 1..22: mol_type = other DNA
tgagagattgtgttttcctgcc

SEQ ID NO: 33742 - DNA, 22 bp, synthetic construct
  misc_feature 1..22: note = chemically synthesized
  source 1..22: mol_type = other DNA
tgttttcctgccttttccatgg

SEQ ID NO: 33743 - DNA, 22 bp, synthetic construct
  misc_feature 1..22: note = chemically synthesized
  source 1..22: mol_type = other DNA
tcctgccttttccatggattct

SEQ ID NO: 33744 - DNA, 22 bp, synthetic construct
  misc_feature 1..22: note = chemically synthesized
  source 1..22: mol_type = other DNA
cctgccttttccatggattctg

SEQ ID NO: 33745 - DNA, 22 bp, synthetic construct
  misc_feature 1..22: note = chemically synthesized
  source 1..22: mol_type = other DNA
ctgccttttccatggattctgt

SEQ ID NO: 33746 - DNA, 22 bp, synthetic construct
  misc_feature 1..22: note = chemically synthesized
  source 1..22: mol_type = other DNA
ccttttccatggattctgtttc

SEQ ID NO: 33747 - DNA, 22 bp, synthetic construct
  misc_feature 1..22: note = chemically synthesized
  source 1..22: mol_type = other DNA
ttccatggattctgtttcctct

SEQ ID NO: 33748 - DNA, 22 bp, synthetic construct
  misc_feature 1..22: note = chemically synthesized
  source 1..22: mol_type = other DNA
tccatggattctgtttcctctt

SEQ ID NO: 33749 - DNA, 22 bp, synthetic construct
  misc_feature 1..22: note = chemically synthesized
  source 1..22: mol_type = other DNA
ccatggattctgtttcctcttc

SEQ ID NO: 33750 - DNA, 22 bp, synthetic construct
  misc_feature 1..22: note = chemically synthesized
  source 1..22: mol_type = other DNA
catggattctgtttcctcttct

SEQ ID NO: 33751 - DNA, 22 bp, synthetic construct
  misc_feature 1..22: note = chemically synthesized
  source 1..22: mol_type = other DNA
tgtttcctcttctagaggctac

SEQ ID NO: 33752 - DNA, 22 bp, synthetic construct
  misc_feature 1..22: note = chemically synthesized
  source 1..22: mol_type = other DNA
tttcctcttctagaggctaccc

SEQ ID NO: 33753 - DNA, 22 bp, synthetic construct
  misc_feature 1..22: note = chemically synthesized
  source 1..22: mol_type = other DNA
cctcttctagaggctacccaca

SEQ ID NO: 33754 - DNA, 22 bp, synthetic construct
  misc_feature 1..22: note = chemically synthesized
  source 1..22: mol_type = other DNA
ctcttctagaggctacccacat

SEQ ID NO: 33755 - DNA, 22 bp, synthetic construct
  misc_feature 1..22: note = chemically synthesized
  source 1..22: mol_type = other DNA
ttctagaggctacccacattcc

SEQ ID NO: 33756 - DNA, 22 bp, synthetic construct
  misc_feature 1..22: note = chemically synthesized
  source 1..22: mol_type = other DNA
ctagaggctacccacattcctt

SEQ ID NO: 33757 - DNA, 22 bp, synthetic construct
  misc_feature 1..22: note = chemically synthesized
  source 1..22: mol_type = other DNA
tagaggctacccacattccttg

SEQ ID NO: 33758 - DNA, 22 bp, synthetic construct
  misc_feature 1..22: note = chemically synthesized
  source 1..22: mol_type = other DNA
gaggctacccacattccttggt

SEQ ID NO: 33759 - DNA, 22 bp, synthetic construct
  misc_feature 1..22: note = chemically synthesized
  source 1..22: mol_type = other DNA
cccacattccttggtttgtagc

SEQ ID NO: 33760 - DNA, 22 bp, synthetic construct
  misc_feature 1..22: note = chemically synthesized
  source 1..22: mol_type = other DNA
cttggtttgtagcctcttcctc

SEQ ID NO: 33761 - DNA, 22 bp, synthetic construct
  misc_feature 1..22: note = chemically synthesized
  source 1..22: mol_type = other DNA
ggtttgtagcctcttcctcgat

SEQ ID NO: 33762 - DNA, 22 bp, synthetic construct
  misc_feature 1..22: note = chemically synthesized
  source 1..22: mol_type = other DNA
gtttgtagcctcttcctcgatc

SEQ ID NO: 33763 - DNA, 22 bp, synthetic construct
  misc_feature 1..22: note = chemically synthesized
  source 1..22: mol_type = other DNA
gtagcctcttcctcgatcttca

SEQ ID NO: 33764 - DNA, 22 bp, synthetic construct
  misc_feature 1..22: note = chemically synthesized
  source 1..22: mol_type = other DNA
tagcctcttcctcgatcttcaa

SEQ ID NO: 33765 - DNA, 22 bp, synthetic construct
  misc_feature 1..22: note = chemically synthesized
  source 1..22: mol_type = other DNA
ttcctcgatcttcaaaaaaatg

SEQ ID NO: 33766 - DNA, 22 bp, synthetic construct
  misc_feature 1..22: note = chemically synthesized
  source 1..22: mol_type = other DNA
cctcgatcttcaaaaaaatgta

SEQ ID NO: 33767 - DNA, 22 bp, synthetic construct
  misc_feature 1..22: note = chemically synthesized
  source 1..22: mol_type = other DNA
ctcgatcttcaaaaaaatgtat

SEQ ID NO: 33768 - DNA, 22 bp, synthetic construct
  misc_feature 1..22: note = chemically synthesized
  source 1..22: mol_type = other DNA
gatcttcaaaaaaatgtatctc

SEQ ID NO: 33769 - DNA, 22 bp, synthetic construct
  misc_feature 1..22: note = chemically synthesized
  source 1..22: mol_type = other DNA
caaaaaaatgtatctctgcttt

SEQ ID NO: 33770 - DNA, 22 bp, synthetic construct
  misc_feature 1..22: note = chemically synthesized
  source 1..22: mol_type = other DNA
aaaaaaatgtatctctgctttt

SEQ ID NO: 33771 - DNA, 22 bp, synthetic construct
  misc_feature 1..22: note = chemically synthesized
  source 1..22: mol_type = other DNA
tgcttttgtaatcacgtcacat

SEQ ID NO: 33772 - DNA, 22 bp, synthetic construct
  misc_feature 1..22: note = chemically synthesized
  source 1..22: mol_type = other DNA
cttttgtaatcacgtcacattt

SEQ ID NO: 33773 - DNA, 22 bp, synthetic construct
  misc_feature 1..22: note = chemically synthesized
  source 1..22: mol_type = other DNA
ttgtaatcacgtcacattttct

SEQ ID NO: 33774 - DNA, 22 bp, synthetic construct
  misc_feature 1..22: note = chemically synthesized
  source 1..22: mol_type = other DNA
tgtaatcacgtcacattttctc

SEQ ID NO: 33775 - DNA, 22 bp, synthetic construct
  misc_feature 1..22: note = chemically synthesized
  source 1..22: mol_type = other DNA
gtaatcacgtcacattttctcc

SEQ ID NO: 33776 - DNA, 22 bp, synthetic construct
  misc_feature 1..22: note = chemically synthesized
  source 1..22: mol_type = other DNA
taatcacgtcacattttctcct

SEQ ID NO: 33777 - DNA, 22 bp, synthetic construct
  misc_feature 1..22: note = chemically synthesized
  source 1..22: mol_type = other DNA
tctcctcttataagtcaaatct

SEQ ID NO: 33778 - DNA, 22 bp, synthetic construct
  misc_feature 1..22: note = chemically synthesized
  source 1..22: mol_type = other DNA
ctcctcttataagtcaaatctc

SEQ ID NO: 33779 - DNA, 22 bp, synthetic construct
  misc_feature 1..22: note = chemically synthesized
  source 1..22: mol_type = other DNA
tcctcttataagtcaaatctcc

SEQ ID NO: 33780 - DNA, 22 bp, synthetic construct
  misc_feature 1..22: note = chemically synthesized
  source 1..22: mol_type = other DNA
ctcttataagtcaaatctccct

SEQ ID NO: 33781 - DNA, 22 bp, synthetic construct
  misc_feature 1..22: note = chemically synthesized
  source 1..22: mol_type = other DNA
ttataagtcaaatctccctttg

SEQ ID NO: 33782 - DNA, 22 bp, synthetic construct
  misc_feature 1..22: note = chemically synthesized
  source 1..22: mol_type = other DNA
ataagtcaaatctccctttgcc

SEQ ID NO: 33783 - DNA, 22 bp, synthetic construct
  misc_feature 1..22: note = chemically synthesized
  source 1..22: mol_type = other DNA
taagtcaaatctccctttgcct

SEQ ID NO: 33784 - DNA, 22 bp, synthetic construct
  misc_feature 1..22: note = chemically synthesized
  source 1..22: mol_type = other DNA
cctttgcctccctcttataatg

SEQ ID NO: 33785 - DNA, 22 bp, synthetic construct
  misc_feature 1..22: note = chemically synthesized
  source 1..22: mol_type = other DNA
tgcctccctcttataatgacac

SEQ ID NO: 33786 - DNA, 22 bp, synthetic construct
  misc_feature 1..22: note = chemically synthesized
  source 1..22: mol_type = other DNA
gcctccctcttataatgacact

SEQ ID NO: 33787 - DNA, 22 bp, synthetic construct
  misc_feature 1..22: note = chemically synthesized
  source 1..22: mol_type = other DNA
cctccctcttataatgacactt

SEQ ID NO: 33788 - DNA, 22 bp, synthetic construct
  misc_feature 1..22: note = chemically synthesized
  source 1..22: mol_type = other DNA
cctcttataatgacacttgtga

SEQ ID NO: 33789 - DNA, 22 bp, synthetic construct
  misc_feature 1..22: note = chemically synthesized
  source 1..22: mol_type = other DNA
ttataatgacacttgtgattac

SEQ ID NO: 33790 - DNA, 22 bp, synthetic construct
  misc_feature 1..22: note = chemically synthesized
  source 1..22: mol_type = other DNA
ataatgacacttgtgattacat

SEQ ID NO: 33791 - DNA, 22 bp, synthetic construct
  misc_feature 1..22: note = chemically synthesized
  source 1..22: mol_type = other DNA
taatgacacttgtgattacatt

SEQ ID NO: 33792 - DNA, 22 bp, synthetic construct
  misc_feature 1..22: note = chemically synthesized
  source 1..22: mol_type = other DNA
gtgattacatttaggatacacc

SEQ ID NO: 33793 - DNA, 22 bp, synthetic construct
  misc_feature 1..22: note = chemically synthesized
  source 1..22: mol_type = other DNA
tgattacatttaggatacaccc

SEQ ID NO: 33794 - DNA, 22 bp, synthetic construct
  misc_feature 1..22: note = chemically synthesized
  source 1..22: mol_type = other DNA
catttaggatacacccaaataa

SEQ ID NO: 33795 - DNA, 22 bp, synthetic construct
  misc_feature 1..22: note = chemically synthesized
  source 1..22: mol_type = other DNA
aggatacacccaaataattagg

SEQ ID NO: 33796 - DNA, 22 bp, synthetic construct
  misc_feature 1..22: note = chemically synthesized
  source 1..22: mol_type = other DNA
ggatacacccaaataattagga

SEQ ID NO: 33797 - DNA, 22 bp, synthetic construct
  misc_feature 1..22: note = chemically synthesized
  source 1..22: mol_type = other DNA
ggatatctccccatcccaagat

SEQ ID NO: 33798 - DNA, 22 bp, synthetic construct
  misc_feature 1..22: note = chemically synthesized
  source 1..22: mol_type = other DNA
cccatcccaagatccttaatta

SEQ ID NO: 33799 - DNA, 22 bp, synthetic construct
  misc_feature 1..22: note = chemically synthesized
  source 1..22: mol_type = other DNA
aattatatatgcaaaagtctgt

SEQ ID NO: 33800 - DNA, 22 bp, synthetic construct
  misc_feature 1..22: note = chemically synthesized
  source 1..22: mol_type = other DNA
attatatatgcaaaagtctgtt

SEQ ID NO: 33801 - DNA, 22 bp, synthetic construct
  misc_feature 1..22: note = chemically synthesized
  source 1..22: mol_type = other DNA
tatatgcaaaagtctgtttggc

SEQ ID NO: 33802 - DNA, 22 bp, synthetic construct
  misc_feature 1..22: note = chemically synthesized
  source 1..22: mol_type = other DNA
tttggctagaaaagataatact

SEQ ID NO: 33803 - DNA, 22 bp, synthetic construct
  misc_feature 1..22: note = chemically synthesized
  source 1..22: mol_type = other DNA
ggctagaaaagataatactcac

SEQ ID NO: 33804 - DNA, 22 bp, synthetic construct
  misc_feature 1..22: note = chemically synthesized
  source 1..22: mol_type = other DNA
gctagaaaagataatactcaca

SEQ ID NO: 33805 - DNA, 22 bp, synthetic construct
  misc_feature 1..22: note = chemically synthesized
  source 1..22: mol_type = other DNA
gaaaagataatactcacaggtt

SEQ ID NO: 33806 - DNA, 22 bp, synthetic construct
  misc_feature 1..22: note = chemically synthesized
  source 1..22: mol_type = other DNA
acaggtttcaggggttaagcca

SEQ ID NO: 33807 - DNA, 22 bp, synthetic construct
  misc_feature 1..22: note = chemically synthesized
  source 1..22: mol_type = other DNA
caggggttaagccatacatatc

SEQ ID NO: 33808 - DNA, 22 bp, synthetic construct
  misc_feature 1..22: note = chemically synthesized
  source 1..22: mol_type = other DNA
aggggttaagccatacatatct

SEQ ID NO: 33809 - DNA, 22 bp, synthetic construct
  misc_feature 1..22: note = chemically synthesized
  source 1..22: mol_type = other DNA
agccatacatatctttcagagt

SEQ ID NO: 33810 - DNA, 22 bp, synthetic construct
  misc_feature 1..22: note = chemically synthesized
  source 1..22: mol_type = other DNA
tcagagtgagccattagccatt

SEQ ID NO: 33811 - DNA, 22 bp, synthetic construct
  misc_feature 1..22: note = chemically synthesized
  source 1..22: mol_type = other DNA
cagagtgagccattagccatta

SEQ ID NO: 33812 - DNA, 22 bp, synthetic construct
  misc_feature 1..22: note = chemically synthesized
  source 1..22: mol_type = other DNA
agagtgagccattagccattat

SEQ ID NO: 33813 - DNA, 22 bp, synthetic construct
  misc_feature 1..22: note = chemically synthesized
  source 1..22: mol_type = other DNA
gccattattcagcctactgcga

SEQ ID NO: 33814 - DNA, 22 bp, synthetic construct
  misc_feature 1..22: note = chemically synthesized
  source 1..22: mol_type = other DNA
ttcagcctactgcgataatgtg

SEQ ID NO: 33815 - DNA, 22 bp, synthetic construct
  misc_feature 1..22: note = chemically synthesized
  source 1..22: mol_type = other DNA
agcctactgcgataatgtgcaa

SEQ ID NO: 33816 - DNA, 22 bp, synthetic construct
  misc_feature 1..22: note = chemically synthesized
  source 1..22: mol_type = other DNA
ctgcgataatgtgcaagttccc

SEQ ID NO: 33817 - DNA, 22 bp, synthetic construct
  misc_feature 1..22: note = chemically synthesized
  source 1..22: mol_type = other DNA
cgataatgtgcaagttcccttt

SEQ ID NO: 33818 - DNA, 22 bp, synthetic construct
  misc_feature 1..22: note = chemically synthesized
  source 1..22: mol_type = other DNA
cctttacaatctatgttctatg

SEQ ID NO: 33819 - DNA, 22 bp, synthetic construct
  misc_feature 1..22: note = chemically synthesized
  source 1..22: mol_type = other DNA
tacaatctatgttctatgttcc

SEQ ID NO: 33820 - DNA, 22 bp, synthetic construct
  misc_feature 1..22: note = chemically synthesized
  source 1..22: mol_type = other DNA
acaatctatgttctatgttccc

SEQ ID NO: 33821 - DNA, 22 bp, synthetic construct
  misc_feature 1..22: note = chemically synthesized
  source 1..22: mol_type = other DNA
caatctatgttctatgttccca

SEQ ID NO: 33822 - DNA, 22 bp, synthetic construct
  misc_feature 1..22: note = chemically synthesized
  source 1..22: mol_type = other DNA
tgttctatgttcccatcaaggt

SEQ ID NO: 33823 - DNA, 22 bp, synthetic construct
  misc_feature 1..22: note = chemically synthesized
  source 1..22: mol_type = other DNA
tatgttcccatcaaggttaatt

SEQ ID NO: 33824 - DNA, 22 bp, synthetic construct
  misc_feature 1..22: note = chemically synthesized
  source 1..22: mol_type = other DNA
tgttcccatcaaggttaattag

SEQ ID NO: 33825 - DNA, 22 bp, synthetic construct
  misc_feature 1..22: note = chemically synthesized
  source 1..22: mol_type = other DNA
ccatcaaggttaattagaaata

SEQ ID NO: 33826 - DNA, 22 bp, synthetic construct
  misc_feature 1..22: note = chemically synthesized
  source 1..22: mol_type = other DNA
attagaaatattagactctttt

SEQ ID NO: 33827 - DNA, 22 bp, synthetic construct
  misc_feature 1..22: note = chemically synthesized
  source 1..22: mol_type = other DNA
gaaatattagactctttttcca

SEQ ID NO: 33828 - DNA, 22 bp, synthetic construct
  misc_feature 1..22: note = chemically synthesized
  source 1..22: mol_type = other DNA
gactctttttccacagaaaaaa

SEQ ID NO: 33829 - DNA, 22 bp, synthetic construct
  misc_feature 1..22: note = chemically synthesized
  source 1..22: mol_type = other DNA
tttttccacagaaaaaaaaaat

SEQ ID NO: 33830 - DNA, 22 bp, synthetic construct
  misc_feature 1..22: note = chemically synthesized
  source 1..22: mol_type = other DNA
tttccacagaaaaaaaaaatgt

SEQ ID NO: 33831 - DNA, 22 bp, synthetic construct
  misc_feature 1..22: note = chemically synthesized
  source 1..22: mol_type = other DNA
ttccacagaaaaaaaaaatgta

SEQ ID NO: 33832 - DNA, 22 bp, synthetic construct
  misc_feature 1..22: note = chemically synthesized
  source 1..22: mol_type = other DNA
tccacagaaaaaaaaaatgtag

SEQ ID NO: 33833 - DNA, 22 bp, synthetic construct
  misc_feature 1..22: note = chemically synthesized
  source 1..22: mol_type = other DNA
ccacagaaaaaaaaaatgtagc

SEQ ID NO: 33834 - DNA, 22 bp, synthetic construct
  misc_feature 1..22: note = chemically synthesized
  source 1..22: mol_type = other DNA
cacagaaaaaaaaaatgtagca

SEQ ID NO: 33835 - DNA, 22 bp, synthetic construct
  misc_feature 1..22: note = chemically synthesized
  source 1..22: mol_type = other DNA
catctctaccctgacttctctc

SEQ ID NO: 33836 - DNA, 22 bp, synthetic construct
  misc_feature 1..22: note = chemically synthesized
  source 1..22: mol_type = other DNA
atctctaccctgacttctctct

SEQ ID NO: 33837 - DNA, 22 bp, synthetic construct
  misc_feature 1..22: note = chemically synthesized
  source 1..22: mol_type = other DNA
taccctgacttctctctctttc

SEQ ID NO: 33838 - DNA, 22 bp, synthetic construct
  misc_feature 1..22: note = chemically synthesized
  source 1..22: mol_type = other DNA
ccctgacttctctctctttcct

SEQ ID NO: 33839 - DNA, 22 bp, synthetic construct
  misc_feature 1..22: note = chemically synthesized
  source 1..22: mol_type = other DNA
acttctctctctttccttcatg

SEQ ID NO: 33840 - DNA, 22 bp, synthetic construct
  misc_feature 1..22: note = chemically synthesized
  source 1..22: mol_type = other DNA
ctctctctttccttcatgccca

SEQ ID NO: 33841 - DNA, 22 bp, synthetic construct
  misc_feature 1..22: note = chemically synthesized
  source 1..22: mol_type = other DNA
tctctctttccttcatgcccag

SEQ ID NO: 33842 - DNA, 22 bp, synthetic construct
  misc_feature 1..22: note = chemically synthesized
  source 1..22: mol_type = other DNA
tctctttccttcatgcccagta

SEQ ID NO: 33843 - DNA, 22 bp, synthetic construct
  misc_feature 1..22: note = chemically synthesized
  source 1..22: mol_type = other DNA
tctttccttcatgcccagtaag

SEQ ID NO: 33844 - DNA, 22 bp, synthetic construct
  misc_feature 1..22: note = chemically synthesized
  source 1..22: mol_type = other DNA
tttccttcatgcccagtaagag

SEQ ID NO: 33845 - DNA, 22 bp, synthetic construct
  misc_feature 1..22: note = chemically synthesized
  source 1..22: mol_type = other DNA
tccttcatgcccagtaagagga

SEQ ID NO: 33846 - DNA, 22 bp, synthetic construct
  misc_feature 1..22: note = chemically synthesized
  source 1..22: mol_type = other DNA
ccttcatgcccagtaagaggaa

SEQ ID NO: 33847 - DNA, 22 bp, synthetic construct
  misc_feature 1..22: note = chemically synthesized
  source 1..22: mol_type = other DNA
cttcatgcccagtaagaggaag

SEQ ID NO: 33848 - DNA, 22 bp, synthetic construct
  misc_feature 1..22: note = chemically synthesized
  source 1..22: mol_type = other DNA
catgcccagtaagaggaagtga

SEQ ID NO: 33849 - DNA, 22 bp, synthetic construct
  misc_feature 1..22: note = chemically synthesized
  source 1..22: mol_type = other DNA
atgcccagtaagaggaagtgag

SEQ ID NO: 33850 - DNA, 22 bp, synthetic construct
  misc_feature 1..22: note = chemically synthesized
  source 1..22: mol_type = other DNA
ttcatctcatcaggtgttacct

SEQ ID NO: 33851 - DNA, 22 bp, synthetic construct
  misc_feature 1..22: note = chemically synthesized
  source 1..22: mol_type = other DNA
atctcatcaggtgttacctaga

SEQ ID NO: 33852 - DNA, 22 bp, synthetic construct
  misc_feature 1..22: note = chemically synthesized
  source 1..22: mol_type = other DNA
atcaggtgttacctagaatcag

SEQ ID NO: 33853 - DNA, 22 bp, synthetic construct
  misc_feature 1..22: note = chemically synthesized
  source 1..22: mol_type = other DNA
cctagaatcagagtcaggagaa

SEQ ID NO: 33854 - DNA, 22 bp, synthetic construct
  misc_feature 1..22: note = chemically synthesized
  source 1..22: mol_type = other DNA
gaatcagagtcaggagaaagca

SEQ ID NO: 33855 - DNA, 22 bp, synthetic construct
  misc_feature 1..22: note = chemically synthesized
  source 1..22: mol_type = other DNA
ataaaactactctgacaagtaa

SEQ ID NO: 33856 - DNA, 22 bp, synthetic construct
  misc_feature 1..22: note = chemically synthesized
  source 1..22: mol_type = other DNA
ctctgacaagtaaaccatatcc

SEQ ID NO: 33857 - DNA, 22 bp, synthetic construct
  misc_feature 1..22: note = chemically synthesized
  source 1..22: mol_type = other DNA
tgacaagtaaaccatatcctgg

SEQ ID NO: 33858 - DNA, 22 bp, synthetic construct
  misc_feature 1..22: note = chemically synthesized
  source 1..22: mol_type = other DNA
acaagtaaaccatatcctgggg

SEQ ID NO: 33859 - DNA, 22 bp, synthetic construct
  misc_feature 1..22: note = chemically synthesized
  source 1..22: mol_type = other DNA
gggaccaggtgagaattaaaaa

SEQ ID NO: 33860 - DNA, 22 bp, synthetic construct
  misc_feature 1..22: note = chemically synthesized
  source 1..22: mol_type = other DNA
aaaagctgtatactcataagct

SEQ ID NO: 33861 - DNA, 22 bp, synthetic construct
  misc_feature 1..22: note = chemically synthesized
  source 1..22: mol_type = other DNA
tatactcataagctgccaaaga

SEQ ID NO: 33862 - DNA, 22 bp, synthetic construct
  misc_feature 1..22: note = chemically synthesized
  source 1..22: mol_type = other DNA
ataagctgccaaagagctgatg

SEQ ID NO: 33863 - DNA, 22 bp, synthetic construct
  misc_feature 1..22: note = chemically synthesized
  source 1..22: mol_type = other DNA
ccaaagagctgatggtactgaa

SEQ ID NO: 33864 - DNA, 22 bp, synthetic construct
  misc_feature 1..22: note = chemically synthesized
  source 1..22: mol_type = other DNA
atggtactgaagtcacatggag

SEQ ID NO: 33865 - DNA, 22 bp, synthetic construct
  misc_feature 1..22: note = chemically synthesized
  source 1..22: mol_type = other DNA
aagtcacatggagctcaggaat

SEQ ID NO: 33866 - DNA, 22 bp, synthetic construct
  misc_feature 1..22: note = chemically synthesized
  source 1..22: mol_type = other DNA
aggaatttattcttgcatttag

SEQ ID NO: 33867 - DNA, 22 bp, synthetic construct
  misc_feature 1..22: note = chemically synthesized
  source 1..22: mol_type = other DNA
attcttgcatttagaaagtatg

SEQ ID NO: 33868 - DNA, 22 bp, synthetic construct
  misc_feature 1..22: note = chemically synthesized
  source 1..22: mol_type = other DNA
ttcttgcatttagaaagtatgc

SEQ ID NO: 33869 - DNA, 22 bp, synthetic construct
  misc_feature 1..22: note = chemically synthesized
  source 1..22: mol_type = other DNA
ttgcatttagaaagtatgcata

SEQ ID NO: 33870 - DNA, 22 bp, synthetic construct
  misc_feature 1..22: note = chemically synthesized
  source 1..22: mol_type = other DNA
gcatttagaaagtatgcatata

SEQ ID NO: 33871 - DNA, 22 bp, synthetic construct
  misc_feature 1..22: note = chemically synthesized
  source 1..22: mol_type = other DNA
catttagaaagtatgcatataa

SEQ ID NO: 33872 - DNA, 22 bp, synthetic construct
  misc_feature 1..22: note = chemically synthesized
  source 1..22: mol_type = other DNA
agaaagtatgcatataattctc

SEQ ID NO: 33873 - DNA, 22 bp, synthetic construct
  misc_feature 1..22: note = chemically synthesized
  source 1..22: mol_type = other DNA
gaaagtatgcatataattctct

SEQ ID NO: 33874 - DNA, 22 bp, synthetic construct
  misc_feature 1..22: note = chemically synthesized
  source 1..22: mol_type = other DNA
tctcgaaaagaaatgaaatcat

SEQ ID NO: 33875 - DNA, 22 bp, synthetic construct
  misc_feature 1..22: note = chemically synthesized
  source 1..22: mol_type = other DNA
tcgaaaagaaatgaaatcatat

SEQ ID NO: 33876 - DNA, 22 bp, synthetic construct
  misc_feature 1..22: note = chemically synthesized
  source 1..22: mol_type = other DNA
gaaaagaaatgaaatcatattt

SEQ ID NO: 33877 - DNA, 22 bp, synthetic construct
  misc_feature 1..22: note = chemically synthesized
  source 1..22: mol_type = other DNA
ttctgtcggatcaaattattca

SEQ ID NO: 33878 - DNA, 22 bp, synthetic construct
  misc_feature 1..22: note = chemically synthesized
  source 1..22: mol_type = other DNA
tctgtcggatcaaattattcag

SEQ ID NO: 33879 - DNA, 22 bp, synthetic construct
  misc_feature 1..22: note = chemically synthesized
  source 1..22: mol_type = other DNA
ctgtcggatcaaattattcaga

SEQ ID NO: 33880 - DNA, 22 bp, synthetic construct
  misc_feature 1..22: note = chemically synthesized
  source 1..22: mol_type = other DNA
tgtcggatcaaattattcagaa

SEQ ID NO: 33881 - DNA, 22 bp, synthetic construct
  misc_feature 1..22: note = chemically synthesized
  source 1..22: mol_type = other DNA
tcggatcaaattattcagaaat

SEQ ID NO: 33882 - DNA, 22 bp, synthetic construct
  misc_feature 1..22: note = chemically synthesized
  source 1..22: mol_type = other DNA
ttcagaaatccgaactgtagaa

SEQ ID NO: 33883 - DNA, 22 bp, synthetic construct
  misc_feature 1..22: note = chemically synthesized
  source 1..22: mol_type = other DNA
agaaatccgaactgtagaaaac

SEQ ID NO: 33884 - DNA, 22 bp, synthetic construct
  misc_feature 1..22: note = chemically synthesized
  source 1..22: mol_type = other DNA
tagaaaacatacaaacacactt

SEQ ID NO: 33885 - DNA, 22 bp, synthetic construct
  misc_feature 1..22: note = chemically synthesized
  source 1..22: mol_type = other DNA
gcttaatgttagctttttaatc

SEQ ID NO: 33886 - DNA, 22 bp, synthetic construct
  misc_feature 1..22: note = chemically synthesized
  source 1..22: mol_type = other DNA
cttaatgttagctttttaatct

SEQ ID NO: 33887 - DNA, 22 bp, synthetic construct
  misc_feature 1..22: note = chemically synthesized
  source 1..22: mol_type = other DNA
aatgttagctttttaatcttat

SEQ ID NO: 33888 - DNA, 22 bp, synthetic construct
  misc_feature 1..22: note = chemically synthesized
  source 1..22: mol_type = other DNA
atgttagctttttaatcttatt

SEQ ID NO: 33889 - DNA, 22 bp, synthetic construct
  misc_feature 1..22: note = chemically synthesized
  source 1..22: mol_type = other DNA
gctttttaatcttatttttgta

SEQ ID NO: 33890 - DNA, 22 bp, synthetic construct
  misc_feature 1..22: note = chemically synthesized
  source 1..22: mol_type = other DNA
tttaatcttatttttgtacaca

SEQ ID NO: 33891 - DNA, 22 bp, synthetic construct
  misc_feature 1..22: note = chemically synthesized
  source 1..22: mol_type = other DNA
ttaatcttatttttgtacacag

SEQ ID NO: 33892 - DNA, 22 bp, synthetic construct
  misc_feature 1..22: note = chemically synthesized
  source 1..22: mol_type = other DNA
taatcttatttttgtacacagt

SEQ ID NO: 33893 - DNA, 22 bp, synthetic construct
  misc_feature 1..22: note = chemically synthesized
  source 1..22: mol_type = other DNA
aatcttatttttgtacacagta

SEQ ID NO: 33894 - DNA, 22 bp, synthetic construct
  misc_feature 1..22: note = chemically synthesized
  source 1..22: mol_type = other DNA
atcttatttttgtacacagtat

SEQ ID NO: 33895 - DNA, 22 bp, synthetic construct
  misc_feature 1..22: note = chemically synthesized
  source 1..22: mol_type = other DNA
atttttgtacacagtatacttt

SEQ ID NO: 33896 - DNA, 22 bp, synthetic construct
  misc_feature 1..22: note = chemically synthesized
  source 1..22: mol_type = other DNA
tttttgtacacagtatactttt

SEQ ID NO: 33897 - DNA, 22 bp, synthetic construct
  misc_feature 1..22: note = chemically synthesized
  source 1..22: mol_type = other DNA
ttgtacacagtatacttttaca

SEQ ID NO: 33898 - DNA, 22 bp, synthetic construct
  misc_feature 1..22: note = chemically synthesized
  source 1..22: mol_type = other DNA
tgtacacagtatacttttacat

SEQ ID NO: 33899 - DNA, 22 bp, synthetic construct
  misc_feature 1..22: note = chemically synthesized
  source 1..22: mol_type = other DNA
gtacacagtatacttttacata

SEQ ID NO: 33900 - DNA, 22 bp, synthetic construct
  misc_feature 1..22: note = chemically synthesized
  source 1..22: mol_type = other DNA
tacacagtatacttttacatag

SEQ ID NO: 33901 - DNA, 22 bp, synthetic construct
  misc_feature 1..22: note = chemically synthesized
  source 1..22: mol_type = other DNA
ttacataggcactgaaccagct

SEQ ID NO: 33902 - DNA, 22 bp, synthetic construct
  misc_feature 1..22: note = chemically synthesized
  source 1..22: mol_type = other DNA
tacataggcactgaaccagctg

SEQ ID NO: 33903 - DNA, 22 bp, synthetic construct
  misc_feature 1..22: note = chemically synthesized
  source 1..22: mol_type = other DNA
acataggcactgaaccagctgg

SEQ ID NO: 33904 - DNA, 22 bp, synthetic construct
  misc_feature 1..22: note = chemically synthesized
  source 1..22: mol_type = other DNA
cataggcactgaaccagctgga

SEQ ID NO: 33905 - DNA, 22 bp, synthetic construct
  misc_feature 1..22: note = chemically synthesized
  source 1..22: mol_type = other DNA
aaccagctggaaatgaatgctt

SEQ ID NO: 33906 - DNA, 22 bp, synthetic construct
  misc_feature 1..22: note = chemically synthesized
  source 1..22: mol_type = other DNA
gaaatgaatgcttggattttcg

SEQ ID NO: 33907 - DNA, 22 bp, synthetic construct
  misc_feature 1..22: note = chemically synthesized
  source 1..22: mol_type = other DNA
ggattttcgcagctgataaaag

SEQ ID NO: 33908 - DNA, 22 bp, synthetic construct
  misc_feature 1..22: note = chemically synthesized
  source 1..22: mol_type = other DNA
gattttcgcagctgataaaagc

SEQ ID NO: 33909 - DNA, 22 bp, synthetic construct
  misc_feature 1..22: note = chemically synthesized
  source 1..22: mol_type = other DNA
tcgcagctgataaaagcagagt

SEQ ID NO: 33910 - DNA, 22 bp, synthetic construct
  misc_feature 1..22: note = chemically synthesized
  source 1..22: mol_type = other DNA
cgcagctgataaaagcagagtt

SEQ ID NO: 33911 - DNA, 22 bp, synthetic construct
  misc_feature 1..22: note = chemically synthesized
  source 1..22: mol_type = other DNA
gcagctgataaaagcagagttc

SEQ ID NO: 33912 - DNA, 22 bp, synthetic construct
  misc_feature 1..22: note = chemically synthesized
  source 1..22: mol_type = other DNA
ataaaagcagagttcagattct

SEQ ID NO: 33913 - DNA, 22 bp, synthetic construct
  misc_feature 1..22: note = chemically synthesized
  source 1..22: mol_type = other DNA
agattctgtccttgagctcaat

SEQ ID NO: 33914 - DNA, 22 bp, synthetic construct
  misc_feature 1..22: note = chemically synthesized
  source 1..22: mol_type = other DNA
tgtccttgagctcaatgtctgg

SEQ ID NO: 33915 - DNA, 22 bp, synthetic construct
  misc_feature 1..22: note = chemically synthesized
  source 1..22: mol_type = other DNA
tccttgagctcaatgtctggag

SEQ ID NO: 33916 - DNA, 22 bp, synthetic construct
  misc_feature 1..22: note = chemically synthesized
  source 1..22: mol_type = other DNA
gagctcaatgtctggagaaagc

SEQ ID NO: 33917 - DNA, 22 bp, synthetic construct
  misc_feature 1..22: note = chemically synthesized
  source 1..22: mol_type = other DNA
agctcaatgtctggagaaagca

SEQ ID NO: 33918 - DNA, 22 bp, synthetic construct
  misc_feature 1..22: note = chemically synthesized
  source 1..22: mol_type = other DNA
aatgtctggagaaagcagctgt

SEQ ID NO: 33919 - DNA, 22 bp, synthetic construct
  misc_feature 1..22: note = chemically synthesized
  source 1..22: mol_type = other DNA
gagaaagcagctgtgaatactg

SEQ ID NO: 33920 - DNA, 22 bp, synthetic construct
  misc_feature 1..22: note = chemically synthesized
  source 1..22: mol_type = other DNA
tgaatactgcttccttaattca

SEQ ID NO: 33921 - DNA, 22 bp, synthetic construct
  misc_feature 1..22: note = chemically synthesized
  source 1..22: mol_type = other DNA
cttccttaattcagatgccttt

SEQ ID NO: 33922 - DNA, 22 bp, synthetic construct
  misc_feature 1..22: note = chemically synthesized
  source 1..22: mol_type = other DNA
ccttaattcagatgcctttggc

SEQ ID NO: 33923 - DNA, 22 bp, synthetic construct
  misc_feature 1..22: note = chemically synthesized
  source 1..22: mol_type = other DNA
cttaattcagatgcctttggcc

SEQ ID NO: 33924 - DNA, 22 bp, synthetic construct
  misc_feature 1..22: note = chemically synthesized
  source 1..22: mol_type = other DNA
aattcagatgcctttggccgtg

SEQ ID NO: 33925 - DNA, 22 bp, synthetic construct
  misc_feature 1..22: note = chemically synthesized
  source 1..22: mol_type = other DNA
attcagatgcctttggccgtga

SEQ ID NO: 33926 - DNA, 22 bp, synthetic construct
  misc_feature 1..22: note = chemically synthesized
  source 1..22: mol_type = other DNA
agatgcctttggccgtgagggg

SEQ ID NO: 33927 - DNA, 22 bp, synthetic construct
  misc_feature 1..22: note = chemically synthesized
  source 1..22: mol_type = other DNA
tggccgtgaggggcatggcatt

SEQ ID NO: 33928 - DNA, 22 bp, synthetic construct
  misc_feature 1..22: note = chemically synthesized
  source 1..22: mol_type = other DNA
ggccgtgaggggcatggcattt

SEQ ID NO: 33929 - DNA, 22 bp, synthetic construct
  misc_feature 1..22: note = chemically synthesized
  source 1..22: mol_type = other DNA
gccgtgaggggcatggcatttt

SEQ ID NO: 33930 - DNA, 22 bp, synthetic construct
  misc_feature 1..22: note = chemically synthesized
  source 1..22: mol_type = other DNA
taaagctgcaataaactctgta

SEQ ID NO: 33931 - DNA, 22 bp, synthetic construct
  misc_feature 1..22: note = chemically synthesized
  source 1..22: mol_type = other DNA
aaagctgcaataaactctgtac

SEQ ID NO: 33932 - DNA, 22 bp, synthetic construct
  misc_feature 1..22: note = chemically synthesized
  source 1..22: mol_type = other DNA
aagctgcaataaactctgtact

SEQ ID NO: 33933 - DNA, 22 bp, synthetic construct
  misc_feature 1..22: note = chemically synthesized
  source 1..22: mol_type = other DNA
caataaactctgtactttttct

SEQ ID NO: 33934 - DNA, 22 bp, synthetic construct
  misc_feature 1..22: note = chemically synthesized
  source 1..22: mol_type = other DNA
tgtactttttctctcaggggat

SEQ ID NO: 33935 - DNA, 22 bp, synthetic construct
  misc_feature 1..22: note = chemically synthesized
  source 1..22: mol_type = other DNA
tactttttctctcaggggatta

SEQ ID NO: 33936 - DNA, 22 bp, synthetic construct
  misc_feature 1..22: note = chemically synthesized
  source 1..22: mol_type = other DNA
tttctctcaggggattagaaaa

SEQ ID NO: 33937 - DNA, 22 bp, synthetic construct
  misc_feature 1..22: note = chemically synthesized
  source 1..22: mol_type = other DNA
ttctctcaggggattagaaaaa

SEQ ID NO: 33938 - DNA, 22 bp, synthetic construct
  misc_feature 1..22: note = chemically synthesized
  source 1..22: mol_type = other DNA
tctctcaggggattagaaaaac

SEQ ID NO: 33939 - DNA, 22 bp, synthetic construct
  misc_feature 1..22: note = chemically synthesized
  source 1..22: mol_type = other DNA
ctctcaggggattagaaaaacc

SEQ ID NO: 33940 - DNA, 22 bp, synthetic construct
  misc_feature 1..22: note = chemically synthesized
  source 1..22: mol_type = other DNA
tctcaggggattagaaaaacca

SEQ ID NO: 33941 - DNA, 22 bp, synthetic construct
  misc_feature 1..22: note = chemically synthesized
  source 1..22: mol_type = other DNA
tcaggggattagaaaaaccaat

SEQ ID NO: 33942 - DNA, 22 bp, synthetic construct
  misc_feature 1..22: note = chemically synthesized
  source 1..22: mol_type = other DNA
aggggattagaaaaaccaattg

SEQ ID NO: 33943 - DNA, 22 bp, synthetic construct
  misc_feature 1..22: note = chemically synthesized
  source 1..22: mol_type = other DNA
gaaaaaccaattgatttgatag

SEQ ID NO: 33944 - DNA, 22 bp, synthetic construct
  misc_feature 1..22: note = chemically synthesized
  source 1..22: mol_type = other DNA
atttgatagtgactcagcagtt

SEQ ID NO: 33945 - DNA, 22 bp, synthetic construct
  misc_feature 1..22: note = chemically synthesized
  source 1..22: mol_type = other DNA
gatagtgactcagcagttttca

SEQ ID NO: 33946 - DNA, 22 bp, synthetic construct
  misc_feature 1..22: note = chemically synthesized
  source 1..22: mol_type = other DNA
atagtgactcagcagttttcac

SEQ ID NO: 33947 - DNA, 22 bp, synthetic construct
  misc_feature 1..22: note = chemically synthesized
  source 1..22: mol_type = other DNA
agcagttttcaccttcctcttt

SEQ ID NO: 33948 - DNA, 22 bp, synthetic construct
  misc_feature 1..22: note = chemically synthesized
  source 1..22: mol_type = other DNA
tcaccttcctctttagccaatg

SEQ ID NO: 33949 - DNA, 22 bp, synthetic construct
  misc_feature 1..22: note = chemically synthesized
  source 1..22: mol_type = other DNA
caccttcctctttagccaatgc

SEQ ID NO: 33950 - DNA, 22 bp, synthetic construct
  misc_feature 1..22: note = chemically synthesized
  source 1..22: mol_type = other DNA
accttcctctttagccaatgcc

SEQ ID NO: 33951 - DNA, 22 bp, synthetic construct
  misc_feature 1..22: note = chemically synthesized
  source 1..22: mol_type = other DNA
cctctttagccaatgccctgca

SEQ ID NO: 33952 - DNA, 22 bp, synthetic construct
  misc_feature 1..22: note = chemically synthesized
  source 1..22: mol_type = other DNA
ctctttagccaatgccctgcag

SEQ ID NO: 33953 - DNA, 22 bp, synthetic construct
  misc_feature 1..22: note = chemically synthesized
  source 1..22: mol_type = other DNA
tttagccaatgccctgcagcta

SEQ ID NO: 33954 - DNA, 22 bp, synthetic construct
  misc_feature 1..22: note = chemically synthesized
  source 1..22: mol_type = other DNA
tagccaatgccctgcagctaag

SEQ ID NO: 33955 - DNA, 22 bp, synthetic construct
  misc_feature 1..22: note = chemically synthesized
  source 1..22: mol_type = other DNA
agccaatgccctgcagctaaga

SEQ ID NO: 33956 - DNA, 22 bp, synthetic construct
  misc_feature 1..22: note = chemically synthesized
  source 1..22: mol_type = other DNA
gccaatgccctgcagctaagat

SEQ ID NO: 33957 - DNA, 22 bp, synthetic construct
  misc_feature 1..22: note = chemically synthesized
  source 1..22: mol_type = other DNA
cagctaagattgagaaacggat

SEQ ID NO: 33958 - DNA, 22 bp, synthetic construct
  misc_feature 1..22: note = chemically synthesized
  source 1..22: mol_type = other DNA
agattgagaaacggattcagaa

SEQ ID NO: 33959 - DNA, 22 bp, synthetic construct
  misc_feature 1..22: note = chemically synthesized
  source 1..22: mol_type = other DNA
agaaacggattcagaactcaca

SEQ ID NO: 33960 - DNA, 22 bp, synthetic construct
  misc_feature 1..22: note = chemically synthesized
  source 1..22: mol_type = other DNA
agaactcacacctcttggtgct

SEQ ID NO: 33961 - DNA, 22 bp, synthetic construct
  misc_feature 1..22: note = chemically synthesized
  source 1..22: mol_type = other DNA
acacctcttggtgcttggtggc

SEQ ID NO: 33962 - DNA, 22 bp, synthetic construct
  misc_feature 1..22: note = chemically synthesized
  source 1..22: mol_type = other DNA
ttggtgcttggtggctcccttc

SEQ ID NO: 33963 - DNA, 22 bp, synthetic construct
  misc_feature 1..22: note = chemically synthesized
  source 1..22: mol_type = other DNA
ggtgcttggtggctcccttcca

SEQ ID NO: 33964 - DNA, 22 bp, synthetic construct
  misc_feature 1..22: note = chemically synthesized
  source 1..22: mol_type = other DNA
gtgcttggtggctcccttccaa

SEQ ID NO: 33965 - DNA, 22 bp, synthetic construct
  misc_feature 1..22: note = chemically synthesized
  source 1..22: mol_type = other DNA
ggtggctcccttccaaaccatc

SEQ ID NO: 33966 - DNA, 22 bp, synthetic construct
  misc_feature 1..22: note = chemically synthesized
  source 1..22: mol_type = other DNA
gtggctcccttccaaaccatca

SEQ ID NO: 33967 - DNA, 22 bp, synthetic construct
  misc_feature 1..22: note = chemically synthesized
  source 1..22: mol_type = other DNA
ccttccaaaccatcagctgttc

SEQ ID NO: 33968 - DNA, 22 bp, synthetic construct
  misc_feature 1..22: note = chemically synthesized
  source 1..22: mol_type = other DNA
ccaaaccatcagctgttctttc

SEQ ID NO: 33969 - DNA, 22 bp, synthetic construct
  misc_feature 1..22: note = chemically synthesized
  source 1..22: mol_type = other DNA
caaaccatcagctgttctttct

SEQ ID NO: 33970 - DNA, 22 bp, synthetic construct
  misc_feature 1..22: note = chemically synthesized
  source 1..22: mol_type = other DNA
ttctttctactttctttcctat

SEQ ID NO: 33971 - DNA, 22 bp, synthetic construct
  misc_feature 1..22: note = chemically synthesized
  source 1..22: mol_type = other DNA
tttctactttctttcctatttt

SEQ ID NO: 33972 - DNA, 22 bp, synthetic construct
  misc_feature 1..22: note = chemically synthesized
  source 1..22: mol_type = other DNA
tctactttctttcctatttttt

SEQ ID NO: 33973 - DNA, 22 bp, synthetic construct
  misc_feature 1..22: note = chemically synthesized
  source 1..22: mol_type = other DNA
ctactttctttcctatttttta

SEQ ID NO: 33974 - DNA, 22 bp, synthetic construct
  misc_feature 1..22: note = chemically synthesized
  source 1..22: mol_type = other DNA
tactttctttcctattttttaa

SEQ ID NO: 33975 - DNA, 22 bp, synthetic construct
  misc_feature 1..22: note = chemically synthesized
  source 1..22: mol_type = other DNA
ctttctttcctattttttaaag

SEQ ID NO: 33976 - DNA, 22 bp, synthetic construct
  misc_feature 1..22: note = chemically synthesized
  source 1..22: mol_type = other DNA
tctttcctattttttaaagcac

SEQ ID NO: 33977 - DNA, 22 bp, synthetic construct
  misc_feature 1..22: note = chemically synthesized
  source 1..22: mol_type = other DNA
ctttcctattttttaaagcaca

SEQ ID NO: 33978 - DNA, 22 bp, synthetic construct
  misc_feature 1..22: note = chemically synthesized
  source 1..22: mol_type = other DNA
tttcctattttttaaagcacag

SEQ ID NO: 33979 - DNA, 22 bp, synthetic construct
  misc_feature 1..22: note = chemically synthesized
  source 1..22: mol_type = other DNA
tcctattttttaaagcacagtc

SEQ ID NO: 33980 - DNA, 22 bp, synthetic construct
  misc_feature 1..22: note = chemically synthesized
  source 1..22: mol_type = other DNA
cctattttttaaagcacagtct

SEQ ID NO: 33981 - DNA, 22 bp, synthetic construct
  misc_feature 1..22: note = chemically synthesized
  source 1..22: mol_type = other DNA
ctattttttaaagcacagtctg

SEQ ID NO: 33982 - DNA, 22 bp, synthetic construct
  misc_feature 1..22: note = chemically synthesized
  source 1..22: mol_type = other DNA
ttttttaaagcacagtctgaat

SEQ ID NO: 33983 - DNA, 22 bp, synthetic construct
  misc_feature 1..22: note = chemically synthesized
  source 1..22: mol_type = other DNA
tttaaagcacagtctgaatcaa

SEQ ID NO: 33984 - DNA, 22 bp, synthetic construct
  misc_feature 1..22: note = chemically synthesized
  source 1..22: mol_type = other DNA
ttaaagcacagtctgaatcaag

SEQ ID NO: 33985 - DNA, 22 bp, synthetic construct
  misc_feature 1..22: note = chemically synthesized
  source 1..22: mol_type = other DNA
taaagcacagtctgaatcaagt

SEQ ID NO: 33986 - DNA, 22 bp, synthetic construct
  misc_feature 1..22: note = chemically synthesized
  source 1..22: mol_type = other DNA
aaagcacagtctgaatcaagtg

SEQ ID NO: 33987 - DNA, 22 bp, synthetic construct
  misc_feature 1..22: note = chemically synthesized
  source 1..22: mol_type = other DNA
aagcacagtctgaatcaagtgc

SEQ ID NO: 33988 - DNA, 22 bp, synthetic construct
  misc_feature 1..22: note = chemically synthesized
  source 1..22: mol_type = other DNA
aatcaagtgcttcagaaccatt

SEQ ID NO: 33989 - DNA, 22 bp, synthetic construct
  misc_feature 1..22: note = chemically synthesized
  source 1..22: mol_type = other DNA
cagaaccatttatactaactcg

SEQ ID NO: 33990 - DNA, 22 bp, synthetic construct
  misc_feature 1..22: note = chemically synthesized
  source 1..22: mol_type = other DNA
agaaccatttatactaactcgt

SEQ ID NO: 33991 - DNA, 22 bp, synthetic construct
  misc_feature 1..22: note = chemically synthesized
  source 1..22: mol_type = other DNA
atactaactcgtgttccaaaca

SEQ ID NO: 33992 - DNA, 22 bp, synthetic construct
  misc_feature 1..22: note = chemically synthesized
  source 1..22: mol_type = other DNA
tactaactcgtgttccaaacac

SEQ ID NO: 33993 - DNA, 22 bp, synthetic construct
  misc_feature 1..22: note = chemically synthesized
  source 1..22: mol_type = other DNA
actcgtgttccaaacacataac

SEQ ID NO: 33994 - DNA, 22 bp, synthetic construct
  misc_feature 1..22: note = chemically synthesized
  source 1..22: mol_type = other DNA
gtgttccaaacacataaccctg

SEQ ID NO: 33995 - DNA, 22 bp, synthetic construct
  misc_feature 1..22: note = chemically synthesized
  source 1..22: mol_type = other DNA
caaacacataaccctgaaccct

SEQ ID NO: 33996 - DNA, 22 bp, synthetic construct
  misc_feature 1..22: note = chemically synthesized
  source 1..22: mol_type = other DNA
aaccctcttctaaggccaccag

SEQ ID NO: 33997 - DNA, 22 bp, synthetic construct
  misc_feature 1..22: note = chemically synthesized
  source 1..22: mol_type = other DNA
ttctaaggccaccagttacaaa

SEQ ID NO: 33998 - DNA, 22 bp, synthetic construct
  misc_feature 1..22: note = chemically synthesized
  source 1..22: mol_type = other DNA
ctaaggccaccagttacaaaga

SEQ ID NO: 33999 - DNA, 22 bp, synthetic construct
  misc_feature 1..22: note = chemically synthesized
  source 1..22: mol_type = other DNA
taaggccaccagttacaaagaa

SEQ ID NO: 34000 - DNA, 22 bp, synthetic construct
  misc_feature 1..22: note = chemically synthesized
  source 1..22: mol_type = other DNA
aggccaccagttacaaagaatg

SEQ ID NO: 34001 - DNA, 22 bp, synthetic construct
  misc_feature 1..22: note = chemically synthesized
  source 1..22: mol_type = other DNA
caaagaatggggaaggttaatg

SEQ ID NO: 34002 - DNA, 22 bp, synthetic construct
  misc_feature 1..22: note = chemically synthesized
  source 1..22: mol_type = other DNA
atgagtaactccaccagtgcct

SEQ ID NO: 34003 - DNA, 22 bp, synthetic construct
  misc_feature 1..22: note = chemically synthesized
  source 1..22: mol_type = other DNA
caccagtgcctgccagaaagct

SEQ ID NO: 34004 - DNA, 22 bp, synthetic construct
  misc_feature 1..22: note = chemically synthesized
  source 1..22: mol_type = other DNA
ccagaaagctcagctgtactcc

SEQ ID NO: 34005 - DNA, 22 bp, synthetic construct
  misc_feature 1..22: note = chemically synthesized
  source 1..22: mol_type = other DNA
agctgtactccagccttccttc

SEQ ID NO: 34006 - DNA, 22 bp, synthetic construct
  misc_feature 1..22: note = chemically synthesized
  source 1..22: mol_type = other DNA
tactccagccttccttcctctc

SEQ ID NO: 34007 - DNA, 22 bp, synthetic construct
  misc_feature 1..22: note = chemically synthesized
  source 1..22: mol_type = other DNA
cagccttccttcctctcttgca

SEQ ID NO: 34008 - DNA, 22 bp, synthetic construct
  misc_feature 1..22: note = chemically synthesized
  source 1..22: mol_type = other DNA
ccttcctctcttgcagagagaa

SEQ ID NO: 34009 - DNA, 22 bp, synthetic construct
  misc_feature 1..22: note = chemically synthesized
  source 1..22: mol_type = other DNA
cttcctctcttgcagagagaaa

SEQ ID NO: 34010 - DNA, 22 bp, synthetic construct
  misc_feature 1..22: note = chemically synthesized
  source 1..22: mol_type = other DNA
cctctcttgcagagagaaacaa

SEQ ID NO: 34011 - DNA, 22 bp, synthetic construct
  misc_feature 1..22: note = chemically synthesized
  source 1..22: mol_type = other DNA
ctctcttgcagagagaaacaat

SEQ ID NO: 34012 - DNA, 22 bp, synthetic construct
  misc_feature 1..22: note = chemically synthesized
  source 1..22: mol_type = other DNA
tcttgcagagagaaacaatgcg

SEQ ID NO: 34013 - DNA, 22 bp, synthetic construct
  misc_feature 1..22: note = chemically synthesized
  source 1..22: mol_type = other DNA
ttgcagagagaaacaatgcggc

SEQ ID NO: 34014 - DNA, 22 bp, synthetic construct
  misc_feature 1..22: note = chemically synthesized
  source 1..22: mol_type = other DNA
gcagagagaaacaatgcggcag

SEQ ID NO: 34015 - DNA, 22 bp, synthetic construct
  misc_feature 1..22: note = chemically synthesized
  source 1..22: mol_type = other DNA
cagagagaaacaatgcggcagt

SEQ ID NO: 34016 - DNA, 22 bp, synthetic construct
  misc_feature 1..22: note = chemically synthesized
  source 1..22: mol_type = other DNA
aacaaagcgaaggcactgtaat

SEQ ID NO: 34017 - DNA, 22 bp, synthetic construct
  misc_feature 1..22: note = chemically synthesized
  source 1..22: mol_type = other DNA
taatgcccagtggcttcagtca

SEQ ID NO: 34018 - DNA, 22 bp, synthetic construct
  misc_feature 1..22: note = chemically synthesized
  source 1..22: mol_type = other DNA
cagtcacaggctggtctaaaat

SEQ ID NO: 34019 - DNA, 22 bp, synthetic construct
  misc_feature 1..22: note = chemically synthesized
  source 1..22: mol_type = other DNA
agtcacaggctggtctaaaatt

SEQ ID NO: 34020 - DNA, 22 bp, synthetic construct
  misc_feature 1..22: note = chemically synthesized
  source 1..22: mol_type = other DNA
gtctaaaattccatttcacaga

SEQ ID NO: 34021 - DNA, 22 bp, synthetic construct
  misc_feature 1..22: note = chemically synthesized
  source 1..22: mol_type = other DNA
aaattccatttcacagaattga

SEQ ID NO: 34022 - DNA, 22 bp, synthetic construct
  misc_feature 1..22: note = chemically synthesized
  source 1..22: mol_type = other DNA
catttcacagaattgaagataa

SEQ ID NO: 34023 - DNA, 22 bp, synthetic construct
  misc_feature 1..22: note = chemically synthesized
  source 1..22: mol_type = other DNA
cacagaattgaagataatttgg

SEQ ID NO: 34024 - DNA, 22 bp, synthetic construct
  misc_feature 1..22: note = chemically synthesized
  source 1..22: mol_type = other DNA
acagaattgaagataatttggg

SEQ ID NO: 34025 - DNA, 22 bp, synthetic construct
  misc_feature 1..22: note = chemically synthesized
  source 1..22: mol_type = other DNA
aagataatttggggttattacc

SEQ ID NO: 34026 - DNA, 22 bp, synthetic construct
  misc_feature 1..22: note = chemically synthesized
  source 1..22: mol_type = other DNA
ggggttattaccaattctcagc

SEQ ID NO: 34027 - DNA, 22 bp, synthetic construct
  misc_feature 1..22: note = chemically synthesized
  source 1..22: mol_type = other DNA
gggttattaccaattctcagca

SEQ ID NO: 34028 - DNA, 22 bp, synthetic construct
  misc_feature 1..22: note = chemically synthesized
  source 1..22: mol_type = other DNA
ttaccaattctcagcagctcaa

SEQ ID NO: 34029 - DNA, 22 bp, synthetic construct
  misc_feature 1..22: note = chemically synthesized
  source 1..22: mol_type = other DNA
ccaattctcagcagctcaaatt

SEQ ID NO: 34030 - DNA, 22 bp, synthetic construct
  misc_feature 1..22: note = chemically synthesized
  source 1..22: mol_type = other DNA
tcagcagctcaaattcaatccc

SEQ ID NO: 34031 - DNA, 22 bp, synthetic construct
  misc_feature 1..22: note = chemically synthesized
  source 1..22: mol_type = other DNA
agcagctcaaattcaatcccgt

SEQ ID NO: 34032 - DNA, 22 bp, synthetic construct
  misc_feature 1..22: note = chemically synthesized
  source 1..22: mol_type = other DNA
aaattcaatcccgttgatggtg

SEQ ID NO: 34033 - DNA, 22 bp, synthetic construct
  misc_feature 1..22: note = chemically synthesized
  source 1..22: mol_type = other DNA
aatcccgttgatggtgagcatg

SEQ ID NO: 34034 - DNA, 22 bp, synthetic construct
  misc_feature 1..22: note = chemically synthesized
  source 1..22: mol_type = other DNA
atggtgagcatggggttcattt

SEQ ID NO: 34035 - DNA, 22 bp, synthetic construct
  misc_feature 1..22: note = chemically synthesized
  source 1..22: mol_type = other DNA
attttgagagtagaaaattgga

SEQ ID NO: 34036 - DNA, 22 bp, synthetic construct
  misc_feature 1..22: note = chemically synthesized
  source 1..22: mol_type = other DNA
tgagagtagaaaattggatgca

SEQ ID NO: 34037 - DNA, 22 bp, synthetic construct
  misc_feature 1..22: note = chemically synthesized
  source 1..22: mol_type = other DNA
gagagtagaaaattggatgcag

SEQ ID NO: 34038 - DNA, 22 bp, synthetic construct
  misc_feature 1..22: note = chemically synthesized
  source 1..22: mol_type = other DNA
agagtagaaaattggatgcagt

SEQ ID NO: 34039 - DNA, 22 bp, synthetic construct
  misc_feature 1..22: note = chemically synthesized
  source 1..22: mol_type = other DNA
gatgcagtggagaatcagaatg

SEQ ID NO: 34040 - DNA, 22 bp, synthetic construct
  misc_feature 1..22: note = chemically synthesized
  source 1..22: mol_type = other DNA
gatggtctctgccatttcccca

SEQ ID NO: 34041 - DNA, 22 bp, synthetic construct
  misc_feature 1..22: note = chemically synthesized
  source 1..22: mol_type = other DNA
tgccatttccccaaagatatca

SEQ ID NO: 34042 - DNA, 22 bp, synthetic construct
  misc_feature 1..22: note = chemically synthesized
  source 1..22: mol_type = other DNA
ccatttccccaaagatatcatc

SEQ ID NO: 34043 - DNA, 22 bp, synthetic construct
  misc_feature 1..22: note = chemically synthesized
  source 1..22: mol_type = other DNA
ccccaaagatatcatcctaact

SEQ ID NO: 34044 - DNA, 22 bp, synthetic construct
  misc_feature 1..22: note = chemically synthesized
  source 1..22: mol_type = other DNA
cccaaagatatcatcctaactg

SEQ ID NO: 34045 - DNA, 22 bp, synthetic construct
  misc_feature 1..22: note = chemically synthesized
  source 1..22: mol_type = other DNA
actgcatgctgctgcttttaac

SEQ ID NO: 34046 - DNA, 22 bp, synthetic construct
  misc_feature 1..22: note = chemically synthesized
  source 1..22: mol_type = other DNA
catgctgctgcttttaacaaat

SEQ ID NO: 34047 - DNA, 22 bp, synthetic construct
  misc_feature 1..22: note = chemically synthesized
  source 1..22: mol_type = other DNA
ctgcttttaacaaatcagtata

SEQ ID NO: 34048 - DNA, 22 bp, synthetic construct
  misc_feature 1..22: note = chemically synthesized
  source 1..22: mol_type = other DNA
cttttaacaaatcagtatacaa

SEQ ID NO: 34049 - DNA, 22 bp, synthetic construct
  misc_feature 1..22: note = chemically synthesized
  source 1..22: mol_type = other DNA
ttaacaaatcagtatacaactt

SEQ ID NO: 34050 - DNA, 22 bp, synthetic construct
  misc_feature 1..22: note = chemically synthesized
  source 1..22: mol_type = other DNA
taacaaatcagtatacaactta

SEQ ID NO: 34051 - DNA, 22 bp, synthetic construct
  misc_feature 1..22: note = chemically synthesized
  source 1..22: mol_type = other DNA
aacaaatcagtatacaacttag

SEQ ID NO: 34052 - DNA, 22 bp, synthetic construct
  misc_feature 1..22: note = chemically synthesized
  source 1..22: mol_type = other DNA
acaaatcagtatacaacttagt

SEQ ID NO: 34053 - DNA, 22 bp, synthetic construct
  misc_feature 1..22: note = chemically synthesized
  source 1..22: mol_type = other DNA
agtattttttgtgttgacaaat

SEQ ID NO: 34054 - DNA, 22 bp, synthetic construct
  misc_feature 1..22: note = chemically synthesized
  source 1..22: mol_type = other DNA
gtattttttgtgttgacaaatt

SEQ ID NO: 34055 - DNA, 22 bp, synthetic construct
  misc_feature 1..22: note = chemically synthesized
  source 1..22: mol_type = other DNA
tttgtgttgacaaattttcaaa

SEQ ID NO: 34056 - DNA, 22 bp, synthetic construct
  misc_feature 1..22: note = chemically synthesized
  source 1..22: mol_type = other DNA
ttgtgttgacaaattttcaaat

SEQ ID NO: 34057 - DNA, 22 bp, synthetic construct
  misc_feature 1..22: note = chemically synthesized
  source 1..22: mol_type = other DNA
tgtgttgacaaattttcaaata

SEQ ID NO: 34058 - DNA, 22 bp, synthetic construct
  misc_feature 1..22: note = chemically synthesized
  source 1..22: mol_type = other DNA
gtgttgacaaattttcaaatat

SEQ ID NO: 34059 - DNA, 22 bp, synthetic construct
  misc_feature 1..22: note = chemically synthesized
  source 1..22: mol_type = other DNA
tgttgacaaattttcaaatata

SEQ ID NO: 34060 - DNA, 22 bp, synthetic construct
  misc_feature 1..22: note = chemically synthesized
  source 1..22: mol_type = other DNA
acaaattttcaaatatacaaaa

SEQ ID NO: 34061 - DNA, 22 bp, synthetic construct
  misc_feature 1..22: note = chemically synthesized
  source 1..22: mol_type = other DNA
tcaaatatacaaaatattgagt

SEQ ID NO: 34062 - DNA, 22 bp, synthetic construct
  misc_feature 1..22: note = chemically synthesized
  source 1..22: mol_type = other DNA
caaatatacaaaatattgagtc

SEQ ID NO: 34063 - DNA, 22 bp, synthetic construct
  misc_feature 1..22: note = chemically synthesized
  source 1..22: mol_type = other DNA
aaatatacaaaatattgagtct

SEQ ID NO: 34064 - DNA, 22 bp, synthetic construct
  misc_feature 1..22: note = chemically synthesized
  source 1..22: mol_type = other DNA
agtctgaaggcaaaaagaataa

SEQ ID NO: 34065 - DNA, 22 bp, synthetic construct
  misc_feature 1..22: note = chemically synthesized
  source 1..22: mol_type = other DNA
aaggcaaaaagaataatttttc

SEQ ID NO: 34066 - DNA, 22 bp, synthetic construct
  misc_feature 1..22: note = chemically synthesized
  source 1..22: mol_type = other DNA
ttcacttccattgcttcctagg

SEQ ID NO: 34067 - DNA, 22 bp, synthetic construct
  misc_feature 1..22: note = chemically synthesized
  source 1..22: mol_type = other DNA
tcacttccattgcttcctaggt

SEQ ID NO: 34068 - DNA, 22 bp, synthetic construct
  misc_feature 1..22: note = chemically synthesized
  source 1..22: mol_type = other DNA
cacttccattgcttcctaggtc

SEQ ID NO: 34069 - DNA, 22 bp, synthetic construct
  misc_feature 1..22: note = chemically synthesized
  source 1..22: mol_type = other DNA
acttccattgcttcctaggtca

SEQ ID NO: 34070 - DNA, 22 bp, synthetic construct
  misc_feature 1..22: note = chemically synthesized
  source 1..22: mol_type = other DNA
ccattgcttcctaggtcataac

SEQ ID NO: 34071 - DNA, 22 bp, synthetic construct
  misc_feature 1..22: note = chemically synthesized
  source 1..22: mol_type = other DNA
cattgcttcctaggtcataaca

SEQ ID NO: 34072 - DNA, 22 bp, synthetic construct
  misc_feature 1..22: note = chemically synthesized
  source 1..22: mol_type = other DNA
cttcctaggtcataacattcac

SEQ ID NO: 34073 - DNA, 22 bp, synthetic construct
  misc_feature 1..22: note = chemically synthesized
  source 1..22: mol_type = other DNA
cctaggtcataacattcacatc

SEQ ID NO: 34074 - DNA, 22 bp, synthetic construct
  misc_feature 1..22: note = chemically synthesized
  source 1..22: mol_type = other DNA
ctaggtcataacattcacatct

SEQ ID NO: 34075 - DNA, 22 bp, synthetic construct
  misc_feature 1..22: note = chemically synthesized
  source 1..22: mol_type = other DNA
ggtcataacattcacatctgat

SEQ ID NO: 34076 - DNA, 22 bp, synthetic construct
  misc_feature 1..22: note = chemically synthesized
  source 1..22: mol_type = other DNA
acatctgatatttcttccaaat

SEQ ID NO: 34077 - DNA, 22 bp, synthetic construct
  misc_feature 1..22: note = chemically synthesized
  source 1..22: mol_type = other DNA
atatttcttccaaatacagact

SEQ ID NO: 34078 - DNA, 22 bp, synthetic construct
  misc_feature 1..22: note = chemically synthesized
  source 1..22: mol_type = other DNA
cttccaaatacagactgttgtt

SEQ ID NO: 34079 - DNA, 22 bp, synthetic construct
  misc_feature 1..22: note = chemically synthesized
  source 1..22: mol_type = other DNA
ttccaaatacagactgttgttg

SEQ ID NO: 34080 - DNA, 22 bp, synthetic construct
  misc_feature 1..22: note = chemically synthesized
  source 1..22: mol_type = other DNA
ccaaatacagactgttgttggc

SEQ ID NO: 34081 - DNA, 22 bp, synthetic construct
  misc_feature 1..22: note = chemically synthesized
  source 1..22: mol_type = other DNA
caaatacagactgttgttggcc

SEQ ID NO: 34082 - DNA, 22 bp, synthetic construct
  misc_feature 1..22: note = chemically synthesized
  source 1..22: mol_type = other DNA
ttgttggcctgatcatcactca

SEQ ID NO: 34083 - DNA, 22 bp, synthetic construct
  misc_feature 1..22: note = chemically synthesized
  source 1..22: mol_type = other DNA
ttggcctgatcatcactcacac

SEQ ID NO: 34084 - DNA, 22 bp, synthetic construct
  misc_feature 1..22: note = chemically synthesized
  source 1..22: mol_type = other DNA
gcctgatcatcactcacacatc

SEQ ID NO: 34085 - DNA, 22 bp, synthetic construct
  misc_feature 1..22: note = chemically synthesized
  source 1..22: mol_type = other DNA
atcatcactcacacatccaggc

SEQ ID NO: 34086 - DNA, 22 bp, synthetic construct
  misc_feature 1..22: note = chemically synthesized
  source 1..22: mol_type = other DNA
acacatccaggcttgttacatc

SEQ ID NO: 34087 - DNA, 22 bp, synthetic construct
  misc_feature 1..22: note = chemically synthesized
  source 1..22: mol_type = other DNA
gttacatctccacgccactgag

SEQ ID NO: 34088 - DNA, 22 bp, synthetic construct
  misc_feature 1..22: note = chemically synthesized
  source 1..22: mol_type = other DNA
ttacatctccacgccactgagt

SEQ ID NO: 34089 - DNA, 22 bp, synthetic construct
  misc_feature 1..22: note = chemically synthesized
  source 1..22: mol_type = other DNA
catctccacgccactgagtatc

SEQ ID NO: 34090 - DNA, 22 bp, synthetic construct
  misc_feature 1..22: note = chemically synthesized
  source 1..22: mol_type = other DNA
cacgccactgagtatcagggaa

SEQ ID NO: 34091 - DNA, 22 bp, synthetic construct
  misc_feature 1..22: note = chemically synthesized
  source 1..22: mol_type = other DNA
agtatcagggaacctgccccaa

SEQ ID NO: 34092 - DNA, 22 bp, synthetic construct
  misc_feature 1..22: note = chemically synthesized
  source 1..22: mol_type = other DNA
ccccaatattcacgtaggttct

SEQ ID NO: 34093 - DNA, 22 bp, synthetic construct
  misc_feature 1..22: note = chemically synthesized
  source 1..22: mol_type = other DNA
acgtaggttcttttctattttc

SEQ ID NO: 34094 - DNA, 22 bp, synthetic construct
  misc_feature 1..22: note = chemically synthesized
  source 1..22: mol_type = other DNA
ttttctattttccctaagcgtc

SEQ ID NO: 34095 - DNA, 22 bp, synthetic construct
  misc_feature 1..22: note = chemically synthesized
  source 1..22: mol_type = other DNA
ttctattttccctaagcgtcgg

SEQ ID NO: 34096 - DNA, 22 bp, synthetic construct
  misc_feature 1..22: note = chemically synthesized
  source 1..22: mol_type = other DNA
tctattttccctaagcgtcggc

SEQ ID NO: 34097 - DNA, 22 bp, synthetic construct
  misc_feature 1..22: note = chemically synthesized
  source 1..22: mol_type = other DNA
ctattttccctaagcgtcggcc

SEQ ID NO: 34098 - DNA, 22 bp, synthetic construct
  misc_feature 1..22: note = chemically synthesized
  source 1..22: mol_type = other DNA
tattttccctaagcgtcggcca

SEQ ID NO: 34099 - DNA, 22 bp, synthetic construct
  misc_feature 1..22: note = chemically synthesized
  source 1..22: mol_type = other DNA
ttttccctaagcgtcggccaac

SEQ ID NO: 34100 - DNA, 22 bp, synthetic construct
  misc_feature 1..22: note = chemically synthesized
  source 1..22: mol_type = other DNA
tccctaagcgtcggccaacttt

SEQ ID NO: 34101 - DNA, 22 bp, synthetic construct
  misc_feature 1..22: note = chemically synthesized
  source 1..22: mol_type = other DNA
ccctaagcgtcggccaacttta

SEQ ID NO: 34102 - DNA, 22 bp, synthetic construct
  misc_feature 1..22: note = chemically synthesized
  source 1..22: mol_type = other DNA
cctaagcgtcggccaactttag

SEQ ID NO: 34103 - DNA, 22 bp, synthetic construct
  misc_feature 1..22: note = chemically synthesized
  source 1..22: mol_type = other DNA
agcgtcggccaactttagaaat

SEQ ID NO: 34104 - DNA, 22 bp, synthetic construct
  misc_feature 1..22: note = chemically synthesized
  source 1..22: mol_type = other DNA
tagaaataaagggacagagtac

SEQ ID NO: 34105 - DNA, 22 bp, synthetic construct
  misc_feature 1..22: note = chemically synthesized
  source 1..22: mol_type = other DNA
agaaataaagggacagagtaca

SEQ ID NO: 34106 - DNA, 22 bp, synthetic construct
  misc_feature 1..22: note = chemically synthesized
  source 1..22: mol_type = other DNA
gaaataaagggacagagtacaa

SEQ ID NO: 34107 - DNA, 22 bp, synthetic construct
  misc_feature 1..22: note = chemically synthesized
  source 1..22: mol_type = other DNA
taaagccgggcatccgggggag

SEQ ID NO: 34108 - DNA, 22 bp, synthetic construct
  misc_feature 1..22: note = chemically synthesized
  source 1..22: mol_type = other DNA
aaagccgggcatccgggggagg

SEQ ID NO: 34109 - DNA, 22 bp, synthetic construct
  misc_feature 1..22: note = chemically synthesized
  source 1..22: mol_type = other DNA
aagccgggcatccgggggaggc

SEQ ID NO: 34110 - DNA, 22 bp, synthetic construct
  misc_feature 1..22: note = chemically synthesized
  source 1..22: mol_type = other DNA
cggtaggttccgtgatgcccca

SEQ ID NO: 34111 - DNA, 22 bp, synthetic construct
  misc_feature 1..22: note = chemically synthesized
  source 1..22: mol_type = other DNA
ggtaggttccgtgatgccccac

SEQ ID NO: 34112 - DNA, 22 bp, synthetic construct
  misc_feature 1..22: note = chemically synthesized
  source 1..22: mol_type = other DNA
cgtgatgccccacaagccacaa

SEQ ID NO: 34113 - DNA, 22 bp, synthetic construct
  misc_feature 1..22: note = chemically synthesized
  source 1..22: mol_type = other DNA
gtattagggattttcaaatggg

SEQ ID NO: 34114 - DNA, 22 bp, synthetic construct
  misc_feature 1..22: note = chemically synthesized
  source 1..22: mol_type = other DNA
tattagggattttcaaatgggg

SEQ ID NO: 34115 - DNA, 22 bp, synthetic construct
  misc_feature 1..22: note = chemically synthesized
  source 1..22: mol_type = other DNA
gggattttcaaatggggaggca

SEQ ID NO: 34116 - DNA, 22 bp, synthetic construct
  misc_feature 1..22: note = chemically synthesized
  source 1..22: mol_type = other DNA
tcaaatggggaggcagtgtgca

SEQ ID NO: 34117 - DNA, 22 bp, synthetic construct
  misc_feature 1..22: note = chemically synthesized
  source 1..22: mol_type = other DNA
caaatggggaggcagtgtgcaa

SEQ ID NO: 34118 - DNA, 22 bp, synthetic construct
  misc_feature 1..22: note = chemically synthesized
  source 1..22: mol_type = other DNA
aaatggggaggcagtgtgcaaa

SEQ ID NO: 34119 - DNA, 22 bp, synthetic construct
  misc_feature 1..22: note = chemically synthesized
  source 1..22: mol_type = other DNA
tacaaggtaatagaatatcaca

SEQ ID NO: 34120 - DNA, 22 bp, synthetic construct
  misc_feature 1..22: note = chemically synthesized
  source 1..22: mol_type = other DNA
acaaggtaatagaatatcacaa

SEQ ID NO: 34121 - DNA, 22 bp, synthetic construct
  misc_feature 1..22: note = chemically synthesized
  source 1..22: mol_type = other DNA
caaggtaatagaatatcacaag

SEQ ID NO: 34122 - DNA, 22 bp, synthetic construct
  misc_feature 1..22: note = chemically synthesized
  source 1..22: mol_type = other DNA
aaattgctaatgaagtttcggg

SEQ ID NO: 34123 - DNA, 22 bp, synthetic construct
  misc_feature 1..22: note = chemically synthesized
  source 1..22: mol_type = other DNA
ctaatgaagtttcgggcaccat

SEQ ID NO: 34124 - DNA, 22 bp, synthetic construct
  misc_feature 1..22: note = chemically synthesized
  source 1..22: mol_type = other DNA
atgaagtttcgggcaccattgt

SEQ ID NO: 34125 - DNA, 22 bp, synthetic construct
  misc_feature 1..22: note = chemically synthesized
  source 1..22: mol_type = other DNA
cgggcaccattgtcattgataa

SEQ ID NO: 34126 - DNA, 22 bp, synthetic construct
  misc_feature 1..22: note = chemically synthesized
  source 1..22: mol_type = other DNA
gggcaccattgtcattgataac

SEQ ID NO: 34127 - DNA, 22 bp, synthetic construct
  misc_feature 1..22: note = chemically synthesized
  source 1..22: mol_type = other DNA
tcattgataacatcttatcagg

SEQ ID NO: 34128 - DNA, 22 bp, synthetic construct
  misc_feature 1..22: note = chemically synthesized
  source 1..22: mol_type = other DNA
ataacatcttatcaggagacag

SEQ ID NO: 34129 - DNA, 22 bp, synthetic construct
  misc_feature 1..22: note = chemically synthesized
  source 1..22: mol_type = other DNA
atcaggagacagggtttttagg

SEQ ID NO: 34130 - DNA, 22 bp, synthetic construct
  misc_feature 1..22: note = chemically synthesized
  source 1..22: mol_type = other DNA
tcaggagacagggtttttagga

SEQ ID NO: 34131 - DNA, 22 bp, synthetic construct
  misc_feature 1..22: note = chemically synthesized
  source 1..22: mol_type = other DNA
ttaggatcaactggtctgacca

SEQ ID NO: 34132 - DNA, 22 bp, synthetic construct
  misc_feature 1..22: note = chemically synthesized
  source 1..22: mol_type = other DNA
taggatcaactggtctgaccaa

SEQ ID NO: 34133 - DNA, 22 bp, synthetic construct
  misc_feature 1..22: note = chemically synthesized
  source 1..22: mol_type = other DNA
aggatcaactggtctgaccaaa

SEQ ID NO: 34134 - DNA, 22 bp, synthetic construct
  misc_feature 1..22: note = chemically synthesized
  source 1..22: mol_type = other DNA
ggatcaactggtctgaccaaaa

SEQ ID NO: 34135 - DNA, 22 bp, synthetic construct
  misc_feature 1..22: note = chemically synthesized
  source 1..22: mol_type = other DNA
gtctgaccaaaatttattaggc

SEQ ID NO: 34136 - DNA, 22 bp, synthetic construct
  misc_feature 1..22: note = chemically synthesized
  source 1..22: mol_type = other DNA
accaaaatttattaggcgggaa

SEQ ID NO: 34137 - DNA, 22 bp, synthetic construct
  misc_feature 1..22: note = chemically synthesized
  source 1..22: mol_type = other DNA
attaggcgggaatttcctcttc

SEQ ID NO: 34138 - DNA, 22 bp, synthetic construct
  misc_feature 1..22: note = chemically synthesized
  source 1..22: mol_type = other DNA
ttaggcgggaatttcctcttcc

SEQ ID NO: 34139 - DNA, 22 bp, synthetic construct
  misc_feature 1..22: note = chemically synthesized
  source 1..22: mol_type = other DNA
ggcgggaatttcctcttcctaa

SEQ ID NO: 34140 - DNA, 22 bp, synthetic construct
  misc_feature 1..22: note = chemically synthesized
  source 1..22: mol_type = other DNA
cctcttcctaataagcctggga

SEQ ID NO: 34141 - DNA, 22 bp, synthetic construct
  misc_feature 1..22: note = chemically synthesized
  source 1..22: mol_type = other DNA
ctcttcctaataagcctgggag

SEQ ID NO: 34142 - DNA, 22 bp, synthetic construct
  misc_feature 1..22: note = chemically synthesized
  source 1..22: mol_type = other DNA
ttcctaataagcctgggagcgc

SEQ ID NO: 34143 - DNA, 22 bp, synthetic construct
  misc_feature 1..22: note = chemically synthesized
  source 1..22: mol_type = other DNA
cctaataagcctgggagcgctg

SEQ ID NO: 34144 - DNA, 22 bp, synthetic construct
  misc_feature 1..22: note = chemically synthesized
  source 1..22: mol_type = other DNA
ctaataagcctgggagcgctgt

SEQ ID NO: 34145 - DNA, 22 bp, synthetic construct
  misc_feature 1..22: note = chemically synthesized
  source 1..22: mol_type = other DNA
ataagcctgggagcgctgtggg

SEQ ID NO: 34146 - DNA, 22 bp, synthetic construct
  misc_feature 1..22: note = chemically synthesized
  source 1..22: mol_type = other DNA
ggagcgctgtgggagactgggg

SEQ ID NO: 34147 - DNA, 22 bp, synthetic construct
  misc_feature 1..22: note = chemically synthesized
  source 1..22: mol_type = other DNA
tgggagactggggtctatttca

SEQ ID NO: 34148 - DNA, 22 bp, synthetic construct
  misc_feature 1..22: note = chemically synthesized
  source 1..22: mol_type = other DNA
gggtctatttcacccctgcagt

SEQ ID NO: 34149 - DNA, 22 bp, synthetic construct
  misc_feature 1..22: note = chemically synthesized
  source 1..22: mol_type = other DNA
tttcacccctgcagtctcgacc

SEQ ID NO: 34150 - DNA, 22 bp, synthetic construct
  misc_feature 1..22: note = chemically synthesized
  source 1..22: mol_type = other DNA
cacccctgcagtctcgaccata

SEQ ID NO: 34151 - DNA, 22 bp, synthetic construct
  misc_feature 1..22: note = chemically synthesized
  source 1..22: mol_type = other DNA
acccctgcagtctcgaccataa

SEQ ID NO: 34152 - DNA, 22 bp, synthetic construct
  misc_feature 1..22: note = chemically synthesized
  source 1..22: mol_type = other DNA
cagtctcgaccataagagacag

SEQ ID NO: 34153 - DNA, 22 bp, synthetic construct
  misc_feature 1..22: note = chemically synthesized
  source 1..22: mol_type = other DNA
gaccataagagacaggcgcacc

SEQ ID NO: 34154 - DNA, 22 bp, synthetic construct
  misc_feature 1..22: note = chemically synthesized
  source 1..22: mol_type = other DNA
gaggggggctgtttataagcct

SEQ ID NO: 34155 - DNA, 22 bp, synthetic construct
  misc_feature 1..22: note = chemically synthesized
  source 1..22: mol_type = other DNA
tttataagcctatacctcctgg

SEQ ID NO: 34156 - DNA, 22 bp, synthetic construct
  misc_feature 1..22: note = chemically synthesized
  source 1..22: mol_type = other DNA
ataagcctatacctcctggctc

SEQ ID NO: 34157 - DNA, 22 bp, synthetic construct
  misc_feature 1..22: note = chemically synthesized
  source 1..22: mol_type = other DNA
taagcctatacctcctggctcg

SEQ ID NO: 34158 - DNA, 22 bp, synthetic construct
  misc_feature 1..22: note = chemically synthesized
  source 1..22: mol_type = other DNA
tacctcctggctcgtattctct

SEQ ID NO: 34159 - DNA, 22 bp, synthetic construct
  misc_feature 1..22: note = chemically synthesized
  source 1..22: mol_type = other DNA
ctggctcgtattctctttctca

SEQ ID NO: 34160 - DNA, 22 bp, synthetic construct
  misc_feature 1..22: note = chemically synthesized
  source 1..22: mol_type = other DNA
gctcgtattctctttctcaggg

SEQ ID NO: 34161 - DNA, 22 bp, synthetic construct
  misc_feature 1..22: note = chemically synthesized
  source 1..22: mol_type = other DNA
gtattctctttctcagggatgt

SEQ ID NO: 34162 - DNA, 22 bp, synthetic construct
  misc_feature 1..22: note = chemically synthesized
  source 1..22: mol_type = other DNA
tctttctcagggatgttccatg

SEQ ID NO: 34163 - DNA, 22 bp, synthetic construct
  misc_feature 1..22: note = chemically synthesized
  source 1..22: mol_type = other DNA
tttctcagggatgttccatgct

SEQ ID NO: 34164 - DNA, 22 bp, synthetic construct
  misc_feature 1..22: note = chemically synthesized
  source 1..22: mol_type = other DNA
tctcagggatgttccatgctga

SEQ ID NO: 34165 - DNA, 22 bp, synthetic construct
  misc_feature 1..22: note = chemically synthesized
  source 1..22: mol_type = other DNA
ctcagggatgttccatgctgag

SEQ ID NO: 34166 - DNA, 22 bp, synthetic construct
  misc_feature 1..22: note = chemically synthesized
  source 1..22: mol_type = other DNA
tcagggatgttccatgctgaga

SEQ ID NO: 34167 - DNA, 22 bp, synthetic construct
  misc_feature 1..22: note = chemically synthesized
  source 1..22: mol_type = other DNA
agggatgttccatgctgagaaa

SEQ ID NO: 34168 - DNA, 22 bp, synthetic construct
  misc_feature 1..22: note = chemically synthesized
  source 1..22: mol_type = other DNA
catgctgagaaaaagaattcag

SEQ ID NO: 34169 - DNA, 22 bp, synthetic construct
  misc_feature 1..22: note = chemically synthesized
  source 1..22: mol_type = other DNA
agaaaaagaattcagcgatatt

SEQ ID NO: 34170 - DNA, 22 bp, synthetic construct
  misc_feature 1..22: note = chemically synthesized
  source 1..22: mol_type = other DNA
agcgatatttctcccatttgct

SEQ ID NO: 34171 - DNA, 22 bp, synthetic construct
  misc_feature 1..22: note = chemically synthesized
  source 1..22: mol_type = other DNA
ctcccatttgcttttgaaagaa

SEQ ID NO: 34172 - DNA, 22 bp, synthetic construct
  misc_feature 1..22: note = chemically synthesized
  source 1..22: mol_type = other DNA
tcccatttgcttttgaaagaag

SEQ ID NO: 34173 - DNA, 22 bp, synthetic construct
  misc_feature 1..22: note = chemically synthesized
  source 1..22: mol_type = other DNA
ccatttgcttttgaaagaagag

SEQ ID NO: 34174 - DNA, 22 bp, synthetic construct
  misc_feature 1..22: note = chemically synthesized
  source 1..22: mol_type = other DNA
gcttttgaaagaagagaaatat

SEQ ID NO: 34175 - DNA, 22 bp, synthetic construct
  misc_feature 1..22: note = chemically synthesized
  source 1..22: mol_type = other DNA
cttttgaaagaagagaaatatg

SEQ ID NO: 34176 - DNA, 22 bp, synthetic construct
  misc_feature 1..22: note = chemically synthesized
  source 1..22: mol_type = other DNA
ttgaaagaagagaaatatggct

SEQ ID NO: 34177 - DNA, 22 bp, synthetic construct
  misc_feature 1..22: note = chemically synthesized
  source 1..22: mol_type = other DNA
tgaaagaagagaaatatggctc

SEQ ID NO: 34178 - DNA, 22 bp, synthetic construct
  misc_feature 1..22: note = chemically synthesized
  source 1..22: mol_type = other DNA
gaaagaagagaaatatggctct

SEQ ID NO: 34179 - DNA, 22 bp, synthetic construct
  misc_feature 1..22: note = chemically synthesized
  source 1..22: mol_type = other DNA
aaagaagagaaatatggctctg

SEQ ID NO: 34180 - DNA, 22 bp, synthetic construct
  misc_feature 1..22: note = chemically synthesized
  source 1..22: mol_type = other DNA
tgttctgcctggctcaccagca

SEQ ID NO: 34181 - DNA, 22 bp, synthetic construct
  misc_feature 1..22: note = chemically synthesized
  source 1..22: mol_type = other DNA
ttctgcctggctcaccagcagt

SEQ ID NO: 34182 - DNA, 22 bp, synthetic construct
  misc_feature 1..22: note = chemically synthesized
  source 1..22: mol_type = other DNA
tgcctggctcaccagcagtcag

SEQ ID NO: 34183 - DNA, 22 bp, synthetic construct
  misc_feature 1..22: note = chemically synthesized
  source 1..22: mol_type = other DNA
cctggctcaccagcagtcagag

SEQ ID NO: 34184 - DNA, 22 bp, synthetic construct
  misc_feature 1..22: note = chemically synthesized
  source 1..22: mol_type = other DNA
gctcaccagcagtcagagttta

SEQ ID NO: 34185 - DNA, 22 bp, synthetic construct
  misc_feature 1..22: note = chemically synthesized
  source 1..22: mol_type = other DNA
accagcagtcagagtttaaggt

SEQ ID NO: 34186 - DNA, 22 bp, synthetic construct
  misc_feature 1..22: note = chemically synthesized
  source 1..22: mol_type = other DNA
aaggttatctctcttattccct

SEQ ID NO: 34187 - DNA, 22 bp, synthetic construct
  misc_feature 1..22: note = chemically synthesized
  source 1..22: mol_type = other DNA
aggttatctctcttattccctg

SEQ ID NO: 34188 - DNA, 22 bp, synthetic construct
  misc_feature 1..22: note = chemically synthesized
  source 1..22: mol_type = other DNA
tctctcttattccctgaacaat

SEQ ID NO: 34189 - DNA, 22 bp, synthetic construct
  misc_feature 1..22: note = chemically synthesized
  source 1..22: mol_type = other DNA
tcttattccctgaacaattgct

SEQ ID NO: 34190 - DNA, 22 bp, synthetic construct
  misc_feature 1..22: note = chemically synthesized
  source 1..22: mol_type = other DNA
ttattccctgaacaattgctgt

SEQ ID NO: 34191 - DNA, 22 bp, synthetic construct
  misc_feature 1..22: note = chemically synthesized
  source 1..22: mol_type = other DNA
attccctgaacaattgctgtta

SEQ ID NO: 34192 - DNA, 22 bp, synthetic construct
  misc_feature 1..22: note = chemically synthesized
  source 1..22: mol_type = other DNA
ttccctgaacaattgctgttat

SEQ ID NO: 34193 - DNA, 22 bp, synthetic construct
  misc_feature 1..22: note = chemically synthesized
  source 1..22: mol_type = other DNA
cctgaacaattgctgttatcct

SEQ ID NO: 34194 - DNA, 22 bp, synthetic construct
  misc_feature 1..22: note = chemically synthesized
  source 1..22: mol_type = other DNA
aacaattgctgttatcctgttc

SEQ ID NO: 34195 - DNA, 22 bp, synthetic construct
  misc_feature 1..22: note = chemically synthesized
  source 1..22: mol_type = other DNA
ctgttatcctgttcttttttca

SEQ ID NO: 34196 - DNA, 22 bp, synthetic construct
  misc_feature 1..22: note = chemically synthesized
  source 1..22: mol_type = other DNA
ttatcctgttcttttttcaagg

SEQ ID NO: 34197 - DNA, 22 bp, synthetic construct
  misc_feature 1..22: note = chemically synthesized
  source 1..22: mol_type = other DNA
tcctgttcttttttcaaggtgt

SEQ ID NO: 34198 - DNA, 22 bp, synthetic construct
  misc_feature 1..22: note = chemically synthesized
  source 1..22: mol_type = other DNA
ttcttttttcaaggtgtccaca

SEQ ID NO: 34199 - DNA, 22 bp, synthetic construct
  misc_feature 1..22: note = chemically synthesized
  source 1..22: mol_type = other DNA
ttttttcaaggtgtccacattt

SEQ ID NO: 34200 - DNA, 22 bp, synthetic construct
  misc_feature 1..22: note = chemically synthesized
  source 1..22: mol_type = other DNA
ttttcaaggtgtccacatttca

SEQ ID NO: 34201 - DNA, 22 bp, synthetic construct
  misc_feature 1..22: note = chemically synthesized
  source 1..22: mol_type = other DNA
tttcaaggtgtccacatttcat

SEQ ID NO: 34202 - DNA, 22 bp, synthetic construct
  misc_feature 1..22: note = chemically synthesized
  source 1..22: mol_type = other DNA
ttcaaggtgtccacatttcatg

SEQ ID NO: 34203 - DNA, 22 bp, synthetic construct
  misc_feature 1..22: note = chemically synthesized
  source 1..22: mol_type = other DNA
tcaaggtgtccacatttcatgt

SEQ ID NO: 34204 - DNA, 22 bp, synthetic construct
  misc_feature 1..22: note = chemically synthesized
  source 1..22: mol_type = other DNA
caaggtgtccacatttcatgtt

SEQ ID NO: 34205 - DNA, 22 bp, synthetic construct
  misc_feature 1..22: note = chemically synthesized
  source 1..22: mol_type = other DNA
aaggtgtccacatttcatgttg

SEQ ID NO: 34206 - DNA, 22 bp, synthetic construct
  misc_feature 1..22: note = chemically synthesized
  source 1..22: mol_type = other DNA
catgttgctcaaacacacatgc

SEQ ID NO: 34207 - DNA, 22 bp, synthetic construct
  misc_feature 1..22: note = chemically synthesized
  source 1..22: mol_type = other DNA
atgttgctcaaacacacatgct

SEQ ID NO: 34208 - DNA, 22 bp, synthetic construct
  misc_feature 1..22: note = chemically synthesized
  source 1..22: mol_type = other DNA
ctcaaacacacatgctgtacaa

SEQ ID NO: 34209 - DNA, 22 bp, synthetic construct
  misc_feature 1..22: note = chemically synthesized
  source 1..22: mol_type = other DNA
aaacacacatgctgtacaattt

SEQ ID NO: 34210 - DNA, 22 bp, synthetic construct
  misc_feature 1..22: note = chemically synthesized
  source 1..22: mol_type = other DNA
tacaatttgtgcagttaatgca

SEQ ID NO: 34211 - DNA, 22 bp, synthetic construct
  misc_feature 1..22: note = chemically synthesized
  source 1..22: mol_type = other DNA
gtgcagttaatgcaattattac

SEQ ID NO: 34212 - DNA, 22 bp, synthetic construct
  misc_feature 1..22: note = chemically synthesized
  source 1..22: mol_type = other DNA
tgcagttaatgcaattattaca

SEQ ID NO: 34213 - DNA, 22 bp, synthetic construct
  misc_feature 1..22: note = chemically synthesized
  source 1..22: mol_type = other DNA
atgcaattattacagggtcctg

SEQ ID NO: 34214 - DNA, 22 bp, synthetic construct
  misc_feature 1..22: note = chemically synthesized
  source 1..22: mol_type = other DNA
ttacagggtcctgaggcaatat

SEQ ID NO: 34215 - DNA, 22 bp, synthetic construct
  misc_feature 1..22: note = chemically synthesized
  source 1..22: mol_type = other DNA
cagggtcctgaggcaatataca

SEQ ID NO: 34216 - DNA, 22 bp, synthetic construct
  misc_feature 1..22: note = chemically synthesized
  source 1..22: mol_type = other DNA
aggcaatatacatcctcctcag

SEQ ID NO: 34217 - DNA, 22 bp, synthetic construct
  misc_feature 1..22: note = chemically synthesized
  source 1..22: mol_type = other DNA
ctcagctgacaggattaagaga

SEQ ID NO: 34218 - DNA, 22 bp, synthetic construct
  misc_feature 1..22: note = chemically synthesized
  source 1..22: mol_type = other DNA
agctgacaggattaagagatta

SEQ ID NO: 34219 - DNA, 22 bp, synthetic construct
  misc_feature 1..22: note = chemically synthesized
  source 1..22: mol_type = other DNA
acaggattaagagattaaagta

SEQ ID NO: 34220 - DNA, 22 bp, synthetic construct
  misc_feature 1..22: note = chemically synthesized
  source 1..22: mol_type = other DNA
agagattaaagtaaagacaggc

SEQ ID NO: 34221 - DNA, 22 bp, synthetic construct
  misc_feature 1..22: note = chemically synthesized
  source 1..22: mol_type = other DNA
aagtaaagacaggcataaatca

SEQ ID NO: 34222 - DNA, 22 bp, synthetic construct
  misc_feature 1..22: note = chemically synthesized
  source 1..22: mol_type = other DNA
actggggaagtgataagtgtcc

SEQ ID NO: 34223 - DNA, 22 bp, synthetic construct
  misc_feature 1..22: note = chemically synthesized
  source 1..22: mol_type = other DNA
gggaagtgataagtgtccatga

SEQ ID NO: 34224 - DNA, 22 bp, synthetic construct
  misc_feature 1..22: note = chemically synthesized
  source 1..22: mol_type = other DNA
tacaatttatgtttagagattg

SEQ ID NO: 34225 - DNA, 22 bp, synthetic construct
  misc_feature 1..22: note = chemically synthesized
  source 1..22: mol_type = other DNA
acaatttatgtttagagattgc

SEQ ID NO: 34226 - DNA, 22 bp, synthetic construct
  misc_feature 1..22: note = chemically synthesized
  source 1..22: mol_type = other DNA
caatttatgtttagagattgca

SEQ ID NO: 34227 - DNA, 22 bp, synthetic construct
  misc_feature 1..22: note = chemically synthesized
  source 1..22: mol_type = other DNA
atgtttagagattgcagtaaag

SEQ ID NO: 34228 - DNA, 22 bp, synthetic construct
  misc_feature 1..22: note = chemically synthesized
  source 1..22: mol_type = other DNA
tgtttagagattgcagtaaaga

SEQ ID NO: 34229 - DNA, 22 bp, synthetic construct
  misc_feature 1..22: note = chemically synthesized
  source 1..22: mol_type = other DNA
agagattgcagtaaagacaggc

SEQ ID NO: 34230 - DNA, 22 bp, synthetic construct
  misc_feature 1..22: note = chemically synthesized
  source 1..22: mol_type = other DNA
gagattgcagtaaagacaggca

SEQ ID NO: 34231 - DNA, 22 bp, synthetic construct
  misc_feature 1..22: note = chemically synthesized
  source 1..22: mol_type = other DNA
cagtaaagacaggcataagaaa

SEQ ID NO: 34232 - DNA, 22 bp, synthetic construct
  misc_feature 1..22: note = chemically synthesized
  source 1..22: mol_type = other DNA
caaaagtattaatttggggaac

SEQ ID NO: 34233 - DNA, 22 bp, synthetic construct
  misc_feature 1..22: note = chemically synthesized
  source 1..22: mol_type = other DNA
atttggggaactaataaatgtc

SEQ ID NO: 34234 - DNA, 22 bp, synthetic construct
  misc_feature 1..22: note = chemically synthesized
  source 1..22: mol_type = other DNA
ggggaactaataaatgtccatg

SEQ ID NO: 34235 - DNA, 22 bp, synthetic construct
  misc_feature 1..22: note = chemically synthesized
  source 1..22: mol_type = other DNA
gggaactaataaatgtccatga

SEQ ID NO: 34236 - DNA, 22 bp, synthetic construct
  misc_feature 1..22: note = chemically synthesized
  source 1..22: mol_type = other DNA
ataaatgtccatgaaatcttca

SEQ ID NO: 34237 - DNA, 22 bp, synthetic construct
  misc_feature 1..22: note = chemically synthesized
  source 1..22: mol_type = other DNA
cacaatccacgaacttctgcca

SEQ ID NO: 34238 - DNA, 22 bp, synthetic construct
  misc_feature 1..22: note = chemically synthesized
  source 1..22: mol_type = other DNA
acaatccacgaacttctgccat

SEQ ID NO: 34239 - DNA, 22 bp, synthetic construct
  misc_feature 1..22: note = chemically synthesized
  source 1..22: mol_type = other DNA
ctgccatggcttcagctgatcc

SEQ ID NO: 34240 - DNA, 22 bp, synthetic construct
  misc_feature 1..22: note = chemically synthesized
  source 1..22: mol_type = other DNA
tgccatggcttcagctgatccc

SEQ ID NO: 34241 - DNA, 22 bp, synthetic construct
  misc_feature 1..22: note = chemically synthesized
  source 1..22: mol_type = other DNA
ccatggcttcagctgatccctc

SEQ ID NO: 34242 - DNA, 22 bp, synthetic construct
  misc_feature 1..22: note = chemically synthesized
  source 1..22: mol_type = other DNA
cagctgatccctccgtttggag

SEQ ID NO: 34243 - DNA, 22 bp, synthetic construct
  misc_feature 1..22: note = chemically synthesized
  source 1..22: mol_type = other DNA
agctgatccctccgtttggagt

SEQ ID NO: 34244 - DNA, 22 bp, synthetic construct
  misc_feature 1..22: note = chemically synthesized
  source 1..22: mol_type = other DNA
atccctccgtttggagtcccag

SEQ ID NO: 34245 - DNA, 22 bp, synthetic construct
  misc_feature 1..22: note = chemically synthesized
  source 1..22: mol_type = other DNA
cgtttggagtcccagacttccc

SEQ ID NO: 34246 - DNA, 22 bp, synthetic construct
  misc_feature 1..22: note = chemically synthesized
  source 1..22: mol_type = other DNA
ggagtcccagacttcccgcaac

SEQ ID NO: 34247 - DNA, 22 bp, synthetic construct
  misc_feature 1..22: note = chemically synthesized
  source 1..22: mol_type = other DNA
gagtcccagacttcccgcaaca

SEQ ID NO: 34248 - DNA, 22 bp, synthetic construct
  misc_feature 1..22: note = chemically synthesized
  source 1..22: mol_type = other DNA
cccgcaacaactgagaactctg

SEQ ID NO: 34249 - DNA, 22 bp, synthetic construct
  misc_feature 1..22: note = chemically synthesized
  source 1..22: mol_type = other DNA
ccgcaacaactgagaactctgg

SEQ ID NO: 34250 - DNA, 22 bp, synthetic construct
  misc_feature 1..22: note = chemically synthesized
  source 1..22: mol_type = other DNA
agaactctggagggcctaccct

SEQ ID NO: 34251 - DNA, 22 bp, synthetic construct
  misc_feature 1..22: note = chemically synthesized
  source 1..22: mol_type = other DNA
tggagggcctacccttcaccca

SEQ ID NO: 34252 - DNA, 22 bp, synthetic construct
  misc_feature 1..22: note = chemically synthesized
  source 1..22: mol_type = other DNA
gagggcctacccttcacccact

SEQ ID NO: 34253 - DNA, 22 bp, synthetic construct
  misc_feature 1..22: note = chemically synthesized
  source 1..22: mol_type = other DNA
cccttcacccacttccaccctt

SEQ ID NO: 34254 - DNA, 22 bp, synthetic construct
  misc_feature 1..22: note = chemically synthesized
  source 1..22: mol_type = other DNA
cacccacttccacccttcttat

SEQ ID NO: 34255 - DNA, 22 bp, synthetic construct
  misc_feature 1..22: note = chemically synthesized
  source 1..22: mol_type = other DNA
acccacttccacccttcttata

SEQ ID NO: 34256 - DNA, 22 bp, synthetic construct
  misc_feature 1..22: note = chemically synthesized
  source 1..22: mol_type = other DNA
ccacccttcttatatctcttaa

SEQ ID NO: 34257 - DNA, 22 bp, synthetic construct
  misc_feature 1..22: note = chemically synthesized
  source 1..22: mol_type = other DNA
cacccttcttatatctcttaag

SEQ ID NO: 34258 - DNA, 22 bp, synthetic construct
  misc_feature 1..22: note = chemically synthesized
  source 1..22: mol_type = other DNA
cttatatctcttaaggagctgt

SEQ ID NO: 34259 - DNA, 22 bp, synthetic construct
  misc_feature 1..22: note = chemically synthesized
  source 1..22: mol_type = other DNA
ttatatctcttaaggagctgtg

SEQ ID NO: 34260 - DNA, 22 bp, synthetic construct
  misc_feature 1..22: note = chemically synthesized
  source 1..22: mol_type = other DNA
atatctcttaaggagctgtgtt

SEQ ID NO: 34261 - DNA, 22 bp, synthetic construct
  misc_feature 1..22: note = chemically synthesized
  source 1..22: mol_type = other DNA
tatctcttaaggagctgtgttc

SEQ ID NO: 34262 - DNA, 22 bp, synthetic construct
  misc_feature 1..22: note = chemically synthesized
  source 1..22: mol_type = other DNA
ttaaggagctgtgttcagatgg

SEQ ID NO: 34263 - DNA, 22 bp, synthetic construct
  misc_feature 1..22: note = chemically synthesized
  source 1..22: mol_type = other DNA
aaggagctgtgttcagatggtt

SEQ ID NO: 34264 - DNA, 22 bp, synthetic construct
  misc_feature 1..22: note = chemically synthesized
  source 1..22: mol_type = other DNA
aggagctgtgttcagatggtta

SEQ ID NO: 34265 - DNA, 22 bp, synthetic construct
  misc_feature 1..22: note = chemically synthesized
  source 1..22: mol_type = other DNA
tgttcagatggttacatttcgc

SEQ ID NO: 34266 - DNA, 22 bp, synthetic construct
  misc_feature 1..22: note = chemically synthesized
  source 1..22: mol_type = other DNA
agatggttacatttcgcttgct

SEQ ID NO: 34267 - DNA, 22 bp, synthetic construct
  misc_feature 1..22: note = chemically synthesized
  source 1..22: mol_type = other DNA
catttcgcttgctgagcaagac

SEQ ID NO: 34268 - DNA, 22 bp, synthetic construct
  misc_feature 1..22: note = chemically synthesized
  source 1..22: mol_type = other DNA
cgcttgctgagcaagactgcat

SEQ ID NO: 34269 - DNA, 22 bp, synthetic construct
  misc_feature 1..22: note = chemically synthesized
  source 1..22: mol_type = other DNA
gcttgctgagcaagactgcatt

SEQ ID NO: 34270 - DNA, 22 bp, synthetic construct
  misc_feature 1..22: note = chemically synthesized
  source 1..22: mol_type = other DNA
gctgagcaagactgcattttca

SEQ ID NO: 34271 - DNA, 22 bp, synthetic construct
  misc_feature 1..22: note = chemically synthesized
  source 1..22: mol_type = other DNA
ctgagcaagactgcattttcat

SEQ ID NO: 34272 - DNA, 22 bp, synthetic construct
  misc_feature 1..22: note = chemically synthesized
  source 1..22: mol_type = other DNA
agcaagactgcattttcattat

SEQ ID NO: 34273 - DNA, 22 bp, synthetic construct
  misc_feature 1..22: note = chemically synthesized
  source 1..22: mol_type = other DNA
cattttcattatcctgggctaa

SEQ ID NO: 34274 - DNA, 22 bp, synthetic construct
  misc_feature 1..22: note = chemically synthesized
  source 1..22: mol_type = other DNA
tcattatcctgggctaaaatca

SEQ ID NO: 34275 - DNA, 22 bp, synthetic construct
  misc_feature 1..22: note = chemically synthesized
  source 1..22: mol_type = other DNA
cattatcctgggctaaaatcaa

SEQ ID NO: 34276 - DNA, 22 bp, synthetic construct
  misc_feature 1..22: note = chemically synthesized
  source 1..22: mol_type = other DNA
attatcctgggctaaaatcaat

SEQ ID NO: 34277 - DNA, 22 bp, synthetic construct
  misc_feature 1..22: note = chemically synthesized
  source 1..22: mol_type = other DNA
tcctgggctaaaatcaattggt

SEQ ID NO: 34278 - DNA, 22 bp, synthetic construct
  misc_feature 1..22: note = chemically synthesized
  source 1..22: mol_type = other DNA
ggctaaaatcaattggtattta

SEQ ID NO: 34279 - DNA, 22 bp, synthetic construct
  misc_feature 1..22: note = chemically synthesized
  source 1..22: mol_type = other DNA
aaatcaattggtatttaagtta

SEQ ID NO: 34280 - DNA, 22 bp, synthetic construct
  misc_feature 1..22: note = chemically synthesized
  source 1..22: mol_type = other DNA
gtatttaagttagagcaaaaag

SEQ ID NO: 34281 - DNA, 22 bp, synthetic construct
  misc_feature 1..22: note = chemically synthesized
  source 1..22: mol_type = other DNA
aagttagagcaaaaagggttct

SEQ ID NO: 34282 - DNA, 22 bp, synthetic construct
  misc_feature 1..22: note = chemically synthesized
  source 1..22: mol_type = other DNA
agttagagcaaaaagggttcta

SEQ ID NO: 34283 - DNA, 22 bp, synthetic construct
  misc_feature 1..22: note = chemically synthesized
  source 1..22: mol_type = other DNA
gagcaaaaagggttctaaccct

SEQ ID NO: 34284 - DNA, 22 bp, synthetic construct
  misc_feature 1..22: note = chemically synthesized
  source 1..22: mol_type = other DNA
taaccctatttacagcagcaca

SEQ ID NO: 34285 - DNA, 22 bp, synthetic construct
  misc_feature 1..22: note = chemically synthesized
  source 1..22: mol_type = other DNA
accctatttacagcagcacaca

SEQ ID NO: 34286 - DNA, 22 bp, synthetic construct
  misc_feature 1..22: note = chemically synthesized
  source 1..22: mol_type = other DNA
tttacagcagcacacatacact

SEQ ID NO: 34287 - DNA, 22 bp, synthetic construct
  misc_feature 1..22: note = chemically synthesized
  source 1..22: mol_type = other DNA
acagcagcacacatacacttac

SEQ ID NO: 34288 - DNA, 22 bp, synthetic construct
  misc_feature 1..22: note = chemically synthesized
  source 1..22: mol_type = other DNA
cagcagcacacatacacttaca

SEQ ID NO: 34289 - DNA, 22 bp, synthetic construct
  misc_feature 1..22: note = chemically synthesized
  source 1..22: mol_type = other DNA
acattagaattggctttaaggg

SEQ ID NO: 34290 - DNA, 22 bp, synthetic construct
  misc_feature 1..22: note = chemically synthesized
  source 1..22: mol_type = other DNA
cattagaattggctttaaggga

SEQ ID NO: 34291 - DNA, 22 bp, synthetic construct
  misc_feature 1..22: note = chemically synthesized
  source 1..22: mol_type = other DNA
gaattggctttaagggaaaaat

SEQ ID NO: 34292 - DNA, 22 bp, synthetic construct
  misc_feature 1..22: note = chemically synthesized
  source 1..22: mol_type = other DNA
gctttaagggaaaaattcaatc

SEQ ID NO: 34293 - DNA, 22 bp, synthetic construct
  misc_feature 1..22: note = chemically synthesized
  source 1..22: mol_type = other DNA
taagggaaaaattcaatcaatc

SEQ ID NO: 34294 - DNA, 22 bp, synthetic construct
  misc_feature 1..22: note = chemically synthesized
  source 1..22: mol_type = other DNA
aagggaaaaattcaatcaatcg

SEQ ID NO: 34295 - DNA, 22 bp, synthetic construct
  misc_feature 1..22: note = chemically synthesized
  source 1..22: mol_type = other DNA
agggaaaaattcaatcaatcga

SEQ ID NO: 34296 - DNA, 22 bp, synthetic construct
  misc_feature 1..22: note = chemically synthesized
  source 1..22: mol_type = other DNA
aatcaatcgacaaatttccact

SEQ ID NO: 34297 - DNA, 22 bp, synthetic construct
  misc_feature 1..22: note = chemically synthesized
  source 1..22: mol_type = other DNA
ccactgattaccttctatgagc

SEQ ID NO: 34298 - DNA, 22 bp, synthetic construct
  misc_feature 1..22: note = chemically synthesized
  source 1..22: mol_type = other DNA
cactgattaccttctatgagcc

SEQ ID NO: 34299 - DNA, 22 bp, synthetic construct
  misc_feature 1..22: note = chemically synthesized
  source 1..22: mol_type = other DNA
attaccttctatgagccaagac

SEQ ID NO: 34300 - DNA, 22 bp, synthetic construct
  misc_feature 1..22: note = chemically synthesized
  source 1..22: mol_type = other DNA
ccttctatgagccaagactgcc

SEQ ID NO: 34301 - DNA, 22 bp, synthetic construct
  misc_feature 1..22: note = chemically synthesized
  source 1..22: mol_type = other DNA
ctatgagccaagactgccatag

SEQ ID NO: 34302 - DNA, 22 bp, synthetic construct
  misc_feature 1..22: note = chemically synthesized
  source 1..22: mol_type = other DNA
tatgagccaagactgccatagt

SEQ ID NO: 34303 - DNA, 22 bp, synthetic construct
  misc_feature 1..22: note = chemically synthesized
  source 1..22: mol_type = other DNA
tgagccaagactgccatagtct

SEQ ID NO: 34304 - DNA, 22 bp, synthetic construct
  misc_feature 1..22: note = chemically synthesized
  source 1..22: mol_type = other DNA
ccatagtctcagccttcatgca

SEQ ID NO: 34305 - DNA, 22 bp, synthetic construct
  misc_feature 1..22: note = chemically synthesized
  source 1..22: mol_type = other DNA
agccttcatgcagcttataggc

SEQ ID NO: 34306 - DNA, 22 bp, synthetic construct
  misc_feature 1..22: note = chemically synthesized
  source 1..22: mol_type = other DNA
catgcagcttataggctagcaa

SEQ ID NO: 34307 - DNA, 22 bp, synthetic construct
  misc_feature 1..22: note = chemically synthesized
  source 1..22: mol_type = other DNA
atgcagcttataggctagcaaa

SEQ ID NO: 34308 - DNA, 22 bp, synthetic construct
  misc_feature 1..22: note = chemically synthesized
  source 1..22: mol_type = other DNA
ataggctagcaaaaaagccaga

SEQ ID NO: 34309 - DNA, 22 bp, synthetic construct
  misc_feature 1..22: note = chemically synthesized
  source 1..22: mol_type = other DNA
taggctagcaaaaaagccagac

SEQ ID NO: 34310 - DNA, 22 bp, synthetic construct
  misc_feature 1..22: note = chemically synthesized
  source 1..22: mol_type = other DNA
gcaaaaaagccagacagtgcac

SEQ ID NO: 34311 - DNA, 22 bp, synthetic construct
  misc_feature 1..22: note = chemically synthesized
  source 1..22: mol_type = other DNA
acaagtgtgttgagtgttgcaa

SEQ ID NO: 34312 - DNA, 22 bp, synthetic construct
  misc_feature 1..22: note = chemically synthesized
  source 1..22: mol_type = other DNA
agtgttgcaagagtaagtttca

SEQ ID NO: 34313 - DNA, 22 bp, synthetic construct
  misc_feature 1..22: note = chemically synthesized
  source 1..22: mol_type = other DNA
caagagtaagtttcaggggctc

SEQ ID NO: 34314 - DNA, 22 bp, synthetic construct
  misc_feature 1..22: note = chemically synthesized
  source 1..22: mol_type = other DNA
caggggctctccatgacttacc

SEQ ID NO: 34315 - DNA, 22 bp, synthetic construct
  misc_feature 1..22: note = chemically synthesized
  source 1..22: mol_type = other DNA
aggggctctccatgacttacct

SEQ ID NO: 34316 - DNA, 22 bp, synthetic construct
  misc_feature 1..22: note = chemically synthesized
  source 1..22: mol_type = other DNA
tccatgacttacctggttgaga

SEQ ID NO: 34317 - DNA, 22 bp, synthetic construct
  misc_feature 1..22: note = chemically synthesized
  source 1..22: mol_type = other DNA
catgacttacctggttgagaaa

SEQ ID NO: 34318 - DNA, 22 bp, synthetic construct
  misc_feature 1..22: note = chemically synthesized
  source 1..22: mol_type = other DNA
acctggttgagaaaccctttaa

SEQ ID NO: 34319 - DNA, 22 bp, synthetic construct
  misc_feature 1..22: note = chemically synthesized
  source 1..22: mol_type = other DNA
cctggttgagaaaccctttaac

SEQ ID NO: 34320 - DNA, 22 bp, synthetic construct
  misc_feature 1..22: note = chemically synthesized
  source 1..22: mol_type = other DNA
gttgagaaaccctttaactttt

SEQ ID NO: 34321 - DNA, 22 bp, synthetic construct
  misc_feature 1..22: note = chemically synthesized
  source 1..22: mol_type = other DNA
agaaaccctttaactttttttt

SEQ ID NO: 34322 - DNA, 22 bp, synthetic construct
  misc_feature 1..22: note = chemically synthesized
  source 1..22: mol_type = other DNA
taactttttttttcctctgggt

SEQ ID NO: 34323 - DNA, 22 bp, synthetic construct
  misc_feature 1..22: note = chemically synthesized
  source 1..22: mol_type = other DNA
aactttttttttcctctgggtg

SEQ ID NO: 34324 - DNA, 22 bp, synthetic construct
  misc_feature 1..22: note = chemically synthesized
  source 1..22: mol_type = other DNA
actttttttttcctctgggtgt

SEQ ID NO: 34325 - DNA, 22 bp, synthetic construct
  misc_feature 1..22: note = chemically synthesized
  source 1..22: mol_type = other DNA
tttttttcctctgggtgtaaag

SEQ ID NO: 34326 - DNA, 22 bp, synthetic construct
  misc_feature 1..22: note = chemically synthesized
  source 1..22: mol_type = other DNA
ttttttcctctgggtgtaaagt

SEQ ID NO: 34327 - DNA, 22 bp, synthetic construct
  misc_feature 1..22: note = chemically synthesized
  source 1..22: mol_type = other DNA
tttttcctctgggtgtaaagtg

SEQ ID NO: 34328 - DNA, 22 bp, synthetic construct
  misc_feature 1..22: note = chemically synthesized
  source 1..22: mol_type = other DNA
ttttcctctgggtgtaaagtga

SEQ ID NO: 34329 - DNA, 22 bp, synthetic construct
  misc_feature 1..22: note = chemically synthesized
  source 1..22: mol_type = other DNA
tttcctctgggtgtaaagtgaa

SEQ ID NO: 34330 - DNA, 22 bp, synthetic construct
  misc_feature 1..22: note = chemically synthesized
  source 1..22: mol_type = other DNA
ttcctctgggtgtaaagtgaag

SEQ ID NO: 34331 - DNA, 22 bp, synthetic construct
  misc_feature 1..22: note = chemically synthesized
  source 1..22: mol_type = other DNA
tcctctgggtgtaaagtgaaga

SEQ ID NO: 34332 - DNA, 22 bp, synthetic construct
  misc_feature 1..22: note = chemically synthesized
  source 1..22: mol_type = other DNA
cctctgggtgtaaagtgaagag

SEQ ID NO: 34333 - DNA, 22 bp, synthetic construct
  misc_feature 1..22: note = chemically synthesized
  source 1..22: mol_type = other DNA
ctctgggtgtaaagtgaagaga

SEQ ID NO: 34334 - DNA, 22 bp, synthetic construct
  misc_feature 1..22: note = chemically synthesized
  source 1..22: mol_type = other DNA
tgggtgtaaagtgaagagatgg

SEQ ID NO: 34335 - DNA, 22 bp, synthetic construct
  misc_feature 1..22: note = chemically synthesized
  source 1..22: mol_type = other DNA
ggtgtaaagtgaagagatggca

SEQ ID NO: 34336 - DNA, 22 bp, synthetic construct
  misc_feature 1..22: note = chemically synthesized
  source 1..22: mol_type = other DNA
cattgtgtcattgtgaaaagat

SEQ ID NO: 34337 - DNA, 22 bp, synthetic construct
  misc_feature 1..22: note = chemically synthesized
  source 1..22: mol_type = other DNA
tgtcattgtgaaaagatgctgg

SEQ ID NO: 34338 - DNA, 22 bp, synthetic construct
  misc_feature 1..22: note = chemically synthesized
  source 1..22: mol_type = other DNA
tgaaaagatgctgggctggcgt

SEQ ID NO: 34339 - DNA, 22 bp, synthetic construct
  misc_feature 1..22: note = chemically synthesized
  source 1..22: mol_type = other DNA
ggctggcgtgtctcctgaaggc

SEQ ID NO: 34340 - DNA, 22 bp, synthetic construct
  misc_feature 1..22: note = chemically synthesized
  source 1..22: mol_type = other DNA
gcgtgtctcctgaaggccaccc

SEQ ID NO: 34341 - DNA, 22 bp, synthetic construct
  misc_feature 1..22: note = chemically synthesized
  source 1..22: mol_type = other DNA
ctgaaggccacccatatcttta

SEQ ID NO: 34342 - DNA, 22 bp, synthetic construct
  misc_feature 1..22: note = chemically synthesized
  source 1..22: mol_type = other DNA
aaggccacccatatctttaaac

SEQ ID NO: 34343 - DNA, 22 bp, synthetic construct
  misc_feature 1..22: note = chemically synthesized
  source 1..22: mol_type = other DNA
taaactttattttcatgcattc

SEQ ID NO: 34344 - DNA, 22 bp, synthetic construct
  misc_feature 1..22: note = chemically synthesized
  source 1..22: mol_type = other DNA
aaactttattttcatgcattcg

SEQ ID NO: 34345 - DNA, 22 bp, synthetic construct
  misc_feature 1..22: note = chemically synthesized
  source 1..22: mol_type = other DNA
aactttattttcatgcattcgc

SEQ ID NO: 34346 - DNA, 22 bp, synthetic construct
  misc_feature 1..22: note = chemically synthesized
  source 1..22: mol_type = other DNA
tattttcatgcattcgcacaaa

SEQ ID NO: 34347 - DNA, 22 bp, synthetic construct
  misc_feature 1..22: note = chemically synthesized
  source 1..22: mol_type = other DNA
attttcatgcattcgcacaaat

SEQ ID NO: 34348 - DNA, 22 bp, synthetic construct
  misc_feature 1..22: note = chemically synthesized
  source 1..22: mol_type = other DNA
ttttcatgcattcgcacaaata

SEQ ID NO: 34349 - DNA, 22 bp, synthetic construct
  misc_feature 1..22: note = chemically synthesized
  source 1..22: mol_type = other DNA
tcatgcattcgcacaaatatag

SEQ ID NO: 34350 - DNA, 22 bp, synthetic construct
  misc_feature 1..22: note = chemically synthesized
  source 1..22: mol_type = other DNA
catgcattcgcacaaatataga

SEQ ID NO: 34351 - DNA, 22 bp, synthetic construct
  misc_feature 1..22: note = chemically synthesized
  source 1..22: mol_type = other DNA
atgcattcgcacaaatatagat

SEQ ID NO: 34352 - DNA, 22 bp, synthetic construct
  misc_feature 1..22: note = chemically synthesized
  source 1..22: mol_type = other DNA
gcacaaatatagatgtgttcca

SEQ ID NO: 34353 - DNA, 22 bp, synthetic construct
  misc_feature 1..22: note = chemically synthesized
  source 1..22: mol_type = other DNA
catagatgaggcagatagcaga

SEQ ID NO: 34354 - DNA, 22 bp, synthetic construct
  misc_feature 1..22: note = chemically synthesized
  source 1..22: mol_type = other DNA
ctgcctacagcaaggctagttt

SEQ ID NO: 34355 - DNA, 22 bp, synthetic construct
  misc_feature 1..22: note = chemically synthesized
  source 1..22: mol_type = other DNA
tgcctacagcaaggctagtttg

SEQ ID NO: 34356 - DNA, 22 bp, synthetic construct
  misc_feature 1..22: note = chemically synthesized
  source 1..22: mol_type = other DNA
cctacagcaaggctagtttgga

SEQ ID NO: 34357 - DNA, 22 bp, synthetic construct
  misc_feature 1..22: note = chemically synthesized
  source 1..22: mol_type = other DNA
cagcaaggctagtttggagagg

SEQ ID NO: 34358 - DNA, 22 bp, synthetic construct
  misc_feature 1..22: note = chemically synthesized
  source 1..22: mol_type = other DNA
gtttggagagggttttgctgtc

SEQ ID NO: 34359 - DNA, 22 bp, synthetic construct
  misc_feature 1..22: note = chemically synthesized
  source 1..22: mol_type = other DNA
ggagagggttttgctgtcaggg

SEQ ID NO: 34360 - DNA, 22 bp, synthetic construct
  misc_feature 1..22: note = chemically synthesized
  source 1..22: mol_type = other DNA
gagagggttttgctgtcagggt

SEQ ID NO: 34361 - DNA, 22 bp, synthetic construct
  misc_feature 1..22: note = chemically synthesized
  source 1..22: mol_type = other DNA
tgctgtcagggttggacccaca

SEQ ID NO: 34362 - DNA, 22 bp, synthetic construct
  misc_feature 1..22: note = chemically synthesized
  source 1..22: mol_type = other DNA
gctgtcagggttggacccacac

SEQ ID NO: 34363 - DNA, 22 bp, synthetic construct
  misc_feature 1..22: note = chemically synthesized
  source 1..22: mol_type = other DNA
ctgtcagggttggacccacaca

SEQ ID NO: 34364 - DNA, 22 bp, synthetic construct
  misc_feature 1..22: note = chemically synthesized
  source 1..22: mol_type = other DNA
tcagggttggacccacacacct

SEQ ID NO: 34365 - DNA, 22 bp, synthetic construct
  misc_feature 1..22: note = chemically synthesized
  source 1..22: mol_type = other DNA
gacccacacacctcttcataga

SEQ ID NO: 34366 - DNA, 22 bp, synthetic construct
  misc_feature 1..22: note = chemically synthesized
  source 1..22: mol_type = other DNA
ttcatagatgctttttcttttt

SEQ ID NO: 34367 - DNA, 22 bp, synthetic construct
  misc_feature 1..22: note = chemically synthesized
  source 1..22: mol_type = other DNA
catagatgctttttcttttttt

SEQ ID NO: 34368 - DNA, 22 bp, synthetic construct
  misc_feature 1..22: note = chemically synthesized
  source 1..22: mol_type = other DNA
atagatgctttttctttttttt

SEQ ID NO: 34369 - DNA, 22 bp, synthetic construct
  misc_feature 1..22: note = chemically synthesized
  source 1..22: mol_type = other DNA
tttcttttttttcccagagttt

SEQ ID NO: 34370 - DNA, 22 bp, synthetic construct
  misc_feature 1..22: note = chemically synthesized
  source 1..22: mol_type = other DNA
ttcttttttttcccagagtttg

SEQ ID NO: 34371 - DNA, 22 bp, synthetic construct
  misc_feature 1..22: note = chemically synthesized
  source 1..22: mol_type = other DNA
tcttttttttcccagagtttga

SEQ ID NO: 34372 - DNA, 22 bp, synthetic construct
  misc_feature 1..22: note = chemically synthesized
  source 1..22: mol_type = other DNA
cttttttttcccagagtttgaa

SEQ ID NO: 34373 - DNA, 22 bp, synthetic construct
  misc_feature 1..22: note = chemically synthesized
  source 1..22: mol_type = other DNA
ttttttttcccagagtttgaaa

SEQ ID NO: 34374 - DNA, 22 bp, synthetic construct
  misc_feature 1..22: note = chemically synthesized
  source 1..22: mol_type = other DNA
ttttttcccagagtttgaaagg

SEQ ID NO: 34375 - DNA, 22 bp, synthetic construct
  misc_feature 1..22: note = chemically synthesized
  source 1..22: mol_type = other DNA
tttttcccagagtttgaaaggg

SEQ ID NO: 34376 - DNA, 22 bp, synthetic construct
  misc_feature 1..22: note = chemically synthesized
  source 1..22: mol_type = other DNA
ttttcccagagtttgaaaggga

SEQ ID NO: 34377 - DNA, 22 bp, synthetic construct
  misc_feature 1..22: note = chemically synthesized
  source 1..22: mol_type = other DNA
tttcccagagtttgaaagggaa

SEQ ID NO: 34378 - DNA, 22 bp, synthetic construct
  misc_feature 1..22: note = chemically synthesized
  source 1..22: mol_type = other DNA
ttcccagagtttgaaagggaaa

SEQ ID NO: 34379 - DNA, 22 bp, synthetic construct
  misc_feature 1..22: note = chemically synthesized
  source 1..22: mol_type = other DNA
tcccagagtttgaaagggaaat

SEQ ID NO: 34380 - DNA, 22 bp, synthetic construct
  misc_feature 1..22: note = chemically synthesized
  source 1..22: mol_type = other DNA
cccagagtttgaaagggaaatg

SEQ ID NO: 34381 - DNA, 22 bp, synthetic construct
  misc_feature 1..22: note = chemically synthesized
  source 1..22: mol_type = other DNA
ccagagtttgaaagggaaatgg

SEQ ID NO: 34382 - DNA, 22 bp, synthetic construct
  misc_feature 1..22: note = chemically synthesized
  source 1..22: mol_type = other DNA
gaaagggaaatggagtctcaag

SEQ ID NO: 34383 - DNA, 22 bp, synthetic construct
  misc_feature 1..22: note = chemically synthesized
  source 1..22: mol_type = other DNA
aaagggaaatggagtctcaagt

SEQ ID NO: 34384 - DNA, 22 bp, synthetic construct
  misc_feature 1..22: note = chemically synthesized
  source 1..22: mol_type = other DNA
aagttcagggaggttacagtgt

SEQ ID NO: 34385 - DNA, 22 bp, synthetic construct
  misc_feature 1..22: note = chemically synthesized
  source 1..22: mol_type = other DNA
agggaggttacagtgtagaccc

SEQ ID NO: 34386 - DNA, 22 bp, synthetic construct
  misc_feature 1..22: note = chemically synthesized
  source 1..22: mol_type = other DNA
cagtgtagacccacaaatcagc

SEQ ID NO: 34387 - DNA, 22 bp, synthetic construct
  misc_feature 1..22: note = chemically synthesized
  source 1..22: mol_type = other DNA
agtacagctaagggtggagaag

SEQ ID NO: 34388 - DNA, 22 bp, synthetic construct
  misc_feature 1..22: note = chemically synthesized
  source 1..22: mol_type = other DNA
agggtggagaagtctatgcaat

SEQ ID NO: 34389 - DNA, 22 bp, synthetic construct
  misc_feature 1..22: note = chemically synthesized
  source 1..22: mol_type = other DNA
tgcaatatccagcactcttctg

SEQ ID NO: 34390 - DNA, 22 bp, synthetic construct
  misc_feature 1..22: note = chemically synthesized
  source 1..22: mol_type = other DNA
ttctgattaattagaagtcttt

SEQ ID NO: 34391 - DNA, 22 bp, synthetic construct
  misc_feature 1..22: note = chemically synthesized
  source 1..22: mol_type = other DNA
ctgattaattagaagtctttaa

SEQ ID NO: 34392 - DNA, 22 bp, synthetic construct
  misc_feature 1..22: note = chemically synthesized
  source 1..22: mol_type = other DNA
tgattaattagaagtctttaaa

SEQ ID NO: 34393 - DNA, 22 bp, synthetic construct
  misc_feature 1..22: note = chemically synthesized
  source 1..22: mol_type = other DNA
attaattagaagtctttaaaat

SEQ ID NO: 34394 - DNA, 22 bp, synthetic construct
  misc_feature 1..22: note = chemically synthesized
  source 1..22: mol_type = other DNA
attagaagtctttaaaattcac

SEQ ID NO: 34395 - DNA, 22 bp, synthetic construct
  misc_feature 1..22: note = chemically synthesized
  source 1..22: mol_type = other DNA
gaagtctttaaaattcacagaa

SEQ ID NO: 34396 - DNA, 22 bp, synthetic construct
  misc_feature 1..22: note = chemically synthesized
  source 1..22: mol_type = other DNA
taaaattcacagaaaccatatt

SEQ ID NO: 34397 - DNA, 22 bp, synthetic construct
  misc_feature 1..22: note = chemically synthesized
  source 1..22: mol_type = other DNA
aaaattcacagaaaccatattg

SEQ ID NO: 34398 - DNA, 22 bp, synthetic construct
  misc_feature 1..22: note = chemically synthesized
  source 1..22: mol_type = other DNA
aaattcacagaaaccatattgt

SEQ ID NO: 34399 - DNA, 22 bp, synthetic construct
  misc_feature 1..22: note = chemically synthesized
  source 1..22: mol_type = other DNA
acagaaaccatattgtcttccc

SEQ ID NO: 34400 - DNA, 22 bp, synthetic construct
  misc_feature 1..22: note = chemically synthesized
  source 1..22: mol_type = other DNA
tcttccctaaatgattcatatg

SEQ ID NO: 34401 - DNA, 22 bp, synthetic construct
  misc_feature 1..22: note = chemically synthesized
  source 1..22: mol_type = other DNA
ccctaaatgattcatatgtcaa

SEQ ID NO: 34402 - DNA, 22 bp, synthetic construct
  misc_feature 1..22: note = chemically synthesized
  source 1..22: mol_type = other DNA
cctaaatgattcatatgtcaag

SEQ ID NO: 34403 - DNA, 22 bp, synthetic construct
  misc_feature 1..22: note = chemically synthesized
  source 1..22: mol_type = other DNA
aatgattcatatgtcaagacac

SEQ ID NO: 34404 - DNA, 22 bp, synthetic construct
  misc_feature 1..22: note = chemically synthesized
  source 1..22: mol_type = other DNA
atatgtcaagacacagtaaaga

SEQ ID NO: 34405 - DNA, 22 bp, synthetic construct
  misc_feature 1..22: note = chemically synthesized
  source 1..22: mol_type = other DNA
tatgtggaacatcatacacaaa

SEQ ID NO: 34406 - DNA, 22 bp, synthetic construct
  misc_feature 1..22: note = chemically synthesized
  source 1..22: mol_type = other DNA
ttaccttagtaaactgccaatt

SEQ ID NO: 34407 - DNA, 22 bp, synthetic construct
  misc_feature 1..22: note = chemically synthesized
  source 1..22: mol_type = other DNA
accttagtaaactgccaatttt

SEQ ID NO: 34408 - DNA, 22 bp, synthetic construct
  misc_feature 1..22: note = chemically synthesized
  source 1..22: mol_type = other DNA
ccttagtaaactgccaattttc

SEQ ID NO: 34409 - DNA, 22 bp, synthetic construct
  misc_feature 1..22: note = chemically synthesized
  source 1..22: mol_type = other DNA
agtaaactgccaattttctgaa

SEQ ID NO: 34410 - DNA, 22 bp, synthetic construct
  misc_feature 1..22: note = chemically synthesized
  source 1..22: mol_type = other DNA
gtaaactgccaattttctgaaa

SEQ ID NO: 34411 - DNA, 22 bp, synthetic construct
  misc_feature 1..22: note = chemically synthesized
  source 1..22: mol_type = other DNA
ccaattttctgaaatgctcttt

SEQ ID NO: 34412 - DNA, 22 bp, synthetic construct
  misc_feature 1..22: note = chemically synthesized
  source 1..22: mol_type = other DNA
tctgaaatgctctttaaatcct

SEQ ID NO: 34413 - DNA, 22 bp, synthetic construct
  misc_feature 1..22: note = chemically synthesized
  source 1..22: mol_type = other DNA
ctgaaatgctctttaaatcctg

SEQ ID NO: 34414 - DNA, 22 bp, synthetic construct
  misc_feature 1..22: note = chemically synthesized
  source 1..22: mol_type = other DNA
tgaaatgctctttaaatcctgc

SEQ ID NO: 34415 - DNA, 22 bp, synthetic construct
  misc_feature 1..22: note = chemically synthesized
  source 1..22: mol_type = other DNA
aaatgctctttaaatcctgcta

SEQ ID NO: 34416 - DNA, 22 bp, synthetic construct
  misc_feature 1..22: note = chemically synthesized
  source 1..22: mol_type = other DNA
tttaaatcctgctaatggtggc

SEQ ID NO: 34417 - DNA, 22 bp, synthetic construct
  misc_feature 1..22: note = chemically synthesized
  source 1..22: mol_type = other DNA
taaatcctgctaatggtggcat

SEQ ID NO: 34418 - DNA, 22 bp, synthetic construct
  misc_feature 1..22: note = chemically synthesized
  source 1..22: mol_type = other DNA
aaatcctgctaatggtggcatt

SEQ ID NO: 34419 - DNA, 22 bp, synthetic construct
  misc_feature 1..22: note = chemically synthesized
  source 1..22: mol_type = other DNA
aatcctgctaatggtggcattt

SEQ ID NO: 34420 - DNA, 22 bp, synthetic construct
  misc_feature 1..22: note = chemically synthesized
  source 1..22: mol_type = other DNA
ctaatggtggcatttgtgtctt

SEQ ID NO: 34421 - DNA, 22 bp, synthetic construct
  misc_feature 1..22: note = chemically synthesized
  source 1..22: mol_type = other DNA
atggtggcatttgtgtctttgt

SEQ ID NO: 34422 - DNA, 22 bp, synthetic construct
  misc_feature 1..22: note = chemically synthesized
  source 1..22: mol_type = other DNA
gtgtctttgtcacctacagtac

SEQ ID NO: 34423 - DNA, 22 bp, synthetic construct
  misc_feature 1..22: note = chemically synthesized
  source 1..22: mol_type = other DNA
tgtctttgtcacctacagtaca

SEQ ID NO: 34424 - DNA, 22 bp, synthetic construct
  misc_feature 1..22: note = chemically synthesized
  source 1..22: mol_type = other DNA
tgtcacctacagtacatttctg

SEQ ID NO: 34425 - DNA, 22 bp, synthetic construct
  misc_feature 1..22: note = chemically synthesized
  source 1..22: mol_type = other DNA
gtcacctacagtacatttctgg

SEQ ID NO: 34426 - DNA, 22 bp, synthetic construct
  misc_feature 1..22: note = chemically synthesized
  source 1..22: mol_type = other DNA
tcacctacagtacatttctgga

SEQ ID NO: 34427 - DNA, 22 bp, synthetic construct
  misc_feature 1..22: note = chemically synthesized
  source 1..22: mol_type = other DNA
cagtacatttctggatttggga

SEQ ID NO: 34428 - DNA, 22 bp, synthetic construct
  misc_feature 1..22: note = chemically synthesized
  source 1..22: mol_type = other DNA
ctggatttgggaatgagtgttc

SEQ ID NO: 34429 - DNA, 22 bp, synthetic construct
  misc_feature 1..22: note = chemically synthesized
  source 1..22: mol_type = other DNA
tggatttgggaatgagtgttct

SEQ ID NO: 34430 - DNA, 22 bp, synthetic construct
  misc_feature 1..22: note = chemically synthesized
  source 1..22: mol_type = other DNA
gatttgggaatgagtgttcttc

SEQ ID NO: 34431 - DNA, 22 bp, synthetic construct
  misc_feature 1..22: note = chemically synthesized
  source 1..22: mol_type = other DNA
gggaatgagtgttcttcagagg

SEQ ID NO: 34432 - DNA, 22 bp, synthetic construct
  misc_feature 1..22: note = chemically synthesized
  source 1..22: mol_type = other DNA
ggaatgagtgttcttcagagga

SEQ ID NO: 34433 - DNA, 22 bp, synthetic construct
  misc_feature 1..22: note = chemically synthesized
  source 1..22: mol_type = other DNA
ttcagaggatcctcgctgccca

SEQ ID NO: 34434 - DNA, 22 bp, synthetic construct
  misc_feature 1..22: note = chemically synthesized
  source 1..22: mol_type = other DNA
cagaggatcctcgctgcccagg

SEQ ID NO: 34435 - DNA, 22 bp, synthetic construct
  misc_feature 1..22: note = chemically synthesized
  source 1..22: mol_type = other DNA
agaggatcctcgctgcccaggt

SEQ ID NO: 34436 - DNA, 22 bp, synthetic construct
  misc_feature 1..22: note = chemically synthesized
  source 1..22: mol_type = other DNA
gctgcccaggttccctgccaga

SEQ ID NO: 34437 - DNA, 22 bp, synthetic construct
  misc_feature 1..22: note = chemically synthesized
  source 1..22: mol_type = other DNA
cccaggttccctgccagaagga

SEQ ID NO: 34438 - DNA, 20 bp, synthetic construct
  misc_feature 1..20: note = chemically synthesized
  source 1..20: mol_type = other DNA
ctccttttgccacaccctca

SEQ ID NO: 34439 - DNA, 20 bp, synthetic construct
  misc_feature 1..20: note = chemically synthesized
  source 1..20: mol_type = other DNA
acaccctcacagacataacc

SEQ ID NO: 34440 - DNA, 20 bp, synthetic construct
  misc_feature 1..20: note = chemically synthesized
  source 1..20: mol_type = other DNA
ttgcatctttcaatccaatc

SEQ ID NO: 34441 - DNA, 20 bp, synthetic construct
  misc_feature 1..20: note = chemically synthesized
  source 1..20: mol_type = other DNA
tttcaatccaatcaagttga

SEQ ID NO: 34442 - DNA, 20 bp, synthetic construct
  misc_feature 1..20: note = chemically synthesized
  source 1..20: mol_type = other DNA
ttgacagtattaaccatcac

SEQ ID NO: 34443 - DNA, 20 bp, synthetic construct
  misc_feature 1..20: note = chemically synthesized
  source 1..20: mol_type = other DNA
tcatacataatcttcaaata

SEQ ID NO: 34444 - DNA, 20 bp, synthetic construct
  misc_feature 1..20: note = chemically synthesized
  source 1..20: mol_type = other DNA
cttcaaataaagacaataat

SEQ ID NO: 34445 - DNA, 20 bp, synthetic construct
  misc_feature 1..20: note = chemically synthesized
  source 1..20: mol_type = other DNA
ttcaaataaagacaataata

SEQ ID NO: 34446 - DNA, 20 bp, synthetic construct
  misc_feature 1..20: note = chemically synthesized
  source 1..20: mol_type = other DNA
tacaactatcctcatacaac

SEQ ID NO: 34447 - DNA, 20 bp, synthetic construct
  misc_feature 1..20: note = chemically synthesized
  source 1..20: mol_type = other DNA
cgcaccaatccccaaaccaa

SEQ ID NO: 34448 - DNA, 20 bp, synthetic construct
  misc_feature 1..20: note = chemically synthesized
  source 1..20: mol_type = other DNA
caaaccaaaagttattacat

SEQ ID NO: 34449 - DNA, 20 bp, synthetic construct
  misc_feature 1..20: note = chemically synthesized
  source 1..20: mol_type = other DNA
aaaccaaaagttattacata

SEQ ID NO: 34450 - DNA, 20 bp, synthetic construct
  misc_feature 1..20: note = chemically synthesized
  source 1..20: mol_type = other DNA
aatgcttaaatgctgatgtg

SEQ ID NO: 34451 - DNA, 20 bp, synthetic construct
  misc_feature 1..20: note = chemically synthesized
  source 1..20: mol_type = other DNA
gatgtgaagtccataaatct

SEQ ID NO: 34452 - DNA, 20 bp, synthetic construct
  misc_feature 1..20: note = chemically synthesized
  source 1..20: mol_type = other DNA
atgtgaagtccataaatcta

SEQ ID NO: 34453 - DNA, 20 bp, synthetic construct
  misc_feature 1..20: note = chemically synthesized
  source 1..20: mol_type = other DNA
aaatctaaggtcacatgata

SEQ ID NO: 34454 - DNA, 20 bp, synthetic construct
  misc_feature 1..20: note = chemically synthesized
  source 1..20: mol_type = other DNA
aatctaaggtcacatgataa

SEQ ID NO: 34455 - DNA, 20 bp, synthetic construct
  misc_feature 1..20: note = chemically synthesized
  source 1..20: mol_type = other DNA
cacatgataaaggaaaaata

SEQ ID NO: 34456 - DNA, 20 bp, synthetic construct
  misc_feature 1..20: note = chemically synthesized
  source 1..20: mol_type = other DNA
acatgataaaggaaaaataa

SEQ ID NO: 34457 - DNA, 20 bp, synthetic construct
  misc_feature 1..20: note = chemically synthesized
  source 1..20: mol_type = other DNA
aaaataaaggaaataaaata

SEQ ID NO: 34458 - DNA, 20 bp, synthetic construct
  misc_feature 1..20: note = chemically synthesized
  source 1..20: mol_type = other DNA
ataaaataaagatattttct

SEQ ID NO: 34459 - DNA, 20 bp, synthetic construct
  misc_feature 1..20: note = chemically synthesized
  source 1..20: mol_type = other DNA
taaagatattttcttagcac

SEQ ID NO: 34460 - DNA, 20 bp, synthetic construct
  misc_feature 1..20: note = chemically synthesized
  source 1..20: mol_type = other DNA
cacaagtgtacacatgcatt

SEQ ID NO: 34461 - DNA, 20 bp, synthetic construct
  misc_feature 1..20: note = chemically synthesized
  source 1..20: mol_type = other DNA
agtgtacacatgcatttaga

SEQ ID NO: 34462 - DNA, 20 bp, synthetic construct
  misc_feature 1..20: note = chemically synthesized
  source 1..20: mol_type = other DNA
gtacacatgcatttagaaag

SEQ ID NO: 34463 - DNA, 20 bp, synthetic construct
  misc_feature 1..20: note = chemically synthesized
  source 1..20: mol_type = other DNA
atgcatttagaaagtggata

SEQ ID NO: 34464 - DNA, 20 bp, synthetic construct
  misc_feature 1..20: note = chemically synthesized
  source 1..20: mol_type = other DNA
agaaagtggatatagtgctg

SEQ ID NO: 34465 - DNA, 20 bp, synthetic construct
  misc_feature 1..20: note = chemically synthesized
  source 1..20: mol_type = other DNA
gtgctgcagctgtccacttt

SEQ ID NO: 34466 - DNA, 20 bp, synthetic construct
  misc_feature 1..20: note = chemically synthesized
  source 1..20: mol_type = other DNA
tgctgcagctgtccactttc

SEQ ID NO: 34467 - DNA, 20 bp, synthetic construct
  misc_feature 1..20: note = chemically synthesized
  source 1..20: mol_type = other DNA
tgcagctgtccactttcggg

SEQ ID NO: 34468 - DNA, 20 bp, synthetic construct
  misc_feature 1..20: note = chemically synthesized
  source 1..20: mol_type = other DNA
ggtggtgcctgcatatcgtg

SEQ ID NO: 34469 - DNA, 20 bp, synthetic construct
  misc_feature 1..20: note = chemically synthesized
  source 1..20: mol_type = other DNA
gtgcagaaccatctatgaac

SEQ ID NO: 34470 - DNA, 20 bp, synthetic construct
  misc_feature 1..20: note = chemically synthesized
  source 1..20: mol_type = other DNA
accatctatgaaccagtcct

SEQ ID NO: 34471 - DNA, 20 bp, synthetic construct
  misc_feature 1..20: note = chemically synthesized
  source 1..20: mol_type = other DNA
cttcctctgtcaactgatca

SEQ ID NO: 34472 - DNA, 20 bp, synthetic construct
  misc_feature 1..20: note = chemically synthesized
  source 1..20: mol_type = other DNA
ttcctctgtcaactgatcat

SEQ ID NO: 34473 - DNA, 20 bp, synthetic construct
  misc_feature 1..20: note = chemically synthesized
  source 1..20: mol_type = other DNA
tcctctgtcaactgatcata

SEQ ID NO: 34474 - DNA, 20 bp, synthetic construct
  misc_feature 1..20: note = chemically synthesized
  source 1..20: mol_type = other DNA
gatcatagggaactccccat

SEQ ID NO: 34475 - DNA, 20 bp, synthetic construct
  misc_feature 1..20: note = chemically synthesized
  source 1..20: mol_type = other DNA
atcatagggaactccccatg

SEQ ID NO: 34476 - DNA, 20 bp, synthetic construct
  misc_feature 1..20: note = chemically synthesized
  source 1..20: mol_type = other DNA
ggaactccccatgaggccat

SEQ ID NO: 34477 - DNA, 20 bp, synthetic construct
  misc_feature 1..20: note = chemically synthesized
  source 1..20: mol_type = other DNA
tccccatgaggccattggtg

SEQ ID NO: 34478 - DNA, 20 bp, synthetic construct
  misc_feature 1..20: note = chemically synthesized
  source 1..20: mol_type = other DNA
ccccatgaggccattggtgc

SEQ ID NO: 34479 - DNA, 20 bp, synthetic construct
  misc_feature 1..20: note = chemically synthesized
  source 1..20: mol_type = other DNA
atgaggccattggtgcaggc

SEQ ID NO: 34480 - DNA, 20 bp, synthetic construct
  misc_feature 1..20: note = chemically synthesized
  source 1..20: mol_type = other DNA
tgaggccattggtgcaggct

SEQ ID NO: 34481 - DNA, 20 bp, synthetic construct
  misc_feature 1..20: note = chemically synthesized
  source 1..20: mol_type = other DNA
gaggccattggtgcaggctg

SEQ ID NO: 34482 - DNA, 20 bp, synthetic construct
  misc_feature 1..20: note = chemically synthesized
  source 1..20: mol_type = other DNA
aggccattggtgcaggctgg

SEQ ID NO: 34483 - DNA, 20 bp, synthetic construct
  misc_feature 1..20: note = chemically synthesized
  source 1..20: mol_type = other DNA
gccattggtgcaggctgggg

SEQ ID NO: 34484 - DNA, 20 bp, synthetic construct
  misc_feature 1..20: note = chemically synthesized
  source 1..20: mol_type = other DNA
ccattggtgcaggctggggg

SEQ ID NO: 34485 - DNA, 20 bp, synthetic construct
  misc_feature 1..20: note = chemically synthesized
  source 1..20: mol_type = other DNA
cattggtgcaggctggggga

SEQ ID NO: 34486 - DNA, 20 bp, synthetic construct
  misc_feature 1..20: note = chemically synthesized
  source 1..20: mol_type = other DNA
tggtgcaggctgggggaggg

SEQ ID NO: 34487 - DNA, 20 bp, synthetic construct
  misc_feature 1..20: note = chemically synthesized
  source 1..20: mol_type = other DNA
ggtgcaggctgggggaggga

SEQ ID NO: 34488 - DNA, 20 bp, synthetic construct
  misc_feature 1..20: note = chemically synthesized
  source 1..20: mol_type = other DNA
gcaggctgggggagggaagg

SEQ ID NO: 34489 - DNA, 20 bp, synthetic construct
  misc_feature 1..20: note = chemically synthesized
  source 1..20: mol_type = other DNA
caggctgggggagggaaggc

SEQ ID NO: 34490 - DNA, 20 bp, synthetic construct
  misc_feature 1..20: note = chemically synthesized
  source 1..20: mol_type = other DNA
aggctgggggagggaaggca

SEQ ID NO: 34491 - DNA, 20 bp, synthetic construct
  misc_feature 1..20: note = chemically synthesized
  source 1..20: mol_type = other DNA
ctgggggagggaaggcaggg

SEQ ID NO: 34492 - DNA, 20 bp, synthetic construct
  misc_feature 1..20: note = chemically synthesized
  source 1..20: mol_type = other DNA
gagggaaggcagggtggcat

SEQ ID NO: 34493 - DNA, 20 bp, synthetic construct
  misc_feature 1..20: note = chemically synthesized
  source 1..20: mol_type = other DNA
ggaaggcagggtggcatgag

SEQ ID NO: 34494 - DNA, 20 bp, synthetic construct
  misc_feature 1..20: note = chemically synthesized
  source 1..20: mol_type = other DNA
aaggcagggtggcatgagtg

SEQ ID NO: 34495 - DNA, 20 bp, synthetic construct
  misc_feature 1..20: note = chemically synthesized
  source 1..20: mol_type = other DNA
ggtggcatgagtggagaaca

SEQ ID NO: 34496 - DNA, 20 bp, synthetic construct
  misc_feature 1..20: note = chemically synthesized
  source 1..20: mol_type = other DNA
gtggcatgagtggagaacat

SEQ ID NO: 34497 - DNA, 20 bp, synthetic construct
  misc_feature 1..20: note = chemically synthesized
  source 1..20: mol_type = other DNA
agtggagaacatgggcattt

SEQ ID NO: 34498 - DNA, 20 bp, synthetic construct
  misc_feature 1..20: note = chemically synthesized
  source 1..20: mol_type = other DNA
atgtaacttacttgtgcctt

SEQ ID NO: 34499 - DNA, 20 bp, synthetic construct
  misc_feature 1..20: note = chemically synthesized
  source 1..20: mol_type = other DNA
tgtaacttacttgtgccttc

SEQ ID NO: 34500 - DNA, 20 bp, synthetic construct
  misc_feature 1..20: note = chemically synthesized
  source 1..20: mol_type = other DNA
tgtgccttcaggacctgctc

SEQ ID NO: 34501 - DNA, 20 bp, synthetic construct
  misc_feature 1..20: note = chemically synthesized
  source 1..20: mol_type = other DNA
cgctgtgctgacccacttca

SEQ ID NO: 34502 - DNA, 20 bp, synthetic construct
  misc_feature 1..20: note = chemically synthesized
  source 1..20: mol_type = other DNA
gtgctgacccacttcatggc

SEQ ID NO: 34503 - DNA, 20 bp, synthetic construct
  misc_feature 1..20: note = chemically synthesized
  source 1..20: mol_type = other DNA
tgacccacttcatggctaga

SEQ ID NO: 34504 - DNA, 20 bp, synthetic construct
  misc_feature 1..20: note = chemically synthesized
  source 1..20: mol_type = other DNA
gacccacttcatggctagat

SEQ ID NO: 34505 - DNA, 20 bp, synthetic construct
  misc_feature 1..20: note = chemically synthesized
  source 1..20: mol_type = other DNA
cacttcatggctagatgggt

SEQ ID NO: 34506 - DNA, 20 bp, synthetic construct
  misc_feature 1..20: note = chemically synthesized
  source 1..20: mol_type = other DNA
tcatggctagatgggtcaga

SEQ ID NO: 34507 - DNA, 20 bp, synthetic construct
  misc_feature 1..20: note = chemically synthesized
  source 1..20: mol_type = other DNA
tagatgggtcagaaagcaac

SEQ ID NO: 34508 - DNA, 20 bp, synthetic construct
  misc_feature 1..20: note = chemically synthesized
  source 1..20: mol_type = other DNA
agaaagcaaccagttcatga

SEQ ID NO: 34509 - DNA, 20 bp, synthetic construct
  misc_feature 1..20: note = chemically synthesized
  source 1..20: mol_type = other DNA
gaaagcaaccagttcatgat

SEQ ID NO: 34510 - DNA, 20 bp, synthetic construct
  misc_feature 1..20: note = chemically synthesized
  source 1..20: mol_type = other DNA
agcaaccagttcatgatagg

SEQ ID NO: 34511 - DNA, 20 bp, synthetic construct
  misc_feature 1..20: note = chemically synthesized
  source 1..20: mol_type = other DNA
gcaaccagttcatgataggc

SEQ ID NO: 34512 - DNA, 20 bp, synthetic construct
  misc_feature 1..20: note = chemically synthesized
  source 1..20: mol_type = other DNA
cagttcatgataggcaggtt

SEQ ID NO: 34513 - DNA, 20 bp, synthetic construct
  misc_feature 1..20: note = chemically synthesized
  source 1..20: mol_type = other DNA
agttcatgataggcaggttc

SEQ ID NO: 34514 - DNA, 20 bp, synthetic construct
  misc_feature 1..20: note = chemically synthesized
  source 1..20: mol_type = other DNA
tcatgataggcaggttcagg

SEQ ID NO: 34515 - DNA, 20 bp, synthetic construct
  misc_feature 1..20: note = chemically synthesized
  source 1..20: mol_type = other DNA
ataggcaggttcaggtagca

SEQ ID NO: 34516 - DNA, 20 bp, synthetic construct
  misc_feature 1..20: note = chemically synthesized
  source 1..20: mol_type = other DNA
catggtgactttatgaccca

SEQ ID NO: 34517 - DNA, 20 bp, synthetic construct
  misc_feature 1..20: note = chemically synthesized
  source 1..20: mol_type = other DNA
atgacccacagtcaaacgtt

SEQ ID NO: 34518 - DNA, 20 bp, synthetic construct
  misc_feature 1..20: note = chemically synthesized
  source 1..20: mol_type = other DNA
caaacgttcagttaccacca

SEQ ID NO: 34519 - DNA, 20 bp, synthetic construct
  misc_feature 1..20: note = chemically synthesized
  source 1..20: mol_type = other DNA
ttaccaccaaagcccaataa

SEQ ID NO: 34520 - DNA, 20 bp, synthetic construct
  misc_feature 1..20: note = chemically synthesized
  source 1..20: mol_type = other DNA
aaagcccaataacagaccaa

SEQ ID NO: 34521 - DNA, 20 bp, synthetic construct
  misc_feature 1..20: note = chemically synthesized
  source 1..20: mol_type = other DNA
gaccaatagctgtctctcaa

SEQ ID NO: 34522 - DNA, 20 bp, synthetic construct
  misc_feature 1..20: note = chemically synthesized
  source 1..20: mol_type = other DNA
accaatagctgtctctcaaa

SEQ ID NO: 34523 - DNA, 20 bp, synthetic construct
  misc_feature 1..20: note = chemically synthesized
  source 1..20: mol_type = other DNA
caatagctgtctctcaaaag

SEQ ID NO: 34524 - DNA, 20 bp, synthetic construct
  misc_feature 1..20: note = chemically synthesized
  source 1..20: mol_type = other DNA
atagctgtctctcaaaagga

SEQ ID NO: 34525 - DNA, 20 bp, synthetic construct
  misc_feature 1..20: note = chemically synthesized
  source 1..20: mol_type = other DNA
gctgtctctcaaaaggagag

SEQ ID NO: 34526 - DNA, 20 bp, synthetic construct
  misc_feature 1..20: note = chemically synthesized
  source 1..20: mol_type = other DNA
aaaaggagagtagttatctg

SEQ ID NO: 34527 - DNA, 20 bp, synthetic construct
  misc_feature 1..20: note = chemically synthesized
  source 1..20: mol_type = other DNA
aggagagtagttatctgcag

SEQ ID NO: 34528 - DNA, 20 bp, synthetic construct
  misc_feature 1..20: note = chemically synthesized
  source 1..20: mol_type = other DNA
agagtagttatctgcagaag

SEQ ID NO: 34529 - DNA, 20 bp, synthetic construct
  misc_feature 1..20: note = chemically synthesized
  source 1..20: mol_type = other DNA
gtagttatctgcagaagtgg

SEQ ID NO: 34530 - DNA, 20 bp, synthetic construct
  misc_feature 1..20: note = chemically synthesized
  source 1..20: mol_type = other DNA
tagttatctgcagaagtggc

SEQ ID NO: 34531 - DNA, 20 bp, synthetic construct
  misc_feature 1..20: note = chemically synthesized
  source 1..20: mol_type = other DNA
agttatctgcagaagtggca

SEQ ID NO: 34532 - DNA, 20 bp, synthetic construct
  misc_feature 1..20: note = chemically synthesized
  source 1..20: mol_type = other DNA
agggccttgctccaaaatcc

SEQ ID NO: 34533 - DNA, 20 bp, synthetic construct
  misc_feature 1..20: note = chemically synthesized
  source 1..20: mol_type = other DNA
ggccttgctccaaaatccta

SEQ ID NO: 34534 - DNA, 20 bp, synthetic construct
  misc_feature 1..20: note = chemically synthesized
  source 1..20: mol_type = other DNA
gccttgctccaaaatcctag

SEQ ID NO: 34535 - DNA, 20 bp, synthetic construct
  misc_feature 1..20: note = chemically synthesized
  source 1..20: mol_type = other DNA
tctccactgtgattcaccta

SEQ ID NO: 34536 - DNA, 20 bp, synthetic construct
  misc_feature 1..20: note = chemically synthesized
  source 1..20: mol_type = other DNA
ctccactgtgattcacctat

SEQ ID NO: 34537 - DNA, 20 bp, synthetic construct
  misc_feature 1..20: note = chemically synthesized
  source 1..20: mol_type = other DNA
tccactgtgattcacctatg

SEQ ID NO: 34538 - DNA, 20 bp, synthetic construct
  misc_feature 1..20: note = chemically synthesized
  source 1..20: mol_type = other DNA
ccactgtgattcacctatgg

SEQ ID NO: 34539 - DNA, 20 bp, synthetic construct
  misc_feature 1..20: note = chemically synthesized
  source 1..20: mol_type = other DNA
tcacctatgggggcctgcca

SEQ ID NO: 34540 - DNA, 20 bp, synthetic construct
  misc_feature 1..20: note = chemically synthesized
  source 1..20: mol_type = other DNA
cacctatgggggcctgccaa

SEQ ID NO: 34541 - DNA, 20 bp, synthetic construct
  misc_feature 1..20: note = chemically synthesized
  source 1..20: mol_type = other DNA
ggcctgccaaaggctccaaa

SEQ ID NO: 34542 - DNA, 20 bp, synthetic construct
  misc_feature 1..20: note = chemically synthesized
  source 1..20: mol_type = other DNA
ctatctgccactgacacctc

SEQ ID NO: 34543 - DNA, 20 bp, synthetic construct
  misc_feature 1..20: note = chemically synthesized
  source 1..20: mol_type = other DNA
actgacacctcaagcaccat

SEQ ID NO: 34544 - DNA, 20 bp, synthetic construct
  misc_feature 1..20: note = chemically synthesized
  source 1..20: mol_type = other DNA
ctcaagcaccattggatctg

SEQ ID NO: 34545 - DNA, 20 bp, synthetic construct
  misc_feature 1..20: note = chemically synthesized
  source 1..20: mol_type = other DNA
tcaagcaccattggatctgc

SEQ ID NO: 34546 - DNA, 20 bp, synthetic construct
  misc_feature 1..20: note = chemically synthesized
  source 1..20: mol_type = other DNA
caagcaccattggatctgcg

SEQ ID NO: 34547 - DNA, 20 bp, synthetic construct
  misc_feature 1..20: note = chemically synthesized
  source 1..20: mol_type = other DNA
attggatctgcggggtcatg

SEQ ID NO: 34548 - DNA, 20 bp, synthetic construct
  misc_feature 1..20: note = chemically synthesized
  source 1..20: mol_type = other DNA
gcggggtcatgtggcccaaa

SEQ ID NO: 34549 - DNA, 20 bp, synthetic construct
  misc_feature 1..20: note = chemically synthesized
  source 1..20: mol_type = other DNA
gggtcatgtggcccaaatgg

SEQ ID NO: 34550 - DNA, 20 bp, synthetic construct
  misc_feature 1..20: note = chemically synthesized
  source 1..20: mol_type = other DNA
gtcatgtggcccaaatggca

SEQ ID NO: 34551 - DNA, 20 bp, synthetic construct
  misc_feature 1..20: note = chemically synthesized
  source 1..20: mol_type = other DNA
atgtggcccaaatggcagag

SEQ ID NO: 34552 - DNA, 20 bp, synthetic construct
  misc_feature 1..20: note = chemically synthesized
  source 1..20: mol_type = other DNA
aaatggcagagcagctttca

SEQ ID NO: 34553 - DNA, 20 bp, synthetic construct
  misc_feature 1..20: note = chemically synthesized
  source 1..20: mol_type = other DNA
tggcagagcagctttcacag

SEQ ID NO: 34554 - DNA, 20 bp, synthetic construct
  misc_feature 1..20: note = chemically synthesized
  source 1..20: mol_type = other DNA
gagcagctttcacagcagcc

SEQ ID NO: 34555 - DNA, 20 bp, synthetic construct
  misc_feature 1..20: note = chemically synthesized
  source 1..20: mol_type = other DNA
acagcagcctggacctgttt

SEQ ID NO: 34556 - DNA, 20 bp, synthetic construct
  misc_feature 1..20: note = chemically synthesized
  source 1..20: mol_type = other DNA
agcagcctggacctgtttca

SEQ ID NO: 34557 - DNA, 20 bp, synthetic construct
  misc_feature 1..20: note = chemically synthesized
  source 1..20: mol_type = other DNA
ttcagagccttcttttgttc

SEQ ID NO: 34558 - DNA, 20 bp, synthetic construct
  misc_feature 1..20: note = chemically synthesized
  source 1..20: mol_type = other DNA
ttctagactgcacttaaatc

SEQ ID NO: 34559 - DNA, 20 bp, synthetic construct
  misc_feature 1..20: note = chemically synthesized
  source 1..20: mol_type = other DNA
tagactgcacttaaatctgg

SEQ ID NO: 34560 - DNA, 20 bp, synthetic construct
  misc_feature 1..20: note = chemically synthesized
  source 1..20: mol_type = other DNA
acttaaatctggcagccttt

SEQ ID NO: 34561 - DNA, 20 bp, synthetic construct
  misc_feature 1..20: note = chemically synthesized
  source 1..20: mol_type = other DNA
cttaaatctggcagcctttc

SEQ ID NO: 34562 - DNA, 20 bp, synthetic construct
  misc_feature 1..20: note = chemically synthesized
  source 1..20: mol_type = other DNA
ctttcaggtcactcgataaa

SEQ ID NO: 34563 - DNA, 20 bp, synthetic construct
  misc_feature 1..20: note = chemically synthesized
  source 1..20: mol_type = other DNA
tttcaggtcactcgataaat

SEQ ID NO: 34564 - DNA, 20 bp, synthetic construct
  misc_feature 1..20: note = chemically synthesized
  source 1..20: mol_type = other DNA
aggtcactcgataaatgggc

SEQ ID NO: 34565 - DNA, 20 bp, synthetic construct
  misc_feature 1..20: note = chemically synthesized
  source 1..20: mol_type = other DNA
gtcactcgataaatgggcca

SEQ ID NO: 34566 - DNA, 20 bp, synthetic construct
  misc_feature 1..20: note = chemically synthesized
  source 1..20: mol_type = other DNA
ccagagtaacacacccaaac

SEQ ID NO: 34567 - DNA, 20 bp, synthetic construct
  misc_feature 1..20: note = chemically synthesized
  source 1..20: mol_type = other DNA
cagagtaacacacccaaacg

SEQ ID NO: 34568 - DNA, 20 bp, synthetic construct
  misc_feature 1..20: note = chemically synthesized
  source 1..20: mol_type = other DNA
tgttgcctccaaaatccaaa

SEQ ID NO: 34569 - DNA, 20 bp, synthetic construct
  misc_feature 1..20: note = chemically synthesized
  source 1..20: mol_type = other DNA
gttgcctccaaaatccaaat

SEQ ID NO: 34570 - DNA, 20 bp, synthetic construct
  misc_feature 1..20: note = chemically synthesized
  source 1..20: mol_type = other DNA
caaaatccaaataggcccac

SEQ ID NO: 34571 - DNA, 20 bp, synthetic construct
  misc_feature 1..20: note = chemically synthesized
  source 1..20: mol_type = other DNA
aaaatccaaataggcccacc

SEQ ID NO: 34572 - DNA, 20 bp, synthetic construct
  misc_feature 1..20: note = chemically synthesized
  source 1..20: mol_type = other DNA
caggcattgtgcctctttct

SEQ ID NO: 34573 - DNA, 20 bp, synthetic construct
  misc_feature 1..20: note = chemically synthesized
  source 1..20: mol_type = other DNA
tgtgcctctttcttggttgt

SEQ ID NO: 34574 - DNA, 20 bp, synthetic construct
  misc_feature 1..20: note = chemically synthesized
  source 1..20: mol_type = other DNA
tgcctctttcttggttgtaa

SEQ ID NO: 34575 - DNA, 20 bp, synthetic construct
  misc_feature 1..20: note = chemically synthesized
  source 1..20: mol_type = other DNA
gcctctttcttggttgtaag

SEQ ID NO: 34576 - DNA, 20 bp, synthetic construct
  misc_feature 1..20: note = chemically synthesized
  source 1..20: mol_type = other DNA
cctctttcttggttgtaaga

SEQ ID NO: 34577 - DNA, 20 bp, synthetic construct
  misc_feature 1..20: note = chemically synthesized
  source 1..20: mol_type = other DNA
ctctttcttggttgtaagag

SEQ ID NO: 34578 - DNA, 20 bp, synthetic construct
  misc_feature 1..20: note = chemically synthesized
  source 1..20: mol_type = other DNA
gttgtaagaggggccaaacg

SEQ ID NO: 34579 - DNA, 20 bp, synthetic construct
  misc_feature 1..20: note = chemically synthesized
  source 1..20: mol_type = other DNA
taagaggggccaaacgcagc

SEQ ID NO: 34580 - DNA, 20 bp, synthetic construct
  misc_feature 1..20: note = chemically synthesized
  source 1..20: mol_type = other DNA
cagcaagttatgcttcacct

SEQ ID NO: 34581 - DNA, 20 bp, synthetic construct
  misc_feature 1..20: note = chemically synthesized
  source 1..20: mol_type = other DNA
caagttatgcttcaccttag

SEQ ID NO: 34582 - DNA, 20 bp, synthetic construct
  misc_feature 1..20: note = chemically synthesized
  source 1..20: mol_type = other DNA
aagttatgcttcaccttaga

SEQ ID NO: 34583 - DNA, 20 bp, synthetic construct
  misc_feature 1..20: note = chemically synthesized
  source 1..20: mol_type = other DNA
ccttagaaggaatatctcca

SEQ ID NO: 34584 - DNA, 20 bp, synthetic construct
  misc_feature 1..20: note = chemically synthesized
  source 1..20: mol_type = other DNA
cttagaaggaatatctccat

SEQ ID NO: 34585 - DNA, 20 bp, synthetic construct
  misc_feature 1..20: note = chemically synthesized
  source 1..20: mol_type = other DNA
ctccataggtctcatgccac

SEQ ID NO: 34586 - DNA, 20 bp, synthetic construct
  misc_feature 1..20: note = chemically synthesized
  source 1..20: mol_type = other DNA
gtctcatgccactggaaccc

SEQ ID NO: 34587 - DNA, 20 bp, synthetic construct
  misc_feature 1..20: note = chemically synthesized
  source 1..20: mol_type = other DNA
ggaaccctagaaattttacc

SEQ ID NO: 34588 - DNA, 20 bp, synthetic construct
  misc_feature 1..20: note = chemically synthesized
  source 1..20: mol_type = other DNA
gaaccctagaaattttaccg

SEQ ID NO: 34589 - DNA, 20 bp, synthetic construct
  misc_feature 1..20: note = chemically synthesized
  source 1..20: mol_type = other DNA
ccctagaaattttaccgagg

SEQ ID NO: 34590 - DNA, 20 bp, synthetic construct
  misc_feature 1..20: note = chemically synthesized
  source 1..20: mol_type = other DNA
agaaattttaccgaggtaga

SEQ ID NO: 34591 - DNA, 20 bp, synthetic construct
  misc_feature 1..20: note = chemically synthesized
  source 1..20: mol_type = other DNA
ggtagaaagtccctaaattt

SEQ ID NO: 34592 - DNA, 20 bp, synthetic construct
  misc_feature 1..20: note = chemically synthesized
  source 1..20: mol_type = other DNA
gaaagtccctaaattttagc

SEQ ID NO: 34593 - DNA, 20 bp, synthetic construct
  misc_feature 1..20: note = chemically synthesized
  source 1..20: mol_type = other DNA
tggatttatttcccatcctc

SEQ ID NO: 34594 - DNA, 20 bp, synthetic construct
  misc_feature 1..20: note = chemically synthesized
  source 1..20: mol_type = other DNA
catacaaatgtctcaccaat

SEQ ID NO: 34595 - DNA, 20 bp, synthetic construct
  misc_feature 1..20: note = chemically synthesized
  source 1..20: mol_type = other DNA
aaatgtctcaccaataagtt

SEQ ID NO: 34596 - DNA, 20 bp, synthetic construct
  misc_feature 1..20: note = chemically synthesized
  source 1..20: mol_type = other DNA
tcataatgtcatgaatgtaa

SEQ ID NO: 34597 - DNA, 20 bp, synthetic construct
  misc_feature 1..20: note = chemically synthesized
  source 1..20: mol_type = other DNA
atgtcatgaatgtaatggac

SEQ ID NO: 34598 - DNA, 20 bp, synthetic construct
  misc_feature 1..20: note = chemically synthesized
  source 1..20: mol_type = other DNA
tggaccagtgttatatctcg

SEQ ID NO: 34599 - DNA, 20 bp, synthetic construct
  misc_feature 1..20: note = chemically synthesized
  source 1..20: mol_type = other DNA
accagtgttatatctcgtgg

SEQ ID NO: 34600 - DNA, 20 bp, synthetic construct
  misc_feature 1..20: note = chemically synthesized
  source 1..20: mol_type = other DNA
ttatatctcgtggaagtgaa

SEQ ID NO: 34601 - DNA, 20 bp, synthetic construct
  misc_feature 1..20: note = chemically synthesized
  source 1..20: mol_type = other DNA
atctcgtggaagtgaaaagc

SEQ ID NO: 34602 - DNA, 20 bp, synthetic construct
  misc_feature 1..20: note = chemically synthesized
  source 1..20: mol_type = other DNA
cgtggaagtgaaaagcgagc

SEQ ID NO: 34603 - DNA, 20 bp, synthetic construct
  misc_feature 1..20: note = chemically synthesized
  source 1..20: mol_type = other DNA
gtggaagtgaaaagcgagca

SEQ ID NO: 34604 - DNA, 20 bp, synthetic construct
  misc_feature 1..20: note = chemically synthesized
  source 1..20: mol_type = other DNA
cgagcaaggtctctccaaat

SEQ ID NO: 34605 - DNA, 20 bp, synthetic construct
  misc_feature 1..20: note = chemically synthesized
  source 1..20: mol_type = other DNA
ccaaataagattatgacaca

SEQ ID NO: 34606 - DNA, 20 bp, synthetic construct
  misc_feature 1..20: note = chemically synthesized
  source 1..20: mol_type = other DNA
ataagattatgacacaaagc

SEQ ID NO: 34607 - DNA, 20 bp, synthetic construct
  misc_feature 1..20: note = chemically synthesized
  source 1..20: mol_type = other DNA
aagattatgacacaaagctg

SEQ ID NO: 34608 - DNA, 20 bp, synthetic construct
  misc_feature 1..20: note = chemically synthesized
  source 1..20: mol_type = other DNA
gattatgacacaaagctgga

SEQ ID NO: 34609 - DNA, 20 bp, synthetic construct
  misc_feature 1..20: note = chemically synthesized
  source 1..20: mol_type = other DNA
tggagagttgatacacccct

SEQ ID NO: 34610 - DNA, 20 bp, synthetic construct
  misc_feature 1..20: note = chemically synthesized
  source 1..20: mol_type = other DNA
ggagagttgatacacccctg

SEQ ID NO: 34611 - DNA, 20 bp, synthetic construct
  misc_feature 1..20: note = chemically synthesized
  source 1..20: mol_type = other DNA
gagttgatacacccctgagg

SEQ ID NO: 34612 - DNA, 20 bp, synthetic construct
  misc_feature 1..20: note = chemically synthesized
  source 1..20: mol_type = other DNA
agttgatacacccctgaggt

SEQ ID NO: 34613 - DNA, 20 bp, synthetic construct
  misc_feature 1..20: note = chemically synthesized
  source 1..20: mol_type = other DNA
gttgatacacccctgaggta

SEQ ID NO: 34614 - DNA, 20 bp, synthetic construct
  misc_feature 1..20: note = chemically synthesized
  source 1..20: mol_type = other DNA
gatacacccctgaggtaggg

SEQ ID NO: 34615 - DNA, 20 bp, synthetic construct
  misc_feature 1..20: note = chemically synthesized
  source 1..20: mol_type = other DNA
acccctgaggtagggtggta

SEQ ID NO: 34616 - DNA, 20 bp, synthetic construct
  misc_feature 1..20: note = chemically synthesized
  source 1..20: mol_type = other DNA
cccctgaggtagggtggtaa

SEQ ID NO: 34617 - DNA, 20 bp, synthetic construct
  misc_feature 1..20: note = chemically synthesized
  source 1..20: mol_type = other DNA
gggtggtaaaggtataatgc

SEQ ID NO: 34618 - DNA, 20 bp, synthetic construct
  misc_feature 1..20: note = chemically synthesized
  source 1..20: mol_type = other DNA
aggtataatgctggccttgt

SEQ ID NO: 34619 - DNA, 20 bp, synthetic construct
  misc_feature 1..20: note = chemically synthesized
  source 1..20: mol_type = other DNA
aatgctggccttgtcagctg

SEQ ID NO: 34620 - DNA, 20 bp, synthetic construct
  misc_feature 1..20: note = chemically synthesized
  source 1..20: mol_type = other DNA
atgctggccttgtcagctga

SEQ ID NO: 34621 - DNA, 20 bp, synthetic construct
  misc_feature 1..20: note = chemically synthesized
  source 1..20: mol_type = other DNA
agctgaaggcaaattgcttc

SEQ ID NO: 34622 - DNA, 20 bp, synthetic construct
  misc_feature 1..20: note = chemically synthesized
  source 1..20: mol_type = other DNA
tgaaggcaaattgcttctgg

SEQ ID NO: 34623 - DNA, 20 bp, synthetic construct
  misc_feature 1..20: note = chemically synthesized
  source 1..20: mol_type = other DNA
gaaggcaaattgcttctggt

SEQ ID NO: 34624 - DNA, 20 bp, synthetic construct
  misc_feature 1..20: note = chemically synthesized
  source 1..20: mol_type = other DNA
attgcttctggtgggtctta

SEQ ID NO: 34625 - DNA, 20 bp, synthetic construct
  misc_feature 1..20: note = chemically synthesized
  source 1..20: mol_type = other DNA
cttctggtgggtcttatgga

SEQ ID NO: 34626 - DNA, 20 bp, synthetic construct
  misc_feature 1..20: note = chemically synthesized
  source 1..20: mol_type = other DNA
ttctggtgggtcttatggac

SEQ ID NO: 34627 - DNA, 20 bp, synthetic construct
  misc_feature 1..20: note = chemically synthesized
  source 1..20: mol_type = other DNA
gtgggtcttatggacaggaa

SEQ ID NO: 34628 - DNA, 20 bp, synthetic construct
  misc_feature 1..20: note = chemically synthesized
  source 1..20: mol_type = other DNA
gggtcttatggacaggaatg

SEQ ID NO: 34629 - DNA, 20 bp, synthetic construct
  misc_feature 1..20: note = chemically synthesized
  source 1..20: mol_type = other DNA
tatggacaggaatggagaaa

SEQ ID NO: 34630 - DNA, 20 bp, synthetic construct
  misc_feature 1..20: note = chemically synthesized
  source 1..20: mol_type = other DNA
tggagaaaaagccacttgcc

SEQ ID NO: 34631 - DNA, 20 bp, synthetic construct
  misc_feature 1..20: note = chemically synthesized
  source 1..20: mol_type = other DNA
aaagccacttgccaagccaa

SEQ ID NO: 34632 - DNA, 20 bp, synthetic construct
  misc_feature 1..20: note = chemically synthesized
  source 1..20: mol_type = other DNA
ccaagccaatggctgcatac

SEQ ID NO: 34633 - DNA, 20 bp, synthetic construct
  misc_feature 1..20: note = chemically synthesized
  source 1..20: mol_type = other DNA
caagccaatggctgcatacc

SEQ ID NO: 34634 - DNA, 20 bp, synthetic construct
  misc_feature 1..20: note = chemically synthesized
  source 1..20: mol_type = other DNA
aatggctgcataccaggcac

SEQ ID NO: 34635 - DNA, 20 bp, synthetic construct
  misc_feature 1..20: note = chemically synthesized
  source 1..20: mol_type = other DNA
atggctgcataccaggcacc

SEQ ID NO: 34636 - DNA, 20 bp, synthetic construct
  misc_feature 1..20: note = chemically synthesized
  source 1..20: mol_type = other DNA
ggctgcataccaggcaccag

SEQ ID NO: 34637 - DNA, 20 bp, synthetic construct
  misc_feature 1..20: note = chemically synthesized
  source 1..20: mol_type = other DNA
ggagatgtgttaatttgctc

SEQ ID NO: 34638 - DNA, 20 bp, synthetic construct
  misc_feature 1..20: note = chemically synthesized
  source 1..20: mol_type = other DNA
tcaagcaacaaaaccacaac

SEQ ID NO: 34639 - DNA, 20 bp, synthetic construct
  misc_feature 1..20: note = chemically synthesized
  source 1..20: mol_type = other DNA
agcaacaaaaccacaactgg

SEQ ID NO: 34640 - DNA, 20 bp, synthetic construct
  misc_feature 1..20: note = chemically synthesized
  source 1..20: mol_type = other DNA
caacaaaaccacaactggta

SEQ ID NO: 34641 - DNA, 20 bp, synthetic construct
  misc_feature 1..20: note = chemically synthesized
  source 1..20: mol_type = other DNA
caaaaccacaactggtagag

SEQ ID NO: 34642 - DNA, 20 bp, synthetic construct
  misc_feature 1..20: note = chemically synthesized
  source 1..20: mol_type = other DNA
actggtagagcagctgcaat

SEQ ID NO: 34643 - DNA, 20 bp, synthetic construct
  misc_feature 1..20: note = chemically synthesized
  source 1..20: mol_type = other DNA
tggtagagcagctgcaattg

SEQ ID NO: 34644 - DNA, 20 bp, synthetic construct
  misc_feature 1..20: note = chemically synthesized
  source 1..20: mol_type = other DNA
ctgcaattggagtcaccact

SEQ ID NO: 34645 - DNA, 20 bp, synthetic construct
  misc_feature 1..20: note = chemically synthesized
  source 1..20: mol_type = other DNA
attggagtcaccacttggtt

SEQ ID NO: 34646 - DNA, 20 bp, synthetic construct
  misc_feature 1..20: note = chemically synthesized
  source 1..20: mol_type = other DNA
ataatccaccatcattttcc

SEQ ID NO: 34647 - DNA, 20 bp, synthetic construct
  misc_feature 1..20: note = chemically synthesized
  source 1..20: mol_type = other DNA
agatccatctgtcctctgca

SEQ ID NO: 34648 - DNA, 20 bp, synthetic construct
  misc_feature 1..20: note = chemically synthesized
  source 1..20: mol_type = other DNA
gatccatctgtcctctgcac

SEQ ID NO: 34649 - DNA, 20 bp, synthetic construct
  misc_feature 1..20: note = chemically synthesized
  source 1..20: mol_type = other DNA
tgtcctctgcacaggtcaaa

SEQ ID NO: 34650 - DNA, 20 bp, synthetic construct
  misc_feature 1..20: note = chemically synthesized
  source 1..20: mol_type = other DNA
gtcctctgcacaggtcaaat

SEQ ID NO: 34651 - DNA, 20 bp, synthetic construct
  misc_feature 1..20: note = chemically synthesized
  source 1..20: mol_type = other DNA
cctctgcacaggtcaaatgg

SEQ ID NO: 34652 - DNA, 20 bp, synthetic construct
  misc_feature 1..20: note = chemically synthesized
  source 1..20: mol_type = other DNA
tctgcacaggtcaaatggga

SEQ ID NO: 34653 - DNA, 20 bp, synthetic construct
  misc_feature 1..20: note = chemically synthesized
  source 1..20: mol_type = other DNA
ggtcaaatgggagagttgaa

SEQ ID NO: 34654 - DNA, 20 bp, synthetic construct
  misc_feature 1..20: note = chemically synthesized
  source 1..20: mol_type = other DNA
gtcaaatgggagagttgaac

SEQ ID NO: 34655 - DNA, 20 bp, synthetic construct
  misc_feature 1..20: note = chemically synthesized
  source 1..20: mol_type = other DNA
tcaaatgggagagttgaaca

SEQ ID NO: 34656 - DNA, 20 bp, synthetic construct
  misc_feature 1..20: note = chemically synthesized
  source 1..20: mol_type = other DNA
gggagagttgaacagggatg

SEQ ID NO: 34657 - DNA, 20 bp, synthetic construct
  misc_feature 1..20: note = chemically synthesized
  source 1..20: mol_type = other DNA
agagttgaacagggatgtgg

SEQ ID NO: 34658 - DNA, 20 bp, synthetic construct
  misc_feature 1..20: note = chemically synthesized
  source 1..20: mol_type = other DNA
gagttgaacagggatgtggt

SEQ ID NO: 34659 - DNA, 20 bp, synthetic construct
  misc_feature 1..20: note = chemically synthesized
  source 1..20: mol_type = other DNA
tcaccacccctgcgtctttc

SEQ ID NO: 34660 - DNA, 20 bp, synthetic construct
  misc_feature 1..20: note = chemically synthesized
  source 1..20: mol_type = other DNA
tgcgtctttcaagtccttga

SEQ ID NO: 34661 - DNA, 20 bp, synthetic construct
  misc_feature 1..20: note = chemically synthesized
  source 1..20: mol_type = other DNA
gatggtgacactaatcactt

SEQ ID NO: 34662 - DNA, 20 bp, synthetic construct
  misc_feature 1..20: note = chemically synthesized
  source 1..20: mol_type = other DNA
actaatcacttcagtccctc

SEQ ID NO: 34663 - DNA, 20 bp, synthetic construct
  misc_feature 1..20: note = chemically synthesized
  source 1..20: mol_type = other DNA
ctaatcacttcagtccctcc

SEQ ID NO: 34664 - DNA, 20 bp, synthetic construct
  misc_feature 1..20: note = chemically synthesized
  source 1..20: mol_type = other DNA
taatcacttcagtccctcca

SEQ ID NO: 34665 - DNA, 20 bp, synthetic construct
  misc_feature 1..20: note = chemically synthesized
  source 1..20: mol_type = other DNA
cacttcagtccctccaggga

SEQ ID NO: 34666 - DNA, 20 bp, synthetic construct
  misc_feature 1..20: note = chemically synthesized
  source 1..20: mol_type = other DNA
acttcagtccctccagggat

SEQ ID NO: 34667 - DNA, 20 bp, synthetic construct
  misc_feature 1..20: note = chemically synthesized
  source 1..20: mol_type = other DNA
ttttgatttttttatttttc

SEQ ID NO: 34668 - DNA, 20 bp, synthetic construct
  misc_feature 1..20: note = chemically synthesized
  source 1..20: mol_type = other DNA
tttgatttttttatttttct

SEQ ID NO: 34669 - DNA, 20 bp, synthetic construct
  misc_feature 1..20: note = chemically synthesized
  source 1..20: mol_type = other DNA
gatttttttatttttctagg

SEQ ID NO: 34670 - DNA, 20 bp, synthetic construct
  misc_feature 1..20: note = chemically synthesized
  source 1..20: mol_type = other DNA
tttttttatttttctaggta

SEQ ID NO: 34671 - DNA, 20 bp, synthetic construct
  misc_feature 1..20: note = chemically synthesized
  source 1..20: mol_type = other DNA
tttatttttctaggtagaga

SEQ ID NO: 34672 - DNA, 20 bp, synthetic construct
  misc_feature 1..20: note = chemically synthesized
  source 1..20: mol_type = other DNA
ctaggtagagacagctctaa

SEQ ID NO: 34673 - DNA, 20 bp, synthetic construct
  misc_feature 1..20: note = chemically synthesized
  source 1..20: mol_type = other DNA
cagctctaatggcttctgtt

SEQ ID NO: 34674 - DNA, 20 bp, synthetic construct
  misc_feature 1..20: note = chemically synthesized
  source 1..20: mol_type = other DNA
tttggcctttcccaccataa

SEQ ID NO: 34675 - DNA, 20 bp, synthetic construct
  misc_feature 1..20: note = chemically synthesized
  source 1..20: mol_type = other DNA
cataatagccctcatcctac

SEQ ID NO: 34676 - DNA, 20 bp, synthetic construct
  misc_feature 1..20: note = chemically synthesized
  source 1..20: mol_type = other DNA
atagccctcatcctaccagt

SEQ ID NO: 34677 - DNA, 20 bp, synthetic construct
  misc_feature 1..20: note = chemically synthesized
  source 1..20: mol_type = other DNA
tagccctcatcctaccagtc

SEQ ID NO: 34678 - DNA, 20 bp, synthetic construct
  misc_feature 1..20: note = chemically synthesized
  source 1..20: mol_type = other DNA
agccctcatcctaccagtca

SEQ ID NO: 34679 - DNA, 20 bp, synthetic construct
  misc_feature 1..20: note = chemically synthesized
  source 1..20: mol_type = other DNA
ccctcatcctaccagtcagg

SEQ ID NO: 34680 - DNA, 20 bp, synthetic construct
  misc_feature 1..20: note = chemically synthesized
  source 1..20: mol_type = other DNA
taccagtcagggagccaatg

SEQ ID NO: 34681 - DNA, 20 bp, synthetic construct
  misc_feature 1..20: note = chemically synthesized
  source 1..20: mol_type = other DNA
agccaatgtggcatttctgc

SEQ ID NO: 34682 - DNA, 20 bp, synthetic construct
  misc_feature 1..20: note = chemically synthesized
  source 1..20: mol_type = other DNA
tggcatttctgccagctaat

SEQ ID NO: 34683 - DNA, 20 bp, synthetic construct
  misc_feature 1..20: note = chemically synthesized
  source 1..20: mol_type = other DNA
tctatacaaattatgcattt

SEQ ID NO: 34684 - DNA, 20 bp, synthetic construct
  misc_feature 1..20: note = chemically synthesized
  source 1..20: mol_type = other DNA
caaattatgcattttggcac

SEQ ID NO: 34685 - DNA, 20 bp, synthetic construct
  misc_feature 1..20: note = chemically synthesized
  source 1..20: mol_type = other DNA
aaattatgcattttggcact

SEQ ID NO: 34686 - DNA, 20 bp, synthetic construct
  misc_feature 1..20: note = chemically synthesized
  source 1..20: mol_type = other DNA
tttggcactgggaaaatgac

SEQ ID NO: 34687 - DNA, 20 bp, synthetic construct
  misc_feature 1..20: note = chemically synthesized
  source 1..20: mol_type = other DNA
tggcactgggaaaatgacca

SEQ ID NO: 34688 - DNA, 20 bp, synthetic construct
  misc_feature 1..20: note = chemically synthesized
  source 1..20: mol_type = other DNA
ggcactgggaaaatgaccag

SEQ ID NO: 34689 - DNA, 20 bp, synthetic construct
  misc_feature 1..20: note = chemically synthesized
  source 1..20: mol_type = other DNA
tgggaaaatgaccagaggat

SEQ ID NO: 34690 - DNA, 20 bp, synthetic construct
  misc_feature 1..20: note = chemically synthesized
  source 1..20: mol_type = other DNA
aaatgaccagaggataagtc

SEQ ID NO: 34691 - DNA, 20 bp, synthetic construct
  misc_feature 1..20: note = chemically synthesized
  source 1..20: mol_type = other DNA
aatgaccagaggataagtcc

SEQ ID NO: 34692 - DNA, 20 bp, synthetic construct
  misc_feature 1..20: note = chemically synthesized
  source 1..20: mol_type = other DNA
atgaccagaggataagtcca

SEQ ID NO: 34693 - DNA, 20 bp, synthetic construct
  misc_feature 1..20: note = chemically synthesized
  source 1..20: mol_type = other DNA
ggataagtccagggacccac

SEQ ID NO: 34694 - DNA, 20 bp, synthetic construct
  misc_feature 1..20: note = chemically synthesized
  source 1..20: mol_type = other DNA
ggacccactggaaccactgt

SEQ ID NO: 34695 - DNA, 20 bp, synthetic construct
  misc_feature 1..20: note = chemically synthesized
  source 1..20: mol_type = other DNA
ccactggaaccactgtaagt

SEQ ID NO: 34696 - DNA, 20 bp, synthetic construct
  misc_feature 1..20: note = chemically synthesized
  source 1..20: mol_type = other DNA
aaccactgtaagtcagaaat

SEQ ID NO: 34697 - DNA, 20 bp, synthetic construct
  misc_feature 1..20: note = chemically synthesized
  source 1..20: mol_type = other DNA
attaattacctaacctccat

SEQ ID NO: 34698 - DNA, 20 bp, synthetic construct
  misc_feature 1..20: note = chemically synthesized
  source 1..20: mol_type = other DNA
ccataagcccctactttaac

SEQ ID NO: 34699 - DNA, 20 bp, synthetic construct
  misc_feature 1..20: note = chemically synthesized
  source 1..20: mol_type = other DNA
cataagcccctactttaact

SEQ ID NO: 34700 - DNA, 20 bp, synthetic construct
  misc_feature 1..20: note = chemically synthesized
  source 1..20: mol_type = other DNA
ataagcccctactttaactg

SEQ ID NO: 34701 - DNA, 20 bp, synthetic construct
  misc_feature 1..20: note = chemically synthesized
  source 1..20: mol_type = other DNA
ggggaaccacaataacgttt

SEQ ID NO: 34702 - DNA, 20 bp, synthetic construct
  misc_feature 1..20: note = chemically synthesized
  source 1..20: mol_type = other DNA
gggaaccacaataacgtttt

SEQ ID NO: 34703 - DNA, 20 bp, synthetic construct
  misc_feature 1..20: note = chemically synthesized
  source 1..20: mol_type = other DNA
caataacgttttgggtaccc

SEQ ID NO: 34704 - DNA, 20 bp, synthetic construct
  misc_feature 1..20: note = chemically synthesized
  source 1..20: mol_type = other DNA
gggtaccctggaatcaacgt

SEQ ID NO: 34705 - DNA, 20 bp, synthetic construct
  misc_feature 1..20: note = chemically synthesized
  source 1..20: mol_type = other DNA
ccctggaatcaacgtcagct

SEQ ID NO: 34706 - DNA, 20 bp, synthetic construct
  misc_feature 1..20: note = chemically synthesized
  source 1..20: mol_type = other DNA
ctggaatcaacgtcagctca

SEQ ID NO: 34707 - DNA, 20 bp, synthetic construct
  misc_feature 1..20: note = chemically synthesized
  source 1..20: mol_type = other DNA
aatcaacgtcagctcagagc

SEQ ID NO: 34708 - DNA, 20 bp, synthetic construct
  misc_feature 1..20: note = chemically synthesized
  source 1..20: mol_type = other DNA
gtcagctcagagccagtgtc

SEQ ID NO: 34709 - DNA, 20 bp, synthetic construct
  misc_feature 1..20: note = chemically synthesized
  source 1..20: mol_type = other DNA
tctcattacttccctttctc

SEQ ID NO: 34710 - DNA, 20 bp, synthetic construct
  misc_feature 1..20: note = chemically synthesized
  source 1..20: mol_type = other DNA
ttccctttctccagtacaca

SEQ ID NO: 34711 - DNA, 20 bp, synthetic construct
  misc_feature 1..20: note = chemically synthesized
  source 1..20: mol_type = other DNA
tccagtacacacagttaccc

SEQ ID NO: 34712 - DNA, 20 bp, synthetic construct
  misc_feature 1..20: note = chemically synthesized
  source 1..20: mol_type = other DNA
acacacagttaccctggtaa

SEQ ID NO: 34713 - DNA, 20 bp, synthetic construct
  misc_feature 1..20: note = chemically synthesized
  source 1..20: mol_type = other DNA
cacacagttaccctggtaaa

SEQ ID NO: 34714 - DNA, 20 bp, synthetic construct
  misc_feature 1..20: note = chemically synthesized
  source 1..20: mol_type = other DNA
cagttaccctggtaaaaggc

SEQ ID NO: 34715 - DNA, 20 bp, synthetic construct
  misc_feature 1..20: note = chemically synthesized
  source 1..20: mol_type = other DNA
gttaccctggtaaaaggcca

SEQ ID NO: 34716 - DNA, 20 bp, synthetic construct
  misc_feature 1..20: note = chemically synthesized
  source 1..20: mol_type = other DNA
ttaccctggtaaaaggccag

SEQ ID NO: 34717 - DNA, 20 bp, synthetic construct
  misc_feature 1..20: note = chemically synthesized
  source 1..20: mol_type = other DNA
taaaaggccagaggtctcct

SEQ ID NO: 34718 - DNA, 20 bp, synthetic construct
  misc_feature 1..20: note = chemically synthesized
  source 1..20: mol_type = other DNA
aaaaggccagaggtctcctt

SEQ ID NO: 34719 - DNA, 20 bp, synthetic construct
  misc_feature 1..20: note = chemically synthesized
  source 1..20: mol_type = other DNA
aaaggccagaggtctcctta

SEQ ID NO: 34720 - DNA, 20 bp, synthetic construct
  misc_feature 1..20: note = chemically synthesized
  source 1..20: mol_type = other DNA
ggccagaggtctccttaggg

SEQ ID NO: 34721 - DNA, 20 bp, synthetic construct
  misc_feature 1..20: note = chemically synthesized
  source 1..20: mol_type = other DNA
gccagaggtctccttaggga

SEQ ID NO: 34722 - DNA, 20 bp, synthetic construct
  misc_feature 1..20: note = chemically synthesized
  source 1..20: mol_type = other DNA
gaggtctccttagggaagga

SEQ ID NO: 34723 - DNA, 20 bp, synthetic construct
  misc_feature 1..20: note = chemically synthesized
  source 1..20: mol_type = other DNA
aggtctccttagggaaggat

SEQ ID NO: 34724 - DNA, 20 bp, synthetic construct
  misc_feature 1..20: note = chemically synthesized
  source 1..20: mol_type = other DNA
gtctccttagggaaggatgg

SEQ ID NO: 34725 - DNA, 20 bp, synthetic construct
  misc_feature 1..20: note = chemically synthesized
  source 1..20: mol_type = other DNA
ccttagggaaggatgggaga

SEQ ID NO: 34726 - DNA, 20 bp, synthetic construct
  misc_feature 1..20: note = chemically synthesized
  source 1..20: mol_type = other DNA
ttagggaaggatgggagaaa

SEQ ID NO: 34727 - DNA, 20 bp, synthetic construct
  misc_feature 1..20: note = chemically synthesized
  source 1..20: mol_type = other DNA
aaggatgggagaaagagtaa

SEQ ID NO: 34728 - DNA, 20 bp, synthetic construct
  misc_feature 1..20: note = chemically synthesized
  source 1..20: mol_type = other DNA
gggagaaagagtaacagcat

SEQ ID NO: 34729 - DNA, 20 bp, synthetic construct
  misc_feature 1..20: note = chemically synthesized
  source 1..20: mol_type = other DNA
agagtaacagcataagttgt

SEQ ID NO: 34730 - DNA, 20 bp, synthetic construct
  misc_feature 1..20: note = chemically synthesized
  source 1..20: mol_type = other DNA
gtaacagcataagttgtcag

SEQ ID NO: 34731 - DNA, 20 bp, synthetic construct
  misc_feature 1..20: note = chemically synthesized
  source 1..20: mol_type = other DNA
agcataagttgtcagtagcc

SEQ ID NO: 34732 - DNA, 20 bp, synthetic construct
  misc_feature 1..20: note = chemically synthesized
  source 1..20: mol_type = other DNA
ataagttgtcagtagcctag

SEQ ID NO: 34733 - DNA, 20 bp, synthetic construct
  misc_feature 1..20: note = chemically synthesized
  source 1..20: mol_type = other DNA
gcctagtggtgtccttcctc

SEQ ID NO: 34734 - DNA, 20 bp, synthetic construct
  misc_feature 1..20: note = chemically synthesized
  source 1..20: mol_type = other DNA
cctagtggtgtccttcctca

SEQ ID NO: 34735 - DNA, 20 bp, synthetic construct
  misc_feature 1..20: note = chemically synthesized
  source 1..20: mol_type = other DNA
ctagtggtgtccttcctcaa

SEQ ID NO: 34736 - DNA, 20 bp, synthetic construct
  misc_feature 1..20: note = chemically synthesized
  source 1..20: mol_type = other DNA
tagtggtgtccttcctcaag

SEQ ID NO: 34737 - DNA, 20 bp, synthetic construct
  misc_feature 1..20: note = chemically synthesized
  source 1..20: mol_type = other DNA
tgtccttcctcaaggggatc

SEQ ID NO: 34738 - DNA, 20 bp, synthetic construct
  misc_feature 1..20: note = chemically synthesized
  source 1..20: mol_type = other DNA
gatccagcctccccttcatt

SEQ ID NO: 34739 - DNA, 20 bp, synthetic construct
  misc_feature 1..20: note = chemically synthesized
  source 1..20: mol_type = other DNA
ccagcctccccttcattcag

SEQ ID NO: 34740 - DNA, 20 bp, synthetic construct
  misc_feature 1..20: note = chemically synthesized
  source 1..20: mol_type = other DNA
cagcctccccttcattcagt

SEQ ID NO: 34741 - DNA, 20 bp, synthetic construct
  misc_feature 1..20: note = chemically synthesized
  source 1..20: mol_type = other DNA
ccccttcattcagtgggttc

SEQ ID NO: 34742 - DNA, 20 bp, synthetic construct
  misc_feature 1..20: note = chemically synthesized
  source 1..20: mol_type = other DNA
agtgggttctggaactgtaa

SEQ ID NO: 34743 - DNA, 20 bp, synthetic construct
  misc_feature 1..20: note = chemically synthesized
  source 1..20: mol_type = other DNA
gtgggttctggaactgtaac

SEQ ID NO: 34744 - DNA, 20 bp, synthetic construct
  misc_feature 1..20: note = chemically synthesized
  source 1..20: mol_type = other DNA
tctggaactgtaacaggttc

SEQ ID NO: 34745 - DNA, 20 bp, synthetic construct
  misc_feature 1..20: note = chemically synthesized
  source 1..20: mol_type = other DNA
aactgtaacaggttcgagtc

SEQ ID NO: 34746 - DNA, 20 bp, synthetic construct
  misc_feature 1..20: note = chemically synthesized
  source 1..20: mol_type = other DNA
ttcgagtctggaaattgatt

SEQ ID NO: 34747 - DNA, 20 bp, synthetic construct
  misc_feature 1..20: note = chemically synthesized
  source 1..20: mol_type = other DNA
tcgagtctggaaattgattg

SEQ ID NO: 34748 - DNA, 20 bp, synthetic construct
  misc_feature 1..20: note = chemically synthesized
  source 1..20: mol_type = other DNA
cgagtctggaaattgattga

SEQ ID NO: 34749 - DNA, 20 bp, synthetic construct
  misc_feature 1..20: note = chemically synthesized
  source 1..20: mol_type = other DNA
gattctctgtttttataatt

SEQ ID NO: 34750 - DNA, 20 bp, synthetic construct
  misc_feature 1..20: note = chemically synthesized
  source 1..20: mol_type = other DNA
tctgtttttataattcagat

SEQ ID NO: 34751 - DNA, 20 bp, synthetic construct
  misc_feature 1..20: note = chemically synthesized
  source 1..20: mol_type = other DNA
ttataattcagattagtctt

SEQ ID NO: 34752 - DNA, 20 bp, synthetic construct
  misc_feature 1..20: note = chemically synthesized
  source 1..20: mol_type = other DNA
agtctttagtccattctacc

SEQ ID NO: 34753 - DNA, 20 bp, synthetic construct
  misc_feature 1..20: note = chemically synthesized
  source 1..20: mol_type = other DNA
ctttagtccattctacctgg

SEQ ID NO: 34754 - DNA, 20 bp, synthetic construct
  misc_feature 1..20: note = chemically synthesized
  source 1..20: mol_type = other DNA
gttttttgtttatataaatc

SEQ ID NO: 34755 - DNA, 20 bp, synthetic construct
  misc_feature 1..20: note = chemically synthesized
  source 1..20: mol_type = other DNA
ttttgtttatataaatcaag

SEQ ID NO: 34756 - DNA, 20 bp, synthetic construct
  misc_feature 1..20: note = chemically synthesized
  source 1..20: mol_type = other DNA
tttgtttatataaatcaagt

SEQ ID NO: 34757 - DNA, 20 bp, synthetic construct
  misc_feature 1..20: note = chemically synthesized
  source 1..20: mol_type = other DNA
atataaatcaagtaggaata

SEQ ID NO: 34758 - DNA, 20 bp, synthetic construct
  misc_feature 1..20: note = chemically synthesized
  source 1..20: mol_type = other DNA
taaatcaagtaggaatacag

SEQ ID NO: 34759 - DNA, 20 bp, synthetic construct
  misc_feature 1..20: note = chemically synthesized
  source 1..20: mol_type = other DNA
aaatcaagtaggaatacagt

SEQ ID NO: 34760 - DNA, 20 bp, synthetic construct
  misc_feature 1..20: note = chemically synthesized
  source 1..20: mol_type = other DNA
tttcccatcaatttcacttc

SEQ ID NO: 34761 - DNA, 20 bp, synthetic construct
  misc_feature 1..20: note = chemically synthesized
  source 1..20: mol_type = other DNA
ttcccatcaatttcacttct

SEQ ID NO: 34762 - DNA, 20 bp, synthetic construct
  misc_feature 1..20: note = chemically synthesized
  source 1..20: mol_type = other DNA
ctaggaacaccatgattaat

SEQ ID NO: 34763 - DNA, 20 bp, synthetic construct
  misc_feature 1..20: note = chemically synthesized
  source 1..20: mol_type = other DNA
catgattaattagccaatgc

SEQ ID NO: 34764 - DNA, 20 bp, synthetic construct
  misc_feature 1..20: note = chemically synthesized
  source 1..20: mol_type = other DNA
tgattaattagccaatgcca

SEQ ID NO: 34765 - DNA, 20 bp, synthetic construct
  misc_feature 1..20: note = chemically synthesized
  source 1..20: mol_type = other DNA
ccaatgccagagctctacat

SEQ ID NO: 34766 - DNA, 20 bp, synthetic construct
  misc_feature 1..20: note = chemically synthesized
  source 1..20: mol_type = other DNA
tgccagagctctacatgagt

SEQ ID NO: 34767 - DNA, 20 bp, synthetic construct
  misc_feature 1..20: note = chemically synthesized
  source 1..20: mol_type = other DNA
catgagtcagactattctga

SEQ ID NO: 34768 - DNA, 20 bp, synthetic construct
  misc_feature 1..20: note = chemically synthesized
  source 1..20: mol_type = other DNA
tttgcctctgctgtctatta

SEQ ID NO: 34769 - DNA, 20 bp, synthetic construct
  misc_feature 1..20: note = chemically synthesized
  source 1..20: mol_type = other DNA
gcctctgctgtctattatgg

SEQ ID NO: 34770 - DNA, 20 bp, synthetic construct
  misc_feature 1..20: note = chemically synthesized
  source 1..20: mol_type = other DNA
tatgcccaccttgcctttga

SEQ ID NO: 34771 - DNA, 20 bp, synthetic construct
  misc_feature 1..20: note = chemically synthesized
  source 1..20: mol_type = other DNA
ccaccttgcctttgatggtt

SEQ ID NO: 34772 - DNA, 20 bp, synthetic construct
  misc_feature 1..20: note = chemically synthesized
  source 1..20: mol_type = other DNA
gatggttcagtgccaacact

SEQ ID NO: 34773 - DNA, 20 bp, synthetic construct
  misc_feature 1..20: note = chemically synthesized
  source 1..20: mol_type = other DNA
acacttggcccctgccacct

SEQ ID NO: 34774 - DNA, 20 bp, synthetic construct
  misc_feature 1..20: note = chemically synthesized
  source 1..20: mol_type = other DNA
cacttggcccctgccacctc

SEQ ID NO: 34775 - DNA, 20 bp, synthetic construct
  misc_feature 1..20: note = chemically synthesized
  source 1..20: mol_type = other DNA
cccattgtatttaaattttg

SEQ ID NO: 34776 - DNA, 20 bp, synthetic construct
  misc_feature 1..20: note = chemically synthesized
  source 1..20: mol_type = other DNA
tgtatttaaattttgtagtt

SEQ ID NO: 34777 - DNA, 20 bp, synthetic construct
  misc_feature 1..20: note = chemically synthesized
  source 1..20: mol_type = other DNA
attttgtagttgagtgactg

SEQ ID NO: 34778 - DNA, 20 bp, synthetic construct
  misc_feature 1..20: note = chemically synthesized
  source 1..20: mol_type = other DNA
gtgactgtggttcctactgt

SEQ ID NO: 34779 - DNA, 20 bp, synthetic construct
  misc_feature 1..20: note = chemically synthesized
  source 1..20: mol_type = other DNA
ctactgttagatctgacata

SEQ ID NO: 34780 - DNA, 20 bp, synthetic construct
  misc_feature 1..20: note = chemically synthesized
  source 1..20: mol_type = other DNA
actgttagatctgacataca

SEQ ID NO: 34781 - DNA, 20 bp, synthetic construct
  misc_feature 1..20: note = chemically synthesized
  source 1..20: mol_type = other DNA
gttagatctgacatacagag

SEQ ID NO: 34782 - DNA, 20 bp, synthetic construct
  misc_feature 1..20: note = chemically synthesized
  source 1..20: mol_type = other DNA
tagatctgacatacagagaa

SEQ ID NO: 34783 - DNA, 20 bp, synthetic construct
  misc_feature 1..20: note = chemically synthesized
  source 1..20: mol_type = other DNA
catacagagaagagcaatta

SEQ ID NO: 34784 - DNA, 20 bp, synthetic construct
  misc_feature 1..20: note = chemically synthesized
  source 1..20: mol_type = other DNA
atacagagaagagcaattac

SEQ ID NO: 34785 - DNA, 20 bp, synthetic construct
  misc_feature 1..20: note = chemically synthesized
  source 1..20: mol_type = other DNA
ttacgggctcttcaaaaata

SEQ ID NO: 34786 - DNA, 20 bp, synthetic construct
  misc_feature 1..20: note = chemically synthesized
  source 1..20: mol_type = other DNA
tacgggctcttcaaaaatac

SEQ ID NO: 34787 - DNA, 20 bp, synthetic construct
  misc_feature 1..20: note = chemically synthesized
  source 1..20: mol_type = other DNA
tctcacaaatctatttcaca

SEQ ID NO: 34788 - DNA, 20 bp, synthetic construct
  misc_feature 1..20: note = chemically synthesized
  source 1..20: mol_type = other DNA
aaatctatttcacaaagctt

SEQ ID NO: 34789 - DNA, 20 bp, synthetic construct
  misc_feature 1..20: note = chemically synthesized
  source 1..20: mol_type = other DNA
tatttcacaaagcttcggcc

SEQ ID NO: 34790 - DNA, 20 bp, synthetic construct
  misc_feature 1..20: note = chemically synthesized
  source 1..20: mol_type = other DNA
atttcacaaagcttcggcca

SEQ ID NO: 34791 - DNA, 20 bp, synthetic construct
  misc_feature 1..20: note = chemically synthesized
  source 1..20: mol_type = other DNA
tttcacaaagcttcggccaa

SEQ ID NO: 34792 - DNA, 20 bp, synthetic construct
  misc_feature 1..20: note = chemically synthesized
  source 1..20: mol_type = other DNA
tcggccaagggtgtatcttc

SEQ ID NO: 34793 - DNA, 20 bp, synthetic construct
  misc_feature 1..20: note = chemically synthesized
  source 1..20: mol_type = other DNA
gtgtatcttctggaccctcc

SEQ ID NO: 34794 - DNA, 20 bp, synthetic construct
  misc_feature 1..20: note = chemically synthesized
  source 1..20: mol_type = other DNA
atcttctggaccctcccagc

SEQ ID NO: 34795 - DNA, 20 bp, synthetic construct
  misc_feature 1..20: note = chemically synthesized
  source 1..20: mol_type = other DNA
tcttctggaccctcccagct

SEQ ID NO: 34796 - DNA, 20 bp, synthetic construct
  misc_feature 1..20: note = chemically synthesized
  source 1..20: mol_type = other DNA
tggaccctcccagctgggat

SEQ ID NO: 34797 - DNA, 20 bp, synthetic construct
  misc_feature 1..20: note = chemically synthesized
  source 1..20: mol_type = other DNA
accctcccagctgggatgag

SEQ ID NO: 34798 - DNA, 20 bp, synthetic construct
  misc_feature 1..20: note = chemically synthesized
  source 1..20: mol_type = other DNA
ccctcccagctgggatgagt

SEQ ID NO: 34799 - DNA, 20 bp, synthetic construct
  misc_feature 1..20: note = chemically synthesized
  source 1..20: mol_type = other DNA
agctgggatgagtaggtcta

SEQ ID NO: 34800 - DNA, 20 bp, synthetic construct
  misc_feature 1..20: note = chemically synthesized
  source 1..20: mol_type = other DNA
tccaccatcctaatctccct

SEQ ID NO: 34801 - DNA, 20 bp, synthetic construct
  misc_feature 1..20: note = chemically synthesized
  source 1..20: mol_type = other DNA
tcctaatctccctaagcctt

SEQ ID NO: 34802 - DNA, 20 bp, synthetic construct
  misc_feature 1..20: note = chemically synthesized
  source 1..20: mol_type = other DNA
cacttcctctacattaaacc

SEQ ID NO: 34803 - DNA, 20 bp, synthetic construct
  misc_feature 1..20: note = chemically synthesized
  source 1..20: mol_type = other DNA
acttcctctacattaaacca

SEQ ID NO: 34804 - DNA, 20 bp, synthetic construct
  misc_feature 1..20: note = chemically synthesized
  source 1..20: mol_type = other DNA
acattaaaccaaggcatttc

SEQ ID NO: 34805 - DNA, 20 bp, synthetic construct
  misc_feature 1..20: note = chemically synthesized
  source 1..20: mol_type = other DNA
catttccagctcactaacat

SEQ ID NO: 34806 - DNA, 20 bp, synthetic construct
  misc_feature 1..20: note = chemically synthesized
  source 1..20: mol_type = other DNA
ccatcttttaatccatattt

SEQ ID NO: 34807 - DNA, 20 bp, synthetic construct
  misc_feature 1..20: note = chemically synthesized
  source 1..20: mol_type = other DNA
aatccatatttcagctaacc

SEQ ID NO: 34808 - DNA, 20 bp, synthetic construct
  misc_feature 1..20: note = chemically synthesized
  source 1..20: mol_type = other DNA
aacttttttttttttttttt

SEQ ID NO: 34809 - DNA, 20 bp, synthetic construct
  misc_feature 1..20: note = chemically synthesized
  source 1..20: mol_type = other DNA
tttttttttttttttggaaa

SEQ ID NO: 34810 - DNA, 20 bp, synthetic construct
  misc_feature 1..20: note = chemically synthesized
  source 1..20: mol_type = other DNA
tttttttttttttggaaatg

SEQ ID NO: 34811 - DNA, 20 bp, synthetic construct
  misc_feature 1..20: note = chemically synthesized
  source 1..20: mol_type = other DNA
atggagtcttgctctgttac

SEQ ID NO: 34812 - DNA, 20 bp, synthetic construct
  misc_feature 1..20: note = chemically synthesized
  source 1..20: mol_type = other DNA
tggagtcttgctctgttacc

SEQ ID NO: 34813 - DNA, 20 bp, synthetic construct
  misc_feature 1..20: note = chemically synthesized
  source 1..20: mol_type = other DNA
gtcttgctctgttaccaggc

SEQ ID NO: 34814 - DNA, 20 bp, synthetic construct
  misc_feature 1..20: note = chemically synthesized
  source 1..20: mol_type = other DNA
tctgttaccaggctggaatg

SEQ ID NO: 34815 - DNA, 20 bp, synthetic construct
  misc_feature 1..20: note = chemically synthesized
  source 1..20: mol_type = other DNA
gttaccaggctggaatgcag

SEQ ID NO: 34816 - DNA, 20 bp, synthetic construct
  misc_feature 1..20: note = chemically synthesized
  source 1..20: mol_type = other DNA
ttaccaggctggaatgcagt

SEQ ID NO: 34817 - DNA, 20 bp, synthetic construct
  misc_feature 1..20: note = chemically synthesized
  source 1..20: mol_type = other DNA
taccaggctggaatgcagtg

SEQ ID NO: 34818 - DNA, 20 bp, synthetic construct
  misc_feature 1..20: note = chemically synthesized
  source 1..20: mol_type = other DNA
ggaatgcagtggggcgatct

SEQ ID NO: 34819 - DNA, 20 bp, synthetic construct
  misc_feature 1..20: note = chemically synthesized
  source 1..20: mol_type = other DNA
tcactgcaatctctgcctca

SEQ ID NO: 34820 - DNA, 20 bp, synthetic construct
  misc_feature 1..20: note = chemically synthesized
  source 1..20: mol_type = other DNA
cactgcaatctctgcctcac

SEQ ID NO: 34821 - DNA, 20 bp, synthetic construct
  misc_feature 1..20: note = chemically synthesized
  source 1..20: mol_type = other DNA
aatctctgcctcacaggttc

SEQ ID NO: 34822 - DNA, 20 bp, synthetic construct
  misc_feature 1..20: note = chemically synthesized
  source 1..20: mol_type = other DNA
ctctgcctcacaggttcaag

SEQ ID NO: 34823 - DNA, 20 bp, synthetic construct
  misc_feature 1..20: note = chemically synthesized
  source 1..20: mol_type = other DNA
ttcaagcagttctcttgcct

SEQ ID NO: 34824 - DNA, 20 bp, synthetic construct
  misc_feature 1..20: note = chemically synthesized
  source 1..20: mol_type = other DNA
ttctcttgcctcagcctccc

SEQ ID NO: 34825 - DNA, 20 bp, synthetic construct
  misc_feature 1..20: note = chemically synthesized
  source 1..20: mol_type = other DNA
tcttgcctcagcctcccaag

SEQ ID NO: 34826 - DNA, 20 bp, synthetic construct
  misc_feature 1..20: note = chemically synthesized
  source 1..20: mol_type = other DNA
cctcagcctcccaagtagat

SEQ ID NO: 34827 - DNA, 20 bp, synthetic construct
  misc_feature 1..20: note = chemically synthesized
  source 1..20: mol_type = other DNA
ctcccaagtagatgagatta

SEQ ID NO: 34828 - DNA, 20 bp, synthetic construct
  misc_feature 1..20: note = chemically synthesized
  source 1..20: mol_type = other DNA
cagttacgcatcaccatgcc

SEQ ID NO: 34829 - DNA, 20 bp, synthetic construct
  misc_feature 1..20: note = chemically synthesized
  source 1..20: mol_type = other DNA
ccagctaatttttgtatttt

SEQ ID NO: 34830 - DNA, 20 bp, synthetic construct
  misc_feature 1..20: note = chemically synthesized
  source 1..20: mol_type = other DNA
gctaatttttgtatttttag

SEQ ID NO: 34831 - DNA, 20 bp, synthetic construct
  misc_feature 1..20: note = chemically synthesized
  source 1..20: mol_type = other DNA
taatttttgtatttttagca

SEQ ID NO: 34832 - DNA, 20 bp, synthetic construct
  misc_feature 1..20: note = chemically synthesized
  source 1..20: mol_type = other DNA
ttttgtatttttagcagaga

SEQ ID NO: 34833 - DNA, 20 bp, synthetic construct
  misc_feature 1..20: note = chemically synthesized
  source 1..20: mol_type = other DNA
tttgtatttttagcagagat

SEQ ID NO: 34834 - DNA, 20 bp, synthetic construct
  misc_feature 1..20: note = chemically synthesized
  source 1..20: mol_type = other DNA
ttgtatttttagcagagatg

SEQ ID NO: 34835 - DNA, 20 bp, synthetic construct
  misc_feature 1..20: note = chemically synthesized
  source 1..20: mol_type = other DNA
gagatggggtttcaccattt

SEQ ID NO: 34836 - DNA, 20 bp, synthetic construct
  misc_feature 1..20: note = chemically synthesized
  source 1..20: mol_type = other DNA
tggggtttcaccattttagc

SEQ ID NO: 34837 - DNA, 20 bp, synthetic construct
  misc_feature 1..20: note = chemically synthesized
  source 1..20: mol_type = other DNA
tctgcccgcccccgcctccc

SEQ ID NO: 34838 - DNA, 20 bp, synthetic construct
  misc_feature 1..20: note = chemically synthesized
  source 1..20: mol_type = other DNA
ctgcccgcccccgcctccca

SEQ ID NO: 34839 - DNA, 20 bp, synthetic construct
  misc_feature 1..20: note = chemically synthesized
  source 1..20: mol_type = other DNA
gcccccgcctcccaaggtgc

SEQ ID NO: 34840 - DNA, 20 bp, synthetic construct
  misc_feature 1..20: note = chemically synthesized
  source 1..20: mol_type = other DNA
cccccgcctcccaaggtgct

SEQ ID NO: 34841 - DNA, 20 bp, synthetic construct
  misc_feature 1..20: note = chemically synthesized
  source 1..20: mol_type = other DNA
ctcccaaggtgctgggatta

SEQ ID NO: 34842 - DNA, 20 bp, synthetic construct
  misc_feature 1..20: note = chemically synthesized
  source 1..20: mol_type = other DNA
tcccaaggtgctgggattac

SEQ ID NO: 34843 - DNA, 20 bp, synthetic construct
  misc_feature 1..20: note = chemically synthesized
  source 1..20: mol_type = other DNA
ggtgctgggattacaggcgt

SEQ ID NO: 34844 - DNA, 20 bp, synthetic construct
  misc_feature 1..20: note = chemically synthesized
  source 1..20: mol_type = other DNA
caggcgtgagccactgctcc

SEQ ID NO: 34845 - DNA, 20 bp, synthetic construct
  misc_feature 1..20: note = chemically synthesized
  source 1..20: mol_type = other DNA
gccactgctcccggccctat

SEQ ID NO: 34846 - DNA, 20 bp, synthetic construct
  misc_feature 1..20: note = chemically synthesized
  source 1..20: mol_type = other DNA
gccctatcagaaccttttct

SEQ ID NO: 34847 - DNA, 20 bp, synthetic construct
  misc_feature 1..20: note = chemically synthesized
  source 1..20: mol_type = other DNA
agaaccttttctaagtcccc

SEQ ID NO: 34848 - DNA, 20 bp, synthetic construct
  misc_feature 1..20: note = chemically synthesized
  source 1..20: mol_type = other DNA
ccgagctgcaacattaaatg

SEQ ID NO: 34849 - DNA, 20 bp, synthetic construct
  misc_feature 1..20: note = chemically synthesized
  source 1..20: mol_type = other DNA
ttaaatgcagaatccctact

SEQ ID NO: 34850 - DNA, 20 bp, synthetic construct
  misc_feature 1..20: note = chemically synthesized
  source 1..20: mol_type = other DNA
aatgcagaatccctacttag

SEQ ID NO: 34851 - DNA, 20 bp, synthetic construct
  misc_feature 1..20: note = chemically synthesized
  source 1..20: mol_type = other DNA
atgcagaatccctacttagt

SEQ ID NO: 34852 - DNA, 20 bp, synthetic construct
  misc_feature 1..20: note = chemically synthesized
  source 1..20: mol_type = other DNA
tgcagaatccctacttagta

SEQ ID NO: 34853 - DNA, 20 bp, synthetic construct
  misc_feature 1..20: note = chemically synthesized
  source 1..20: mol_type = other DNA
tagggccaaaccaataaatt

SEQ ID NO: 34854 - DNA, 20 bp, synthetic construct
  misc_feature 1..20: note = chemically synthesized
  source 1..20: mol_type = other DNA
ccattcccatgcctgttctc

SEQ ID NO: 34855 - DNA, 20 bp, synthetic construct
  misc_feature 1..20: note = chemically synthesized
  source 1..20: mol_type = other DNA
agatttctgccaatataaat

SEQ ID NO: 34856 - DNA, 20 bp, synthetic construct
  misc_feature 1..20: note = chemically synthesized
  source 1..20: mol_type = other DNA
ttctgccaatataaattaga

SEQ ID NO: 34857 - DNA, 20 bp, synthetic construct
  misc_feature 1..20: note = chemically synthesized
  source 1..20: mol_type = other DNA
caatataaattagaaagctt

SEQ ID NO: 34858 - DNA, 20 bp, synthetic construct
  misc_feature 1..20: note = chemically synthesized
  source 1..20: mol_type = other DNA
tataaattagaaagcttaag

SEQ ID NO: 34859 - DNA, 20 bp, synthetic construct
  misc_feature 1..20: note = chemically synthesized
  source 1..20: mol_type = other DNA
gaaagcttaagcagttcttt

SEQ ID NO: 34860 - DNA, 20 bp, synthetic construct
  misc_feature 1..20: note = chemically synthesized
  source 1..20: mol_type = other DNA
aagcttaagcagttctttta

SEQ ID NO: 34861 - DNA, 20 bp, synthetic construct
  misc_feature 1..20: note = chemically synthesized
  source 1..20: mol_type = other DNA
gagtataatgcacctcctca

SEQ ID NO: 34862 - DNA, 20 bp, synthetic construct
  misc_feature 1..20: note = chemically synthesized
  source 1..20: mol_type = other DNA
agtataatgcacctcctcat

SEQ ID NO: 34863 - DNA, 20 bp, synthetic construct
  misc_feature 1..20: note = chemically synthesized
  source 1..20: mol_type = other DNA
cacactctgaacctcacctc

SEQ ID NO: 34864 - DNA, 20 bp, synthetic construct
  misc_feature 1..20: note = chemically synthesized
  source 1..20: mol_type = other DNA
acactctgaacctcacctct

SEQ ID NO: 34865 - DNA, 20 bp, synthetic construct
  misc_feature 1..20: note = chemically synthesized
  source 1..20: mol_type = other DNA
cactctgaacctcacctctg

SEQ ID NO: 34866 - DNA, 20 bp, synthetic construct
  misc_feature 1..20: note = chemically synthesized
  source 1..20: mol_type = other DNA
acctcacctctggggcccgc

SEQ ID NO: 34867 - DNA, 20 bp, synthetic construct
  misc_feature 1..20: note = chemically synthesized
  source 1..20: mol_type = other DNA
cctcacctctggggcccgca

SEQ ID NO: 34868 - DNA, 20 bp, synthetic construct
  misc_feature 1..20: note = chemically synthesized
  source 1..20: mol_type = other DNA
tctggggcccgcaaggaatt

SEQ ID NO: 34869 - DNA, 20 bp, synthetic construct
  misc_feature 1..20: note = chemically synthesized
  source 1..20: mol_type = other DNA
ggcccgcaaggaatttagcc

SEQ ID NO: 34870 - DNA, 20 bp, synthetic construct
  misc_feature 1..20: note = chemically synthesized
  source 1..20: mol_type = other DNA
caaggaatttagcctagtta

SEQ ID NO: 34871 - DNA, 20 bp, synthetic construct
  misc_feature 1..20: note = chemically synthesized
  source 1..20: mol_type = other DNA
aaggaatttagcctagttat

SEQ ID NO: 34872 - DNA, 20 bp, synthetic construct
  misc_feature 1..20: note = chemically synthesized
  source 1..20: mol_type = other DNA
atttagcctagttataggtc

SEQ ID NO: 34873 - DNA, 20 bp, synthetic construct
  misc_feature 1..20: note = chemically synthesized
  source 1..20: mol_type = other DNA
tagcctagttataggtctag

SEQ ID NO: 34874 - DNA, 20 bp, synthetic construct
  misc_feature 1..20: note = chemically synthesized
  source 1..20: mol_type = other DNA
gttataggtctagaagcatt

SEQ ID NO: 34875 - DNA, 20 bp, synthetic construct
  misc_feature 1..20: note = chemically synthesized
  source 1..20: mol_type = other DNA
ttataggtctagaagcattc

SEQ ID NO: 34876 - DNA, 20 bp, synthetic construct
  misc_feature 1..20: note = chemically synthesized
  source 1..20: mol_type = other DNA
tataggtctagaagcattca

SEQ ID NO: 34877 - DNA, 20 bp, synthetic construct
  misc_feature 1..20: note = chemically synthesized
  source 1..20: mol_type = other DNA
ataggtctagaagcattcag

SEQ ID NO: 34878 - DNA, 20 bp, synthetic construct
  misc_feature 1..20: note = chemically synthesized
  source 1..20: mol_type = other DNA
ctagaagcattcaggggcat

SEQ ID NO: 34879 - DNA, 20 bp, synthetic construct
  misc_feature 1..20: note = chemically synthesized
  source 1..20: mol_type = other DNA
tagaagcattcaggggcatt

SEQ ID NO: 34880 - DNA, 20 bp, synthetic construct
  misc_feature 1..20: note = chemically synthesized
  source 1..20: mol_type = other DNA
agaagcattcaggggcatta

SEQ ID NO: 34881 - DNA, 20 bp, synthetic construct
  misc_feature 1..20: note = chemically synthesized
  source 1..20: mol_type = other DNA
gaagcattcaggggcattag

SEQ ID NO: 34882 - DNA, 20 bp, synthetic construct
  misc_feature 1..20: note = chemically synthesized
  source 1..20: mol_type = other DNA
gggcattaggggtgcctctt

SEQ ID NO: 34883 - DNA, 20 bp, synthetic construct
  misc_feature 1..20: note = chemically synthesized
  source 1..20: mol_type = other DNA
ggcattaggggtgcctcttg

SEQ ID NO: 34884 - DNA, 20 bp, synthetic construct
  misc_feature 1..20: note = chemically synthesized
  source 1..20: mol_type = other DNA
cattaggggtgcctcttgag

SEQ ID NO: 34885 - DNA, 20 bp, synthetic construct
  misc_feature 1..20: note = chemically synthesized
  source 1..20: mol_type = other DNA
agaatcaacattatcttgcc

SEQ ID NO: 34886 - DNA, 20 bp, synthetic construct
  misc_feature 1..20: note = chemically synthesized
  source 1..20: mol_type = other DNA
atcaacattatcttgcctgg

SEQ ID NO: 34887 - DNA, 20 bp, synthetic construct
  misc_feature 1..20: note = chemically synthesized
  source 1..20: mol_type = other DNA
atcttgcctggcagctgcct

SEQ ID NO: 34888 - DNA, 20 bp, synthetic construct
  misc_feature 1..20: note = chemically synthesized
  source 1..20: mol_type = other DNA
tcttgcctggcagctgcctc

SEQ ID NO: 34889 - DNA, 20 bp, synthetic construct
  misc_feature 1..20: note = chemically synthesized
  source 1..20: mol_type = other DNA
cttgcctggcagctgcctca

SEQ ID NO: 34890 - DNA, 20 bp, synthetic construct
  misc_feature 1..20: note = chemically synthesized
  source 1..20: mol_type = other DNA
gcctggcagctgcctcaggg

SEQ ID NO: 34891 - DNA, 20 bp, synthetic construct
  misc_feature 1..20: note = chemically synthesized
  source 1..20: mol_type = other DNA
cctggcagctgcctcaggga

SEQ ID NO: 34892 - DNA, 20 bp, synthetic construct
  misc_feature 1..20: note = chemically synthesized
  source 1..20: mol_type = other DNA
aaggccatcactgttgcctc

SEQ ID NO: 34893 - DNA, 20 bp, synthetic construct
  misc_feature 1..20: note = chemically synthesized
  source 1..20: mol_type = other DNA
gccatcactgttgcctcaag

SEQ ID NO: 34894 - DNA, 20 bp, synthetic construct
  misc_feature 1..20: note = chemically synthesized
  source 1..20: mol_type = other DNA
cactgttgcctcaagcagtg

SEQ ID NO: 34895 - DNA, 20 bp, synthetic construct
  misc_feature 1..20: note = chemically synthesized
  source 1..20: mol_type = other DNA
actgttgcctcaagcagtgc

SEQ ID NO: 34896 - DNA, 20 bp, synthetic construct
  misc_feature 1..20: note = chemically synthesized
  source 1..20: mol_type = other DNA
ctgttgcctcaagcagtgca

SEQ ID NO: 34897 - DNA, 20 bp, synthetic construct
  misc_feature 1..20: note = chemically synthesized
  source 1..20: mol_type = other DNA
cagtgcagggtttacatcct

SEQ ID NO: 34898 - DNA, 20 bp, synthetic construct
  misc_feature 1..20: note = chemically synthesized
  source 1..20: mol_type = other DNA
agggtttacatcctcagaca

SEQ ID NO: 34899 - DNA, 20 bp, synthetic construct
  misc_feature 1..20: note = chemically synthesized
  source 1..20: mol_type = other DNA
gggtttacatcctcagacaa

SEQ ID NO: 34900 - DNA, 20 bp, synthetic construct
  misc_feature 1..20: note = chemically synthesized
  source 1..20: mol_type = other DNA
tttacatcctcagacaaagg

SEQ ID NO: 34901 - DNA, 20 bp, synthetic construct
  misc_feature 1..20: note = chemically synthesized
  source 1..20: mol_type = other DNA
catcctcagacaaaggtgga

SEQ ID NO: 34902 - DNA, 20 bp, synthetic construct
  misc_feature 1..20: note = chemically synthesized
  source 1..20: mol_type = other DNA
atcctcagacaaaggtggaa

SEQ ID NO: 34903 - DNA, 20 bp, synthetic construct
  misc_feature 1..20: note = chemically synthesized
  source 1..20: mol_type = other DNA
gacaaaggtggaaaggctaa

SEQ ID NO: 34904 - DNA, 20 bp, synthetic construct
  misc_feature 1..20: note = chemically synthesized
  source 1..20: mol_type = other DNA
aaaggtggaaaggctaatgg

SEQ ID NO: 34905 - DNA, 20 bp, synthetic construct
  misc_feature 1..20: note = chemically synthesized
  source 1..20: mol_type = other DNA
tggaaaggctaatggcagca

SEQ ID NO: 34906 - DNA, 20 bp, synthetic construct
  misc_feature 1..20: note = chemically synthesized
  source 1..20: mol_type = other DNA
ggaaaggctaatggcagcac

SEQ ID NO: 34907 - DNA, 20 bp, synthetic construct
  misc_feature 1..20: note = chemically synthesized
  source 1..20: mol_type = other DNA
aggctaatggcagcacgggt

SEQ ID NO: 34908 - DNA, 20 bp, synthetic construct
  misc_feature 1..20: note = chemically synthesized
  source 1..20: mol_type = other DNA
ggctaatggcagcacgggtc

SEQ ID NO: 34909 - DNA, 20 bp, synthetic construct
  misc_feature 1..20: note = chemically synthesized
  source 1..20: mol_type = other DNA
gctaatggcagcacgggtca

SEQ ID NO: 34910 - DNA, 20 bp, synthetic construct
  misc_feature 1..20: note = chemically synthesized
  source 1..20: mol_type = other DNA
taatggcagcacgggtcagg

SEQ ID NO: 34911 - DNA, 20 bp, synthetic construct
  misc_feature 1..20: note = chemically synthesized
  source 1..20: mol_type = other DNA
aatggcagcacgggtcaggg

SEQ ID NO: 34912 - DNA, 20 bp, synthetic construct
  misc_feature 1..20: note = chemically synthesized
  source 1..20: mol_type = other DNA
atggcagcacgggtcaggga

SEQ ID NO: 34913 - DNA, 20 bp, synthetic construct
  misc_feature 1..20: note = chemically synthesized
  source 1..20: mol_type = other DNA
tggcagcacgggtcagggag

SEQ ID NO: 34914 - DNA, 20 bp, synthetic construct
  misc_feature 1..20: note = chemically synthesized
  source 1..20: mol_type = other DNA
ggaggggatgttaccactac

SEQ ID NO: 34915 - DNA, 20 bp, synthetic construct
  misc_feature 1..20: note = chemically synthesized
  source 1..20: mol_type = other DNA
gaggggatgttaccactact

SEQ ID NO: 34916 - DNA, 20 bp, synthetic construct
  misc_feature 1..20: note = chemically synthesized
  source 1..20: mol_type = other DNA
aggggatgttaccactactg

SEQ ID NO: 34917 - DNA, 20 bp, synthetic construct
  misc_feature 1..20: note = chemically synthesized
  source 1..20: mol_type = other DNA
gatgttaccactactgggga

SEQ ID NO: 34918 - DNA, 20 bp, synthetic construct
  misc_feature 1..20: note = chemically synthesized
  source 1..20: mol_type = other DNA
atgttaccactactggggat

SEQ ID NO: 34919 - DNA, 20 bp, synthetic construct
  misc_feature 1..20: note = chemically synthesized
  source 1..20: mol_type = other DNA
tgttaccactactggggatg

SEQ ID NO: 34920 - DNA, 20 bp, synthetic construct
  misc_feature 1..20: note = chemically synthesized
  source 1..20: mol_type = other DNA
gatggggaaactgtttcttc

SEQ ID NO: 34921 - DNA, 20 bp, synthetic construct
  misc_feature 1..20: note = chemically synthesized
  source 1..20: mol_type = other DNA
aactgtttcttctggcaaaa

SEQ ID NO: 34922 - DNA, 20 bp, synthetic construct
  misc_feature 1..20: note = chemically synthesized
  source 1..20: mol_type = other DNA
ttctggcaaaaaagtttcat

SEQ ID NO: 34923 - DNA, 20 bp, synthetic construct
  misc_feature 1..20: note = chemically synthesized
  source 1..20: mol_type = other DNA
ctggcaaaaaagtttcatca

SEQ ID NO: 34924 - DNA, 20 bp, synthetic construct
  misc_feature 1..20: note = chemically synthesized
  source 1..20: mol_type = other DNA
ttcatcagagttcacaaact

SEQ ID NO: 34925 - DNA, 20 bp, synthetic construct
  misc_feature 1..20: note = chemically synthesized
  source 1..20: mol_type = other DNA
gttcacaaactcagtgtcct

SEQ ID NO: 34926 - DNA, 20 bp, synthetic construct
  misc_feature 1..20: note = chemically synthesized
  source 1..20: mol_type = other DNA
ctcagtgtcctcagcttcat

SEQ ID NO: 34927 - DNA, 20 bp, synthetic construct
  misc_feature 1..20: note = chemically synthesized
  source 1..20: mol_type = other DNA
tcagtgtcctcagcttcatc

SEQ ID NO: 34928 - DNA, 20 bp, synthetic construct
  misc_feature 1..20: note = chemically synthesized
  source 1..20: mol_type = other DNA
cagtgtcctcagcttcatca

SEQ ID NO: 34929 - DNA, 20 bp, synthetic construct
  misc_feature 1..20: note = chemically synthesized
  source 1..20: mol_type = other DNA
ctcccacacatccccactcc

SEQ ID NO: 34930 - DNA, 20 bp, synthetic construct
  misc_feature 1..20: note = chemically synthesized
  source 1..20: mol_type = other DNA
cacatccccactccaagttc

SEQ ID NO: 34931 - DNA, 20 bp, synthetic construct
  misc_feature 1..20: note = chemically synthesized
  source 1..20: mol_type = other DNA
acatccccactccaagttcc

SEQ ID NO: 34932 - DNA, 20 bp, synthetic construct
  misc_feature 1..20: note = chemically synthesized
  source 1..20: mol_type = other DNA
catccccactccaagttcca

SEQ ID NO: 34933 - DNA, 20 bp, synthetic construct
  misc_feature 1..20: note = chemically synthesized
  source 1..20: mol_type = other DNA
tccagggtcccatttttttc

SEQ ID NO: 34934 - DNA, 20 bp, synthetic construct
  misc_feature 1..20: note = chemically synthesized
  source 1..20: mol_type = other DNA
agtcaatgccctcactttaa

SEQ ID NO: 34935 - DNA, 20 bp, synthetic construct
  misc_feature 1..20: note = chemically synthesized
  source 1..20: mol_type = other DNA
tcactttaacagtaaacacc

SEQ ID NO: 34936 - DNA, 20 bp, synthetic construct
  misc_feature 1..20: note = chemically synthesized
  source 1..20: mol_type = other DNA
tttaacagtaaacacctggc

SEQ ID NO: 34937 - DNA, 20 bp, synthetic construct
  misc_feature 1..20: note = chemically synthesized
  source 1..20: mol_type = other DNA
ttaacagtaaacacctggca

SEQ ID NO: 34938 - DNA, 20 bp, synthetic construct
  misc_feature 1..20: note = chemically synthesized
  source 1..20: mol_type = other DNA
tgtgcatgcacctcttgttg

SEQ ID NO: 34939 - DNA, 20 bp, synthetic construct
  misc_feature 1..20: note = chemically synthesized
  source 1..20: mol_type = other DNA
atgcacctcttgttgcagat

SEQ ID NO: 34940 - DNA, 20 bp, synthetic construct
  misc_feature 1..20: note = chemically synthesized
  source 1..20: mol_type = other DNA
atcagctactcgcatgataa

SEQ ID NO: 34941 - DNA, 20 bp, synthetic construct
  misc_feature 1..20: note = chemically synthesized
  source 1..20: mol_type = other DNA
caatttcaactctttctcta

SEQ ID NO: 34942 - DNA, 20 bp, synthetic construct
  misc_feature 1..20: note = chemically synthesized
  source 1..20: mol_type = other DNA
aatttcaactctttctctac

SEQ ID NO: 34943 - DNA, 20 bp, synthetic construct
  misc_feature 1..20: note = chemically synthesized
  source 1..20: mol_type = other DNA
tttcaactctttctctacag

SEQ ID NO: 34944 - DNA, 20 bp, synthetic construct
  misc_feature 1..20: note = chemically synthesized
  source 1..20: mol_type = other DNA
caggagttaaaactctcatt

SEQ ID NO: 34945 - DNA, 20 bp, synthetic construct
  misc_feature 1..20: note = chemically synthesized
  source 1..20: mol_type = other DNA
aggagttaaaactctcattc

SEQ ID NO: 34946 - DNA, 20 bp, synthetic construct
  misc_feature 1..20: note = chemically synthesized
  source 1..20: mol_type = other DNA
ggagttaaaactctcattca

SEQ ID NO: 34947 - DNA, 20 bp, synthetic construct
  misc_feature 1..20: note = chemically synthesized
  source 1..20: mol_type = other DNA
actctcattcagggcaatct

SEQ ID NO: 34948 - DNA, 20 bp, synthetic construct
  misc_feature 1..20: note = chemically synthesized
  source 1..20: mol_type = other DNA
ctcattcagggcaatcttag

SEQ ID NO: 34949 - DNA, 20 bp, synthetic construct
  misc_feature 1..20: note = chemically synthesized
  source 1..20: mol_type = other DNA
gggcaatcttagcagatttg

SEQ ID NO: 34950 - DNA, 20 bp, synthetic construct
  misc_feature 1..20: note = chemically synthesized
  source 1..20: mol_type = other DNA
atcttagcagatttgtggct

SEQ ID NO: 34951 - DNA, 20 bp, synthetic construct
  misc_feature 1..20: note = chemically synthesized
  source 1..20: mol_type = other DNA
tggctcagtatctgcttctg

SEQ ID NO: 34952 - DNA, 20 bp, synthetic construct
  misc_feature 1..20: note = chemically synthesized
  source 1..20: mol_type = other DNA
ggctcagtatctgcttctga

SEQ ID NO: 34953 - DNA, 20 bp, synthetic construct
  misc_feature 1..20: note = chemically synthesized
  source 1..20: mol_type = other DNA
tcagtatctgcttctgaagg

SEQ ID NO: 34954 - DNA, 20 bp, synthetic construct
  misc_feature 1..20: note = chemically synthesized
  source 1..20: mol_type = other DNA
cagtatctgcttctgaaggt

SEQ ID NO: 34955 - DNA, 20 bp, synthetic construct
  misc_feature 1..20: note = chemically synthesized
  source 1..20: mol_type = other DNA
gtatctgcttctgaaggtgg

SEQ ID NO: 34956 - DNA, 20 bp, synthetic construct
  misc_feature 1..20: note = chemically synthesized
  source 1..20: mol_type = other DNA
ctgcttctgaaggtgggaga

SEQ ID NO: 34957 - DNA, 20 bp, synthetic construct
  misc_feature 1..20: note = chemically synthesized
  source 1..20: mol_type = other DNA
aggtgggagacagatcccct

SEQ ID NO: 34958 - DNA, 20 bp, synthetic construct
  misc_feature 1..20: note = chemically synthesized
  source 1..20: mol_type = other DNA
ttttctttcatctctttctc

SEQ ID NO: 34959 - DNA, 20 bp, synthetic construct
  misc_feature 1..20: note = chemically synthesized
  source 1..20: mol_type = other DNA
ttctttcatctctttctcca

SEQ ID NO: 34960 - DNA, 20 bp, synthetic construct
  misc_feature 1..20: note = chemically synthesized
  source 1..20: mol_type = other DNA
atctctttctccagagaact

SEQ ID NO: 34961 - DNA, 20 bp, synthetic construct
  misc_feature 1..20: note = chemically synthesized
  source 1..20: mol_type = other DNA
tctctttctccagagaactt

SEQ ID NO: 34962 - DNA, 20 bp, synthetic construct
  misc_feature 1..20: note = chemically synthesized
  source 1..20: mol_type = other DNA
tctttctccagagaacttag

SEQ ID NO: 34963 - DNA, 20 bp, synthetic construct
  misc_feature 1..20: note = chemically synthesized
  source 1..20: mol_type = other DNA
accaacttcattatgttcct

SEQ ID NO: 34964 - DNA, 20 bp, synthetic construct
  misc_feature 1..20: note = chemically synthesized
  source 1..20: mol_type = other DNA
gttccttggttctccacata

SEQ ID NO: 34965 - DNA, 20 bp, synthetic construct
  misc_feature 1..20: note = chemically synthesized
  source 1..20: mol_type = other DNA
tggttctccacatatagtca

SEQ ID NO: 34966 - DNA, 20 bp, synthetic construct
  misc_feature 1..20: note = chemically synthesized
  source 1..20: mol_type = other DNA
ggttctccacatatagtcaa

SEQ ID NO: 34967 - DNA, 20 bp, synthetic construct
  misc_feature 1..20: note = chemically synthesized
  source 1..20: mol_type = other DNA
atagtcaaaggtattatgta

SEQ ID NO: 34968 - DNA, 20 bp, synthetic construct
  misc_feature 1..20: note = chemically synthesized
  source 1..20: mol_type = other DNA
agtcaaaggtattatgtata

SEQ ID NO: 34969 - DNA, 20 bp, synthetic construct
  misc_feature 1..20: note = chemically synthesized
  source 1..20: mol_type = other DNA
ctaaactccttgcctctcat

SEQ ID NO: 34970 - DNA, 20 bp, synthetic construct
  misc_feature 1..20: note = chemically synthesized
  source 1..20: mol_type = other DNA
gcctctcataagtgatgaat

SEQ ID NO: 34971 - DNA, 20 bp, synthetic construct
  misc_feature 1..20: note = chemically synthesized
  source 1..20: mol_type = other DNA
tctcataagtgatgaatcag

SEQ ID NO: 34972 - DNA, 20 bp, synthetic construct
  misc_feature 1..20: note = chemically synthesized
  source 1..20: mol_type = other DNA
gcataactctctaaacaatt

SEQ ID NO: 34973 - DNA, 20 bp, synthetic construct
  misc_feature 1..20: note = chemically synthesized
  source 1..20: mol_type = other DNA
cataactctctaaacaattc

SEQ ID NO: 34974 - DNA, 20 bp, synthetic construct
  misc_feature 1..20: note = chemically synthesized
  source 1..20: mol_type = other DNA
ctctctaaacaattcaggcc

SEQ ID NO: 34975 - DNA, 20 bp, synthetic construct
  misc_feature 1..20: note = chemically synthesized
  source 1..20: mol_type = other DNA
caattcaggccaagtactat

SEQ ID NO: 34976 - DNA, 20 bp, synthetic construct
  misc_feature 1..20: note = chemically synthesized
  source 1..20: mol_type = other DNA
atcagtgttctccatactat

SEQ ID NO: 34977 - DNA, 20 bp, synthetic construct
  misc_feature 1..20: note = chemically synthesized
  source 1..20: mol_type = other DNA
agtgttctccatactattag

SEQ ID NO: 34978 - DNA, 20 bp, synthetic construct
  misc_feature 1..20: note = chemically synthesized
  source 1..20: mol_type = other DNA
gttctccatactattagaag

SEQ ID NO: 34979 - DNA, 20 bp, synthetic construct
  misc_feature 1..20: note = chemically synthesized
  source 1..20: mol_type = other DNA
tctccatactattagaagta

SEQ ID NO: 34980 - DNA, 20 bp, synthetic construct
  misc_feature 1..20: note = chemically synthesized
  source 1..20: mol_type = other DNA
actattagaagtagagtcct

SEQ ID NO: 34981 - DNA, 20 bp, synthetic construct
  misc_feature 1..20: note = chemically synthesized
  source 1..20: mol_type = other DNA
gtagagtccttagcattttt

SEQ ID NO: 34982 - DNA, 20 bp, synthetic construct
  misc_feature 1..20: note = chemically synthesized
  source 1..20: mol_type = other DNA
tttggtctaatcatattaat

SEQ ID NO: 34983 - DNA, 20 bp, synthetic construct
  misc_feature 1..20: note = chemically synthesized
  source 1..20: mol_type = other DNA
tcatattaatcagccaacac

SEQ ID NO: 34984 - DNA, 20 bp, synthetic construct
  misc_feature 1..20: note = chemically synthesized
  source 1..20: mol_type = other DNA
tattaatcagccaacaccag

SEQ ID NO: 34985 - DNA, 20 bp, synthetic construct
  misc_feature 1..20: note = chemically synthesized
  source 1..20: mol_type = other DNA
agaagtcccaaaaccaatga

SEQ ID NO: 34986 - DNA, 20 bp, synthetic construct
  misc_feature 1..20: note = chemically synthesized
  source 1..20: mol_type = other DNA
tccttaatattctgttcctc

SEQ ID NO: 34987 - DNA, 20 bp, synthetic construct
  misc_feature 1..20: note = chemically synthesized
  source 1..20: mol_type = other DNA
tgttcctcaagaaccacttc

SEQ ID NO: 34988 - DNA, 20 bp, synthetic construct
  misc_feature 1..20: note = chemically synthesized
  source 1..20: mol_type = other DNA
tctggtatgaaaatctgtat

SEQ ID NO: 34989 - DNA, 20 bp, synthetic construct
  misc_feature 1..20: note = chemically synthesized
  source 1..20: mol_type = other DNA
gtatgaaaatctgtattagt

SEQ ID NO: 34990 - DNA, 20 bp, synthetic construct
  misc_feature 1..20: note = chemically synthesized
  source 1..20: mol_type = other DNA
tatgaaaatctgtattagtc

SEQ ID NO: 34991 - DNA, 20 bp, synthetic construct
  misc_feature 1..20: note = chemically synthesized
  source 1..20: mol_type = other DNA
atgaaaatctgtattagtcg

SEQ ID NO: 34992 - DNA, 20 bp, synthetic construct
  misc_feature 1..20: note = chemically synthesized
  source 1..20: mol_type = other DNA
ctgtattagtcggggttctc

SEQ ID NO: 34993 - DNA, 20 bp, synthetic construct
  misc_feature 1..20: note = chemically synthesized
  source 1..20: mol_type = other DNA
gtattagtcggggttctcta

SEQ ID NO: 34994 - DNA, 20 bp, synthetic construct
  misc_feature 1..20: note = chemically synthesized
  source 1..20: mol_type = other DNA
tattagtcggggttctctag

SEQ ID NO: 34995 - DNA, 20 bp, synthetic construct
  misc_feature 1..20: note = chemically synthesized
  source 1..20: mol_type = other DNA
attagtcggggttctctaga

SEQ ID NO: 34996 - DNA, 20 bp, synthetic construct
  misc_feature 1..20: note = chemically synthesized
  source 1..20: mol_type = other DNA
gtcggggttctctagaggga

SEQ ID NO: 34997 - DNA, 20 bp, synthetic construct
  misc_feature 1..20: note = chemically synthesized
  source 1..20: mol_type = other DNA
ctctagagggacagaactaa

SEQ ID NO: 34998 - DNA, 20 bp, synthetic construct
  misc_feature 1..20: note = chemically synthesized
  source 1..20: mol_type = other DNA
tctagagggacagaactaat

SEQ ID NO: 34999 - DNA, 20 bp, synthetic construct
  misc_feature 1..20: note = chemically synthesized
  source 1..20: mol_type = other DNA
tagagggacagaactaatag

SEQ ID NO: 35000 - DNA, 20 bp, synthetic construct
  misc_feature 1..20: note = chemically synthesized
  source 1..20: mol_type = other DNA
gattatatatatatatatat

SEQ ID NO: 35001 - DNA, 20 bp, synthetic construct
  misc_feature 1..20: note = chemically synthesized
  source 1..20: mol_type = other DNA
ttatatatatatatatatga

SEQ ID NO: 35002 - DNA, 20 bp, synthetic construct
  misc_feature 1..20: note = chemically synthesized
  source 1..20: mol_type = other DNA
atatatatatatatatgaga

SEQ ID NO: 35003 - DNA, 20 bp, synthetic construct
  misc_feature 1..20: note = chemically synthesized
  source 1..20: mol_type = other DNA
atatatatatatatgagaga

SEQ ID NO: 35004 - DNA, 20 bp, synthetic construct
  misc_feature 1..20: note = chemically synthesized
  source 1..20: mol_type = other DNA
atatatatatatgagagaga

SEQ ID NO: 35005 - DNA, 20 bp, synthetic construct
  misc_feature 1..20: note = chemically synthesized
  source 1..20: mol_type = other DNA
atatatatatgagagagaga

SEQ ID NO: 35006 - DNA, 20 bp, synthetic construct
  misc_feature 1..20: note = chemically synthesized
  source 1..20: mol_type = other DNA
atatatatgagagagagaga

SEQ ID NO: 35007 - DNA, 20 bp, synthetic construct
  misc_feature 1..20: note = chemically synthesized
  source 1..20: mol_type = other DNA
atatatgagagagagagaga

SEQ ID NO: 35008 - DNA, 20 bp, synthetic construct
  misc_feature 1..20: note = chemically synthesized
  source 1..20: mol_type = other DNA
atatgagagagagagagaga

SEQ ID NO: 35009 - DNA, 20 bp, synthetic construct
  misc_feature 1..20: note = chemically synthesized
  source 1..20: mol_type = other DNA
tatgtatatatgtgtatata

SEQ ID NO: 35010 - DNA, 20 bp, synthetic construct
  misc_feature 1..20: note = chemically synthesized
  source 1..20: mol_type = other DNA
tatatatgtgtatatatagt

SEQ ID NO: 35011 - DNA, 20 bp, synthetic construct
  misc_feature 1..20: note = chemically synthesized
  source 1..20: mol_type = other DNA
agtatacctatatctatcta

SEQ ID NO: 35012 - DNA, 20 bp, synthetic construct
  misc_feature 1..20: note = chemically synthesized
  source 1..20: mol_type = other DNA
cctatatctatctatagata

SEQ ID NO: 35013 - DNA, 20 bp, synthetic construct
  misc_feature 1..20: note = chemically synthesized
  source 1..20: mol_type = other DNA
gatatagatatactcacaca

SEQ ID NO: 35014 - DNA, 20 bp, synthetic construct
  misc_feature 1..20: note = chemically synthesized
  source 1..20: mol_type = other DNA
atatagatatactcacacaa

SEQ ID NO: 35015 - DNA, 20 bp, synthetic construct
  misc_feature 1..20: note = chemically synthesized
  source 1..20: mol_type = other DNA
tatagatatactcacacaaa

SEQ ID NO: 35016 - DNA, 20 bp, synthetic construct
  misc_feature 1..20: note = chemically synthesized
  source 1..20: mol_type = other DNA
atagatatactcacacaaag

SEQ ID NO: 35017 - DNA, 20 bp, synthetic construct
  misc_feature 1..20: note = chemically synthesized
  source 1..20: mol_type = other DNA
agatatactcacacaaaggg

SEQ ID NO: 35018 - DNA, 20 bp, synthetic construct
  misc_feature 1..20: note = chemically synthesized
  source 1..20: mol_type = other DNA
cacacaaaggggagcttatt

SEQ ID NO: 35019 - DNA, 20 bp, synthetic construct
  misc_feature 1..20: note = chemically synthesized
  source 1..20: mol_type = other DNA
acaaaggggagcttattaag

SEQ ID NO: 35020 - DNA, 20 bp, synthetic construct
  misc_feature 1..20: note = chemically synthesized
  source 1..20: mol_type = other DNA
attaagtggtattaactcac

SEQ ID NO: 35021 - DNA, 20 bp, synthetic construct
  misc_feature 1..20: note = chemically synthesized
  source 1..20: mol_type = other DNA
gtattaactcacaagattac

SEQ ID NO: 35022 - DNA, 20 bp, synthetic construct
  misc_feature 1..20: note = chemically synthesized
  source 1..20: mol_type = other DNA
tattaactcacaagattaca

SEQ ID NO: 35023 - DNA, 20 bp, synthetic construct
  misc_feature 1..20: note = chemically synthesized
  source 1..20: mol_type = other DNA
aagattacaaggtcccataa

SEQ ID NO: 35024 - DNA, 20 bp, synthetic construct
  misc_feature 1..20: note = chemically synthesized
  source 1..20: mol_type = other DNA
agattacaaggtcccataat

SEQ ID NO: 35025 - DNA, 20 bp, synthetic construct
  misc_feature 1..20: note = chemically synthesized
  source 1..20: mol_type = other DNA
taataggccacctgcaatct

SEQ ID NO: 35026 - DNA, 20 bp, synthetic construct
  misc_feature 1..20: note = chemically synthesized
  source 1..20: mol_type = other DNA
aataggccacctgcaatctg

SEQ ID NO: 35027 - DNA, 20 bp, synthetic construct
  misc_feature 1..20: note = chemically synthesized
  source 1..20: mol_type = other DNA
taggccacctgcaatctgag

SEQ ID NO: 35028 - DNA, 20 bp, synthetic construct
  misc_feature 1..20: note = chemically synthesized
  source 1..20: mol_type = other DNA
ccacctgcaatctgaggagc

SEQ ID NO: 35029 - DNA, 20 bp, synthetic construct
  misc_feature 1..20: note = chemically synthesized
  source 1..20: mol_type = other DNA
cacctgcaatctgaggagca

SEQ ID NO: 35030 - DNA, 20 bp, synthetic construct
  misc_feature 1..20: note = chemically synthesized
  source 1..20: mol_type = other DNA
ctgcaatctgaggagcaagg

SEQ ID NO: 35031 - DNA, 20 bp, synthetic construct
  misc_feature 1..20: note = chemically synthesized
  source 1..20: mol_type = other DNA
aatctgaggagcaaggaaga

SEQ ID NO: 35032 - DNA, 20 bp, synthetic construct
  misc_feature 1..20: note = chemically synthesized
  source 1..20: mol_type = other DNA
aggagcaaggaagacagtcc

SEQ ID NO: 35033 - DNA, 20 bp, synthetic construct
  misc_feature 1..20: note = chemically synthesized
  source 1..20: mol_type = other DNA
ggaagacagtccaagtccca

SEQ ID NO: 35034 - DNA, 20 bp, synthetic construct
  misc_feature 1..20: note = chemically synthesized
  source 1..20: mol_type = other DNA
cagtccaagtcccacagctg

SEQ ID NO: 35035 - DNA, 20 bp, synthetic construct
  misc_feature 1..20: note = chemically synthesized
  source 1..20: mol_type = other DNA
agtcccacagctgaagaact

SEQ ID NO: 35036 - DNA, 20 bp, synthetic construct
  misc_feature 1..20: note = chemically synthesized
  source 1..20: mol_type = other DNA
tcccacagctgaagaacttg

SEQ ID NO: 35037 - DNA, 20 bp, synthetic construct
  misc_feature 1..20: note = chemically synthesized
  source 1..20: mol_type = other DNA
gaacttggagtccgatgttc

SEQ ID NO: 35038 - DNA, 20 bp, synthetic construct
  misc_feature 1..20: note = chemically synthesized
  source 1..20: mol_type = other DNA
acttggagtccgatgttcaa

SEQ ID NO: 35039 - DNA, 20 bp, synthetic construct
  misc_feature 1..20: note = chemically synthesized
  source 1..20: mol_type = other DNA
tggagtccgatgttcaagag

SEQ ID NO: 35040 - DNA, 20 bp, synthetic construct
  misc_feature 1..20: note = chemically synthesized
  source 1..20: mol_type = other DNA
ggagtccgatgttcaagagc

SEQ ID NO: 35041 - DNA, 20 bp, synthetic construct
  misc_feature 1..20: note = chemically synthesized
  source 1..20: mol_type = other DNA
gtccgatgttcaagagcagg

SEQ ID NO: 35042 - DNA, 20 bp, synthetic construct
  misc_feature 1..20: note = chemically synthesized
  source 1..20: mol_type = other DNA
tccgatgttcaagagcagga

SEQ ID NO: 35043 - DNA, 20 bp, synthetic construct
  misc_feature 1..20: note = chemically synthesized
  source 1..20: mol_type = other DNA
gttcaagagcaggaaggatc

SEQ ID NO: 35044 - DNA, 20 bp, synthetic construct
  misc_feature 1..20: note = chemically synthesized
  source 1..20: mol_type = other DNA
agagcaggaaggatccagca

SEQ ID NO: 35045 - DNA, 20 bp, synthetic construct
  misc_feature 1..20: note = chemically synthesized
  source 1..20: mol_type = other DNA
gagcaggaaggatccagcac

SEQ ID NO: 35046 - DNA, 20 bp, synthetic construct
  misc_feature 1..20: note = chemically synthesized
  source 1..20: mol_type = other DNA
gcaggaaggatccagcacag

SEQ ID NO: 35047 - DNA, 20 bp, synthetic construct
  misc_feature 1..20: note = chemically synthesized
  source 1..20: mol_type = other DNA
gaaggatccagcacaggaga

SEQ ID NO: 35048 - DNA, 20 bp, synthetic construct
  misc_feature 1..20: note = chemically synthesized
  source 1..20: mol_type = other DNA
tccagcacaggagaaagatg

SEQ ID NO: 35049 - DNA, 20 bp, synthetic construct
  misc_feature 1..20: note = chemically synthesized
  source 1..20: mol_type = other DNA
ccagcacaggagaaagatgt

SEQ ID NO: 35050 - DNA, 20 bp, synthetic construct
  misc_feature 1..20: note = chemically synthesized
  source 1..20: mol_type = other DNA
cacaggagaaagatgtaggc

SEQ ID NO: 35051 - DNA, 20 bp, synthetic construct
  misc_feature 1..20: note = chemically synthesized
  source 1..20: mol_type = other DNA
acaggagaaagatgtaggct

SEQ ID NO: 35052 - DNA, 20 bp, synthetic construct
  misc_feature 1..20: note = chemically synthesized
  source 1..20: mol_type = other DNA
aggagaaagatgtaggctgg

SEQ ID NO: 35053 - DNA, 20 bp, synthetic construct
  misc_feature 1..20: note = chemically synthesized
  source 1..20: mol_type = other DNA
ggagaaagatgtaggctggg

SEQ ID NO: 35054 - DNA, 20 bp, synthetic construct
  misc_feature 1..20: note = chemically synthesized
  source 1..20: mol_type = other DNA
aagatgtaggctgggaggct

SEQ ID NO: 35055 - DNA, 20 bp, synthetic construct
  misc_feature 1..20: note = chemically synthesized
  source 1..20: mol_type = other DNA
tgtaggctgggaggctaagc

SEQ ID NO: 35056 - DNA, 20 bp, synthetic construct
  misc_feature 1..20: note = chemically synthesized
  source 1..20: mol_type = other DNA
gctgggaggctaagccagtc

SEQ ID NO: 35057 - DNA, 20 bp, synthetic construct
  misc_feature 1..20: note = chemically synthesized
  source 1..20: mol_type = other DNA
gcctttttacatttttctgc

SEQ ID NO: 35058 - DNA, 20 bp, synthetic construct
  misc_feature 1..20: note = chemically synthesized
  source 1..20: mol_type = other DNA
tttctgccagctttatattc

SEQ ID NO: 35059 - DNA, 20 bp, synthetic construct
  misc_feature 1..20: note = chemically synthesized
  source 1..20: mol_type = other DNA
agctttatattctggctcta

SEQ ID NO: 35060 - DNA, 20 bp, synthetic construct
  misc_feature 1..20: note = chemically synthesized
  source 1..20: mol_type = other DNA
tatattctggctctacagct

SEQ ID NO: 35061 - DNA, 20 bp, synthetic construct
  misc_feature 1..20: note = chemically synthesized
  source 1..20: mol_type = other DNA
atattctggctctacagctt

SEQ ID NO: 35062 - DNA, 20 bp, synthetic construct
  misc_feature 1..20: note = chemically synthesized
  source 1..20: mol_type = other DNA
tattctggctctacagcttg

SEQ ID NO: 35063 - DNA, 20 bp, synthetic construct
  misc_feature 1..20: note = chemically synthesized
  source 1..20: mol_type = other DNA
attctggctctacagcttgg

SEQ ID NO: 35064 - DNA, 20 bp, synthetic construct
  misc_feature 1..20: note = chemically synthesized
  source 1..20: mol_type = other DNA
ctggctctacagcttggggg

SEQ ID NO: 35065 - DNA, 20 bp, synthetic construct
  misc_feature 1..20: note = chemically synthesized
  source 1..20: mol_type = other DNA
gctctacagcttgggggcag

SEQ ID NO: 35066 - DNA, 20 bp, synthetic construct
  misc_feature 1..20: note = chemically synthesized
  source 1..20: mol_type = other DNA
ctctacagcttgggggcagc

SEQ ID NO: 35067 - DNA, 20 bp, synthetic construct
  misc_feature 1..20: note = chemically synthesized
  source 1..20: mol_type = other DNA
tctacagcttgggggcagca

SEQ ID NO: 35068 - DNA, 20 bp, synthetic construct
  misc_feature 1..20: note = chemically synthesized
  source 1..20: mol_type = other DNA
ctacagcttgggggcagcag

SEQ ID NO: 35069 - DNA, 20 bp, synthetic construct
  misc_feature 1..20: note = chemically synthesized
  source 1..20: mol_type = other DNA
cagcttgggggcagcagggg

SEQ ID NO: 35070 - DNA, 20 bp, synthetic construct
  misc_feature 1..20: note = chemically synthesized
  source 1..20: mol_type = other DNA
agcttgggggcagcaggggc

SEQ ID NO: 35071 - DNA, 20 bp, synthetic construct
  misc_feature 1..20: note = chemically synthesized
  source 1..20: mol_type = other DNA
gcttgggggcagcaggggca

SEQ ID NO: 35072 - DNA, 20 bp, synthetic construct
  misc_feature 1..20: note = chemically synthesized
  source 1..20: mol_type = other DNA
cttgggggcagcaggggcag

SEQ ID NO: 35073 - DNA, 20 bp, synthetic construct
  misc_feature 1..20: note = chemically synthesized
  source 1..20: mol_type = other DNA
ggcagcaggggcaggggcct

SEQ ID NO: 35074 - DNA, 20 bp, synthetic construct
  misc_feature 1..20: note = chemically synthesized
  source 1..20: mol_type = other DNA
gcagcaggggcaggggcctc

SEQ ID NO: 35075 - DNA, 20 bp, synthetic construct
  misc_feature 1..20: note = chemically synthesized
  source 1..20: mol_type = other DNA
cagcaggggcaggggcctca

SEQ ID NO: 35076 - DNA, 20 bp, synthetic construct
  misc_feature 1..20: note = chemically synthesized
  source 1..20: mol_type = other DNA
caggggcctcagggtgcttg

SEQ ID NO: 35077 - DNA, 20 bp, synthetic construct
  misc_feature 1..20: note = chemically synthesized
  source 1..20: mol_type = other DNA
aggggcctcagggtgcttgc

SEQ ID NO: 35078 - DNA, 20 bp, synthetic construct
  misc_feature 1..20: note = chemically synthesized
  source 1..20: mol_type = other DNA
ggggcctcagggtgcttgca

SEQ ID NO: 35079 - DNA, 20 bp, synthetic construct
  misc_feature 1..20: note = chemically synthesized
  source 1..20: mol_type = other DNA
tgcttgcagggatgacacac

SEQ ID NO: 35080 - DNA, 20 bp, synthetic construct
  misc_feature 1..20: note = chemically synthesized
  source 1..20: mol_type = other DNA
acacactggcctcttttcca

SEQ ID NO: 35081 - DNA, 20 bp, synthetic construct
  misc_feature 1..20: note = chemically synthesized
  source 1..20: mol_type = other DNA
cacactggcctcttttccat

SEQ ID NO: 35082 - DNA, 20 bp, synthetic construct
  misc_feature 1..20: note = chemically synthesized
  source 1..20: mol_type = other DNA
acactggcctcttttccata

SEQ ID NO: 35083 - DNA, 20 bp, synthetic construct
  misc_feature 1..20: note = chemically synthesized
  source 1..20: mol_type = other DNA
ctggcctcttttccataggg

SEQ ID NO: 35084 - DNA, 20 bp, synthetic construct
  misc_feature 1..20: note = chemically synthesized
  source 1..20: mol_type = other DNA
cctcttttccatagggtggc

SEQ ID NO: 35085 - DNA, 20 bp, synthetic construct
  misc_feature 1..20: note = chemically synthesized
  source 1..20: mol_type = other DNA
ctcttttccatagggtggct

SEQ ID NO: 35086 - DNA, 20 bp, synthetic construct
  misc_feature 1..20: note = chemically synthesized
  source 1..20: mol_type = other DNA
tcttttccatagggtggctg

SEQ ID NO: 35087 - DNA, 20 bp, synthetic construct
  misc_feature 1..20: note = chemically synthesized
  source 1..20: mol_type = other DNA
atagggtggctggggcacac

SEQ ID NO: 35088 - DNA, 20 bp, synthetic construct
  misc_feature 1..20: note = chemically synthesized
  source 1..20: mol_type = other DNA
tagggtggctggggcacact

SEQ ID NO: 35089 - DNA, 20 bp, synthetic construct
  misc_feature 1..20: note = chemically synthesized
  source 1..20: mol_type = other DNA
agggtggctggggcacactg

SEQ ID NO: 35090 - DNA, 20 bp, synthetic construct
  misc_feature 1..20: note = chemically synthesized
  source 1..20: mol_type = other DNA
gctggggcacactggggtgt

SEQ ID NO: 35091 - DNA, 20 bp, synthetic construct
  misc_feature 1..20: note = chemically synthesized
  source 1..20: mol_type = other DNA
ggcacactggggtgtgagta

SEQ ID NO: 35092 - DNA, 20 bp, synthetic construct
  misc_feature 1..20: note = chemically synthesized
  source 1..20: mol_type = other DNA
tggggtgtgagtaaagcact

SEQ ID NO: 35093 - DNA, 20 bp, synthetic construct
  misc_feature 1..20: note = chemically synthesized
  source 1..20: mol_type = other DNA
ggggtgtgagtaaagcactc

SEQ ID NO: 35094 - DNA, 20 bp, synthetic construct
  misc_feature 1..20: note = chemically synthesized
  source 1..20: mol_type = other DNA
caggatcttttttccttccc

SEQ ID NO: 35095 - DNA, 20 bp, synthetic construct
  misc_feature 1..20: note = chemically synthesized
  source 1..20: mol_type = other DNA
cttttttccttccctagtcc

SEQ ID NO: 35096 - DNA, 20 bp, synthetic construct
  misc_feature 1..20: note = chemically synthesized
  source 1..20: mol_type = other DNA
ttccttccctagtccaagta

SEQ ID NO: 35097 - DNA, 20 bp, synthetic construct
  misc_feature 1..20: note = chemically synthesized
  source 1..20: mol_type = other DNA
ttccctagtccaagtacagc

SEQ ID NO: 35098 - DNA, 20 bp, synthetic construct
  misc_feature 1..20: note = chemically synthesized
  source 1..20: mol_type = other DNA
tccctagtccaagtacagca

SEQ ID NO: 35099 - DNA, 20 bp, synthetic construct
  misc_feature 1..20: note = chemically synthesized
  source 1..20: mol_type = other DNA
ccctagtccaagtacagcaa

SEQ ID NO: 35100 - DNA, 20 bp, synthetic construct
  misc_feature 1..20: note = chemically synthesized
  source 1..20: mol_type = other DNA
tagtccaagtacagcaaggg

SEQ ID NO: 35101 - DNA, 20 bp, synthetic construct
  misc_feature 1..20: note = chemically synthesized
  source 1..20: mol_type = other DNA
cagcaagggcagtatgactg

SEQ ID NO: 35102 - DNA, 20 bp, synthetic construct
  misc_feature 1..20: note = chemically synthesized
  source 1..20: mol_type = other DNA
gggcagtatgactgcagtgt

SEQ ID NO: 35103 - DNA, 20 bp, synthetic construct
  misc_feature 1..20: note = chemically synthesized
  source 1..20: mol_type = other DNA
cagtatgactgcagtgttag

SEQ ID NO: 35104 - DNA, 20 bp, synthetic construct
  misc_feature 1..20: note = chemically synthesized
  source 1..20: mol_type = other DNA
tatgactgcagtgttagtgg

SEQ ID NO: 35105 - DNA, 20 bp, synthetic construct
  misc_feature 1..20: note = chemically synthesized
  source 1..20: mol_type = other DNA
gactgcagtgttagtggcag

SEQ ID NO: 35106 - DNA, 20 bp, synthetic construct
  misc_feature 1..20: note = chemically synthesized
  source 1..20: mol_type = other DNA
actgcagtgttagtggcaga

SEQ ID NO: 35107 - DNA, 20 bp, synthetic construct
  misc_feature 1..20: note = chemically synthesized
  source 1..20: mol_type = other DNA
gttagtggcagaaggacttt

SEQ ID NO: 35108 - DNA, 20 bp, synthetic construct
  misc_feature 1..20: note = chemically synthesized
  source 1..20: mol_type = other DNA
gaaggactttcagtcacctc

SEQ ID NO: 35109 - DNA, 20 bp, synthetic construct
  misc_feature 1..20: note = chemically synthesized
  source 1..20: mol_type = other DNA
aaggactttcagtcacctct

SEQ ID NO: 35110 - DNA, 20 bp, synthetic construct
  misc_feature 1..20: note = chemically synthesized
  source 1..20: mol_type = other DNA
ggactttcagtcacctctgg

SEQ ID NO: 35111 - DNA, 20 bp, synthetic construct
  misc_feature 1..20: note = chemically synthesized
  source 1..20: mol_type = other DNA
agcttcaccccacaaaaaca

SEQ ID NO: 35112 - DNA, 20 bp, synthetic construct
  misc_feature 1..20: note = chemically synthesized
  source 1..20: mol_type = other DNA
cttcaccccacaaaaacaca

SEQ ID NO: 35113 - DNA, 20 bp, synthetic construct
  misc_feature 1..20: note = chemically synthesized
  source 1..20: mol_type = other DNA
ccccacaaaaacacagagtg

SEQ ID NO: 35114 - DNA, 20 bp, synthetic construct
  misc_feature 1..20: note = chemically synthesized
  source 1..20: mol_type = other DNA
acaaaaacacagagtgcagc

SEQ ID NO: 35115 - DNA, 20 bp, synthetic construct
  misc_feature 1..20: note = chemically synthesized
  source 1..20: mol_type = other DNA
aaaacacagagtgcagccag

SEQ ID NO: 35116 - DNA, 20 bp, synthetic construct
  misc_feature 1..20: note = chemically synthesized
  source 1..20: mol_type = other DNA
gccagtggaaatgttcaact

SEQ ID NO: 35117 - DNA, 20 bp, synthetic construct
  misc_feature 1..20: note = chemically synthesized
  source 1..20: mol_type = other DNA
ggaaatgttcaactgagttc

SEQ ID NO: 35118 - DNA, 20 bp, synthetic construct
  misc_feature 1..20: note = chemically synthesized
  source 1..20: mol_type = other DNA
gaaatgttcaactgagttcg

SEQ ID NO: 35119 - DNA, 20 bp, synthetic construct
  misc_feature 1..20: note = chemically synthesized
  source 1..20: mol_type = other DNA
agttcgaggtgcctgcactg

SEQ ID NO: 35120 - DNA, 20 bp, synthetic construct
  misc_feature 1..20: note = chemically synthesized
  source 1..20: mol_type = other DNA
gttcgaggtgcctgcactgt

SEQ ID NO: 35121 - DNA, 20 bp, synthetic construct
  misc_feature 1..20: note = chemically synthesized
  source 1..20: mol_type = other DNA
ggtgcctgcactgtgggccc

SEQ ID NO: 35122 - DNA, 20 bp, synthetic construct
  misc_feature 1..20: note = chemically synthesized
  source 1..20: mol_type = other DNA
cctgcactgtgggcccaagc

SEQ ID NO: 35123 - DNA, 20 bp, synthetic construct
  misc_feature 1..20: note = chemically synthesized
  source 1..20: mol_type = other DNA
ctgcactgtgggcccaagcc

SEQ ID NO: 35124 - DNA, 20 bp, synthetic construct
  misc_feature 1..20: note = chemically synthesized
  source 1..20: mol_type = other DNA
gcactgtgggcccaagccag

SEQ ID NO: 35125 - DNA, 20 bp, synthetic construct
  misc_feature 1..20: note = chemically synthesized
  source 1..20: mol_type = other DNA
cccaagccaggagccttgcc

SEQ ID NO: 35126 - DNA, 20 bp, synthetic construct
  misc_feature 1..20: note = chemically synthesized
  source 1..20: mol_type = other DNA
gccaggagccttgcctggtg

SEQ ID NO: 35127 - DNA, 20 bp, synthetic construct
  misc_feature 1..20: note = chemically synthesized
  source 1..20: mol_type = other DNA
caggagccttgcctggtgaa

SEQ ID NO: 35128 - DNA, 20 bp, synthetic construct
  misc_feature 1..20: note = chemically synthesized
  source 1..20: mol_type = other DNA
gagccttgcctggtgaagag

SEQ ID NO: 35129 - DNA, 20 bp, synthetic construct
  misc_feature 1..20: note = chemically synthesized
  source 1..20: mol_type = other DNA
ccttgcctggtgaagagtag

SEQ ID NO: 35130 - DNA, 20 bp, synthetic construct
  misc_feature 1..20: note = chemically synthesized
  source 1..20: mol_type = other DNA
cttgcctggtgaagagtagc

SEQ ID NO: 35131 - DNA, 20 bp, synthetic construct
  misc_feature 1..20: note = chemically synthesized
  source 1..20: mol_type = other DNA
tggtgaagagtagcaggtga

SEQ ID NO: 35132 - DNA, 20 bp, synthetic construct
  misc_feature 1..20: note = chemically synthesized
  source 1..20: mol_type = other DNA
agtagcaggtgaaagctcac

SEQ ID NO: 35133 - DNA, 20 bp, synthetic construct
  misc_feature 1..20: note = chemically synthesized
  source 1..20: mol_type = other DNA
gcaggtgaaagctcacaaga

SEQ ID NO: 35134 - DNA, 20 bp, synthetic construct
  misc_feature 1..20: note = chemically synthesized
  source 1..20: mol_type = other DNA
aggtgaaagctcacaagaaa

SEQ ID NO: 35135 - DNA, 20 bp, synthetic construct
  misc_feature 1..20: note = chemically synthesized
  source 1..20: mol_type = other DNA
agctcacaagaaagagaaac

SEQ ID NO: 35136 - DNA, 20 bp, synthetic construct
  misc_feature 1..20: note = chemically synthesized
  source 1..20: mol_type = other DNA
attctttccctgctgtgtgc

SEQ ID NO: 35137 - DNA, 20 bp, synthetic construct
  misc_feature 1..20: note = chemically synthesized
  source 1..20: mol_type = other DNA
tctttccctgctgtgtgctg

SEQ ID NO: 35138 - DNA, 20 bp, synthetic construct
  misc_feature 1..20: note = chemically synthesized
  source 1..20: mol_type = other DNA
ctttccctgctgtgtgctgg

SEQ ID NO: 35139 - DNA, 20 bp, synthetic construct
  misc_feature 1..20: note = chemically synthesized
  source 1..20: mol_type = other DNA
ctgctgtgtgctggaggtgt

SEQ ID NO: 35140 - DNA, 20 bp, synthetic construct
  misc_feature 1..20: note = chemically synthesized
  source 1..20: mol_type = other DNA
tgctgtgtgctggaggtgtc

SEQ ID NO: 35141 - DNA, 20 bp, synthetic construct
  misc_feature 1..20: note = chemically synthesized
  source 1..20: mol_type = other DNA
gctgtgtgctggaggtgtca

SEQ ID NO: 35142 - DNA, 20 bp, synthetic construct
  misc_feature 1..20: note = chemically synthesized
  source 1..20: mol_type = other DNA
gtgtgctggaggtgtcaggg

SEQ ID NO: 35143 - DNA, 20 bp, synthetic construct
  misc_feature 1..20: note = chemically synthesized
  source 1..20: mol_type = other DNA
tgctggaggtgtcagggaag

SEQ ID NO: 35144 - DNA, 20 bp, synthetic construct
  misc_feature 1..20: note = chemically synthesized
  source 1..20: mol_type = other DNA
ggaggtgtcagggaagtggc

SEQ ID NO: 35145 - DNA, 20 bp, synthetic construct
  misc_feature 1..20: note = chemically synthesized
  source 1..20: mol_type = other DNA
gaggtgtcagggaagtggcc

SEQ ID NO: 35146 - DNA, 20 bp, synthetic construct
  misc_feature 1..20: note = chemically synthesized
  source 1..20: mol_type = other DNA
ggccaggtcccttctttctc

SEQ ID NO: 35147 - DNA, 20 bp, synthetic construct
  misc_feature 1..20: note = chemically synthesized
  source 1..20: mol_type = other DNA
gtcccttctttctcaagccc

SEQ ID NO: 35148 - DNA, 20 bp, synthetic construct
  misc_feature 1..20: note = chemically synthesized
  source 1..20: mol_type = other DNA
tcccttctttctcaagccca

SEQ ID NO: 35149 - DNA, 20 bp, synthetic construct
  misc_feature 1..20: note = chemically synthesized
  source 1..20: mol_type = other DNA
cccttctttctcaagcccaa

SEQ ID NO: 35150 - DNA, 20 bp, synthetic construct
  misc_feature 1..20: note = chemically synthesized
  source 1..20: mol_type = other DNA
ctcaagcccaagggcattaa

SEQ ID NO: 35151 - DNA, 20 bp, synthetic construct
  misc_feature 1..20: note = chemically synthesized
  source 1..20: mol_type = other DNA
aagcccaagggcattaacgg

SEQ ID NO: 35152 - DNA, 20 bp, synthetic construct
  misc_feature 1..20: note = chemically synthesized
  source 1..20: mol_type = other DNA
cattaacggtggtactgctg

SEQ ID NO: 35153 - DNA, 20 bp, synthetic construct
  misc_feature 1..20: note = chemically synthesized
  source 1..20: mol_type = other DNA
tggtactgctgcagctgaaa

SEQ ID NO: 35154 - DNA, 20 bp, synthetic construct
  misc_feature 1..20: note = chemically synthesized
  source 1..20: mol_type = other DNA
tactgctgcagctgaaatgg

SEQ ID NO: 35155 - DNA, 20 bp, synthetic construct
  misc_feature 1..20: note = chemically synthesized
  source 1..20: mol_type = other DNA
ctgctgcagctgaaatggca

SEQ ID NO: 35156 - DNA, 20 bp, synthetic construct
  misc_feature 1..20: note = chemically synthesized
  source 1..20: mol_type = other DNA
tgctgcagctgaaatggcag

SEQ ID NO: 35157 - DNA, 20 bp, synthetic construct
  misc_feature 1..20: note = chemically synthesized
  source 1..20: mol_type = other DNA
gctgcagctgaaatggcaga

SEQ ID NO: 35158 - DNA, 20 bp, synthetic construct
  misc_feature 1..20: note = chemically synthesized
  source 1..20: mol_type = other DNA
ctgcagctgaaatggcagag

SEQ ID NO: 35159 - DNA, 20 bp, synthetic construct
  misc_feature 1..20: note = chemically synthesized
  source 1..20: mol_type = other DNA
ctgaaatggcagaggggctg

SEQ ID NO: 35160 - DNA, 20 bp, synthetic construct
  misc_feature 1..20: note = chemically synthesized
  source 1..20: mol_type = other DNA
tgaaatggcagaggggctgt

SEQ ID NO: 35161 - DNA, 20 bp, synthetic construct
  misc_feature 1..20: note = chemically synthesized
  source 1..20: mol_type = other DNA
aggggctgtgggttgtctct

SEQ ID NO: 35162 - DNA, 20 bp, synthetic construct
  misc_feature 1..20: note = chemically synthesized
  source 1..20: mol_type = other DNA
tgtctcttggatttcctccc

SEQ ID NO: 35163 - DNA, 20 bp, synthetic construct
  misc_feature 1..20: note = chemically synthesized
  source 1..20: mol_type = other DNA
tctcttggatttcctcccca

SEQ ID NO: 35164 - DNA, 20 bp, synthetic construct
  misc_feature 1..20: note = chemically synthesized
  source 1..20: mol_type = other DNA
cttggatttcctccccagag

SEQ ID NO: 35165 - DNA, 20 bp, synthetic construct
  misc_feature 1..20: note = chemically synthesized
  source 1..20: mol_type = other DNA
atttcctccccagagaagca

SEQ ID NO: 35166 - DNA, 20 bp, synthetic construct
  misc_feature 1..20: note = chemically synthesized
  source 1..20: mol_type = other DNA
ttcctccccagagaagcaca

SEQ ID NO: 35167 - DNA, 20 bp, synthetic construct
  misc_feature 1..20: note = chemically synthesized
  source 1..20: mol_type = other DNA
ccaacactgactaaaatgtt

SEQ ID NO: 35168 - DNA, 20 bp, synthetic construct
  misc_feature 1..20: note = chemically synthesized
  source 1..20: mol_type = other DNA
caacactgactaaaatgttc

SEQ ID NO: 35169 - DNA, 20 bp, synthetic construct
  misc_feature 1..20: note = chemically synthesized
  source 1..20: mol_type = other DNA
cactgactaaaatgttcagg

SEQ ID NO: 35170 - DNA, 20 bp, synthetic construct
  misc_feature 1..20: note = chemically synthesized
  source 1..20: mol_type = other DNA
actgactaaaatgttcaggc

SEQ ID NO: 35171 - DNA, 20 bp, synthetic construct
  misc_feature 1..20: note = chemically synthesized
  source 1..20: mol_type = other DNA
ctgactaaaatgttcaggca

SEQ ID NO: 35172 - DNA, 20 bp, synthetic construct
  misc_feature 1..20: note = chemically synthesized
  source 1..20: mol_type = other DNA
ctaaaatgttcaggcagggc

SEQ ID NO: 35173 - DNA, 20 bp, synthetic construct
  misc_feature 1..20: note = chemically synthesized
  source 1..20: mol_type = other DNA
taaaatgttcaggcagggcc

SEQ ID NO: 35174 - DNA, 20 bp, synthetic construct
  misc_feature 1..20: note = chemically synthesized
  source 1..20: mol_type = other DNA
aaaatgttcaggcagggcca

SEQ ID NO: 35175 - DNA, 20 bp, synthetic construct
  misc_feature 1..20: note = chemically synthesized
  source 1..20: mol_type = other DNA
atgttcaggcagggccaggg

SEQ ID NO: 35176 - DNA, 20 bp, synthetic construct
  misc_feature 1..20: note = chemically synthesized
  source 1..20: mol_type = other DNA
cagggtggctgtgctctgcc

SEQ ID NO: 35177 - DNA, 20 bp, synthetic construct
  misc_feature 1..20: note = chemically synthesized
  source 1..20: mol_type = other DNA
gtggctgtgctctgcccagt

SEQ ID NO: 35178 - DNA, 20 bp, synthetic construct
  misc_feature 1..20: note = chemically synthesized
  source 1..20: mol_type = other DNA
tggctgtgctctgcccagtg

SEQ ID NO: 35179 - DNA, 20 bp, synthetic construct
  misc_feature 1..20: note = chemically synthesized
  source 1..20: mol_type = other DNA
gtgctctgcccagtgaggaa

SEQ ID NO: 35180 - DNA, 20 bp, synthetic construct
  misc_feature 1..20: note = chemically synthesized
  source 1..20: mol_type = other DNA
ctctgcccagtgaggaatag

SEQ ID NO: 35181 - DNA, 20 bp, synthetic construct
  misc_feature 1..20: note = chemically synthesized
  source 1..20: mol_type = other DNA
tctgcccagtgaggaatagt

SEQ ID NO: 35182 - DNA, 20 bp, synthetic construct
  misc_feature 1..20: note = chemically synthesized
  source 1..20: mol_type = other DNA
ctgcccagtgaggaatagta

SEQ ID NO: 35183 - DNA, 20 bp, synthetic construct
  misc_feature 1..20: note = chemically synthesized
  source 1..20: mol_type = other DNA
tgcccagtgaggaatagtag

SEQ ID NO: 35184 - DNA, 20 bp, synthetic construct
  misc_feature 1..20: note = chemically synthesized
  source 1..20: mol_type = other DNA
ccagtgaggaatagtagggg

SEQ ID NO: 35185 - DNA, 20 bp, synthetic construct
  misc_feature 1..20: note = chemically synthesized
  source 1..20: mol_type = other DNA
cagtgaggaatagtaggggc

SEQ ID NO: 35186 - DNA, 20 bp, synthetic construct
  misc_feature 1..20: note = chemically synthesized
  source 1..20: mol_type = other DNA
agtgaggaatagtaggggca

SEQ ID NO: 35187 - DNA, 20 bp, synthetic construct
  misc_feature 1..20: note = chemically synthesized
  source 1..20: mol_type = other DNA
ggaatagtaggggcagggac

SEQ ID NO: 35188 - DNA, 20 bp, synthetic construct
  misc_feature 1..20: note = chemically synthesized
  source 1..20: mol_type = other DNA
agtaggggcagggaccagtg

SEQ ID NO: 35189 - DNA, 20 bp, synthetic construct
  misc_feature 1..20: note = chemically synthesized
  source 1..20: mol_type = other DNA
gcagggaccagtgcagaaaa

SEQ ID NO: 35190 - DNA, 20 bp, synthetic construct
  misc_feature 1..20: note = chemically synthesized
  source 1..20: mol_type = other DNA
gaccagtgcagaaaacagtg

SEQ ID NO: 35191 - DNA, 20 bp, synthetic construct
  misc_feature 1..20: note = chemically synthesized
  source 1..20: mol_type = other DNA
cagtgtggccacttttccat

SEQ ID NO: 35192 - DNA, 20 bp, synthetic construct
  misc_feature 1..20: note = chemically synthesized
  source 1..20: mol_type = other DNA
agtgtggccacttttccata

SEQ ID NO: 35193 - DNA, 20 bp, synthetic construct
  misc_feature 1..20: note = chemically synthesized
  source 1..20: mol_type = other DNA
gtggccacttttccataagg

SEQ ID NO: 35194 - DNA, 20 bp, synthetic construct
  misc_feature 1..20: note = chemically synthesized
  source 1..20: mol_type = other DNA
ataaggcagctacactgtgc

SEQ ID NO: 35195 - DNA, 20 bp, synthetic construct
  misc_feature 1..20: note = chemically synthesized
  source 1..20: mol_type = other DNA
aaggcagctacactgtgctg

SEQ ID NO: 35196 - DNA, 20 bp, synthetic construct
  misc_feature 1..20: note = chemically synthesized
  source 1..20: mol_type = other DNA
aggcagctacactgtgctgg

SEQ ID NO: 35197 - DNA, 20 bp, synthetic construct
  misc_feature 1..20: note = chemically synthesized
  source 1..20: mol_type = other DNA
acactgtgctggaggtccgt

SEQ ID NO: 35198 - DNA, 20 bp, synthetic construct
  misc_feature 1..20: note = chemically synthesized
  source 1..20: mol_type = other DNA
actgtgctggaggtccgtga

SEQ ID NO: 35199 - DNA, 20 bp, synthetic construct
  misc_feature 1..20: note = chemically synthesized
  source 1..20: mol_type = other DNA
ggaggtccgtgagagtcctg

SEQ ID NO: 35200 - DNA, 20 bp, synthetic construct
  misc_feature 1..20: note = chemically synthesized
  source 1..20: mol_type = other DNA
gaagctcctcgctccctcct

SEQ ID NO: 35201 - DNA, 20 bp, synthetic construct
  misc_feature 1..20: note = chemically synthesized
  source 1..20: mol_type = other DNA
tgagcccatactttaatctc

SEQ ID NO: 35202 - DNA, 20 bp, synthetic construct
  misc_feature 1..20: note = chemically synthesized
  source 1..20: mol_type = other DNA
agcccatactttaatctcaa

SEQ ID NO: 35203 - DNA, 20 bp, synthetic construct
  misc_feature 1..20: note = chemically synthesized
  source 1..20: mol_type = other DNA
tactttaatctcaagagttt

SEQ ID NO: 35204 - DNA, 20 bp, synthetic construct
  misc_feature 1..20: note = chemically synthesized
  source 1..20: mol_type = other DNA
tctcaagagtttgagataaa

SEQ ID NO: 35205 - DNA, 20 bp, synthetic construct
  misc_feature 1..20: note = chemically synthesized
  source 1..20: mol_type = other DNA
caagagtttgagataaacag

SEQ ID NO: 35206 - DNA, 20 bp, synthetic construct
  misc_feature 1..20: note = chemically synthesized
  source 1..20: mol_type = other DNA
agtttgagataaacagtggt

SEQ ID NO: 35207 - DNA, 20 bp, synthetic construct
  misc_feature 1..20: note = chemically synthesized
  source 1..20: mol_type = other DNA
gtttgagataaacagtggta

SEQ ID NO: 35208 - DNA, 20 bp, synthetic construct
  misc_feature 1..20: note = chemically synthesized
  source 1..20: mol_type = other DNA
tgagataaacagtggtaagg

SEQ ID NO: 35209 - DNA, 20 bp, synthetic construct
  misc_feature 1..20: note = chemically synthesized
  source 1..20: mol_type = other DNA
ataaacagtggtaaggaaga

SEQ ID NO: 35210 - DNA, 20 bp, synthetic construct
  misc_feature 1..20: note = chemically synthesized
  source 1..20: mol_type = other DNA
tggtaaggaagaaagtacaa

SEQ ID NO: 35211 - DNA, 20 bp, synthetic construct
  misc_feature 1..20: note = chemically synthesized
  source 1..20: mol_type = other DNA
ggtaaggaagaaagtacaac

SEQ ID NO: 35212 - DNA, 20 bp, synthetic construct
  misc_feature 1..20: note = chemically synthesized
  source 1..20: mol_type = other DNA
ggaagaaagtacaacgggta

SEQ ID NO: 35213 - DNA, 20 bp, synthetic construct
  misc_feature 1..20: note = chemically synthesized
  source 1..20: mol_type = other DNA
cgggtacggctaatgaaacc

SEQ ID NO: 35214 - DNA, 20 bp, synthetic construct
  misc_feature 1..20: note = chemically synthesized
  source 1..20: mol_type = other DNA
gggtacggctaatgaaaccc

SEQ ID NO: 35215 - DNA, 20 bp, synthetic construct
  misc_feature 1..20: note = chemically synthesized
  source 1..20: mol_type = other DNA
tacggctaatgaaacccagg

SEQ ID NO: 35216 - DNA, 20 bp, synthetic construct
  misc_feature 1..20: note = chemically synthesized
  source 1..20: mol_type = other DNA
ctaatgaaacccaggaagat

SEQ ID NO: 35217 - DNA, 20 bp, synthetic construct
  misc_feature 1..20: note = chemically synthesized
  source 1..20: mol_type = other DNA
caggaagataagtcaatgcg

SEQ ID NO: 35218 - DNA, 20 bp, synthetic construct
  misc_feature 1..20: note = chemically synthesized
  source 1..20: mol_type = other DNA
gaagataagtcaatgcgtag

SEQ ID NO: 35219 - DNA, 20 bp, synthetic construct
  misc_feature 1..20: note = chemically synthesized
  source 1..20: mol_type = other DNA
gtagaagtaattccaaccta

SEQ ID NO: 35220 - DNA, 20 bp, synthetic construct
  misc_feature 1..20: note = chemically synthesized
  source 1..20: mol_type = other DNA
ctttttaaaaatcatattta

SEQ ID NO: 35221 - DNA, 20 bp, synthetic construct
  misc_feature 1..20: note = chemically synthesized
  source 1..20: mol_type = other DNA
ttttaaaaatcatatttata

SEQ ID NO: 35222 - DNA, 20 bp, synthetic construct
  misc_feature 1..20: note = chemically synthesized
  source 1..20: mol_type = other DNA
tttaaaaatcatatttatag

SEQ ID NO: 35223 - DNA, 20 bp, synthetic construct
  misc_feature 1..20: note = chemically synthesized
  source 1..20: mol_type = other DNA
atcatatttatagaggtttg

SEQ ID NO: 35224 - DNA, 20 bp, synthetic construct
  misc_feature 1..20: note = chemically synthesized
  source 1..20: mol_type = other DNA
agaggtttgcagtgatacta

SEQ ID NO: 35225 - DNA, 20 bp, synthetic construct
  misc_feature 1..20: note = chemically synthesized
  source 1..20: mol_type = other DNA
caatattgcaaatcattatt

SEQ ID NO: 35226 - DNA, 20 bp, synthetic construct
  misc_feature 1..20: note = chemically synthesized
  source 1..20: mol_type = other DNA
caaatcattattaagaatac

SEQ ID NO: 35227 - DNA, 20 bp, synthetic construct
  misc_feature 1..20: note = chemically synthesized
  source 1..20: mol_type = other DNA
atcattattaagaatacaag

SEQ ID NO: 35228 - DNA, 20 bp, synthetic construct
  misc_feature 1..20: note = chemically synthesized
  source 1..20: mol_type = other DNA
tttctttaacacctgtgata

SEQ ID NO: 35229 - DNA, 20 bp, synthetic construct
  misc_feature 1..20: note = chemically synthesized
  source 1..20: mol_type = other DNA
ttctttaacacctgtgatac

SEQ ID NO: 35230 - DNA, 20 bp, synthetic construct
  misc_feature 1..20: note = chemically synthesized
  source 1..20: mol_type = other DNA
ttgatatgaattctacgtaa

SEQ ID NO: 35231 - DNA, 20 bp, synthetic construct
  misc_feature 1..20: note = chemically synthesized
  source 1..20: mol_type = other DNA
ttgcttcttgccaccaccca

SEQ ID NO: 35232 - DNA, 20 bp, synthetic construct
  misc_feature 1..20: note = chemically synthesized
  source 1..20: mol_type = other DNA
cttcttgccaccacccaaag

SEQ ID NO: 35233 - DNA, 20 bp, synthetic construct
  misc_feature 1..20: note = chemically synthesized
  source 1..20: mol_type = other DNA
ttcttgccaccacccaaaga

SEQ ID NO: 35234 - DNA, 20 bp, synthetic construct
  misc_feature 1..20: note = chemically synthesized
  source 1..20: mol_type = other DNA
accacccaaagaaggttgta

SEQ ID NO: 35235 - DNA, 20 bp, synthetic construct
  misc_feature 1..20: note = chemically synthesized
  source 1..20: mol_type = other DNA
aaagaaggttgtatagcact

SEQ ID NO: 35236 - DNA, 20 bp, synthetic construct
  misc_feature 1..20: note = chemically synthesized
  source 1..20: mol_type = other DNA
aactgcaaccgtgtatctct

SEQ ID NO: 35237 - DNA, 20 bp, synthetic construct
  misc_feature 1..20: note = chemically synthesized
  source 1..20: mol_type = other DNA
actgcaaccgtgtatctctt

SEQ ID NO: 35238 - DNA, 20 bp, synthetic construct
  misc_feature 1..20: note = chemically synthesized
  source 1..20: mol_type = other DNA
ttgccctcttccctccctat

SEQ ID NO: 35239 - DNA, 20 bp, synthetic construct
  misc_feature 1..20: note = chemically synthesized
  source 1..20: mol_type = other DNA
cctccctatcagcatgtatc

SEQ ID NO: 35240 - DNA, 20 bp, synthetic construct
  misc_feature 1..20: note = chemically synthesized
  source 1..20: mol_type = other DNA
ccctatcagcatgtatctag

SEQ ID NO: 35241 - DNA, 20 bp, synthetic construct
  misc_feature 1..20: note = chemically synthesized
  source 1..20: mol_type = other DNA
gtatctagcagcattctgaa

SEQ ID NO: 35242 - DNA, 20 bp, synthetic construct
  misc_feature 1..20: note = chemically synthesized
  source 1..20: mol_type = other DNA
attctgaaaagttaactgca

SEQ ID NO: 35243 - DNA, 20 bp, synthetic construct
  misc_feature 1..20: note = chemically synthesized
  source 1..20: mol_type = other DNA
tgaaaagttaactgcacagt

SEQ ID NO: 35244 - DNA, 20 bp, synthetic construct
  misc_feature 1..20: note = chemically synthesized
  source 1..20: mol_type = other DNA
actgcacagtgagcgactgc

SEQ ID NO: 35245 - DNA, 20 bp, synthetic construct
  misc_feature 1..20: note = chemically synthesized
  source 1..20: mol_type = other DNA
ctgcacagtgagcgactgct

SEQ ID NO: 35246 - DNA, 20 bp, synthetic construct
  misc_feature 1..20: note = chemically synthesized
  source 1..20: mol_type = other DNA
gagcgactgctgggcatctt

SEQ ID NO: 35247 - DNA, 20 bp, synthetic construct
  misc_feature 1..20: note = chemically synthesized
  source 1..20: mol_type = other DNA
agcgactgctgggcatctta

SEQ ID NO: 35248 - DNA, 20 bp, synthetic construct
  misc_feature 1..20: note = chemically synthesized
  source 1..20: mol_type = other DNA
gcgactgctgggcatcttaa

SEQ ID NO: 35249 - DNA, 20 bp, synthetic construct
  misc_feature 1..20: note = chemically synthesized
  source 1..20: mol_type = other DNA
cgactgctgggcatcttaag

SEQ ID NO: 35250 - DNA, 20 bp, synthetic construct
  misc_feature 1..20: note = chemically synthesized
  source 1..20: mol_type = other DNA
aaggggcattcttttctacc

SEQ ID NO: 35251 - DNA, 20 bp, synthetic construct
  misc_feature 1..20: note = chemically synthesized
  source 1..20: mol_type = other DNA
aggggcattcttttctacct

SEQ ID NO: 35252 - DNA, 20 bp, synthetic construct
  misc_feature 1..20: note = chemically synthesized
  source 1..20: mol_type = other DNA
ccccctcctccactcatgtc

SEQ ID NO: 35253 - DNA, 20 bp, synthetic construct
  misc_feature 1..20: note = chemically synthesized
  source 1..20: mol_type = other DNA
ctccactcatgtctagcatg

SEQ ID NO: 35254 - DNA, 20 bp, synthetic construct
  misc_feature 1..20: note = chemically synthesized
  source 1..20: mol_type = other DNA
tccactcatgtctagcatgc

SEQ ID NO: 35255 - DNA, 20 bp, synthetic construct
  misc_feature 1..20: note = chemically synthesized
  source 1..20: mol_type = other DNA
catgtctagcatgcaggact

SEQ ID NO: 35256 - DNA, 20 bp, synthetic construct
  misc_feature 1..20: note = chemically synthesized
  source 1..20: mol_type = other DNA
atgtctagcatgcaggactt

SEQ ID NO: 35257 - DNA, 20 bp, synthetic construct
  misc_feature 1..20: note = chemically synthesized
  source 1..20: mol_type = other DNA
tgcaggacttgggtaatctc

SEQ ID NO: 35258 - DNA, 20 bp, synthetic construct
  misc_feature 1..20: note = chemically synthesized
  source 1..20: mol_type = other DNA
gcaggacttgggtaatctct

SEQ ID NO: 35259 - DNA, 20 bp, synthetic construct
  misc_feature 1..20: note = chemically synthesized
  source 1..20: mol_type = other DNA
caggacttgggtaatctctg

SEQ ID NO: 35260 - DNA, 20 bp, synthetic construct
  misc_feature 1..20: note = chemically synthesized
  source 1..20: mol_type = other DNA
ttgggtaatctctggggttt

SEQ ID NO: 35261 - DNA, 20 bp, synthetic construct
  misc_feature 1..20: note = chemically synthesized
  source 1..20: mol_type = other DNA
ctctggggtttcagattctc

SEQ ID NO: 35262 - DNA, 20 bp, synthetic construct
  misc_feature 1..20: note = chemically synthesized
  source 1..20: mol_type = other DNA
tctccagacctccattctct

SEQ ID NO: 35263 - DNA, 20 bp, synthetic construct
  misc_feature 1..20: note = chemically synthesized
  source 1..20: mol_type = other DNA
ctccagacctccattctctc

SEQ ID NO: 35264 - DNA, 20 bp, synthetic construct
  misc_feature 1..20: note = chemically synthesized
  source 1..20: mol_type = other DNA
tccagacctccattctctca

SEQ ID NO: 35265 - DNA, 20 bp, synthetic construct
  misc_feature 1..20: note = chemically synthesized
  source 1..20: mol_type = other DNA
ccagacctccattctctcag

SEQ ID NO: 35266 - DNA, 20 bp, synthetic construct
  misc_feature 1..20: note = chemically synthesized
  source 1..20: mol_type = other DNA
ttccacctcctgctcatatc

SEQ ID NO: 35267 - DNA, 20 bp, synthetic construct
  misc_feature 1..20: note = chemically synthesized
  source 1..20: mol_type = other DNA
ctcatatctagctatctgcc

SEQ ID NO: 35268 - DNA, 20 bp, synthetic construct
  misc_feature 1..20: note = chemically synthesized
  source 1..20: mol_type = other DNA
ctaaccataaaatcttaaat

SEQ ID NO: 35269 - DNA, 20 bp, synthetic construct
  misc_feature 1..20: note = chemically synthesized
  source 1..20: mol_type = other DNA
catgtcatgataaaaaaaat

SEQ ID NO: 35270 - DNA, 20 bp, synthetic construct
  misc_feature 1..20: note = chemically synthesized
  source 1..20: mol_type = other DNA
taaaaaaaataagacaccat

SEQ ID NO: 35271 - DNA, 20 bp, synthetic construct
  misc_feature 1..20: note = chemically synthesized
  source 1..20: mol_type = other DNA
aaaaaataagacaccatcag

SEQ ID NO: 35272 - DNA, 20 bp, synthetic construct
  misc_feature 1..20: note = chemically synthesized
  source 1..20: mol_type = other DNA
tcagtggcaactgtgttgcc

SEQ ID NO: 35273 - DNA, 20 bp, synthetic construct
  misc_feature 1..20: note = chemically synthesized
  source 1..20: mol_type = other DNA
ttgatctgctaatccctgtg

SEQ ID NO: 35274 - DNA, 20 bp, synthetic construct
  misc_feature 1..20: note = chemically synthesized
  source 1..20: mol_type = other DNA
ccctgtgtagaaatgaacct

SEQ ID NO: 35275 - DNA, 20 bp, synthetic construct
  misc_feature 1..20: note = chemically synthesized
  source 1..20: mol_type = other DNA
ctgtgtagaaatgaaccttg

SEQ ID NO: 35276 - DNA, 20 bp, synthetic construct
  misc_feature 1..20: note = chemically synthesized
  source 1..20: mol_type = other DNA
tgtgtagaaatgaaccttgg

SEQ ID NO: 35277 - DNA, 20 bp, synthetic construct
  misc_feature 1..20: note = chemically synthesized
  source 1..20: mol_type = other DNA
atttcttacaatatgtgcat

SEQ ID NO: 35278 - DNA, 20 bp, synthetic construct
  misc_feature 1..20: note = chemically synthesized
  source 1..20: mol_type = other DNA
ttgtaacactgtcactttga

SEQ ID NO: 35279 - DNA, 20 bp, synthetic construct
  misc_feature 1..20: note = chemically synthesized
  source 1..20: mol_type = other DNA
ctgtcactttgacagttgat

SEQ ID NO: 35280 - DNA, 20 bp, synthetic construct
  misc_feature 1..20: note = chemically synthesized
  source 1..20: mol_type = other DNA
gttgataagcatcttctgaa

SEQ ID NO: 35281 - DNA, 20 bp, synthetic construct
  misc_feature 1..20: note = chemically synthesized
  source 1..20: mol_type = other DNA
cttctgaatggtccctcctt

SEQ ID NO: 35282 - DNA, 20 bp, synthetic construct
  misc_feature 1..20: note = chemically synthesized
  source 1..20: mol_type = other DNA
tcctttagttacaaaaatgt

SEQ ID NO: 35283 - DNA, 20 bp, synthetic construct
  misc_feature 1..20: note = chemically synthesized
  source 1..20: mol_type = other DNA
gttacaaaaatgttggtgca

SEQ ID NO: 35284 - DNA, 20 bp, synthetic construct
  misc_feature 1..20: note = chemically synthesized
  source 1..20: mol_type = other DNA
tgttggtgcatggatgatgt

SEQ ID NO: 35285 - DNA, 20 bp, synthetic construct
  misc_feature 1..20: note = chemically synthesized
  source 1..20: mol_type = other DNA
gttggtgcatggatgatgtt

SEQ ID NO: 35286 - DNA, 20 bp, synthetic construct
  misc_feature 1..20: note = chemically synthesized
  source 1..20: mol_type = other DNA
tgatgttgggaataaataaa

SEQ ID NO: 35287 - DNA, 20 bp, synthetic construct
  misc_feature 1..20: note = chemically synthesized
  source 1..20: mol_type = other DNA
actaaattatgttctcatct

SEQ ID NO: 35288 - DNA, 20 bp, synthetic construct
  misc_feature 1..20: note = chemically synthesized
  source 1..20: mol_type = other DNA
ctaaattatgttctcatctt

SEQ ID NO: 35289 - DNA, 20 bp, synthetic construct
  misc_feature 1..20: note = chemically synthesized
  source 1..20: mol_type = other DNA
tctcatcttgggcaaaaatt

SEQ ID NO: 35290 - DNA, 20 bp, synthetic construct
  misc_feature 1..20: note = chemically synthesized
  source 1..20: mol_type = other DNA
aaaattaagcaaaaaaaaaa

SEQ ID NO: 35291 - DNA, 20 bp, synthetic construct
  misc_feature 1..20: note = chemically synthesized
  source 1..20: mol_type = other DNA
aattaagcaaaaaaaaaatg

SEQ ID NO: 35292 - DNA, 20 bp, synthetic construct
  misc_feature 1..20: note = chemically synthesized
  source 1..20: mol_type = other DNA
attaagcaaaaaaaaaatgg

SEQ ID NO: 35293 - DNA, 20 bp, synthetic construct
  misc_feature 1..20: note = chemically synthesized
  source 1..20: mol_type = other DNA
aaaaaaaaatggaggatatg

SEQ ID NO: 35294 - DNA, 20 bp, synthetic construct
  misc_feature 1..20: note = chemically synthesized
  source 1..20: mol_type = other DNA
ggatatgaagctcctccaca

SEQ ID NO: 35295 - DNA, 20 bp, synthetic construct
  misc_feature 1..20: note = chemically synthesized
  source 1..20: mol_type = other DNA
tatgaagctcctccacaaag

SEQ ID NO: 35296 - DNA, 20 bp, synthetic construct
  misc_feature 1..20: note = chemically synthesized
  source 1..20: mol_type = other DNA
atgaagctcctccacaaaga

SEQ ID NO: 35297 - DNA, 20 bp, synthetic construct
  misc_feature 1..20: note = chemically synthesized
  source 1..20: mol_type = other DNA
aaagaaggccatttttgtac

SEQ ID NO: 35298 - DNA, 20 bp, synthetic construct
  misc_feature 1..20: note = chemically synthesized
  source 1..20: mol_type = other DNA
aagaaggccatttttgtact

SEQ ID NO: 35299 - DNA, 20 bp, synthetic construct
  misc_feature 1..20: note = chemically synthesized
  source 1..20: mol_type = other DNA
tttttgtactaggcttacta

SEQ ID NO: 35300 - DNA, 20 bp, synthetic construct
  misc_feature 1..20: note = chemically synthesized
  source 1..20: mol_type = other DNA
ctacagtgacacaccactat

SEQ ID NO: 35301 - DNA, 20 bp, synthetic construct
  misc_feature 1..20: note = chemically synthesized
  source 1..20: mol_type = other DNA
agtgacacaccactattagt

SEQ ID NO: 35302 - DNA, 20 bp, synthetic construct
  misc_feature 1..20: note = chemically synthesized
  source 1..20: mol_type = other DNA
gtgacacaccactattagtt

SEQ ID NO: 35303 - DNA, 20 bp, synthetic construct
  misc_feature 1..20: note = chemically synthesized
  source 1..20: mol_type = other DNA
tgacacaccactattagttg

SEQ ID NO: 35304 - DNA, 20 bp, synthetic construct
  misc_feature 1..20: note = chemically synthesized
  source 1..20: mol_type = other DNA
acacaccactattagttggg

SEQ ID NO: 35305 - DNA, 20 bp, synthetic construct
  misc_feature 1..20: note = chemically synthesized
  source 1..20: mol_type = other DNA
actattagttggggagaatt

SEQ ID NO: 35306 - DNA, 20 bp, synthetic construct
  misc_feature 1..20: note = chemically synthesized
  source 1..20: mol_type = other DNA
ggggagaattcagtttttcc

SEQ ID NO: 35307 - DNA, 20 bp, synthetic construct
  misc_feature 1..20: note = chemically synthesized
  source 1..20: mol_type = other DNA
gggagaattcagtttttcca

SEQ ID NO: 35308 - DNA, 20 bp, synthetic construct
  misc_feature 1..20: note = chemically synthesized
  source 1..20: mol_type = other DNA
cagtttttccaaggtgttga

SEQ ID NO: 35309 - DNA, 20 bp, synthetic construct
  misc_feature 1..20: note = chemically synthesized
  source 1..20: mol_type = other DNA
agtttttccaaggtgttgat

SEQ ID NO: 35310 - DNA, 20 bp, synthetic construct
  misc_feature 1..20: note = chemically synthesized
  source 1..20: mol_type = other DNA
ccaaggtgttgataggcatc

SEQ ID NO: 35311 - DNA, 20 bp, synthetic construct
  misc_feature 1..20: note = chemically synthesized
  source 1..20: mol_type = other DNA
gttgataggcatccagattt

SEQ ID NO: 35312 - DNA, 20 bp, synthetic construct
  misc_feature 1..20: note = chemically synthesized
  source 1..20: mol_type = other DNA
tgataggcatccagatttca

SEQ ID NO: 35313 - DNA, 20 bp, synthetic construct
  misc_feature 1..20: note = chemically synthesized
  source 1..20: mol_type = other DNA
gataggcatccagatttcag

SEQ ID NO: 35314 - DNA, 20 bp, synthetic construct
  misc_feature 1..20: note = chemically synthesized
  source 1..20: mol_type = other DNA
tttcagaggaaattgtaaaa

SEQ ID NO: 35315 - DNA, 20 bp, synthetic construct
  misc_feature 1..20: note = chemically synthesized
  source 1..20: mol_type = other DNA
cagaggaaattgtaaaaaag

SEQ ID NO: 35316 - DNA, 20 bp, synthetic construct
  misc_feature 1..20: note = chemically synthesized
  source 1..20: mol_type = other DNA
aattgtaaaaaagcagaacc

SEQ ID NO: 35317 - DNA, 20 bp, synthetic construct
  misc_feature 1..20: note = chemically synthesized
  source 1..20: mol_type = other DNA
attgtaaaaaagcagaacct

SEQ ID NO: 35318 - DNA, 20 bp, synthetic construct
  misc_feature 1..20: note = chemically synthesized
  source 1..20: mol_type = other DNA
actgcccacgatttttcttt

SEQ ID NO: 35319 - DNA, 20 bp, synthetic construct
  misc_feature 1..20: note = chemically synthesized
  source 1..20: mol_type = other DNA
ttttctttgagatcaaatct

SEQ ID NO: 35320 - DNA, 20 bp, synthetic construct
  misc_feature 1..20: note = chemically synthesized
  source 1..20: mol_type = other DNA
tttctttgagatcaaatctg

SEQ ID NO: 35321 - DNA, 20 bp, synthetic construct
  misc_feature 1..20: note = chemically synthesized
  source 1..20: mol_type = other DNA
gaggcaacaaatctgttcaa

SEQ ID NO: 35322 - DNA, 20 bp, synthetic construct
  misc_feature 1..20: note = chemically synthesized
  source 1..20: mol_type = other DNA
ttcaaaagctgctttctgcc

SEQ ID NO: 35323 - DNA, 20 bp, synthetic construct
  misc_feature 1..20: note = chemically synthesized
  source 1..20: mol_type = other DNA
agctgctttctgcctggttg

SEQ ID NO: 35324 - DNA, 20 bp, synthetic construct
  misc_feature 1..20: note = chemically synthesized
  source 1..20: mol_type = other DNA
ctttctgcctggttgtggca

SEQ ID NO: 35325 - DNA, 20 bp, synthetic construct
  misc_feature 1..20: note = chemically synthesized
  source 1..20: mol_type = other DNA
tttctgcctggttgtggcaa

SEQ ID NO: 35326 - DNA, 20 bp, synthetic construct
  misc_feature 1..20: note = chemically synthesized
  source 1..20: mol_type = other DNA
ttctgcctggttgtggcaaa

SEQ ID NO: 35327 - DNA, 20 bp, synthetic construct
  misc_feature 1..20: note = chemically synthesized
  source 1..20: mol_type = other DNA
tgcctggttgtggcaaaggg

SEQ ID NO: 35328 - DNA, 20 bp, synthetic construct
  misc_feature 1..20: note = chemically synthesized
  source 1..20: mol_type = other DNA
ggttgtggcaaagggtggcc

SEQ ID NO: 35329 - DNA, 20 bp, synthetic construct
  misc_feature 1..20: note = chemically synthesized
  source 1..20: mol_type = other DNA
tgtggcaaagggtggccaag

SEQ ID NO: 35330 - DNA, 20 bp, synthetic construct
  misc_feature 1..20: note = chemically synthesized
  source 1..20: mol_type = other DNA
gtggcaaagggtggccaagt

SEQ ID NO: 35331 - DNA, 20 bp, synthetic construct
  misc_feature 1..20: note = chemically synthesized
  source 1..20: mol_type = other DNA
tggcaaagggtggccaagtg

SEQ ID NO: 35332 - DNA, 20 bp, synthetic construct
  misc_feature 1..20: note = chemically synthesized
  source 1..20: mol_type = other DNA
aagggtggccaagtggggct

SEQ ID NO: 35333 - DNA, 20 bp, synthetic construct
  misc_feature 1..20: note = chemically synthesized
  source 1..20: mol_type = other DNA
ctcagctgtgttcccattgc

SEQ ID NO: 35334 - DNA, 20 bp, synthetic construct
  misc_feature 1..20: note = chemically synthesized
  source 1..20: mol_type = other DNA
tcagctgtgttcccattgca

SEQ ID NO: 35335 - DNA, 20 bp, synthetic construct
  misc_feature 1..20: note = chemically synthesized
  source 1..20: mol_type = other DNA
gttcccattgcaaggctact

SEQ ID NO: 35336 - DNA, 20 bp, synthetic construct
  misc_feature 1..20: note = chemically synthesized
  source 1..20: mol_type = other DNA
tactgagcatcccctgtcct

SEQ ID NO: 35337 - DNA, 20 bp, synthetic construct
  misc_feature 1..20: note = chemically synthesized
  source 1..20: mol_type = other DNA
actgagcatcccctgtcctg

SEQ ID NO: 35338 - DNA, 20 bp, synthetic construct
  misc_feature 1..20: note = chemically synthesized
  source 1..20: mol_type = other DNA
tcccctgtcctgaggctcct

SEQ ID NO: 35339 - DNA, 20 bp, synthetic construct
  misc_feature 1..20: note = chemically synthesized
  source 1..20: mol_type = other DNA
cccctgtcctgaggctcctt

SEQ ID NO: 35340 - DNA, 20 bp, synthetic construct
  misc_feature 1..20: note = chemically synthesized
  source 1..20: mol_type = other DNA
ctgaggctccttaggacacc

SEQ ID NO: 35341 - DNA, 20 bp, synthetic construct
  misc_feature 1..20: note = chemically synthesized
  source 1..20: mol_type = other DNA
gctccttaggacacctggct

SEQ ID NO: 35342 - DNA, 20 bp, synthetic construct
  misc_feature 1..20: note = chemically synthesized
  source 1..20: mol_type = other DNA
taggacacctggctgagctt

SEQ ID NO: 35343 - DNA, 20 bp, synthetic construct
  misc_feature 1..20: note = chemically synthesized
  source 1..20: mol_type = other DNA
gacacctggctgagcttcag

SEQ ID NO: 35344 - DNA, 20 bp, synthetic construct
  misc_feature 1..20: note = chemically synthesized
  source 1..20: mol_type = other DNA
agcttcagcagccctcttcc

SEQ ID NO: 35345 - DNA, 20 bp, synthetic construct
  misc_feature 1..20: note = chemically synthesized
  source 1..20: mol_type = other DNA
cagcagccctcttccaagcc

SEQ ID NO: 35346 - DNA, 20 bp, synthetic construct
  misc_feature 1..20: note = chemically synthesized
  source 1..20: mol_type = other DNA
gcagccctcttccaagcctg

SEQ ID NO: 35347 - DNA, 20 bp, synthetic construct
  misc_feature 1..20: note = chemically synthesized
  source 1..20: mol_type = other DNA
tcttccaagcctggagatgc

SEQ ID NO: 35348 - DNA, 20 bp, synthetic construct
  misc_feature 1..20: note = chemically synthesized
  source 1..20: mol_type = other DNA
ggagatgccagctccatctc

SEQ ID NO: 35349 - DNA, 20 bp, synthetic construct
  misc_feature 1..20: note = chemically synthesized
  source 1..20: mol_type = other DNA
tccatctctggcacaaaatg

SEQ ID NO: 35350 - DNA, 20 bp, synthetic construct
  misc_feature 1..20: note = chemically synthesized
  source 1..20: mol_type = other DNA
acaaaatgtagtgattttca

SEQ ID NO: 35351 - DNA, 20 bp, synthetic construct
  misc_feature 1..20: note = chemically synthesized
  source 1..20: mol_type = other DNA
caaaatgtagtgattttcac

SEQ ID NO: 35352 - DNA, 20 bp, synthetic construct
  misc_feature 1..20: note = chemically synthesized
  source 1..20: mol_type = other DNA
aaaatgtagtgattttcaca

SEQ ID NO: 35353 - DNA, 20 bp, synthetic construct
  misc_feature 1..20: note = chemically synthesized
  source 1..20: mol_type = other DNA
tgtagtgattttcacagggt

SEQ ID NO: 35354 - DNA, 20 bp, synthetic construct
  misc_feature 1..20: note = chemically synthesized
  source 1..20: mol_type = other DNA
tagtgattttcacagggtga

SEQ ID NO: 35355 - DNA, 20 bp, synthetic construct
  misc_feature 1..20: note = chemically synthesized
  source 1..20: mol_type = other DNA
agtgattttcacagggtgag

SEQ ID NO: 35356 - DNA, 20 bp, synthetic construct
  misc_feature 1..20: note = chemically synthesized
  source 1..20: mol_type = other DNA
ttcacagggtgagaggccaa

SEQ ID NO: 35357 - DNA, 20 bp, synthetic construct
  misc_feature 1..20: note = chemically synthesized
  source 1..20: mol_type = other DNA
cacagggtgagaggccaaaa

SEQ ID NO: 35358 - DNA, 20 bp, synthetic construct
  misc_feature 1..20: note = chemically synthesized
  source 1..20: mol_type = other DNA
acagggtgagaggccaaaag

SEQ ID NO: 35359 - DNA, 20 bp, synthetic construct
  misc_feature 1..20: note = chemically synthesized
  source 1..20: mol_type = other DNA
caaaagaggctaataaaatg

SEQ ID NO: 35360 - DNA, 20 bp, synthetic construct
  misc_feature 1..20: note = chemically synthesized
  source 1..20: mol_type = other DNA
agaggctaataaaatgaaga

SEQ ID NO: 35361 - DNA, 20 bp, synthetic construct
  misc_feature 1..20: note = chemically synthesized
  source 1..20: mol_type = other DNA
ctaataaaatgaagatagcc

SEQ ID NO: 35362 - DNA, 20 bp, synthetic construct
  misc_feature 1..20: note = chemically synthesized
  source 1..20: mol_type = other DNA
tgaagatagccaagcttcca

SEQ ID NO: 35363 - DNA, 20 bp, synthetic construct
  misc_feature 1..20: note = chemically synthesized
  source 1..20: mol_type = other DNA
agccaagcttccatggaatt

SEQ ID NO: 35364 - DNA, 20 bp, synthetic construct
  misc_feature 1..20: note = chemically synthesized
  source 1..20: mol_type = other DNA
gcttccatggaattaagcaa

SEQ ID NO: 35365 - DNA, 20 bp, synthetic construct
  misc_feature 1..20: note = chemically synthesized
  source 1..20: mol_type = other DNA
cttccatggaattaagcaac

SEQ ID NO: 35366 - DNA, 20 bp, synthetic construct
  misc_feature 1..20: note = chemically synthesized
  source 1..20: mol_type = other DNA
aggacaaccttgaccacttt

SEQ ID NO: 35367 - DNA, 20 bp, synthetic construct
  misc_feature 1..20: note = chemically synthesized
  source 1..20: mol_type = other DNA
ggacaaccttgaccactttg

SEQ ID NO: 35368 - DNA, 20 bp, synthetic construct
  misc_feature 1..20: note = chemically synthesized
  source 1..20: mol_type = other DNA
gacaaccttgaccactttga

SEQ ID NO: 35369 - DNA, 20 bp, synthetic construct
  misc_feature 1..20: note = chemically synthesized
  source 1..20: mol_type = other DNA
acaaccttgaccactttgag

SEQ ID NO: 35370 - DNA, 20 bp, synthetic construct
  misc_feature 1..20: note = chemically synthesized
  source 1..20: mol_type = other DNA
cttgaccactttgaggggtg

SEQ ID NO: 35371 - DNA, 20 bp, synthetic construct
  misc_feature 1..20: note = chemically synthesized
  source 1..20: mol_type = other DNA
gaccactttgaggggtgtgg

SEQ ID NO: 35372 - DNA, 20 bp, synthetic construct
  misc_feature 1..20: note = chemically synthesized
  source 1..20: mol_type = other DNA
accactttgaggggtgtggt

SEQ ID NO: 35373 - DNA, 20 bp, synthetic construct
  misc_feature 1..20: note = chemically synthesized
  source 1..20: mol_type = other DNA
ccactttgaggggtgtggtg

SEQ ID NO: 35374 - DNA, 20 bp, synthetic construct
  misc_feature 1..20: note = chemically synthesized
  source 1..20: mol_type = other DNA
cactttgaggggtgtggtgg

SEQ ID NO: 35375 - DNA, 20 bp, synthetic construct
  misc_feature 1..20: note = chemically synthesized
  source 1..20: mol_type = other DNA
ggtgtggtgggggccacatg

SEQ ID NO: 35376 - DNA, 20 bp, synthetic construct
  misc_feature 1..20: note = chemically synthesized
  source 1..20: mol_type = other DNA
tggtgggggccacatgcaga

SEQ ID NO: 35377 - DNA, 20 bp, synthetic construct
  misc_feature 1..20: note = chemically synthesized
  source 1..20: mol_type = other DNA
gtgggggccacatgcagatg

SEQ ID NO: 35378 - DNA, 20 bp, synthetic construct
  misc_feature 1..20: note = chemically synthesized
  source 1..20: mol_type = other DNA
ggggccacatgcagatggag

SEQ ID NO: 35379 - DNA, 20 bp, synthetic construct
  misc_feature 1..20: note = chemically synthesized
  source 1..20: mol_type = other DNA
gggccacatgcagatggagt

SEQ ID NO: 35380 - DNA, 20 bp, synthetic construct
  misc_feature 1..20: note = chemically synthesized
  source 1..20: mol_type = other DNA
catgcagatggagtgggtta

SEQ ID NO: 35381 - DNA, 20 bp, synthetic construct
  misc_feature 1..20: note = chemically synthesized
  source 1..20: mol_type = other DNA
tgcagatggagtgggttaaa

SEQ ID NO: 35382 - DNA, 20 bp, synthetic construct
  misc_feature 1..20: note = chemically synthesized
  source 1..20: mol_type = other DNA
ggagtgggttaaagagtgac

SEQ ID NO: 35383 - DNA, 20 bp, synthetic construct
  misc_feature 1..20: note = chemically synthesized
  source 1..20: mol_type = other DNA
gtgggttaaagagtgactag

SEQ ID NO: 35384 - DNA, 20 bp, synthetic construct
  misc_feature 1..20: note = chemically synthesized
  source 1..20: mol_type = other DNA
gggttaaagagtgactagaa

SEQ ID NO: 35385 - DNA, 20 bp, synthetic construct
  misc_feature 1..20: note = chemically synthesized
  source 1..20: mol_type = other DNA
ttaaagagtgactagaagag

SEQ ID NO: 35386 - DNA, 20 bp, synthetic construct
  misc_feature 1..20: note = chemically synthesized
  source 1..20: mol_type = other DNA
aagagtgactagaagagcag

SEQ ID NO: 35387 - DNA, 20 bp, synthetic construct
  misc_feature 1..20: note = chemically synthesized
  source 1..20: mol_type = other DNA
agagtgactagaagagcagt

SEQ ID NO: 35388 - DNA, 20 bp, synthetic construct
  misc_feature 1..20: note = chemically synthesized
  source 1..20: mol_type = other DNA
gagtgactagaagagcagtg

SEQ ID NO: 35389 - DNA, 20 bp, synthetic construct
  misc_feature 1..20: note = chemically synthesized
  source 1..20: mol_type = other DNA
agtgactagaagagcagtgg

SEQ ID NO: 35390 - DNA, 20 bp, synthetic construct
  misc_feature 1..20: note = chemically synthesized
  source 1..20: mol_type = other DNA
gactagaagagcagtggggg

SEQ ID NO: 35391 - DNA, 20 bp, synthetic construct
  misc_feature 1..20: note = chemically synthesized
  source 1..20: mol_type = other DNA
tagaagagcagtgggggtgg

SEQ ID NO: 35392 - DNA, 20 bp, synthetic construct
  misc_feature 1..20: note = chemically synthesized
  source 1..20: mol_type = other DNA
aagagcagtgggggtggcag

SEQ ID NO: 35393 - DNA, 20 bp, synthetic construct
  misc_feature 1..20: note = chemically synthesized
  source 1..20: mol_type = other DNA
agagcagtgggggtggcagc

SEQ ID NO: 35394 - DNA, 20 bp, synthetic construct
  misc_feature 1..20: note = chemically synthesized
  source 1..20: mol_type = other DNA
agcagtgggggtggcagcag

SEQ ID NO: 35395 - DNA, 20 bp, synthetic construct
  misc_feature 1..20: note = chemically synthesized
  source 1..20: mol_type = other DNA
cagtgggggtggcagcagga

SEQ ID NO: 35396 - DNA, 20 bp, synthetic construct
  misc_feature 1..20: note = chemically synthesized
  source 1..20: mol_type = other DNA
tgggggtggcagcaggagag

SEQ ID NO: 35397 - DNA, 20 bp, synthetic construct
  misc_feature 1..20: note = chemically synthesized
  source 1..20: mol_type = other DNA
gtggcagcaggagagaagcc

SEQ ID NO: 35398 - DNA, 20 bp, synthetic construct
  misc_feature 1..20: note = chemically synthesized
  source 1..20: mol_type = other DNA
ggagagaagcctggctctga

SEQ ID NO: 35399 - DNA, 20 bp, synthetic construct
  misc_feature 1..20: note = chemically synthesized
  source 1..20: mol_type = other DNA
gagaagcctggctctgaaag

SEQ ID NO: 35400 - DNA, 20 bp, synthetic construct
  misc_feature 1..20: note = chemically synthesized
  source 1..20: mol_type = other DNA
agcctggctctgaaagcagc

SEQ ID NO: 35401 - DNA, 20 bp, synthetic construct
  misc_feature 1..20: note = chemically synthesized
  source 1..20: mol_type = other DNA
tctgaaagcagcgagacttc

SEQ ID NO: 35402 - DNA, 20 bp, synthetic construct
  misc_feature 1..20: note = chemically synthesized
  source 1..20: mol_type = other DNA
ctgaaagcagcgagacttct

SEQ ID NO: 35403 - DNA, 20 bp, synthetic construct
  misc_feature 1..20: note = chemically synthesized
  source 1..20: mol_type = other DNA
tgaaagcagcgagacttcta

SEQ ID NO: 35404 - DNA, 20 bp, synthetic construct
  misc_feature 1..20: note = chemically synthesized
  source 1..20: mol_type = other DNA
agcgagacttctagggaata

SEQ ID NO: 35405 - DNA, 20 bp, synthetic construct
  misc_feature 1..20: note = chemically synthesized
  source 1..20: mol_type = other DNA
gcgagacttctagggaatac

SEQ ID NO: 35406 - DNA, 20 bp, synthetic construct
  misc_feature 1..20: note = chemically synthesized
  source 1..20: mol_type = other DNA
cgagacttctagggaataca

SEQ ID NO: 35407 - DNA, 20 bp, synthetic construct
  misc_feature 1..20: note = chemically synthesized
  source 1..20: mol_type = other DNA
acttctagggaatacagggt

SEQ ID NO: 35408 - DNA, 20 bp, synthetic construct
  misc_feature 1..20: note = chemically synthesized
  source 1..20: mol_type = other DNA
cttctagggaatacagggtc

SEQ ID NO: 35409 - DNA, 20 bp, synthetic construct
  misc_feature 1..20: note = chemically synthesized
  source 1..20: mol_type = other DNA
ttctagggaatacagggtca

SEQ ID NO: 35410 - DNA, 20 bp, synthetic construct
  misc_feature 1..20: note = chemically synthesized
  source 1..20: mol_type = other DNA
tctagggaatacagggtcag

SEQ ID NO: 35411 - DNA, 20 bp, synthetic construct
  misc_feature 1..20: note = chemically synthesized
  source 1..20: mol_type = other DNA
tagggaatacagggtcaggg

SEQ ID NO: 35412 - DNA, 20 bp, synthetic construct
  misc_feature 1..20: note = chemically synthesized
  source 1..20: mol_type = other DNA
agggaatacagggtcagggg

SEQ ID NO: 35413 - DNA, 20 bp, synthetic construct
  misc_feature 1..20: note = chemically synthesized
  source 1..20: mol_type = other DNA
agggtcaggggaggttctga

SEQ ID NO: 35414 - DNA, 20 bp, synthetic construct
  misc_feature 1..20: note = chemically synthesized
  source 1..20: mol_type = other DNA
ttctgaaagatgacacactg

SEQ ID NO: 35415 - DNA, 20 bp, synthetic construct
  misc_feature 1..20: note = chemically synthesized
  source 1..20: mol_type = other DNA
ctgaaagatgacacactgca

SEQ ID NO: 35416 - DNA, 20 bp, synthetic construct
  misc_feature 1..20: note = chemically synthesized
  source 1..20: mol_type = other DNA
tgtgtttgtatgccgatgac

SEQ ID NO: 35417 - DNA, 20 bp, synthetic construct
  misc_feature 1..20: note = chemically synthesized
  source 1..20: mol_type = other DNA
gtatgccgatgacaagtatc

SEQ ID NO: 35418 - DNA, 20 bp, synthetic construct
  misc_feature 1..20: note = chemically synthesized
  source 1..20: mol_type = other DNA
tgccgatgacaagtatccag

SEQ ID NO: 35419 - DNA, 20 bp, synthetic construct
  misc_feature 1..20: note = chemically synthesized
  source 1..20: mol_type = other DNA
gatgacaagtatccagtaga

SEQ ID NO: 35420 - DNA, 20 bp, synthetic construct
  misc_feature 1..20: note = chemically synthesized
  source 1..20: mol_type = other DNA
atgacaagtatccagtagaa

SEQ ID NO: 35421 - DNA, 20 bp, synthetic construct
  misc_feature 1..20: note = chemically synthesized
  source 1..20: mol_type = other DNA
acaagtatccagtagaaagg

SEQ ID NO: 35422 - DNA, 20 bp, synthetic construct
  misc_feature 1..20: note = chemically synthesized
  source 1..20: mol_type = other DNA
ccagtagaaaggcagatgaa

SEQ ID NO: 35423 - DNA, 20 bp, synthetic construct
  misc_feature 1..20: note = chemically synthesized
  source 1..20: mol_type = other DNA
gatgaacagattctcattct

SEQ ID NO: 35424 - DNA, 20 bp, synthetic construct
  misc_feature 1..20: note = chemically synthesized
  source 1..20: mol_type = other DNA
aacagattctcattctcaga

SEQ ID NO: 35425 - DNA, 20 bp, synthetic construct
  misc_feature 1..20: note = chemically synthesized
  source 1..20: mol_type = other DNA
acagattctcattctcagaa

SEQ ID NO: 35426 - DNA, 20 bp, synthetic construct
  misc_feature 1..20: note = chemically synthesized
  source 1..20: mol_type = other DNA
aaggcctgtcctgacctcct

SEQ ID NO: 35427 - DNA, 20 bp, synthetic construct
  misc_feature 1..20: note = chemically synthesized
  source 1..20: mol_type = other DNA
ggcctgtcctgacctcctga

SEQ ID NO: 35428 - DNA, 20 bp, synthetic construct
  misc_feature 1..20: note = chemically synthesized
  source 1..20: mol_type = other DNA
cctgacctcctgagagtaca

SEQ ID NO: 35429 - DNA, 20 bp, synthetic construct
  misc_feature 1..20: note = chemically synthesized
  source 1..20: mol_type = other DNA
cctgagagtacacagaccat

SEQ ID NO: 35430 - DNA, 20 bp, synthetic construct
  misc_feature 1..20: note = chemically synthesized
  source 1..20: mol_type = other DNA
ctgagagtacacagaccatg

SEQ ID NO: 35431 - DNA, 20 bp, synthetic construct
  misc_feature 1..20: note = chemically synthesized
  source 1..20: mol_type = other DNA
tgagagtacacagaccatga

SEQ ID NO: 35432 - DNA, 20 bp, synthetic construct
  misc_feature 1..20: note = chemically synthesized
  source 1..20: mol_type = other DNA
gagtacacagaccatgaggg

SEQ ID NO: 35433 - DNA, 20 bp, synthetic construct
  misc_feature 1..20: note = chemically synthesized
  source 1..20: mol_type = other DNA
agtacacagaccatgagggc

SEQ ID NO: 35434 - DNA, 20 bp, synthetic construct
  misc_feature 1..20: note = chemically synthesized
  source 1..20: mol_type = other DNA
gtacacagaccatgagggca

SEQ ID NO: 35435 - DNA, 20 bp, synthetic construct
  misc_feature 1..20: note = chemically synthesized
  source 1..20: mol_type = other DNA
acagaccatgagggcagggc

SEQ ID NO: 35436 - DNA, 20 bp, synthetic construct
  misc_feature 1..20: note = chemically synthesized
  source 1..20: mol_type = other DNA
cagaccatgagggcagggca

SEQ ID NO: 35437 - DNA, 20 bp, synthetic construct
  misc_feature 1..20: note = chemically synthesized
  source 1..20: mol_type = other DNA
gaccatgagggcagggcaag

SEQ ID NO: 35438 - DNA, 20 bp, synthetic construct
  misc_feature 1..20: note = chemically synthesized
  source 1..20: mol_type = other DNA
accatgagggcagggcaagg

SEQ ID NO: 35439 - DNA, 20 bp, synthetic construct
  misc_feature 1..20: note = chemically synthesized
  source 1..20: mol_type = other DNA
catgagggcagggcaaggag

SEQ ID NO: 35440 - DNA, 20 bp, synthetic construct
  misc_feature 1..20: note = chemically synthesized
  source 1..20: mol_type = other DNA
atgagggcagggcaaggagg

SEQ ID NO: 35441 - DNA, 20 bp, synthetic construct
  misc_feature 1..20: note = chemically synthesized
  source 1..20: mol_type = other DNA
cacgctcactgtttcatgca

SEQ ID NO: 35442 - DNA, 20 bp, synthetic construct
  misc_feature 1..20: note = chemically synthesized
  source 1..20: mol_type = other DNA
actgtttcatgcaaagtcct

SEQ ID NO: 35443 - DNA, 20 bp, synthetic construct
  misc_feature 1..20: note = chemically synthesized
  source 1..20: mol_type = other DNA
tcatgcaaagtccttggcca

SEQ ID NO: 35444 - DNA, 20 bp, synthetic construct
  misc_feature 1..20: note = chemically synthesized
  source 1..20: mol_type = other DNA
caatttaatatgctctatgc

SEQ ID NO: 35445 - DNA, 20 bp, synthetic construct
  misc_feature 1..20: note = chemically synthesized
  source 1..20: mol_type = other DNA
tatgctctatgctggaaaac

SEQ ID NO: 35446 - DNA, 20 bp, synthetic construct
  misc_feature 1..20: note = chemically synthesized
  source 1..20: mol_type = other DNA
tggaaaactggattattgaa

SEQ ID NO: 35447 - DNA, 20 bp, synthetic construct
  misc_feature 1..20: note = chemically synthesized
  source 1..20: mol_type = other DNA
ggaaaactggattattgaac

SEQ ID NO: 35448 - DNA, 20 bp, synthetic construct
  misc_feature 1..20: note = chemically synthesized
  source 1..20: mol_type = other DNA
ctggattattgaacaggcat

SEQ ID NO: 35449 - DNA, 20 bp, synthetic construct
  misc_feature 1..20: note = chemically synthesized
  source 1..20: mol_type = other DNA
tctgaacctaatccactaaa

SEQ ID NO: 35450 - DNA, 20 bp, synthetic construct
  misc_feature 1..20: note = chemically synthesized
  source 1..20: mol_type = other DNA
atccactaaaaagcacttga

SEQ ID NO: 35451 - DNA, 20 bp, synthetic construct
  misc_feature 1..20: note = chemically synthesized
  source 1..20: mol_type = other DNA
agatatatcaaaatatcatt

SEQ ID NO: 35452 - DNA, 20 bp, synthetic construct
  misc_feature 1..20: note = chemically synthesized
  source 1..20: mol_type = other DNA
atcaaaatatcattgagaaa

SEQ ID NO: 35453 - DNA, 20 bp, synthetic construct
  misc_feature 1..20: note = chemically synthesized
  source 1..20: mol_type = other DNA
tcattgagaaatagatattt

SEQ ID NO: 35454 - DNA, 20 bp, synthetic construct
  misc_feature 1..20: note = chemically synthesized
  source 1..20: mol_type = other DNA
cattgagaaatagatatttt

SEQ ID NO: 35455 - DNA, 20 bp, synthetic construct
  misc_feature 1..20: note = chemically synthesized
  source 1..20: mol_type = other DNA
ctcatttgaactctcttttc

SEQ ID NO: 35456 - DNA, 20 bp, synthetic construct
  misc_feature 1..20: note = chemically synthesized
  source 1..20: mol_type = other DNA
tcatttgaactctcttttcc

SEQ ID NO: 35457 - DNA, 20 bp, synthetic construct
  misc_feature 1..20: note = chemically synthesized
  source 1..20: mol_type = other DNA
tttgaactctcttttccagg

SEQ ID NO: 35458 - DNA, 20 bp, synthetic construct
  misc_feature 1..20: note = chemically synthesized
  source 1..20: mol_type = other DNA
tgaactctcttttccaggaa

SEQ ID NO: 35459 - DNA, 20 bp, synthetic construct
  misc_feature 1..20: note = chemically synthesized
  source 1..20: mol_type = other DNA
tttccaggaagagttgtgct

SEQ ID NO: 35460 - DNA, 20 bp, synthetic construct
  misc_feature 1..20: note = chemically synthesized
  source 1..20: mol_type = other DNA
ttccaggaagagttgtgctt

SEQ ID NO: 35461 - DNA, 20 bp, synthetic construct
  misc_feature 1..20: note = chemically synthesized
  source 1..20: mol_type = other DNA
ttgtgcttgggtaaattcta

SEQ ID NO: 35462 - DNA, 20 bp, synthetic construct
  misc_feature 1..20: note = chemically synthesized
  source 1..20: mol_type = other DNA
tgggtaaattctatagctca

SEQ ID NO: 35463 - DNA, 20 bp, synthetic construct
  misc_feature 1..20: note = chemically synthesized
  source 1..20: mol_type = other DNA
aaaacacacaataaattaat

SEQ ID NO: 35464 - DNA, 20 bp, synthetic construct
  misc_feature 1..20: note = chemically synthesized
  source 1..20: mol_type = other DNA
aaacacacaataaattaata

SEQ ID NO: 35465 - DNA, 20 bp, synthetic construct
  misc_feature 1..20: note = chemically synthesized
  source 1..20: mol_type = other DNA
aattaataaggtgcttccta

SEQ ID NO: 35466 - DNA, 20 bp, synthetic construct
  misc_feature 1..20: note = chemically synthesized
  source 1..20: mol_type = other DNA
aataaggtgcttcctacagt

SEQ ID NO: 35467 - DNA, 20 bp, synthetic construct
  misc_feature 1..20: note = chemically synthesized
  source 1..20: mol_type = other DNA
ggtgcttcctacagtgagtt

SEQ ID NO: 35468 - DNA, 20 bp, synthetic construct
  misc_feature 1..20: note = chemically synthesized
  source 1..20: mol_type = other DNA
gagttcagttaaacattttg

SEQ ID NO: 35469 - DNA, 20 bp, synthetic construct
  misc_feature 1..20: note = chemically synthesized
  source 1..20: mol_type = other DNA
gttcagttaaacattttgaa

SEQ ID NO: 35470 - DNA, 20 bp, synthetic construct
  misc_feature 1..20: note = chemically synthesized
  source 1..20: mol_type = other DNA
tgaagagtgtttttgaaatg

SEQ ID NO: 35471 - DNA, 20 bp, synthetic construct
  misc_feature 1..20: note = chemically synthesized
  source 1..20: mol_type = other DNA
agagtgtttttgaaatgtag

SEQ ID NO: 35472 - DNA, 20 bp, synthetic construct
  misc_feature 1..20: note = chemically synthesized
  source 1..20: mol_type = other DNA
agtgtttttgaaatgtagca

SEQ ID NO: 35473 - DNA, 20 bp, synthetic construct
  misc_feature 1..20: note = chemically synthesized
  source 1..20: mol_type = other DNA
gtttttgaaatgtagcagag

SEQ ID NO: 35474 - DNA, 20 bp, synthetic construct
  misc_feature 1..20: note = chemically synthesized
  source 1..20: mol_type = other DNA
tttttgaaatgtagcagagc

SEQ ID NO: 35475 - DNA, 20 bp, synthetic construct
  misc_feature 1..20: note = chemically synthesized
  source 1..20: mol_type = other DNA
ggctacaattgatattcaaa

SEQ ID NO: 35476 - DNA, 20 bp, synthetic construct
  misc_feature 1..20: note = chemically synthesized
  source 1..20: mol_type = other DNA
ctacaattgatattcaaaaa

SEQ ID NO: 35477 - DNA, 20 bp, synthetic construct
  misc_feature 1..20: note = chemically synthesized
  source 1..20: mol_type = other DNA
tacaattgatattcaaaaag

SEQ ID NO: 35478 - DNA, 20 bp, synthetic construct
  misc_feature 1..20: note = chemically synthesized
  source 1..20: mol_type = other DNA
atttatttccccctttaact

SEQ ID NO: 35479 - DNA, 20 bp, synthetic construct
  misc_feature 1..20: note = chemically synthesized
  source 1..20: mol_type = other DNA
tgtcattttattatgcttca

SEQ ID NO: 35480 - DNA, 20 bp, synthetic construct
  misc_feature 1..20: note = chemically synthesized
  source 1..20: mol_type = other DNA
tcattttattatgcttcata

SEQ ID NO: 35481 - DNA, 20 bp, synthetic construct
  misc_feature 1..20: note = chemically synthesized
  source 1..20: mol_type = other DNA
cttcatagagcatcactgct

SEQ ID NO: 35482 - DNA, 20 bp, synthetic construct
  misc_feature 1..20: note = chemically synthesized
  source 1..20: mol_type = other DNA
cactgctgagatcccctccc

SEQ ID NO: 35483 - DNA, 20 bp, synthetic construct
  misc_feature 1..20: note = chemically synthesized
  source 1..20: mol_type = other DNA
ccctccccagctcatgttgc

SEQ ID NO: 35484 - DNA, 20 bp, synthetic construct
  misc_feature 1..20: note = chemically synthesized
  source 1..20: mol_type = other DNA
cctccccagctcatgttgct

SEQ ID NO: 35485 - DNA, 20 bp, synthetic construct
  misc_feature 1..20: note = chemically synthesized
  source 1..20: mol_type = other DNA
tgctaggaaatatcccaaaa

SEQ ID NO: 35486 - DNA, 20 bp, synthetic construct
  misc_feature 1..20: note = chemically synthesized
  source 1..20: mol_type = other DNA
ttgtttctctgattcacctc

SEQ ID NO: 35487 - DNA, 20 bp, synthetic construct
  misc_feature 1..20: note = chemically synthesized
  source 1..20: mol_type = other DNA
tgtttctctgattcacctcc

SEQ ID NO: 35488 - DNA, 20 bp, synthetic construct
  misc_feature 1..20: note = chemically synthesized
  source 1..20: mol_type = other DNA
gtttctctgattcacctcca

SEQ ID NO: 35489 - DNA, 20 bp, synthetic construct
  misc_feature 1..20: note = chemically synthesized
  source 1..20: mol_type = other DNA
attcacctccagggctcata

SEQ ID NO: 35490 - DNA, 20 bp, synthetic construct
  misc_feature 1..20: note = chemically synthesized
  source 1..20: mol_type = other DNA
ctccagggctcatatggcaa

SEQ ID NO: 35491 - DNA, 20 bp, synthetic construct
  misc_feature 1..20: note = chemically synthesized
  source 1..20: mol_type = other DNA
tccagggctcatatggcaat

SEQ ID NO: 35492 - DNA, 20 bp, synthetic construct
  misc_feature 1..20: note = chemically synthesized
  source 1..20: mol_type = other DNA
ccagggctcatatggcaatg

SEQ ID NO: 35493 - DNA, 20 bp, synthetic construct
  misc_feature 1..20: note = chemically synthesized
  source 1..20: mol_type = other DNA
atatggcaatggggatttaa

SEQ ID NO: 35494 - DNA, 20 bp, synthetic construct
  misc_feature 1..20: note = chemically synthesized
  source 1..20: mol_type = other DNA
tatggcaatggggatttaat

SEQ ID NO: 35495 - DNA, 20 bp, synthetic construct
  misc_feature 1..20: note = chemically synthesized
  source 1..20: mol_type = other DNA
atggcaatggggatttaata

SEQ ID NO: 35496 - DNA, 20 bp, synthetic construct
  misc_feature 1..20: note = chemically synthesized
  source 1..20: mol_type = other DNA
atttaatagggtttatttgt

SEQ ID NO: 35497 - DNA, 20 bp, synthetic construct
  misc_feature 1..20: note = chemically synthesized
  source 1..20: mol_type = other DNA
atagggtttatttgttggtg

SEQ ID NO: 35498 - DNA, 20 bp, synthetic construct
  misc_feature 1..20: note = chemically synthesized
  source 1..20: mol_type = other DNA
acattaaacaaatcttttaa

SEQ ID NO: 35499 - DNA, 20 bp, synthetic construct
  misc_feature 1..20: note = chemically synthesized
  source 1..20: mol_type = other DNA
cattaaacaaatcttttaat

SEQ ID NO: 35500 - DNA, 20 bp, synthetic construct
  misc_feature 1..20: note = chemically synthesized
  source 1..20: mol_type = other DNA
ggaaaaatacttttatatta

SEQ ID NO: 35501 - DNA, 20 bp, synthetic construct
  misc_feature 1..20: note = chemically synthesized
  source 1..20: mol_type = other DNA
gaaaaatacttttatattat

SEQ ID NO: 35502 - DNA, 20 bp, synthetic construct
  misc_feature 1..20: note = chemically synthesized
  source 1..20: mol_type = other DNA
tttatattataggcaaaatg

SEQ ID NO: 35503 - DNA, 20 bp, synthetic construct
  misc_feature 1..20: note = chemically synthesized
  source 1..20: mol_type = other DNA
gtagatgtatattgctactg

SEQ ID NO: 35504 - DNA, 20 bp, synthetic construct
  misc_feature 1..20: note = chemically synthesized
  source 1..20: mol_type = other DNA
aagtaaatgtattttattaa

SEQ ID NO: 35505 - DNA, 20 bp, synthetic construct
  misc_feature 1..20: note = chemically synthesized
  source 1..20: mol_type = other DNA
atgtattttattaatggtgt

SEQ ID NO: 35506 - DNA, 20 bp, synthetic construct
  misc_feature 1..20: note = chemically synthesized
  source 1..20: mol_type = other DNA
tgagaatttcttcctcactg

SEQ ID NO: 35507 - DNA, 20 bp, synthetic construct
  misc_feature 1..20: note = chemically synthesized
  source 1..20: mol_type = other DNA
atgcatatttgcatgtgtaa

SEQ ID NO: 35508 - DNA, 20 bp, synthetic construct
  misc_feature 1..20: note = chemically synthesized
  source 1..20: mol_type = other DNA
atttgcatgtgtaaaagact

SEQ ID NO: 35509 - DNA, 20 bp, synthetic construct
  misc_feature 1..20: note = chemically synthesized
  source 1..20: mol_type = other DNA
aagacttagcaatttgtgaa

SEQ ID NO: 35510 - DNA, 20 bp, synthetic construct
  misc_feature 1..20: note = chemically synthesized
  source 1..20: mol_type = other DNA
acttagcaatttgtgaatag

SEQ ID NO: 35511 - DNA, 20 bp, synthetic construct
  misc_feature 1..20: note = chemically synthesized
  source 1..20: mol_type = other DNA
atgtttctccgcttctcact

SEQ ID NO: 35512 - DNA, 20 bp, synthetic construct
  misc_feature 1..20: note = chemically synthesized
  source 1..20: mol_type = other DNA
tctccgcttctcactgagca

SEQ ID NO: 35513 - DNA, 20 bp, synthetic construct
  misc_feature 1..20: note = chemically synthesized
  source 1..20: mol_type = other DNA
ctcactgagcatggctgtaa

SEQ ID NO: 35514 - DNA, 20 bp, synthetic construct
  misc_feature 1..20: note = chemically synthesized
  source 1..20: mol_type = other DNA
aagaaactttttcctctccc

SEQ ID NO: 35515 - DNA, 20 bp, synthetic construct
  misc_feature 1..20: note = chemically synthesized
  source 1..20: mol_type = other DNA
agaaactttttcctctcccc

SEQ ID NO: 35516 - DNA, 20 bp, synthetic construct
  misc_feature 1..20: note = chemically synthesized
  source 1..20: mol_type = other DNA
tttcctctccccgggcattc

SEQ ID NO: 35517 - DNA, 20 bp, synthetic construct
  misc_feature 1..20: note = chemically synthesized
  source 1..20: mol_type = other DNA
ccgggcattccagcacacat

SEQ ID NO: 35518 - DNA, 20 bp, synthetic construct
  misc_feature 1..20: note = chemically synthesized
  source 1..20: mol_type = other DNA
gcattccagcacacattgga

SEQ ID NO: 35519 - DNA, 20 bp, synthetic construct
  misc_feature 1..20: note = chemically synthesized
  source 1..20: mol_type = other DNA
ttggaaagataacacgtcca

SEQ ID NO: 35520 - DNA, 20 bp, synthetic construct
  misc_feature 1..20: note = chemically synthesized
  source 1..20: mol_type = other DNA
aaagataacacgtccacaga

SEQ ID NO: 35521 - DNA, 20 bp, synthetic construct
  misc_feature 1..20: note = chemically synthesized
  source 1..20: mol_type = other DNA
taacacgtccacagaaagcc

SEQ ID NO: 35522 - DNA, 20 bp, synthetic construct
  misc_feature 1..20: note = chemically synthesized
  source 1..20: mol_type = other DNA
cagaaagcctggctttccaa

SEQ ID NO: 35523 - DNA, 20 bp, synthetic construct
  misc_feature 1..20: note = chemically synthesized
  source 1..20: mol_type = other DNA
gaaagcctggctttccaaaa

SEQ ID NO: 35524 - DNA, 20 bp, synthetic construct
  misc_feature 1..20: note = chemically synthesized
  source 1..20: mol_type = other DNA
ggctttccaaaagagcttat

SEQ ID NO: 35525 - DNA, 20 bp, synthetic construct
  misc_feature 1..20: note = chemically synthesized
  source 1..20: mol_type = other DNA
ctttccaaaagagcttatca

SEQ ID NO: 35526 - DNA, 20 bp, synthetic construct
  misc_feature 1..20: note = chemically synthesized
  source 1..20: mol_type = other DNA
ttatcagagaatgtgccccc

SEQ ID NO: 35527 - DNA, 20 bp, synthetic construct
  misc_feature 1..20: note = chemically synthesized
  source 1..20: mol_type = other DNA
tatcagagaatgtgcccccc

SEQ ID NO: 35528 - DNA, 20 bp, synthetic construct
  misc_feature 1..20: note = chemically synthesized
  source 1..20: mol_type = other DNA
taaaacatatgttaatcctg

SEQ ID NO: 35529 - DNA, 20 bp, synthetic construct
  misc_feature 1..20: note = chemically synthesized
  source 1..20: mol_type = other DNA
aacatatgttaatcctgtgg

SEQ ID NO: 35530 - DNA, 20 bp, synthetic construct
  misc_feature 1..20: note = chemically synthesized
  source 1..20: mol_type = other DNA
catatgttaatcctgtggca

SEQ ID NO: 35531 - DNA, 20 bp, synthetic construct
  misc_feature 1..20: note = chemically synthesized
  source 1..20: mol_type = other DNA
atgttaatcctgtggcagag

SEQ ID NO: 35532 - DNA, 20 bp, synthetic construct
  misc_feature 1..20: note = chemically synthesized
  source 1..20: mol_type = other DNA
tgtggcagagaagtttgttc

SEQ ID NO: 35533 - DNA, 20 bp, synthetic construct
  misc_feature 1..20: note = chemically synthesized
  source 1..20: mol_type = other DNA
gagaagtttgttctagcctt

SEQ ID NO: 35534 - DNA, 20 bp, synthetic construct
  misc_feature 1..20: note = chemically synthesized
  source 1..20: mol_type = other DNA
agaagtttgttctagccttt

SEQ ID NO: 35535 - DNA, 20 bp, synthetic construct
  misc_feature 1..20: note = chemically synthesized
  source 1..20: mol_type = other DNA
tttgttctagcctttgggtg

SEQ ID NO: 35536 - DNA, 20 bp, synthetic construct
  misc_feature 1..20: note = chemically synthesized
  source 1..20: mol_type = other DNA
ttgggtgtagcctgctgaat

SEQ ID NO: 35537 - DNA, 20 bp, synthetic construct
  misc_feature 1..20: note = chemically synthesized
  source 1..20: mol_type = other DNA
tagcctgctgaataagttca

SEQ ID NO: 35538 - DNA, 20 bp, synthetic construct
  misc_feature 1..20: note = chemically synthesized
  source 1..20: mol_type = other DNA
gttcacagtgatctacatcc

SEQ ID NO: 35539 - DNA, 20 bp, synthetic construct
  misc_feature 1..20: note = chemically synthesized
  source 1..20: mol_type = other DNA
gatctacatcctagtttcca

SEQ ID NO: 35540 - DNA, 20 bp, synthetic construct
  misc_feature 1..20: note = chemically synthesized
  source 1..20: mol_type = other DNA
atctacatcctagtttccat

SEQ ID NO: 35541 - DNA, 20 bp, synthetic construct
  misc_feature 1..20: note = chemically synthesized
  source 1..20: mol_type = other DNA
ctagtttccatgggctgaaa

SEQ ID NO: 35542 - DNA, 20 bp, synthetic construct
  misc_feature 1..20: note = chemically synthesized
  source 1..20: mol_type = other DNA
ccctgcactccctacacaca

SEQ ID NO: 35543 - DNA, 20 bp, synthetic construct
  misc_feature 1..20: note = chemically synthesized
  source 1..20: mol_type = other DNA
actccctacacacacagaca

SEQ ID NO: 35544 - DNA, 20 bp, synthetic construct
  misc_feature 1..20: note = chemically synthesized
  source 1..20: mol_type = other DNA
ttctttgatattttcttgaa

SEQ ID NO: 35545 - DNA, 20 bp, synthetic construct
  misc_feature 1..20: note = chemically synthesized
  source 1..20: mol_type = other DNA
ttcaaatgtgtttgacttta

SEQ ID NO: 35546 - DNA, 20 bp, synthetic construct
  misc_feature 1..20: note = chemically synthesized
  source 1..20: mol_type = other DNA
tcaacttgtaaaattttatc

SEQ ID NO: 35547 - DNA, 20 bp, synthetic construct
  misc_feature 1..20: note = chemically synthesized
  source 1..20: mol_type = other DNA
aaattttatctggtaattta

SEQ ID NO: 35548 - DNA, 20 bp, synthetic construct
  misc_feature 1..20: note = chemically synthesized
  source 1..20: mol_type = other DNA
taatttatagattaaattgc

SEQ ID NO: 35549 - DNA, 20 bp, synthetic construct
  misc_feature 1..20: note = chemically synthesized
  source 1..20: mol_type = other DNA
agcatctacctccctttcat

SEQ ID NO: 35550 - DNA, 20 bp, synthetic construct
  misc_feature 1..20: note = chemically synthesized
  source 1..20: mol_type = other DNA
ctttcatcagactctccctg

SEQ ID NO: 35551 - DNA, 20 bp, synthetic construct
  misc_feature 1..20: note = chemically synthesized
  source 1..20: mol_type = other DNA
tttcatcagactctccctgc

SEQ ID NO: 35552 - DNA, 20 bp, synthetic construct
  misc_feature 1..20: note = chemically synthesized
  source 1..20: mol_type = other DNA
ttcatcagactctccctgca

SEQ ID NO: 35553 - DNA, 20 bp, synthetic construct
  misc_feature 1..20: note = chemically synthesized
  source 1..20: mol_type = other DNA
tcagactctccctgcagggc

SEQ ID NO: 35554 - DNA, 20 bp, synthetic construct
  misc_feature 1..20: note = chemically synthesized
  source 1..20: mol_type = other DNA
tctaactatgtatgtgcttc

SEQ ID NO: 35555 - DNA, 20 bp, synthetic construct
  misc_feature 1..20: note = chemically synthesized
  source 1..20: mol_type = other DNA
actatgtatgtgcttcaaga

SEQ ID NO: 35556 - DNA, 20 bp, synthetic construct
  misc_feature 1..20: note = chemically synthesized
  source 1..20: mol_type = other DNA
tgcttcaagatggaactcct

SEQ ID NO: 35557 - DNA, 20 bp, synthetic construct
  misc_feature 1..20: note = chemically synthesized
  source 1..20: mol_type = other DNA
agatggaactcctgagttca

SEQ ID NO: 35558 - DNA, 20 bp, synthetic construct
  misc_feature 1..20: note = chemically synthesized
  source 1..20: mol_type = other DNA
gatggaactcctgagttcac

SEQ ID NO: 35559 - DNA, 20 bp, synthetic construct
  misc_feature 1..20: note = chemically synthesized
  source 1..20: mol_type = other DNA
cacaggtgatttataaacca

SEQ ID NO: 35560 - DNA, 20 bp, synthetic construct
  misc_feature 1..20: note = chemically synthesized
  source 1..20: mol_type = other DNA
actacaaaactctcaccctc

SEQ ID NO: 35561 - DNA, 20 bp, synthetic construct
  misc_feature 1..20: note = chemically synthesized
  source 1..20: mol_type = other DNA
tacaaaactctcaccctcca

SEQ ID NO: 35562 - DNA, 20 bp, synthetic construct
  misc_feature 1..20: note = chemically synthesized
  source 1..20: mol_type = other DNA
accctccagagatttgcctc

SEQ ID NO: 35563 - DNA, 20 bp, synthetic construct
  misc_feature 1..20: note = chemically synthesized
  source 1..20: mol_type = other DNA
ccctccagagatttgcctca

SEQ ID NO: 35564 - DNA, 20 bp, synthetic construct
  misc_feature 1..20: note = chemically synthesized
  source 1..20: mol_type = other DNA
cctccagagatttgcctcaa

SEQ ID NO: 35565 - DNA, 20 bp, synthetic construct
  misc_feature 1..20: note = chemically synthesized
  source 1..20: mol_type = other DNA
gggacaacaccctgctcaca

SEQ ID NO: 35566 - DNA, 20 bp, synthetic construct
  misc_feature 1..20: note = chemically synthesized
  source 1..20: mol_type = other DNA
ggacaacaccctgctcacaa

SEQ ID NO: 35567 - DNA, 20 bp, synthetic construct
  misc_feature 1..20: note = chemically synthesized
  source 1..20: mol_type = other DNA
caccctgctcacaaaggcac

SEQ ID NO: 35568 - DNA, 20 bp, synthetic construct
  misc_feature 1..20: note = chemically synthesized
  source 1..20: mol_type = other DNA
cctgctcacaaaggcaccag

SEQ ID NO: 35569 - DNA, 20 bp, synthetic construct
  misc_feature 1..20: note = chemically synthesized
  source 1..20: mol_type = other DNA
ctgctcacaaaggcaccagc

SEQ ID NO: 35570 - DNA, 20 bp, synthetic construct
  misc_feature 1..20: note = chemically synthesized
  source 1..20: mol_type = other DNA
caggcaactgctcaactacc

SEQ ID NO: 35571 - DNA, 20 bp, synthetic construct
  misc_feature 1..20: note = chemically synthesized
  source 1..20: mol_type = other DNA
gcaactgctcaactacctgg

SEQ ID NO: 35572 - DNA, 20 bp, synthetic construct
  misc_feature 1..20: note = chemically synthesized
  source 1..20: mol_type = other DNA
tgctcaactacctggtggat

SEQ ID NO: 35573 - DNA, 20 bp, synthetic construct
  misc_feature 1..20: note = chemically synthesized
  source 1..20: mol_type = other DNA
gctcaactacctggtggata

SEQ ID NO: 35574 - DNA, 20 bp, synthetic construct
  misc_feature 1..20: note = chemically synthesized
  source 1..20: mol_type = other DNA
acctggtggataaggtgccc

SEQ ID NO: 35575 - DNA, 20 bp, synthetic construct
  misc_feature 1..20: note = chemically synthesized
  source 1..20: mol_type = other DNA
ggtggataaggtgcccaagc

SEQ ID NO: 35576 - DNA, 20 bp, synthetic construct
  misc_feature 1..20: note = chemically synthesized
  source 1..20: mol_type = other DNA
ataaggtgcccaagctagca

SEQ ID NO: 35577 - DNA, 20 bp, synthetic construct
  misc_feature 1..20: note = chemically synthesized
  source 1..20: mol_type = other DNA
cctcctctgttgccttttaa

SEQ ID NO: 35578 - DNA, 20 bp, synthetic construct
  misc_feature 1..20: note = chemically synthesized
  source 1..20: mol_type = other DNA
agtgccactttctgctccta

SEQ ID NO: 35579 - DNA, 20 bp, synthetic construct
  misc_feature 1..20: note = chemically synthesized
  source 1..20: mol_type = other DNA
cactttctgctcctaaagtg

SEQ ID NO: 35580 - DNA, 20 bp, synthetic construct
  misc_feature 1..20: note = chemically synthesized
  source 1..20: mol_type = other DNA
tttctgctcctaaagtgaag

SEQ ID NO: 35581 - DNA, 20 bp, synthetic construct
  misc_feature 1..20: note = chemically synthesized
  source 1..20: mol_type = other DNA
gctcctaaagtgaagtagta

SEQ ID NO: 35582 - DNA, 20 bp, synthetic construct
  misc_feature 1..20: note = chemically synthesized
  source 1..20: mol_type = other DNA
cctaaagtgaagtagtacgg

SEQ ID NO: 35583 - DNA, 20 bp, synthetic construct
  misc_feature 1..20: note = chemically synthesized
  source 1..20: mol_type = other DNA
ctaaagtgaagtagtacggc

SEQ ID NO: 35584 - DNA, 20 bp, synthetic construct
  misc_feature 1..20: note = chemically synthesized
  source 1..20: mol_type = other DNA
actgctgcatttcttcccct

SEQ ID NO: 35585 - DNA, 20 bp, synthetic construct
  misc_feature 1..20: note = chemically synthesized
  source 1..20: mol_type = other DNA
ctgcatttcttcccctaagc

SEQ ID NO: 35586 - DNA, 20 bp, synthetic construct
  misc_feature 1..20: note = chemically synthesized
  source 1..20: mol_type = other DNA
ttcttcccctaagctagctt

SEQ ID NO: 35587 - DNA, 20 bp, synthetic construct
  misc_feature 1..20: note = chemically synthesized
  source 1..20: mol_type = other DNA
ttcccctaagctagctttgg

SEQ ID NO: 35588 - DNA, 20 bp, synthetic construct
  misc_feature 1..20: note = chemically synthesized
  source 1..20: mol_type = other DNA
gcaaatcactttctttatac

SEQ ID NO: 35589 - DNA, 20 bp, synthetic construct
  misc_feature 1..20: note = chemically synthesized
  source 1..20: mol_type = other DNA
cagacttctctcttcttaat

SEQ ID NO: 35590 - DNA, 20 bp, synthetic construct
  misc_feature 1..20: note = chemically synthesized
  source 1..20: mol_type = other DNA
tcttcttaattggattctgc

SEQ ID NO: 35591 - DNA, 20 bp, synthetic construct
  misc_feature 1..20: note = chemically synthesized
  source 1..20: mol_type = other DNA
tcttaattggattctgcaag

SEQ ID NO: 35592 - DNA, 20 bp, synthetic construct
  misc_feature 1..20: note = chemically synthesized
  source 1..20: mol_type = other DNA
caaacaattaacctgctctt

SEQ ID NO: 35593 - DNA, 20 bp, synthetic construct
  misc_feature 1..20: note = chemically synthesized
  source 1..20: mol_type = other DNA
aacctgctcttcagttacat

SEQ ID NO: 35594 - DNA, 20 bp, synthetic construct
  misc_feature 1..20: note = chemically synthesized
  source 1..20: mol_type = other DNA
cagttacattggaatgtgtt

SEQ ID NO: 35595 - DNA, 20 bp, synthetic construct
  misc_feature 1..20: note = chemically synthesized
  source 1..20: mol_type = other DNA
agatttattttttcaaatgt

SEQ ID NO: 35596 - DNA, 20 bp, synthetic construct
  misc_feature 1..20: note = chemically synthesized
  source 1..20: mol_type = other DNA
ttttttcaaatgttggaaca

SEQ ID NO: 35597 - DNA, 20 bp, synthetic construct
  misc_feature 1..20: note = chemically synthesized
  source 1..20: mol_type = other DNA
atgttggaacaaagatgaaa

SEQ ID NO: 35598 - DNA, 20 bp, synthetic construct
  misc_feature 1..20: note = chemically synthesized
  source 1..20: mol_type = other DNA
tggaacaaagatgaaaaagt

SEQ ID NO: 35599 - DNA, 20 bp, synthetic construct
  misc_feature 1..20: note = chemically synthesized
  source 1..20: mol_type = other DNA
aacaaagatgaaaaagtgag

SEQ ID NO: 35600 - DNA, 20 bp, synthetic construct
  misc_feature 1..20: note = chemically synthesized
  source 1..20: mol_type = other DNA
caaagatgaaaaagtgagaa

SEQ ID NO: 35601 - DNA, 20 bp, synthetic construct
  misc_feature 1..20: note = chemically synthesized
  source 1..20: mol_type = other DNA
tgaaaaagtgagaagagccc

SEQ ID NO: 35602 - DNA, 20 bp, synthetic construct
  misc_feature 1..20: note = chemically synthesized
  source 1..20: mol_type = other DNA
aagagccctagattttttct

SEQ ID NO: 35603 - DNA, 20 bp, synthetic construct
  misc_feature 1..20: note = chemically synthesized
  source 1..20: mol_type = other DNA
tagattttttcttggaaatc

SEQ ID NO: 35604 - DNA, 20 bp, synthetic construct
  misc_feature 1..20: note = chemically synthesized
  source 1..20: mol_type = other DNA
ttggaaatctggcttaaatc

SEQ ID NO: 35605 - DNA, 20 bp, synthetic construct
  misc_feature 1..20: note = chemically synthesized
  source 1..20: mol_type = other DNA
tggaaatctggcttaaatcc

SEQ ID NO: 35606 - DNA, 20 bp, synthetic construct
  misc_feature 1..20: note = chemically synthesized
  source 1..20: mol_type = other DNA
gtttctttatttccttgatt

SEQ ID NO: 35607 - DNA, 20 bp, synthetic construct
  misc_feature 1..20: note = chemically synthesized
  source 1..20: mol_type = other DNA
tttctttatttccttgattt

SEQ ID NO: 35608 - DNA, 20 bp, synthetic construct
  misc_feature 1..20: note = chemically synthesized
  source 1..20: mol_type = other DNA
atttccttgatttgggaatt

SEQ ID NO: 35609 - DNA, 20 bp, synthetic construct
  misc_feature 1..20: note = chemically synthesized
  source 1..20: mol_type = other DNA
tgatttgggaatttggtcac

SEQ ID NO: 35610 - DNA, 20 bp, synthetic construct
  misc_feature 1..20: note = chemically synthesized
  source 1..20: mol_type = other DNA
acaaataacatgattttcct

SEQ ID NO: 35611 - DNA, 20 bp, synthetic construct
  misc_feature 1..20: note = chemically synthesized
  source 1..20: mol_type = other DNA
taacatgattttcctaagtc

SEQ ID NO: 35612 - DNA, 20 bp, synthetic construct
  misc_feature 1..20: note = chemically synthesized
  source 1..20: mol_type = other DNA
agatttctttgtttataaaa

SEQ ID NO: 35613 - DNA, 20 bp, synthetic construct
  misc_feature 1..20: note = chemically synthesized
  source 1..20: mol_type = other DNA
gatttctttgtttataaaat

SEQ ID NO: 35614 - DNA, 20 bp, synthetic construct
  misc_feature 1..20: note = chemically synthesized
  source 1..20: mol_type = other DNA
atttctttgtttataaaatg

SEQ ID NO: 35615 - DNA, 20 bp, synthetic construct
  misc_feature 1..20: note = chemically synthesized
  source 1..20: mol_type = other DNA
tgctaccctacctataccat

SEQ ID NO: 35616 - DNA, 20 bp, synthetic construct
  misc_feature 1..20: note = chemically synthesized
  source 1..20: mol_type = other DNA
acctataccatgagctaaat

SEQ ID NO: 35617 - DNA, 20 bp, synthetic construct
  misc_feature 1..20: note = chemically synthesized
  source 1..20: mol_type = other DNA
ataccatgagctaaataagc

SEQ ID NO: 35618 - DNA, 20 bp, synthetic construct
  misc_feature 1..20: note = chemically synthesized
  source 1..20: mol_type = other DNA
taaataagctagtatttgta

SEQ ID NO: 35619 - DNA, 20 bp, synthetic construct
  misc_feature 1..20: note = chemically synthesized
  source 1..20: mol_type = other DNA
aaataagctagtatttgtaa

SEQ ID NO: 35620 - DNA, 20 bp, synthetic construct
  misc_feature 1..20: note = chemically synthesized
  source 1..20: mol_type = other DNA
cttacattcacaatcacaca

SEQ ID NO: 35621 - DNA, 20 bp, synthetic construct
  misc_feature 1..20: note = chemically synthesized
  source 1..20: mol_type = other DNA
tgtatgtatgtataaaaatg

SEQ ID NO: 35622 - DNA, 20 bp, synthetic construct
  misc_feature 1..20: note = chemically synthesized
  source 1..20: mol_type = other DNA
gtatgtatgtataaaaatgt

SEQ ID NO: 35623 - DNA, 20 bp, synthetic construct
  misc_feature 1..20: note = chemically synthesized
  source 1..20: mol_type = other DNA
tatgtatgtataaaaatgtg

SEQ ID NO: 35624 - DNA, 20 bp, synthetic construct
  misc_feature 1..20: note = chemically synthesized
  source 1..20: mol_type = other DNA
acccactcaacaaataccct

SEQ ID NO: 35625 - DNA, 20 bp, synthetic construct
  misc_feature 1..20: note = chemically synthesized
  source 1..20: mol_type = other DNA
cattatatgcgtatatcatc

SEQ ID NO: 35626 - DNA, 20 bp, synthetic construct
  misc_feature 1..20: note = chemically synthesized
  source 1..20: mol_type = other DNA
tgcgtatatcatctggcaaa

SEQ ID NO: 35627 - DNA, 20 bp, synthetic construct
  misc_feature 1..20: note = chemically synthesized
  source 1..20: mol_type = other DNA
atggatgtgtataatttctc

SEQ ID NO: 35628 - DNA, 20 bp, synthetic construct
  misc_feature 1..20: note = chemically synthesized
  source 1..20: mol_type = other DNA
tggatgtgtataatttctcc

SEQ ID NO: 35629 - DNA, 20 bp, synthetic construct
  misc_feature 1..20: note = chemically synthesized
  source 1..20: mol_type = other DNA
ggatgtgtataatttctcca

SEQ ID NO: 35630 - DNA, 20 bp, synthetic construct
  misc_feature 1..20: note = chemically synthesized
  source 1..20: mol_type = other DNA
tgtataatttctccagggat

SEQ ID NO: 35631 - DNA, 20 bp, synthetic construct
  misc_feature 1..20: note = chemically synthesized
  source 1..20: mol_type = other DNA
ataatttctccagggataag

SEQ ID NO: 35632 - DNA, 20 bp, synthetic construct
  misc_feature 1..20: note = chemically synthesized
  source 1..20: mol_type = other DNA
aagaagcaaatgtataccga

SEQ ID NO: 35633 - DNA, 20 bp, synthetic construct
  misc_feature 1..20: note = chemically synthesized
  source 1..20: mol_type = other DNA
agcaaatgtataccgatgga

SEQ ID NO: 35634 - DNA, 20 bp, synthetic construct
  misc_feature 1..20: note = chemically synthesized
  source 1..20: mol_type = other DNA
taccgatggaaagccttact

SEQ ID NO: 35635 - DNA, 20 bp, synthetic construct
  misc_feature 1..20: note = chemically synthesized
  source 1..20: mol_type = other DNA
accgatggaaagccttactc

SEQ ID NO: 35636 - DNA, 20 bp, synthetic construct
  misc_feature 1..20: note = chemically synthesized
  source 1..20: mol_type = other DNA
gccttactcaggccataaca

SEQ ID NO: 35637 - DNA, 20 bp, synthetic construct
  misc_feature 1..20: note = chemically synthesized
  source 1..20: mol_type = other DNA
cttactcaggccataacaaa

SEQ ID NO: 35638 - DNA, 20 bp, synthetic construct
  misc_feature 1..20: note = chemically synthesized
  source 1..20: mol_type = other DNA
tactcaggccataacaaaga

SEQ ID NO: 35639 - DNA, 20 bp, synthetic construct
  misc_feature 1..20: note = chemically synthesized
  source 1..20: mol_type = other DNA
ataacaaagagagaaatgct

SEQ ID NO: 35640 - DNA, 20 bp, synthetic construct
  misc_feature 1..20: note = chemically synthesized
  source 1..20: mol_type = other DNA
gctgagtcccactccatgaa

SEQ ID NO: 35641 - DNA, 20 bp, synthetic construct
  misc_feature 1..20: note = chemically synthesized
  source 1..20: mol_type = other DNA
ctgagtcccactccatgaac

SEQ ID NO: 35642 - DNA, 20 bp, synthetic construct
  misc_feature 1..20: note = chemically synthesized
  source 1..20: mol_type = other DNA
tcccactccatgaacaggtc

SEQ ID NO: 35643 - DNA, 20 bp, synthetic construct
  misc_feature 1..20: note = chemically synthesized
  source 1..20: mol_type = other DNA
cccactccatgaacaggtca

SEQ ID NO: 35644 - DNA, 20 bp, synthetic construct
  misc_feature 1..20: note = chemically synthesized
  source 1..20: mol_type = other DNA
caaggaaccaaacatattca

SEQ ID NO: 35645 - DNA, 20 bp, synthetic construct
  misc_feature 1..20: note = chemically synthesized
  source 1..20: mol_type = other DNA
aggaaccaaacatattcaaa

SEQ ID NO: 35646 - DNA, 20 bp, synthetic construct
  misc_feature 1..20: note = chemically synthesized
  source 1..20: mol_type = other DNA
atttcattgtttcaacttgc

SEQ ID NO: 35647 - DNA, 20 bp, synthetic construct
  misc_feature 1..20: note = chemically synthesized
  source 1..20: mol_type = other DNA
cattgtttcaacttgctagt

SEQ ID NO: 35648 - DNA, 20 bp, synthetic construct
  misc_feature 1..20: note = chemically synthesized
  source 1..20: mol_type = other DNA
attgtttcaacttgctagtg

SEQ ID NO: 35649 - DNA, 20 bp, synthetic construct
  misc_feature 1..20: note = chemically synthesized
  source 1..20: mol_type = other DNA
ttgtttcaacttgctagtga

SEQ ID NO: 35650 - DNA, 20 bp, synthetic construct
  misc_feature 1..20: note = chemically synthesized
  source 1..20: mol_type = other DNA
tgtttcaacttgctagtgag

SEQ ID NO: 35651 - DNA, 20 bp, synthetic construct
  misc_feature 1..20: note = chemically synthesized
  source 1..20: mol_type = other DNA
tttcaacttgctagtgaggg

SEQ ID NO: 35652 - DNA, 20 bp, synthetic construct
  misc_feature 1..20: note = chemically synthesized
  source 1..20: mol_type = other DNA
acttgctagtgaggggagca

SEQ ID NO: 35653 - DNA, 20 bp, synthetic construct
  misc_feature 1..20: note = chemically synthesized
  source 1..20: mol_type = other DNA
aggggagcatggcacctgaa

SEQ ID NO: 35654 - DNA, 20 bp, synthetic construct
  misc_feature 1..20: note = chemically synthesized
  source 1..20: mol_type = other DNA
gggagcatggcacctgaaca

SEQ ID NO: 35655 - DNA, 20 bp, synthetic construct
  misc_feature 1..20: note = chemically synthesized
  source 1..20: mol_type = other DNA
tgatataaattaatgaaact

SEQ ID NO: 35656 - DNA, 20 bp, synthetic construct
  misc_feature 1..20: note = chemically synthesized
  source 1..20: mol_type = other DNA
aattaatgaaactgagaacc

SEQ ID NO: 35657 - DNA, 20 bp, synthetic construct
  misc_feature 1..20: note = chemically synthesized
  source 1..20: mol_type = other DNA
atgaaactgagaaccaagcg

SEQ ID NO: 35658 - DNA, 20 bp, synthetic construct
  misc_feature 1..20: note = chemically synthesized
  source 1..20: mol_type = other DNA
gaaactgagaaccaagcgaa

SEQ ID NO: 35659 - DNA, 20 bp, synthetic construct
  misc_feature 1..20: note = chemically synthesized
  source 1..20: mol_type = other DNA
tgagaaccaagcgaagagct

SEQ ID NO: 35660 - DNA, 20 bp, synthetic construct
  misc_feature 1..20: note = chemically synthesized
  source 1..20: mol_type = other DNA
gagcttagccatcctttgca

SEQ ID NO: 35661 - DNA, 20 bp, synthetic construct
  misc_feature 1..20: note = chemically synthesized
  source 1..20: mol_type = other DNA
ttagccatcctttgcatagt

SEQ ID NO: 35662 - DNA, 20 bp, synthetic construct
  misc_feature 1..20: note = chemically synthesized
  source 1..20: mol_type = other DNA
ctttgcatagttagctacaa

SEQ ID NO: 35663 - DNA, 20 bp, synthetic construct
  misc_feature 1..20: note = chemically synthesized
  source 1..20: mol_type = other DNA
tacaatggctatttattttt

SEQ ID NO: 35664 - DNA, 20 bp, synthetic construct
  misc_feature 1..20: note = chemically synthesized
  source 1..20: mol_type = other DNA
atggctatttatttttcagc

SEQ ID NO: 35665 - DNA, 20 bp, synthetic construct
  misc_feature 1..20: note = chemically synthesized
  source 1..20: mol_type = other DNA
tatttatttttcagccagac

SEQ ID NO: 35666 - DNA, 20 bp, synthetic construct
  misc_feature 1..20: note = chemically synthesized
  source 1..20: mol_type = other DNA
cagccagactggccatcatg

SEQ ID NO: 35667 - DNA, 20 bp, synthetic construct
  misc_feature 1..20: note = chemically synthesized
  source 1..20: mol_type = other DNA
agccagactggccatcatgt

SEQ ID NO: 35668 - DNA, 20 bp, synthetic construct
  misc_feature 1..20: note = chemically synthesized
  source 1..20: mol_type = other DNA
atcatgtaggcacactcttt

SEQ ID NO: 35669 - DNA, 20 bp, synthetic construct
  misc_feature 1..20: note = chemically synthesized
  source 1..20: mol_type = other DNA
gtaggcacactcttttagat

SEQ ID NO: 35670 - DNA, 20 bp, synthetic construct
  misc_feature 1..20: note = chemically synthesized
  source 1..20: mol_type = other DNA
ttttttctgcccattcattc

SEQ ID NO: 35671 - DNA, 20 bp, synthetic construct
  misc_feature 1..20: note = chemically synthesized
  source 1..20: mol_type = other DNA
cattcattccagcaccgtga

SEQ ID NO: 35672 - DNA, 20 bp, synthetic construct
  misc_feature 1..20: note = chemically synthesized
  source 1..20: mol_type = other DNA
cagcaccgtgacagtcttca

SEQ ID NO: 35673 - DNA, 20 bp, synthetic construct
  misc_feature 1..20: note = chemically synthesized
  source 1..20: mol_type = other DNA
agcaccgtgacagtcttcac

SEQ ID NO: 35674 - DNA, 20 bp, synthetic construct
  misc_feature 1..20: note = chemically synthesized
  source 1..20: mol_type = other DNA
gcaccgtgacagtcttcacg

SEQ ID NO: 35675 - DNA, 20 bp, synthetic construct
  misc_feature 1..20: note = chemically synthesized
  source 1..20: mol_type = other DNA
gaaattaaacttattttttt

SEQ ID NO: 35676 - DNA, 20 bp, synthetic construct
  misc_feature 1..20: note = chemically synthesized
  source 1..20: mol_type = other DNA
agaatttttcaatcatatac

SEQ ID NO: 35677 - DNA, 20 bp, synthetic construct
  misc_feature 1..20: note = chemically synthesized
  source 1..20: mol_type = other DNA
tcatatacaagattttgaac

SEQ ID NO: 35678 - DNA, 20 bp, synthetic construct
  misc_feature 1..20: note = chemically synthesized
  source 1..20: mol_type = other DNA
catatacaagattttgaact

SEQ ID NO: 35679 - DNA, 20 bp, synthetic construct
  misc_feature 1..20: note = chemically synthesized
  source 1..20: mol_type = other DNA
aattaaatgaattgcacata

SEQ ID NO: 35680 - DNA, 20 bp, synthetic construct
  misc_feature 1..20: note = chemically synthesized
  source 1..20: mol_type = other DNA
atgaattgcacataaagcca

SEQ ID NO: 35681 - DNA, 20 bp, synthetic construct
  misc_feature 1..20: note = chemically synthesized
  source 1..20: mol_type = other DNA
tatgtatttttactacattg

SEQ ID NO: 35682 - DNA, 20 bp, synthetic construct
  misc_feature 1..20: note = chemically synthesized
  source 1..20: mol_type = other DNA
atgtatttttactacattgt

SEQ ID NO: 35683 - DNA, 20 bp, synthetic construct
  misc_feature 1..20: note = chemically synthesized
  source 1..20: mol_type = other DNA
gtatttttactacattgtgg

SEQ ID NO: 35684 - DNA, 20 bp, synthetic construct
  misc_feature 1..20: note = chemically synthesized
  source 1..20: mol_type = other DNA
aactatgtcttacctgattt

SEQ ID NO: 35685 - DNA, 20 bp, synthetic construct
  misc_feature 1..20: note = chemically synthesized
  source 1..20: mol_type = other DNA
ttacctgatttcagaaataa

SEQ ID NO: 35686 - DNA, 20 bp, synthetic construct
  misc_feature 1..20: note = chemically synthesized
  source 1..20: mol_type = other DNA
cctgatttcagaaataaaag

SEQ ID NO: 35687 - DNA, 20 bp, synthetic construct
  misc_feature 1..20: note = chemically synthesized
  source 1..20: mol_type = other DNA
gatttcagaaataaaagaag

SEQ ID NO: 35688 - DNA, 20 bp, synthetic construct
  misc_feature 1..20: note = chemically synthesized
  source 1..20: mol_type = other DNA
ttcagaaataaaagaagtag

SEQ ID NO: 35689 - DNA, 20 bp, synthetic construct
  misc_feature 1..20: note = chemically synthesized
  source 1..20: mol_type = other DNA
cacttccttatgttccattt

SEQ ID NO: 35690 - DNA, 20 bp, synthetic construct
  misc_feature 1..20: note = chemically synthesized
  source 1..20: mol_type = other DNA
acttccttatgttccatttt

SEQ ID NO: 35691 - DNA, 20 bp, synthetic construct
  misc_feature 1..20: note = chemically synthesized
  source 1..20: mol_type = other DNA
cttatgttccattttgggac

SEQ ID NO: 35692 - DNA, 20 bp, synthetic construct
  misc_feature 1..20: note = chemically synthesized
  source 1..20: mol_type = other DNA
tgttccattttgggactggc

SEQ ID NO: 35693 - DNA, 20 bp, synthetic construct
  misc_feature 1..20: note = chemically synthesized
  source 1..20: mol_type = other DNA
tccattttgggactggccag

SEQ ID NO: 35694 - DNA, 20 bp, synthetic construct
  misc_feature 1..20: note = chemically synthesized
  source 1..20: mol_type = other DNA
tgggactggccagcagtgcc

SEQ ID NO: 35695 - DNA, 20 bp, synthetic construct
  misc_feature 1..20: note = chemically synthesized
  source 1..20: mol_type = other DNA
actggccagcagtgcccaga

SEQ ID NO: 35696 - DNA, 20 bp, synthetic construct
  misc_feature 1..20: note = chemically synthesized
  source 1..20: mol_type = other DNA
cagaaagtgtgtcccaatcc

SEQ ID NO: 35697 - DNA, 20 bp, synthetic construct
  misc_feature 1..20: note = chemically synthesized
  source 1..20: mol_type = other DNA
agaaagtgtgtcccaatccc

SEQ ID NO: 35698 - DNA, 20 bp, synthetic construct
  misc_feature 1..20: note = chemically synthesized
  source 1..20: mol_type = other DNA
aggacattgttgacttacat

SEQ ID NO: 35699 - DNA, 20 bp, synthetic construct
  misc_feature 1..20: note = chemically synthesized
  source 1..20: mol_type = other DNA
gacattgttgacttacatga

SEQ ID NO: 35700 - DNA, 20 bp, synthetic construct
  misc_feature 1..20: note = chemically synthesized
  source 1..20: mol_type = other DNA
gagtaaacgcacccacaaac

SEQ ID NO: 35701 - DNA, 20 bp, synthetic construct
  misc_feature 1..20: note = chemically synthesized
  source 1..20: mol_type = other DNA
aaacgcacccacaaaccaga

SEQ ID NO: 35702 - DNA, 20 bp, synthetic construct
  misc_feature 1..20: note = chemically synthesized
  source 1..20: mol_type = other DNA
acaaaccagatagtcaaatt

SEQ ID NO: 35703 - DNA, 20 bp, synthetic construct
  misc_feature 1..20: note = chemically synthesized
  source 1..20: mol_type = other DNA
aattaagttaatgattctct

SEQ ID NO: 35704 - DNA, 20 bp, synthetic construct
  misc_feature 1..20: note = chemically synthesized
  source 1..20: mol_type = other DNA
ttaagttaatgattctctca

SEQ ID NO: 35705 - DNA, 20 bp, synthetic construct
  misc_feature 1..20: note = chemically synthesized
  source 1..20: mol_type = other DNA
ctctcagagacccatgccac

SEQ ID NO: 35706 - DNA, 20 bp, synthetic construct
  misc_feature 1..20: note = chemically synthesized
  source 1..20: mol_type = other DNA
agagacccatgccactggct

SEQ ID NO: 35707 - DNA, 20 bp, synthetic construct
  misc_feature 1..20: note = chemically synthesized
  source 1..20: mol_type = other DNA
gacccatgccactggctcag

SEQ ID NO: 35708 - DNA, 20 bp, synthetic construct
  misc_feature 1..20: note = chemically synthesized
  source 1..20: mol_type = other DNA
acccatgccactggctcagc

SEQ ID NO: 35709 - DNA, 20 bp, synthetic construct
  misc_feature 1..20: note = chemically synthesized
  source 1..20: mol_type = other DNA
cccatgccactggctcagca

SEQ ID NO: 35710 - DNA, 20 bp, synthetic construct
  misc_feature 1..20: note = chemically synthesized
  source 1..20: mol_type = other DNA
ttcaaacattaccttgaata

SEQ ID NO: 35711 - DNA, 20 bp, synthetic construct
  misc_feature 1..20: note = chemically synthesized
  source 1..20: mol_type = other DNA
caaacattaccttgaatata

SEQ ID NO: 35712 - DNA, 20 bp, synthetic construct
  misc_feature 1..20: note = chemically synthesized
  source 1..20: mol_type = other DNA
tagagtcttataaaatattt

SEQ ID NO: 35713 - DNA, 20 bp, synthetic construct
  misc_feature 1..20: note = chemically synthesized
  source 1..20: mol_type = other DNA
gagtcttataaaatatttga

SEQ ID NO: 35714 - DNA, 20 bp, synthetic construct
  misc_feature 1..20: note = chemically synthesized
  source 1..20: mol_type = other DNA
atttgagagtgcaatgtcaa

SEQ ID NO: 35715 - DNA, 20 bp, synthetic construct
  misc_feature 1..20: note = chemically synthesized
  source 1..20: mol_type = other DNA
agtgcaatgtcaatagatgc

SEQ ID NO: 35716 - DNA, 20 bp, synthetic construct
  misc_feature 1..20: note = chemically synthesized
  source 1..20: mol_type = other DNA
gtgcaatgtcaatagatgct

SEQ ID NO: 35717 - DNA, 20 bp, synthetic construct
  misc_feature 1..20: note = chemically synthesized
  source 1..20: mol_type = other DNA
caatgtcaatagatgctggg

SEQ ID NO: 35718 - DNA, 20 bp, synthetic construct
  misc_feature 1..20: note = chemically synthesized
  source 1..20: mol_type = other DNA
tgtcaatagatgctgggaag

SEQ ID NO: 35719 - DNA, 20 bp, synthetic construct
  misc_feature 1..20: note = chemically synthesized
  source 1..20: mol_type = other DNA
tagatgctgggaagtggtga

SEQ ID NO: 35720 - DNA, 20 bp, synthetic construct
  misc_feature 1..20: note = chemically synthesized
  source 1..20: mol_type = other DNA
gtgaaagccatttcccccct

SEQ ID NO: 35721 - DNA, 20 bp, synthetic construct
  misc_feature 1..20: note = chemically synthesized
  source 1..20: mol_type = other DNA
cttactccttccctcacccc

SEQ ID NO: 35722 - DNA, 20 bp, synthetic construct
  misc_feature 1..20: note = chemically synthesized
  source 1..20: mol_type = other DNA
agaccttcatctttcctgat

SEQ ID NO: 35723 - DNA, 20 bp, synthetic construct
  misc_feature 1..20: note = chemically synthesized
  source 1..20: mol_type = other DNA
ttctttcattctctttcttt

SEQ ID NO: 35724 - DNA, 20 bp, synthetic construct
  misc_feature 1..20: note = chemically synthesized
  source 1..20: mol_type = other DNA
tggataaaataaaatcataa

SEQ ID NO: 35725 - DNA, 20 bp, synthetic construct
  misc_feature 1..20: note = chemically synthesized
  source 1..20: mol_type = other DNA
ataaaataaaatcataaaag

SEQ ID NO: 35726 - DNA, 20 bp, synthetic construct
  misc_feature 1..20: note = chemically synthesized
  source 1..20: mol_type = other DNA
taaaagtagctcatatttgc

SEQ ID NO: 35727 - DNA, 20 bp, synthetic construct
  misc_feature 1..20: note = chemically synthesized
  source 1..20: mol_type = other DNA
ttgctggtaacttccatgac

SEQ ID NO: 35728 - DNA, 20 bp, synthetic construct
  misc_feature 1..20: note = chemically synthesized
  source 1..20: mol_type = other DNA
ccatgaccagaccctctgcc

SEQ ID NO: 35729 - DNA, 20 bp, synthetic construct
  misc_feature 1..20: note = chemically synthesized
  source 1..20: mol_type = other DNA
tgccaagtgctgcacatcca

SEQ ID NO: 35730 - DNA, 20 bp, synthetic construct
  misc_feature 1..20: note = chemically synthesized
  source 1..20: mol_type = other DNA
gcacatccatagcctccctc

SEQ ID NO: 35731 - DNA, 20 bp, synthetic construct
  misc_feature 1..20: note = chemically synthesized
  source 1..20: mol_type = other DNA
gcctccctcaagctttccaa

SEQ ID NO: 35732 - DNA, 20 bp, synthetic construct
  misc_feature 1..20: note = chemically synthesized
  source 1..20: mol_type = other DNA
cctccctcaagctttccaac

SEQ ID NO: 35733 - DNA, 20 bp, synthetic construct
  misc_feature 1..20: note = chemically synthesized
  source 1..20: mol_type = other DNA
ccctcaagctttccaacagg

SEQ ID NO: 35734 - DNA, 20 bp, synthetic construct
  misc_feature 1..20: note = chemically synthesized
  source 1..20: mol_type = other DNA
tccaacaggcagtgctgtac

SEQ ID NO: 35735 - DNA, 20 bp, synthetic construct
  misc_feature 1..20: note = chemically synthesized
  source 1..20: mol_type = other DNA
ccaacaggcagtgctgtacg

SEQ ID NO: 35736 - DNA, 20 bp, synthetic construct
  misc_feature 1..20: note = chemically synthesized
  source 1..20: mol_type = other DNA
aacaggcagtgctgtacgag

SEQ ID NO: 35737 - DNA, 20 bp, synthetic construct
  misc_feature 1..20: note = chemically synthesized
  source 1..20: mol_type = other DNA
acaggcagtgctgtacgagg

SEQ ID NO: 35738 - DNA, 20 bp, synthetic construct
  misc_feature 1..20: note = chemically synthesized
  source 1..20: mol_type = other DNA
caggcagtgctgtacgagga

SEQ ID NO: 35739 - DNA, 20 bp, synthetic construct
  misc_feature 1..20: note = chemically synthesized
  source 1..20: mol_type = other DNA
aggcagtgctgtacgaggag

SEQ ID NO: 35740 - DNA, 20 bp, synthetic construct
  misc_feature 1..20: note = chemically synthesized
  source 1..20: mol_type = other DNA
ggcagtgctgtacgaggagg

SEQ ID NO: 35741 - DNA, 20 bp, synthetic construct
  misc_feature 1..20: note = chemically synthesized
  source 1..20: mol_type = other DNA
tgctgtacgaggagggggct

SEQ ID NO: 35742 - DNA, 20 bp, synthetic construct
  misc_feature 1..20: note = chemically synthesized
  source 1..20: mol_type = other DNA
gctgtacgaggagggggctg

SEQ ID NO: 35743 - DNA, 20 bp, synthetic construct
  misc_feature 1..20: note = chemically synthesized
  source 1..20: mol_type = other DNA
gagggggctgaggccttccc

SEQ ID NO: 35744 - DNA, 20 bp, synthetic construct
  misc_feature 1..20: note = chemically synthesized
  source 1..20: mol_type = other DNA
agggggctgaggccttcccg

SEQ ID NO: 35745 - DNA, 20 bp, synthetic construct
  misc_feature 1..20: note = chemically synthesized
  source 1..20: mol_type = other DNA
cccgaggttgtgtcgctacc

SEQ ID NO: 35746 - DNA, 20 bp, synthetic construct
  misc_feature 1..20: note = chemically synthesized
  source 1..20: mol_type = other DNA
ccgaggttgtgtcgctaccc

SEQ ID NO: 35747 - DNA, 20 bp, synthetic construct
  misc_feature 1..20: note = chemically synthesized
  source 1..20: mol_type = other DNA
cgaggttgtgtcgctaccca

SEQ ID NO: 35748 - DNA, 20 bp, synthetic construct
  misc_feature 1..20: note = chemically synthesized
  source 1..20: mol_type = other DNA
gaggttgtgtcgctacccag

SEQ ID NO: 35749 - DNA, 20 bp, synthetic construct
  misc_feature 1..20: note = chemically synthesized
  source 1..20: mol_type = other DNA
tgtgtcgctacccaggggtg

SEQ ID NO: 35750 - DNA, 20 bp, synthetic construct
  misc_feature 1..20: note = chemically synthesized
  source 1..20: mol_type = other DNA
ctacccaggggtgcagctga

SEQ ID NO: 35751 - DNA, 20 bp, synthetic construct
  misc_feature 1..20: note = chemically synthesized
  source 1..20: mol_type = other DNA
gctgatagacacaacccttt

SEQ ID NO: 35752 - DNA, 20 bp, synthetic construct
  misc_feature 1..20: note = chemically synthesized
  source 1..20: mol_type = other DNA
ctgatagacacaaccctttc

SEQ ID NO: 35753 - DNA, 20 bp, synthetic construct
  misc_feature 1..20: note = chemically synthesized
  source 1..20: mol_type = other DNA
gacacaaccctttcaggtct

SEQ ID NO: 35754 - DNA, 20 bp, synthetic construct
  misc_feature 1..20: note = chemically synthesized
  source 1..20: mol_type = other DNA
cctttcaggtcttagtttac

SEQ ID NO: 35755 - DNA, 20 bp, synthetic construct
  misc_feature 1..20: note = chemically synthesized
  source 1..20: mol_type = other DNA
tcaggtcttagtttacgagc

SEQ ID NO: 35756 - DNA, 20 bp, synthetic construct
  misc_feature 1..20: note = chemically synthesized
  source 1..20: mol_type = other DNA
gtcttagtttacgagcaagc

SEQ ID NO: 35757 - DNA, 20 bp, synthetic construct
  misc_feature 1..20: note = chemically synthesized
  source 1..20: mol_type = other DNA
tcttagtttacgagcaagct

SEQ ID NO: 35758 - DNA, 20 bp, synthetic construct
  misc_feature 1..20: note = chemically synthesized
  source 1..20: mol_type = other DNA
ctgtgccgaaatgacaacat

SEQ ID NO: 35759 - DNA, 20 bp, synthetic construct
  misc_feature 1..20: note = chemically synthesized
  source 1..20: mol_type = other DNA
cttcaaaatttatttattcc

SEQ ID NO: 35760 - DNA, 20 bp, synthetic construct
  misc_feature 1..20: note = chemically synthesized
  source 1..20: mol_type = other DNA
gtaattataaattatgttat

SEQ ID NO: 35761 - DNA, 20 bp, synthetic construct
  misc_feature 1..20: note = chemically synthesized
  source 1..20: mol_type = other DNA
ttataagatatcaatccttc

SEQ ID NO: 35762 - DNA, 20 bp, synthetic construct
  misc_feature 1..20: note = chemically synthesized
  source 1..20: mol_type = other DNA
tataagatatcaatccttcc

SEQ ID NO: 35763 - DNA, 20 bp, synthetic construct
  misc_feature 1..20: note = chemically synthesized
  source 1..20: mol_type = other DNA
taagatatcaatccttccag

SEQ ID NO: 35764 - DNA, 20 bp, synthetic construct
  misc_feature 1..20: note = chemically synthesized
  source 1..20: mol_type = other DNA
aagatatcaatccttccagg

SEQ ID NO: 35765 - DNA, 20 bp, synthetic construct
  misc_feature 1..20: note = chemically synthesized
  source 1..20: mol_type = other DNA
agatatcaatccttccagga

SEQ ID NO: 35766 - DNA, 20 bp, synthetic construct
  misc_feature 1..20: note = chemically synthesized
  source 1..20: mol_type = other DNA
gatatcaatccttccaggag

SEQ ID NO: 35767 - DNA, 20 bp, synthetic construct
  misc_feature 1..20: note = chemically synthesized
  source 1..20: mol_type = other DNA
atatcaatccttccaggagg

SEQ ID NO: 35768 - DNA, 20 bp, synthetic construct
  misc_feature 1..20: note = chemically synthesized
  source 1..20: mol_type = other DNA
tcaatccttccaggaggggg

SEQ ID NO: 35769 - DNA, 20 bp, synthetic construct
  misc_feature 1..20: note = chemically synthesized
  source 1..20: mol_type = other DNA
atccttccaggagggggtgg

SEQ ID NO: 35770 - DNA, 20 bp, synthetic construct
  misc_feature 1..20: note = chemically synthesized
  source 1..20: mol_type = other DNA
gtggctcatgcctataatcc

SEQ ID NO: 35771 - DNA, 20 bp, synthetic construct
  misc_feature 1..20: note = chemically synthesized
  source 1..20: mol_type = other DNA
tgcctataatcccagcattt

SEQ ID NO: 35772 - DNA, 20 bp, synthetic construct
  misc_feature 1..20: note = chemically synthesized
  source 1..20: mol_type = other DNA
gcctataatcccagcatttt

SEQ ID NO: 35773 - DNA, 20 bp, synthetic construct
  misc_feature 1..20: note = chemically synthesized
  source 1..20: mol_type = other DNA
ctataatcccagcattttgg

SEQ ID NO: 35774 - DNA, 20 bp, synthetic construct
  misc_feature 1..20: note = chemically synthesized
  source 1..20: mol_type = other DNA
tataatcccagcattttggg

SEQ ID NO: 35775 - DNA, 20 bp, synthetic construct
  misc_feature 1..20: note = chemically synthesized
  source 1..20: mol_type = other DNA
cccagcattttgggaggcca

SEQ ID NO: 35776 - DNA, 20 bp, synthetic construct
  misc_feature 1..20: note = chemically synthesized
  source 1..20: mol_type = other DNA
agcattttgggaggccacgg

SEQ ID NO: 35777 - DNA, 20 bp, synthetic construct
  misc_feature 1..20: note = chemically synthesized
  source 1..20: mol_type = other DNA
ttttgggaggccacggcaga

SEQ ID NO: 35778 - DNA, 20 bp, synthetic construct
  misc_feature 1..20: note = chemically synthesized
  source 1..20: mol_type = other DNA
ccacggcagatggatcacct

SEQ ID NO: 35779 - DNA, 20 bp, synthetic construct
  misc_feature 1..20: note = chemically synthesized
  source 1..20: mol_type = other DNA
cacggcagatggatcacctg

SEQ ID NO: 35780 - DNA, 20 bp, synthetic construct
  misc_feature 1..20: note = chemically synthesized
  source 1..20: mol_type = other DNA
gcagatggatcacctgaggc

SEQ ID NO: 35781 - DNA, 20 bp, synthetic construct
  misc_feature 1..20: note = chemically synthesized
  source 1..20: mol_type = other DNA
cagatggatcacctgaggcc

SEQ ID NO: 35782 - DNA, 20 bp, synthetic construct
  misc_feature 1..20: note = chemically synthesized
  source 1..20: mol_type = other DNA
gatggatcacctgaggccag

SEQ ID NO: 35783 - DNA, 20 bp, synthetic construct
  misc_feature 1..20: note = chemically synthesized
  source 1..20: mol_type = other DNA
tcacctgaggccaggagttt

SEQ ID NO: 35784 - DNA, 20 bp, synthetic construct
  misc_feature 1..20: note = chemically synthesized
  source 1..20: mol_type = other DNA
tgaggccaggagtttgagac

SEQ ID NO: 35785 - DNA, 20 bp, synthetic construct
  misc_feature 1..20: note = chemically synthesized
  source 1..20: mol_type = other DNA
ccaggagtttgagacaagcc

SEQ ID NO: 35786 - DNA, 20 bp, synthetic construct
  misc_feature 1..20: note = chemically synthesized
  source 1..20: mol_type = other DNA
caggagtttgagacaagcct

SEQ ID NO: 35787 - DNA, 20 bp, synthetic construct
  misc_feature 1..20: note = chemically synthesized
  source 1..20: mol_type = other DNA
tctacaaaaaatacaaaaat

SEQ ID NO: 35788 - DNA, 20 bp, synthetic construct
  misc_feature 1..20: note = chemically synthesized
  source 1..20: mol_type = other DNA
caaaaaatacaaaaattagc

SEQ ID NO: 35789 - DNA, 20 bp, synthetic construct
  misc_feature 1..20: note = chemically synthesized
  source 1..20: mol_type = other DNA
aaaaaatacaaaaattagct

SEQ ID NO: 35790 - DNA, 20 bp, synthetic construct
  misc_feature 1..20: note = chemically synthesized
  source 1..20: mol_type = other DNA
atacaaaaattagctgggtg

SEQ ID NO: 35791 - DNA, 20 bp, synthetic construct
  misc_feature 1..20: note = chemically synthesized
  source 1..20: mol_type = other DNA
acaaaaattagctgggtgtg

SEQ ID NO: 35792 - DNA, 20 bp, synthetic construct
  misc_feature 1..20: note = chemically synthesized
  source 1..20: mol_type = other DNA
caaaaattagctgggtgtgg

SEQ ID NO: 35793 - DNA, 20 bp, synthetic construct
  misc_feature 1..20: note = chemically synthesized
  source 1..20: mol_type = other DNA
ctgggtgtggaggcacatgc

SEQ ID NO: 35794 - DNA, 20 bp, synthetic construct
  misc_feature 1..20: note = chemically synthesized
  source 1..20: mol_type = other DNA
gaggcacatgccagtcatcc

SEQ ID NO: 35795 - DNA, 20 bp, synthetic construct
  misc_feature 1..20: note = chemically synthesized
  source 1..20: mol_type = other DNA
tgccagtcatcccagctact

SEQ ID NO: 35796 - DNA, 20 bp, synthetic construct
  misc_feature 1..20: note = chemically synthesized
  source 1..20: mol_type = other DNA
cagtcatcccagctactaag

SEQ ID NO: 35797 - DNA, 20 bp, synthetic construct
  misc_feature 1..20: note = chemically synthesized
  source 1..20: mol_type = other DNA
agtcatcccagctactaagt

SEQ ID NO: 35798 - DNA, 20 bp, synthetic construct
  misc_feature 1..20: note = chemically synthesized
  source 1..20: mol_type = other DNA
tcccagctactaagtaggct

SEQ ID NO: 35799 - DNA, 20 bp, synthetic construct
  misc_feature 1..20: note = chemically synthesized
  source 1..20: mol_type = other DNA
cccagctactaagtaggctg

SEQ ID NO: 35800 - DNA, 20 bp, synthetic construct
  misc_feature 1..20: note = chemically synthesized
  source 1..20: mol_type = other DNA
tactaagtaggctgaggcac

SEQ ID NO: 35801 - DNA, 20 bp, synthetic construct
  misc_feature 1..20: note = chemically synthesized
  source 1..20: mol_type = other DNA
gcactagaattgcttgaaca

SEQ ID NO: 35802 - DNA, 20 bp, synthetic construct
  misc_feature 1..20: note = chemically synthesized
  source 1..20: mol_type = other DNA
cactagaattgcttgaacac

SEQ ID NO: 35803 - DNA, 20 bp, synthetic construct
  misc_feature 1..20: note = chemically synthesized
  source 1..20: mol_type = other DNA
ctagaattgcttgaacacag

SEQ ID NO: 35804 - DNA, 20 bp, synthetic construct
  misc_feature 1..20: note = chemically synthesized
  source 1..20: mol_type = other DNA
aattgcttgaacacaggaga

SEQ ID NO: 35805 - DNA, 20 bp, synthetic construct
  misc_feature 1..20: note = chemically synthesized
  source 1..20: mol_type = other DNA
ttgcttgaacacaggagatg

SEQ ID NO: 35806 - DNA, 20 bp, synthetic construct
  misc_feature 1..20: note = chemically synthesized
  source 1..20: mol_type = other DNA
tgcttgaacacaggagatgg

SEQ ID NO: 35807 - DNA, 20 bp, synthetic construct
  misc_feature 1..20: note = chemically synthesized
  source 1..20: mol_type = other DNA
aacacaggagatggaggttg

SEQ ID NO: 35808 - DNA, 20 bp, synthetic construct
  misc_feature 1..20: note = chemically synthesized
  source 1..20: mol_type = other DNA
caggagatggaggttgcagt

SEQ ID NO: 35809 - DNA, 20 bp, synthetic construct
  misc_feature 1..20: note = chemically synthesized
  source 1..20: mol_type = other DNA
gatggaggttgcagtgagcc

SEQ ID NO: 35810 - DNA, 20 bp, synthetic construct
  misc_feature 1..20: note = chemically synthesized
  source 1..20: mol_type = other DNA
aagaatgtgccactgcactc

SEQ ID NO: 35811 - DNA, 20 bp, synthetic construct
  misc_feature 1..20: note = chemically synthesized
  source 1..20: mol_type = other DNA
tgtgccactgcactccagcc

SEQ ID NO: 35812 - DNA, 20 bp, synthetic construct
  misc_feature 1..20: note = chemically synthesized
  source 1..20: mol_type = other DNA
gtgccactgcactccagcct

SEQ ID NO: 35813 - DNA, 20 bp, synthetic construct
  misc_feature 1..20: note = chemically synthesized
  source 1..20: mol_type = other DNA
ctgcactccagcctgggtga

SEQ ID NO: 35814 - DNA, 20 bp, synthetic construct
  misc_feature 1..20: note = chemically synthesized
  source 1..20: mol_type = other DNA
gcactccagcctgggtgaca

SEQ ID NO: 35815 - DNA, 20 bp, synthetic construct
  misc_feature 1..20: note = chemically synthesized
  source 1..20: mol_type = other DNA
tccagcctgggtgacagagc

SEQ ID NO: 35816 - DNA, 20 bp, synthetic construct
  misc_feature 1..20: note = chemically synthesized
  source 1..20: mol_type = other DNA
gtgacagagcaagaatgtct

SEQ ID NO: 35817 - DNA, 20 bp, synthetic construct
  misc_feature 1..20: note = chemically synthesized
  source 1..20: mol_type = other DNA
tgacagagcaagaatgtctc

SEQ ID NO: 35818 - DNA, 20 bp, synthetic construct
  misc_feature 1..20: note = chemically synthesized
  source 1..20: mol_type = other DNA
agagcaagaatgtctcagga

SEQ ID NO: 35819 - DNA, 20 bp, synthetic construct
  misc_feature 1..20: note = chemically synthesized
  source 1..20: mol_type = other DNA
aatatcaatccttcctattc

SEQ ID NO: 35820 - DNA, 20 bp, synthetic construct
  misc_feature 1..20: note = chemically synthesized
  source 1..20: mol_type = other DNA
atcaatccttcctattctag

SEQ ID NO: 35821 - DNA, 20 bp, synthetic construct
  misc_feature 1..20: note = chemically synthesized
  source 1..20: mol_type = other DNA
ccttcctattctagtagttg

SEQ ID NO: 35822 - DNA, 20 bp, synthetic construct
  misc_feature 1..20: note = chemically synthesized
  source 1..20: mol_type = other DNA
atatttttaaaaataaaaca

SEQ ID NO: 35823 - DNA, 20 bp, synthetic construct
  misc_feature 1..20: note = chemically synthesized
  source 1..20: mol_type = other DNA
tatttttaaaaataaaacat

SEQ ID NO: 35824 - DNA, 20 bp, synthetic construct
  misc_feature 1..20: note = chemically synthesized
  source 1..20: mol_type = other DNA
atttttaaaaataaaacata

SEQ ID NO: 35825 - DNA, 20 bp, synthetic construct
  misc_feature 1..20: note = chemically synthesized
  source 1..20: mol_type = other DNA
taaaaataaaacatagggtc

SEQ ID NO: 35826 - DNA, 20 bp, synthetic construct
  misc_feature 1..20: note = chemically synthesized
  source 1..20: mol_type = other DNA
ataaaacatagggtcgagtg

SEQ ID NO: 35827 - DNA, 20 bp, synthetic construct
  misc_feature 1..20: note = chemically synthesized
  source 1..20: mol_type = other DNA
aaacatagggtcgagtgcgg

SEQ ID NO: 35828 - DNA, 20 bp, synthetic construct
  misc_feature 1..20: note = chemically synthesized
  source 1..20: mol_type = other DNA
gtggctcaactctgtaatcc

SEQ ID NO: 35829 - DNA, 20 bp, synthetic construct
  misc_feature 1..20: note = chemically synthesized
  source 1..20: mol_type = other DNA
actctgtaatcccagcactt

SEQ ID NO: 35830 - DNA, 20 bp, synthetic construct
  misc_feature 1..20: note = chemically synthesized
  source 1..20: mol_type = other DNA
ctctgtaatcccagcacttt

SEQ ID NO: 35831 - DNA, 20 bp, synthetic construct
  misc_feature 1..20: note = chemically synthesized
  source 1..20: mol_type = other DNA
ctgtaatcccagcactttgg

SEQ ID NO: 35832 - DNA, 20 bp, synthetic construct
  misc_feature 1..20: note = chemically synthesized
  source 1..20: mol_type = other DNA
tgtaatcccagcactttggg

SEQ ID NO: 35833 - DNA, 20 bp, synthetic construct
  misc_feature 1..20: note = chemically synthesized
  source 1..20: mol_type = other DNA
tcccagcactttgggaggcc

SEQ ID NO: 35834 - DNA, 20 bp, synthetic construct
  misc_feature 1..20: note = chemically synthesized
  source 1..20: mol_type = other DNA
agcactttgggaggccaaga

SEQ ID NO: 35835 - DNA, 20 bp, synthetic construct
  misc_feature 1..20: note = chemically synthesized
  source 1..20: mol_type = other DNA
gcactttgggaggccaagac

SEQ ID NO: 35836 - DNA, 20 bp, synthetic construct
  misc_feature 1..20: note = chemically synthesized
  source 1..20: mol_type = other DNA
ctttgggaggccaagacagg

SEQ ID NO: 35837 - DNA, 20 bp, synthetic construct
  misc_feature 1..20: note = chemically synthesized
  source 1..20: mol_type = other DNA
ggccaagacaggtggatcac

SEQ ID NO: 35838 - DNA, 20 bp, synthetic construct
  misc_feature 1..20: note = chemically synthesized
  source 1..20: mol_type = other DNA
gccaagacaggtggatcaca

SEQ ID NO: 35839 - DNA, 20 bp, synthetic construct
  misc_feature 1..20: note = chemically synthesized
  source 1..20: mol_type = other DNA
agacaggtggatcacaaggt

SEQ ID NO: 35840 - DNA, 20 bp, synthetic construct
  misc_feature 1..20: note = chemically synthesized
  source 1..20: mol_type = other DNA
gacaggtggatcacaaggtc

SEQ ID NO: 35841 - DNA, 20 bp, synthetic construct
  misc_feature 1..20: note = chemically synthesized
  source 1..20: mol_type = other DNA
caggtggatcacaaggtcag

SEQ ID NO: 35842 - DNA, 20 bp, synthetic construct
  misc_feature 1..20: note = chemically synthesized
  source 1..20: mol_type = other DNA
gatcacaaggtcaggagttt

SEQ ID NO: 35843 - DNA, 20 bp, synthetic construct
  misc_feature 1..20: note = chemically synthesized
  source 1..20: mol_type = other DNA
caaggtcaggagtttgagac

SEQ ID NO: 35844 - DNA, 20 bp, synthetic construct
  misc_feature 1..20: note = chemically synthesized
  source 1..20: mol_type = other DNA
gtcaggagtttgagaccagc

SEQ ID NO: 35845 - DNA, 20 bp, synthetic construct
  misc_feature 1..20: note = chemically synthesized
  source 1..20: mol_type = other DNA
tcaggagtttgagaccagcc

SEQ ID NO: 35846 - DNA, 20 bp, synthetic construct
  misc_feature 1..20: note = chemically synthesized
  source 1..20: mol_type = other DNA
tgagaccagccaggccaatg

SEQ ID NO: 35847 - DNA, 20 bp, synthetic construct
  misc_feature 1..20: note = chemically synthesized
  source 1..20: mol_type = other DNA
tctactaaaaatacaaaaat

SEQ ID NO: 35848 - DNA, 20 bp, synthetic construct
  misc_feature 1..20: note = chemically synthesized
  source 1..20: mol_type = other DNA
ctaaaaatacaaaaattagc

SEQ ID NO: 35849 - DNA, 20 bp, synthetic construct
  misc_feature 1..20: note = chemically synthesized
  source 1..20: mol_type = other DNA
taaaaatacaaaaattagcc

SEQ ID NO: 35850 - DNA, 20 bp, synthetic construct
  misc_feature 1..20: note = chemically synthesized
  source 1..20: mol_type = other DNA
atacaaaaattagccaggcg

SEQ ID NO: 35851 - DNA, 20 bp, synthetic construct
  misc_feature 1..20: note = chemically synthesized
  source 1..20: mol_type = other DNA
caaaaattagccaggcgtgg

SEQ ID NO: 35852 - DNA, 20 bp, synthetic construct
  misc_feature 1..20: note = chemically synthesized
  source 1..20: mol_type = other DNA
aaattagccaggcgtggtgg

SEQ ID NO: 35853 - DNA, 20 bp, synthetic construct
  misc_feature 1..20: note = chemically synthesized
  source 1..20: mol_type = other DNA
aattagccaggcgtggtggt

SEQ ID NO: 35854 - DNA, 20 bp, synthetic construct
  misc_feature 1..20: note = chemically synthesized
  source 1..20: mol_type = other DNA
gtggtgggcacctgtaatcc

SEQ ID NO: 35855 - DNA, 20 bp, synthetic construct
  misc_feature 1..20: note = chemically synthesized
  source 1..20: mol_type = other DNA
gcacctgtaatcccagctac

SEQ ID NO: 35856 - DNA, 20 bp, synthetic construct
  misc_feature 1..20: note = chemically synthesized
  source 1..20: mol_type = other DNA
cacctgtaatcccagctact

SEQ ID NO: 35857 - DNA, 20 bp, synthetic construct
  misc_feature 1..20: note = chemically synthesized
  source 1..20: mol_type = other DNA
acctgtaatcccagctacta

SEQ ID NO: 35858 - DNA, 20 bp, synthetic construct
  misc_feature 1..20: note = chemically synthesized
  source 1..20: mol_type = other DNA
ctgtaatcccagctactagg

SEQ ID NO: 35859 - DNA, 20 bp, synthetic construct
  misc_feature 1..20: note = chemically synthesized
  source 1..20: mol_type = other DNA
tgtaatcccagctactaggg

SEQ ID NO: 35860 - DNA, 20 bp, synthetic construct
  misc_feature 1..20: note = chemically synthesized
  source 1..20: mol_type = other DNA
atcccagctactagggaggc

SEQ ID NO: 35861 - DNA, 20 bp, synthetic construct
  misc_feature 1..20: note = chemically synthesized
  source 1..20: mol_type = other DNA
cccagctactagggaggctg

SEQ ID NO: 35862 - DNA, 20 bp, synthetic construct
  misc_feature 1..20: note = chemically synthesized
  source 1..20: mol_type = other DNA
ctggagtattcacttgaacc

SEQ ID NO: 35863 - DNA, 20 bp, synthetic construct
  misc_feature 1..20: note = chemically synthesized
  source 1..20: mol_type = other DNA
tggagtattcacttgaaccc

SEQ ID NO: 35864 - DNA, 20 bp, synthetic construct
  misc_feature 1..20: note = chemically synthesized
  source 1..20: mol_type = other DNA
gagtattcacttgaacccag

SEQ ID NO: 35865 - DNA, 20 bp, synthetic construct
  misc_feature 1..20: note = chemically synthesized
  source 1..20: mol_type = other DNA
agtattcacttgaacccagg

SEQ ID NO: 35866 - DNA, 20 bp, synthetic construct
  misc_feature 1..20: note = chemically synthesized
  source 1..20: mol_type = other DNA
attcacttgaacccaggagg

SEQ ID NO: 35867 - DNA, 20 bp, synthetic construct
  misc_feature 1..20: note = chemically synthesized
  source 1..20: mol_type = other DNA
cacttgaacccaggaggtgg

SEQ ID NO: 35868 - DNA, 20 bp, synthetic construct
  misc_feature 1..20: note = chemically synthesized
  source 1..20: mol_type = other DNA
aacccaggaggtggaagttg

SEQ ID NO: 35869 - DNA, 20 bp, synthetic construct
  misc_feature 1..20: note = chemically synthesized
  source 1..20: mol_type = other DNA
caggaggtggaagttgcagt

SEQ ID NO: 35870 - DNA, 20 bp, synthetic construct
  misc_feature 1..20: note = chemically synthesized
  source 1..20: mol_type = other DNA
gcagtgagccaaaatcacgt

SEQ ID NO: 35871 - DNA, 20 bp, synthetic construct
  misc_feature 1..20: note = chemically synthesized
  source 1..20: mol_type = other DNA
tcacgtcagtgcacttcaac

SEQ ID NO: 35872 - DNA, 20 bp, synthetic construct
  misc_feature 1..20: note = chemically synthesized
  source 1..20: mol_type = other DNA
cacgtcagtgcacttcaacc

SEQ ID NO: 35873 - DNA, 20 bp, synthetic construct
  misc_feature 1..20: note = chemically synthesized
  source 1..20: mol_type = other DNA
acgtcagtgcacttcaaccg

SEQ ID NO: 35874 - DNA, 20 bp, synthetic construct
  misc_feature 1..20: note = chemically synthesized
  source 1..20: mol_type = other DNA
cagtgcacttcaaccggggt

SEQ ID NO: 35875 - DNA, 20 bp, synthetic construct
  misc_feature 1..20: note = chemically synthesized
  source 1..20: mol_type = other DNA
gtgcacttcaaccggggtga

SEQ ID NO: 35876 - DNA, 20 bp, synthetic construct
  misc_feature 1..20: note = chemically synthesized
  source 1..20: mol_type = other DNA
aataaaataaaataaaataa

SEQ ID NO: 35877 - DNA, 20 bp, synthetic construct
  misc_feature 1..20: note = chemically synthesized
  source 1..20: mol_type = other DNA
aataaaataaaataaaagca

SEQ ID NO: 35878 - DNA, 20 bp, synthetic construct
  misc_feature 1..20: note = chemically synthesized
  source 1..20: mol_type = other DNA
tctttccgcaaatgaattca

SEQ ID NO: 35879 - DNA, 20 bp, synthetic construct
  misc_feature 1..20: note = chemically synthesized
  source 1..20: mol_type = other DNA
cttacattttcgttctcatg

SEQ ID NO: 35880 - DNA, 20 bp, synthetic construct
  misc_feature 1..20: note = chemically synthesized
  source 1..20: mol_type = other DNA
attttcgttctcatgaagta

SEQ ID NO: 35881 - DNA, 20 bp, synthetic construct
  misc_feature 1..20: note = chemically synthesized
  source 1..20: mol_type = other DNA
tcgttctcatgaagtaaagc

SEQ ID NO: 35882 - DNA, 20 bp, synthetic construct
  misc_feature 1..20: note = chemically synthesized
  source 1..20: mol_type = other DNA
gttctcatgaagtaaagcaa

SEQ ID NO: 35883 - DNA, 20 bp, synthetic construct
  misc_feature 1..20: note = chemically synthesized
  source 1..20: mol_type = other DNA
ctcatgaagtaaagcaagag

SEQ ID NO: 35884 - DNA, 20 bp, synthetic construct
  misc_feature 1..20: note = chemically synthesized
  source 1..20: mol_type = other DNA
atgaagtaaagcaagagtgg

SEQ ID NO: 35885 - DNA, 20 bp, synthetic construct
  misc_feature 1..20: note = chemically synthesized
  source 1..20: mol_type = other DNA
aaagcaagagtggtagaatt

SEQ ID NO: 35886 - DNA, 20 bp, synthetic construct
  misc_feature 1..20: note = chemically synthesized
  source 1..20: mol_type = other DNA
gcaagagtggtagaattaag

SEQ ID NO: 35887 - DNA, 20 bp, synthetic construct
  misc_feature 1..20: note = chemically synthesized
  source 1..20: mol_type = other DNA
gagtggtagaattaagtgga

SEQ ID NO: 35888 - DNA, 20 bp, synthetic construct
  misc_feature 1..20: note = chemically synthesized
  source 1..20: mol_type = other DNA
gtggtagaattaagtggaaa

SEQ ID NO: 35889 - DNA, 20 bp, synthetic construct
  misc_feature 1..20: note = chemically synthesized
  source 1..20: mol_type = other DNA
aagtggaaagagtctatctc

SEQ ID NO: 35890 - DNA, 20 bp, synthetic construct
  misc_feature 1..20: note = chemically synthesized
  source 1..20: mol_type = other DNA
gaaagagtctatctctagtg

SEQ ID NO: 35891 - DNA, 20 bp, synthetic construct
  misc_feature 1..20: note = chemically synthesized
  source 1..20: mol_type = other DNA
tatctctagtgtagtcacgt

SEQ ID NO: 35892 - DNA, 20 bp, synthetic construct
  misc_feature 1..20: note = chemically synthesized
  source 1..20: mol_type = other DNA
ctctagtgtagtcacgtcag

SEQ ID NO: 35893 - DNA, 20 bp, synthetic construct
  misc_feature 1..20: note = chemically synthesized
  source 1..20: mol_type = other DNA
gtcacgtcagtggttgtgtc

SEQ ID NO: 35894 - DNA, 20 bp, synthetic construct
  misc_feature 1..20: note = chemically synthesized
  source 1..20: mol_type = other DNA
cgtcagtggttgtgtcaaga

SEQ ID NO: 35895 - DNA, 20 bp, synthetic construct
  misc_feature 1..20: note = chemically synthesized
  source 1..20: mol_type = other DNA
agtggttgtgtcaagatggt

SEQ ID NO: 35896 - DNA, 20 bp, synthetic construct
  misc_feature 1..20: note = chemically synthesized
  source 1..20: mol_type = other DNA
gtggttgtgtcaagatggtt

SEQ ID NO: 35897 - DNA, 20 bp, synthetic construct
  misc_feature 1..20: note = chemically synthesized
  source 1..20: mol_type = other DNA
ggttgtgtcaagatggttag

SEQ ID NO: 35898 - DNA, 20 bp, synthetic construct
  misc_feature 1..20: note = chemically synthesized
  source 1..20: mol_type = other DNA
gttgtgtcaagatggttagg

SEQ ID NO: 35899 - DNA, 20 bp, synthetic construct
  misc_feature 1..20: note = chemically synthesized
  source 1..20: mol_type = other DNA
gaggctcctcccgtttaaaa

SEQ ID NO: 35900 - DNA, 20 bp, synthetic construct
  misc_feature 1..20: note = chemically synthesized
  source 1..20: mol_type = other DNA
tcccgtttaaaacagtatcc

SEQ ID NO: 35901 - DNA, 20 bp, synthetic construct
  misc_feature 1..20: note = chemically synthesized
  source 1..20: mol_type = other DNA
ttaaaacagtatccaagccc

SEQ ID NO: 35902 - DNA, 20 bp, synthetic construct
  misc_feature 1..20: note = chemically synthesized
  source 1..20: mol_type = other DNA
agccccagttgtaaatcaat

SEQ ID NO: 35903 - DNA, 20 bp, synthetic construct
  misc_feature 1..20: note = chemically synthesized
  source 1..20: mol_type = other DNA
gccccagttgtaaatcaatt

SEQ ID NO: 35904 - DNA, 20 bp, synthetic construct
  misc_feature 1..20: note = chemically synthesized
  source 1..20: mol_type = other DNA
ccccagttgtaaatcaattg

SEQ ID NO: 35905 - DNA, 20 bp, synthetic construct
  misc_feature 1..20: note = chemically synthesized
  source 1..20: mol_type = other DNA
ccagttgtaaatcaattggg

SEQ ID NO: 35906 - DNA, 20 bp, synthetic construct
  misc_feature 1..20: note = chemically synthesized
  source 1..20: mol_type = other DNA
gacacgccaactctgatcat

SEQ ID NO: 35907 - DNA, 20 bp, synthetic construct
  misc_feature 1..20: note = chemically synthesized
  source 1..20: mol_type = other DNA
tctgatcatcagcaatatct

SEQ ID NO: 35908 - DNA, 20 bp, synthetic construct
  misc_feature 1..20: note = chemically synthesized
  source 1..20: mol_type = other DNA
catcagcaatatctgagctc

SEQ ID NO: 35909 - DNA, 20 bp, synthetic construct
  misc_feature 1..20: note = chemically synthesized
  source 1..20: mol_type = other DNA
caatatctgagctccagtct

SEQ ID NO: 35910 - DNA, 20 bp, synthetic construct
  misc_feature 1..20: note = chemically synthesized
  source 1..20: mol_type = other DNA
ccagtctcagatattgtgtg

SEQ ID NO: 35911 - DNA, 20 bp, synthetic construct
  misc_feature 1..20: note = chemically synthesized
  source 1..20: mol_type = other DNA
tctcagatattgtgtgcagt

SEQ ID NO: 35912 - DNA, 20 bp, synthetic construct
  misc_feature 1..20: note = chemically synthesized
  source 1..20: mol_type = other DNA
ccctctacctccttccctac

SEQ ID NO: 35913 - DNA, 20 bp, synthetic construct
  misc_feature 1..20: note = chemically synthesized
  source 1..20: mol_type = other DNA
taccagaaaaatcaccactt

SEQ ID NO: 35914 - DNA, 20 bp, synthetic construct
  misc_feature 1..20: note = chemically synthesized
  source 1..20: mol_type = other DNA
aaaatcaccactttagtccc

SEQ ID NO: 35915 - DNA, 20 bp, synthetic construct
  misc_feature 1..20: note = chemically synthesized
  source 1..20: mol_type = other DNA
ccactttagtccctggccac

SEQ ID NO: 35916 - DNA, 20 bp, synthetic construct
  misc_feature 1..20: note = chemically synthesized
  source 1..20: mol_type = other DNA
cactttagtccctggccacc

SEQ ID NO: 35917 - DNA, 20 bp, synthetic construct
  misc_feature 1..20: note = chemically synthesized
  source 1..20: mol_type = other DNA
ccctggccaccgggacaccc

SEQ ID NO: 35918 - DNA, 20 bp, synthetic construct
  misc_feature 1..20: note = chemically synthesized
  source 1..20: mol_type = other DNA
cctggccaccgggacacccc

SEQ ID NO: 35919 - DNA, 20 bp, synthetic construct
  misc_feature 1..20: note = chemically synthesized
  source 1..20: mol_type = other DNA
tggccaccgggacaccccag

SEQ ID NO: 35920 - DNA, 20 bp, synthetic construct
  misc_feature 1..20: note = chemically synthesized
  source 1..20: mol_type = other DNA
ggccaccgggacaccccagg

SEQ ID NO: 35921 - DNA, 20 bp, synthetic construct
  misc_feature 1..20: note = chemically synthesized
  source 1..20: mol_type = other DNA
gccaccgggacaccccagga

SEQ ID NO: 35922 - DNA, 20 bp, synthetic construct
  misc_feature 1..20: note = chemically synthesized
  source 1..20: mol_type = other DNA
ccgggacaccccaggagggt

SEQ ID NO: 35923 - DNA, 20 bp, synthetic construct
  misc_feature 1..20: note = chemically synthesized
  source 1..20: mol_type = other DNA
ggacaccccaggagggtgag

SEQ ID NO: 35924 - DNA, 20 bp, synthetic construct
  misc_feature 1..20: note = chemically synthesized
  source 1..20: mol_type = other DNA
cccaggagggtgagtggtct

SEQ ID NO: 35925 - DNA, 20 bp, synthetic construct
  misc_feature 1..20: note = chemically synthesized
  source 1..20: mol_type = other DNA
ccaggagggtgagtggtctg

SEQ ID NO: 35926 - DNA, 20 bp, synthetic construct
  misc_feature 1..20: note = chemically synthesized
  source 1..20: mol_type = other DNA
ggagggtgagtggtctgagg

SEQ ID NO: 35927 - DNA, 20 bp, synthetic construct
  misc_feature 1..20: note = chemically synthesized
  source 1..20: mol_type = other DNA
tgagtggtctgaggtagtta

SEQ ID NO: 35928 - DNA, 20 bp, synthetic construct
  misc_feature 1..20: note = chemically synthesized
  source 1..20: mol_type = other DNA
tgaggtagttatggcactta

SEQ ID NO: 35929 - DNA, 20 bp, synthetic construct
  misc_feature 1..20: note = chemically synthesized
  source 1..20: mol_type = other DNA
tggctcccttgctgctgatc

SEQ ID NO: 35930 - DNA, 20 bp, synthetic construct
  misc_feature 1..20: note = chemically synthesized
  source 1..20: mol_type = other DNA
ttgctgctgatctggaactc

SEQ ID NO: 35931 - DNA, 20 bp, synthetic construct
  misc_feature 1..20: note = chemically synthesized
  source 1..20: mol_type = other DNA
tgatctggaactcaagcccc

SEQ ID NO: 35932 - DNA, 20 bp, synthetic construct
  misc_feature 1..20: note = chemically synthesized
  source 1..20: mol_type = other DNA
tctggaactcaagccccaag

SEQ ID NO: 35933 - DNA, 20 bp, synthetic construct
  misc_feature 1..20: note = chemically synthesized
  source 1..20: mol_type = other DNA
caagccccaagaagtcccct

SEQ ID NO: 35934 - DNA, 20 bp, synthetic construct
  misc_feature 1..20: note = chemically synthesized
  source 1..20: mol_type = other DNA
ggatgatctgaatatacatt

SEQ ID NO: 35935 - DNA, 20 bp, synthetic construct
  misc_feature 1..20: note = chemically synthesized
  source 1..20: mol_type = other DNA
gatgatctgaatatacattt

SEQ ID NO: 35936 - DNA, 20 bp, synthetic construct
  misc_feature 1..20: note = chemically synthesized
  source 1..20: mol_type = other DNA
atctgaatatacatttggga

SEQ ID NO: 35937 - DNA, 20 bp, synthetic construct
  misc_feature 1..20: note = chemically synthesized
  source 1..20: mol_type = other DNA
atatacatttgggacagatc

SEQ ID NO: 35938 - DNA, 20 bp, synthetic construct
  misc_feature 1..20: note = chemically synthesized
  source 1..20: mol_type = other DNA
tatacatttgggacagatct

SEQ ID NO: 35939 - DNA, 20 bp, synthetic construct
  misc_feature 1..20: note = chemically synthesized
  source 1..20: mol_type = other DNA
atacatttgggacagatcta

SEQ ID NO: 35940 - DNA, 20 bp, synthetic construct
  misc_feature 1..20: note = chemically synthesized
  source 1..20: mol_type = other DNA
acatttgggacagatctagg

SEQ ID NO: 35941 - DNA, 20 bp, synthetic construct
  misc_feature 1..20: note = chemically synthesized
  source 1..20: mol_type = other DNA
gacagatctagggagtttct

SEQ ID NO: 35942 - DNA, 20 bp, synthetic construct
  misc_feature 1..20: note = chemically synthesized
  source 1..20: mol_type = other DNA
gggagtttctgagcaacact

SEQ ID NO: 35943 - DNA, 20 bp, synthetic construct
  misc_feature 1..20: note = chemically synthesized
  source 1..20: mol_type = other DNA
tttctgagcaacacttagac

SEQ ID NO: 35944 - DNA, 20 bp, synthetic construct
  misc_feature 1..20: note = chemically synthesized
  source 1..20: mol_type = other DNA
ttctgagcaacacttagact

SEQ ID NO: 35945 - DNA, 20 bp, synthetic construct
  misc_feature 1..20: note = chemically synthesized
  source 1..20: mol_type = other DNA
tctgagcaacacttagactg

SEQ ID NO: 35946 - DNA, 20 bp, synthetic construct
  misc_feature 1..20: note = chemically synthesized
  source 1..20: mol_type = other DNA
cctacttgaattcgctactt

SEQ ID NO: 35947 - DNA, 20 bp, synthetic construct
  misc_feature 1..20: note = chemically synthesized
  source 1..20: mol_type = other DNA
ctacttgaattcgctacttt

SEQ ID NO: 35948 - DNA, 20 bp, synthetic construct
  misc_feature 1..20: note = chemically synthesized
  source 1..20: mol_type = other DNA
aattcgctactttgggactc

SEQ ID NO: 35949 - DNA, 20 bp, synthetic construct
  misc_feature 1..20: note = chemically synthesized
  source 1..20: mol_type = other DNA
ctactttgggactcaagtct

SEQ ID NO: 35950 - DNA, 20 bp, synthetic construct
  misc_feature 1..20: note = chemically synthesized
  source 1..20: mol_type = other DNA
tactttgggactcaagtcta

SEQ ID NO: 35951 - DNA, 20 bp, synthetic construct
  misc_feature 1..20: note = chemically synthesized
  source 1..20: mol_type = other DNA
actttgggactcaagtctaa

SEQ ID NO: 35952 - DNA, 20 bp, synthetic construct
  misc_feature 1..20: note = chemically synthesized
  source 1..20: mol_type = other DNA
ggactcaagtctaagggact

SEQ ID NO: 35953 - DNA, 20 bp, synthetic construct
  misc_feature 1..20: note = chemically synthesized
  source 1..20: mol_type = other DNA
aagtctaagggactgagact

SEQ ID NO: 35954 - DNA, 20 bp, synthetic construct
  misc_feature 1..20: note = chemically synthesized
  source 1..20: mol_type = other DNA
ctaagggactgagactgaga

SEQ ID NO: 35955 - DNA, 20 bp, synthetic construct
  misc_feature 1..20: note = chemically synthesized
  source 1..20: mol_type = other DNA
taagggactgagactgagac

SEQ ID NO: 35956 - DNA, 20 bp, synthetic construct
  misc_feature 1..20: note = chemically synthesized
  source 1..20: mol_type = other DNA
agggactgagactgagacag

SEQ ID NO: 35957 - DNA, 20 bp, synthetic construct
  misc_feature 1..20: note = chemically synthesized
  source 1..20: mol_type = other DNA
ggactgagactgagacagga

SEQ ID NO: 35958 - DNA, 20 bp, synthetic construct
  misc_feature 1..20: note = chemically synthesized
  source 1..20: mol_type = other DNA
agactgagacaggagagcac

SEQ ID NO: 35959 - DNA, 20 bp, synthetic construct
  misc_feature 1..20: note = chemically synthesized
  source 1..20: mol_type = other DNA
ggagagcacaagactaactt

SEQ ID NO: 35960 - DNA, 20 bp, synthetic construct
  misc_feature 1..20: note = chemically synthesized
  source 1..20: mol_type = other DNA
cttgcaactgtcaatgcctc

SEQ ID NO: 35961 - DNA, 20 bp, synthetic construct
  misc_feature 1..20: note = chemically synthesized
  source 1..20: mol_type = other DNA
aatgcctccagccaaatgcc

SEQ ID NO: 35962 - DNA, 20 bp, synthetic construct
  misc_feature 1..20: note = chemically synthesized
  source 1..20: mol_type = other DNA
ctccagccaaatgcccagca

SEQ ID NO: 35963 - DNA, 20 bp, synthetic construct
  misc_feature 1..20: note = chemically synthesized
  source 1..20: mol_type = other DNA
ccagccaaatgcccagcaca

SEQ ID NO: 35964 - DNA, 20 bp, synthetic construct
  misc_feature 1..20: note = chemically synthesized
  source 1..20: mol_type = other DNA
caaatgcccagcacagagct

SEQ ID NO: 35965 - DNA, 20 bp, synthetic construct
  misc_feature 1..20: note = chemically synthesized
  source 1..20: mol_type = other DNA
atgcccagcacagagctcag

SEQ ID NO: 35966 - DNA, 20 bp, synthetic construct
  misc_feature 1..20: note = chemically synthesized
  source 1..20: mol_type = other DNA
gtggatttgactcttccatt

SEQ ID NO: 35967 - DNA, 20 bp, synthetic construct
  misc_feature 1..20: note = chemically synthesized
  source 1..20: mol_type = other DNA
ctcttccattcagaaactca

SEQ ID NO: 35968 - DNA, 20 bp, synthetic construct
  misc_feature 1..20: note = chemically synthesized
  source 1..20: mol_type = other DNA
gcacacttcattctcaatca

SEQ ID NO: 35969 - DNA, 20 bp, synthetic construct
  misc_feature 1..20: note = chemically synthesized
  source 1..20: mol_type = other DNA
cacacttcattctcaatcac

SEQ ID NO: 35970 - DNA, 20 bp, synthetic construct
  misc_feature 1..20: note = chemically synthesized
  source 1..20: mol_type = other DNA
acacttcattctcaatcaca

SEQ ID NO: 35971 - DNA, 20 bp, synthetic construct
  misc_feature 1..20: note = chemically synthesized
  source 1..20: mol_type = other DNA
acttcattctcaatcacagg

SEQ ID NO: 35972 - DNA, 20 bp, synthetic construct
  misc_feature 1..20: note = chemically synthesized
  source 1..20: mol_type = other DNA
cattctcaatcacagggagc

SEQ ID NO: 35973 - DNA, 20 bp, synthetic construct
  misc_feature 1..20: note = chemically synthesized
  source 1..20: mol_type = other DNA
attctcaatcacagggagct

SEQ ID NO: 35974 - DNA, 20 bp, synthetic construct
  misc_feature 1..20: note = chemically synthesized
  source 1..20: mol_type = other DNA
acagggagctgggcttcctt

SEQ ID NO: 35975 - DNA, 20 bp, synthetic construct
  misc_feature 1..20: note = chemically synthesized
  source 1..20: mol_type = other DNA
ggagctgggcttccttgaga

SEQ ID NO: 35976 - DNA, 20 bp, synthetic construct
  misc_feature 1..20: note = chemically synthesized
  source 1..20: mol_type = other DNA
ctgggcttccttgagaaagc

SEQ ID NO: 35977 - DNA, 20 bp, synthetic construct
  misc_feature 1..20: note = chemically synthesized
  source 1..20: mol_type = other DNA
ccttgagaaagccagcccca

SEQ ID NO: 35978 - DNA, 20 bp, synthetic construct
  misc_feature 1..20: note = chemically synthesized
  source 1..20: mol_type = other DNA
cttgagaaagccagccccaa

SEQ ID NO: 35979 - DNA, 20 bp, synthetic construct
  misc_feature 1..20: note = chemically synthesized
  source 1..20: mol_type = other DNA
caaaggtacctgtgtttaaa

SEQ ID NO: 35980 - DNA, 20 bp, synthetic construct
  misc_feature 1..20: note = chemically synthesized
  source 1..20: mol_type = other DNA
acctgtgtttaaaaagatga

SEQ ID NO: 35981 - DNA, 20 bp, synthetic construct
  misc_feature 1..20: note = chemically synthesized
  source 1..20: mol_type = other DNA
gtttaaaaagatgaaagaaa

SEQ ID NO: 35982 - DNA, 20 bp, synthetic construct
  misc_feature 1..20: note = chemically synthesized
  source 1..20: mol_type = other DNA
tacgtccacaacatgttcac

SEQ ID NO: 35983 - DNA, 20 bp, synthetic construct
  misc_feature 1..20: note = chemically synthesized
  source 1..20: mol_type = other DNA
acgtccacaacatgttcaca

SEQ ID NO: 35984 - DNA, 20 bp, synthetic construct
  misc_feature 1..20: note = chemically synthesized
  source 1..20: mol_type = other DNA
acatgttcacaaggaaactc

SEQ ID NO: 35985 - DNA, 20 bp, synthetic construct
  misc_feature 1..20: note = chemically synthesized
  source 1..20: mol_type = other DNA
tgttcacaaggaaactccag

SEQ ID NO: 35986 - DNA, 20 bp, synthetic construct
  misc_feature 1..20: note = chemically synthesized
  source 1..20: mol_type = other DNA
acaaggaaactccagaagaa

SEQ ID NO: 35987 - DNA, 20 bp, synthetic construct
  misc_feature 1..20: note = chemically synthesized
  source 1..20: mol_type = other DNA
aaggaaactccagaagaaca

SEQ ID NO: 35988 - DNA, 20 bp, synthetic construct
  misc_feature 1..20: note = chemically synthesized
  source 1..20: mol_type = other DNA
gaaactccagaagaacagag

SEQ ID NO: 35989 - DNA, 20 bp, synthetic construct
  misc_feature 1..20: note = chemically synthesized
  source 1..20: mol_type = other DNA
actccagaagaacagagcag

SEQ ID NO: 35990 - DNA, 20 bp, synthetic construct
  misc_feature 1..20: note = chemically synthesized
  source 1..20: mol_type = other DNA
gaagaacagagcagtggtga

SEQ ID NO: 35991 - DNA, 20 bp, synthetic construct
  misc_feature 1..20: note = chemically synthesized
  source 1..20: mol_type = other DNA
tggacctcctgtctgtccgt

SEQ ID NO: 35992 - DNA, 20 bp, synthetic construct
  misc_feature 1..20: note = chemically synthesized
  source 1..20: mol_type = other DNA
ggacctcctgtctgtccgtg

SEQ ID NO: 35993 - DNA, 20 bp, synthetic construct
  misc_feature 1..20: note = chemically synthesized
  source 1..20: mol_type = other DNA
cctgtctgtccgtgaggctg

SEQ ID NO: 35994 - DNA, 20 bp, synthetic construct
  misc_feature 1..20: note = chemically synthesized
  source 1..20: mol_type = other DNA
tccgtgaggctgtagaacac

SEQ ID NO: 35995 - DNA, 20 bp, synthetic construct
  misc_feature 1..20: note = chemically synthesized
  source 1..20: mol_type = other DNA
ccgtgaggctgtagaacaca

SEQ ID NO: 35996 - DNA, 20 bp, synthetic construct
  misc_feature 1..20: note = chemically synthesized
  source 1..20: mol_type = other DNA
tgaggctgtagaacacaagg

SEQ ID NO: 35997 - DNA, 20 bp, synthetic construct
  misc_feature 1..20: note = chemically synthesized
  source 1..20: mol_type = other DNA
aaggcagctcccaatgctgc

SEQ ID NO: 35998 - DNA, 20 bp, synthetic construct
  misc_feature 1..20: note = chemically synthesized
  source 1..20: mol_type = other DNA
ctgccagactctctgaaccc

SEQ ID NO: 35999 - DNA, 20 bp, synthetic construct
  misc_feature 1..20: note = chemically synthesized
  source 1..20: mol_type = other DNA
gccagactctctgaaccctg

SEQ ID NO: 36000 - DNA, 20 bp, synthetic construct
  misc_feature 1..20: note = chemically synthesized
  source 1..20: mol_type = other DNA
cagactctctgaaccctgga

SEQ ID NO: 36001 - DNA, 20 bp, synthetic construct
  misc_feature 1..20: note = chemically synthesized
  source 1..20: mol_type = other DNA
ggagagtgtaaacgtcatat

SEQ ID NO: 36002 - DNA, 20 bp, synthetic construct
  misc_feature 1..20: note = chemically synthesized
  source 1..20: mol_type = other DNA
agagtgtaaacgtcatataa

SEQ ID NO: 36003 - DNA, 20 bp, synthetic construct
  misc_feature 1..20: note = chemically synthesized
  source 1..20: mol_type = other DNA
gagtctatgttccaaaaacc

SEQ ID NO: 36004 - DNA, 20 bp, synthetic construct
  misc_feature 1..20: note = chemically synthesized
  source 1..20: mol_type = other DNA
aaacctggatttaacaatct

SEQ ID NO: 36005 - DNA, 20 bp, synthetic construct
  misc_feature 1..20: note = chemically synthesized
  source 1..20: mol_type = other DNA
taacaatctgagctttgtca

SEQ ID NO: 36006 - DNA, 20 bp, synthetic construct
  misc_feature 1..20: note = chemically synthesized
  source 1..20: mol_type = other DNA
agctttgtcatggtgctttg

SEQ ID NO: 36007 - DNA, 20 bp, synthetic construct
  misc_feature 1..20: note = chemically synthesized
  source 1..20: mol_type = other DNA
ttgtcatggtgctttgcggt

SEQ ID NO: 36008 - DNA, 20 bp, synthetic construct
  misc_feature 1..20: note = chemically synthesized
  source 1..20: mol_type = other DNA
tctttgcttttaaaaccata

SEQ ID NO: 36009 - DNA, 20 bp, synthetic construct
  misc_feature 1..20: note = chemically synthesized
  source 1..20: mol_type = other DNA
taaagaataatgtttaaatg

SEQ ID NO: 36010 - DNA, 20 bp, synthetic construct
  misc_feature 1..20: note = chemically synthesized
  source 1..20: mol_type = other DNA
aagaataatgtttaaatgta

SEQ ID NO: 36011 - DNA, 20 bp, synthetic construct
  misc_feature 1..20: note = chemically synthesized
  source 1..20: mol_type = other DNA
aatgtttaaatgtagagtct

SEQ ID NO: 36012 - DNA, 20 bp, synthetic construct
  misc_feature 1..20: note = chemically synthesized
  source 1..20: mol_type = other DNA
tgctattgtttttatatttt

SEQ ID NO: 36013 - DNA, 20 bp, synthetic construct
  misc_feature 1..20: note = chemically synthesized
  source 1..20: mol_type = other DNA
ttcactcaacattacataat

SEQ ID NO: 36014 - DNA, 20 bp, synthetic construct
  misc_feature 1..20: note = chemically synthesized
  source 1..20: mol_type = other DNA
attacataatgagttttgta

SEQ ID NO: 36015 - DNA, 20 bp, synthetic construct
  misc_feature 1..20: note = chemically synthesized
  source 1..20: mol_type = other DNA
tcttcataactaatatttta

SEQ ID NO: 36016 - DNA, 20 bp, synthetic construct
  misc_feature 1..20: note = chemically synthesized
  source 1..20: mol_type = other DNA
cttcataactaatattttaa

SEQ ID NO: 36017 - DNA, 20 bp, synthetic construct
  misc_feature 1..20: note = chemically synthesized
  source 1..20: mol_type = other DNA
tcataactaatattttaaag

SEQ ID NO: 36018 - DNA, 20 bp, synthetic construct
  misc_feature 1..20: note = chemically synthesized
  source 1..20: mol_type = other DNA
ataactaatattttaaagga

SEQ ID NO: 36019 - DNA, 20 bp, synthetic construct
  misc_feature 1..20: note = chemically synthesized
  source 1..20: mol_type = other DNA
aaggagagctactgattaat

SEQ ID NO: 36020 - DNA, 20 bp, synthetic construct
  misc_feature 1..20: note = chemically synthesized
  source 1..20: mol_type = other DNA
agctactgattaatgagcat

SEQ ID NO: 36021 - DNA, 20 bp, synthetic construct
  misc_feature 1..20: note = chemically synthesized
  source 1..20: mol_type = other DNA
gctactgattaatgagcatg

SEQ ID NO: 36022 - DNA, 20 bp, synthetic construct
  misc_feature 1..20: note = chemically synthesized
  source 1..20: mol_type = other DNA
aatgagcatgaggtttcctt

SEQ ID NO: 36023 - DNA, 20 bp, synthetic construct
  misc_feature 1..20: note = chemically synthesized
  source 1..20: mol_type = other DNA
atgagcatgaggtttccttt

SEQ ID NO: 36024 - DNA, 20 bp, synthetic construct
  misc_feature 1..20: note = chemically synthesized
  source 1..20: mol_type = other DNA
tgagcatgaggtttcctttg

SEQ ID NO: 36025 - DNA, 20 bp, synthetic construct
  misc_feature 1..20: note = chemically synthesized
  source 1..20: mol_type = other DNA
atgaggtttcctttggggat

SEQ ID NO: 36026 - DNA, 20 bp, synthetic construct
  misc_feature 1..20: note = chemically synthesized
  source 1..20: mol_type = other DNA
tgaggtttcctttggggatg

SEQ ID NO: 36027 - DNA, 20 bp, synthetic construct
  misc_feature 1..20: note = chemically synthesized
  source 1..20: mol_type = other DNA
tggggatgaggaaaatattc

SEQ ID NO: 36028 - DNA, 20 bp, synthetic construct
  misc_feature 1..20: note = chemically synthesized
  source 1..20: mol_type = other DNA
atattctggaaatatgatga

SEQ ID NO: 36029 - DNA, 20 bp, synthetic construct
  misc_feature 1..20: note = chemically synthesized
  source 1..20: mol_type = other DNA
tgaatgtactaaatgccact

SEQ ID NO: 36030 - DNA, 20 bp, synthetic construct
  misc_feature 1..20: note = chemically synthesized
  source 1..20: mol_type = other DNA
atgtactaaatgccacttgg

SEQ ID NO: 36031 - DNA, 20 bp, synthetic construct
  misc_feature 1..20: note = chemically synthesized
  source 1..20: mol_type = other DNA
ttggtggtaccctgcaaaaa

SEQ ID NO: 36032 - DNA, 20 bp, synthetic construct
  misc_feature 1..20: note = chemically synthesized
  source 1..20: mol_type = other DNA
ccctgcaaaaatggttaaaa

SEQ ID NO: 36033 - DNA, 20 bp, synthetic construct
  misc_feature 1..20: note = chemically synthesized
  source 1..20: mol_type = other DNA
tacattttattgcaataaaa

SEQ ID NO: 36034 - DNA, 20 bp, synthetic construct
  misc_feature 1..20: note = chemically synthesized
  source 1..20: mol_type = other DNA
tttattgcaataaaaaagaa

SEQ ID NO: 36035 - DNA, 20 bp, synthetic construct
  misc_feature 1..20: note = chemically synthesized
  source 1..20: mol_type = other DNA
aagaatagtcatcatttact

SEQ ID NO: 36036 - DNA, 20 bp, synthetic construct
  misc_feature 1..20: note = chemically synthesized
  source 1..20: mol_type = other DNA
ttactaagcattatcctttc

SEQ ID NO: 36037 - DNA, 20 bp, synthetic construct
  misc_feature 1..20: note = chemically synthesized
  source 1..20: mol_type = other DNA
tactaagcattatcctttcc

SEQ ID NO: 36038 - DNA, 20 bp, synthetic construct
  misc_feature 1..20: note = chemically synthesized
  source 1..20: mol_type = other DNA
gcattatcctttccaggcac

SEQ ID NO: 36039 - DNA, 20 bp, synthetic construct
  misc_feature 1..20: note = chemically synthesized
  source 1..20: mol_type = other DNA
ccaggcacaagcttataatg

SEQ ID NO: 36040 - DNA, 20 bp, synthetic construct
  misc_feature 1..20: note = chemically synthesized
  source 1..20: mol_type = other DNA
atctcacttcatcctcacaa

SEQ ID NO: 36041 - DNA, 20 bp, synthetic construct
  misc_feature 1..20: note = chemically synthesized
  source 1..20: mol_type = other DNA
ctcacaacagtcctatgaaa

SEQ ID NO: 36042 - DNA, 20 bp, synthetic construct
  misc_feature 1..20: note = chemically synthesized
  source 1..20: mol_type = other DNA
tcacaacagtcctatgaaac

SEQ ID NO: 36043 - DNA, 20 bp, synthetic construct
  misc_feature 1..20: note = chemically synthesized
  source 1..20: mol_type = other DNA
caacagtcctatgaaacagg

SEQ ID NO: 36044 - DNA, 20 bp, synthetic construct
  misc_feature 1..20: note = chemically synthesized
  source 1..20: mol_type = other DNA
gttccatcactcctgctcta

SEQ ID NO: 36045 - DNA, 20 bp, synthetic construct
  misc_feature 1..20: note = chemically synthesized
  source 1..20: mol_type = other DNA
atcactcctgctctacagtt

SEQ ID NO: 36046 - DNA, 20 bp, synthetic construct
  misc_feature 1..20: note = chemically synthesized
  source 1..20: mol_type = other DNA
tcactcctgctctacagtta

SEQ ID NO: 36047 - DNA, 20 bp, synthetic construct
  misc_feature 1..20: note = chemically synthesized
  source 1..20: mol_type = other DNA
gctctacagttaaggaaact

SEQ ID NO: 36048 - DNA, 20 bp, synthetic construct
  misc_feature 1..20: note = chemically synthesized
  source 1..20: mol_type = other DNA
ctctacagttaaggaaactg

SEQ ID NO: 36049 - DNA, 20 bp, synthetic construct
  misc_feature 1..20: note = chemically synthesized
  source 1..20: mol_type = other DNA
agttaaggaaactgaggtgt

SEQ ID NO: 36050 - DNA, 20 bp, synthetic construct
  misc_feature 1..20: note = chemically synthesized
  source 1..20: mol_type = other DNA
gttaaggaaactgaggtgta

SEQ ID NO: 36051 - DNA, 20 bp, synthetic construct
  misc_feature 1..20: note = chemically synthesized
  source 1..20: mol_type = other DNA
taaggaaactgaggtgtaag

SEQ ID NO: 36052 - DNA, 20 bp, synthetic construct
  misc_feature 1..20: note = chemically synthesized
  source 1..20: mol_type = other DNA
aaggaaactgaggtgtaagg

SEQ ID NO: 36053 - DNA, 20 bp, synthetic construct
  misc_feature 1..20: note = chemically synthesized
  source 1..20: mol_type = other DNA
tgaggtgtaaggaggttgtc

SEQ ID NO: 36054 - DNA, 20 bp, synthetic construct
  misc_feature 1..20: note = chemically synthesized
  source 1..20: mol_type = other DNA
gaggttgtctagttcaacct

SEQ ID NO: 36055 - DNA, 20 bp, synthetic construct
  misc_feature 1..20: note = chemically synthesized
  source 1..20: mol_type = other DNA
tgtctagttcaacctgagcc

SEQ ID NO: 36056 - DNA, 20 bp, synthetic construct
  misc_feature 1..20: note = chemically synthesized
  source 1..20: mol_type = other DNA
gtctagttcaacctgagcct

SEQ ID NO: 36057 - DNA, 20 bp, synthetic construct
  misc_feature 1..20: note = chemically synthesized
  source 1..20: mol_type = other DNA
tcaacctgagcctgggtctg

SEQ ID NO: 36058 - DNA, 20 bp, synthetic construct
  misc_feature 1..20: note = chemically synthesized
  source 1..20: mol_type = other DNA
aacctgagcctgggtctgcg

SEQ ID NO: 36059 - DNA, 20 bp, synthetic construct
  misc_feature 1..20: note = chemically synthesized
  source 1..20: mol_type = other DNA
tgcttcctccccgtgcgcgt

SEQ ID NO: 36060 - DNA, 20 bp, synthetic construct
  misc_feature 1..20: note = chemically synthesized
  source 1..20: mol_type = other DNA
cctccacatctttgttcata

SEQ ID NO: 36061 - DNA, 20 bp, synthetic construct
  misc_feature 1..20: note = chemically synthesized
  source 1..20: mol_type = other DNA
cttattccttaatattttct

SEQ ID NO: 36062 - DNA, 20 bp, synthetic construct
  misc_feature 1..20: note = chemically synthesized
  source 1..20: mol_type = other DNA
ccttaatattttctgagcct

SEQ ID NO: 36063 - DNA, 20 bp, synthetic construct
  misc_feature 1..20: note = chemically synthesized
  source 1..20: mol_type = other DNA
ctaagttcccataaattata

SEQ ID NO: 36064 - DNA, 20 bp, synthetic construct
  misc_feature 1..20: note = chemically synthesized
  source 1..20: mol_type = other DNA
aacactgccaatttattttc

SEQ ID NO: 36065 - DNA, 20 bp, synthetic construct
  misc_feature 1..20: note = chemically synthesized
  source 1..20: mol_type = other DNA
actgccaatttattttctag

SEQ ID NO: 36066 - DNA, 20 bp, synthetic construct
  misc_feature 1..20: note = chemically synthesized
  source 1..20: mol_type = other DNA
ctgccaatttattttctaga

SEQ ID NO: 36067 - DNA, 20 bp, synthetic construct
  misc_feature 1..20: note = chemically synthesized
  source 1..20: mol_type = other DNA
tattttctagaaggttatga

SEQ ID NO: 36068 - DNA, 20 bp, synthetic construct
  misc_feature 1..20: note = chemically synthesized
  source 1..20: mol_type = other DNA
atgacagtgtaaaatgtcac

SEQ ID NO: 36069 - DNA, 20 bp, synthetic construct
  misc_feature 1..20: note = chemically synthesized
  source 1..20: mol_type = other DNA
tcacttcaccacacttgtat

SEQ ID NO: 36070 - DNA, 20 bp, synthetic construct
  misc_feature 1..20: note = chemically synthesized
  source 1..20: mol_type = other DNA
agtgttcaatttttaaatat

SEQ ID NO: 36071 - DNA, 20 bp, synthetic construct
  misc_feature 1..20: note = chemically synthesized
  source 1..20: mol_type = other DNA
ttaaatattagctaatctaa

SEQ ID NO: 36072 - DNA, 20 bp, synthetic construct
  misc_feature 1..20: note = chemically synthesized
  source 1..20: mol_type = other DNA
taaatattagctaatctaac

SEQ ID NO: 36073 - DNA, 20 bp, synthetic construct
  misc_feature 1..20: note = chemically synthesized
  source 1..20: mol_type = other DNA
tttatacttctttgacaatt

SEQ ID NO: 36074 - DNA, 20 bp, synthetic construct
  misc_feature 1..20: note = chemically synthesized
  source 1..20: mol_type = other DNA
ttatacttctttgacaattt

SEQ ID NO: 36075 - DNA, 20 bp, synthetic construct
  misc_feature 1..20: note = chemically synthesized
  source 1..20: mol_type = other DNA
atacttctttgacaatttgg

SEQ ID NO: 36076 - DNA, 20 bp, synthetic construct
  misc_feature 1..20: note = chemically synthesized
  source 1..20: mol_type = other DNA
acttctttgacaatttggga

SEQ ID NO: 36077 - DNA, 20 bp, synthetic construct
  misc_feature 1..20: note = chemically synthesized
  source 1..20: mol_type = other DNA
tttgacaatttgggagagtg

SEQ ID NO: 36078 - DNA, 20 bp, synthetic construct
  misc_feature 1..20: note = chemically synthesized
  source 1..20: mol_type = other DNA
tgggagagtgaagattctcc

SEQ ID NO: 36079 - DNA, 20 bp, synthetic construct
  misc_feature 1..20: note = chemically synthesized
  source 1..20: mol_type = other DNA
ttttctttgccaaattcaaa

SEQ ID NO: 36080 - DNA, 20 bp, synthetic construct
  misc_feature 1..20: note = chemically synthesized
  source 1..20: mol_type = other DNA
tttgccaaattcaaatagaa

SEQ ID NO: 36081 - DNA, 20 bp, synthetic construct
  misc_feature 1..20: note = chemically synthesized
  source 1..20: mol_type = other DNA
tagaacggttgcaaaattgc

SEQ ID NO: 36082 - DNA, 20 bp, synthetic construct
  misc_feature 1..20: note = chemically synthesized
  source 1..20: mol_type = other DNA
gaacggttgcaaaattgcca

SEQ ID NO: 36083 - DNA, 20 bp, synthetic construct
  misc_feature 1..20: note = chemically synthesized
  source 1..20: mol_type = other DNA
aacggttgcaaaattgccag

SEQ ID NO: 36084 - DNA, 20 bp, synthetic construct
  misc_feature 1..20: note = chemically synthesized
  source 1..20: mol_type = other DNA
cagaggaaatgctgtttttc

SEQ ID NO: 36085 - DNA, 20 bp, synthetic construct
  misc_feature 1..20: note = chemically synthesized
  source 1..20: mol_type = other DNA
ggaaatgctgtttttccaga

SEQ ID NO: 36086 - DNA, 20 bp, synthetic construct
  misc_feature 1..20: note = chemically synthesized
  source 1..20: mol_type = other DNA
tttttccagatggacacacc

SEQ ID NO: 36087 - DNA, 20 bp, synthetic construct
  misc_feature 1..20: note = chemically synthesized
  source 1..20: mol_type = other DNA
ttttccagatggacacaccc

SEQ ID NO: 36088 - DNA, 20 bp, synthetic construct
  misc_feature 1..20: note = chemically synthesized
  source 1..20: mol_type = other DNA
tttccagatggacacaccca

SEQ ID NO: 36089 - DNA, 20 bp, synthetic construct
  misc_feature 1..20: note = chemically synthesized
  source 1..20: mol_type = other DNA
ggacacacccagggatgttt

SEQ ID NO: 36090 - DNA, 20 bp, synthetic construct
  misc_feature 1..20: note = chemically synthesized
  source 1..20: mol_type = other DNA
cagtgttctcacaaataatc

SEQ ID NO: 36091 - DNA, 20 bp, synthetic construct
  misc_feature 1..20: note = chemically synthesized
  source 1..20: mol_type = other DNA
atccagttttctaattttgc

SEQ ID NO: 36092 - DNA, 20 bp, synthetic construct
  misc_feature 1..20: note = chemically synthesized
  source 1..20: mol_type = other DNA
gttttctaattttgcaagcc

SEQ ID NO: 36093 - DNA, 20 bp, synthetic construct
  misc_feature 1..20: note = chemically synthesized
  source 1..20: mol_type = other DNA
tttgcaagcccagctttcat

SEQ ID NO: 36094 - DNA, 20 bp, synthetic construct
  misc_feature 1..20: note = chemically synthesized
  source 1..20: mol_type = other DNA
tgcaaaaatccttgctttgc

SEQ ID NO: 36095 - DNA, 20 bp, synthetic construct
  misc_feature 1..20: note = chemically synthesized
  source 1..20: mol_type = other DNA
aaatccttgctttgcgagca

SEQ ID NO: 36096 - DNA, 20 bp, synthetic construct
  misc_feature 1..20: note = chemically synthesized
  source 1..20: mol_type = other DNA
cttgctttgcgagcatggca

SEQ ID NO: 36097 - DNA, 20 bp, synthetic construct
  misc_feature 1..20: note = chemically synthesized
  source 1..20: mol_type = other DNA
ttgctttgcgagcatggcac

SEQ ID NO: 36098 - DNA, 20 bp, synthetic construct
  misc_feature 1..20: note = chemically synthesized
  source 1..20: mol_type = other DNA
tttgcgagcatggcacaggc

SEQ ID NO: 36099 - DNA, 20 bp, synthetic construct
  misc_feature 1..20: note = chemically synthesized
  source 1..20: mol_type = other DNA
tgcgagcatggcacaggcaa

SEQ ID NO: 36100 - DNA, 20 bp, synthetic construct
  misc_feature 1..20: note = chemically synthesized
  source 1..20: mol_type = other DNA
gcatggcacaggcaagagat

SEQ ID NO: 36101 - DNA, 20 bp, synthetic construct
  misc_feature 1..20: note = chemically synthesized
  source 1..20: mol_type = other DNA
catggcacaggcaagagatg

SEQ ID NO: 36102 - DNA, 20 bp, synthetic construct
  misc_feature 1..20: note = chemically synthesized
  source 1..20: mol_type = other DNA
gcactctctctttcttcccc

SEQ ID NO: 36103 - DNA, 20 bp, synthetic construct
  misc_feature 1..20: note = chemically synthesized
  source 1..20: mol_type = other DNA
actctctctttcttccccca

SEQ ID NO: 36104 - DNA, 20 bp, synthetic construct
  misc_feature 1..20: note = chemically synthesized
  source 1..20: mol_type = other DNA
ccagagcctttgactgcact

SEQ ID NO: 36105 - DNA, 20 bp, synthetic construct
  misc_feature 1..20: note = chemically synthesized
  source 1..20: mol_type = other DNA
tgcacttagatcattgactt

SEQ ID NO: 36106 - DNA, 20 bp, synthetic construct
  misc_feature 1..20: note = chemically synthesized
  source 1..20: mol_type = other DNA
ttagatcattgactttggtt

SEQ ID NO: 36107 - DNA, 20 bp, synthetic construct
  misc_feature 1..20: note = chemically synthesized
  source 1..20: mol_type = other DNA
ttcagaaacctgactgcatc

SEQ ID NO: 36108 - DNA, 20 bp, synthetic construct
  misc_feature 1..20: note = chemically synthesized
  source 1..20: mol_type = other DNA
cagaaacctgactgcatctg

SEQ ID NO: 36109 - DNA, 20 bp, synthetic construct
  misc_feature 1..20: note = chemically synthesized
  source 1..20: mol_type = other DNA
actgcatctggagttgacat

SEQ ID NO: 36110 - DNA, 20 bp, synthetic construct
  misc_feature 1..20: note = chemically synthesized
  source 1..20: mol_type = other DNA
gcatctggagttgacatgag

SEQ ID NO: 36111 - DNA, 20 bp, synthetic construct
  misc_feature 1..20: note = chemically synthesized
  source 1..20: mol_type = other DNA
tggagttgacatgagcagca

SEQ ID NO: 36112 - DNA, 20 bp, synthetic construct
  misc_feature 1..20: note = chemically synthesized
  source 1..20: mol_type = other DNA
agttgacatgagcagcatgg

SEQ ID NO: 36113 - DNA, 20 bp, synthetic construct
  misc_feature 1..20: note = chemically synthesized
  source 1..20: mol_type = other DNA
agcatggaagatgtttgtcc

SEQ ID NO: 36114 - DNA, 20 bp, synthetic construct
  misc_feature 1..20: note = chemically synthesized
  source 1..20: mol_type = other DNA
tttgtcccagcacctcactc

SEQ ID NO: 36115 - DNA, 20 bp, synthetic construct
  misc_feature 1..20: note = chemically synthesized
  source 1..20: mol_type = other DNA
tgtcccagcacctcactcca

SEQ ID NO: 36116 - DNA, 20 bp, synthetic construct
  misc_feature 1..20: note = chemically synthesized
  source 1..20: mol_type = other DNA
gtcccagcacctcactccag

SEQ ID NO: 36117 - DNA, 20 bp, synthetic construct
  misc_feature 1..20: note = chemically synthesized
  source 1..20: mol_type = other DNA
cagcacctcactccagaggc

SEQ ID NO: 36118 - DNA, 20 bp, synthetic construct
  misc_feature 1..20: note = chemically synthesized
  source 1..20: mol_type = other DNA
cctcactccagaggccagct

SEQ ID NO: 36119 - DNA, 20 bp, synthetic construct
  misc_feature 1..20: note = chemically synthesized
  source 1..20: mol_type = other DNA
gaggccagctcagctcaatc

SEQ ID NO: 36120 - DNA, 20 bp, synthetic construct
  misc_feature 1..20: note = chemically synthesized
  source 1..20: mol_type = other DNA
aggccagctcagctcaatct

SEQ ID NO: 36121 - DNA, 20 bp, synthetic construct
  misc_feature 1..20: note = chemically synthesized
  source 1..20: mol_type = other DNA
ccagctcagctcaatctggg

SEQ ID NO: 36122 - DNA, 20 bp, synthetic construct
  misc_feature 1..20: note = chemically synthesized
  source 1..20: mol_type = other DNA
agctcagctcaatctgggca

SEQ ID NO: 36123 - DNA, 20 bp, synthetic construct
  misc_feature 1..20: note = chemically synthesized
  source 1..20: mol_type = other DNA
atctgggcagagctgcatga

SEQ ID NO: 36124 - DNA, 20 bp, synthetic construct
  misc_feature 1..20: note = chemically synthesized
  source 1..20: mol_type = other DNA
tgggcagagctgcatgatgg

SEQ ID NO: 36125 - DNA, 20 bp, synthetic construct
  misc_feature 1..20: note = chemically synthesized
  source 1..20: mol_type = other DNA
gatggaagtttctgactacc

SEQ ID NO: 36126 - DNA, 20 bp, synthetic construct
  misc_feature 1..20: note = chemically synthesized
  source 1..20: mol_type = other DNA
agtttctgactaccaagcat

SEQ ID NO: 36127 - DNA, 20 bp, synthetic construct
  misc_feature 1..20: note = chemically synthesized
  source 1..20: mol_type = other DNA
gtttctgactaccaagcatc

SEQ ID NO: 36128 - DNA, 20 bp, synthetic construct
  misc_feature 1..20: note = chemically synthesized
  source 1..20: mol_type = other DNA
tctgactaccaagcatcggg

SEQ ID NO: 36129 - DNA, 20 bp, synthetic construct
  misc_feature 1..20: note = chemically synthesized
  source 1..20: mol_type = other DNA
tgactaccaagcatcgggca

SEQ ID NO: 36130 - DNA, 20 bp, synthetic construct
  misc_feature 1..20: note = chemically synthesized
  source 1..20: mol_type = other DNA
gactaccaagcatcgggcag

SEQ ID NO: 36131 - DNA, 20 bp, synthetic construct
  misc_feature 1..20: note = chemically synthesized
  source 1..20: mol_type = other DNA
actaccaagcatcgggcaga

SEQ ID NO: 36132 - DNA, 20 bp, synthetic construct
  misc_feature 1..20: note = chemically synthesized
  source 1..20: mol_type = other DNA
cgggcagagggtgcatcacc

SEQ ID NO: 36133 - DNA, 20 bp, synthetic construct
  misc_feature 1..20: note = chemically synthesized
  source 1..20: mol_type = other DNA
ggtgcatcacctggactaca

SEQ ID NO: 36134 - DNA, 20 bp, synthetic construct
  misc_feature 1..20: note = chemically synthesized
  source 1..20: mol_type = other DNA
cctggactacatagttgtgt

SEQ ID NO: 36135 - DNA, 20 bp, synthetic construct
  misc_feature 1..20: note = chemically synthesized
  source 1..20: mol_type = other DNA
ctggactacatagttgtgtg

SEQ ID NO: 36136 - DNA, 20 bp, synthetic construct
  misc_feature 1..20: note = chemically synthesized
  source 1..20: mol_type = other DNA
tggactacatagttgtgtga

SEQ ID NO: 36137 - DNA, 20 bp, synthetic construct
  misc_feature 1..20: note = chemically synthesized
  source 1..20: mol_type = other DNA
gactacatagttgtgtgagg

SEQ ID NO: 36138 - DNA, 20 bp, synthetic construct
  misc_feature 1..20: note = chemically synthesized
  source 1..20: mol_type = other DNA
tgtgagggagcaccgttctc

SEQ ID NO: 36139 - DNA, 20 bp, synthetic construct
  misc_feature 1..20: note = chemically synthesized
  source 1..20: mol_type = other DNA
ttctctagaatctgctattt

SEQ ID NO: 36140 - DNA, 20 bp, synthetic construct
  misc_feature 1..20: note = chemically synthesized
  source 1..20: mol_type = other DNA
ctagaatctgctatttgagc

SEQ ID NO: 36141 - DNA, 20 bp, synthetic construct
  misc_feature 1..20: note = chemically synthesized
  source 1..20: mol_type = other DNA
tagaatctgctatttgagca

SEQ ID NO: 36142 - DNA, 20 bp, synthetic construct
  misc_feature 1..20: note = chemically synthesized
  source 1..20: mol_type = other DNA
caaggcaaacatcctgataa

SEQ ID NO: 36143 - DNA, 20 bp, synthetic construct
  misc_feature 1..20: note = chemically synthesized
  source 1..20: mol_type = other DNA
taatggtgaaaacctaccgc

SEQ ID NO: 36144 - DNA, 20 bp, synthetic construct
  misc_feature 1..20: note = chemically synthesized
  source 1..20: mol_type = other DNA
gaaaacctaccgcaagttgc

SEQ ID NO: 36145 - DNA, 20 bp, synthetic construct
  misc_feature 1..20: note = chemically synthesized
  source 1..20: mol_type = other DNA
aaaacctaccgcaagttgcc

SEQ ID NO: 36146 - DNA, 20 bp, synthetic construct
  misc_feature 1..20: note = chemically synthesized
  source 1..20: mol_type = other DNA
cctaccgcaagttgccagga

SEQ ID NO: 36147 - DNA, 20 bp, synthetic construct
  misc_feature 1..20: note = chemically synthesized
  source 1..20: mol_type = other DNA
agttgccaggaaagttgatg

SEQ ID NO: 36148 - DNA, 20 bp, synthetic construct
  misc_feature 1..20: note = chemically synthesized
  source 1..20: mol_type = other DNA
ggaaagttgatgtggtctgc

SEQ ID NO: 36149 - DNA, 20 bp, synthetic construct
  misc_feature 1..20: note = chemically synthesized
  source 1..20: mol_type = other DNA
aagttgatgtggtctgcgag

SEQ ID NO: 36150 - DNA, 20 bp, synthetic construct
  misc_feature 1..20: note = chemically synthesized
  source 1..20: mol_type = other DNA
agttgatgtggtctgcgagt

SEQ ID NO: 36151 - DNA, 20 bp, synthetic construct
  misc_feature 1..20: note = chemically synthesized
  source 1..20: mol_type = other DNA
tgcgagtaggtgctgccatc

SEQ ID NO: 36152 - DNA, 20 bp, synthetic construct
  misc_feature 1..20: note = chemically synthesized
  source 1..20: mol_type = other DNA
gagtaggtgctgccatccag

SEQ ID NO: 36153 - DNA, 20 bp, synthetic construct
  misc_feature 1..20: note = chemically synthesized
  source 1..20: mol_type = other DNA
ctgccatccagtggccgaca

SEQ ID NO: 36154 - DNA, 20 bp, synthetic construct
  misc_feature 1..20: note = chemically synthesized
  source 1..20: mol_type = other DNA
gccatccagtggccgacata

SEQ ID NO: 36155 - DNA, 20 bp, synthetic construct
  misc_feature 1..20: note = chemically synthesized
  source 1..20: mol_type = other DNA
gacatagagatgtcatctct

SEQ ID NO: 36156 - DNA, 20 bp, synthetic construct
  misc_feature 1..20: note = chemically synthesized
  source 1..20: mol_type = other DNA
acatagagatgtcatctctg

SEQ ID NO: 36157 - DNA, 20 bp, synthetic construct
  misc_feature 1..20: note = chemically synthesized
  source 1..20: mol_type = other DNA
catagagatgtcatctctga

SEQ ID NO: 36158 - DNA, 20 bp, synthetic construct
  misc_feature 1..20: note = chemically synthesized
  source 1..20: mol_type = other DNA
agagatgtcatctctgaggg

SEQ ID NO: 36159 - DNA, 20 bp, synthetic construct
  misc_feature 1..20: note = chemically synthesized
  source 1..20: mol_type = other DNA
gagatgtcatctctgagggc

SEQ ID NO: 36160 - DNA, 20 bp, synthetic construct
  misc_feature 1..20: note = chemically synthesized
  source 1..20: mol_type = other DNA
atgtcatctctgagggcagg

SEQ ID NO: 36161 - DNA, 20 bp, synthetic construct
  misc_feature 1..20: note = chemically synthesized
  source 1..20: mol_type = other DNA
tgtcatctctgagggcaggt

SEQ ID NO: 36162 - DNA, 20 bp, synthetic construct
  misc_feature 1..20: note = chemically synthesized
  source 1..20: mol_type = other DNA
ctctgagggcaggtaggcca

SEQ ID NO: 36163 - DNA, 20 bp, synthetic construct
  misc_feature 1..20: note = chemically synthesized
  source 1..20: mol_type = other DNA
tctgagggcaggtaggccac

SEQ ID NO: 36164 - DNA, 20 bp, synthetic construct
  misc_feature 1..20: note = chemically synthesized
  source 1..20: mol_type = other DNA
gcaggtaggccacaggtgac

SEQ ID NO: 36165 - DNA, 20 bp, synthetic construct
  misc_feature 1..20: note = chemically synthesized
  source 1..20: mol_type = other DNA
aggtaggccacaggtgacaa

SEQ ID NO: 36166 - DNA, 20 bp, synthetic construct
  misc_feature 1..20: note = chemically synthesized
  source 1..20: mol_type = other DNA
ggtaggccacaggtgacaag

SEQ ID NO: 36167 - DNA, 20 bp, synthetic construct
  misc_feature 1..20: note = chemically synthesized
  source 1..20: mol_type = other DNA
cacaggtgacaagaggattg

SEQ ID NO: 36168 - DNA, 20 bp, synthetic construct
  misc_feature 1..20: note = chemically synthesized
  source 1..20: mol_type = other DNA
aggattgaagccctccctga

SEQ ID NO: 36169 - DNA, 20 bp, synthetic construct
  misc_feature 1..20: note = chemically synthesized
  source 1..20: mol_type = other DNA
ggattgaagccctccctgat

SEQ ID NO: 36170 - DNA, 20 bp, synthetic construct
  misc_feature 1..20: note = chemically synthesized
  source 1..20: mol_type = other DNA
gattgaagccctccctgatg

SEQ ID NO: 36171 - DNA, 20 bp, synthetic construct
  misc_feature 1..20: note = chemically synthesized
  source 1..20: mol_type = other DNA
agccctccctgatggggcct

SEQ ID NO: 36172 - DNA, 20 bp, synthetic construct
  misc_feature 1..20: note = chemically synthesized
  source 1..20: mol_type = other DNA
gccctccctgatggggcctt

SEQ ID NO: 36173 - DNA, 20 bp, synthetic construct
  misc_feature 1..20: note = chemically synthesized
  source 1..20: mol_type = other DNA
ccctccctgatggggccttg

SEQ ID NO: 36174 - DNA, 20 bp, synthetic construct
  misc_feature 1..20: note = chemically synthesized
  source 1..20: mol_type = other DNA
ctccctgatggggccttggg

SEQ ID NO: 36175 - DNA, 20 bp, synthetic construct
  misc_feature 1..20: note = chemically synthesized
  source 1..20: mol_type = other DNA
ccctgatggggccttgggga

SEQ ID NO: 36176 - DNA, 20 bp, synthetic construct
  misc_feature 1..20: note = chemically synthesized
  source 1..20: mol_type = other DNA
cctgatggggccttggggag

SEQ ID NO: 36177 - DNA, 20 bp, synthetic construct
  misc_feature 1..20: note = chemically synthesized
  source 1..20: mol_type = other DNA
ctgatggggccttggggaga

SEQ ID NO: 36178 - DNA, 20 bp, synthetic construct
  misc_feature 1..20: note = chemically synthesized
  source 1..20: mol_type = other DNA
atggggccttggggagaggg

SEQ ID NO: 36179 - DNA, 20 bp, synthetic construct
  misc_feature 1..20: note = chemically synthesized
  source 1..20: mol_type = other DNA
gggccttggggagagggcag

SEQ ID NO: 36180 - DNA, 20 bp, synthetic construct
  misc_feature 1..20: note = chemically synthesized
  source 1..20: mol_type = other DNA
ggccttggggagagggcagc

SEQ ID NO: 36181 - DNA, 20 bp, synthetic construct
  misc_feature 1..20: note = chemically synthesized
  source 1..20: mol_type = other DNA
gccttggggagagggcagca

SEQ ID NO: 36182 - DNA, 20 bp, synthetic construct
  misc_feature 1..20: note = chemically synthesized
  source 1..20: mol_type = other DNA
tggggagagggcagcagggt

SEQ ID NO: 36183 - DNA, 20 bp, synthetic construct
  misc_feature 1..20: note = chemically synthesized
  source 1..20: mol_type = other DNA
agagggcagcagggtaagtc

SEQ ID NO: 36184 - DNA, 20 bp, synthetic construct
  misc_feature 1..20: note = chemically synthesized
  source 1..20: mol_type = other DNA
gggcagcagggtaagtccag

SEQ ID NO: 36185 - DNA, 20 bp, synthetic construct
  misc_feature 1..20: note = chemically synthesized
  source 1..20: mol_type = other DNA
cagcagggtaagtccagcgg

SEQ ID NO: 36186 - DNA, 20 bp, synthetic construct
  misc_feature 1..20: note = chemically synthesized
  source 1..20: mol_type = other DNA
agcagggtaagtccagcggc

SEQ ID NO: 36187 - DNA, 20 bp, synthetic construct
  misc_feature 1..20: note = chemically synthesized
  source 1..20: mol_type = other DNA
ggtaagtccagcggcaggat

SEQ ID NO: 36188 - DNA, 20 bp, synthetic construct
  misc_feature 1..20: note = chemically synthesized
  source 1..20: mol_type = other DNA
caggatcagtccattgattg

SEQ ID NO: 36189 - DNA, 20 bp, synthetic construct
  misc_feature 1..20: note = chemically synthesized
  source 1..20: mol_type = other DNA
attgtggatgacgactgacc

SEQ ID NO: 36190 - DNA, 20 bp, synthetic construct
  misc_feature 1..20: note = chemically synthesized
  source 1..20: mol_type = other DNA
actgacctggaaaatcccct

SEQ ID NO: 36191 - DNA, 20 bp, synthetic construct
  misc_feature 1..20: note = chemically synthesized
  source 1..20: mol_type = other DNA
ccaaactctgcatttgatcc

SEQ ID NO: 36192 - DNA, 20 bp, synthetic construct
  misc_feature 1..20: note = chemically synthesized
  source 1..20: mol_type = other DNA
actctgcatttgatccaagt

SEQ ID NO: 36193 - DNA, 20 bp, synthetic construct
  misc_feature 1..20: note = chemically synthesized
  source 1..20: mol_type = other DNA
ctctgcatttgatccaagtc

SEQ ID NO: 36194 - DNA, 20 bp, synthetic construct
  misc_feature 1..20: note = chemically synthesized
  source 1..20: mol_type = other DNA
tctgcatttgatccaagtca

SEQ ID NO: 36195 - DNA, 20 bp, synthetic construct
  misc_feature 1..20: note = chemically synthesized
  source 1..20: mol_type = other DNA
gatccaagtcagggaacacc

SEQ ID NO: 36196 - DNA, 20 bp, synthetic construct
  misc_feature 1..20: note = chemically synthesized
  source 1..20: mol_type = other DNA
agggaacacctggaaacatg

SEQ ID NO: 36197 - DNA, 20 bp, synthetic construct
  misc_feature 1..20: note = chemically synthesized
  source 1..20: mol_type = other DNA
gggaacacctggaaacatga

SEQ ID NO: 36198 - DNA, 20 bp, synthetic construct
  misc_feature 1..20: note = chemically synthesized
  source 1..20: mol_type = other DNA
ggaacacctggaaacatgaa

SEQ ID NO: 36199 - DNA, 20 bp, synthetic construct
  misc_feature 1..20: note = chemically synthesized
  source 1..20: mol_type = other DNA
gaacacctggaaacatgaag

SEQ ID NO: 36200 - DNA, 20 bp, synthetic construct
  misc_feature 1..20: note = chemically synthesized
  source 1..20: mol_type = other DNA
acacctggaaacatgaaggg

SEQ ID NO: 36201 - DNA, 20 bp, synthetic construct
  misc_feature 1..20: note = chemically synthesized
  source 1..20: mol_type = other DNA
acctggaaacatgaagggga

SEQ ID NO: 36202 - DNA, 20 bp, synthetic construct
  misc_feature 1..20: note = chemically synthesized
  source 1..20: mol_type = other DNA
tggaaacatgaaggggagag

SEQ ID NO: 36203 - DNA, 20 bp, synthetic construct
  misc_feature 1..20: note = chemically synthesized
  source 1..20: mol_type = other DNA
ggaaacatgaaggggagagc

SEQ ID NO: 36204 - DNA, 20 bp, synthetic construct
  misc_feature 1..20: note = chemically synthesized
  source 1..20: mol_type = other DNA
gaaaactttgacctccctct

SEQ ID NO: 36205 - DNA, 20 bp, synthetic construct
  misc_feature 1..20: note = chemically synthesized
  source 1..20: mol_type = other DNA
aaactttgacctccctctca

SEQ ID NO: 36206 - DNA, 20 bp, synthetic construct
  misc_feature 1..20: note = chemically synthesized
  source 1..20: mol_type = other DNA
aactttgacctccctctcag

SEQ ID NO: 36207 - DNA, 20 bp, synthetic construct
  misc_feature 1..20: note = chemically synthesized
  source 1..20: mol_type = other DNA
tgacctccctctcagaggct

SEQ ID NO: 36208 - DNA, 20 bp, synthetic construct
  misc_feature 1..20: note = chemically synthesized
  source 1..20: mol_type = other DNA
ctgatgtcattattgacatg

SEQ ID NO: 36209 - DNA, 20 bp, synthetic construct
  misc_feature 1..20: note = chemically synthesized
  source 1..20: mol_type = other DNA
acatgtagaaaattgatgaa

SEQ ID NO: 36210 - DNA, 20 bp, synthetic construct
  misc_feature 1..20: note = chemically synthesized
  source 1..20: mol_type = other DNA
catgtagaaaattgatgaac

SEQ ID NO: 36211 - DNA, 20 bp, synthetic construct
  misc_feature 1..20: note = chemically synthesized
  source 1..20: mol_type = other DNA
gaaaattgatgaacaggcct

SEQ ID NO: 36212 - DNA, 20 bp, synthetic construct
  misc_feature 1..20: note = chemically synthesized
  source 1..20: mol_type = other DNA
caggcctgagttatgttttg

SEQ ID NO: 36213 - DNA, 20 bp, synthetic construct
  misc_feature 1..20: note = chemically synthesized
  source 1..20: mol_type = other DNA
ttatgttttgtggcacctca

SEQ ID NO: 36214 - DNA, 20 bp, synthetic construct
  misc_feature 1..20: note = chemically synthesized
  source 1..20: mol_type = other DNA
ttttgtggcacctcatggtc

SEQ ID NO: 36215 - DNA, 20 bp, synthetic construct
  misc_feature 1..20: note = chemically synthesized
  source 1..20: mol_type = other DNA
gtggcacctcatggtctagt

SEQ ID NO: 36216 - DNA, 20 bp, synthetic construct
  misc_feature 1..20: note = chemically synthesized
  source 1..20: mol_type = other DNA
catggtctagttagtgttct

SEQ ID NO: 36217 - DNA, 20 bp, synthetic construct
  misc_feature 1..20: note = chemically synthesized
  source 1..20: mol_type = other DNA
tgttctgagaatcattttct

SEQ ID NO: 36218 - DNA, 20 bp, synthetic construct
  misc_feature 1..20: note = chemically synthesized
  source 1..20: mol_type = other DNA
tctgagaatcattttctcag

SEQ ID NO: 36219 - DNA, 20 bp, synthetic construct
  misc_feature 1..20: note = chemically synthesized
  source 1..20: mol_type = other DNA
tcattttctcagtggacctg

SEQ ID NO: 36220 - DNA, 20 bp, synthetic construct
  misc_feature 1..20: note = chemically synthesized
  source 1..20: mol_type = other DNA
cattttctcagtggacctgc

SEQ ID NO: 36221 - DNA, 20 bp, synthetic construct
  misc_feature 1..20: note = chemically synthesized
  source 1..20: mol_type = other DNA
ttctcagtggacctgcaggt

SEQ ID NO: 36222 - DNA, 20 bp, synthetic construct
  misc_feature 1..20: note = chemically synthesized
  source 1..20: mol_type = other DNA
agtggacctgcaggtgagac

SEQ ID NO: 36223 - DNA, 20 bp, synthetic construct
  misc_feature 1..20: note = chemically synthesized
  source 1..20: mol_type = other DNA
gtggacctgcaggtgagacc

SEQ ID NO: 36224 - DNA, 20 bp, synthetic construct
  misc_feature 1..20: note = chemically synthesized
  source 1..20: mol_type = other DNA
acctgcaggtgagaccaggc

SEQ ID NO: 36225 - DNA, 20 bp, synthetic construct
  misc_feature 1..20: note = chemically synthesized
  source 1..20: mol_type = other DNA
cctgcaggtgagaccaggcg

SEQ ID NO: 36226 - DNA, 20 bp, synthetic construct
  misc_feature 1..20: note = chemically synthesized
  source 1..20: mol_type = other DNA
gcaggtgagaccaggcgagg

SEQ ID NO: 36227 - DNA, 20 bp, synthetic construct
  misc_feature 1..20: note = chemically synthesized
  source 1..20: mol_type = other DNA
ggtgagaccaggcgaggcag

SEQ ID NO: 36228 - DNA, 20 bp, synthetic construct
  misc_feature 1..20: note = chemically synthesized
  source 1..20: mol_type = other DNA
gaccaggcgaggcagaagcc

SEQ ID NO: 36229 - DNA, 20 bp, synthetic construct
  misc_feature 1..20: note = chemically synthesized
  source 1..20: mol_type = other DNA
caggcgaggcagaagcctag

SEQ ID NO: 36230 - DNA, 20 bp, synthetic construct
  misc_feature 1..20: note = chemically synthesized
  source 1..20: mol_type = other DNA
aggcgaggcagaagcctagt

SEQ ID NO: 36231 - DNA, 20 bp, synthetic construct
  misc_feature 1..20: note = chemically synthesized
  source 1..20: mol_type = other DNA
ggcgaggcagaagcctagtg

SEQ ID NO: 36232 - DNA, 20 bp, synthetic construct
  misc_feature 1..20: note = chemically synthesized
  source 1..20: mol_type = other DNA
gcgaggcagaagcctagtgg

SEQ ID NO: 36233 - DNA, 20 bp, synthetic construct
  misc_feature 1..20: note = chemically synthesized
  source 1..20: mol_type = other DNA
ggcagaagcctagtggggga

SEQ ID NO: 36234 - DNA, 20 bp, synthetic construct
  misc_feature 1..20: note = chemically synthesized
  source 1..20: mol_type = other DNA
agaagcctagtgggggatgg

SEQ ID NO: 36235 - DNA, 20 bp, synthetic construct
  misc_feature 1..20: note = chemically synthesized
  source 1..20: mol_type = other DNA
gcctagtgggggatggtggt

SEQ ID NO: 36236 - DNA, 20 bp, synthetic construct
  misc_feature 1..20: note = chemically synthesized
  source 1..20: mol_type = other DNA
ggatggtggttagaaatgtg

SEQ ID NO: 36237 - DNA, 20 bp, synthetic construct
  misc_feature 1..20: note = chemically synthesized
  source 1..20: mol_type = other DNA
ggtggttagaaatgtgtgga

SEQ ID NO: 36238 - DNA, 20 bp, synthetic construct
  misc_feature 1..20: note = chemically synthesized
  source 1..20: mol_type = other DNA
tagaaatgtgtggatggttg

SEQ ID NO: 36239 - DNA, 20 bp, synthetic construct
  misc_feature 1..20: note = chemically synthesized
  source 1..20: mol_type = other DNA
agaaatgtgtggatggttgt

SEQ ID NO: 36240 - DNA, 20 bp, synthetic construct
  misc_feature 1..20: note = chemically synthesized
  source 1..20: mol_type = other DNA
gaaatgtgtggatggttgtg

SEQ ID NO: 36241 - DNA, 20 bp, synthetic construct
  misc_feature 1..20: note = chemically synthesized
  source 1..20: mol_type = other DNA
atgtgtggatggttgtgggg

SEQ ID NO: 36242 - DNA, 20 bp, synthetic construct
  misc_feature 1..20: note = chemically synthesized
  source 1..20: mol_type = other DNA
tgtggatggttgtggggcag

SEQ ID NO: 36243 - DNA, 20 bp, synthetic construct
  misc_feature 1..20: note = chemically synthesized
  source 1..20: mol_type = other DNA
tggttgtggggcagaagaaa

SEQ ID NO: 36244 - DNA, 20 bp, synthetic construct
  misc_feature 1..20: note = chemically synthesized
  source 1..20: mol_type = other DNA
tgtggggcagaagaaacagc

SEQ ID NO: 36245 - DNA, 20 bp, synthetic construct
  misc_feature 1..20: note = chemically synthesized
  source 1..20: mol_type = other DNA
ggggcagaagaaacagcaag

SEQ ID NO: 36246 - DNA, 20 bp, synthetic construct
  misc_feature 1..20: note = chemically synthesized
  source 1..20: mol_type = other DNA
gggcagaagaaacagcaagt

SEQ ID NO: 36247 - DNA, 20 bp, synthetic construct
  misc_feature 1..20: note = chemically synthesized
  source 1..20: mol_type = other DNA
aagaaacagcaagtaggctc

SEQ ID NO: 36248 - DNA, 20 bp, synthetic construct
  misc_feature 1..20: note = chemically synthesized
  source 1..20: mol_type = other DNA
agaaacagcaagtaggctct

SEQ ID NO: 36249 - DNA, 20 bp, synthetic construct
  misc_feature 1..20: note = chemically synthesized
  source 1..20: mol_type = other DNA
acagcaagtaggctctgggc

SEQ ID NO: 36250 - DNA, 20 bp, synthetic construct
  misc_feature 1..20: note = chemically synthesized
  source 1..20: mol_type = other DNA
gctctgggccagctacaaac

SEQ ID NO: 36251 - DNA, 20 bp, synthetic construct
  misc_feature 1..20: note = chemically synthesized
  source 1..20: mol_type = other DNA
atgatgtctactgatgatga

SEQ ID NO: 36252 - DNA, 20 bp, synthetic construct
  misc_feature 1..20: note = chemically synthesized
  source 1..20: mol_type = other DNA
tctactgatgatgatagtga

SEQ ID NO: 36253 - DNA, 20 bp, synthetic construct
  misc_feature 1..20: note = chemically synthesized
  source 1..20: mol_type = other DNA
actgatgatgatagtgatgg

SEQ ID NO: 36254 - DNA, 20 bp, synthetic construct
  misc_feature 1..20: note = chemically synthesized
  source 1..20: mol_type = other DNA
gatgatgatagtgatggtgg

SEQ ID NO: 36255 - DNA, 20 bp, synthetic construct
  misc_feature 1..20: note = chemically synthesized
  source 1..20: mol_type = other DNA
gatgatagtgatggtggtgg

SEQ ID NO: 36256 - DNA, 20 bp, synthetic construct
  misc_feature 1..20: note = chemically synthesized
  source 1..20: mol_type = other DNA
gatagtgatggtggtggtgg

SEQ ID NO: 36257 - DNA, 20 bp, synthetic construct
  misc_feature 1..20: note = chemically synthesized
  source 1..20: mol_type = other DNA
gatggtggtggtggtggtga

SEQ ID NO: 36258 - DNA, 20 bp, synthetic construct
  misc_feature 1..20: note = chemically synthesized
  source 1..20: mol_type = other DNA
ggtggtggtggtggtgatgg

SEQ ID NO: 36259 - DNA, 20 bp, synthetic construct
  misc_feature 1..20: note = chemically synthesized
  source 1..20: mol_type = other DNA
ggtggtggtggtgatggtgg

SEQ ID NO: 36260 - DNA, 20 bp, synthetic construct
  misc_feature 1..20: note = chemically synthesized
  source 1..20: mol_type = other DNA
ggtggtggtgatggtggtgg

SEQ ID NO: 36261 - DNA, 20 bp, synthetic construct
  misc_feature 1..20: note = chemically synthesized
  source 1..20: mol_type = other DNA
ggtggtggtaataattgtga

SEQ ID NO: 36262 - DNA, 20 bp, synthetic construct
  misc_feature 1..20: note = chemically synthesized
  source 1..20: mol_type = other DNA
ggtggtaataattgtgatgg

SEQ ID NO: 36263 - DNA, 20 bp, synthetic construct
  misc_feature 1..20: note = chemically synthesized
  source 1..20: mol_type = other DNA
ggtaataattgtgatggtgg

SEQ ID NO: 36264 - DNA, 20 bp, synthetic construct
  misc_feature 1..20: note = chemically synthesized
  source 1..20: mol_type = other DNA
tggtggtggaatgatgatga

SEQ ID NO: 36265 - DNA, 20 bp, synthetic construct
  misc_feature 1..20: note = chemically synthesized
  source 1..20: mol_type = other DNA
tggtggaatgatgatgatgg

SEQ ID NO: 36266 - DNA, 20 bp, synthetic construct
  misc_feature 1..20: note = chemically synthesized
  source 1..20: mol_type = other DNA
tggaatgatgatgatggtgg

SEQ ID NO: 36267 - DNA, 20 bp, synthetic construct
  misc_feature 1..20: note = chemically synthesized
  source 1..20: mol_type = other DNA
aatgatgatgatggtggtgg

SEQ ID NO: 36268 - DNA, 20 bp, synthetic construct
  misc_feature 1..20: note = chemically synthesized
  source 1..20: mol_type = other DNA
atgatgatgatggtggtggt

SEQ ID NO: 36269 - DNA, 20 bp, synthetic construct
  misc_feature 1..20: note = chemically synthesized
  source 1..20: mol_type = other DNA
atgatgatggtggtggtggg

SEQ ID NO: 36270 - DNA, 20 bp, synthetic construct
  misc_feature 1..20: note = chemically synthesized
  source 1..20: mol_type = other DNA
gtggtggtgggtagtaatga

SEQ ID NO: 36271 - DNA, 20 bp, synthetic construct
  misc_feature 1..20: note = chemically synthesized
  source 1..20: mol_type = other DNA
gtgggtagtaatgatggtgt

SEQ ID NO: 36272 - DNA, 20 bp, synthetic construct
  misc_feature 1..20: note = chemically synthesized
  source 1..20: mol_type = other DNA
agtaatgatggtgttggtga

SEQ ID NO: 36273 - DNA, 20 bp, synthetic construct
  misc_feature 1..20: note = chemically synthesized
  source 1..20: mol_type = other DNA
aatgatggtgttggtgatgg

SEQ ID NO: 36274 - DNA, 20 bp, synthetic construct
  misc_feature 1..20: note = chemically synthesized
  source 1..20: mol_type = other DNA
gatggtgttggtgatggtgg

SEQ ID NO: 36275 - DNA, 20 bp, synthetic construct
  misc_feature 1..20: note = chemically synthesized
  source 1..20: mol_type = other DNA
ggtgttggtgatggtggtag

SEQ ID NO: 36276 - DNA, 20 bp, synthetic construct
  misc_feature 1..20: note = chemically synthesized
  source 1..20: mol_type = other DNA
ggtgatggtggtagtggtcg

SEQ ID NO: 36277 - DNA, 20 bp, synthetic construct
  misc_feature 1..20: note = chemically synthesized
  source 1..20: mol_type = other DNA
ggtggtagtggtcgtggtga

SEQ ID NO: 36278 - DNA, 20 bp, synthetic construct
  misc_feature 1..20: note = chemically synthesized
  source 1..20: mol_type = other DNA
agtggtcgtggtgatggtga

SEQ ID NO: 36279 - DNA, 20 bp, synthetic construct
  misc_feature 1..20: note = chemically synthesized
  source 1..20: mol_type = other DNA
cgtggtgatggtgatagtga

SEQ ID NO: 36280 - DNA, 20 bp, synthetic construct
  misc_feature 1..20: note = chemically synthesized
  source 1..20: mol_type = other DNA
gatggtgatagtgatagtga

SEQ ID NO: 36281 - DNA, 20 bp, synthetic construct
  misc_feature 1..20: note = chemically synthesized
  source 1..20: mol_type = other DNA
ggtgatagtgatagtgatgg

SEQ ID NO: 36282 - DNA, 20 bp, synthetic construct
  misc_feature 1..20: note = chemically synthesized
  source 1..20: mol_type = other DNA
gatagtgatagtgatggtgg

SEQ ID NO: 36283 - DNA, 20 bp, synthetic construct
  misc_feature 1..20: note = chemically synthesized
  source 1..20: mol_type = other DNA
ggtggtaatgataatgctaa

SEQ ID NO: 36284 - DNA, 20 bp, synthetic construct
  misc_feature 1..20: note = chemically synthesized
  source 1..20: mol_type = other DNA
ggtaatgataatgctaatgg

SEQ ID NO: 36285 - DNA, 20 bp, synthetic construct
  misc_feature 1..20: note = chemically synthesized
  source 1..20: mol_type = other DNA
aatgataatgctaatggtgg

SEQ ID NO: 36286 - DNA, 20 bp, synthetic construct
  misc_feature 1..20: note = chemically synthesized
  source 1..20: mol_type = other DNA
gataatgattatcatgatga

SEQ ID NO: 36287 - DNA, 20 bp, synthetic construct
  misc_feature 1..20: note = chemically synthesized
  source 1..20: mol_type = other DNA
aatgattatcatgatgatag

SEQ ID NO: 36288 - DNA, 20 bp, synthetic construct
  misc_feature 1..20: note = chemically synthesized
  source 1..20: mol_type = other DNA
gattatcatgatgatagcgg

SEQ ID NO: 36289 - DNA, 20 bp, synthetic construct
  misc_feature 1..20: note = chemically synthesized
  source 1..20: mol_type = other DNA
catgatgatagcggtggtga

SEQ ID NO: 36290 - DNA, 20 bp, synthetic construct
  misc_feature 1..20: note = chemically synthesized
  source 1..20: mol_type = other DNA
gatagcggtggtgatggtga

SEQ ID NO: 36291 - DNA, 20 bp, synthetic construct
  misc_feature 1..20: note = chemically synthesized
  source 1..20: mol_type = other DNA
gatggtgatggtgatgataa

SEQ ID NO: 36292 - DNA, 20 bp, synthetic construct
  misc_feature 1..20: note = chemically synthesized
  source 1..20: mol_type = other DNA
gatggtgatgataatggtga

SEQ ID NO: 36293 - DNA, 20 bp, synthetic construct
  misc_feature 1..20: note = chemically synthesized
  source 1..20: mol_type = other DNA
ggtgatgataatggtgatgg

SEQ ID NO: 36294 - DNA, 20 bp, synthetic construct
  misc_feature 1..20: note = chemically synthesized
  source 1..20: mol_type = other DNA
gatgataatggtgatggtgg

SEQ ID NO: 36295 - DNA, 20 bp, synthetic construct
  misc_feature 1..20: note = chemically synthesized
  source 1..20: mol_type = other DNA
tggtggtagaatgatgatga

SEQ ID NO: 36296 - DNA, 20 bp, synthetic construct
  misc_feature 1..20: note = chemically synthesized
  source 1..20: mol_type = other DNA
tagaatgatgatgatggtga

SEQ ID NO: 36297 - DNA, 20 bp, synthetic construct
  misc_feature 1..20: note = chemically synthesized
  source 1..20: mol_type = other DNA
aatgatgatgatggtgatgg

SEQ ID NO: 36298 - DNA, 20 bp, synthetic construct
  misc_feature 1..20: note = chemically synthesized
  source 1..20: mol_type = other DNA
gatgatgatggtgatggtgg

SEQ ID NO: 36299 - DNA, 20 bp, synthetic construct
  misc_feature 1..20: note = chemically synthesized
  source 1..20: mol_type = other DNA
gatgatggtgatggtggtgg

SEQ ID NO: 36300 - DNA, 20 bp, synthetic construct
  misc_feature 1..20: note = chemically synthesized
  source 1..20: mol_type = other DNA
gatggtgatggtggtggtgg

SEQ ID NO: 36301 - DNA, 20 bp, synthetic construct
  misc_feature 1..20: note = chemically synthesized
  source 1..20: mol_type = other DNA
ggtgatggtggtggtggtgg

SEQ ID NO: 36302 - DNA, 20 bp, synthetic construct
  misc_feature 1..20: note = chemically synthesized
  source 1..20: mol_type = other DNA
ggtggtggtagtaatgatga

SEQ ID NO: 36303 - DNA, 20 bp, synthetic construct
  misc_feature 1..20: note = chemically synthesized
  source 1..20: mol_type = other DNA
ggtggtagtaatgatgatgg

SEQ ID NO: 36304 - DNA, 20 bp, synthetic construct
  misc_feature 1..20: note = chemically synthesized
  source 1..20: mol_type = other DNA
ggtagtaatgatgatggtgg

SEQ ID NO: 36305 - DNA, 20 bp, synthetic construct
  misc_feature 1..20: note = chemically synthesized
  source 1..20: mol_type = other DNA
atggtggtggtgatgatgtt

SEQ ID NO: 36306 - DNA, 20 bp, synthetic construct
  misc_feature 1..20: note = chemically synthesized
  source 1..20: mol_type = other DNA
tggtggtggtgatgatgttg

SEQ ID NO: 36307 - DNA, 20 bp, synthetic construct
  misc_feature 1..20: note = chemically synthesized
  source 1..20: mol_type = other DNA
ggtggtggtgatgatgttga

SEQ ID NO: 36308 - DNA, 20 bp, synthetic construct
  misc_feature 1..20: note = chemically synthesized
  source 1..20: mol_type = other DNA
gatgttgagggtgatgataa

SEQ ID NO: 36309 - DNA, 20 bp, synthetic construct
  misc_feature 1..20: note = chemically synthesized
  source 1..20: mol_type = other DNA
gagggtgatgataatagtga

SEQ ID NO: 36310 - DNA, 20 bp, synthetic construct
  misc_feature 1..20: note = chemically synthesized
  source 1..20: mol_type = other DNA
ggtgatgataatagtgacag

SEQ ID NO: 36311 - DNA, 20 bp, synthetic construct
  misc_feature 1..20: note = chemically synthesized
  source 1..20: mol_type = other DNA
gatgataatagtgacagtgg

SEQ ID NO: 36312 - DNA, 20 bp, synthetic construct
  misc_feature 1..20: note = chemically synthesized
  source 1..20: mol_type = other DNA
gataatagtgacagtggtgg

SEQ ID NO: 36313 - DNA, 20 bp, synthetic construct
  misc_feature 1..20: note = chemically synthesized
  source 1..20: mol_type = other DNA
agtggtggtggtaatgataa

SEQ ID NO: 36314 - DNA, 20 bp, synthetic construct
  misc_feature 1..20: note = chemically synthesized
  source 1..20: mol_type = other DNA
ggtggtaatgataatggtga

SEQ ID NO: 36315 - DNA, 20 bp, synthetic construct
  misc_feature 1..20: note = chemically synthesized
  source 1..20: mol_type = other DNA
ggtaatgataatggtgatgg

SEQ ID NO: 36316 - DNA, 20 bp, synthetic construct
  misc_feature 1..20: note = chemically synthesized
  source 1..20: mol_type = other DNA
taatggtgatggtggaatga

SEQ ID NO: 36317 - DNA, 20 bp, synthetic construct
  misc_feature 1..20: note = chemically synthesized
  source 1..20: mol_type = other DNA
tgatggtggaatgatggtga

SEQ ID NO: 36318 - DNA, 20 bp, synthetic construct
  misc_feature 1..20: note = chemically synthesized
  source 1..20: mol_type = other DNA
tggtggaatgatggtgatgg

SEQ ID NO: 36319 - DNA, 20 bp, synthetic construct
  misc_feature 1..20: note = chemically synthesized
  source 1..20: mol_type = other DNA
tggaatgatggtgatggtgg

SEQ ID NO: 36320 - DNA, 20 bp, synthetic construct
  misc_feature 1..20: note = chemically synthesized
  source 1..20: mol_type = other DNA
tgatggtggtggaatgatga

SEQ ID NO: 36321 - DNA, 20 bp, synthetic construct
  misc_feature 1..20: note = chemically synthesized
  source 1..20: mol_type = other DNA
tggtggtggaatgatgatgg

SEQ ID NO: 36322 - DNA, 20 bp, synthetic construct
  misc_feature 1..20: note = chemically synthesized
  source 1..20: mol_type = other DNA
ggaatgatgatggtggtgct

SEQ ID NO: 36323 - DNA, 20 bp, synthetic construct
  misc_feature 1..20: note = chemically synthesized
  source 1..20: mol_type = other DNA
atgatgatggtggtgctgag

SEQ ID NO: 36324 - DNA, 20 bp, synthetic construct
  misc_feature 1..20: note = chemically synthesized
  source 1..20: mol_type = other DNA
gtggtgctgagtagtaatga

SEQ ID NO: 36325 - DNA, 20 bp, synthetic construct
  misc_feature 1..20: note = chemically synthesized
  source 1..20: mol_type = other DNA
ctgagtagtaatgatggtga

SEQ ID NO: 36326 - DNA, 20 bp, synthetic construct
  misc_feature 1..20: note = chemically synthesized
  source 1..20: mol_type = other DNA
agtagtaatgatggtgatgg

SEQ ID NO: 36327 - DNA, 20 bp, synthetic construct
  misc_feature 1..20: note = chemically synthesized
  source 1..20: mol_type = other DNA
agtaatgatggtgatggtgg

SEQ ID NO: 36328 - DNA, 20 bp, synthetic construct
  misc_feature 1..20: note = chemically synthesized
  source 1..20: mol_type = other DNA
aatgatggtgatggtggtgg

SEQ ID NO: 36329 - DNA, 20 bp, synthetic construct
  misc_feature 1..20: note = chemically synthesized
  source 1..20: mol_type = other DNA
ggtgatggtggtggtggctg

SEQ ID NO: 36330 - DNA, 20 bp, synthetic construct
  misc_feature 1..20: note = chemically synthesized
  source 1..20: mol_type = other DNA
ggtggtggctgtggtgatga

SEQ ID NO: 36331 - DNA, 20 bp, synthetic construct
  misc_feature 1..20: note = chemically synthesized
  source 1..20: mol_type = other DNA
ggtggctgtggtgatgatgg

SEQ ID NO: 36332 - DNA, 20 bp, synthetic construct
  misc_feature 1..20: note = chemically synthesized
  source 1..20: mol_type = other DNA
ggctgtggtgatgatggtgg

SEQ ID NO: 36333 - DNA, 20 bp, synthetic construct
  misc_feature 1..20: note = chemically synthesized
  source 1..20: mol_type = other DNA
tgtggtgatgatggtggtgg

SEQ ID NO: 36334 - DNA, 20 bp, synthetic construct
  misc_feature 1..20: note = chemically synthesized
  source 1..20: mol_type = other DNA
ggtgatgatggtggtggtag

SEQ ID NO: 36335 - DNA, 20 bp, synthetic construct
  misc_feature 1..20: note = chemically synthesized
  source 1..20: mol_type = other DNA
gatgatggtggtggtagtgg

SEQ ID NO: 36336 - DNA, 20 bp, synthetic construct
  misc_feature 1..20: note = chemically synthesized
  source 1..20: mol_type = other DNA
ggtagtggtagtaacgatga

SEQ ID NO: 36337 - DNA, 20 bp, synthetic construct
  misc_feature 1..20: note = chemically synthesized
  source 1..20: mol_type = other DNA
agtggtagtaacgatgatgg

SEQ ID NO: 36338 - DNA, 20 bp, synthetic construct
  misc_feature 1..20: note = chemically synthesized
  source 1..20: mol_type = other DNA
ggtagtaacgatgatggtgg

SEQ ID NO: 36339 - DNA, 20 bp, synthetic construct
  misc_feature 1..20: note = chemically synthesized
  source 1..20: mol_type = other DNA
gatgatggtggtggtgatga

SEQ ID NO: 36340 - DNA, 20 bp, synthetic construct
  misc_feature 1..20: note = chemically synthesized
  source 1..20: mol_type = other DNA
ggtggtgatgatagtgatga

SEQ ID NO: 36341 - DNA, 20 bp, synthetic construct
  misc_feature 1..20: note = chemically synthesized
  source 1..20: mol_type = other DNA
gtgatgatggtgatgatgtt

SEQ ID NO: 36342 - DNA, 20 bp, synthetic construct
  misc_feature 1..20: note = chemically synthesized
  source 1..20: mol_type = other DNA
tgatgatggtgatgatgttg

SEQ ID NO: 36343 - DNA, 20 bp, synthetic construct
  misc_feature 1..20: note = chemically synthesized
  source 1..20: mol_type = other DNA
gatgatggtgatgatgttga

SEQ ID NO: 36344 - DNA, 20 bp, synthetic construct
  misc_feature 1..20: note = chemically synthesized
  source 1..20: mol_type = other DNA
gatgttgagggtgatgataa

SEQ ID NO: 36345 - DNA, 20 bp, synthetic construct
  misc_feature 1..20: note = chemically synthesized
  source 1..20: mol_type = other DNA
gagggtgatgataatagtga

SEQ ID NO: 36346 - DNA, 20 bp, synthetic construct
  misc_feature 1..20: note = chemically synthesized
  source 1..20: mol_type = other DNA
ggtgatgataatagtgatag

SEQ ID NO: 36347 - DNA, 20 bp, synthetic construct
  misc_feature 1..20: note = chemically synthesized
  source 1..20: mol_type = other DNA
gatgataatagtgatagcgg

SEQ ID NO: 36348 - DNA, 20 bp, synthetic construct
  misc_feature 1..20: note = chemically synthesized
  source 1..20: mol_type = other DNA
taccaccaccatcatcacca

SEQ ID NO: 36349 - DNA, 20 bp, synthetic construct
  misc_feature 1..20: note = chemically synthesized
  source 1..20: mol_type = other DNA
ccatcaccatcattactact

SEQ ID NO: 36350 - DNA, 20 bp, synthetic construct
  misc_feature 1..20: note = chemically synthesized
  source 1..20: mol_type = other DNA
attatcattaccaccaccat

SEQ ID NO: 36351 - DNA, 20 bp, synthetic construct
  misc_feature 1..20: note = chemically synthesized
  source 1..20: mol_type = other DNA
accaccatcactatcatcat

SEQ ID NO: 36352 - DNA, 20 bp, synthetic construct
  misc_feature 1..20: note = chemically synthesized
  source 1..20: mol_type = other DNA
accatcactatcatcatcag

SEQ ID NO: 36353 - DNA, 20 bp, synthetic construct
  misc_feature 1..20: note = chemically synthesized
  source 1..20: mol_type = other DNA
atcagtagacatcatataac

SEQ ID NO: 36354 - DNA, 20 bp, synthetic construct
  misc_feature 1..20: note = chemically synthesized
  source 1..20: mol_type = other DNA
gacatcatataaccagtttg

SEQ ID NO: 36355 - DNA, 20 bp, synthetic construct
  misc_feature 1..20: note = chemically synthesized
  source 1..20: mol_type = other DNA
tcatataaccagtttgtagc

SEQ ID NO: 36356 - DNA, 20 bp, synthetic construct
  misc_feature 1..20: note = chemically synthesized
  source 1..20: mol_type = other DNA
taaccagtttgtagctggcc

SEQ ID NO: 36357 - DNA, 20 bp, synthetic construct
  misc_feature 1..20: note = chemically synthesized
  source 1..20: mol_type = other DNA
accagtttgtagctggccca

SEQ ID NO: 36358 - DNA, 20 bp, synthetic construct
  misc_feature 1..20: note = chemically synthesized
  source 1..20: mol_type = other DNA
ttctaaccaccatcccccac

SEQ ID NO: 36359 - DNA, 20 bp, synthetic construct
  misc_feature 1..20: note = chemically synthesized
  source 1..20: mol_type = other DNA
tctaaccaccatcccccact

SEQ ID NO: 36360 - DNA, 20 bp, synthetic construct
  misc_feature 1..20: note = chemically synthesized
  source 1..20: mol_type = other DNA
cactaggcttctgcctcgcc

SEQ ID NO: 36361 - DNA, 20 bp, synthetic construct
  misc_feature 1..20: note = chemically synthesized
  source 1..20: mol_type = other DNA
gcctcgcctggtctcacctg

SEQ ID NO: 36362 - DNA, 20 bp, synthetic construct
  misc_feature 1..20: note = chemically synthesized
  source 1..20: mol_type = other DNA
cctcgcctggtctcacctgc

SEQ ID NO: 36363 - DNA, 20 bp, synthetic construct
  misc_feature 1..20: note = chemically synthesized
  source 1..20: mol_type = other DNA
gtctcacctgcaggtccact

SEQ ID NO: 36364 - DNA, 20 bp, synthetic construct
  misc_feature 1..20: note = chemically synthesized
  source 1..20: mol_type = other DNA
tccactgagaaaatgattct

SEQ ID NO: 36365 - DNA, 20 bp, synthetic construct
  misc_feature 1..20: note = chemically synthesized
  source 1..20: mol_type = other DNA
atgattctcagaacactaac

SEQ ID NO: 36366 - DNA, 20 bp, synthetic construct
  misc_feature 1..20: note = chemically synthesized
  source 1..20: mol_type = other DNA
cagaacactaactagaccat

SEQ ID NO: 36367 - DNA, 20 bp, synthetic construct
  misc_feature 1..20: note = chemically synthesized
  source 1..20: mol_type = other DNA
agaacactaactagaccatg

SEQ ID NO: 36368 - DNA, 20 bp, synthetic construct
  misc_feature 1..20: note = chemically synthesized
  source 1..20: mol_type = other DNA
aggtgccacaaaacataact

SEQ ID NO: 36369 - DNA, 20 bp, synthetic construct
  misc_feature 1..20: note = chemically synthesized
  source 1..20: mol_type = other DNA
ggtgccacaaaacataactc

SEQ ID NO: 36370 - DNA, 20 bp, synthetic construct
  misc_feature 1..20: note = chemically synthesized
  source 1..20: mol_type = other DNA
ctacatgtcaataatgacat

SEQ ID NO: 36371 - DNA, 20 bp, synthetic construct
  misc_feature 1..20: note = chemically synthesized
  source 1..20: mol_type = other DNA
tacatgtcaataatgacatc

SEQ ID NO: 36372 - DNA, 20 bp, synthetic construct
  misc_feature 1..20: note = chemically synthesized
  source 1..20: mol_type = other DNA
aataatgacatcaggtcaat

SEQ ID NO: 36373 - DNA, 20 bp, synthetic construct
  misc_feature 1..20: note = chemically synthesized
  source 1..20: mol_type = other DNA
atcaggtcaattggcgttct

SEQ ID NO: 36374 - DNA, 20 bp, synthetic construct
  misc_feature 1..20: note = chemically synthesized
  source 1..20: mol_type = other DNA
aattggcgttctcagcctct

SEQ ID NO: 36375 - DNA, 20 bp, synthetic construct
  misc_feature 1..20: note = chemically synthesized
  source 1..20: mol_type = other DNA
ttggcgttctcagcctctga

SEQ ID NO: 36376 - DNA, 20 bp, synthetic construct
  misc_feature 1..20: note = chemically synthesized
  source 1..20: mol_type = other DNA
tggcgttctcagcctctgag

SEQ ID NO: 36377 - DNA, 20 bp, synthetic construct
  misc_feature 1..20: note = chemically synthesized
  source 1..20: mol_type = other DNA
ggcgttctcagcctctgaga

SEQ ID NO: 36378 - DNA, 20 bp, synthetic construct
  misc_feature 1..20: note = chemically synthesized
  source 1..20: mol_type = other DNA
cgttctcagcctctgagagg

SEQ ID NO: 36379 - DNA, 20 bp, synthetic construct
  misc_feature 1..20: note = chemically synthesized
  source 1..20: mol_type = other DNA
gttctcagcctctgagaggg

SEQ ID NO: 36380 - DNA, 20 bp, synthetic construct
  misc_feature 1..20: note = chemically synthesized
  source 1..20: mol_type = other DNA
agcctctgagagggaggtca

SEQ ID NO: 36381 - DNA, 20 bp, synthetic construct
  misc_feature 1..20: note = chemically synthesized
  source 1..20: mol_type = other DNA
tgctctccccttcatgtttc

SEQ ID NO: 36382 - DNA, 20 bp, synthetic construct
  misc_feature 1..20: note = chemically synthesized
  source 1..20: mol_type = other DNA
gctctccccttcatgtttcc

SEQ ID NO: 36383 - DNA, 20 bp, synthetic construct
  misc_feature 1..20: note = chemically synthesized
  source 1..20: mol_type = other DNA
tttccaggtgttccctgact

SEQ ID NO: 36384 - DNA, 20 bp, synthetic construct
  misc_feature 1..20: note = chemically synthesized
  source 1..20: mol_type = other DNA
tccctgacttggatcaaatg

SEQ ID NO: 36385 - DNA, 20 bp, synthetic construct
  misc_feature 1..20: note = chemically synthesized
  source 1..20: mol_type = other DNA
cctgacttggatcaaatgca

SEQ ID NO: 36386 - DNA, 20 bp, synthetic construct
  misc_feature 1..20: note = chemically synthesized
  source 1..20: mol_type = other DNA
cttggatcaaatgcagagtt

SEQ ID NO: 36387 - DNA, 20 bp, synthetic construct
  misc_feature 1..20: note = chemically synthesized
  source 1..20: mol_type = other DNA
tggatcaaatgcagagtttg

SEQ ID NO: 36388 - DNA, 20 bp, synthetic construct
  misc_feature 1..20: note = chemically synthesized
  source 1..20: mol_type = other DNA
ggatcaaatgcagagtttgg

SEQ ID NO: 36389 - DNA, 20 bp, synthetic construct
  misc_feature 1..20: note = chemically synthesized
  source 1..20: mol_type = other DNA
atgcagagtttggaggtgtt

SEQ ID NO: 36390 - DNA, 20 bp, synthetic construct
  misc_feature 1..20: note = chemically synthesized
  source 1..20: mol_type = other DNA
tgcagagtttggaggtgttg

SEQ ID NO: 36391 - DNA, 20 bp, synthetic construct
  misc_feature 1..20: note = chemically synthesized
  source 1..20: mol_type = other DNA
agtttggaggtgttgaggcc

SEQ ID NO: 36392 - DNA, 20 bp, synthetic construct
  misc_feature 1..20: note = chemically synthesized
  source 1..20: mol_type = other DNA
gtttggaggtgttgaggcca

SEQ ID NO: 36393 - DNA, 20 bp, synthetic construct
  misc_feature 1..20: note = chemically synthesized
  source 1..20: mol_type = other DNA
tttggaggtgttgaggccaa

SEQ ID NO: 36394 - DNA, 20 bp, synthetic construct
  misc_feature 1..20: note = chemically synthesized
  source 1..20: mol_type = other DNA
ttggaggtgttgaggccaag

SEQ ID NO: 36395 - DNA, 20 bp, synthetic construct
  misc_feature 1..20: note = chemically synthesized
  source 1..20: mol_type = other DNA
ttgaggccaaggggattttc

SEQ ID NO: 36396 - DNA, 20 bp, synthetic construct
  misc_feature 1..20: note = chemically synthesized
  source 1..20: mol_type = other DNA
tgaggccaaggggattttcc

SEQ ID NO: 36397 - DNA, 20 bp, synthetic construct
  misc_feature 1..20: note = chemically synthesized
  source 1..20: mol_type = other DNA
gccaaggggattttccaggt

SEQ ID NO: 36398 - DNA, 20 bp, synthetic construct
  misc_feature 1..20: note = chemically synthesized
  source 1..20: mol_type = other DNA
cagtcgtcatccacaatcaa

SEQ ID NO: 36399 - DNA, 20 bp, synthetic construct
  misc_feature 1..20: note = chemically synthesized
  source 1..20: mol_type = other DNA
caatggactgatcctgccgc

SEQ ID NO: 36400 - DNA, 20 bp, synthetic construct
  misc_feature 1..20: note = chemically synthesized
  source 1..20: mol_type = other DNA
taccctgctgccctctcccc

SEQ ID NO: 36401 - DNA, 20 bp, synthetic construct
  misc_feature 1..20: note = chemically synthesized
  source 1..20: mol_type = other DNA
accctgctgccctctcccca

SEQ ID NO: 36402 - DNA, 20 bp, synthetic construct
  misc_feature 1..20: note = chemically synthesized
  source 1..20: mol_type = other DNA
ccctctccccaaggccccat

SEQ ID NO: 36403 - DNA, 20 bp, synthetic construct
  misc_feature 1..20: note = chemically synthesized
  source 1..20: mol_type = other DNA
cctctccccaaggccccatc

SEQ ID NO: 36404 - DNA, 20 bp, synthetic construct
  misc_feature 1..20: note = chemically synthesized
  source 1..20: mol_type = other DNA
ctctccccaaggccccatca

SEQ ID NO: 36405 - DNA, 20 bp, synthetic construct
  misc_feature 1..20: note = chemically synthesized
  source 1..20: mol_type = other DNA
ctccccaaggccccatcagg

SEQ ID NO: 36406 - DNA, 20 bp, synthetic construct
  misc_feature 1..20: note = chemically synthesized
  source 1..20: mol_type = other DNA
tccccaaggccccatcaggg

SEQ ID NO: 36407 - DNA, 20 bp, synthetic construct
  misc_feature 1..20: note = chemically synthesized
  source 1..20: mol_type = other DNA
ccccaaggccccatcaggga

SEQ ID NO: 36408 - DNA, 20 bp, synthetic construct
  misc_feature 1..20: note = chemically synthesized
  source 1..20: mol_type = other DNA
ttcaatcctcttgtcacctg

SEQ ID NO: 36409 - DNA, 20 bp, synthetic construct
  misc_feature 1..20: note = chemically synthesized
  source 1..20: mol_type = other DNA
acctgtggcctacctgccct

SEQ ID NO: 36410 - DNA, 20 bp, synthetic construct
  misc_feature 1..20: note = chemically synthesized
  source 1..20: mol_type = other DNA
ctgtggcctacctgccctca

SEQ ID NO: 36411 - DNA, 20 bp, synthetic construct
  misc_feature 1..20: note = chemically synthesized
  source 1..20: mol_type = other DNA
cagagatgacatctctatgt

SEQ ID NO: 36412 - DNA, 20 bp, synthetic construct
  misc_feature 1..20: note = chemically synthesized
  source 1..20: mol_type = other DNA
gacatctctatgtcggccac

SEQ ID NO: 36413 - DNA, 20 bp, synthetic construct
  misc_feature 1..20: note = chemically synthesized
  source 1..20: mol_type = other DNA
tctctatgtcggccactgga

SEQ ID NO: 36414 - DNA, 20 bp, synthetic construct
  misc_feature 1..20: note = chemically synthesized
  source 1..20: mol_type = other DNA
ctatgtcggccactggatgg

SEQ ID NO: 36415 - DNA, 20 bp, synthetic construct
  misc_feature 1..20: note = chemically synthesized
  source 1..20: mol_type = other DNA
tggatggcagcacctactcg

SEQ ID NO: 36416 - DNA, 20 bp, synthetic construct
  misc_feature 1..20: note = chemically synthesized
  source 1..20: mol_type = other DNA
gcagaccacatcaactttcc

SEQ ID NO: 36417 - DNA, 20 bp, synthetic construct
  misc_feature 1..20: note = chemically synthesized
  source 1..20: mol_type = other DNA
tcaactttcctggcaacttg

SEQ ID NO: 36418 - DNA, 20 bp, synthetic construct
  misc_feature 1..20: note = chemically synthesized
  source 1..20: mol_type = other DNA
actttcctggcaacttgcgg

SEQ ID NO: 36419 - DNA, 20 bp, synthetic construct
  misc_feature 1..20: note = chemically synthesized
  source 1..20: mol_type = other DNA
ctttcctggcaacttgcggt

SEQ ID NO: 36420 - DNA, 20 bp, synthetic construct
  misc_feature 1..20: note = chemically synthesized
  source 1..20: mol_type = other DNA
cggtaggttttcaccattat

SEQ ID NO: 36421 - DNA, 20 bp, synthetic construct
  misc_feature 1..20: note = chemically synthesized
  source 1..20: mol_type = other DNA
ggtaggttttcaccattatc

SEQ ID NO: 36422 - DNA, 20 bp, synthetic construct
  misc_feature 1..20: note = chemically synthesized
  source 1..20: mol_type = other DNA
ggatgtttgccttgctcaaa

SEQ ID NO: 36423 - DNA, 20 bp, synthetic construct
  misc_feature 1..20: note = chemically synthesized
  source 1..20: mol_type = other DNA
tgtttgccttgctcaaatag

SEQ ID NO: 36424 - DNA, 20 bp, synthetic construct
  misc_feature 1..20: note = chemically synthesized
  source 1..20: mol_type = other DNA
cttgctcaaatagcagattc

SEQ ID NO: 36425 - DNA, 20 bp, synthetic construct
  misc_feature 1..20: note = chemically synthesized
  source 1..20: mol_type = other DNA
tgctcaaatagcagattcta

SEQ ID NO: 36426 - DNA, 20 bp, synthetic construct
  misc_feature 1..20: note = chemically synthesized
  source 1..20: mol_type = other DNA
aaatagcagattctagagaa

SEQ ID NO: 36427 - DNA, 20 bp, synthetic construct
  misc_feature 1..20: note = chemically synthesized
  source 1..20: mol_type = other DNA
tgctccctcacacaactatg

SEQ ID NO: 36428 - DNA, 20 bp, synthetic construct
  misc_feature 1..20: note = chemically synthesized
  source 1..20: mol_type = other DNA
cctcacacaactatgtagtc

SEQ ID NO: 36429 - DNA, 20 bp, synthetic construct
  misc_feature 1..20: note = chemically synthesized
  source 1..20: mol_type = other DNA
ctcacacaactatgtagtcc

SEQ ID NO: 36430 - DNA, 20 bp, synthetic construct
  misc_feature 1..20: note = chemically synthesized
  source 1..20: mol_type = other DNA
tgcaccctctgcccgatgct

SEQ ID NO: 36431 - DNA, 20 bp, synthetic construct
  misc_feature 1..20: note = chemically synthesized
  source 1..20: mol_type = other DNA
accctctgcccgatgcttgg

SEQ ID NO: 36432 - DNA, 20 bp, synthetic construct
  misc_feature 1..20: note = chemically synthesized
  source 1..20: mol_type = other DNA
tctgcccgatgcttggtagt

SEQ ID NO: 36433 - DNA, 20 bp, synthetic construct
  misc_feature 1..20: note = chemically synthesized
  source 1..20: mol_type = other DNA
agtcagaaacttccatcatg

SEQ ID NO: 36434 - DNA, 20 bp, synthetic construct
  misc_feature 1..20: note = chemically synthesized
  source 1..20: mol_type = other DNA
ttccatcatgcagctctgcc

SEQ ID NO: 36435 - DNA, 20 bp, synthetic construct
  misc_feature 1..20: note = chemically synthesized
  source 1..20: mol_type = other DNA
catgcagctctgcccagatt

SEQ ID NO: 36436 - DNA, 20 bp, synthetic construct
  misc_feature 1..20: note = chemically synthesized
  source 1..20: mol_type = other DNA
agctctgcccagattgagct

SEQ ID NO: 36437 - DNA, 20 bp, synthetic construct
  misc_feature 1..20: note = chemically synthesized
  source 1..20: mol_type = other DNA
ctgcccagattgagctgagc

SEQ ID NO: 36438 - DNA, 20 bp, synthetic construct
  misc_feature 1..20: note = chemically synthesized
  source 1..20: mol_type = other DNA
gattgagctgagctggcctc

SEQ ID NO: 36439 - DNA, 20 bp, synthetic construct
  misc_feature 1..20: note = chemically synthesized
  source 1..20: mol_type = other DNA
ttgagctgagctggcctctg

SEQ ID NO: 36440 - DNA, 20 bp, synthetic construct
  misc_feature 1..20: note = chemically synthesized
  source 1..20: mol_type = other DNA
gctgagctggcctctggagt

SEQ ID NO: 36441 - DNA, 20 bp, synthetic construct
  misc_feature 1..20: note = chemically synthesized
  source 1..20: mol_type = other DNA
ctgagctggcctctggagtg

SEQ ID NO: 36442 - DNA, 20 bp, synthetic construct
  misc_feature 1..20: note = chemically synthesized
  source 1..20: mol_type = other DNA
tggcctctggagtgaggtgc

SEQ ID NO: 36443 - DNA, 20 bp, synthetic construct
  misc_feature 1..20: note = chemically synthesized
  source 1..20: mol_type = other DNA
ggcctctggagtgaggtgct

SEQ ID NO: 36444 - DNA, 20 bp, synthetic construct
  misc_feature 1..20: note = chemically synthesized
  source 1..20: mol_type = other DNA
catgctgctcatgtcaactc

SEQ ID NO: 36445 - DNA, 20 bp, synthetic construct
  misc_feature 1..20: note = chemically synthesized
  source 1..20: mol_type = other DNA
gctcatgtcaactccagatg

SEQ ID NO: 36446 - DNA, 20 bp, synthetic construct
  misc_feature 1..20: note = chemically synthesized
  source 1..20: mol_type = other DNA
atgtcaactccagatgcagt

SEQ ID NO: 36447 - DNA, 20 bp, synthetic construct
  misc_feature 1..20: note = chemically synthesized
  source 1..20: mol_type = other DNA
tgtcaactccagatgcagtc

SEQ ID NO: 36448 - DNA, 20 bp, synthetic construct
  misc_feature 1..20: note = chemically synthesized
  source 1..20: mol_type = other DNA
gcagtcaggtttctgaacca

SEQ ID NO: 36449 - DNA, 20 bp, synthetic construct
  misc_feature 1..20: note = chemically synthesized
  source 1..20: mol_type = other DNA
tgaaccaaagtcaatgatct

SEQ ID NO: 36450 - DNA, 20 bp, synthetic construct
  misc_feature 1..20: note = chemically synthesized
  source 1..20: mol_type = other DNA
caaagtcaatgatctaagtg

SEQ ID NO: 36451 - DNA, 20 bp, synthetic construct
  misc_feature 1..20: note = chemically synthesized
  source 1..20: mol_type = other DNA
caatgatctaagtgcagtca

SEQ ID NO: 36452 - DNA, 20 bp, synthetic construct
  misc_feature 1..20: note = chemically synthesized
  source 1..20: mol_type = other DNA
aatgatctaagtgcagtcaa

SEQ ID NO: 36453 - DNA, 20 bp, synthetic construct
  misc_feature 1..20: note = chemically synthesized
  source 1..20: mol_type = other DNA
ctaagtgcagtcaaaggctc

SEQ ID NO: 36454 - DNA, 20 bp, synthetic construct
  misc_feature 1..20: note = chemically synthesized
  source 1..20: mol_type = other DNA
taagtgcagtcaaaggctct

SEQ ID NO: 36455 - DNA, 20 bp, synthetic construct
  misc_feature 1..20: note = chemically synthesized
  source 1..20: mol_type = other DNA
aagtgcagtcaaaggctctg

SEQ ID NO: 36456 - DNA, 20 bp, synthetic construct
  misc_feature 1..20: note = chemically synthesized
  source 1..20: mol_type = other DNA
agtgcagtcaaaggctctgg

SEQ ID NO: 36457 - DNA, 20 bp, synthetic construct
  misc_feature 1..20: note = chemically synthesized
  source 1..20: mol_type = other DNA
gcagtcaaaggctctggggg

SEQ ID NO: 36458 - DNA, 20 bp, synthetic construct
  misc_feature 1..20: note = chemically synthesized
  source 1..20: mol_type = other DNA
tcaaaggctctgggggaaga

SEQ ID NO: 36459 - DNA, 20 bp, synthetic construct
  misc_feature 1..20: note = chemically synthesized
  source 1..20: mol_type = other DNA
aaaggctctgggggaagaaa

SEQ ID NO: 36460 - DNA, 20 bp, synthetic construct
  misc_feature 1..20: note = chemically synthesized
  source 1..20: mol_type = other DNA
aggctctgggggaagaaaga

SEQ ID NO: 36461 - DNA, 20 bp, synthetic construct
  misc_feature 1..20: note = chemically synthesized
  source 1..20: mol_type = other DNA
gctctgggggaagaaagaga

SEQ ID NO: 36462 - DNA, 20 bp, synthetic construct
  misc_feature 1..20: note = chemically synthesized
  source 1..20: mol_type = other DNA
ttgcctgtgccatgctcgca

SEQ ID NO: 36463 - DNA, 20 bp, synthetic construct
  misc_feature 1..20: note = chemically synthesized
  source 1..20: mol_type = other DNA
ctgtgccatgctcgcaaagc

SEQ ID NO: 36464 - DNA, 20 bp, synthetic construct
  misc_feature 1..20: note = chemically synthesized
  source 1..20: mol_type = other DNA
tgtgccatgctcgcaaagca

SEQ ID NO: 36465 - DNA, 20 bp, synthetic construct
  misc_feature 1..20: note = chemically synthesized
  source 1..20: mol_type = other DNA
tttttgcaaaattctaatga

SEQ ID NO: 36466 - DNA, 20 bp, synthetic construct
  misc_feature 1..20: note = chemically synthesized
  source 1..20: mol_type = other DNA
tgcaaaattctaatgaaagc

SEQ ID NO: 36467 - DNA, 20 bp, synthetic construct
  misc_feature 1..20: note = chemically synthesized
  source 1..20: mol_type = other DNA
gcaaaattctaatgaaagct

SEQ ID NO: 36468 - DNA, 20 bp, synthetic construct
  misc_feature 1..20: note = chemically synthesized
  source 1..20: mol_type = other DNA
gaaagctgggcttgcaaaat

SEQ ID NO: 36469 - DNA, 20 bp, synthetic construct
  misc_feature 1..20: note = chemically synthesized
  source 1..20: mol_type = other DNA
ggcttgcaaaattagaaaac

SEQ ID NO: 36470 - DNA, 20 bp, synthetic construct
  misc_feature 1..20: note = chemically synthesized
  source 1..20: mol_type = other DNA
tagaaaactggattatttgt

SEQ ID NO: 36471 - DNA, 20 bp, synthetic construct
  misc_feature 1..20: note = chemically synthesized
  source 1..20: mol_type = other DNA
tgagaacactgaaacatccc

SEQ ID NO: 36472 - DNA, 20 bp, synthetic construct
  misc_feature 1..20: note = chemically synthesized
  source 1..20: mol_type = other DNA
gagaacactgaaacatccct

SEQ ID NO: 36473 - DNA, 20 bp, synthetic construct
  misc_feature 1..20: note = chemically synthesized
  source 1..20: mol_type = other DNA
catccctgggtgtgtccatc

SEQ ID NO: 36474 - DNA, 20 bp, synthetic construct
  misc_feature 1..20: note = chemically synthesized
  source 1..20: mol_type = other DNA
ggtgtgtccatctggaaaaa

SEQ ID NO: 36475 - DNA, 20 bp, synthetic construct
  misc_feature 1..20: note = chemically synthesized
  source 1..20: mol_type = other DNA
tggaaaaacagcatttcctc

SEQ ID NO: 36476 - DNA, 20 bp, synthetic construct
  misc_feature 1..20: note = chemically synthesized
  source 1..20: mol_type = other DNA
gcaaccgttctatttgaatt

SEQ ID NO: 36477 - DNA, 20 bp, synthetic construct
  misc_feature 1..20: note = chemically synthesized
  source 1..20: mol_type = other DNA
cgttctatttgaatttggca

SEQ ID NO: 36478 - DNA, 20 bp, synthetic construct
  misc_feature 1..20: note = chemically synthesized
  source 1..20: mol_type = other DNA
tgaatttggcaaagaaaata

SEQ ID NO: 36479 - DNA, 20 bp, synthetic construct
  misc_feature 1..20: note = chemically synthesized
  source 1..20: mol_type = other DNA
atttggcaaagaaaataaag

SEQ ID NO: 36480 - DNA, 20 bp, synthetic construct
  misc_feature 1..20: note = chemically synthesized
  source 1..20: mol_type = other DNA
aataaagcagtttttcacaa

SEQ ID NO: 36481 - DNA, 20 bp, synthetic construct
  misc_feature 1..20: note = chemically synthesized
  source 1..20: mol_type = other DNA
cacaaaagaataaacacaac

SEQ ID NO: 36482 - DNA, 20 bp, synthetic construct
  misc_feature 1..20: note = chemically synthesized
  source 1..20: mol_type = other DNA
acaaaagaataaacacaacc

SEQ ID NO: 36483 - DNA, 20 bp, synthetic construct
  misc_feature 1..20: note = chemically synthesized
  source 1..20: mol_type = other DNA
aaaagaataaacacaaccag

SEQ ID NO: 36484 - DNA, 20 bp, synthetic construct
  misc_feature 1..20: note = chemically synthesized
  source 1..20: mol_type = other DNA
ttcactctcccaaattgtca

SEQ ID NO: 36485 - DNA, 20 bp, synthetic construct
  misc_feature 1..20: note = chemically synthesized
  source 1..20: mol_type = other DNA
actctcccaaattgtcaaag

SEQ ID NO: 36486 - DNA, 20 bp, synthetic construct
  misc_feature 1..20: note = chemically synthesized
  source 1..20: mol_type = other DNA
attgtcaaagaagtataaat

SEQ ID NO: 36487 - DNA, 20 bp, synthetic construct
  misc_feature 1..20: note = chemically synthesized
  source 1..20: mol_type = other DNA
gtataaattagaaaatgaat

SEQ ID NO: 36488 - DNA, 20 bp, synthetic construct
  misc_feature 1..20: note = chemically synthesized
  source 1..20: mol_type = other DNA
tataaattagaaaatgaatc

SEQ ID NO: 36489 - DNA, 20 bp, synthetic construct
  misc_feature 1..20: note = chemically synthesized
  source 1..20: mol_type = other DNA
tcaggacaatttcaacctgt

SEQ ID NO: 36490 - DNA, 20 bp, synthetic construct
  misc_feature 1..20: note = chemically synthesized
  source 1..20: mol_type = other DNA
acaatttcaacctgttagat

SEQ ID NO: 36491 - DNA, 20 bp, synthetic construct
  misc_feature 1..20: note = chemically synthesized
  source 1..20: mol_type = other DNA
taaaaattgaacactcatac

SEQ ID NO: 36492 - DNA, 20 bp, synthetic construct
  misc_feature 1..20: note = chemically synthesized
  source 1..20: mol_type = other DNA
attgaacactcatacaagtg

SEQ ID NO: 36493 - DNA, 20 bp, synthetic construct
  misc_feature 1..20: note = chemically synthesized
  source 1..20: mol_type = other DNA
acactcatacaagtgtggtg

SEQ ID NO: 36494 - DNA, 20 bp, synthetic construct
  misc_feature 1..20: note = chemically synthesized
  source 1..20: mol_type = other DNA
gtggtgaagtgattgttttc

SEQ ID NO: 36495 - DNA, 20 bp, synthetic construct
  misc_feature 1..20: note = chemically synthesized
  source 1..20: mol_type = other DNA
tttacactgtcataaccttc

SEQ ID NO: 36496 - DNA, 20 bp, synthetic construct
  misc_feature 1..20: note = chemically synthesized
  source 1..20: mol_type = other DNA
taaccttctagaaaataaat

SEQ ID NO: 36497 - DNA, 20 bp, synthetic construct
  misc_feature 1..20: note = chemically synthesized
  source 1..20: mol_type = other DNA
ccttctagaaaataaattgg

SEQ ID NO: 36498 - DNA, 20 bp, synthetic construct
  misc_feature 1..20: note = chemically synthesized
  source 1..20: mol_type = other DNA
aaataaattggcagtgttat

SEQ ID NO: 36499 - DNA, 20 bp, synthetic construct
  misc_feature 1..20: note = chemically synthesized
  source 1..20: mol_type = other DNA
aataaattggcagtgttatt

SEQ ID NO: 36500 - DNA, 20 bp, synthetic construct
  misc_feature 1..20: note = chemically synthesized
  source 1..20: mol_type = other DNA
taaattggcagtgttattgg

SEQ ID NO: 36501 - DNA, 20 bp, synthetic construct
  misc_feature 1..20: note = chemically synthesized
  source 1..20: mol_type = other DNA
ttggcagtgttattgggaga

SEQ ID NO: 36502 - DNA, 20 bp, synthetic construct
  misc_feature 1..20: note = chemically synthesized
  source 1..20: mol_type = other DNA
aaatatgtctatataattta

SEQ ID NO: 36503 - DNA, 20 bp, synthetic construct
  misc_feature 1..20: note = chemically synthesized
  source 1..20: mol_type = other DNA
aatatgtctatataatttat

SEQ ID NO: 36504 - DNA, 20 bp, synthetic construct
  misc_feature 1..20: note = chemically synthesized
  source 1..20: mol_type = other DNA
ctatataatttatgggaact

SEQ ID NO: 36505 - DNA, 20 bp, synthetic construct
  misc_feature 1..20: note = chemically synthesized
  source 1..20: mol_type = other DNA
tatataatttatgggaactt

SEQ ID NO: 36506 - DNA, 20 bp, synthetic construct
  misc_feature 1..20: note = chemically synthesized
  source 1..20: mol_type = other DNA
aatttatgggaacttaggct

SEQ ID NO: 36507 - DNA, 20 bp, synthetic construct
  misc_feature 1..20: note = chemically synthesized
  source 1..20: mol_type = other DNA
acttaggctcagaaaatatt

SEQ ID NO: 36508 - DNA, 20 bp, synthetic construct
  misc_feature 1..20: note = chemically synthesized
  source 1..20: mol_type = other DNA
cttaggctcagaaaatatta

SEQ ID NO: 36509 - DNA, 20 bp, synthetic construct
  misc_feature 1..20: note = chemically synthesized
  source 1..20: mol_type = other DNA
ctcagaaaatattaaggaat

SEQ ID NO: 36510 - DNA, 20 bp, synthetic construct
  misc_feature 1..20: note = chemically synthesized
  source 1..20: mol_type = other DNA
aagaatgaactttatgaaca

SEQ ID NO: 36511 - DNA, 20 bp, synthetic construct
  misc_feature 1..20: note = chemically synthesized
  source 1..20: mol_type = other DNA
gaactttatgaacaaagatg

SEQ ID NO: 36512 - DNA, 20 bp, synthetic construct
  misc_feature 1..20: note = chemically synthesized
  source 1..20: mol_type = other DNA
actttatgaacaaagatgtg

SEQ ID NO: 36513 - DNA, 20 bp, synthetic construct
  misc_feature 1..20: note = chemically synthesized
  source 1..20: mol_type = other DNA
ctttatgaacaaagatgtgg

SEQ ID NO: 36514 - DNA, 20 bp, synthetic construct
  misc_feature 1..20: note = chemically synthesized
  source 1..20: mol_type = other DNA
tttatgaacaaagatgtgga

SEQ ID NO: 36515 - DNA, 20 bp, synthetic construct
  misc_feature 1..20: note = chemically synthesized
  source 1..20: mol_type = other DNA
tgaacaaagatgtggagggt

SEQ ID NO: 36516 - DNA, 20 bp, synthetic construct
  misc_feature 1..20: note = chemically synthesized
  source 1..20: mol_type = other DNA
acaaagatgtggagggttgg

SEQ ID NO: 36517 - DNA, 20 bp, synthetic construct
  misc_feature 1..20: note = chemically synthesized
  source 1..20: mol_type = other DNA
agatgtggagggttggaagc

SEQ ID NO: 36518 - DNA, 20 bp, synthetic construct
  misc_feature 1..20: note = chemically synthesized
  source 1..20: mol_type = other DNA
atgtggagggttggaagcaa

SEQ ID NO: 36519 - DNA, 20 bp, synthetic construct
  misc_feature 1..20: note = chemically synthesized
  source 1..20: mol_type = other DNA
tgtggagggttggaagcaag

SEQ ID NO: 36520 - DNA, 20 bp, synthetic construct
  misc_feature 1..20: note = chemically synthesized
  source 1..20: mol_type = other DNA
gtggagggttggaagcaaga

SEQ ID NO: 36521 - DNA, 20 bp, synthetic construct
  misc_feature 1..20: note = chemically synthesized
  source 1..20: mol_type = other DNA
tggagggttggaagcaagag

SEQ ID NO: 36522 - DNA, 20 bp, synthetic construct
  misc_feature 1..20: note = chemically synthesized
  source 1..20: mol_type = other DNA
ggagggttggaagcaagagg

SEQ ID NO: 36523 - DNA, 20 bp, synthetic construct
  misc_feature 1..20: note = chemically synthesized
  source 1..20: mol_type = other DNA
gagggttggaagcaagaggg

SEQ ID NO: 36524 - DNA, 20 bp, synthetic construct
  misc_feature 1..20: note = chemically synthesized
  source 1..20: mol_type = other DNA
aagaggggggccaacgcgca

SEQ ID NO: 36525 - DNA, 20 bp, synthetic construct
  misc_feature 1..20: note = chemically synthesized
  source 1..20: mol_type = other DNA
agaggggggccaacgcgcac

SEQ ID NO: 36526 - DNA, 20 bp, synthetic construct
  misc_feature 1..20: note = chemically synthesized
  source 1..20: mol_type = other DNA
gaggggggccaacgcgcacg

SEQ ID NO: 36527 - DNA, 20 bp, synthetic construct
  misc_feature 1..20: note = chemically synthesized
  source 1..20: mol_type = other DNA
ggggggccaacgcgcacggg

SEQ ID NO: 36528 - DNA, 20 bp, synthetic construct
  misc_feature 1..20: note = chemically synthesized
  source 1..20: mol_type = other DNA
gggggccaacgcgcacgggg

SEQ ID NO: 36529 - DNA, 20 bp, synthetic construct
  misc_feature 1..20: note = chemically synthesized
  source 1..20: mol_type = other DNA
ggccaacgcgcacggggagg

SEQ ID NO: 36530 - DNA, 20 bp, synthetic construct
  misc_feature 1..20: note = chemically synthesized
  source 1..20: mol_type = other DNA
gcgcacggggaggaagcatt

SEQ ID NO: 36531 - DNA, 20 bp, synthetic construct
  misc_feature 1..20: note = chemically synthesized
  source 1..20: mol_type = other DNA
cgcacggggaggaagcattt

SEQ ID NO: 36532 - DNA, 20 bp, synthetic construct
  misc_feature 1..20: note = chemically synthesized
  source 1..20: mol_type = other DNA
acggggaggaagcatttggg

SEQ ID NO: 36533 - DNA, 20 bp, synthetic construct
  misc_feature 1..20: note = chemically synthesized
  source 1..20: mol_type = other DNA
gcatttgggcagtgactccg

SEQ ID NO: 36534 - DNA, 20 bp, synthetic construct
  misc_feature 1..20: note = chemically synthesized
  source 1..20: mol_type = other DNA
gggcagtgactccgcagacc

SEQ ID NO: 36535 - DNA, 20 bp, synthetic construct
  misc_feature 1..20: note = chemically synthesized
  source 1..20: mol_type = other DNA
ggcagtgactccgcagaccc

SEQ ID NO: 36536 - DNA, 20 bp, synthetic construct
  misc_feature 1..20: note = chemically synthesized
  source 1..20: mol_type = other DNA
tgactccgcagacccaggct

SEQ ID NO: 36537 - DNA, 20 bp, synthetic construct
  misc_feature 1..20: note = chemically synthesized
  source 1..20: mol_type = other DNA
gactccgcagacccaggctc

SEQ ID NO: 36538 - DNA, 20 bp, synthetic construct
  misc_feature 1..20: note = chemically synthesized
  source 1..20: mol_type = other DNA
gacccaggctcaggttgaac

SEQ ID NO: 36539 - DNA, 20 bp, synthetic construct
  misc_feature 1..20: note = chemically synthesized
  source 1..20: mol_type = other DNA
tagacaacctccttacacct

SEQ ID NO: 36540 - DNA, 20 bp, synthetic construct
  misc_feature 1..20: note = chemically synthesized
  source 1..20: mol_type = other DNA
cacctcagtttccttaactg

SEQ ID NO: 36541 - DNA, 20 bp, synthetic construct
  misc_feature 1..20: note = chemically synthesized
  source 1..20: mol_type = other DNA
cctcagtttccttaactgta

SEQ ID NO: 36542 - DNA, 20 bp, synthetic construct
  misc_feature 1..20: note = chemically synthesized
  source 1..20: mol_type = other DNA
cagtttccttaactgtagag

SEQ ID NO: 36543 - DNA, 20 bp, synthetic construct
  misc_feature 1..20: note = chemically synthesized
  source 1..20: mol_type = other DNA
agtttccttaactgtagagc

SEQ ID NO: 36544 - DNA, 20 bp, synthetic construct
  misc_feature 1..20: note = chemically synthesized
  source 1..20: mol_type = other DNA
tttccttaactgtagagcag

SEQ ID NO: 36545 - DNA, 20 bp, synthetic construct
  misc_feature 1..20: note = chemically synthesized
  source 1..20: mol_type = other DNA
taactgtagagcaggagtga

SEQ ID NO: 36546 - DNA, 20 bp, synthetic construct
  misc_feature 1..20: note = chemically synthesized
  source 1..20: mol_type = other DNA
tgatggaactgcctgtttca

SEQ ID NO: 36547 - DNA, 20 bp, synthetic construct
  misc_feature 1..20: note = chemically synthesized
  source 1..20: mol_type = other DNA
gatggaactgcctgtttcat

SEQ ID NO: 36548 - DNA, 20 bp, synthetic construct
  misc_feature 1..20: note = chemically synthesized
  source 1..20: mol_type = other DNA
ctgtttcataggactgttgt

SEQ ID NO: 36549 - DNA, 20 bp, synthetic construct
  misc_feature 1..20: note = chemically synthesized
  source 1..20: mol_type = other DNA
tgtttcataggactgttgtg

SEQ ID NO: 36550 - DNA, 20 bp, synthetic construct
  misc_feature 1..20: note = chemically synthesized
  source 1..20: mol_type = other DNA
ataggactgttgtgaggatg

SEQ ID NO: 36551 - DNA, 20 bp, synthetic construct
  misc_feature 1..20: note = chemically synthesized
  source 1..20: mol_type = other DNA
gactgttgtgaggatgaagt

SEQ ID NO: 36552 - DNA, 20 bp, synthetic construct
  misc_feature 1..20: note = chemically synthesized
  source 1..20: mol_type = other DNA
agtgagatacaccacattat

SEQ ID NO: 36553 - DNA, 20 bp, synthetic construct
  misc_feature 1..20: note = chemically synthesized
  source 1..20: mol_type = other DNA
ccacattataagcttgtgcc

SEQ ID NO: 36554 - DNA, 20 bp, synthetic construct
  misc_feature 1..20: note = chemically synthesized
  source 1..20: mol_type = other DNA
attataagcttgtgcctgga

SEQ ID NO: 36555 - DNA, 20 bp, synthetic construct
  misc_feature 1..20: note = chemically synthesized
  source 1..20: mol_type = other DNA
ttataagcttgtgcctggaa

SEQ ID NO: 36556 - DNA, 20 bp, synthetic construct
  misc_feature 1..20: note = chemically synthesized
  source 1..20: mol_type = other DNA
tgcctggaaaggataatgct

SEQ ID NO: 36557 - DNA, 20 bp, synthetic construct
  misc_feature 1..20: note = chemically synthesized
  source 1..20: mol_type = other DNA
ttattgcaataaaatgtaca

SEQ ID NO: 36558 - DNA, 20 bp, synthetic construct
  misc_feature 1..20: note = chemically synthesized
  source 1..20: mol_type = other DNA
caataaaatgtacacagcgt

SEQ ID NO: 36559 - DNA, 20 bp, synthetic construct
  misc_feature 1..20: note = chemically synthesized
  source 1..20: mol_type = other DNA
ataaaatgtacacagcgtaa

SEQ ID NO: 36560 - DNA, 20 bp, synthetic construct
  misc_feature 1..20: note = chemically synthesized
  source 1..20: mol_type = other DNA
tactattttaaccatttttg

SEQ ID NO: 36561 - DNA, 20 bp, synthetic construct
  misc_feature 1..20: note = chemically synthesized
  source 1..20: mol_type = other DNA
actattttaaccatttttgc

SEQ ID NO: 36562 - DNA, 20 bp, synthetic construct
  misc_feature 1..20: note = chemically synthesized
  source 1..20: mol_type = other DNA
ctattttaaccatttttgca

SEQ ID NO: 36563 - DNA, 20 bp, synthetic construct
  misc_feature 1..20: note = chemically synthesized
  source 1..20: mol_type = other DNA
catttttgcagggtaccacc

SEQ ID NO: 36564 - DNA, 20 bp, synthetic construct
  misc_feature 1..20: note = chemically synthesized
  source 1..20: mol_type = other DNA
ttttgcagggtaccaccaag

SEQ ID NO: 36565 - DNA, 20 bp, synthetic construct
  misc_feature 1..20: note = chemically synthesized
  source 1..20: mol_type = other DNA
gggtaccaccaagtggcatt

SEQ ID NO: 36566 - DNA, 20 bp, synthetic construct
  misc_feature 1..20: note = chemically synthesized
  source 1..20: mol_type = other DNA
agtggcatttagtacattca

SEQ ID NO: 36567 - DNA, 20 bp, synthetic construct
  misc_feature 1..20: note = chemically synthesized
  source 1..20: mol_type = other DNA
ggcatttagtacattcacag

SEQ ID NO: 36568 - DNA, 20 bp, synthetic construct
  misc_feature 1..20: note = chemically synthesized
  source 1..20: mol_type = other DNA
tgcaaccatcatcatatttc

SEQ ID NO: 36569 - DNA, 20 bp, synthetic construct
  misc_feature 1..20: note = chemically synthesized
  source 1..20: mol_type = other DNA
gaatattttcctcatcccca

SEQ ID NO: 36570 - DNA, 20 bp, synthetic construct
  misc_feature 1..20: note = chemically synthesized
  source 1..20: mol_type = other DNA
aatattttcctcatccccaa

SEQ ID NO: 36571 - DNA, 20 bp, synthetic construct
  misc_feature 1..20: note = chemically synthesized
  source 1..20: mol_type = other DNA
gaaacctcatgctcattaat

SEQ ID NO: 36572 - DNA, 20 bp, synthetic construct
  misc_feature 1..20: note = chemically synthesized
  source 1..20: mol_type = other DNA
acctcatgctcattaatcag

SEQ ID NO: 36573 - DNA, 20 bp, synthetic construct
  misc_feature 1..20: note = chemically synthesized
  source 1..20: mol_type = other DNA
gtagctctcctttaaaatat

SEQ ID NO: 36574 - DNA, 20 bp, synthetic construct
  misc_feature 1..20: note = chemically synthesized
  source 1..20: mol_type = other DNA
cctttaaaatattagttatg

SEQ ID NO: 36575 - DNA, 20 bp, synthetic construct
  misc_feature 1..20: note = chemically synthesized
  source 1..20: mol_type = other DNA
aatattagttatgaagatca

SEQ ID NO: 36576 - DNA, 20 bp, synthetic construct
  misc_feature 1..20: note = chemically synthesized
  source 1..20: mol_type = other DNA
aaaactcattatgtaatgtt

SEQ ID NO: 36577 - DNA, 20 bp, synthetic construct
  misc_feature 1..20: note = chemically synthesized
  source 1..20: mol_type = other DNA
gtaatgttgagtgaaaaaat

SEQ ID NO: 36578 - DNA, 20 bp, synthetic construct
  misc_feature 1..20: note = chemically synthesized
  source 1..20: mol_type = other DNA
taatgttgagtgaaaaaatc

SEQ ID NO: 36579 - DNA, 20 bp, synthetic construct
  misc_feature 1..20: note = chemically synthesized
  source 1..20: mol_type = other DNA
aatgttgagtgaaaaaatca

SEQ ID NO: 36580 - DNA, 20 bp, synthetic construct
  misc_feature 1..20: note = chemically synthesized
  source 1..20: mol_type = other DNA
attttgtgatatgatgtaat

SEQ ID NO: 36581 - DNA, 20 bp, synthetic construct
  misc_feature 1..20: note = chemically synthesized
  source 1..20: mol_type = other DNA
tgatatgatgtaattagtga

SEQ ID NO: 36582 - DNA, 20 bp, synthetic construct
  misc_feature 1..20: note = chemically synthesized
  source 1..20: mol_type = other DNA
tatgatgtaattagtgaaag

SEQ ID NO: 36583 - DNA, 20 bp, synthetic construct
  misc_feature 1..20: note = chemically synthesized
  source 1..20: mol_type = other DNA
tagtgaaagaagcatacaaa

SEQ ID NO: 36584 - DNA, 20 bp, synthetic construct
  misc_feature 1..20: note = chemically synthesized
  source 1..20: mol_type = other DNA
gtctgaaaatataaaaacaa

SEQ ID NO: 36585 - DNA, 20 bp, synthetic construct
  misc_feature 1..20: note = chemically synthesized
  source 1..20: mol_type = other DNA
acaatagcaattgcatttct

SEQ ID NO: 36586 - DNA, 20 bp, synthetic construct
  misc_feature 1..20: note = chemically synthesized
  source 1..20: mol_type = other DNA
catttaaacattattcttta

SEQ ID NO: 36587 - DNA, 20 bp, synthetic construct
  misc_feature 1..20: note = chemically synthesized
  source 1..20: mol_type = other DNA
attattctttatggttttaa

SEQ ID NO: 36588 - DNA, 20 bp, synthetic construct
  misc_feature 1..20: note = chemically synthesized
  source 1..20: mol_type = other DNA
tctttatggttttaaaagca

SEQ ID NO: 36589 - DNA, 20 bp, synthetic construct
  misc_feature 1..20: note = chemically synthesized
  source 1..20: mol_type = other DNA
tggttttaaaagcaaagaaa

SEQ ID NO: 36590 - DNA, 20 bp, synthetic construct
  misc_feature 1..20: note = chemically synthesized
  source 1..20: mol_type = other DNA
ggttttaaaagcaaagaaaa

SEQ ID NO: 36591 - DNA, 20 bp, synthetic construct
  misc_feature 1..20: note = chemically synthesized
  source 1..20: mol_type = other DNA
taaaagcaaagaaaaaggta

SEQ ID NO: 36592 - DNA, 20 bp, synthetic construct
  misc_feature 1..20: note = chemically synthesized
  source 1..20: mol_type = other DNA
agaaacaacaaccaaccgca

SEQ ID NO: 36593 - DNA, 20 bp, synthetic construct
  misc_feature 1..20: note = chemically synthesized
  source 1..20: mol_type = other DNA
aaccgcaaagcaccatgaca

SEQ ID NO: 36594 - DNA, 20 bp, synthetic construct
  misc_feature 1..20: note = chemically synthesized
  source 1..20: mol_type = other DNA
caaagcaccatgacaaagct

SEQ ID NO: 36595 - DNA, 20 bp, synthetic construct
  misc_feature 1..20: note = chemically synthesized
  source 1..20: mol_type = other DNA
aaagctcagattgttaaatc

SEQ ID NO: 36596 - DNA, 20 bp, synthetic construct
  misc_feature 1..20: note = chemically synthesized
  source 1..20: mol_type = other DNA
aagctcagattgttaaatcc

SEQ ID NO: 36597 - DNA, 20 bp, synthetic construct
  misc_feature 1..20: note = chemically synthesized
  source 1..20: mol_type = other DNA
gattgttaaatccaggtttt

SEQ ID NO: 36598 - DNA, 20 bp, synthetic construct
  misc_feature 1..20: note = chemically synthesized
  source 1..20: mol_type = other DNA
aaatccaggtttttggaaca

SEQ ID NO: 36599 - DNA, 20 bp, synthetic construct
  misc_feature 1..20: note = chemically synthesized
  source 1..20: mol_type = other DNA
tatatgacgtttacactctc

SEQ ID NO: 36600 - DNA, 20 bp, synthetic construct
  misc_feature 1..20: note = chemically synthesized
  source 1..20: mol_type = other DNA
atatgacgtttacactctcc

SEQ ID NO: 36601 - DNA, 20 bp, synthetic construct
  misc_feature 1..20: note = chemically synthesized
  source 1..20: mol_type = other DNA
tatgacgtttacactctcca

SEQ ID NO: 36602 - DNA, 20 bp, synthetic construct
  misc_feature 1..20: note = chemically synthesized
  source 1..20: mol_type = other DNA
cgtttacactctccagggtt

SEQ ID NO: 36603 - DNA, 20 bp, synthetic construct
  misc_feature 1..20: note = chemically synthesized
  source 1..20: mol_type = other DNA
tttacactctccagggttca

SEQ ID NO: 36604 - DNA, 20 bp, synthetic construct
  misc_feature 1..20: note = chemically synthesized
  source 1..20: mol_type = other DNA
tacactctccagggttcaga

SEQ ID NO: 36605 - DNA, 20 bp, synthetic construct
  misc_feature 1..20: note = chemically synthesized
  source 1..20: mol_type = other DNA
tctccagggttcagagagtc

SEQ ID NO: 36606 - DNA, 20 bp, synthetic construct
  misc_feature 1..20: note = chemically synthesized
  source 1..20: mol_type = other DNA
ccagggttcagagagtctgg

SEQ ID NO: 36607 - DNA, 20 bp, synthetic construct
  misc_feature 1..20: note = chemically synthesized
  source 1..20: mol_type = other DNA
ttcagagagtctggcagcat

SEQ ID NO: 36608 - DNA, 20 bp, synthetic construct
  misc_feature 1..20: note = chemically synthesized
  source 1..20: mol_type = other DNA
tcagagagtctggcagcatt

SEQ ID NO: 36609 - DNA, 20 bp, synthetic construct
  misc_feature 1..20: note = chemically synthesized
  source 1..20: mol_type = other DNA
agagagtctggcagcattgg

SEQ ID NO: 36610 - DNA, 20 bp, synthetic construct
  misc_feature 1..20: note = chemically synthesized
  source 1..20: mol_type = other DNA
gggagctgccttgtgttcta

SEQ ID NO: 36611 - DNA, 20 bp, synthetic construct
  misc_feature 1..20: note = chemically synthesized
  source 1..20: mol_type = other DNA
ccttgtgttctacagcctca

SEQ ID NO: 36612 - DNA, 20 bp, synthetic construct
  misc_feature 1..20: note = chemically synthesized
  source 1..20: mol_type = other DNA
gtgttctacagcctcacgga

SEQ ID NO: 36613 - DNA, 20 bp, synthetic construct
  misc_feature 1..20: note = chemically synthesized
  source 1..20: mol_type = other DNA
tctacagcctcacggacaga

SEQ ID NO: 36614 - DNA, 20 bp, synthetic construct
  misc_feature 1..20: note = chemically synthesized
  source 1..20: mol_type = other DNA
ctacagcctcacggacagac

SEQ ID NO: 36615 - DNA, 20 bp, synthetic construct
  misc_feature 1..20: note = chemically synthesized
  source 1..20: mol_type = other DNA
acagcctcacggacagacag

SEQ ID NO: 36616 - DNA, 20 bp, synthetic construct
  misc_feature 1..20: note = chemically synthesized
  source 1..20: mol_type = other DNA
cagcctcacggacagacagg

SEQ ID NO: 36617 - DNA, 20 bp, synthetic construct
  misc_feature 1..20: note = chemically synthesized
  source 1..20: mol_type = other DNA
tcaccactgctctgttcttc

SEQ ID NO: 36618 - DNA, 20 bp, synthetic construct
  misc_feature 1..20: note = chemically synthesized
  source 1..20: mol_type = other DNA
accactgctctgttcttctg

SEQ ID NO: 36619 - DNA, 20 bp, synthetic construct
  misc_feature 1..20: note = chemically synthesized
  source 1..20: mol_type = other DNA
gtttccttgtgaacatgttg

SEQ ID NO: 36620 - DNA, 20 bp, synthetic construct
  misc_feature 1..20: note = chemically synthesized
  source 1..20: mol_type = other DNA
ttgtgaacatgttgtggacg

SEQ ID NO: 36621 - DNA, 20 bp, synthetic construct
  misc_feature 1..20: note = chemically synthesized
  source 1..20: mol_type = other DNA
ttctttcatctttttaaaca

SEQ ID NO: 36622 - DNA, 20 bp, synthetic construct
  misc_feature 1..20: note = chemically synthesized
  source 1..20: mol_type = other DNA
tctttcatctttttaaacac

SEQ ID NO: 36623 - DNA, 20 bp, synthetic construct
  misc_feature 1..20: note = chemically synthesized
  source 1..20: mol_type = other DNA
tttttaaacacaggtacctt

SEQ ID NO: 36624 - DNA, 20 bp, synthetic construct
  misc_feature 1..20: note = chemically synthesized
  source 1..20: mol_type = other DNA
ttttaaacacaggtaccttt

SEQ ID NO: 36625 - DNA, 20 bp, synthetic construct
  misc_feature 1..20: note = chemically synthesized
  source 1..20: mol_type = other DNA
tttaaacacaggtacctttg

SEQ ID NO: 36626 - DNA, 20 bp, synthetic construct
  misc_feature 1..20: note = chemically synthesized
  source 1..20: mol_type = other DNA
aacacaggtacctttggggc

SEQ ID NO: 36627 - DNA, 20 bp, synthetic construct
  misc_feature 1..20: note = chemically synthesized
  source 1..20: mol_type = other DNA
cctttggggctggctttctc

SEQ ID NO: 36628 - DNA, 20 bp, synthetic construct
  misc_feature 1..20: note = chemically synthesized
  source 1..20: mol_type = other DNA
ctttggggctggctttctca

SEQ ID NO: 36629 - DNA, 20 bp, synthetic construct
  misc_feature 1..20: note = chemically synthesized
  source 1..20: mol_type = other DNA
tggggctggctttctcaagg

SEQ ID NO: 36630 - DNA, 20 bp, synthetic construct
  misc_feature 1..20: note = chemically synthesized
  source 1..20: mol_type = other DNA
ctggctttctcaaggaagcc

SEQ ID NO: 36631 - DNA, 20 bp, synthetic construct
  misc_feature 1..20: note = chemically synthesized
  source 1..20: mol_type = other DNA
aagcccagctccctgtgatt

SEQ ID NO: 36632 - DNA, 20 bp, synthetic construct
  misc_feature 1..20: note = chemically synthesized
  source 1..20: mol_type = other DNA
gctccctgtgattgagaatg

SEQ ID NO: 36633 - DNA, 20 bp, synthetic construct
  misc_feature 1..20: note = chemically synthesized
  source 1..20: mol_type = other DNA
atgaagtgtgcaatcgctat

SEQ ID NO: 36634 - DNA, 20 bp, synthetic construct
  misc_feature 1..20: note = chemically synthesized
  source 1..20: mol_type = other DNA
aatcgctatgagtttctgaa

SEQ ID NO: 36635 - DNA, 20 bp, synthetic construct
  misc_feature 1..20: note = chemically synthesized
  source 1..20: mol_type = other DNA
cgctatgagtttctgaatgg

SEQ ID NO: 36636 - DNA, 20 bp, synthetic construct
  misc_feature 1..20: note = chemically synthesized
  source 1..20: mol_type = other DNA
ctatgagtttctgaatggaa

SEQ ID NO: 36637 - DNA, 20 bp, synthetic construct
  misc_feature 1..20: note = chemically synthesized
  source 1..20: mol_type = other DNA
atggaagagtcaaatccact

SEQ ID NO: 36638 - DNA, 20 bp, synthetic construct
  misc_feature 1..20: note = chemically synthesized
  source 1..20: mol_type = other DNA
aaatccactgagctctgtgc

SEQ ID NO: 36639 - DNA, 20 bp, synthetic construct
  misc_feature 1..20: note = chemically synthesized
  source 1..20: mol_type = other DNA
aatccactgagctctgtgct

SEQ ID NO: 36640 - DNA, 20 bp, synthetic construct
  misc_feature 1..20: note = chemically synthesized
  source 1..20: mol_type = other DNA
tgagctctgtgctgggcatt

SEQ ID NO: 36641 - DNA, 20 bp, synthetic construct
  misc_feature 1..20: note = chemically synthesized
  source 1..20: mol_type = other DNA
ctctgtgctgggcatttggc

SEQ ID NO: 36642 - DNA, 20 bp, synthetic construct
  misc_feature 1..20: note = chemically synthesized
  source 1..20: mol_type = other DNA
ctgtgctgggcatttggctg

SEQ ID NO: 36643 - DNA, 20 bp, synthetic construct
  misc_feature 1..20: note = chemically synthesized
  source 1..20: mol_type = other DNA
tgtgctgggcatttggctgg

SEQ ID NO: 36644 - DNA, 20 bp, synthetic construct
  misc_feature 1..20: note = chemically synthesized
  source 1..20: mol_type = other DNA
catttggctggaggcattga

SEQ ID NO: 36645 - DNA, 20 bp, synthetic construct
  misc_feature 1..20: note = chemically synthesized
  source 1..20: mol_type = other DNA
ctggaggcattgacagttgc

SEQ ID NO: 36646 - DNA, 20 bp, synthetic construct
  misc_feature 1..20: note = chemically synthesized
  source 1..20: mol_type = other DNA
tggaggcattgacagttgca

SEQ ID NO: 36647 - DNA, 20 bp, synthetic construct
  misc_feature 1..20: note = chemically synthesized
  source 1..20: mol_type = other DNA
ggcattgacagttgcaaggt

SEQ ID NO: 36648 - DNA, 20 bp, synthetic construct
  misc_feature 1..20: note = chemically synthesized
  source 1..20: mol_type = other DNA
tgacagttgcaaggtaagaa

SEQ ID NO: 36649 - DNA, 20 bp, synthetic construct
  misc_feature 1..20: note = chemically synthesized
  source 1..20: mol_type = other DNA
ttgcaaggtaagaaaagatc

SEQ ID NO: 36650 - DNA, 20 bp, synthetic construct
  misc_feature 1..20: note = chemically synthesized
  source 1..20: mol_type = other DNA
gcaaggtaagaaaagatcaa

SEQ ID NO: 36651 - DNA, 20 bp, synthetic construct
  misc_feature 1..20: note = chemically synthesized
  source 1..20: mol_type = other DNA
aagaaaagatcaagagacca

SEQ ID NO: 36652 - DNA, 20 bp, synthetic construct
  misc_feature 1..20: note = chemically synthesized
  source 1..20: mol_type = other DNA
aaagatcaagagaccaaagt

SEQ ID NO: 36653 - DNA, 20 bp, synthetic construct
  misc_feature 1..20: note = chemically synthesized
  source 1..20: mol_type = other DNA
agtcttgtgctctcctgtct

SEQ ID NO: 36654 - DNA, 20 bp, synthetic construct
  misc_feature 1..20: note = chemically synthesized
  source 1..20: mol_type = other DNA
gtgctctcctgtctcagtct

SEQ ID NO: 36655 - DNA, 20 bp, synthetic construct
  misc_feature 1..20: note = chemically synthesized
  source 1..20: mol_type = other DNA
ctgtctcagtctcagtccct

SEQ ID NO: 36656 - DNA, 20 bp, synthetic construct
  misc_feature 1..20: note = chemically synthesized
  source 1..20: mol_type = other DNA
agtctcagtcccttagactt

SEQ ID NO: 36657 - DNA, 20 bp, synthetic construct
  misc_feature 1..20: note = chemically synthesized
  source 1..20: mol_type = other DNA
tcccttagacttgagtccca

SEQ ID NO: 36658 - DNA, 20 bp, synthetic construct
  misc_feature 1..20: note = chemically synthesized
  source 1..20: mol_type = other DNA
cttagacttgagtcccaaag

SEQ ID NO: 36659 - DNA, 20 bp, synthetic construct
  misc_feature 1..20: note = chemically synthesized
  source 1..20: mol_type = other DNA
agtcccaaagtagcgaattc

SEQ ID NO: 36660 - DNA, 20 bp, synthetic construct
  misc_feature 1..20: note = chemically synthesized
  source 1..20: mol_type = other DNA
cccaaagtagcgaattcaag

SEQ ID NO: 36661 - DNA, 20 bp, synthetic construct
  misc_feature 1..20: note = chemically synthesized
  source 1..20: mol_type = other DNA
ccaaagtagcgaattcaagt

SEQ ID NO: 36662 - DNA, 20 bp, synthetic construct
  misc_feature 1..20: note = chemically synthesized
  source 1..20: mol_type = other DNA
ttcaagtaggatttaatcaa

SEQ ID NO: 36663 - DNA, 20 bp, synthetic construct
  misc_feature 1..20: note = chemically synthesized
  source 1..20: mol_type = other DNA
aagtaggatttaatcaatgg

SEQ ID NO: 36664 - DNA, 20 bp, synthetic construct
  misc_feature 1..20: note = chemically synthesized
  source 1..20: mol_type = other DNA
atttaatcaatggaagaccc

SEQ ID NO: 36665 - DNA, 20 bp, synthetic construct
  misc_feature 1..20: note = chemically synthesized
  source 1..20: mol_type = other DNA
tcaatggaagaccccagtct

SEQ ID NO: 36666 - DNA, 20 bp, synthetic construct
  misc_feature 1..20: note = chemically synthesized
  source 1..20: mol_type = other DNA
accccagtctaagtgttgct

SEQ ID NO: 36667 - DNA, 20 bp, synthetic construct
  misc_feature 1..20: note = chemically synthesized
  source 1..20: mol_type = other DNA
agtgttgctcagaaactccc

SEQ ID NO: 36668 - DNA, 20 bp, synthetic construct
  misc_feature 1..20: note = chemically synthesized
  source 1..20: mol_type = other DNA
atctgtcccaaatgtatatt

SEQ ID NO: 36669 - DNA, 20 bp, synthetic construct
  misc_feature 1..20: note = chemically synthesized
  source 1..20: mol_type = other DNA
aatgtatattcagatcatcc

SEQ ID NO: 36670 - DNA, 20 bp, synthetic construct
  misc_feature 1..20: note = chemically synthesized
  source 1..20: mol_type = other DNA
atgtatattcagatcatcca

SEQ ID NO: 36671 - DNA, 20 bp, synthetic construct
  misc_feature 1..20: note = chemically synthesized
  source 1..20: mol_type = other DNA
tgtatattcagatcatccaa

SEQ ID NO: 36672 - DNA, 20 bp, synthetic construct
  misc_feature 1..20: note = chemically synthesized
  source 1..20: mol_type = other DNA
gtatattcagatcatccaag

SEQ ID NO: 36673 - DNA, 20 bp, synthetic construct
  misc_feature 1..20: note = chemically synthesized
  source 1..20: mol_type = other DNA
gatcatccaaggggacttct

SEQ ID NO: 36674 - DNA, 20 bp, synthetic construct
  misc_feature 1..20: note = chemically synthesized
  source 1..20: mol_type = other DNA
atcatccaaggggacttctt

SEQ ID NO: 36675 - DNA, 20 bp, synthetic construct
  misc_feature 1..20: note = chemically synthesized
  source 1..20: mol_type = other DNA
tcatccaaggggacttcttg

SEQ ID NO: 36676 - DNA, 20 bp, synthetic construct
  misc_feature 1..20: note = chemically synthesized
  source 1..20: mol_type = other DNA
aaggggacttcttggggctt

SEQ ID NO: 36677 - DNA, 20 bp, synthetic construct
  misc_feature 1..20: note = chemically synthesized
  source 1..20: mol_type = other DNA
acttcttggggcttgagttc

SEQ ID NO: 36678 - DNA, 20 bp, synthetic construct
  misc_feature 1..20: note = chemically synthesized
  source 1..20: mol_type = other DNA
ttggggcttgagttccagat

SEQ ID NO: 36679 - DNA, 20 bp, synthetic construct
  misc_feature 1..20: note = chemically synthesized
  source 1..20: mol_type = other DNA
gggcttgagttccagatcag

SEQ ID NO: 36680 - DNA, 20 bp, synthetic construct
  misc_feature 1..20: note = chemically synthesized
  source 1..20: mol_type = other DNA
ttgagttccagatcagcagc

SEQ ID NO: 36681 - DNA, 20 bp, synthetic construct
  misc_feature 1..20: note = chemically synthesized
  source 1..20: mol_type = other DNA
tgagttccagatcagcagca

SEQ ID NO: 36682 - DNA, 20 bp, synthetic construct
  misc_feature 1..20: note = chemically synthesized
  source 1..20: mol_type = other DNA
gagttccagatcagcagcaa

SEQ ID NO: 36683 - DNA, 20 bp, synthetic construct
  misc_feature 1..20: note = chemically synthesized
  source 1..20: mol_type = other DNA
gttccagatcagcagcaagg

SEQ ID NO: 36684 - DNA, 20 bp, synthetic construct
  misc_feature 1..20: note = chemically synthesized
  source 1..20: mol_type = other DNA
atcagcagcaagggagccat

SEQ ID NO: 36685 - DNA, 20 bp, synthetic construct
  misc_feature 1..20: note = chemically synthesized
  source 1..20: mol_type = other DNA
cataagtgccataactacct

SEQ ID NO: 36686 - DNA, 20 bp, synthetic construct
  misc_feature 1..20: note = chemically synthesized
  source 1..20: mol_type = other DNA
cctcagaccactcaccctcc

SEQ ID NO: 36687 - DNA, 20 bp, synthetic construct
  misc_feature 1..20: note = chemically synthesized
  source 1..20: mol_type = other DNA
ctcagaccactcaccctcct

SEQ ID NO: 36688 - DNA, 20 bp, synthetic construct
  misc_feature 1..20: note = chemically synthesized
  source 1..20: mol_type = other DNA
tcagaccactcaccctcctg

SEQ ID NO: 36689 - DNA, 20 bp, synthetic construct
  misc_feature 1..20: note = chemically synthesized
  source 1..20: mol_type = other DNA
ctcaccctcctggggtgtcc

SEQ ID NO: 36690 - DNA, 20 bp, synthetic construct
  misc_feature 1..20: note = chemically synthesized
  source 1..20: mol_type = other DNA
accctcctggggtgtcccgg

SEQ ID NO: 36691 - DNA, 20 bp, synthetic construct
  misc_feature 1..20: note = chemically synthesized
  source 1..20: mol_type = other DNA
tcctggggtgtcccggtggc

SEQ ID NO: 36692 - DNA, 20 bp, synthetic construct
  misc_feature 1..20: note = chemically synthesized
  source 1..20: mol_type = other DNA
cctggggtgtcccggtggcc

SEQ ID NO: 36693 - DNA, 20 bp, synthetic construct
  misc_feature 1..20: note = chemically synthesized
  source 1..20: mol_type = other DNA
ctggggtgtcccggtggcca

SEQ ID NO: 36694 - DNA, 20 bp, synthetic construct
  misc_feature 1..20: note = chemically synthesized
  source 1..20: mol_type = other DNA
gtcccggtggccagggacta

SEQ ID NO: 36695 - DNA, 20 bp, synthetic construct
  misc_feature 1..20: note = chemically synthesized
  source 1..20: mol_type = other DNA
ccggtggccagggactaaag

SEQ ID NO: 36696 - DNA, 20 bp, synthetic construct
  misc_feature 1..20: note = chemically synthesized
  source 1..20: mol_type = other DNA
gactaaagtggtgatttttc

SEQ ID NO: 36697 - DNA, 20 bp, synthetic construct
  misc_feature 1..20: note = chemically synthesized
  source 1..20: mol_type = other DNA
taaagtggtgatttttctgg

SEQ ID NO: 36698 - DNA, 20 bp, synthetic construct
  misc_feature 1..20: note = chemically synthesized
  source 1..20: mol_type = other DNA
aaagtggtgatttttctggt

SEQ ID NO: 36699 - DNA, 20 bp, synthetic construct
  misc_feature 1..20: note = chemically synthesized
  source 1..20: mol_type = other DNA
aagtggtgatttttctggta

SEQ ID NO: 36700 - DNA, 20 bp, synthetic construct
  misc_feature 1..20: note = chemically synthesized
  source 1..20: mol_type = other DNA
tggtgatttttctggtaggg

SEQ ID NO: 36701 - DNA, 20 bp, synthetic construct
  misc_feature 1..20: note = chemically synthesized
  source 1..20: mol_type = other DNA
ggtgatttttctggtaggga

SEQ ID NO: 36702 - DNA, 20 bp, synthetic construct
  misc_feature 1..20: note = chemically synthesized
  source 1..20: mol_type = other DNA
tgatttttctggtagggaag

SEQ ID NO: 36703 - DNA, 20 bp, synthetic construct
  misc_feature 1..20: note = chemically synthesized
  source 1..20: mol_type = other DNA
gatttttctggtagggaagg

SEQ ID NO: 36704 - DNA, 20 bp, synthetic construct
  misc_feature 1..20: note = chemically synthesized
  source 1..20: mol_type = other DNA
ttttctggtagggaaggagg

SEQ ID NO: 36705 - DNA, 20 bp, synthetic construct
  misc_feature 1..20: note = chemically synthesized
  source 1..20: mol_type = other DNA
ttctggtagggaaggaggta

SEQ ID NO: 36706 - DNA, 20 bp, synthetic construct
  misc_feature 1..20: note = chemically synthesized
  source 1..20: mol_type = other DNA
tctggtagggaaggaggtag

SEQ ID NO: 36707 - DNA, 20 bp, synthetic construct
  misc_feature 1..20: note = chemically synthesized
  source 1..20: mol_type = other DNA
ctggtagggaaggaggtaga

SEQ ID NO: 36708 - DNA, 20 bp, synthetic construct
  misc_feature 1..20: note = chemically synthesized
  source 1..20: mol_type = other DNA
agggaaggaggtagagggta

SEQ ID NO: 36709 - DNA, 20 bp, synthetic construct
  misc_feature 1..20: note = chemically synthesized
  source 1..20: mol_type = other DNA
gggaaggaggtagagggtac

SEQ ID NO: 36710 - DNA, 20 bp, synthetic construct
  misc_feature 1..20: note = chemically synthesized
  source 1..20: mol_type = other DNA
aggaggtagagggtacagga

SEQ ID NO: 36711 - DNA, 20 bp, synthetic construct
  misc_feature 1..20: note = chemically synthesized
  source 1..20: mol_type = other DNA
gaggtagagggtacaggaca

SEQ ID NO: 36712 - DNA, 20 bp, synthetic construct
  misc_feature 1..20: note = chemically synthesized
  source 1..20: mol_type = other DNA
actaactgcacacaatatct

SEQ ID NO: 36713 - DNA, 20 bp, synthetic construct
  misc_feature 1..20: note = chemically synthesized
  source 1..20: mol_type = other DNA
ctgcacacaatatctgagac

SEQ ID NO: 36714 - DNA, 20 bp, synthetic construct
  misc_feature 1..20: note = chemically synthesized
  source 1..20: mol_type = other DNA
gcacacaatatctgagactg

SEQ ID NO: 36715 - DNA, 20 bp, synthetic construct
  misc_feature 1..20: note = chemically synthesized
  source 1..20: mol_type = other DNA
caatatctgagactggagct

SEQ ID NO: 36716 - DNA, 20 bp, synthetic construct
  misc_feature 1..20: note = chemically synthesized
  source 1..20: mol_type = other DNA
gctcagatattgctgatgat

SEQ ID NO: 36717 - DNA, 20 bp, synthetic construct
  misc_feature 1..20: note = chemically synthesized
  source 1..20: mol_type = other DNA
tcagatattgctgatgatca

SEQ ID NO: 36718 - DNA, 20 bp, synthetic construct
  misc_feature 1..20: note = chemically synthesized
  source 1..20: mol_type = other DNA
atattgctgatgatcagagt

SEQ ID NO: 36719 - DNA, 20 bp, synthetic construct
  misc_feature 1..20: note = chemically synthesized
  source 1..20: mol_type = other DNA
ctccccaattgatttacaac

SEQ ID NO: 36720 - DNA, 20 bp, synthetic construct
  misc_feature 1..20: note = chemically synthesized
  source 1..20: mol_type = other DNA
tccccaattgatttacaact

SEQ ID NO: 36721 - DNA, 20 bp, synthetic construct
  misc_feature 1..20: note = chemically synthesized
  source 1..20: mol_type = other DNA
ccccaattgatttacaactg

SEQ ID NO: 36722 - DNA, 20 bp, synthetic construct
  misc_feature 1..20: note = chemically synthesized
  source 1..20: mol_type = other DNA
attgatttacaactggggct

SEQ ID NO: 36723 - DNA, 20 bp, synthetic construct
  misc_feature 1..20: note = chemically synthesized
  source 1..20: mol_type = other DNA
ggcttggatactgttttaaa

SEQ ID NO: 36724 - DNA, 20 bp, synthetic construct
  misc_feature 1..20: note = chemically synthesized
  source 1..20: mol_type = other DNA
gcttggatactgttttaaac

SEQ ID NO: 36725 - DNA, 20 bp, synthetic construct
  misc_feature 1..20: note = chemically synthesized
  source 1..20: mol_type = other DNA
ttggatactgttttaaacgg

SEQ ID NO: 36726 - DNA, 20 bp, synthetic construct
  misc_feature 1..20: note = chemically synthesized
  source 1..20: mol_type = other DNA
tggatactgttttaaacggg

SEQ ID NO: 36727 - DNA, 20 bp, synthetic construct
  misc_feature 1..20: note = chemically synthesized
  source 1..20: mol_type = other DNA
gatactgttttaaacgggag

SEQ ID NO: 36728 - DNA, 20 bp, synthetic construct
  misc_feature 1..20: note = chemically synthesized
  source 1..20: mol_type = other DNA
aaccactgacgtgactacac

SEQ ID NO: 36729 - DNA, 20 bp, synthetic construct
  misc_feature 1..20: note = chemically synthesized
  source 1..20: mol_type = other DNA
ccactgacgtgactacacta

SEQ ID NO: 36730 - DNA, 20 bp, synthetic construct
  misc_feature 1..20: note = chemically synthesized
  source 1..20: mol_type = other DNA
tgacgtgactacactagaga

SEQ ID NO: 36731 - DNA, 20 bp, synthetic construct
  misc_feature 1..20: note = chemically synthesized
  source 1..20: mol_type = other DNA
ccactcttgctttacttcat

SEQ ID NO: 36732 - DNA, 20 bp, synthetic construct
  misc_feature 1..20: note = chemically synthesized
  source 1..20: mol_type = other DNA
cttcatgagaacgaaaatgt

SEQ ID NO: 36733 - DNA, 20 bp, synthetic construct
  misc_feature 1..20: note = chemically synthesized
  source 1..20: mol_type = other DNA
ttgcaccatgaattcatttg

SEQ ID NO: 36734 - DNA, 20 bp, synthetic construct
  misc_feature 1..20: note = chemically synthesized
  source 1..20: mol_type = other DNA
accatgaattcatttgcgga

SEQ ID NO: 36735 - DNA, 20 bp, synthetic construct
  misc_feature 1..20: note = chemically synthesized
  source 1..20: mol_type = other DNA
ttattttattttattttatt

SEQ ID NO: 36736 - DNA, 20 bp, synthetic construct
  misc_feature 1..20: note = chemically synthesized
  source 1..20: mol_type = other DNA
ttttattgagactctcaccc

SEQ ID NO: 36737 - DNA, 20 bp, synthetic construct
  misc_feature 1..20: note = chemically synthesized
  source 1..20: mol_type = other DNA
tgagactctcaccccggttg

SEQ ID NO: 36738 - DNA, 20 bp, synthetic construct
  misc_feature 1..20: note = chemically synthesized
  source 1..20: mol_type = other DNA
gaagtgcactgacgtgattt

SEQ ID NO: 36739 - DNA, 20 bp, synthetic construct
  misc_feature 1..20: note = chemically synthesized
  source 1..20: mol_type = other DNA
tcactgcaacttccacctcc

SEQ ID NO: 36740 - DNA, 20 bp, synthetic construct
  misc_feature 1..20: note = chemically synthesized
  source 1..20: mol_type = other DNA
cactgcaacttccacctcct

SEQ ID NO: 36741 - DNA, 20 bp, synthetic construct
  misc_feature 1..20: note = chemically synthesized
  source 1..20: mol_type = other DNA
aacttccacctcctgggttc

SEQ ID NO: 36742 - DNA, 20 bp, synthetic construct
  misc_feature 1..20: note = chemically synthesized
  source 1..20: mol_type = other DNA
ctgggttcaagtgaatactc

SEQ ID NO: 36743 - DNA, 20 bp, synthetic construct
  misc_feature 1..20: note = chemically synthesized
  source 1..20: mol_type = other DNA
agtgaatactccagcctccc

SEQ ID NO: 36744 - DNA, 20 bp, synthetic construct
  misc_feature 1..20: note = chemically synthesized
  source 1..20: mol_type = other DNA
gaatactccagcctccctag

SEQ ID NO: 36745 - DNA, 20 bp, synthetic construct
  misc_feature 1..20: note = chemically synthesized
  source 1..20: mol_type = other DNA
actccagcctccctagtagc

SEQ ID NO: 36746 - DNA, 20 bp, synthetic construct
  misc_feature 1..20: note = chemically synthesized
  source 1..20: mol_type = other DNA
ctccagcctccctagtagct

SEQ ID NO: 36747 - DNA, 20 bp, synthetic construct
  misc_feature 1..20: note = chemically synthesized
  source 1..20: mol_type = other DNA
ctccctagtagctgggatta

SEQ ID NO: 36748 - DNA, 20 bp, synthetic construct
  misc_feature 1..20: note = chemically synthesized
  source 1..20: mol_type = other DNA
tccctagtagctgggattac

SEQ ID NO: 36749 - DNA, 20 bp, synthetic construct
  misc_feature 1..20: note = chemically synthesized
  source 1..20: mol_type = other DNA
caggtgcccaccaccacgcc

SEQ ID NO: 36750 - DNA, 20 bp, synthetic construct
  misc_feature 1..20: note = chemically synthesized
  source 1..20: mol_type = other DNA
ctggctaatttttgtatttt

SEQ ID NO: 36751 - DNA, 20 bp, synthetic construct
  misc_feature 1..20: note = chemically synthesized
  source 1..20: mol_type = other DNA
gctaatttttgtatttttag

SEQ ID NO: 36752 - DNA, 20 bp, synthetic construct
  misc_feature 1..20: note = chemically synthesized
  source 1..20: mol_type = other DNA
taatttttgtatttttagta

SEQ ID NO: 36753 - DNA, 20 bp, synthetic construct
  misc_feature 1..20: note = chemically synthesized
  source 1..20: mol_type = other DNA
ttttgtatttttagtagaga

SEQ ID NO: 36754 - DNA, 20 bp, synthetic construct
  misc_feature 1..20: note = chemically synthesized
  source 1..20: mol_type = other DNA
tttgtatttttagtagagat

SEQ ID NO: 36755 - DNA, 20 bp, synthetic construct
  misc_feature 1..20: note = chemically synthesized
  source 1..20: mol_type = other DNA
ttgtatttttagtagagatg

SEQ ID NO: 36756 - DNA, 20 bp, synthetic construct
  misc_feature 1..20: note = chemically synthesized
  source 1..20: mol_type = other DNA
gagatggggtttcaccacat

SEQ ID NO: 36757 - DNA, 20 bp, synthetic construct
  misc_feature 1..20: note = chemically synthesized
  source 1..20: mol_type = other DNA
ggggtttcaccacattggcc

SEQ ID NO: 36758 - DNA, 20 bp, synthetic construct
  misc_feature 1..20: note = chemically synthesized
  source 1..20: mol_type = other DNA
tttcaccacattggcctggc

SEQ ID NO: 36759 - DNA, 20 bp, synthetic construct
  misc_feature 1..20: note = chemically synthesized
  source 1..20: mol_type = other DNA
accttgtgatccacctgtct

SEQ ID NO: 36760 - DNA, 20 bp, synthetic construct
  misc_feature 1..20: note = chemically synthesized
  source 1..20: mol_type = other DNA
ccacctgtcttggcctccca

SEQ ID NO: 36761 - DNA, 20 bp, synthetic construct
  misc_feature 1..20: note = chemically synthesized
  source 1..20: mol_type = other DNA
gtcttggcctcccaaagtgc

SEQ ID NO: 36762 - DNA, 20 bp, synthetic construct
  misc_feature 1..20: note = chemically synthesized
  source 1..20: mol_type = other DNA
tcttggcctcccaaagtgct

SEQ ID NO: 36763 - DNA, 20 bp, synthetic construct
  misc_feature 1..20: note = chemically synthesized
  source 1..20: mol_type = other DNA
ctcccaaagtgctgggatta

SEQ ID NO: 36764 - DNA, 20 bp, synthetic construct
  misc_feature 1..20: note = chemically synthesized
  source 1..20: mol_type = other DNA
cccaaagtgctgggattaca

SEQ ID NO: 36765 - DNA, 20 bp, synthetic construct
  misc_feature 1..20: note = chemically synthesized
  source 1..20: mol_type = other DNA
agtgctgggattacagagtt

SEQ ID NO: 36766 - DNA, 20 bp, synthetic construct
  misc_feature 1..20: note = chemically synthesized
  source 1..20: mol_type = other DNA
aaatatttatttatttattt

SEQ ID NO: 36767 - DNA, 20 bp, synthetic construct
  misc_feature 1..20: note = chemically synthesized
  source 1..20: mol_type = other DNA
tttatttaagccacaactac

SEQ ID NO: 36768 - DNA, 20 bp, synthetic construct
  misc_feature 1..20: note = chemically synthesized
  source 1..20: mol_type = other DNA
ttaagccacaactactagaa

SEQ ID NO: 36769 - DNA, 20 bp, synthetic construct
  misc_feature 1..20: note = chemically synthesized
  source 1..20: mol_type = other DNA
taagccacaactactagaat

SEQ ID NO: 36770 - DNA, 20 bp, synthetic construct
  misc_feature 1..20: note = chemically synthesized
  source 1..20: mol_type = other DNA
gccacaactactagaatagg

SEQ ID NO: 36771 - DNA, 20 bp, synthetic construct
  misc_feature 1..20: note = chemically synthesized
  source 1..20: mol_type = other DNA
ccacaactactagaatagga

SEQ ID NO: 36772 - DNA, 20 bp, synthetic construct
  misc_feature 1..20: note = chemically synthesized
  source 1..20: mol_type = other DNA
gatattttattaattttatt

SEQ ID NO: 36773 - DNA, 20 bp, synthetic construct
  misc_feature 1..20: note = chemically synthesized
  source 1..20: mol_type = other DNA
attatttttttttctttcct

SEQ ID NO: 36774 - DNA, 20 bp, synthetic construct
  misc_feature 1..20: note = chemically synthesized
  source 1..20: mol_type = other DNA
gacattcttgctctgtcacc

SEQ ID NO: 36775 - DNA, 20 bp, synthetic construct
  misc_feature 1..20: note = chemically synthesized
  source 1..20: mol_type = other DNA
acattcttgctctgtcaccc

SEQ ID NO: 36776 - DNA, 20 bp, synthetic construct
  misc_feature 1..20: note = chemically synthesized
  source 1..20: mol_type = other DNA
tcttgctctgtcacccaggc

SEQ ID NO: 36777 - DNA, 20 bp, synthetic construct
  misc_feature 1..20: note = chemically synthesized
  source 1..20: mol_type = other DNA
ttgctctgtcacccaggctg

SEQ ID NO: 36778 - DNA, 20 bp, synthetic construct
  misc_feature 1..20: note = chemically synthesized
  source 1..20: mol_type = other DNA
ctgtcacccaggctggagtg

SEQ ID NO: 36779 - DNA, 20 bp, synthetic construct
  misc_feature 1..20: note = chemically synthesized
  source 1..20: mol_type = other DNA
tcacccaggctggagtgcag

SEQ ID NO: 36780 - DNA, 20 bp, synthetic construct
  misc_feature 1..20: note = chemically synthesized
  source 1..20: mol_type = other DNA
ggagtgcagtggcacattct

SEQ ID NO: 36781 - DNA, 20 bp, synthetic construct
  misc_feature 1..20: note = chemically synthesized
  source 1..20: mol_type = other DNA
aacctccatctcctgtgttc

SEQ ID NO: 36782 - DNA, 20 bp, synthetic construct
  misc_feature 1..20: note = chemically synthesized
  source 1..20: mol_type = other DNA
ctcctgtgttcaagcaattc

SEQ ID NO: 36783 - DNA, 20 bp, synthetic construct
  misc_feature 1..20: note = chemically synthesized
  source 1..20: mol_type = other DNA
ttcaagcaattctagtgcct

SEQ ID NO: 36784 - DNA, 20 bp, synthetic construct
  misc_feature 1..20: note = chemically synthesized
  source 1..20: mol_type = other DNA
ttctagtgcctcagcctact

SEQ ID NO: 36785 - DNA, 20 bp, synthetic construct
  misc_feature 1..20: note = chemically synthesized
  source 1..20: mol_type = other DNA
tagtgcctcagcctacttag

SEQ ID NO: 36786 - DNA, 20 bp, synthetic construct
  misc_feature 1..20: note = chemically synthesized
  source 1..20: mol_type = other DNA
gcctcagcctacttagtagc

SEQ ID NO: 36787 - DNA, 20 bp, synthetic construct
  misc_feature 1..20: note = chemically synthesized
  source 1..20: mol_type = other DNA
cctcagcctacttagtagct

SEQ ID NO: 36788 - DNA, 20 bp, synthetic construct
  misc_feature 1..20: note = chemically synthesized
  source 1..20: mol_type = other DNA
tacttagtagctgggatgac

SEQ ID NO: 36789 - DNA, 20 bp, synthetic construct
  misc_feature 1..20: note = chemically synthesized
  source 1..20: mol_type = other DNA
ctggcatgtgcctccacacc

SEQ ID NO: 36790 - DNA, 20 bp, synthetic construct
  misc_feature 1..20: note = chemically synthesized
  source 1..20: mol_type = other DNA
gctaatttttgtattttttg

SEQ ID NO: 36791 - DNA, 20 bp, synthetic construct
  misc_feature 1..20: note = chemically synthesized
  source 1..20: mol_type = other DNA
taatttttgtattttttgta

SEQ ID NO: 36792 - DNA, 20 bp, synthetic construct
  misc_feature 1..20: note = chemically synthesized
  source 1..20: mol_type = other DNA
ttttgtattttttgtagaga

SEQ ID NO: 36793 - DNA, 20 bp, synthetic construct
  misc_feature 1..20: note = chemically synthesized
  source 1..20: mol_type = other DNA
tttgtattttttgtagagac

SEQ ID NO: 36794 - DNA, 20 bp, synthetic construct
  misc_feature 1..20: note = chemically synthesized
  source 1..20: mol_type = other DNA
ttgtattttttgtagagaca

SEQ ID NO: 36795 - DNA, 20 bp, synthetic construct
  misc_feature 1..20: note = chemically synthesized
  source 1..20: mol_type = other DNA
tttttgtagagacagggttt

SEQ ID NO: 36796 - DNA, 20 bp, synthetic construct
  misc_feature 1..20: note = chemically synthesized
  source 1..20: mol_type = other DNA
cagggttttggcatgttgcc

SEQ ID NO: 36797 - DNA, 20 bp, synthetic construct
  misc_feature 1..20: note = chemically synthesized
  source 1..20: mol_type = other DNA
agggttttggcatgttgccc

SEQ ID NO: 36798 - DNA, 20 bp, synthetic construct
  misc_feature 1..20: note = chemically synthesized
  source 1..20: mol_type = other DNA
ccaggcttgtctcaaactcc

SEQ ID NO: 36799 - DNA, 20 bp, synthetic construct
  misc_feature 1..20: note = chemically synthesized
  source 1..20: mol_type = other DNA
ttgtctcaaactcctggcct

SEQ ID NO: 36800 - DNA, 20 bp, synthetic construct
  misc_feature 1..20: note = chemically synthesized
  source 1..20: mol_type = other DNA
tgtctcaaactcctggcctc

SEQ ID NO: 36801 - DNA, 20 bp, synthetic construct
  misc_feature 1..20: note = chemically synthesized
  source 1..20: mol_type = other DNA
ctcaggtgatccatctgccg

SEQ ID NO: 36802 - DNA, 20 bp, synthetic construct
  misc_feature 1..20: note = chemically synthesized
  source 1..20: mol_type = other DNA
gccgtggcctcccaaaatgc

SEQ ID NO: 36803 - DNA, 20 bp, synthetic construct
  misc_feature 1..20: note = chemically synthesized
  source 1..20: mol_type = other DNA
ccgtggcctcccaaaatgct

SEQ ID NO: 36804 - DNA, 20 bp, synthetic construct
  misc_feature 1..20: note = chemically synthesized
  source 1..20: mol_type = other DNA
ctcccaaaatgctgggatta

SEQ ID NO: 36805 - DNA, 20 bp, synthetic construct
  misc_feature 1..20: note = chemically synthesized
  source 1..20: mol_type = other DNA
tcccaaaatgctgggattat

SEQ ID NO: 36806 - DNA, 20 bp, synthetic construct
  misc_feature 1..20: note = chemically synthesized
  source 1..20: mol_type = other DNA
aatgctgggattataggcat

SEQ ID NO: 36807 - DNA, 20 bp, synthetic construct
  misc_feature 1..20: note = chemically synthesized
  source 1..20: mol_type = other DNA
catgagccaccaccccctcc

SEQ ID NO: 36808 - DNA, 20 bp, synthetic construct
  misc_feature 1..20: note = chemically synthesized
  source 1..20: mol_type = other DNA
gagccaccaccccctcctgg

SEQ ID NO: 36809 - DNA, 20 bp, synthetic construct
  misc_feature 1..20: note = chemically synthesized
  source 1..20: mol_type = other DNA
agccaccaccccctcctgga

SEQ ID NO: 36810 - DNA, 20 bp, synthetic construct
  misc_feature 1..20: note = chemically synthesized
  source 1..20: mol_type = other DNA
tataacataatttataatta

SEQ ID NO: 36811 - DNA, 20 bp, synthetic construct
  misc_feature 1..20: note = chemically synthesized
  source 1..20: mol_type = other DNA
tataattacagaaaacatgt

SEQ ID NO: 36812 - DNA, 20 bp, synthetic construct
  misc_feature 1..20: note = chemically synthesized
  source 1..20: mol_type = other DNA
cagaaaacatgtgagttcac

SEQ ID NO: 36813 - DNA, 20 bp, synthetic construct
  misc_feature 1..20: note = chemically synthesized
  source 1..20: mol_type = other DNA
agaaaacatgtgagttcact

SEQ ID NO: 36814 - DNA, 20 bp, synthetic construct
  misc_feature 1..20: note = chemically synthesized
  source 1..20: mol_type = other DNA
ctaggaataaataaattttg

SEQ ID NO: 36815 - DNA, 20 bp, synthetic construct
  misc_feature 1..20: note = chemically synthesized
  source 1..20: mol_type = other DNA
ataaattttgaagataataa

SEQ ID NO: 36816 - DNA, 20 bp, synthetic construct
  misc_feature 1..20: note = chemically synthesized
  source 1..20: mol_type = other DNA
tttcacttatgttgtcattt

SEQ ID NO: 36817 - DNA, 20 bp, synthetic construct
  misc_feature 1..20: note = chemically synthesized
  source 1..20: mol_type = other DNA
cttatgttgtcatttcggca

SEQ ID NO: 36818 - DNA, 20 bp, synthetic construct
  misc_feature 1..20: note = chemically synthesized
  source 1..20: mol_type = other DNA
gttgtcatttcggcacagtt

SEQ ID NO: 36819 - DNA, 20 bp, synthetic construct
  misc_feature 1..20: note = chemically synthesized
  source 1..20: mol_type = other DNA
catttcggcacagtttggta

SEQ ID NO: 36820 - DNA, 20 bp, synthetic construct
  misc_feature 1..20: note = chemically synthesized
  source 1..20: mol_type = other DNA
atttcggcacagtttggtat

SEQ ID NO: 36821 - DNA, 20 bp, synthetic construct
  misc_feature 1..20: note = chemically synthesized
  source 1..20: mol_type = other DNA
gcacagtttggtataggatg

SEQ ID NO: 36822 - DNA, 20 bp, synthetic construct
  misc_feature 1..20: note = chemically synthesized
  source 1..20: mol_type = other DNA
acagtttggtataggatgtg

SEQ ID NO: 36823 - DNA, 20 bp, synthetic construct
  misc_feature 1..20: note = chemically synthesized
  source 1..20: mol_type = other DNA
gagatgttaacatttatacc

SEQ ID NO: 36824 - DNA, 20 bp, synthetic construct
  misc_feature 1..20: note = chemically synthesized
  source 1..20: mol_type = other DNA
acctagcttgctcgtaaact

SEQ ID NO: 36825 - DNA, 20 bp, synthetic construct
  misc_feature 1..20: note = chemically synthesized
  source 1..20: mol_type = other DNA
gctcgtaaactaagacctga

SEQ ID NO: 36826 - DNA, 20 bp, synthetic construct
  misc_feature 1..20: note = chemically synthesized
  source 1..20: mol_type = other DNA
ctcgtaaactaagacctgaa

SEQ ID NO: 36827 - DNA, 20 bp, synthetic construct
  misc_feature 1..20: note = chemically synthesized
  source 1..20: mol_type = other DNA
tcgtaaactaagacctgaaa

SEQ ID NO: 36828 - DNA, 20 bp, synthetic construct
  misc_feature 1..20: note = chemically synthesized
  source 1..20: mol_type = other DNA
cctgaaagggttgtgtctat

SEQ ID NO: 36829 - DNA, 20 bp, synthetic construct
  misc_feature 1..20: note = chemically synthesized
  source 1..20: mol_type = other DNA
gtgtctatcagctgcacccc

SEQ ID NO: 36830 - DNA, 20 bp, synthetic construct
  misc_feature 1..20: note = chemically synthesized
  source 1..20: mol_type = other DNA
tgtctatcagctgcacccct

SEQ ID NO: 36831 - DNA, 20 bp, synthetic construct
  misc_feature 1..20: note = chemically synthesized
  source 1..20: mol_type = other DNA
ctatcagctgcacccctggg

SEQ ID NO: 36832 - DNA, 20 bp, synthetic construct
  misc_feature 1..20: note = chemically synthesized
  source 1..20: mol_type = other DNA
cctgggtagcgacacaacct

SEQ ID NO: 36833 - DNA, 20 bp, synthetic construct
  misc_feature 1..20: note = chemically synthesized
  source 1..20: mol_type = other DNA
ctgggtagcgacacaacctc

SEQ ID NO: 36834 - DNA, 20 bp, synthetic construct
  misc_feature 1..20: note = chemically synthesized
  source 1..20: mol_type = other DNA
ggtagcgacacaacctcggg

SEQ ID NO: 36835 - DNA, 20 bp, synthetic construct
  misc_feature 1..20: note = chemically synthesized
  source 1..20: mol_type = other DNA
gtagcgacacaacctcggga

SEQ ID NO: 36836 - DNA, 20 bp, synthetic construct
  misc_feature 1..20: note = chemically synthesized
  source 1..20: mol_type = other DNA
acacaacctcgggaaggcct

SEQ ID NO: 36837 - DNA, 20 bp, synthetic construct
  misc_feature 1..20: note = chemically synthesized
  source 1..20: mol_type = other DNA
gcctcagccccctcctcgta

SEQ ID NO: 36838 - DNA, 20 bp, synthetic construct
  misc_feature 1..20: note = chemically synthesized
  source 1..20: mol_type = other DNA
cctcgtacagcactgcctgt

SEQ ID NO: 36839 - DNA, 20 bp, synthetic construct
  misc_feature 1..20: note = chemically synthesized
  source 1..20: mol_type = other DNA
gtacagcactgcctgttgga

SEQ ID NO: 36840 - DNA, 20 bp, synthetic construct
  misc_feature 1..20: note = chemically synthesized
  source 1..20: mol_type = other DNA
cactgcctgttggaaagctt

SEQ ID NO: 36841 - DNA, 20 bp, synthetic construct
  misc_feature 1..20: note = chemically synthesized
  source 1..20: mol_type = other DNA
actgcctgttggaaagcttg

SEQ ID NO: 36842 - DNA, 20 bp, synthetic construct
  misc_feature 1..20: note = chemically synthesized
  source 1..20: mol_type = other DNA
ctgcctgttggaaagcttga

SEQ ID NO: 36843 - DNA, 20 bp, synthetic construct
  misc_feature 1..20: note = chemically synthesized
  source 1..20: mol_type = other DNA
gcctgttggaaagcttgagg

SEQ ID NO: 36844 - DNA, 20 bp, synthetic construct
  misc_feature 1..20: note = chemically synthesized
  source 1..20: mol_type = other DNA
cctgttggaaagcttgaggg

SEQ ID NO: 36845 - DNA, 20 bp, synthetic construct
  misc_feature 1..20: note = chemically synthesized
  source 1..20: mol_type = other DNA
ggaaagcttgagggaggcta

SEQ ID NO: 36846 - DNA, 20 bp, synthetic construct
  misc_feature 1..20: note = chemically synthesized
  source 1..20: mol_type = other DNA
tgagggaggctatggatgtg

SEQ ID NO: 36847 - DNA, 20 bp, synthetic construct
  misc_feature 1..20: note = chemically synthesized
  source 1..20: mol_type = other DNA
ggctatggatgtgcagcact

SEQ ID NO: 36848 - DNA, 20 bp, synthetic construct
  misc_feature 1..20: note = chemically synthesized
  source 1..20: mol_type = other DNA
tatggatgtgcagcacttgg

SEQ ID NO: 36849 - DNA, 20 bp, synthetic construct
  misc_feature 1..20: note = chemically synthesized
  source 1..20: mol_type = other DNA
tggatgtgcagcacttggca

SEQ ID NO: 36850 - DNA, 20 bp, synthetic construct
  misc_feature 1..20: note = chemically synthesized
  source 1..20: mol_type = other DNA
ggatgtgcagcacttggcag

SEQ ID NO: 36851 - DNA, 20 bp, synthetic construct
  misc_feature 1..20: note = chemically synthesized
  source 1..20: mol_type = other DNA
gatgtgcagcacttggcaga

SEQ ID NO: 36852 - DNA, 20 bp, synthetic construct
  misc_feature 1..20: note = chemically synthesized
  source 1..20: mol_type = other DNA
gcagcacttggcagagggtc

SEQ ID NO: 36853 - DNA, 20 bp, synthetic construct
  misc_feature 1..20: note = chemically synthesized
  source 1..20: mol_type = other DNA
cttggcagagggtctggtca

SEQ ID NO: 36854 - DNA, 20 bp, synthetic construct
  misc_feature 1..20: note = chemically synthesized
  source 1..20: mol_type = other DNA
ggcagagggtctggtcatgg

SEQ ID NO: 36855 - DNA, 20 bp, synthetic construct
  misc_feature 1..20: note = chemically synthesized
  source 1..20: mol_type = other DNA
ggtctggtcatggaagttac

SEQ ID NO: 36856 - DNA, 20 bp, synthetic construct
  misc_feature 1..20: note = chemically synthesized
  source 1..20: mol_type = other DNA
tggaagttaccagcaaatat

SEQ ID NO: 36857 - DNA, 20 bp, synthetic construct
  misc_feature 1..20: note = chemically synthesized
  source 1..20: mol_type = other DNA
tatgattttattttatccaa

SEQ ID NO: 36858 - DNA, 20 bp, synthetic construct
  misc_feature 1..20: note = chemically synthesized
  source 1..20: mol_type = other DNA
attttattttatccaaaaga

SEQ ID NO: 36859 - DNA, 20 bp, synthetic construct
  misc_feature 1..20: note = chemically synthesized
  source 1..20: mol_type = other DNA
tttattttatccaaaagaaa

SEQ ID NO: 36860 - DNA, 20 bp, synthetic construct
  misc_feature 1..20: note = chemically synthesized
  source 1..20: mol_type = other DNA
atccaaaagaaagagaatga

SEQ ID NO: 36861 - DNA, 20 bp, synthetic construct
  misc_feature 1..20: note = chemically synthesized
  source 1..20: mol_type = other DNA
caaaagaaagagaatgaaag

SEQ ID NO: 36862 - DNA, 20 bp, synthetic construct
  misc_feature 1..20: note = chemically synthesized
  source 1..20: mol_type = other DNA
aaagaaagagaatgaaagaa

SEQ ID NO: 36863 - DNA, 20 bp, synthetic construct
  misc_feature 1..20: note = chemically synthesized
  source 1..20: mol_type = other DNA
aagaaagagaatgaaagaag

SEQ ID NO: 36864 - DNA, 20 bp, synthetic construct
  misc_feature 1..20: note = chemically synthesized
  source 1..20: mol_type = other DNA
agaaagagaatgaaagaaga

SEQ ID NO: 36865 - DNA, 20 bp, synthetic construct
  misc_feature 1..20: note = chemically synthesized
  source 1..20: mol_type = other DNA
gaaagagaatgaaagaagag

SEQ ID NO: 36866 - DNA, 20 bp, synthetic construct
  misc_feature 1..20: note = chemically synthesized
  source 1..20: mol_type = other DNA
aagagaatgaaagaagaggg

SEQ ID NO: 36867 - DNA, 20 bp, synthetic construct
  misc_feature 1..20: note = chemically synthesized
  source 1..20: mol_type = other DNA
agagaatgaaagaagagggg

SEQ ID NO: 36868 - DNA, 20 bp, synthetic construct
  misc_feature 1..20: note = chemically synthesized
  source 1..20: mol_type = other DNA
gaaagaagaggggaggaaac

SEQ ID NO: 36869 - DNA, 20 bp, synthetic construct
  misc_feature 1..20: note = chemically synthesized
  source 1..20: mol_type = other DNA
ggggaggaaacaagactaat

SEQ ID NO: 36870 - DNA, 20 bp, synthetic construct
  misc_feature 1..20: note = chemically synthesized
  source 1..20: mol_type = other DNA
gggaggaaacaagactaatc

SEQ ID NO: 36871 - DNA, 20 bp, synthetic construct
  misc_feature 1..20: note = chemically synthesized
  source 1..20: mol_type = other DNA
ggaaacaagactaatcagga

SEQ ID NO: 36872 - DNA, 20 bp, synthetic construct
  misc_feature 1..20: note = chemically synthesized
  source 1..20: mol_type = other DNA
aagactaatcaggaaagatg

SEQ ID NO: 36873 - DNA, 20 bp, synthetic construct
  misc_feature 1..20: note = chemically synthesized
  source 1..20: mol_type = other DNA
agactaatcaggaaagatga

SEQ ID NO: 36874 - DNA, 20 bp, synthetic construct
  misc_feature 1..20: note = chemically synthesized
  source 1..20: mol_type = other DNA
aatcaggaaagatgaaggtc

SEQ ID NO: 36875 - DNA, 20 bp, synthetic construct
  misc_feature 1..20: note = chemically synthesized
  source 1..20: mol_type = other DNA
atcaggaaagatgaaggtct

SEQ ID NO: 36876 - DNA, 20 bp, synthetic construct
  misc_feature 1..20: note = chemically synthesized
  source 1..20: mol_type = other DNA
tcaggaaagatgaaggtcta

SEQ ID NO: 36877 - DNA, 20 bp, synthetic construct
  misc_feature 1..20: note = chemically synthesized
  source 1..20: mol_type = other DNA
caggaaagatgaaggtctag

SEQ ID NO: 36878 - DNA, 20 bp, synthetic construct
  misc_feature 1..20: note = chemically synthesized
  source 1..20: mol_type = other DNA
aaagatgaaggtctaggggt

SEQ ID NO: 36879 - DNA, 20 bp, synthetic construct
  misc_feature 1..20: note = chemically synthesized
  source 1..20: mol_type = other DNA
aagatgaaggtctaggggtg

SEQ ID NO: 36880 - DNA, 20 bp, synthetic construct
  misc_feature 1..20: note = chemically synthesized
  source 1..20: mol_type = other DNA
agatgaaggtctaggggtga

SEQ ID NO: 36881 - DNA, 20 bp, synthetic construct
  misc_feature 1..20: note = chemically synthesized
  source 1..20: mol_type = other DNA
tgaaggtctaggggtgaggg

SEQ ID NO: 36882 - DNA, 20 bp, synthetic construct
  misc_feature 1..20: note = chemically synthesized
  source 1..20: mol_type = other DNA
gaaggtctaggggtgaggga

SEQ ID NO: 36883 - DNA, 20 bp, synthetic construct
  misc_feature 1..20: note = chemically synthesized
  source 1..20: mol_type = other DNA
aggtctaggggtgagggaag

SEQ ID NO: 36884 - DNA, 20 bp, synthetic construct
  misc_feature 1..20: note = chemically synthesized
  source 1..20: mol_type = other DNA
ctaggggtgagggaaggagt

SEQ ID NO: 36885 - DNA, 20 bp, synthetic construct
  misc_feature 1..20: note = chemically synthesized
  source 1..20: mol_type = other DNA
taggggtgagggaaggagta

SEQ ID NO: 36886 - DNA, 20 bp, synthetic construct
  misc_feature 1..20: note = chemically synthesized
  source 1..20: mol_type = other DNA
ggggtgagggaaggagtaag

SEQ ID NO: 36887 - DNA, 20 bp, synthetic construct
  misc_feature 1..20: note = chemically synthesized
  source 1..20: mol_type = other DNA
ggaaggagtaaggagacata

SEQ ID NO: 36888 - DNA, 20 bp, synthetic construct
  misc_feature 1..20: note = chemically synthesized
  source 1..20: mol_type = other DNA
gaaggagtaaggagacataa

SEQ ID NO: 36889 - DNA, 20 bp, synthetic construct
  misc_feature 1..20: note = chemically synthesized
  source 1..20: mol_type = other DNA
aaggagacataaaggcaatg

SEQ ID NO: 36890 - DNA, 20 bp, synthetic construct
  misc_feature 1..20: note = chemically synthesized
  source 1..20: mol_type = other DNA
ggagacataaaggcaatgtg

SEQ ID NO: 36891 - DNA, 20 bp, synthetic construct
  misc_feature 1..20: note = chemically synthesized
  source 1..20: mol_type = other DNA
gacataaaggcaatgtggag

SEQ ID NO: 36892 - DNA, 20 bp, synthetic construct
  misc_feature 1..20: note = chemically synthesized
  source 1..20: mol_type = other DNA
aaaggcaatgtggagcagct

SEQ ID NO: 36893 - DNA, 20 bp, synthetic construct
  misc_feature 1..20: note = chemically synthesized
  source 1..20: mol_type = other DNA
aaggcaatgtggagcagctg

SEQ ID NO: 36894 - DNA, 20 bp, synthetic construct
  misc_feature 1..20: note = chemically synthesized
  source 1..20: mol_type = other DNA
aggcaatgtggagcagctga

SEQ ID NO: 36895 - DNA, 20 bp, synthetic construct
  misc_feature 1..20: note = chemically synthesized
  source 1..20: mol_type = other DNA
ggcaatgtggagcagctgag

SEQ ID NO: 36896 - DNA, 20 bp, synthetic construct
  misc_feature 1..20: note = chemically synthesized
  source 1..20: mol_type = other DNA
gcaatgtggagcagctgagg

SEQ ID NO: 36897 - DNA, 20 bp, synthetic construct
  misc_feature 1..20: note = chemically synthesized
  source 1..20: mol_type = other DNA
caatgtggagcagctgaggg

SEQ ID NO: 36898 - DNA, 20 bp, synthetic construct
  misc_feature 1..20: note = chemically synthesized
  source 1..20: mol_type = other DNA
ggagcagctgaggggggaaa

SEQ ID NO: 36899 - DNA, 20 bp, synthetic construct
  misc_feature 1..20: note = chemically synthesized
  source 1..20: mol_type = other DNA
aaatggctttcaccacttcc

SEQ ID NO: 36900 - DNA, 20 bp, synthetic construct
  misc_feature 1..20: note = chemically synthesized
  source 1..20: mol_type = other DNA
tgcactctcaaatattttat

SEQ ID NO: 36901 - DNA, 20 bp, synthetic construct
  misc_feature 1..20: note = chemically synthesized
  source 1..20: mol_type = other DNA
ttttataagactctatattc

SEQ ID NO: 36902 - DNA, 20 bp, synthetic construct
  misc_feature 1..20: note = chemically synthesized
  source 1..20: mol_type = other DNA
tttataagactctatattca

SEQ ID NO: 36903 - DNA, 20 bp, synthetic construct
  misc_feature 1..20: note = chemically synthesized
  source 1..20: mol_type = other DNA
ggtaatgtttgaaccctgct

SEQ ID NO: 36904 - DNA, 20 bp, synthetic construct
  misc_feature 1..20: note = chemically synthesized
  source 1..20: mol_type = other DNA
atgtttgaaccctgctgagc

SEQ ID NO: 36905 - DNA, 20 bp, synthetic construct
  misc_feature 1..20: note = chemically synthesized
  source 1..20: mol_type = other DNA
tttgaaccctgctgagccag

SEQ ID NO: 36906 - DNA, 20 bp, synthetic construct
  misc_feature 1..20: note = chemically synthesized
  source 1..20: mol_type = other DNA
accctgctgagccagtggca

SEQ ID NO: 36907 - DNA, 20 bp, synthetic construct
  misc_feature 1..20: note = chemically synthesized
  source 1..20: mol_type = other DNA
ccctgctgagccagtggcat

SEQ ID NO: 36908 - DNA, 20 bp, synthetic construct
  misc_feature 1..20: note = chemically synthesized
  source 1..20: mol_type = other DNA
agccagtggcatgggtctct

SEQ ID NO: 36909 - DNA, 20 bp, synthetic construct
  misc_feature 1..20: note = chemically synthesized
  source 1..20: mol_type = other DNA
ccagtggcatgggtctctga

SEQ ID NO: 36910 - DNA, 20 bp, synthetic construct
  misc_feature 1..20: note = chemically synthesized
  source 1..20: mol_type = other DNA
attaacttaatttgactatc

SEQ ID NO: 36911 - DNA, 20 bp, synthetic construct
  misc_feature 1..20: note = chemically synthesized
  source 1..20: mol_type = other DNA
taatttgactatctggtttg

SEQ ID NO: 36912 - DNA, 20 bp, synthetic construct
  misc_feature 1..20: note = chemically synthesized
  source 1..20: mol_type = other DNA
aatttgactatctggtttgt

SEQ ID NO: 36913 - DNA, 20 bp, synthetic construct
  misc_feature 1..20: note = chemically synthesized
  source 1..20: mol_type = other DNA
gggtgcgtttactctcatgt

SEQ ID NO: 36914 - DNA, 20 bp, synthetic construct
  misc_feature 1..20: note = chemically synthesized
  source 1..20: mol_type = other DNA
catgtaagtcaacaatgtcc

SEQ ID NO: 36915 - DNA, 20 bp, synthetic construct
  misc_feature 1..20: note = chemically synthesized
  source 1..20: mol_type = other DNA
atgtaagtcaacaatgtcct

SEQ ID NO: 36916 - DNA, 20 bp, synthetic construct
  misc_feature 1..20: note = chemically synthesized
  source 1..20: mol_type = other DNA
agtcaacaatgtcctgggat

SEQ ID NO: 36917 - DNA, 20 bp, synthetic construct
  misc_feature 1..20: note = chemically synthesized
  source 1..20: mol_type = other DNA
gtcaacaatgtcctgggatt

SEQ ID NO: 36918 - DNA, 20 bp, synthetic construct
  misc_feature 1..20: note = chemically synthesized
  source 1..20: mol_type = other DNA
tgggattgggacacactttc

SEQ ID NO: 36919 - DNA, 20 bp, synthetic construct
  misc_feature 1..20: note = chemically synthesized
  source 1..20: mol_type = other DNA
gggattgggacacactttct

SEQ ID NO: 36920 - DNA, 20 bp, synthetic construct
  misc_feature 1..20: note = chemically synthesized
  source 1..20: mol_type = other DNA
acacactttctgggcactgc

SEQ ID NO: 36921 - DNA, 20 bp, synthetic construct
  misc_feature 1..20: note = chemically synthesized
  source 1..20: mol_type = other DNA
actttctgggcactgctggc

SEQ ID NO: 36922 - DNA, 20 bp, synthetic construct
  misc_feature 1..20: note = chemically synthesized
  source 1..20: mol_type = other DNA
actgctggccagtcccaaaa

SEQ ID NO: 36923 - DNA, 20 bp, synthetic construct
  misc_feature 1..20: note = chemically synthesized
  source 1..20: mol_type = other DNA
ccagtcccaaaatggaacat

SEQ ID NO: 36924 - DNA, 20 bp, synthetic construct
  misc_feature 1..20: note = chemically synthesized
  source 1..20: mol_type = other DNA
cagtcccaaaatggaacata

SEQ ID NO: 36925 - DNA, 20 bp, synthetic construct
  misc_feature 1..20: note = chemically synthesized
  source 1..20: mol_type = other DNA
tcccaaaatggaacataagg

SEQ ID NO: 36926 - DNA, 20 bp, synthetic construct
  misc_feature 1..20: note = chemically synthesized
  source 1..20: mol_type = other DNA
caaaatggaacataaggaag

SEQ ID NO: 36927 - DNA, 20 bp, synthetic construct
  misc_feature 1..20: note = chemically synthesized
  source 1..20: mol_type = other DNA
acttcttttatttctgaaat

SEQ ID NO: 36928 - DNA, 20 bp, synthetic construct
  misc_feature 1..20: note = chemically synthesized
  source 1..20: mol_type = other DNA
cttcttttatttctgaaatc

SEQ ID NO: 36929 - DNA, 20 bp, synthetic construct
  misc_feature 1..20: note = chemically synthesized
  source 1..20: mol_type = other DNA
ttttatttctgaaatcaggt

SEQ ID NO: 36930 - DNA, 20 bp, synthetic construct
  misc_feature 1..20: note = chemically synthesized
  source 1..20: mol_type = other DNA
ttctgaaatcaggtaagaca

SEQ ID NO: 36931 - DNA, 20 bp, synthetic construct
  misc_feature 1..20: note = chemically synthesized
  source 1..20: mol_type = other DNA
acatagtttttttaaattat

SEQ ID NO: 36932 - DNA, 20 bp, synthetic construct
  misc_feature 1..20: note = chemically synthesized
  source 1..20: mol_type = other DNA
ttattttttctcccacaatg

SEQ ID NO: 36933 - DNA, 20 bp, synthetic construct
  misc_feature 1..20: note = chemically synthesized
  source 1..20: mol_type = other DNA
tagtaaaaatacatatgcca

SEQ ID NO: 36934 - DNA, 20 bp, synthetic construct
  misc_feature 1..20: note = chemically synthesized
  source 1..20: mol_type = other DNA
tttttgattcatgaaattcc

SEQ ID NO: 36935 - DNA, 20 bp, synthetic construct
  misc_feature 1..20: note = chemically synthesized
  source 1..20: mol_type = other DNA
tgaaaaattcttaaaaaaat

SEQ ID NO: 36936 - DNA, 20 bp, synthetic construct
  misc_feature 1..20: note = chemically synthesized
  source 1..20: mol_type = other DNA
ataagtttaatttccccgtg

SEQ ID NO: 36937 - DNA, 20 bp, synthetic construct
  misc_feature 1..20: note = chemically synthesized
  source 1..20: mol_type = other DNA
tttccccgtgaagactgtca

SEQ ID NO: 36938 - DNA, 20 bp, synthetic construct
  misc_feature 1..20: note = chemically synthesized
  source 1..20: mol_type = other DNA
cgtgaagactgtcacggtgc

SEQ ID NO: 36939 - DNA, 20 bp, synthetic construct
  misc_feature 1..20: note = chemically synthesized
  source 1..20: mol_type = other DNA
tgtcacggtgctggaatgaa

SEQ ID NO: 36940 - DNA, 20 bp, synthetic construct
  misc_feature 1..20: note = chemically synthesized
  source 1..20: mol_type = other DNA
gtcacggtgctggaatgaat

SEQ ID NO: 36941 - DNA, 20 bp, synthetic construct
  misc_feature 1..20: note = chemically synthesized
  source 1..20: mol_type = other DNA
acggtgctggaatgaatggg

SEQ ID NO: 36942 - DNA, 20 bp, synthetic construct
  misc_feature 1..20: note = chemically synthesized
  source 1..20: mol_type = other DNA
tgaatgggcagaaaaaataa

SEQ ID NO: 36943 - DNA, 20 bp, synthetic construct
  misc_feature 1..20: note = chemically synthesized
  source 1..20: mol_type = other DNA
ggttgatttttctaatctaa

SEQ ID NO: 36944 - DNA, 20 bp, synthetic construct
  misc_feature 1..20: note = chemically synthesized
  source 1..20: mol_type = other DNA
ttgatttttctaatctaaaa

SEQ ID NO: 36945 - DNA, 20 bp, synthetic construct
  misc_feature 1..20: note = chemically synthesized
  source 1..20: mol_type = other DNA
aaaagagtgtgcctacatga

SEQ ID NO: 36946 - DNA, 20 bp, synthetic construct
  misc_feature 1..20: note = chemically synthesized
  source 1..20: mol_type = other DNA
gagtgtgcctacatgatggc

SEQ ID NO: 36947 - DNA, 20 bp, synthetic construct
  misc_feature 1..20: note = chemically synthesized
  source 1..20: mol_type = other DNA
tgcctacatgatggccagtc

SEQ ID NO: 36948 - DNA, 20 bp, synthetic construct
  misc_feature 1..20: note = chemically synthesized
  source 1..20: mol_type = other DNA
cagtctggctgaaaaataaa

SEQ ID NO: 36949 - DNA, 20 bp, synthetic construct
  misc_feature 1..20: note = chemically synthesized
  source 1..20: mol_type = other DNA
tgaaaaataaatagccattg

SEQ ID NO: 36950 - DNA, 20 bp, synthetic construct
  misc_feature 1..20: note = chemically synthesized
  source 1..20: mol_type = other DNA
ccattgtagctaactatgca

SEQ ID NO: 36951 - DNA, 20 bp, synthetic construct
  misc_feature 1..20: note = chemically synthesized
  source 1..20: mol_type = other DNA
cattgtagctaactatgcaa

SEQ ID NO: 36952 - DNA, 20 bp, synthetic construct
  misc_feature 1..20: note = chemically synthesized
  source 1..20: mol_type = other DNA
gtagctaactatgcaaagga

SEQ ID NO: 36953 - DNA, 20 bp, synthetic construct
  misc_feature 1..20: note = chemically synthesized
  source 1..20: mol_type = other DNA
taactatgcaaaggatggct

SEQ ID NO: 36954 - DNA, 20 bp, synthetic construct
  misc_feature 1..20: note = chemically synthesized
  source 1..20: mol_type = other DNA
ggatggctaagctcttcgct

SEQ ID NO: 36955 - DNA, 20 bp, synthetic construct
  misc_feature 1..20: note = chemically synthesized
  source 1..20: mol_type = other DNA
taagctcttcgcttggttct

SEQ ID NO: 36956 - DNA, 20 bp, synthetic construct
  misc_feature 1..20: note = chemically synthesized
  source 1..20: mol_type = other DNA
taatttatatcatctctgtt

SEQ ID NO: 36957 - DNA, 20 bp, synthetic construct
  misc_feature 1..20: note = chemically synthesized
  source 1..20: mol_type = other DNA
aatttatatcatctctgttc

SEQ ID NO: 36958 - DNA, 20 bp, synthetic construct
  misc_feature 1..20: note = chemically synthesized
  source 1..20: mol_type = other DNA
aggtgccatgctcccctcac

SEQ ID NO: 36959 - DNA, 20 bp, synthetic construct
  misc_feature 1..20: note = chemically synthesized
  source 1..20: mol_type = other DNA
gccatgctcccctcactagc

SEQ ID NO: 36960 - DNA, 20 bp, synthetic construct
  misc_feature 1..20: note = chemically synthesized
  source 1..20: mol_type = other DNA
aataactctttgaatatgtt

SEQ ID NO: 36961 - DNA, 20 bp, synthetic construct
  misc_feature 1..20: note = chemically synthesized
  source 1..20: mol_type = other DNA
ttggttccttgacctgttca

SEQ ID NO: 36962 - DNA, 20 bp, synthetic construct
  misc_feature 1..20: note = chemically synthesized
  source 1..20: mol_type = other DNA
ggttccttgacctgttcatg

SEQ ID NO: 36963 - DNA, 20 bp, synthetic construct
  misc_feature 1..20: note = chemically synthesized
  source 1..20: mol_type = other DNA
tccttgacctgttcatggag

SEQ ID NO: 36964 - DNA, 20 bp, synthetic construct
  misc_feature 1..20: note = chemically synthesized
  source 1..20: mol_type = other DNA
ccttgacctgttcatggagt

SEQ ID NO: 36965 - DNA, 20 bp, synthetic construct
  misc_feature 1..20: note = chemically synthesized
  source 1..20: mol_type = other DNA
cctgttcatggagtgggact

SEQ ID NO: 36966 - DNA, 20 bp, synthetic construct
  misc_feature 1..20: note = chemically synthesized
  source 1..20: mol_type = other DNA
cagcatttctctctttgtta

SEQ ID NO: 36967 - DNA, 20 bp, synthetic construct
  misc_feature 1..20: note = chemically synthesized
  source 1..20: mol_type = other DNA
ttctctctttgttatggcct

SEQ ID NO: 36968 - DNA, 20 bp, synthetic construct
  misc_feature 1..20: note = chemically synthesized
  source 1..20: mol_type = other DNA
ctctttgttatggcctgagt

SEQ ID NO: 36969 - DNA, 20 bp, synthetic construct
  misc_feature 1..20: note = chemically synthesized
  source 1..20: mol_type = other DNA
tctttgttatggcctgagta

SEQ ID NO: 36970 - DNA, 20 bp, synthetic construct
  misc_feature 1..20: note = chemically synthesized
  source 1..20: mol_type = other DNA
gcctgagtaaggctttccat

SEQ ID NO: 36971 - DNA, 20 bp, synthetic construct
  misc_feature 1..20: note = chemically synthesized
  source 1..20: mol_type = other DNA
atacatttgcttcttatccc

SEQ ID NO: 36972 - DNA, 20 bp, synthetic construct
  misc_feature 1..20: note = chemically synthesized
  source 1..20: mol_type = other DNA
acatttgcttcttatccctg

SEQ ID NO: 36973 - DNA, 20 bp, synthetic construct
  misc_feature 1..20: note = chemically synthesized
  source 1..20: mol_type = other DNA
aattatacacatccatttgc

SEQ ID NO: 36974 - DNA, 20 bp, synthetic construct
  misc_feature 1..20: note = chemically synthesized
  source 1..20: mol_type = other DNA
ataatgattcaacaaatact

SEQ ID NO: 36975 - DNA, 20 bp, synthetic construct
  misc_feature 1..20: note = chemically synthesized
  source 1..20: mol_type = other DNA
taatgattcaacaaatactc

SEQ ID NO: 36976 - DNA, 20 bp, synthetic construct
  misc_feature 1..20: note = chemically synthesized
  source 1..20: mol_type = other DNA
aatgattcaacaaatactca

SEQ ID NO: 36977 - DNA, 20 bp, synthetic construct
  misc_feature 1..20: note = chemically synthesized
  source 1..20: mol_type = other DNA
aaatactcagggtatttgtt

SEQ ID NO: 36978 - DNA, 20 bp, synthetic construct
  misc_feature 1..20: note = chemically synthesized
  source 1..20: mol_type = other DNA
tactcagggtatttgttgag

SEQ ID NO: 36979 - DNA, 20 bp, synthetic construct
  misc_feature 1..20: note = chemically synthesized
  source 1..20: mol_type = other DNA
actcagggtatttgttgagt

SEQ ID NO: 36980 - DNA, 20 bp, synthetic construct
  misc_feature 1..20: note = chemically synthesized
  source 1..20: mol_type = other DNA
agggtatttgttgagtgggt

SEQ ID NO: 36981 - DNA, 20 bp, synthetic construct
  misc_feature 1..20: note = chemically synthesized
  source 1..20: mol_type = other DNA
gggtatttgttgagtgggtt

SEQ ID NO: 36982 - DNA, 20 bp, synthetic construct
  misc_feature 1..20: note = chemically synthesized
  source 1..20: mol_type = other DNA
ccgtgtgtgattgtgaatgt

SEQ ID NO: 36983 - DNA, 20 bp, synthetic construct
  misc_feature 1..20: note = chemically synthesized
  source 1..20: mol_type = other DNA
tgtgtgtcctttacaaatac

SEQ ID NO: 36984 - DNA, 20 bp, synthetic construct
  misc_feature 1..20: note = chemically synthesized
  source 1..20: mol_type = other DNA
tttacaaatactagcttatt

SEQ ID NO: 36985 - DNA, 20 bp, synthetic construct
  misc_feature 1..20: note = chemically synthesized
  source 1..20: mol_type = other DNA
atactagcttatttagctca

SEQ ID NO: 36986 - DNA, 20 bp, synthetic construct
  misc_feature 1..20: note = chemically synthesized
  source 1..20: mol_type = other DNA
agcttatttagctcatggta

SEQ ID NO: 36987 - DNA, 20 bp, synthetic construct
  misc_feature 1..20: note = chemically synthesized
  source 1..20: mol_type = other DNA
gcttatttagctcatggtat

SEQ ID NO: 36988 - DNA, 20 bp, synthetic construct
  misc_feature 1..20: note = chemically synthesized
  source 1..20: mol_type = other DNA
tatttagctcatggtatagg

SEQ ID NO: 36989 - DNA, 20 bp, synthetic construct
  misc_feature 1..20: note = chemically synthesized
  source 1..20: mol_type = other DNA
atttagctcatggtataggt

SEQ ID NO: 36990 - DNA, 20 bp, synthetic construct
  misc_feature 1..20: note = chemically synthesized
  source 1..20: mol_type = other DNA
tttagctcatggtataggta

SEQ ID NO: 36991 - DNA, 20 bp, synthetic construct
  misc_feature 1..20: note = chemically synthesized
  source 1..20: mol_type = other DNA
agctcatggtataggtaggg

SEQ ID NO: 36992 - DNA, 20 bp, synthetic construct
  misc_feature 1..20: note = chemically synthesized
  source 1..20: mol_type = other DNA
atggtataggtagggtagca

SEQ ID NO: 36993 - DNA, 20 bp, synthetic construct
  misc_feature 1..20: note = chemically synthesized
  source 1..20: mol_type = other DNA
tcatccccattttataaaca

SEQ ID NO: 36994 - DNA, 20 bp, synthetic construct
  misc_feature 1..20: note = chemically synthesized
  source 1..20: mol_type = other DNA
attttataaacaaagaaatc

SEQ ID NO: 36995 - DNA, 20 bp, synthetic construct
  misc_feature 1..20: note = chemically synthesized
  source 1..20: mol_type = other DNA
taaacaaagaaatctagact

SEQ ID NO: 36996 - DNA, 20 bp, synthetic construct
  misc_feature 1..20: note = chemically synthesized
  source 1..20: mol_type = other DNA
aaacaaagaaatctagactt

SEQ ID NO: 36997 - DNA, 20 bp, synthetic construct
  misc_feature 1..20: note = chemically synthesized
  source 1..20: mol_type = other DNA
cgtgaccaaattcccaaatc

SEQ ID NO: 36998 - DNA, 20 bp, synthetic construct
  misc_feature 1..20: note = chemically synthesized
  source 1..20: mol_type = other DNA
gtgaccaaattcccaaatca

SEQ ID NO: 36999 - DNA, 20 bp, synthetic construct
  misc_feature 1..20: note = chemically synthesized
  source 1..20: mol_type = other DNA
attcccaaatcaaggaaata

SEQ ID NO: 37000 - DNA, 20 bp, synthetic construct
  misc_feature 1..20: note = chemically synthesized
  source 1..20: mol_type = other DNA
atcaaggaaataaagaaacc

SEQ ID NO: 37001 - DNA, 20 bp, synthetic construct
  misc_feature 1..20: note = chemically synthesized
  source 1..20: mol_type = other DNA
aaataaagaaacctggattt

SEQ ID NO: 37002 - DNA, 20 bp, synthetic construct
  misc_feature 1..20: note = chemically synthesized
  source 1..20: mol_type = other DNA
aaagaaacctggatttaagc

SEQ ID NO: 37003 - DNA, 20 bp, synthetic construct
  misc_feature 1..20: note = chemically synthesized
  source 1..20: mol_type = other DNA
tggatttaagccagatttcc

SEQ ID NO: 37004 - DNA, 20 bp, synthetic construct
  misc_feature 1..20: note = chemically synthesized
  source 1..20: mol_type = other DNA
cagatttccaagaaaaaatc

SEQ ID NO: 37005 - DNA, 20 bp, synthetic construct
  misc_feature 1..20: note = chemically synthesized
  source 1..20: mol_type = other DNA
agatttccaagaaaaaatct

SEQ ID NO: 37006 - DNA, 20 bp, synthetic construct
  misc_feature 1..20: note = chemically synthesized
  source 1..20: mol_type = other DNA
gatttccaagaaaaaatcta

SEQ ID NO: 37007 - DNA, 20 bp, synthetic construct
  misc_feature 1..20: note = chemically synthesized
  source 1..20: mol_type = other DNA
aacacattccaatgtaactg

SEQ ID NO: 37008 - DNA, 20 bp, synthetic construct
  misc_feature 1..20: note = chemically synthesized
  source 1..20: mol_type = other DNA
cacattccaatgtaactgaa

SEQ ID NO: 37009 - DNA, 20 bp, synthetic construct
  misc_feature 1..20: note = chemically synthesized
  source 1..20: mol_type = other DNA
attccaatgtaactgaagag

SEQ ID NO: 37010 - DNA, 20 bp, synthetic construct
  misc_feature 1..20: note = chemically synthesized
  source 1..20: mol_type = other DNA
ttccaatgtaactgaagagc

SEQ ID NO: 37011 - DNA, 20 bp, synthetic construct
  misc_feature 1..20: note = chemically synthesized
  source 1..20: mol_type = other DNA
ggttaattgtttgccacttg

SEQ ID NO: 37012 - DNA, 20 bp, synthetic construct
  misc_feature 1..20: note = chemically synthesized
  source 1..20: mol_type = other DNA
gccacttgcagaatccaatt

SEQ ID NO: 37013 - DNA, 20 bp, synthetic construct
  misc_feature 1..20: note = chemically synthesized
  source 1..20: mol_type = other DNA
acttgcagaatccaattaag

SEQ ID NO: 37014 - DNA, 20 bp, synthetic construct
  misc_feature 1..20: note = chemically synthesized
  source 1..20: mol_type = other DNA
ttgcagaatccaattaagaa

SEQ ID NO: 37015 - DNA, 20 bp, synthetic construct
  misc_feature 1..20: note = chemically synthesized
  source 1..20: mol_type = other DNA
gcagaatccaattaagaaga

SEQ ID NO: 37016 - DNA, 20 bp, synthetic construct
  misc_feature 1..20: note = chemically synthesized
  source 1..20: mol_type = other DNA
gaatccaattaagaagagag

SEQ ID NO: 37017 - DNA, 20 bp, synthetic construct
  misc_feature 1..20: note = chemically synthesized
  source 1..20: mol_type = other DNA
caattaagaagagagaagtc

SEQ ID NO: 37018 - DNA, 20 bp, synthetic construct
  misc_feature 1..20: note = chemically synthesized
  source 1..20: mol_type = other DNA
gaagagagaagtctggtata

SEQ ID NO: 37019 - DNA, 20 bp, synthetic construct
  misc_feature 1..20: note = chemically synthesized
  source 1..20: mol_type = other DNA
agagaagtctggtataaaga

SEQ ID NO: 37020 - DNA, 20 bp, synthetic construct
  misc_feature 1..20: note = chemically synthesized
  source 1..20: mol_type = other DNA
aagaaagtgatttgcttcca

SEQ ID NO: 37021 - DNA, 20 bp, synthetic construct
  misc_feature 1..20: note = chemically synthesized
  source 1..20: mol_type = other DNA
aagtgatttgcttccaaagc

SEQ ID NO: 37022 - DNA, 20 bp, synthetic construct
  misc_feature 1..20: note = chemically synthesized
  source 1..20: mol_type = other DNA
atttgcttccaaagctagct

SEQ ID NO: 37023 - DNA, 20 bp, synthetic construct
  misc_feature 1..20: note = chemically synthesized
  source 1..20: mol_type = other DNA
tttgcttccaaagctagctt

SEQ ID NO: 37024 - DNA, 20 bp, synthetic construct
  misc_feature 1..20: note = chemically synthesized
  source 1..20: mol_type = other DNA
ttgcttccaaagctagctta

SEQ ID NO: 37025 - DNA, 20 bp, synthetic construct
  misc_feature 1..20: note = chemically synthesized
  source 1..20: mol_type = other DNA
tgcttccaaagctagcttag

SEQ ID NO: 37026 - DNA, 20 bp, synthetic construct
  misc_feature 1..20: note = chemically synthesized
  source 1..20: mol_type = other DNA
ttccaaagctagcttagggg

SEQ ID NO: 37027 - DNA, 20 bp, synthetic construct
  misc_feature 1..20: note = chemically synthesized
  source 1..20: mol_type = other DNA
ctagcttaggggaagaaatg

SEQ ID NO: 37028 - DNA, 20 bp, synthetic construct
  misc_feature 1..20: note = chemically synthesized
  source 1..20: mol_type = other DNA
gcttaggggaagaaatgcag

SEQ ID NO: 37029 - DNA, 20 bp, synthetic construct
  misc_feature 1..20: note = chemically synthesized
  source 1..20: mol_type = other DNA
cctgccgtactacttcactt

SEQ ID NO: 37030 - DNA, 20 bp, synthetic construct
  misc_feature 1..20: note = chemically synthesized
  source 1..20: mol_type = other DNA
ctgccgtactacttcacttt

SEQ ID NO: 37031 - DNA, 20 bp, synthetic construct
  misc_feature 1..20: note = chemically synthesized
  source 1..20: mol_type = other DNA
gccgtactacttcactttag

SEQ ID NO: 37032 - DNA, 20 bp, synthetic construct
  misc_feature 1..20: note = chemically synthesized
  source 1..20: mol_type = other DNA
gtactacttcactttaggag

SEQ ID NO: 37033 - DNA, 20 bp, synthetic construct
  misc_feature 1..20: note = chemically synthesized
  source 1..20: mol_type = other DNA
tacttcactttaggagcaga

SEQ ID NO: 37034 - DNA, 20 bp, synthetic construct
  misc_feature 1..20: note = chemically synthesized
  source 1..20: mol_type = other DNA
ttcactttaggagcagaaag

SEQ ID NO: 37035 - DNA, 20 bp, synthetic construct
  misc_feature 1..20: note = chemically synthesized
  source 1..20: mol_type = other DNA
gcagaaagtggcacttttaa

SEQ ID NO: 37036 - DNA, 20 bp, synthetic construct
  misc_feature 1..20: note = chemically synthesized
  source 1..20: mol_type = other DNA
cagaaagtggcacttttaaa

SEQ ID NO: 37037 - DNA, 20 bp, synthetic construct
  misc_feature 1..20: note = chemically synthesized
  source 1..20: mol_type = other DNA
gtggcacttttaaaaggcaa

SEQ ID NO: 37038 - DNA, 20 bp, synthetic construct
  misc_feature 1..20: note = chemically synthesized
  source 1..20: mol_type = other DNA
ggcacttttaaaaggcaaca

SEQ ID NO: 37039 - DNA, 20 bp, synthetic construct
  misc_feature 1..20: note = chemically synthesized
  source 1..20: mol_type = other DNA
gcacttttaaaaggcaacag

SEQ ID NO: 37040 - DNA, 20 bp, synthetic construct
  misc_feature 1..20: note = chemically synthesized
  source 1..20: mol_type = other DNA
acttttaaaaggcaacagag

SEQ ID NO: 37041 - DNA, 20 bp, synthetic construct
  misc_feature 1..20: note = chemically synthesized
  source 1..20: mol_type = other DNA
cttttaaaaggcaacagagg

SEQ ID NO: 37042 - DNA, 20 bp, synthetic construct
  misc_feature 1..20: note = chemically synthesized
  source 1..20: mol_type = other DNA
taaaaggcaacagaggaggc

SEQ ID NO: 37043 - DNA, 20 bp, synthetic construct
  misc_feature 1..20: note = chemically synthesized
  source 1..20: mol_type = other DNA
aggcaacagaggaggcgagc

SEQ ID NO: 37044 - DNA, 20 bp, synthetic construct
  misc_feature 1..20: note = chemically synthesized
  source 1..20: mol_type = other DNA
ggcaacagaggaggcgagca

SEQ ID NO: 37045 - DNA, 20 bp, synthetic construct
  misc_feature 1..20: note = chemically synthesized
  source 1..20: mol_type = other DNA
agaggaggcgagcaaggatt

SEQ ID NO: 37046 - DNA, 20 bp, synthetic construct
  misc_feature 1..20: note = chemically synthesized
  source 1..20: mol_type = other DNA
gaggaggcgagcaaggattc

SEQ ID NO: 37047 - DNA, 20 bp, synthetic construct
  misc_feature 1..20: note = chemically synthesized
  source 1..20: mol_type = other DNA
aggaggcgagcaaggattca

SEQ ID NO: 37048 - DNA, 20 bp, synthetic construct
  misc_feature 1..20: note = chemically synthesized
  source 1..20: mol_type = other DNA
ggaggcgagcaaggattcag

SEQ ID NO: 37049 - DNA, 20 bp, synthetic construct
  misc_feature 1..20: note = chemically synthesized
  source 1..20: mol_type = other DNA
aaggattcaggggtccatgc

SEQ ID NO: 37050 - DNA, 20 bp, synthetic construct
  misc_feature 1..20: note = chemically synthesized
  source 1..20: mol_type = other DNA
ttcaggggtccatgctagct

SEQ ID NO: 37051 - DNA, 20 bp, synthetic construct
  misc_feature 1..20: note = chemically synthesized
  source 1..20: mol_type = other DNA
tcaggggtccatgctagctt

SEQ ID NO: 37052 - DNA, 20 bp, synthetic construct
  misc_feature 1..20: note = chemically synthesized
  source 1..20: mol_type = other DNA
agcttgggcaccttatccac

SEQ ID NO: 37053 - DNA, 20 bp, synthetic construct
  misc_feature 1..20: note = chemically synthesized
  source 1..20: mol_type = other DNA
gcttgggcaccttatccacc

SEQ ID NO: 37054 - DNA, 20 bp, synthetic construct
  misc_feature 1..20: note = chemically synthesized
  source 1..20: mol_type = other DNA
tgggcaccttatccaccagg

SEQ ID NO: 37055 - DNA, 20 bp, synthetic construct
  misc_feature 1..20: note = chemically synthesized
  source 1..20: mol_type = other DNA
accttatccaccaggtagtt

SEQ ID NO: 37056 - DNA, 20 bp, synthetic construct
  misc_feature 1..20: note = chemically synthesized
  source 1..20: mol_type = other DNA
ttatccaccaggtagttgag

SEQ ID NO: 37057 - DNA, 20 bp, synthetic construct
  misc_feature 1..20: note = chemically synthesized
  source 1..20: mol_type = other DNA
gtagttgagcagttgcctgc

SEQ ID NO: 37058 - DNA, 20 bp, synthetic construct
  misc_feature 1..20: note = chemically synthesized
  source 1..20: mol_type = other DNA
ttgcctgctggtgcctttgt

SEQ ID NO: 37059 - DNA, 20 bp, synthetic construct
  misc_feature 1..20: note = chemically synthesized
  source 1..20: mol_type = other DNA
cctgctggtgcctttgtgag

SEQ ID NO: 37060 - DNA, 20 bp, synthetic construct
  misc_feature 1..20: note = chemically synthesized
  source 1..20: mol_type = other DNA
ctgctggtgcctttgtgagc

SEQ ID NO: 37061 - DNA, 20 bp, synthetic construct
  misc_feature 1..20: note = chemically synthesized
  source 1..20: mol_type = other DNA
tgctggtgcctttgtgagca

SEQ ID NO: 37062 - DNA, 20 bp, synthetic construct
  misc_feature 1..20: note = chemically synthesized
  source 1..20: mol_type = other DNA
tgagcagggtgttgtccctt

SEQ ID NO: 37063 - DNA, 20 bp, synthetic construct
  misc_feature 1..20: note = chemically synthesized
  source 1..20: mol_type = other DNA
gagcagggtgttgtcccttg

SEQ ID NO: 37064 - DNA, 20 bp, synthetic construct
  misc_feature 1..20: note = chemically synthesized
  source 1..20: mol_type = other DNA
tgtcccttgaggcaaatctc

SEQ ID NO: 37065 - DNA, 20 bp, synthetic construct
  misc_feature 1..20: note = chemically synthesized
  source 1..20: mol_type = other DNA
tcccttgaggcaaatctctg

SEQ ID NO: 37066 - DNA, 20 bp, synthetic construct
  misc_feature 1..20: note = chemically synthesized
  source 1..20: mol_type = other DNA
cccttgaggcaaatctctgg

SEQ ID NO: 37067 - DNA, 20 bp, synthetic construct
  misc_feature 1..20: note = chemically synthesized
  source 1..20: mol_type = other DNA
ccttgaggcaaatctctgga

SEQ ID NO: 37068 - DNA, 20 bp, synthetic construct
  misc_feature 1..20: note = chemically synthesized
  source 1..20: mol_type = other DNA
gaggcaaatctctggagggt

SEQ ID NO: 37069 - DNA, 20 bp, synthetic construct
  misc_feature 1..20: note = chemically synthesized
  source 1..20: mol_type = other DNA
ggcaaatctctggagggtga

SEQ ID NO: 37070 - DNA, 20 bp, synthetic construct
  misc_feature 1..20: note = chemically synthesized
  source 1..20: mol_type = other DNA
tctggagggtgagagttttg

SEQ ID NO: 37071 - DNA, 20 bp, synthetic construct
  misc_feature 1..20: note = chemically synthesized
  source 1..20: mol_type = other DNA
ggagggtgagagttttgtag

SEQ ID NO: 37072 - DNA, 20 bp, synthetic construct
  misc_feature 1..20: note = chemically synthesized
  source 1..20: mol_type = other DNA
gagggtgagagttttgtagt

SEQ ID NO: 37073 - DNA, 20 bp, synthetic construct
  misc_feature 1..20: note = chemically synthesized
  source 1..20: mol_type = other DNA
gttttgtagtgggcatgctt

SEQ ID NO: 37074 - DNA, 20 bp, synthetic construct
  misc_feature 1..20: note = chemically synthesized
  source 1..20: mol_type = other DNA
ttataaatcacctgtgaact

SEQ ID NO: 37075 - DNA, 20 bp, synthetic construct
  misc_feature 1..20: note = chemically synthesized
  source 1..20: mol_type = other DNA
tataaatcacctgtgaactc

SEQ ID NO: 37076 - DNA, 20 bp, synthetic construct
  misc_feature 1..20: note = chemically synthesized
  source 1..20: mol_type = other DNA
taaatcacctgtgaactcag

SEQ ID NO: 37077 - DNA, 20 bp, synthetic construct
  misc_feature 1..20: note = chemically synthesized
  source 1..20: mol_type = other DNA
aactcaggagttccatcttg

SEQ ID NO: 37078 - DNA, 20 bp, synthetic construct
  misc_feature 1..20: note = chemically synthesized
  source 1..20: mol_type = other DNA
tccatcttgaagcacataca

SEQ ID NO: 37079 - DNA, 20 bp, synthetic construct
  misc_feature 1..20: note = chemically synthesized
  source 1..20: mol_type = other DNA
tcttgaagcacatacatagt

SEQ ID NO: 37080 - DNA, 20 bp, synthetic construct
  misc_feature 1..20: note = chemically synthesized
  source 1..20: mol_type = other DNA
agttagatgaacttgccctg

SEQ ID NO: 37081 - DNA, 20 bp, synthetic construct
  misc_feature 1..20: note = chemically synthesized
  source 1..20: mol_type = other DNA
gttagatgaacttgccctgc

SEQ ID NO: 37082 - DNA, 20 bp, synthetic construct
  misc_feature 1..20: note = chemically synthesized
  source 1..20: mol_type = other DNA
ttagatgaacttgccctgca

SEQ ID NO: 37083 - DNA, 20 bp, synthetic construct
  misc_feature 1..20: note = chemically synthesized
  source 1..20: mol_type = other DNA
agatgaacttgccctgcagg

SEQ ID NO: 37084 - DNA, 20 bp, synthetic construct
  misc_feature 1..20: note = chemically synthesized
  source 1..20: mol_type = other DNA
atgaacttgccctgcaggga

SEQ ID NO: 37085 - DNA, 20 bp, synthetic construct
  misc_feature 1..20: note = chemically synthesized
  source 1..20: mol_type = other DNA
ctgcagggagagtctgatga

SEQ ID NO: 37086 - DNA, 20 bp, synthetic construct
  misc_feature 1..20: note = chemically synthesized
  source 1..20: mol_type = other DNA
tgcagggagagtctgatgaa

SEQ ID NO: 37087 - DNA, 20 bp, synthetic construct
  misc_feature 1..20: note = chemically synthesized
  source 1..20: mol_type = other DNA
gcagggagagtctgatgaaa

SEQ ID NO: 37088 - DNA, 20 bp, synthetic construct
  misc_feature 1..20: note = chemically synthesized
  source 1..20: mol_type = other DNA
agggagagtctgatgaaagg

SEQ ID NO: 37089 - DNA, 20 bp, synthetic construct
  misc_feature 1..20: note = chemically synthesized
  source 1..20: mol_type = other DNA
gggagagtctgatgaaaggg

SEQ ID NO: 37090 - DNA, 20 bp, synthetic construct
  misc_feature 1..20: note = chemically synthesized
  source 1..20: mol_type = other DNA
agagtctgatgaaagggagg

SEQ ID NO: 37091 - DNA, 20 bp, synthetic construct
  misc_feature 1..20: note = chemically synthesized
  source 1..20: mol_type = other DNA
caatttaatctataaattac

SEQ ID NO: 37092 - DNA, 20 bp, synthetic construct
  misc_feature 1..20: note = chemically synthesized
  source 1..20: mol_type = other DNA
attaccagataaaattttac

SEQ ID NO: 37093 - DNA, 20 bp, synthetic construct
  misc_feature 1..20: note = chemically synthesized
  source 1..20: mol_type = other DNA
aattttacaagttgacttta

SEQ ID NO: 37094 - DNA, 20 bp, synthetic construct
  misc_feature 1..20: note = chemically synthesized
  source 1..20: mol_type = other DNA
aagtcaaacacatttgaatt

SEQ ID NO: 37095 - DNA, 20 bp, synthetic construct
  misc_feature 1..20: note = chemically synthesized
  source 1..20: mol_type = other DNA
tcaaacacatttgaatttag

SEQ ID NO: 37096 - DNA, 20 bp, synthetic construct
  misc_feature 1..20: note = chemically synthesized
  source 1..20: mol_type = other DNA
aacacatttgaatttagtgg

SEQ ID NO: 37097 - DNA, 20 bp, synthetic construct
  misc_feature 1..20: note = chemically synthesized
  source 1..20: mol_type = other DNA
gaatttagtggaagccattc

SEQ ID NO: 37098 - DNA, 20 bp, synthetic construct
  misc_feature 1..20: note = chemically synthesized
  source 1..20: mol_type = other DNA
agccattcaagaaaatatca

SEQ ID NO: 37099 - DNA, 20 bp, synthetic construct
  misc_feature 1..20: note = chemically synthesized
  source 1..20: mol_type = other DNA
agaaaatatcaaagaaaata

SEQ ID NO: 37100 - DNA, 20 bp, synthetic construct
  misc_feature 1..20: note = chemically synthesized
  source 1..20: mol_type = other DNA
aaaatatcaaagaaaataca

SEQ ID NO: 37101 - DNA, 20 bp, synthetic construct
  misc_feature 1..20: note = chemically synthesized
  source 1..20: mol_type = other DNA
atatcaaagaaaatacagag

SEQ ID NO: 37102 - DNA, 20 bp, synthetic construct
  misc_feature 1..20: note = chemically synthesized
  source 1..20: mol_type = other DNA
tatcaaagaaaatacagagc

SEQ ID NO: 37103 - DNA, 20 bp, synthetic construct
  misc_feature 1..20: note = chemically synthesized
  source 1..20: mol_type = other DNA
tcaaagaaaatacagagcag

SEQ ID NO: 37104 - DNA, 20 bp, synthetic construct
  misc_feature 1..20: note = chemically synthesized
  source 1..20: mol_type = other DNA
aagaaaatacagagcaggag

SEQ ID NO: 37105 - DNA, 20 bp, synthetic construct
  misc_feature 1..20: note = chemically synthesized
  source 1..20: mol_type = other DNA
atacagagcaggagaagatt

SEQ ID NO: 37106 - DNA, 20 bp, synthetic construct
  misc_feature 1..20: note = chemically synthesized
  source 1..20: mol_type = other DNA
gagcaggagaagattaagca

SEQ ID NO: 37107 - DNA, 20 bp, synthetic construct
  misc_feature 1..20: note = chemically synthesized
  source 1..20: mol_type = other DNA
gcaggagaagattaagcaaa

SEQ ID NO: 37108 - DNA, 20 bp, synthetic construct
  misc_feature 1..20: note = chemically synthesized
  source 1..20: mol_type = other DNA
agattaagcaaagagttttt

SEQ ID NO: 37109 - DNA, 20 bp, synthetic construct
  misc_feature 1..20: note = chemically synthesized
  source 1..20: mol_type = other DNA
gattaagcaaagagtttttt

SEQ ID NO: 37110 - DNA, 20 bp, synthetic construct
  misc_feature 1..20: note = chemically synthesized
  source 1..20: mol_type = other DNA
attaagcaaagagttttttg

SEQ ID NO: 37111 - DNA, 20 bp, synthetic construct
  misc_feature 1..20: note = chemically synthesized
  source 1..20: mol_type = other DNA
aaagagttttttggggaaat

SEQ ID NO: 37112 - DNA, 20 bp, synthetic construct
  misc_feature 1..20: note = chemically synthesized
  source 1..20: mol_type = other DNA
ggtgtctatgtctgtgtgtg

SEQ ID NO: 37113 - DNA, 20 bp, synthetic construct
  misc_feature 1..20: note = chemically synthesized
  source 1..20: mol_type = other DNA
gtgtctatgtctgtgtgtgt

SEQ ID NO: 37114 - DNA, 20 bp, synthetic construct
  misc_feature 1..20: note = chemically synthesized
  source 1..20: mol_type = other DNA
tgtctatgtctgtgtgtgta

SEQ ID NO: 37115 - DNA, 20 bp, synthetic construct
  misc_feature 1..20: note = chemically synthesized
  source 1..20: mol_type = other DNA
tctatgtctgtgtgtgtagg

SEQ ID NO: 37116 - DNA, 20 bp, synthetic construct
  misc_feature 1..20: note = chemically synthesized
  source 1..20: mol_type = other DNA
gtctgtgtgtgtagggagtg

SEQ ID NO: 37117 - DNA, 20 bp, synthetic construct
  misc_feature 1..20: note = chemically synthesized
  source 1..20: mol_type = other DNA
tctgtgtgtgtagggagtgc

SEQ ID NO: 37118 - DNA, 20 bp, synthetic construct
  misc_feature 1..20: note = chemically synthesized
  source 1..20: mol_type = other DNA
ctgtgtgtgtagggagtgca

SEQ ID NO: 37119 - DNA, 20 bp, synthetic construct
  misc_feature 1..20: note = chemically synthesized
  source 1..20: mol_type = other DNA
tgtgtgtgtagggagtgcag

SEQ ID NO: 37120 - DNA, 20 bp, synthetic construct
  misc_feature 1..20: note = chemically synthesized
  source 1..20: mol_type = other DNA
gggatatgaatattctattt

SEQ ID NO: 37121 - DNA, 20 bp, synthetic construct
  misc_feature 1..20: note = chemically synthesized
  source 1..20: mol_type = other DNA
gaatattctatttcagccca

SEQ ID NO: 37122 - DNA, 20 bp, synthetic construct
  misc_feature 1..20: note = chemically synthesized
  source 1..20: mol_type = other DNA
ctatttcagcccatggaaac

SEQ ID NO: 37123 - DNA, 20 bp, synthetic construct
  misc_feature 1..20: note = chemically synthesized
  source 1..20: mol_type = other DNA
tatttcagcccatggaaact

SEQ ID NO: 37124 - DNA, 20 bp, synthetic construct
  misc_feature 1..20: note = chemically synthesized
  source 1..20: mol_type = other DNA
agcccatggaaactaggatg

SEQ ID NO: 37125 - DNA, 20 bp, synthetic construct
  misc_feature 1..20: note = chemically synthesized
  source 1..20: mol_type = other DNA
tagatcactgtgaacttatt

SEQ ID NO: 37126 - DNA, 20 bp, synthetic construct
  misc_feature 1..20: note = chemically synthesized
  source 1..20: mol_type = other DNA
atcactgtgaacttattcag

SEQ ID NO: 37127 - DNA, 20 bp, synthetic construct
  misc_feature 1..20: note = chemically synthesized
  source 1..20: mol_type = other DNA
tcactgtgaacttattcagc

SEQ ID NO: 37128 - DNA, 20 bp, synthetic construct
  misc_feature 1..20: note = chemically synthesized
  source 1..20: mol_type = other DNA
tattcagcaggctacaccca

SEQ ID NO: 37129 - DNA, 20 bp, synthetic construct
  misc_feature 1..20: note = chemically synthesized
  source 1..20: mol_type = other DNA
attcagcaggctacacccaa

SEQ ID NO: 37130 - DNA, 20 bp, synthetic construct
  misc_feature 1..20: note = chemically synthesized
  source 1..20: mol_type = other DNA
agcaggctacacccaaaggc

SEQ ID NO: 37131 - DNA, 20 bp, synthetic construct
  misc_feature 1..20: note = chemically synthesized
  source 1..20: mol_type = other DNA
tagaacaaacttctctgcca

SEQ ID NO: 37132 - DNA, 20 bp, synthetic construct
  misc_feature 1..20: note = chemically synthesized
  source 1..20: mol_type = other DNA
agaacaaacttctctgccac

SEQ ID NO: 37133 - DNA, 20 bp, synthetic construct
  misc_feature 1..20: note = chemically synthesized
  source 1..20: mol_type = other DNA
aacatatgttttaatcgacc

SEQ ID NO: 37134 - DNA, 20 bp, synthetic construct
  misc_feature 1..20: note = chemically synthesized
  source 1..20: mol_type = other DNA
acatatgttttaatcgacct

SEQ ID NO: 37135 - DNA, 20 bp, synthetic construct
  misc_feature 1..20: note = chemically synthesized
  source 1..20: mol_type = other DNA
catatgttttaatcgacctg

SEQ ID NO: 37136 - DNA, 20 bp, synthetic construct
  misc_feature 1..20: note = chemically synthesized
  source 1..20: mol_type = other DNA
atatgttttaatcgacctgg

SEQ ID NO: 37137 - DNA, 20 bp, synthetic construct
  misc_feature 1..20: note = chemically synthesized
  source 1..20: mol_type = other DNA
tatgttttaatcgacctggg

SEQ ID NO: 37138 - DNA, 20 bp, synthetic construct
  misc_feature 1..20: note = chemically synthesized
  source 1..20: mol_type = other DNA
tggggggcacattctctgat

SEQ ID NO: 37139 - DNA, 20 bp, synthetic construct
  misc_feature 1..20: note = chemically synthesized
  source 1..20: mol_type = other DNA
cattctctgataagctcttt

SEQ ID NO: 37140 - DNA, 20 bp, synthetic construct
  misc_feature 1..20: note = chemically synthesized
  source 1..20: mol_type = other DNA
ctctgataagctcttttgga

SEQ ID NO: 37141 - DNA, 20 bp, synthetic construct
  misc_feature 1..20: note = chemically synthesized
  source 1..20: mol_type = other DNA
gataagctcttttggaaagc

SEQ ID NO: 37142 - DNA, 20 bp, synthetic construct
  misc_feature 1..20: note = chemically synthesized
  source 1..20: mol_type = other DNA
ataagctcttttggaaagcc

SEQ ID NO: 37143 - DNA, 20 bp, synthetic construct
  misc_feature 1..20: note = chemically synthesized
  source 1..20: mol_type = other DNA
ttggaaagccaggctttctg

SEQ ID NO: 37144 - DNA, 20 bp, synthetic construct
  misc_feature 1..20: note = chemically synthesized
  source 1..20: mol_type = other DNA
gttatctttccaatgtgtgc

SEQ ID NO: 37145 - DNA, 20 bp, synthetic construct
  misc_feature 1..20: note = chemically synthesized
  source 1..20: mol_type = other DNA
ccaatgtgtgctggaatgcc

SEQ ID NO: 37146 - DNA, 20 bp, synthetic construct
  misc_feature 1..20: note = chemically synthesized
  source 1..20: mol_type = other DNA
caatgtgtgctggaatgccc

SEQ ID NO: 37147 - DNA, 20 bp, synthetic construct
  misc_feature 1..20: note = chemically synthesized
  source 1..20: mol_type = other DNA
aatgtgtgctggaatgcccg

SEQ ID NO: 37148 - DNA, 20 bp, synthetic construct
  misc_feature 1..20: note = chemically synthesized
  source 1..20: mol_type = other DNA
tgtgtgctggaatgcccggg

SEQ ID NO: 37149 - DNA, 20 bp, synthetic construct
  misc_feature 1..20: note = chemically synthesized
  source 1..20: mol_type = other DNA
tgtgctggaatgcccgggga

SEQ ID NO: 37150 - DNA, 20 bp, synthetic construct
  misc_feature 1..20: note = chemically synthesized
  source 1..20: mol_type = other DNA
gtgctggaatgcccggggag

SEQ ID NO: 37151 - DNA, 20 bp, synthetic construct
  misc_feature 1..20: note = chemically synthesized
  source 1..20: mol_type = other DNA
gaatgcccggggagaggaaa

SEQ ID NO: 37152 - DNA, 20 bp, synthetic construct
  misc_feature 1..20: note = chemically synthesized
  source 1..20: mol_type = other DNA
agaggaaaaagtttctttta

SEQ ID NO: 37153 - DNA, 20 bp, synthetic construct
  misc_feature 1..20: note = chemically synthesized
  source 1..20: mol_type = other DNA
gtttcttttacagccatgct

SEQ ID NO: 37154 - DNA, 20 bp, synthetic construct
  misc_feature 1..20: note = chemically synthesized
  source 1..20: mol_type = other DNA
cttttacagccatgctcagt

SEQ ID NO: 37155 - DNA, 20 bp, synthetic construct
  misc_feature 1..20: note = chemically synthesized
  source 1..20: mol_type = other DNA
ttacagccatgctcagtgag

SEQ ID NO: 37156 - DNA, 20 bp, synthetic construct
  misc_feature 1..20: note = chemically synthesized
  source 1..20: mol_type = other DNA
cagccatgctcagtgagaag

SEQ ID NO: 37157 - DNA, 20 bp, synthetic construct
  misc_feature 1..20: note = chemically synthesized
  source 1..20: mol_type = other DNA
gccatgctcagtgagaagcg

SEQ ID NO: 37158 - DNA, 20 bp, synthetic construct
  misc_feature 1..20: note = chemically synthesized
  source 1..20: mol_type = other DNA
tcttctattcacaaattgct

SEQ ID NO: 37159 - DNA, 20 bp, synthetic construct
  misc_feature 1..20: note = chemically synthesized
  source 1..20: mol_type = other DNA
gcatacacattcacacacca

SEQ ID NO: 37160 - DNA, 20 bp, synthetic construct
  misc_feature 1..20: note = chemically synthesized
  source 1..20: mol_type = other DNA
acacattcacacaccacagt

SEQ ID NO: 37161 - DNA, 20 bp, synthetic construct
  misc_feature 1..20: note = chemically synthesized
  source 1..20: mol_type = other DNA
cacattcacacaccacagtg

SEQ ID NO: 37162 - DNA, 20 bp, synthetic construct
  misc_feature 1..20: note = chemically synthesized
  source 1..20: mol_type = other DNA
attcacacaccacagtgagg

SEQ ID NO: 37163 - DNA, 20 bp, synthetic construct
  misc_feature 1..20: note = chemically synthesized
  source 1..20: mol_type = other DNA
ttaataaaatacatttactt

SEQ ID NO: 37164 - DNA, 20 bp, synthetic construct
  misc_feature 1..20: note = chemically synthesized
  source 1..20: mol_type = other DNA
ataaaatacatttacttcag

SEQ ID NO: 37165 - DNA, 20 bp, synthetic construct
  misc_feature 1..20: note = chemically synthesized
  source 1..20: mol_type = other DNA
acattttgcctataatataa

SEQ ID NO: 37166 - DNA, 20 bp, synthetic construct
  misc_feature 1..20: note = chemically synthesized
  source 1..20: mol_type = other DNA
aaaagtatttttcctattaa

SEQ ID NO: 37167 - DNA, 20 bp, synthetic construct
  misc_feature 1..20: note = chemically synthesized
  source 1..20: mol_type = other DNA
ttaaatccccattgccatat

SEQ ID NO: 37168 - DNA, 20 bp, synthetic construct
  misc_feature 1..20: note = chemically synthesized
  source 1..20: mol_type = other DNA
ccccattgccatatgagccc

SEQ ID NO: 37169 - DNA, 20 bp, synthetic construct
  misc_feature 1..20: note = chemically synthesized
  source 1..20: mol_type = other DNA
ccattgccatatgagccctg

SEQ ID NO: 37170 - DNA, 20 bp, synthetic construct
  misc_feature 1..20: note = chemically synthesized
  source 1..20: mol_type = other DNA
cattgccatatgagccctgg

SEQ ID NO: 37171 - DNA, 20 bp, synthetic construct
  misc_feature 1..20: note = chemically synthesized
  source 1..20: mol_type = other DNA
tatgagccctggaggtgaat

SEQ ID NO: 37172 - DNA, 20 bp, synthetic construct
  misc_feature 1..20: note = chemically synthesized
  source 1..20: mol_type = other DNA
tgagccctggaggtgaatca

SEQ ID NO: 37173 - DNA, 20 bp, synthetic construct
  misc_feature 1..20: note = chemically synthesized
  source 1..20: mol_type = other DNA
gaggtgaatcagagaaacaa

SEQ ID NO: 37174 - DNA, 20 bp, synthetic construct
  misc_feature 1..20: note = chemically synthesized
  source 1..20: mol_type = other DNA
aggtgaatcagagaaacaaa

SEQ ID NO: 37175 - DNA, 20 bp, synthetic construct
  misc_feature 1..20: note = chemically synthesized
  source 1..20: mol_type = other DNA
tcagagaaacaaaaggattg

SEQ ID NO: 37176 - DNA, 20 bp, synthetic construct
  misc_feature 1..20: note = chemically synthesized
  source 1..20: mol_type = other DNA
aaggattgtggaaaaatcat

SEQ ID NO: 37177 - DNA, 20 bp, synthetic construct
  misc_feature 1..20: note = chemically synthesized
  source 1..20: mol_type = other DNA
aggattgtggaaaaatcatc

SEQ ID NO: 37178 - DNA, 20 bp, synthetic construct
  misc_feature 1..20: note = chemically synthesized
  source 1..20: mol_type = other DNA
aaaaatcatcaggttaaaaa

SEQ ID NO: 37179 - DNA, 20 bp, synthetic construct
  misc_feature 1..20: note = chemically synthesized
  source 1..20: mol_type = other DNA
aagaaaaattgattctgttt

SEQ ID NO: 37180 - DNA, 20 bp, synthetic construct
  misc_feature 1..20: note = chemically synthesized
  source 1..20: mol_type = other DNA
agaaaaattgattctgtttt

SEQ ID NO: 37181 - DNA, 20 bp, synthetic construct
  misc_feature 1..20: note = chemically synthesized
  source 1..20: mol_type = other DNA
ttctgttttgggatatttcc

SEQ ID NO: 37182 - DNA, 20 bp, synthetic construct
  misc_feature 1..20: note = chemically synthesized
  source 1..20: mol_type = other DNA
gggatatttcctagcaacat

SEQ ID NO: 37183 - DNA, 20 bp, synthetic construct
  misc_feature 1..20: note = chemically synthesized
  source 1..20: mol_type = other DNA
tatttcctagcaacatgagc

SEQ ID NO: 37184 - DNA, 20 bp, synthetic construct
  misc_feature 1..20: note = chemically synthesized
  source 1..20: mol_type = other DNA
atttcctagcaacatgagct

SEQ ID NO: 37185 - DNA, 20 bp, synthetic construct
  misc_feature 1..20: note = chemically synthesized
  source 1..20: mol_type = other DNA
tttcctagcaacatgagctg

SEQ ID NO: 37186 - DNA, 20 bp, synthetic construct
  misc_feature 1..20: note = chemically synthesized
  source 1..20: mol_type = other DNA
tcctagcaacatgagctggg

SEQ ID NO: 37187 - DNA, 20 bp, synthetic construct
  misc_feature 1..20: note = chemically synthesized
  source 1..20: mol_type = other DNA
cctagcaacatgagctgggg

SEQ ID NO: 37188 - DNA, 20 bp, synthetic construct
  misc_feature 1..20: note = chemically synthesized
  source 1..20: mol_type = other DNA
ctagcaacatgagctgggga

SEQ ID NO: 37189 - DNA, 20 bp, synthetic construct
  misc_feature 1..20: note = chemically synthesized
  source 1..20: mol_type = other DNA
tagcaacatgagctggggag

SEQ ID NO: 37190 - DNA, 20 bp, synthetic construct
  misc_feature 1..20: note = chemically synthesized
  source 1..20: mol_type = other DNA
atgagctggggaggggatct

SEQ ID NO: 37191 - DNA, 20 bp, synthetic construct
  misc_feature 1..20: note = chemically synthesized
  source 1..20: mol_type = other DNA
agctggggaggggatctcag

SEQ ID NO: 37192 - DNA, 20 bp, synthetic construct
  misc_feature 1..20: note = chemically synthesized
  source 1..20: mol_type = other DNA
ctcagcagtgatgctctatg

SEQ ID NO: 37193 - DNA, 20 bp, synthetic construct
  misc_feature 1..20: note = chemically synthesized
  source 1..20: mol_type = other DNA
tgaagcataataaaatgaca

SEQ ID NO: 37194 - DNA, 20 bp, synthetic construct
  misc_feature 1..20: note = chemically synthesized
  source 1..20: mol_type = other DNA
ataataaaatgacacagtta

SEQ ID NO: 37195 - DNA, 20 bp, synthetic construct
  misc_feature 1..20: note = chemically synthesized
  source 1..20: mol_type = other DNA
taataaaatgacacagttac

SEQ ID NO: 37196 - DNA, 20 bp, synthetic construct
  misc_feature 1..20: note = chemically synthesized
  source 1..20: mol_type = other DNA
tgacacagttacaggtaact

SEQ ID NO: 37197 - DNA, 20 bp, synthetic construct
  misc_feature 1..20: note = chemically synthesized
  source 1..20: mol_type = other DNA
agttacaggtaacttagtta

SEQ ID NO: 37198 - DNA, 20 bp, synthetic construct
  misc_feature 1..20: note = chemically synthesized
  source 1..20: mol_type = other DNA
gttacaggtaacttagttaa

SEQ ID NO: 37199 - DNA, 20 bp, synthetic construct
  misc_feature 1..20: note = chemically synthesized
  source 1..20: mol_type = other DNA
ttacaggtaacttagttaaa

SEQ ID NO: 37200 - DNA, 20 bp, synthetic construct
  misc_feature 1..20: note = chemically synthesized
  source 1..20: mol_type = other DNA
tacaggtaacttagttaaag

SEQ ID NO: 37201 - DNA, 20 bp, synthetic construct
  misc_feature 1..20: note = chemically synthesized
  source 1..20: mol_type = other DNA
acaggtaacttagttaaagg

SEQ ID NO: 37202 - DNA, 20 bp, synthetic construct
  misc_feature 1..20: note = chemically synthesized
  source 1..20: mol_type = other DNA
tagttaaagggggaaataaa

SEQ ID NO: 37203 - DNA, 20 bp, synthetic construct
  misc_feature 1..20: note = chemically synthesized
  source 1..20: mol_type = other DNA
ttaaagggggaaataaatgg

SEQ ID NO: 37204 - DNA, 20 bp, synthetic construct
  misc_feature 1..20: note = chemically synthesized
  source 1..20: mol_type = other DNA
ctctttttgaatatcaattg

SEQ ID NO: 37205 - DNA, 20 bp, synthetic construct
  misc_feature 1..20: note = chemically synthesized
  source 1..20: mol_type = other DNA
atgtttaactgaactcactg

SEQ ID NO: 37206 - DNA, 20 bp, synthetic construct
  misc_feature 1..20: note = chemically synthesized
  source 1..20: mol_type = other DNA
tgtttaactgaactcactgt

SEQ ID NO: 37207 - DNA, 20 bp, synthetic construct
  misc_feature 1..20: note = chemically synthesized
  source 1..20: mol_type = other DNA
ttaactgaactcactgtagg

SEQ ID NO: 37208 - DNA, 20 bp, synthetic construct
  misc_feature 1..20: note = chemically synthesized
  source 1..20: mol_type = other DNA
ttaatttattgtgtgttttg

SEQ ID NO: 37209 - DNA, 20 bp, synthetic construct
  misc_feature 1..20: note = chemically synthesized
  source 1..20: mol_type = other DNA
gtgttttgaagtcacactgt

SEQ ID NO: 37210 - DNA, 20 bp, synthetic construct
  misc_feature 1..20: note = chemically synthesized
  source 1..20: mol_type = other DNA
tgaagtcacactgtgagcta

SEQ ID NO: 37211 - DNA, 20 bp, synthetic construct
  misc_feature 1..20: note = chemically synthesized
  source 1..20: mol_type = other DNA
gtgagctatagaatttaccc

SEQ ID NO: 37212 - DNA, 20 bp, synthetic construct
  misc_feature 1..20: note = chemically synthesized
  source 1..20: mol_type = other DNA
tacccaagcacaactcttcc

SEQ ID NO: 37213 - DNA, 20 bp, synthetic construct
  misc_feature 1..20: note = chemically synthesized
  source 1..20: mol_type = other DNA
aagcacaactcttcctggaa

SEQ ID NO: 37214 - DNA, 20 bp, synthetic construct
  misc_feature 1..20: note = chemically synthesized
  source 1..20: mol_type = other DNA
gcacaactcttcctggaaaa

SEQ ID NO: 37215 - DNA, 20 bp, synthetic construct
  misc_feature 1..20: note = chemically synthesized
  source 1..20: mol_type = other DNA
acaactcttcctggaaaaga

SEQ ID NO: 37216 - DNA, 20 bp, synthetic construct
  misc_feature 1..20: note = chemically synthesized
  source 1..20: mol_type = other DNA
ctggaaaagagagttcaaat

SEQ ID NO: 37217 - DNA, 20 bp, synthetic construct
  misc_feature 1..20: note = chemically synthesized
  source 1..20: mol_type = other DNA
aagagagttcaaatgagaaa

SEQ ID NO: 37218 - DNA, 20 bp, synthetic construct
  misc_feature 1..20: note = chemically synthesized
  source 1..20: mol_type = other DNA
agttcaaatgagaaacagtg

SEQ ID NO: 37219 - DNA, 20 bp, synthetic construct
  misc_feature 1..20: note = chemically synthesized
  source 1..20: mol_type = other DNA
gttcaaatgagaaacagtgc

SEQ ID NO: 37220 - DNA, 20 bp, synthetic construct
  misc_feature 1..20: note = chemically synthesized
  source 1..20: mol_type = other DNA
ttcaaatgagaaacagtgcg

SEQ ID NO: 37221 - DNA, 20 bp, synthetic construct
  misc_feature 1..20: note = chemically synthesized
  source 1..20: mol_type = other DNA
atgagaaacagtgcggggtg

SEQ ID NO: 37222 - DNA, 20 bp, synthetic construct
  misc_feature 1..20: note = chemically synthesized
  source 1..20: mol_type = other DNA
aacagtgcggggtgaagaca

SEQ ID NO: 37223 - DNA, 20 bp, synthetic construct
  misc_feature 1..20: note = chemically synthesized
  source 1..20: mol_type = other DNA
gcggggtgaagacatggata

SEQ ID NO: 37224 - DNA, 20 bp, synthetic construct
  misc_feature 1..20: note = chemically synthesized
  source 1..20: mol_type = other DNA
cggggtgaagacatggatat

SEQ ID NO: 37225 - DNA, 20 bp, synthetic construct
  misc_feature 1..20: note = chemically synthesized
  source 1..20: mol_type = other DNA
gatattttgatatatctatc

SEQ ID NO: 37226 - DNA, 20 bp, synthetic construct
  misc_feature 1..20: note = chemically synthesized
  source 1..20: mol_type = other DNA
tatatctatcaagtgctttt

SEQ ID NO: 37227 - DNA, 20 bp, synthetic construct
  misc_feature 1..20: note = chemically synthesized
  source 1..20: mol_type = other DNA
atctatcaagtgctttttag

SEQ ID NO: 37228 - DNA, 20 bp, synthetic construct
  misc_feature 1..20: note = chemically synthesized
  source 1..20: mol_type = other DNA
tcaagtgctttttagtggat

SEQ ID NO: 37229 - DNA, 20 bp, synthetic construct
  misc_feature 1..20: note = chemically synthesized
  source 1..20: mol_type = other DNA
caagtgctttttagtggatt

SEQ ID NO: 37230 - DNA, 20 bp, synthetic construct
  misc_feature 1..20: note = chemically synthesized
  source 1..20: mol_type = other DNA
gctttttagtggattaggtt

SEQ ID NO: 37231 - DNA, 20 bp, synthetic construct
  misc_feature 1..20: note = chemically synthesized
  source 1..20: mol_type = other DNA
ggattaggttcagaatgcat

SEQ ID NO: 37232 - DNA, 20 bp, synthetic construct
  misc_feature 1..20: note = chemically synthesized
  source 1..20: mol_type = other DNA
ccaatgcctgttcaataatc

SEQ ID NO: 37233 - DNA, 20 bp, synthetic construct
  misc_feature 1..20: note = chemically synthesized
  source 1..20: mol_type = other DNA
tgttcaataatccagttttc

SEQ ID NO: 37234 - DNA, 20 bp, synthetic construct
  misc_feature 1..20: note = chemically synthesized
  source 1..20: mol_type = other DNA
aataatccagttttccagca

SEQ ID NO: 37235 - DNA, 20 bp, synthetic construct
  misc_feature 1..20: note = chemically synthesized
  source 1..20: mol_type = other DNA
taatccagttttccagcata

SEQ ID NO: 37236 - DNA, 20 bp, synthetic construct
  misc_feature 1..20: note = chemically synthesized
  source 1..20: mol_type = other DNA
agcatagagcatattaaatt

SEQ ID NO: 37237 - DNA, 20 bp, synthetic construct
  misc_feature 1..20: note = chemically synthesized
  source 1..20: mol_type = other DNA
gcatagagcatattaaattg

SEQ ID NO: 37238 - DNA, 20 bp, synthetic construct
  misc_feature 1..20: note = chemically synthesized
  source 1..20: mol_type = other DNA
tagagcatattaaattgagg

SEQ ID NO: 37239 - DNA, 20 bp, synthetic construct
  misc_feature 1..20: note = chemically synthesized
  source 1..20: mol_type = other DNA
agagcatattaaattgagga

SEQ ID NO: 37240 - DNA, 20 bp, synthetic construct
  misc_feature 1..20: note = chemically synthesized
  source 1..20: mol_type = other DNA
tattaaattgaggaaggaca

SEQ ID NO: 37241 - DNA, 20 bp, synthetic construct
  misc_feature 1..20: note = chemically synthesized
  source 1..20: mol_type = other DNA
attgaggaaggacaaagtca

SEQ ID NO: 37242 - DNA, 20 bp, synthetic construct
  misc_feature 1..20: note = chemically synthesized
  source 1..20: mol_type = other DNA
tgaggaaggacaaagtcaca

SEQ ID NO: 37243 - DNA, 20 bp, synthetic construct
  misc_feature 1..20: note = chemically synthesized
  source 1..20: mol_type = other DNA
gaggaaggacaaagtcacag

SEQ ID NO: 37244 - DNA, 20 bp, synthetic construct
  misc_feature 1..20: note = chemically synthesized
  source 1..20: mol_type = other DNA
gaaggacaaagtcacagagg

SEQ ID NO: 37245 - DNA, 20 bp, synthetic construct
  misc_feature 1..20: note = chemically synthesized
  source 1..20: mol_type = other DNA
aaggacaaagtcacagaggt

SEQ ID NO: 37246 - DNA, 20 bp, synthetic construct
  misc_feature 1..20: note = chemically synthesized
  source 1..20: mol_type = other DNA
aggacaaagtcacagaggtg

SEQ ID NO: 37247 - DNA, 20 bp, synthetic construct
  misc_feature 1..20: note = chemically synthesized
  source 1..20: mol_type = other DNA
gacaaagtcacagaggtggg

SEQ ID NO: 37248 - DNA, 20 bp, synthetic construct
  misc_feature 1..20: note = chemically synthesized
  source 1..20: mol_type = other DNA
aaagtcacagaggtggggag

SEQ ID NO: 37249 - DNA, 20 bp, synthetic construct
  misc_feature 1..20: note = chemically synthesized
  source 1..20: mol_type = other DNA
aagtcacagaggtggggagc

SEQ ID NO: 37250 - DNA, 20 bp, synthetic construct
  misc_feature 1..20: note = chemically synthesized
  source 1..20: mol_type = other DNA
tcacagaggtggggagcagg

SEQ ID NO: 37251 - DNA, 20 bp, synthetic construct
  misc_feature 1..20: note = chemically synthesized
  source 1..20: mol_type = other DNA
ggtggggagcaggtggactg

SEQ ID NO: 37252 - DNA, 20 bp, synthetic construct
  misc_feature 1..20: note = chemically synthesized
  source 1..20: mol_type = other DNA
ggagcaggtggactgtggcc

SEQ ID NO: 37253 - DNA, 20 bp, synthetic construct
  misc_feature 1..20: note = chemically synthesized
  source 1..20: mol_type = other DNA
gagcaggtggactgtggcca

SEQ ID NO: 37254 - DNA, 20 bp, synthetic construct
  misc_feature 1..20: note = chemically synthesized
  source 1..20: mol_type = other DNA
gccaaggactttgcatgaaa

SEQ ID NO: 37255 - DNA, 20 bp, synthetic construct
  misc_feature 1..20: note = chemically synthesized
  source 1..20: mol_type = other DNA
aggactttgcatgaaacagt

SEQ ID NO: 37256 - DNA, 20 bp, synthetic construct
  misc_feature 1..20: note = chemically synthesized
  source 1..20: mol_type = other DNA
tcctccttgccctgccctca

SEQ ID NO: 37257 - DNA, 20 bp, synthetic construct
  misc_feature 1..20: note = chemically synthesized
  source 1..20: mol_type = other DNA
cctcatggtctgtgtactct

SEQ ID NO: 37258 - DNA, 20 bp, synthetic construct
  misc_feature 1..20: note = chemically synthesized
  source 1..20: mol_type = other DNA
ctcatggtctgtgtactctc

SEQ ID NO: 37259 - DNA, 20 bp, synthetic construct
  misc_feature 1..20: note = chemically synthesized
  source 1..20: mol_type = other DNA
catggtctgtgtactctcag

SEQ ID NO: 37260 - DNA, 20 bp, synthetic construct
  misc_feature 1..20: note = chemically synthesized
  source 1..20: mol_type = other DNA
atggtctgtgtactctcagg

SEQ ID NO: 37261 - DNA, 20 bp, synthetic construct
  misc_feature 1..20: note = chemically synthesized
  source 1..20: mol_type = other DNA
tctgtgtactctcaggaggt

SEQ ID NO: 37262 - DNA, 20 bp, synthetic construct
  misc_feature 1..20: note = chemically synthesized
  source 1..20: mol_type = other DNA
ctgtgtactctcaggaggtc

SEQ ID NO: 37263 - DNA, 20 bp, synthetic construct
  misc_feature 1..20: note = chemically synthesized
  source 1..20: mol_type = other DNA
gtactctcaggaggtcagga

SEQ ID NO: 37264 - DNA, 20 bp, synthetic construct
  misc_feature 1..20: note = chemically synthesized
  source 1..20: mol_type = other DNA
tactctcaggaggtcaggac

SEQ ID NO: 37265 - DNA, 20 bp, synthetic construct
  misc_feature 1..20: note = chemically synthesized
  source 1..20: mol_type = other DNA
aggtcaggacaggcctttct

SEQ ID NO: 37266 - DNA, 20 bp, synthetic construct
  misc_feature 1..20: note = chemically synthesized
  source 1..20: mol_type = other DNA
ggacaggcctttctgagaat

SEQ ID NO: 37267 - DNA, 20 bp, synthetic construct
  misc_feature 1..20: note = chemically synthesized
  source 1..20: mol_type = other DNA
ctgttcatctgcctttctac

SEQ ID NO: 37268 - DNA, 20 bp, synthetic construct
  misc_feature 1..20: note = chemically synthesized
  source 1..20: mol_type = other DNA
ttctactggatacttgtcat

SEQ ID NO: 37269 - DNA, 20 bp, synthetic construct
  misc_feature 1..20: note = chemically synthesized
  source 1..20: mol_type = other DNA
atacaaacacatgttctctg

SEQ ID NO: 37270 - DNA, 20 bp, synthetic construct
  misc_feature 1..20: note = chemically synthesized
  source 1..20: mol_type = other DNA
ctctgcagtgtgtcatcttt

SEQ ID NO: 37271 - DNA, 20 bp, synthetic construct
  misc_feature 1..20: note = chemically synthesized
  source 1..20: mol_type = other DNA
tcccctgaccctgtattccc

SEQ ID NO: 37272 - DNA, 20 bp, synthetic construct
  misc_feature 1..20: note = chemically synthesized
  source 1..20: mol_type = other DNA
cctgaccctgtattccctag

SEQ ID NO: 37273 - DNA, 20 bp, synthetic construct
  misc_feature 1..20: note = chemically synthesized
  source 1..20: mol_type = other DNA
cctagaagtctcgctgcttt

SEQ ID NO: 37274 - DNA, 20 bp, synthetic construct
  misc_feature 1..20: note = chemically synthesized
  source 1..20: mol_type = other DNA
tagaagtctcgctgctttca

SEQ ID NO: 37275 - DNA, 20 bp, synthetic construct
  misc_feature 1..20: note = chemically synthesized
  source 1..20: mol_type = other DNA
agtctcgctgctttcagagc

SEQ ID NO: 37276 - DNA, 20 bp, synthetic construct
  misc_feature 1..20: note = chemically synthesized
  source 1..20: mol_type = other DNA
gtctcgctgctttcagagcc

SEQ ID NO: 37277 - DNA, 20 bp, synthetic construct
  misc_feature 1..20: note = chemically synthesized
  source 1..20: mol_type = other DNA
tgccacccccactgctcttc

SEQ ID NO: 37278 - DNA, 20 bp, synthetic construct
  misc_feature 1..20: note = chemically synthesized
  source 1..20: mol_type = other DNA
taacccactccatctgcatg

SEQ ID NO: 37279 - DNA, 20 bp, synthetic construct
  misc_feature 1..20: note = chemically synthesized
  source 1..20: mol_type = other DNA
ggcccccaccacacccctca

SEQ ID NO: 37280 - DNA, 20 bp, synthetic construct
  misc_feature 1..20: note = chemically synthesized
  source 1..20: mol_type = other DNA
ccccaccacacccctcaaag

SEQ ID NO: 37281 - DNA, 20 bp, synthetic construct
  misc_feature 1..20: note = chemically synthesized
  source 1..20: mol_type = other DNA
ccacacccctcaaagtggtc

SEQ ID NO: 37282 - DNA, 20 bp, synthetic construct
  misc_feature 1..20: note = chemically synthesized
  source 1..20: mol_type = other DNA
cacacccctcaaagtggtca

SEQ ID NO: 37283 - DNA, 20 bp, synthetic construct
  misc_feature 1..20: note = chemically synthesized
  source 1..20: mol_type = other DNA
tgtcctgttgcttaattcca

SEQ ID NO: 37284 - DNA, 20 bp, synthetic construct
  misc_feature 1..20: note = chemically synthesized
  source 1..20: mol_type = other DNA
cctgttgcttaattccatgg

SEQ ID NO: 37285 - DNA, 20 bp, synthetic construct
  misc_feature 1..20: note = chemically synthesized
  source 1..20: mol_type = other DNA
tgcttaattccatggaagct

SEQ ID NO: 37286 - DNA, 20 bp, synthetic construct
  misc_feature 1..20: note = chemically synthesized
  source 1..20: mol_type = other DNA
cttggctatcttcattttat

SEQ ID NO: 37287 - DNA, 20 bp, synthetic construct
  misc_feature 1..20: note = chemically synthesized
  source 1..20: mol_type = other DNA
ttcattttattagcctcttt

SEQ ID NO: 37288 - DNA, 20 bp, synthetic construct
  misc_feature 1..20: note = chemically synthesized
  source 1..20: mol_type = other DNA
aaaatcactacattttgtgc

SEQ ID NO: 37289 - DNA, 20 bp, synthetic construct
  misc_feature 1..20: note = chemically synthesized
  source 1..20: mol_type = other DNA
aatcactacattttgtgcca

SEQ ID NO: 37290 - DNA, 20 bp, synthetic construct
  misc_feature 1..20: note = chemically synthesized
  source 1..20: mol_type = other DNA
actacattttgtgccagaga

SEQ ID NO: 37291 - DNA, 20 bp, synthetic construct
  misc_feature 1..20: note = chemically synthesized
  source 1..20: mol_type = other DNA
tacattttgtgccagagatg

SEQ ID NO: 37292 - DNA, 20 bp, synthetic construct
  misc_feature 1..20: note = chemically synthesized
  source 1..20: mol_type = other DNA
ttttgtgccagagatggagc

SEQ ID NO: 37293 - DNA, 20 bp, synthetic construct
  misc_feature 1..20: note = chemically synthesized
  source 1..20: mol_type = other DNA
agagatggagctggcatctc

SEQ ID NO: 37294 - DNA, 20 bp, synthetic construct
  misc_feature 1..20: note = chemically synthesized
  source 1..20: mol_type = other DNA
gagatggagctggcatctcc

SEQ ID NO: 37295 - DNA, 20 bp, synthetic construct
  misc_feature 1..20: note = chemically synthesized
  source 1..20: mol_type = other DNA
ggagctggcatctccaggct

SEQ ID NO: 37296 - DNA, 20 bp, synthetic construct
  misc_feature 1..20: note = chemically synthesized
  source 1..20: mol_type = other DNA
gctggcatctccaggcttgg

SEQ ID NO: 37297 - DNA, 20 bp, synthetic construct
  misc_feature 1..20: note = chemically synthesized
  source 1..20: mol_type = other DNA
tggcatctccaggcttggaa

SEQ ID NO: 37298 - DNA, 20 bp, synthetic construct
  misc_feature 1..20: note = chemically synthesized
  source 1..20: mol_type = other DNA
ggcatctccaggcttggaag

SEQ ID NO: 37299 - DNA, 20 bp, synthetic construct
  misc_feature 1..20: note = chemically synthesized
  source 1..20: mol_type = other DNA
gcatctccaggcttggaaga

SEQ ID NO: 37300 - DNA, 20 bp, synthetic construct
  misc_feature 1..20: note = chemically synthesized
  source 1..20: mol_type = other DNA
ggcttggaagagggctgctg

SEQ ID NO: 37301 - DNA, 20 bp, synthetic construct
  misc_feature 1..20: note = chemically synthesized
  source 1..20: mol_type = other DNA
ggaagagggctgctgaagct

SEQ ID NO: 37302 - DNA, 20 bp, synthetic construct
  misc_feature 1..20: note = chemically synthesized
  source 1..20: mol_type = other DNA
gagggctgctgaagctcagc

SEQ ID NO: 37303 - DNA, 20 bp, synthetic construct
  misc_feature 1..20: note = chemically synthesized
  source 1..20: mol_type = other DNA
agggctgctgaagctcagcc

SEQ ID NO: 37304 - DNA, 20 bp, synthetic construct
  misc_feature 1..20: note = chemically synthesized
  source 1..20: mol_type = other DNA
gaagctcagccaggtgtcct

SEQ ID NO: 37305 - DNA, 20 bp, synthetic construct
  misc_feature 1..20: note = chemically synthesized
  source 1..20: mol_type = other DNA
aagctcagccaggtgtccta

SEQ ID NO: 37306 - DNA, 20 bp, synthetic construct
  misc_feature 1..20: note = chemically synthesized
  source 1..20: mol_type = other DNA
gctcagccaggtgtcctaag

SEQ ID NO: 37307 - DNA, 20 bp, synthetic construct
  misc_feature 1..20: note = chemically synthesized
  source 1..20: mol_type = other DNA
ccaggtgtcctaaggagcct

SEQ ID NO: 37308 - DNA, 20 bp, synthetic construct
  misc_feature 1..20: note = chemically synthesized
  source 1..20: mol_type = other DNA
caggtgtcctaaggagcctc

SEQ ID NO: 37309 - DNA, 20 bp, synthetic construct
  misc_feature 1..20: note = chemically synthesized
  source 1..20: mol_type = other DNA
tgtcctaaggagcctcagga

SEQ ID NO: 37310 - DNA, 20 bp, synthetic construct
  misc_feature 1..20: note = chemically synthesized
  source 1..20: mol_type = other DNA
gtcctaaggagcctcaggac

SEQ ID NO: 37311 - DNA, 20 bp, synthetic construct
  misc_feature 1..20: note = chemically synthesized
  source 1..20: mol_type = other DNA
tcctaaggagcctcaggaca

SEQ ID NO: 37312 - DNA, 20 bp, synthetic construct
  misc_feature 1..20: note = chemically synthesized
  source 1..20: mol_type = other DNA
cctaaggagcctcaggacag

SEQ ID NO: 37313 - DNA, 20 bp, synthetic construct
  misc_feature 1..20: note = chemically synthesized
  source 1..20: mol_type = other DNA
gcctcaggacaggggatgct

SEQ ID NO: 37314 - DNA, 20 bp, synthetic construct
  misc_feature 1..20: note = chemically synthesized
  source 1..20: mol_type = other DNA
tcaggacaggggatgctcag

SEQ ID NO: 37315 - DNA, 20 bp, synthetic construct
  misc_feature 1..20: note = chemically synthesized
  source 1..20: mol_type = other DNA
gatgctcagtagccttgcaa

SEQ ID NO: 37316 - DNA, 20 bp, synthetic construct
  misc_feature 1..20: note = chemically synthesized
  source 1..20: mol_type = other DNA
atgctcagtagccttgcaat

SEQ ID NO: 37317 - DNA, 20 bp, synthetic construct
  misc_feature 1..20: note = chemically synthesized
  source 1..20: mol_type = other DNA
gtagccttgcaatgggaaca

SEQ ID NO: 37318 - DNA, 20 bp, synthetic construct
  misc_feature 1..20: note = chemically synthesized
  source 1..20: mol_type = other DNA
cttgcaatgggaacacagct

SEQ ID NO: 37319 - DNA, 20 bp, synthetic construct
  misc_feature 1..20: note = chemically synthesized
  source 1..20: mol_type = other DNA
gaacacagctgagccccact

SEQ ID NO: 37320 - DNA, 20 bp, synthetic construct
  misc_feature 1..20: note = chemically synthesized
  source 1..20: mol_type = other DNA
tggccaccctttgccacaac

SEQ ID NO: 37321 - DNA, 20 bp, synthetic construct
  misc_feature 1..20: note = chemically synthesized
  source 1..20: mol_type = other DNA
ggccaccctttgccacaacc

SEQ ID NO: 37322 - DNA, 20 bp, synthetic construct
  misc_feature 1..20: note = chemically synthesized
  source 1..20: mol_type = other DNA
caccctttgccacaaccagg

SEQ ID NO: 37323 - DNA, 20 bp, synthetic construct
  misc_feature 1..20: note = chemically synthesized
  source 1..20: mol_type = other DNA
ctttgccacaaccaggcaga

SEQ ID NO: 37324 - DNA, 20 bp, synthetic construct
  misc_feature 1..20: note = chemically synthesized
  source 1..20: mol_type = other DNA
tgccacaaccaggcagaaag

SEQ ID NO: 37325 - DNA, 20 bp, synthetic construct
  misc_feature 1..20: note = chemically synthesized
  source 1..20: mol_type = other DNA
ggcagaaagcagcttttgaa

SEQ ID NO: 37326 - DNA, 20 bp, synthetic construct
  misc_feature 1..20: note = chemically synthesized
  source 1..20: mol_type = other DNA
tttgaacagatttgttgcct

SEQ ID NO: 37327 - DNA, 20 bp, synthetic construct
  misc_feature 1..20: note = chemically synthesized
  source 1..20: mol_type = other DNA
ttgcctcagatttgatctca

SEQ ID NO: 37328 - DNA, 20 bp, synthetic construct
  misc_feature 1..20: note = chemically synthesized
  source 1..20: mol_type = other DNA
ttgatctcaaagaaaaatcg

SEQ ID NO: 37329 - DNA, 20 bp, synthetic construct
  misc_feature 1..20: note = chemically synthesized
  source 1..20: mol_type = other DNA
tgatctcaaagaaaaatcgt

SEQ ID NO: 37330 - DNA, 20 bp, synthetic construct
  misc_feature 1..20: note = chemically synthesized
  source 1..20: mol_type = other DNA
tctcaaagaaaaatcgtggg

SEQ ID NO: 37331 - DNA, 20 bp, synthetic construct
  misc_feature 1..20: note = chemically synthesized
  source 1..20: mol_type = other DNA
agaaaaatcgtgggcagtat

SEQ ID NO: 37332 - DNA, 20 bp, synthetic construct
  misc_feature 1..20: note = chemically synthesized
  source 1..20: mol_type = other DNA
atcgtgggcagtattggtcc

SEQ ID NO: 37333 - DNA, 20 bp, synthetic construct
  misc_feature 1..20: note = chemically synthesized
  source 1..20: mol_type = other DNA
tcgtgggcagtattggtccc

SEQ ID NO: 37334 - DNA, 20 bp, synthetic construct
  misc_feature 1..20: note = chemically synthesized
  source 1..20: mol_type = other DNA
ttacaatttcctctgaaatc

SEQ ID NO: 37335 - DNA, 20 bp, synthetic construct
  misc_feature 1..20: note = chemically synthesized
  source 1..20: mol_type = other DNA
ctggatgcctatcaacacct

SEQ ID NO: 37336 - DNA, 20 bp, synthetic construct
  misc_feature 1..20: note = chemically synthesized
  source 1..20: mol_type = other DNA
actgaattctccccaactaa

SEQ ID NO: 37337 - DNA, 20 bp, synthetic construct
  misc_feature 1..20: note = chemically synthesized
  source 1..20: mol_type = other DNA
gaattctccccaactaatag

SEQ ID NO: 37338 - DNA, 20 bp, synthetic construct
  misc_feature 1..20: note = chemically synthesized
  source 1..20: mol_type = other DNA
ctaatagtggtgtgtcactg

SEQ ID NO: 37339 - DNA, 20 bp, synthetic construct
  misc_feature 1..20: note = chemically synthesized
  source 1..20: mol_type = other DNA
tagtggtgtgtcactgtagt

SEQ ID NO: 37340 - DNA, 20 bp, synthetic construct
  misc_feature 1..20: note = chemically synthesized
  source 1..20: mol_type = other DNA
gtgtgtcactgtagtaagcc

SEQ ID NO: 37341 - DNA, 20 bp, synthetic construct
  misc_feature 1..20: note = chemically synthesized
  source 1..20: mol_type = other DNA
tagtaagcctagtacaaaaa

SEQ ID NO: 37342 - DNA, 20 bp, synthetic construct
  misc_feature 1..20: note = chemically synthesized
  source 1..20: mol_type = other DNA
tacaaaaatggccttctttg

SEQ ID NO: 37343 - DNA, 20 bp, synthetic construct
  misc_feature 1..20: note = chemically synthesized
  source 1..20: mol_type = other DNA
caaaaatggccttctttgtg

SEQ ID NO: 37344 - DNA, 20 bp, synthetic construct
  misc_feature 1..20: note = chemically synthesized
  source 1..20: mol_type = other DNA
aaaaatggccttctttgtgg

SEQ ID NO: 37345 - DNA, 20 bp, synthetic construct
  misc_feature 1..20: note = chemically synthesized
  source 1..20: mol_type = other DNA
aaatggccttctttgtggag

SEQ ID NO: 37346 - DNA, 20 bp, synthetic construct
  misc_feature 1..20: note = chemically synthesized
  source 1..20: mol_type = other DNA
tttttgcttaatttttgccc

SEQ ID NO: 37347 - DNA, 20 bp, synthetic construct
  misc_feature 1..20: note = chemically synthesized
  source 1..20: mol_type = other DNA
gcttaatttttgcccaagat

SEQ ID NO: 37348 - DNA, 20 bp, synthetic construct
  misc_feature 1..20: note = chemically synthesized
  source 1..20: mol_type = other DNA
cccaagatgagaacataatt

SEQ ID NO: 37349 - DNA, 20 bp, synthetic construct
  misc_feature 1..20: note = chemically synthesized
  source 1..20: mol_type = other DNA
caccaacatttttgtaacta

SEQ ID NO: 37350 - DNA, 20 bp, synthetic construct
  misc_feature 1..20: note = chemically synthesized
  source 1..20: mol_type = other DNA
accaacatttttgtaactaa

SEQ ID NO: 37351 - DNA, 20 bp, synthetic construct
  misc_feature 1..20: note = chemically synthesized
  source 1..20: mol_type = other DNA
caacatttttgtaactaaag

SEQ ID NO: 37352 - DNA, 20 bp, synthetic construct
  misc_feature 1..20: note = chemically synthesized
  source 1..20: mol_type = other DNA
aacatttttgtaactaaagg

SEQ ID NO: 37353 - DNA, 20 bp, synthetic construct
  misc_feature 1..20: note = chemically synthesized
  source 1..20: mol_type = other DNA
acatttttgtaactaaagga

SEQ ID NO: 37354 - DNA, 20 bp, synthetic construct
  misc_feature 1..20: note = chemically synthesized
  source 1..20: mol_type = other DNA
taactaaaggagggaccatt

SEQ ID NO: 37355 - DNA, 20 bp, synthetic construct
  misc_feature 1..20: note = chemically synthesized
  source 1..20: mol_type = other DNA
ctaaaggagggaccattcag

SEQ ID NO: 37356 - DNA, 20 bp, synthetic construct
  misc_feature 1..20: note = chemically synthesized
  source 1..20: mol_type = other DNA
aagatgcttatcaactgtca

SEQ ID NO: 37357 - DNA, 20 bp, synthetic construct
  misc_feature 1..20: note = chemically synthesized
  source 1..20: mol_type = other DNA
cttatcaactgtcaaagtga

SEQ ID NO: 37358 - DNA, 20 bp, synthetic construct
  misc_feature 1..20: note = chemically synthesized
  source 1..20: mol_type = other DNA
acaaccaatgcacatattgt

SEQ ID NO: 37359 - DNA, 20 bp, synthetic construct
  misc_feature 1..20: note = chemically synthesized
  source 1..20: mol_type = other DNA
tattgtaagaaatcaaacaa

SEQ ID NO: 37360 - DNA, 20 bp, synthetic construct
  misc_feature 1..20: note = chemically synthesized
  source 1..20: mol_type = other DNA
gaaatcaaacaatggcctcc

SEQ ID NO: 37361 - DNA, 20 bp, synthetic construct
  misc_feature 1..20: note = chemically synthesized
  source 1..20: mol_type = other DNA
aaatcaaacaatggcctcca

SEQ ID NO: 37362 - DNA, 20 bp, synthetic construct
  misc_feature 1..20: note = chemically synthesized
  source 1..20: mol_type = other DNA
ctccaaggttcatttctaca

SEQ ID NO: 37363 - DNA, 20 bp, synthetic construct
  misc_feature 1..20: note = chemically synthesized
  source 1..20: mol_type = other DNA
tccaaggttcatttctacac

SEQ ID NO: 37364 - DNA, 20 bp, synthetic construct
  misc_feature 1..20: note = chemically synthesized
  source 1..20: mol_type = other DNA
ccaaggttcatttctacaca

SEQ ID NO: 37365 - DNA, 20 bp, synthetic construct
  misc_feature 1..20: note = chemically synthesized
  source 1..20: mol_type = other DNA
gttcatttctacacagggat

SEQ ID NO: 37366 - DNA, 20 bp, synthetic construct
  misc_feature 1..20: note = chemically synthesized
  source 1..20: mol_type = other DNA
catttctacacagggattag

SEQ ID NO: 37367 - DNA, 20 bp, synthetic construct
  misc_feature 1..20: note = chemically synthesized
  source 1..20: mol_type = other DNA
tagcagatcaacatcaatct

SEQ ID NO: 37368 - DNA, 20 bp, synthetic construct
  misc_feature 1..20: note = chemically synthesized
  source 1..20: mol_type = other DNA
caacatcaatcttggcaaca

SEQ ID NO: 37369 - DNA, 20 bp, synthetic construct
  misc_feature 1..20: note = chemically synthesized
  source 1..20: mol_type = other DNA
ggcaacacagttgccactga

SEQ ID NO: 37370 - DNA, 20 bp, synthetic construct
  misc_feature 1..20: note = chemically synthesized
  source 1..20: mol_type = other DNA
ttattttttttatcatgaca

SEQ ID NO: 37371 - DNA, 20 bp, synthetic construct
  misc_feature 1..20: note = chemically synthesized
  source 1..20: mol_type = other DNA
tttatcatgacatggcaatc

SEQ ID NO: 37372 - DNA, 20 bp, synthetic construct
  misc_feature 1..20: note = chemically synthesized
  source 1..20: mol_type = other DNA
tatcatgacatggcaatcaa

SEQ ID NO: 37373 - DNA, 20 bp, synthetic construct
  misc_feature 1..20: note = chemically synthesized
  source 1..20: mol_type = other DNA
aacatgatttattcttattt

SEQ ID NO: 37374 - DNA, 20 bp, synthetic construct
  misc_feature 1..20: note = chemically synthesized
  source 1..20: mol_type = other DNA
tattcttatttaagatttta

SEQ ID NO: 37375 - DNA, 20 bp, synthetic construct
  misc_feature 1..20: note = chemically synthesized
  source 1..20: mol_type = other DNA
cttatttaagattttatggt

SEQ ID NO: 37376 - DNA, 20 bp, synthetic construct
  misc_feature 1..20: note = chemically synthesized
  source 1..20: mol_type = other DNA
ttaagattttatggttagac

SEQ ID NO: 37377 - DNA, 20 bp, synthetic construct
  misc_feature 1..20: note = chemically synthesized
  source 1..20: mol_type = other DNA
taagattttatggttagact

SEQ ID NO: 37378 - DNA, 20 bp, synthetic construct
  misc_feature 1..20: note = chemically synthesized
  source 1..20: mol_type = other DNA
gattttatggttagactagg

SEQ ID NO: 37379 - DNA, 20 bp, synthetic construct
  misc_feature 1..20: note = chemically synthesized
  source 1..20: mol_type = other DNA
ttatggttagactaggcaga

SEQ ID NO: 37380 - DNA, 20 bp, synthetic construct
  misc_feature 1..20: note = chemically synthesized
  source 1..20: mol_type = other DNA
ggttagactaggcagatagc

SEQ ID NO: 37381 - DNA, 20 bp, synthetic construct
  misc_feature 1..20: note = chemically synthesized
  source 1..20: mol_type = other DNA
ctaggcagatagctagatat

SEQ ID NO: 37382 - DNA, 20 bp, synthetic construct
  misc_feature 1..20: note = chemically synthesized
  source 1..20: mol_type = other DNA
ggcagatagctagatatgag

SEQ ID NO: 37383 - DNA, 20 bp, synthetic construct
  misc_feature 1..20: note = chemically synthesized
  source 1..20: mol_type = other DNA
gcagatagctagatatgagc

SEQ ID NO: 37384 - DNA, 20 bp, synthetic construct
  misc_feature 1..20: note = chemically synthesized
  source 1..20: mol_type = other DNA
agatagctagatatgagcag

SEQ ID NO: 37385 - DNA, 20 bp, synthetic construct
  misc_feature 1..20: note = chemically synthesized
  source 1..20: mol_type = other DNA
gatagctagatatgagcagg

SEQ ID NO: 37386 - DNA, 20 bp, synthetic construct
  misc_feature 1..20: note = chemically synthesized
  source 1..20: mol_type = other DNA
agctagatatgagcaggagg

SEQ ID NO: 37387 - DNA, 20 bp, synthetic construct
  misc_feature 1..20: note = chemically synthesized
  source 1..20: mol_type = other DNA
tagatatgagcaggaggtgg

SEQ ID NO: 37388 - DNA, 20 bp, synthetic construct
  misc_feature 1..20: note = chemically synthesized
  source 1..20: mol_type = other DNA
agcaggaggtggaagcccct

SEQ ID NO: 37389 - DNA, 20 bp, synthetic construct
  misc_feature 1..20: note = chemically synthesized
  source 1..20: mol_type = other DNA
caggaggtggaagcccctga

SEQ ID NO: 37390 - DNA, 20 bp, synthetic construct
  misc_feature 1..20: note = chemically synthesized
  source 1..20: mol_type = other DNA
ggtggaagcccctgagagaa

SEQ ID NO: 37391 - DNA, 20 bp, synthetic construct
  misc_feature 1..20: note = chemically synthesized
  source 1..20: mol_type = other DNA
tggaagcccctgagagaatg

SEQ ID NO: 37392 - DNA, 20 bp, synthetic construct
  misc_feature 1..20: note = chemically synthesized
  source 1..20: mol_type = other DNA
ggaagcccctgagagaatgg

SEQ ID NO: 37393 - DNA, 20 bp, synthetic construct
  misc_feature 1..20: note = chemically synthesized
  source 1..20: mol_type = other DNA
cccctgagagaatggaggtc

SEQ ID NO: 37394 - DNA, 20 bp, synthetic construct
  misc_feature 1..20: note = chemically synthesized
  source 1..20: mol_type = other DNA
cctgagagaatggaggtctg

SEQ ID NO: 37395 - DNA, 20 bp, synthetic construct
  misc_feature 1..20: note = chemically synthesized
  source 1..20: mol_type = other DNA
gtctggagaatctgaaaccc

SEQ ID NO: 37396 - DNA, 20 bp, synthetic construct
  misc_feature 1..20: note = chemically synthesized
  source 1..20: mol_type = other DNA
ctggagaatctgaaacccca

SEQ ID NO: 37397 - DNA, 20 bp, synthetic construct
  misc_feature 1..20: note = chemically synthesized
  source 1..20: mol_type = other DNA
tgaaaccccagagattaccc

SEQ ID NO: 37398 - DNA, 20 bp, synthetic construct
  misc_feature 1..20: note = chemically synthesized
  source 1..20: mol_type = other DNA
attacccaagtcctgcatgc

SEQ ID NO: 37399 - DNA, 20 bp, synthetic construct
  misc_feature 1..20: note = chemically synthesized
  source 1..20: mol_type = other DNA
aagtcctgcatgctagacat

SEQ ID NO: 37400 - DNA, 20 bp, synthetic construct
  misc_feature 1..20: note = chemically synthesized
  source 1..20: mol_type = other DNA
tcctgcatgctagacatgag

SEQ ID NO: 37401 - DNA, 20 bp, synthetic construct
  misc_feature 1..20: note = chemically synthesized
  source 1..20: mol_type = other DNA
ctgcatgctagacatgagtg

SEQ ID NO: 37402 - DNA, 20 bp, synthetic construct
  misc_feature 1..20: note = chemically synthesized
  source 1..20: mol_type = other DNA
tgcatgctagacatgagtgg

SEQ ID NO: 37403 - DNA, 20 bp, synthetic construct
  misc_feature 1..20: note = chemically synthesized
  source 1..20: mol_type = other DNA
catgctagacatgagtggag

SEQ ID NO: 37404 - DNA, 20 bp, synthetic construct
  misc_feature 1..20: note = chemically synthesized
  source 1..20: mol_type = other DNA
atgctagacatgagtggagg

SEQ ID NO: 37405 - DNA, 20 bp, synthetic construct
  misc_feature 1..20: note = chemically synthesized
  source 1..20: mol_type = other DNA
tgctagacatgagtggagga

SEQ ID NO: 37406 - DNA, 20 bp, synthetic construct
  misc_feature 1..20: note = chemically synthesized
  source 1..20: mol_type = other DNA
gctagacatgagtggaggag

SEQ ID NO: 37407 - DNA, 20 bp, synthetic construct
  misc_feature 1..20: note = chemically synthesized
  source 1..20: mol_type = other DNA
ctagacatgagtggaggagg

SEQ ID NO: 37408 - DNA, 20 bp, synthetic construct
  misc_feature 1..20: note = chemically synthesized
  source 1..20: mol_type = other DNA
agtggaggagggggaatacc

SEQ ID NO: 37409 - DNA, 20 bp, synthetic construct
  misc_feature 1..20: note = chemically synthesized
  source 1..20: mol_type = other DNA
gtggaggagggggaatacct

SEQ ID NO: 37410 - DNA, 20 bp, synthetic construct
  misc_feature 1..20: note = chemically synthesized
  source 1..20: mol_type = other DNA
gaggagggggaatacctagg

SEQ ID NO: 37411 - DNA, 20 bp, synthetic construct
  misc_feature 1..20: note = chemically synthesized
  source 1..20: mol_type = other DNA
gggggaatacctaggtagaa

SEQ ID NO: 37412 - DNA, 20 bp, synthetic construct
  misc_feature 1..20: note = chemically synthesized
  source 1..20: mol_type = other DNA
ggtagaaaagaatgcccctt

SEQ ID NO: 37413 - DNA, 20 bp, synthetic construct
  misc_feature 1..20: note = chemically synthesized
  source 1..20: mol_type = other DNA
agaatgccccttaagatgcc

SEQ ID NO: 37414 - DNA, 20 bp, synthetic construct
  misc_feature 1..20: note = chemically synthesized
  source 1..20: mol_type = other DNA
atgccccttaagatgcccag

SEQ ID NO: 37415 - DNA, 20 bp, synthetic construct
  misc_feature 1..20: note = chemically synthesized
  source 1..20: mol_type = other DNA
cccagcagtcgctcactgtg

SEQ ID NO: 37416 - DNA, 20 bp, synthetic construct
  misc_feature 1..20: note = chemically synthesized
  source 1..20: mol_type = other DNA
tcactgtgcagttaactttt

SEQ ID NO: 37417 - DNA, 20 bp, synthetic construct
  misc_feature 1..20: note = chemically synthesized
  source 1..20: mol_type = other DNA
ttaacttttcagaatgctgc

SEQ ID NO: 37418 - DNA, 20 bp, synthetic construct
  misc_feature 1..20: note = chemically synthesized
  source 1..20: mol_type = other DNA
tgctgctagatacatgctga

SEQ ID NO: 37419 - DNA, 20 bp, synthetic construct
  misc_feature 1..20: note = chemically synthesized
  source 1..20: mol_type = other DNA
gctgctagatacatgctgat

SEQ ID NO: 37420 - DNA, 20 bp, synthetic construct
  misc_feature 1..20: note = chemically synthesized
  source 1..20: mol_type = other DNA
ctgctagatacatgctgata

SEQ ID NO: 37421 - DNA, 20 bp, synthetic construct
  misc_feature 1..20: note = chemically synthesized
  source 1..20: mol_type = other DNA
gctagatacatgctgatagg

SEQ ID NO: 37422 - DNA, 20 bp, synthetic construct
  misc_feature 1..20: note = chemically synthesized
  source 1..20: mol_type = other DNA
ctagatacatgctgataggg

SEQ ID NO: 37423 - DNA, 20 bp, synthetic construct
  misc_feature 1..20: note = chemically synthesized
  source 1..20: mol_type = other DNA
tagatacatgctgataggga

SEQ ID NO: 37424 - DNA, 20 bp, synthetic construct
  misc_feature 1..20: note = chemically synthesized
  source 1..20: mol_type = other DNA
atacatgctgatagggaggg

SEQ ID NO: 37425 - DNA, 20 bp, synthetic construct
  misc_feature 1..20: note = chemically synthesized
  source 1..20: mol_type = other DNA
acatgctgatagggagggaa

SEQ ID NO: 37426 - DNA, 20 bp, synthetic construct
  misc_feature 1..20: note = chemically synthesized
  source 1..20: mol_type = other DNA
catgctgatagggagggaag

SEQ ID NO: 37427 - DNA, 20 bp, synthetic construct
  misc_feature 1..20: note = chemically synthesized
  source 1..20: mol_type = other DNA
atgctgatagggagggaaga

SEQ ID NO: 37428 - DNA, 20 bp, synthetic construct
  misc_feature 1..20: note = chemically synthesized
  source 1..20: mol_type = other DNA
gatagggagggaagagggca

SEQ ID NO: 37429 - DNA, 20 bp, synthetic construct
  misc_feature 1..20: note = chemically synthesized
  source 1..20: mol_type = other DNA
atagggagggaagagggcaa

SEQ ID NO: 37430 - DNA, 20 bp, synthetic construct
  misc_feature 1..20: note = chemically synthesized
  source 1..20: mol_type = other DNA
agggagggaagagggcaaag

SEQ ID NO: 37431 - DNA, 20 bp, synthetic construct
  misc_feature 1..20: note = chemically synthesized
  source 1..20: mol_type = other DNA
agggcaaaggagaaattcct

SEQ ID NO: 37432 - DNA, 20 bp, synthetic construct
  misc_feature 1..20: note = chemically synthesized
  source 1..20: mol_type = other DNA
ggcaaaggagaaattcctaa

SEQ ID NO: 37433 - DNA, 20 bp, synthetic construct
  misc_feature 1..20: note = chemically synthesized
  source 1..20: mol_type = other DNA
agaaattcctaagagataca

SEQ ID NO: 37434 - DNA, 20 bp, synthetic construct
  misc_feature 1..20: note = chemically synthesized
  source 1..20: mol_type = other DNA
tcctaagagatacacggttg

SEQ ID NO: 37435 - DNA, 20 bp, synthetic construct
  misc_feature 1..20: note = chemically synthesized
  source 1..20: mol_type = other DNA
aagagatacacggttgcagt

SEQ ID NO: 37436 - DNA, 20 bp, synthetic construct
  misc_feature 1..20: note = chemically synthesized
  source 1..20: mol_type = other DNA
gttgcagttagtatacatct

SEQ ID NO: 37437 - DNA, 20 bp, synthetic construct
  misc_feature 1..20: note = chemically synthesized
  source 1..20: mol_type = other DNA
gagtgctatacaaccttctt

SEQ ID NO: 37438 - DNA, 20 bp, synthetic construct
  misc_feature 1..20: note = chemically synthesized
  source 1..20: mol_type = other DNA
agtgctatacaaccttcttt

SEQ ID NO: 37439 - DNA, 20 bp, synthetic construct
  misc_feature 1..20: note = chemically synthesized
  source 1..20: mol_type = other DNA
gctatacaaccttctttggg

SEQ ID NO: 37440 - DNA, 20 bp, synthetic construct
  misc_feature 1..20: note = chemically synthesized
  source 1..20: mol_type = other DNA
atacaaccttctttgggtgg

SEQ ID NO: 37441 - DNA, 20 bp, synthetic construct
  misc_feature 1..20: note = chemically synthesized
  source 1..20: mol_type = other DNA
aaccttctttgggtggtggc

SEQ ID NO: 37442 - DNA, 20 bp, synthetic construct
  misc_feature 1..20: note = chemically synthesized
  source 1..20: mol_type = other DNA
cttctttgggtggtggcaag

SEQ ID NO: 37443 - DNA, 20 bp, synthetic construct
  misc_feature 1..20: note = chemically synthesized
  source 1..20: mol_type = other DNA
ggtggtggcaagaagcaatg

SEQ ID NO: 37444 - DNA, 20 bp, synthetic construct
  misc_feature 1..20: note = chemically synthesized
  source 1..20: mol_type = other DNA
gaagcaatgcagccattacg

SEQ ID NO: 37445 - DNA, 20 bp, synthetic construct
  misc_feature 1..20: note = chemically synthesized
  source 1..20: mol_type = other DNA
catatcaaacacctgtatca

SEQ ID NO: 37446 - DNA, 20 bp, synthetic construct
  misc_feature 1..20: note = chemically synthesized
  source 1..20: mol_type = other DNA
atatcaaacacctgtatcac

SEQ ID NO: 37447 - DNA, 20 bp, synthetic construct
  misc_feature 1..20: note = chemically synthesized
  source 1..20: mol_type = other DNA
cacctgtatcacaggtgtta

SEQ ID NO: 37448 - DNA, 20 bp, synthetic construct
  misc_feature 1..20: note = chemically synthesized
  source 1..20: mol_type = other DNA
atcacaggtgttaaagaaac

SEQ ID NO: 37449 - DNA, 20 bp, synthetic construct
  misc_feature 1..20: note = chemically synthesized
  source 1..20: mol_type = other DNA
atgatttgcaatattgtctt

SEQ ID NO: 37450 - DNA, 20 bp, synthetic construct
  misc_feature 1..20: note = chemically synthesized
  source 1..20: mol_type = other DNA
ctataaatatgatttttaaa

SEQ ID NO: 37451 - DNA, 20 bp, synthetic construct
  misc_feature 1..20: note = chemically synthesized
  source 1..20: mol_type = other DNA
atttttaaaaagtatttctt

SEQ ID NO: 37452 - DNA, 20 bp, synthetic construct
  misc_feature 1..20: note = chemically synthesized
  source 1..20: mol_type = other DNA
tttttaaaaagtatttcttt

SEQ ID NO: 37453 - DNA, 20 bp, synthetic construct
  misc_feature 1..20: note = chemically synthesized
  source 1..20: mol_type = other DNA
taaaaagtatttctttaggt

SEQ ID NO: 37454 - DNA, 20 bp, synthetic construct
  misc_feature 1..20: note = chemically synthesized
  source 1..20: mol_type = other DNA
tacgcattgacttatcttcc

SEQ ID NO: 37455 - DNA, 20 bp, synthetic construct
  misc_feature 1..20: note = chemically synthesized
  source 1..20: mol_type = other DNA
acgcattgacttatcttcct

SEQ ID NO: 37456 - DNA, 20 bp, synthetic construct
  misc_feature 1..20: note = chemically synthesized
  source 1..20: mol_type = other DNA
cttatcttcctgggtttcat

SEQ ID NO: 37457 - DNA, 20 bp, synthetic construct
  misc_feature 1..20: note = chemically synthesized
  source 1..20: mol_type = other DNA
actgtttatctcaaactctt

SEQ ID NO: 37458 - DNA, 20 bp, synthetic construct
  misc_feature 1..20: note = chemically synthesized
  source 1..20: mol_type = other DNA
atctcaaactcttgagatta

SEQ ID NO: 37459 - DNA, 20 bp, synthetic construct
  misc_feature 1..20: note = chemically synthesized
  source 1..20: mol_type = other DNA
aaactcttgagattaaagta

SEQ ID NO: 37460 - DNA, 20 bp, synthetic construct
  misc_feature 1..20: note = chemically synthesized
  source 1..20: mol_type = other DNA
aactcttgagattaaagtat

SEQ ID NO: 37461 - DNA, 20 bp, synthetic construct
  misc_feature 1..20: note = chemically synthesized
  source 1..20: mol_type = other DNA
ttgagattaaagtatgggct

SEQ ID NO: 37462 - DNA, 20 bp, synthetic construct
  misc_feature 1..20: note = chemically synthesized
  source 1..20: mol_type = other DNA
tgagattaaagtatgggctc

SEQ ID NO: 37463 - DNA, 20 bp, synthetic construct
  misc_feature 1..20: note = chemically synthesized
  source 1..20: mol_type = other DNA
agattaaagtatgggctcag

SEQ ID NO: 37464 - DNA, 20 bp, synthetic construct
  misc_feature 1..20: note = chemically synthesized
  source 1..20: mol_type = other DNA
gattaaagtatgggctcagg

SEQ ID NO: 37465 - DNA, 20 bp, synthetic construct
  misc_feature 1..20: note = chemically synthesized
  source 1..20: mol_type = other DNA
attaaagtatgggctcagga

SEQ ID NO: 37466 - DNA, 20 bp, synthetic construct
  misc_feature 1..20: note = chemically synthesized
  source 1..20: mol_type = other DNA
taaagtatgggctcaggagg

SEQ ID NO: 37467 - DNA, 20 bp, synthetic construct
  misc_feature 1..20: note = chemically synthesized
  source 1..20: mol_type = other DNA
gtatgggctcaggagggagc

SEQ ID NO: 37468 - DNA, 20 bp, synthetic construct
  misc_feature 1..20: note = chemically synthesized
  source 1..20: mol_type = other DNA
tatgggctcaggagggagcg

SEQ ID NO: 37469 - DNA, 20 bp, synthetic construct
  misc_feature 1..20: note = chemically synthesized
  source 1..20: mol_type = other DNA
tgggctcaggagggagcgag

SEQ ID NO: 37470 - DNA, 20 bp, synthetic construct
  misc_feature 1..20: note = chemically synthesized
  source 1..20: mol_type = other DNA
caggagggagcgaggagctt

SEQ ID NO: 37471 - DNA, 20 bp, synthetic construct
  misc_feature 1..20: note = chemically synthesized
  source 1..20: mol_type = other DNA
aggagggagcgaggagcttc

SEQ ID NO: 37472 - DNA, 20 bp, synthetic construct
  misc_feature 1..20: note = chemically synthesized
  source 1..20: mol_type = other DNA
gaggagcttcaggactctca

SEQ ID NO: 37473 - DNA, 20 bp, synthetic construct
  misc_feature 1..20: note = chemically synthesized
  source 1..20: mol_type = other DNA
tcaggactctcacggacctc

SEQ ID NO: 37474 - DNA, 20 bp, synthetic construct
  misc_feature 1..20: note = chemically synthesized
  source 1..20: mol_type = other DNA
actctcacggacctccagca

SEQ ID NO: 37475 - DNA, 20 bp, synthetic construct
  misc_feature 1..20: note = chemically synthesized
  source 1..20: mol_type = other DNA
cacggacctccagcacagtg

SEQ ID NO: 37476 - DNA, 20 bp, synthetic construct
  misc_feature 1..20: note = chemically synthesized
  source 1..20: mol_type = other DNA
agcacagtgtagctgcctta

SEQ ID NO: 37477 - DNA, 20 bp, synthetic construct
  misc_feature 1..20: note = chemically synthesized
  source 1..20: mol_type = other DNA
agtgtagctgccttatggaa

SEQ ID NO: 37478 - DNA, 20 bp, synthetic construct
  misc_feature 1..20: note = chemically synthesized
  source 1..20: mol_type = other DNA
gtagctgccttatggaaaag

SEQ ID NO: 37479 - DNA, 20 bp, synthetic construct
  misc_feature 1..20: note = chemically synthesized
  source 1..20: mol_type = other DNA
ggccacactgttttctgcac

SEQ ID NO: 37480 - DNA, 20 bp, synthetic construct
  misc_feature 1..20: note = chemically synthesized
  source 1..20: mol_type = other DNA
ctgcccctactattcctcac

SEQ ID NO: 37481 - DNA, 20 bp, synthetic construct
  misc_feature 1..20: note = chemically synthesized
  source 1..20: mol_type = other DNA
tgcccctactattcctcact

SEQ ID NO: 37482 - DNA, 20 bp, synthetic construct
  misc_feature 1..20: note = chemically synthesized
  source 1..20: mol_type = other DNA
ccctactattcctcactggg

SEQ ID NO: 37483 - DNA, 20 bp, synthetic construct
  misc_feature 1..20: note = chemically synthesized
  source 1..20: mol_type = other DNA
ctactattcctcactgggca

SEQ ID NO: 37484 - DNA, 20 bp, synthetic construct
  misc_feature 1..20: note = chemically synthesized
  source 1..20: mol_type = other DNA
attcctcactgggcagagca

SEQ ID NO: 37485 - DNA, 20 bp, synthetic construct
  misc_feature 1..20: note = chemically synthesized
  source 1..20: mol_type = other DNA
tgggcagagcacagccaccc

SEQ ID NO: 37486 - DNA, 20 bp, synthetic construct
  misc_feature 1..20: note = chemically synthesized
  source 1..20: mol_type = other DNA
ctggccctgcctgaacattt

SEQ ID NO: 37487 - DNA, 20 bp, synthetic construct
  misc_feature 1..20: note = chemically synthesized
  source 1..20: mol_type = other DNA
ccctgcctgaacattttagt

SEQ ID NO: 37488 - DNA, 20 bp, synthetic construct
  misc_feature 1..20: note = chemically synthesized
  source 1..20: mol_type = other DNA
ctgaacattttagtcagtgt

SEQ ID NO: 37489 - DNA, 20 bp, synthetic construct
  misc_feature 1..20: note = chemically synthesized
  source 1..20: mol_type = other DNA
gtgttggctctgtgcttctc

SEQ ID NO: 37490 - DNA, 20 bp, synthetic construct
  misc_feature 1..20: note = chemically synthesized
  source 1..20: mol_type = other DNA
tgttggctctgtgcttctct

SEQ ID NO: 37491 - DNA, 20 bp, synthetic construct
  misc_feature 1..20: note = chemically synthesized
  source 1..20: mol_type = other DNA
gttggctctgtgcttctctg

SEQ ID NO: 37492 - DNA, 20 bp, synthetic construct
  misc_feature 1..20: note = chemically synthesized
  source 1..20: mol_type = other DNA
tggctctgtgcttctctggg

SEQ ID NO: 37493 - DNA, 20 bp, synthetic construct
  misc_feature 1..20: note = chemically synthesized
  source 1..20: mol_type = other DNA
ggctctgtgcttctctgggg

SEQ ID NO: 37494 - DNA, 20 bp, synthetic construct
  misc_feature 1..20: note = chemically synthesized
  source 1..20: mol_type = other DNA
cttctctggggaggaaatcc

SEQ ID NO: 37495 - DNA, 20 bp, synthetic construct
  misc_feature 1..20: note = chemically synthesized
  source 1..20: mol_type = other DNA
tctctggggaggaaatccaa

SEQ ID NO: 37496 - DNA, 20 bp, synthetic construct
  misc_feature 1..20: note = chemically synthesized
  source 1..20: mol_type = other DNA
gaaatccaagagacaaccca

SEQ ID NO: 37497 - DNA, 20 bp, synthetic construct
  misc_feature 1..20: note = chemically synthesized
  source 1..20: mol_type = other DNA
ccacagcccctctgccattt

SEQ ID NO: 37498 - DNA, 20 bp, synthetic construct
  misc_feature 1..20: note = chemically synthesized
  source 1..20: mol_type = other DNA
cccctctgccatttcagctg

SEQ ID NO: 37499 - DNA, 20 bp, synthetic construct
  misc_feature 1..20: note = chemically synthesized
  source 1..20: mol_type = other DNA
ctctgccatttcagctgcag

SEQ ID NO: 37500 - DNA, 20 bp, synthetic construct
  misc_feature 1..20: note = chemically synthesized
  source 1..20: mol_type = other DNA
agtaccaccgttaatgccct

SEQ ID NO: 37501 - DNA, 20 bp, synthetic construct
  misc_feature 1..20: note = chemically synthesized
  source 1..20: mol_type = other DNA
gtaccaccgttaatgccctt

SEQ ID NO: 37502 - DNA, 20 bp, synthetic construct
  misc_feature 1..20: note = chemically synthesized
  source 1..20: mol_type = other DNA
ccgttaatgcccttgggctt

SEQ ID NO: 37503 - DNA, 20 bp, synthetic construct
  misc_feature 1..20: note = chemically synthesized
  source 1..20: mol_type = other DNA
taatgcccttgggcttgaga

SEQ ID NO: 37504 - DNA, 20 bp, synthetic construct
  misc_feature 1..20: note = chemically synthesized
  source 1..20: mol_type = other DNA
tgcccttgggcttgagaaag

SEQ ID NO: 37505 - DNA, 20 bp, synthetic construct
  misc_feature 1..20: note = chemically synthesized
  source 1..20: mol_type = other DNA
gcccttgggcttgagaaaga

SEQ ID NO: 37506 - DNA, 20 bp, synthetic construct
  misc_feature 1..20: note = chemically synthesized
  source 1..20: mol_type = other DNA
cccttgggcttgagaaagaa

SEQ ID NO: 37507 - DNA, 20 bp, synthetic construct
  misc_feature 1..20: note = chemically synthesized
  source 1..20: mol_type = other DNA
ggcttgagaaagaagggacc

SEQ ID NO: 37508 - DNA, 20 bp, synthetic construct
  misc_feature 1..20: note = chemically synthesized
  source 1..20: mol_type = other DNA
ggccacttccctgacacctc

SEQ ID NO: 37509 - DNA, 20 bp, synthetic construct
  misc_feature 1..20: note = chemically synthesized
  source 1..20: mol_type = other DNA
tccctgacacctccagcaca

SEQ ID NO: 37510 - DNA, 20 bp, synthetic construct
  misc_feature 1..20: note = chemically synthesized
  source 1..20: mol_type = other DNA
ctgacacctccagcacacag

SEQ ID NO: 37511 - DNA, 20 bp, synthetic construct
  misc_feature 1..20: note = chemically synthesized
  source 1..20: mol_type = other DNA
tgacacctccagcacacagc

SEQ ID NO: 37512 - DNA, 20 bp, synthetic construct
  misc_feature 1..20: note = chemically synthesized
  source 1..20: mol_type = other DNA
gacacctccagcacacagca

SEQ ID NO: 37513 - DNA, 20 bp, synthetic construct
  misc_feature 1..20: note = chemically synthesized
  source 1..20: mol_type = other DNA
cctccagcacacagcaggga

SEQ ID NO: 37514 - DNA, 20 bp, synthetic construct
  misc_feature 1..20: note = chemically synthesized
  source 1..20: mol_type = other DNA
acacagcagggaaagaattc

SEQ ID NO: 37515 - DNA, 20 bp, synthetic construct
  misc_feature 1..20: note = chemically synthesized
  source 1..20: mol_type = other DNA
ttccagtttctctttcttgt

SEQ ID NO: 37516 - DNA, 20 bp, synthetic construct
  misc_feature 1..20: note = chemically synthesized
  source 1..20: mol_type = other DNA
tttcacctgctactcttcac

SEQ ID NO: 37517 - DNA, 20 bp, synthetic construct
  misc_feature 1..20: note = chemically synthesized
  source 1..20: mol_type = other DNA
ttcacctgctactcttcacc

SEQ ID NO: 37518 - DNA, 20 bp, synthetic construct
  misc_feature 1..20: note = chemically synthesized
  source 1..20: mol_type = other DNA
cctgctactcttcaccaggc

SEQ ID NO: 37519 - DNA, 20 bp, synthetic construct
  misc_feature 1..20: note = chemically synthesized
  source 1..20: mol_type = other DNA
ctgctactcttcaccaggca

SEQ ID NO: 37520 - DNA, 20 bp, synthetic construct
  misc_feature 1..20: note = chemically synthesized
  source 1..20: mol_type = other DNA
tcttcaccaggcaaggctcc

SEQ ID NO: 37521 - DNA, 20 bp, synthetic construct
  misc_feature 1..20: note = chemically synthesized
  source 1..20: mol_type = other DNA
accaggcaaggctcctggct

SEQ ID NO: 37522 - DNA, 20 bp, synthetic construct
  misc_feature 1..20: note = chemically synthesized
  source 1..20: mol_type = other DNA
ccaggcaaggctcctggctt

SEQ ID NO: 37523 - DNA, 20 bp, synthetic construct
  misc_feature 1..20: note = chemically synthesized
  source 1..20: mol_type = other DNA
aggctcctggcttgggccca

SEQ ID NO: 37524 - DNA, 20 bp, synthetic construct
  misc_feature 1..20: note = chemically synthesized
  source 1..20: mol_type = other DNA
cctggcttgggcccacagtg

SEQ ID NO: 37525 - DNA, 20 bp, synthetic construct
  misc_feature 1..20: note = chemically synthesized
  source 1..20: mol_type = other DNA
ctggcttgggcccacagtgc

SEQ ID NO: 37526 - DNA, 20 bp, synthetic construct
  misc_feature 1..20: note = chemically synthesized
  source 1..20: mol_type = other DNA
cagtgcaggcacctcgaact

SEQ ID NO: 37527 - DNA, 20 bp, synthetic construct
  misc_feature 1..20: note = chemically synthesized
  source 1..20: mol_type = other DNA
actcagttgaacatttccac

SEQ ID NO: 37528 - DNA, 20 bp, synthetic construct
  misc_feature 1..20: note = chemically synthesized
  source 1..20: mol_type = other DNA
ggctgcactctgtgtttttg

SEQ ID NO: 37529 - DNA, 20 bp, synthetic construct
  misc_feature 1..20: note = chemically synthesized
  source 1..20: mol_type = other DNA
gctgcactctgtgtttttgt

SEQ ID NO: 37530 - DNA, 20 bp, synthetic construct
  misc_feature 1..20: note = chemically synthesized
  source 1..20: mol_type = other DNA
ctgcactctgtgtttttgtg

SEQ ID NO: 37531 - DNA, 20 bp, synthetic construct
  misc_feature 1..20: note = chemically synthesized
  source 1..20: mol_type = other DNA
ctctgtgtttttgtggggtg

SEQ ID NO: 37532 - DNA, 20 bp, synthetic construct
  misc_feature 1..20: note = chemically synthesized
  source 1..20: mol_type = other DNA
tttttgtggggtgaagctcc

SEQ ID NO: 37533 - DNA, 20 bp, synthetic construct
  misc_feature 1..20: note = chemically synthesized
  source 1..20: mol_type = other DNA
tttgtggggtgaagctccca

SEQ ID NO: 37534 - DNA, 20 bp, synthetic construct
  misc_feature 1..20: note = chemically synthesized
  source 1..20: mol_type = other DNA
ttgtggggtgaagctcccag

SEQ ID NO: 37535 - DNA, 20 bp, synthetic construct
  misc_feature 1..20: note = chemically synthesized
  source 1..20: mol_type = other DNA
aagctcccagaggtgactga

SEQ ID NO: 37536 - DNA, 20 bp, synthetic construct
  misc_feature 1..20: note = chemically synthesized
  source 1..20: mol_type = other DNA
tccttctgccactaacactg

SEQ ID NO: 37537 - DNA, 20 bp, synthetic construct
  misc_feature 1..20: note = chemically synthesized
  source 1..20: mol_type = other DNA
catactgcccttgctgtact

SEQ ID NO: 37538 - DNA, 20 bp, synthetic construct
  misc_feature 1..20: note = chemically synthesized
  source 1..20: mol_type = other DNA
tgcccttgctgtacttggac

SEQ ID NO: 37539 - DNA, 20 bp, synthetic construct
  misc_feature 1..20: note = chemically synthesized
  source 1..20: mol_type = other DNA
gcccttgctgtacttggact

SEQ ID NO: 37540 - DNA, 20 bp, synthetic construct
  misc_feature 1..20: note = chemically synthesized
  source 1..20: mol_type = other DNA
cccttgctgtacttggacta

SEQ ID NO: 37541 - DNA, 20 bp, synthetic construct
  misc_feature 1..20: note = chemically synthesized
  source 1..20: mol_type = other DNA
ttgctgtacttggactaggg

SEQ ID NO: 37542 - DNA, 20 bp, synthetic construct
  misc_feature 1..20: note = chemically synthesized
  source 1..20: mol_type = other DNA
tgctgtacttggactaggga

SEQ ID NO: 37543 - DNA, 20 bp, synthetic construct
  misc_feature 1..20: note = chemically synthesized
  source 1..20: mol_type = other DNA
cttggactagggaaggaaaa

SEQ ID NO: 37544 - DNA, 20 bp, synthetic construct
  misc_feature 1..20: note = chemically synthesized
  source 1..20: mol_type = other DNA
agggaaggaaaaaagatcct

SEQ ID NO: 37545 - DNA, 20 bp, synthetic construct
  misc_feature 1..20: note = chemically synthesized
  source 1..20: mol_type = other DNA
tgagtgctttactcacaccc

SEQ ID NO: 37546 - DNA, 20 bp, synthetic construct
  misc_feature 1..20: note = chemically synthesized
  source 1..20: mol_type = other DNA
actcacaccccagtgtgccc

SEQ ID NO: 37547 - DNA, 20 bp, synthetic construct
  misc_feature 1..20: note = chemically synthesized
  source 1..20: mol_type = other DNA
agtgtgccccagccacccta

SEQ ID NO: 37548 - DNA, 20 bp, synthetic construct
  misc_feature 1..20: note = chemically synthesized
  source 1..20: mol_type = other DNA
gccccagccaccctatggaa

SEQ ID NO: 37549 - DNA, 20 bp, synthetic construct
  misc_feature 1..20: note = chemically synthesized
  source 1..20: mol_type = other DNA
cccagccaccctatggaaaa

SEQ ID NO: 37550 - DNA, 20 bp, synthetic construct
  misc_feature 1..20: note = chemically synthesized
  source 1..20: mol_type = other DNA
ccagccaccctatggaaaag

SEQ ID NO: 37551 - DNA, 20 bp, synthetic construct
  misc_feature 1..20: note = chemically synthesized
  source 1..20: mol_type = other DNA
ccaccctatggaaaagaggc

SEQ ID NO: 37552 - DNA, 20 bp, synthetic construct
  misc_feature 1..20: note = chemically synthesized
  source 1..20: mol_type = other DNA
ggccagtgtgtcatccctgc

SEQ ID NO: 37553 - DNA, 20 bp, synthetic construct
  misc_feature 1..20: note = chemically synthesized
  source 1..20: mol_type = other DNA
gtcatccctgcaagcaccct

SEQ ID NO: 37554 - DNA, 20 bp, synthetic construct
  misc_feature 1..20: note = chemically synthesized
  source 1..20: mol_type = other DNA
tcatccctgcaagcaccctg

SEQ ID NO: 37555 - DNA, 20 bp, synthetic construct
  misc_feature 1..20: note = chemically synthesized
  source 1..20: mol_type = other DNA
cccctgcccctgctgccccc

SEQ ID NO: 37556 - DNA, 20 bp, synthetic construct
  misc_feature 1..20: note = chemically synthesized
  source 1..20: mol_type = other DNA
cccctgctgcccccaagctg

SEQ ID NO: 37557 - DNA, 20 bp, synthetic construct
  misc_feature 1..20: note = chemically synthesized
  source 1..20: mol_type = other DNA
cctgctgcccccaagctgta

SEQ ID NO: 37558 - DNA, 20 bp, synthetic construct
  misc_feature 1..20: note = chemically synthesized
  source 1..20: mol_type = other DNA
ctgcccccaagctgtagagc

SEQ ID NO: 37559 - DNA, 20 bp, synthetic construct
  misc_feature 1..20: note = chemically synthesized
  source 1..20: mol_type = other DNA
agctgtagagccagaatata

SEQ ID NO: 37560 - DNA, 20 bp, synthetic construct
  misc_feature 1..20: note = chemically synthesized
  source 1..20: mol_type = other DNA
gtagagccagaatataaagc

SEQ ID NO: 37561 - DNA, 20 bp, synthetic construct
  misc_feature 1..20: note = chemically synthesized
  source 1..20: mol_type = other DNA
gagccagaatataaagctgg

SEQ ID NO: 37562 - DNA, 20 bp, synthetic construct
  misc_feature 1..20: note = chemically synthesized
  source 1..20: mol_type = other DNA
agctggcagaaaaatgtaaa

SEQ ID NO: 37563 - DNA, 20 bp, synthetic construct
  misc_feature 1..20: note = chemically synthesized
  source 1..20: mol_type = other DNA
gctggcagaaaaatgtaaaa

SEQ ID NO: 37564 - DNA, 20 bp, synthetic construct
  misc_feature 1..20: note = chemically synthesized
  source 1..20: mol_type = other DNA
gcagaaaaatgtaaaaaggc

SEQ ID NO: 37565 - DNA, 20 bp, synthetic construct
  misc_feature 1..20: note = chemically synthesized
  source 1..20: mol_type = other DNA
aaaatgtaaaaaggctagac

SEQ ID NO: 37566 - DNA, 20 bp, synthetic construct
  misc_feature 1..20: note = chemically synthesized
  source 1..20: mol_type = other DNA
gtaaaaaggctagactggct

SEQ ID NO: 37567 - DNA, 20 bp, synthetic construct
  misc_feature 1..20: note = chemically synthesized
  source 1..20: mol_type = other DNA
gctagactggcttagcctcc

SEQ ID NO: 37568 - DNA, 20 bp, synthetic construct
  misc_feature 1..20: note = chemically synthesized
  source 1..20: mol_type = other DNA
cctacatctttctcctgtgc

SEQ ID NO: 37569 - DNA, 20 bp, synthetic construct
  misc_feature 1..20: note = chemically synthesized
  source 1..20: mol_type = other DNA
tccttcctgctcttgaacat

SEQ ID NO: 37570 - DNA, 20 bp, synthetic construct
  misc_feature 1..20: note = chemically synthesized
  source 1..20: mol_type = other DNA
gctcttgaacatcggactcc

SEQ ID NO: 37571 - DNA, 20 bp, synthetic construct
  misc_feature 1..20: note = chemically synthesized
  source 1..20: mol_type = other DNA
acatcggactccaagttctt

SEQ ID NO: 37572 - DNA, 20 bp, synthetic construct
  misc_feature 1..20: note = chemically synthesized
  source 1..20: mol_type = other DNA
gactccaagttcttcagctg

SEQ ID NO: 37573 - DNA, 20 bp, synthetic construct
  misc_feature 1..20: note = chemically synthesized
  source 1..20: mol_type = other DNA
actccaagttcttcagctgt

SEQ ID NO: 37574 - DNA, 20 bp, synthetic construct
  misc_feature 1..20: note = chemically synthesized
  source 1..20: mol_type = other DNA
agttcttcagctgtgggact

SEQ ID NO: 37575 - DNA, 20 bp, synthetic construct
  misc_feature 1..20: note = chemically synthesized
  source 1..20: mol_type = other DNA
ggactgtcttccttgctcct

SEQ ID NO: 37576 - DNA, 20 bp, synthetic construct
  misc_feature 1..20: note = chemically synthesized
  source 1..20: mol_type = other DNA
cttccttgctcctcagattg

SEQ ID NO: 37577 - DNA, 20 bp, synthetic construct
  misc_feature 1..20: note = chemically synthesized
  source 1..20: mol_type = other DNA
ttccttgctcctcagattgc

SEQ ID NO: 37578 - DNA, 20 bp, synthetic construct
  misc_feature 1..20: note = chemically synthesized
  source 1..20: mol_type = other DNA
cttgctcctcagattgcagg

SEQ ID NO: 37579 - DNA, 20 bp, synthetic construct
  misc_feature 1..20: note = chemically synthesized
  source 1..20: mol_type = other DNA
agattgcaggtggcctatta

SEQ ID NO: 37580 - DNA, 20 bp, synthetic construct
  misc_feature 1..20: note = chemically synthesized
  source 1..20: mol_type = other DNA
gattgcaggtggcctattat

SEQ ID NO: 37581 - DNA, 20 bp, synthetic construct
  misc_feature 1..20: note = chemically synthesized
  source 1..20: mol_type = other DNA
atgggaccttgtaatcttgt

SEQ ID NO: 37582 - DNA, 20 bp, synthetic construct
  misc_feature 1..20: note = chemically synthesized
  source 1..20: mol_type = other DNA
gtgagttaataccacttaat

SEQ ID NO: 37583 - DNA, 20 bp, synthetic construct
  misc_feature 1..20: note = chemically synthesized
  source 1..20: mol_type = other DNA
taataagctcccctttgtgt

SEQ ID NO: 37584 - DNA, 20 bp, synthetic construct
  misc_feature 1..20: note = chemically synthesized
  source 1..20: mol_type = other DNA
tgtgagtatatctatatcta

SEQ ID NO: 37585 - DNA, 20 bp, synthetic construct
  misc_feature 1..20: note = chemically synthesized
  source 1..20: mol_type = other DNA
agtatatctatatctataga

SEQ ID NO: 37586 - DNA, 20 bp, synthetic construct
  misc_feature 1..20: note = chemically synthesized
  source 1..20: mol_type = other DNA
tctatatctatagatagata

SEQ ID NO: 37587 - DNA, 20 bp, synthetic construct
  misc_feature 1..20: note = chemically synthesized
  source 1..20: mol_type = other DNA
ctatatctatagatagatat

SEQ ID NO: 37588 - DNA, 20 bp, synthetic construct
  misc_feature 1..20: note = chemically synthesized
  source 1..20: mol_type = other DNA
atatatatataatctcctat

SEQ ID NO: 37589 - DNA, 20 bp, synthetic construct
  misc_feature 1..20: note = chemically synthesized
  source 1..20: mol_type = other DNA
tcctattagttctgtccctc

SEQ ID NO: 37590 - DNA, 20 bp, synthetic construct
  misc_feature 1..20: note = chemically synthesized
  source 1..20: mol_type = other DNA
ctattagttctgtccctcta

SEQ ID NO: 37591 - DNA, 20 bp, synthetic construct
  misc_feature 1..20: note = chemically synthesized
  source 1..20: mol_type = other DNA
ctagagaaccccgactaata

SEQ ID NO: 37592 - DNA, 20 bp, synthetic construct
  misc_feature 1..20: note = chemically synthesized
  source 1..20: mol_type = other DNA
actaatacagattttcatac

SEQ ID NO: 37593 - DNA, 20 bp, synthetic construct
  misc_feature 1..20: note = chemically synthesized
  source 1..20: mol_type = other DNA
aatacagattttcataccag

SEQ ID NO: 37594 - DNA, 20 bp, synthetic construct
  misc_feature 1..20: note = chemically synthesized
  source 1..20: mol_type = other DNA
acagattttcataccagaag

SEQ ID NO: 37595 - DNA, 20 bp, synthetic construct
  misc_feature 1..20: note = chemically synthesized
  source 1..20: mol_type = other DNA
tcataccagaagtggttctt

SEQ ID NO: 37596 - DNA, 20 bp, synthetic construct
  misc_feature 1..20: note = chemically synthesized
  source 1..20: mol_type = other DNA
cataccagaagtggttcttg

SEQ ID NO: 37597 - DNA, 20 bp, synthetic construct
  misc_feature 1..20: note = chemically synthesized
  source 1..20: mol_type = other DNA
cagaagtggttcttgaggaa

SEQ ID NO: 37598 - DNA, 20 bp, synthetic construct
  misc_feature 1..20: note = chemically synthesized
  source 1..20: mol_type = other DNA
ttcttgaggaacagaatatt

SEQ ID NO: 37599 - DNA, 20 bp, synthetic construct
  misc_feature 1..20: note = chemically synthesized
  source 1..20: mol_type = other DNA
tcttgaggaacagaatatta

SEQ ID NO: 37600 - DNA, 20 bp, synthetic construct
  misc_feature 1..20: note = chemically synthesized
  source 1..20: mol_type = other DNA
gaggaacagaatattaagga

SEQ ID NO: 37601 - DNA, 20 bp, synthetic construct
  misc_feature 1..20: note = chemically synthesized
  source 1..20: mol_type = other DNA
taaggatggaattctttcat

SEQ ID NO: 37602 - DNA, 20 bp, synthetic construct
  misc_feature 1..20: note = chemically synthesized
  source 1..20: mol_type = other DNA
tggaattctttcattggttt

SEQ ID NO: 37603 - DNA, 20 bp, synthetic construct
  misc_feature 1..20: note = chemically synthesized
  source 1..20: mol_type = other DNA
ggaattctttcattggtttt

SEQ ID NO: 37604 - DNA, 20 bp, synthetic construct
  misc_feature 1..20: note = chemically synthesized
  source 1..20: mol_type = other DNA
ttcattggttttgggacttc

SEQ ID NO: 37605 - DNA, 20 bp, synthetic construct
  misc_feature 1..20: note = chemically synthesized
  source 1..20: mol_type = other DNA
ggttttgggacttctggtgt

SEQ ID NO: 37606 - DNA, 20 bp, synthetic construct
  misc_feature 1..20: note = chemically synthesized
  source 1..20: mol_type = other DNA
tgttggctgattaatatgat

SEQ ID NO: 37607 - DNA, 20 bp, synthetic construct
  misc_feature 1..20: note = chemically synthesized
  source 1..20: mol_type = other DNA
tgattagaccaaaaaatgct

SEQ ID NO: 37608 - DNA, 20 bp, synthetic construct
  misc_feature 1..20: note = chemically synthesized
  source 1..20: mol_type = other DNA
gattagaccaaaaaatgcta

SEQ ID NO: 37609 - DNA, 20 bp, synthetic construct
  misc_feature 1..20: note = chemically synthesized
  source 1..20: mol_type = other DNA
gctaaggactctacttctaa

SEQ ID NO: 37610 - DNA, 20 bp, synthetic construct
  misc_feature 1..20: note = chemically synthesized
  source 1..20: mol_type = other DNA
ggactctacttctaatagta

SEQ ID NO: 37611 - DNA, 20 bp, synthetic construct
  misc_feature 1..20: note = chemically synthesized
  source 1..20: mol_type = other DNA
actctacttctaatagtatg

SEQ ID NO: 37612 - DNA, 20 bp, synthetic construct
  misc_feature 1..20: note = chemically synthesized
  source 1..20: mol_type = other DNA
aatagtatggagaacactga

SEQ ID NO: 37613 - DNA, 20 bp, synthetic construct
  misc_feature 1..20: note = chemically synthesized
  source 1..20: mol_type = other DNA
tggagaacactgatagtact

SEQ ID NO: 37614 - DNA, 20 bp, synthetic construct
  misc_feature 1..20: note = chemically synthesized
  source 1..20: mol_type = other DNA
agtacttggcctgaattgtt

SEQ ID NO: 37615 - DNA, 20 bp, synthetic construct
  misc_feature 1..20: note = chemically synthesized
  source 1..20: mol_type = other DNA
tacttggcctgaattgttta

SEQ ID NO: 37616 - DNA, 20 bp, synthetic construct
  misc_feature 1..20: note = chemically synthesized
  source 1..20: mol_type = other DNA
cttggcctgaattgtttaga

SEQ ID NO: 37617 - DNA, 20 bp, synthetic construct
  misc_feature 1..20: note = chemically synthesized
  source 1..20: mol_type = other DNA
actactgattcatcacttat

SEQ ID NO: 37618 - DNA, 20 bp, synthetic construct
  misc_feature 1..20: note = chemically synthesized
  source 1..20: mol_type = other DNA
tactgattcatcacttatga

SEQ ID NO: 37619 - DNA, 20 bp, synthetic construct
  misc_feature 1..20: note = chemically synthesized
  source 1..20: mol_type = other DNA
actgattcatcacttatgag

SEQ ID NO: 37620 - DNA, 20 bp, synthetic construct
  misc_feature 1..20: note = chemically synthesized
  source 1..20: mol_type = other DNA
attcatcacttatgagaggc

SEQ ID NO: 37621 - DNA, 20 bp, synthetic construct
  misc_feature 1..20: note = chemically synthesized
  source 1..20: mol_type = other DNA
ttcatcacttatgagaggca

SEQ ID NO: 37622 - DNA, 20 bp, synthetic construct
  misc_feature 1..20: note = chemically synthesized
  source 1..20: mol_type = other DNA
catcacttatgagaggcaag

SEQ ID NO: 37623 - DNA, 20 bp, synthetic construct
  misc_feature 1..20: note = chemically synthesized
  source 1..20: mol_type = other DNA
cttatgagaggcaaggagtt

SEQ ID NO: 37624 - DNA, 20 bp, synthetic construct
  misc_feature 1..20: note = chemically synthesized
  source 1..20: mol_type = other DNA
ataatacctttgactatatg

SEQ ID NO: 37625 - DNA, 20 bp, synthetic construct
  misc_feature 1..20: note = chemically synthesized
  source 1..20: mol_type = other DNA
aatacctttgactatatgtg

SEQ ID NO: 37626 - DNA, 20 bp, synthetic construct
  misc_feature 1..20: note = chemically synthesized
  source 1..20: mol_type = other DNA
ttgactatatgtggagaacc

SEQ ID NO: 37627 - DNA, 20 bp, synthetic construct
  misc_feature 1..20: note = chemically synthesized
  source 1..20: mol_type = other DNA
tgactatatgtggagaacca

SEQ ID NO: 37628 - DNA, 20 bp, synthetic construct
  misc_feature 1..20: note = chemically synthesized
  source 1..20: mol_type = other DNA
gagaaccaaggaacataatg

SEQ ID NO: 37629 - DNA, 20 bp, synthetic construct
  misc_feature 1..20: note = chemically synthesized
  source 1..20: mol_type = other DNA
accaaggaacataatgaagt

SEQ ID NO: 37630 - DNA, 20 bp, synthetic construct
  misc_feature 1..20: note = chemically synthesized
  source 1..20: mol_type = other DNA
gaagttggttgattgctcct

SEQ ID NO: 37631 - DNA, 20 bp, synthetic construct
  misc_feature 1..20: note = chemically synthesized
  source 1..20: mol_type = other DNA
ttgattgctcctaagttctc

SEQ ID NO: 37632 - DNA, 20 bp, synthetic construct
  misc_feature 1..20: note = chemically synthesized
  source 1..20: mol_type = other DNA
gattgctcctaagttctctg

SEQ ID NO: 37633 - DNA, 20 bp, synthetic construct
  misc_feature 1..20: note = chemically synthesized
  source 1..20: mol_type = other DNA
gctcctaagttctctggaga

SEQ ID NO: 37634 - DNA, 20 bp, synthetic construct
  misc_feature 1..20: note = chemically synthesized
  source 1..20: mol_type = other DNA
tcctaagttctctggagaaa

SEQ ID NO: 37635 - DNA, 20 bp, synthetic construct
  misc_feature 1..20: note = chemically synthesized
  source 1..20: mol_type = other DNA
ttctctggagaaagagatga

SEQ ID NO: 37636 - DNA, 20 bp, synthetic construct
  misc_feature 1..20: note = chemically synthesized
  source 1..20: mol_type = other DNA
atgaaagaaaatgatgatct

SEQ ID NO: 37637 - DNA, 20 bp, synthetic construct
  misc_feature 1..20: note = chemically synthesized
  source 1..20: mol_type = other DNA
tgaaagaaaatgatgatctc

SEQ ID NO: 37638 - DNA, 20 bp, synthetic construct
  misc_feature 1..20: note = chemically synthesized
  source 1..20: mol_type = other DNA
gaaagaaaatgatgatctca

SEQ ID NO: 37639 - DNA, 20 bp, synthetic construct
  misc_feature 1..20: note = chemically synthesized
  source 1..20: mol_type = other DNA
aaagaaaatgatgatctcag

SEQ ID NO: 37640 - DNA, 20 bp, synthetic construct
  misc_feature 1..20: note = chemically synthesized
  source 1..20: mol_type = other DNA
ggggatctgtctcccacctt

SEQ ID NO: 37641 - DNA, 20 bp, synthetic construct
  misc_feature 1..20: note = chemically synthesized
  source 1..20: mol_type = other DNA
gatctgtctcccaccttcag

SEQ ID NO: 37642 - DNA, 20 bp, synthetic construct
  misc_feature 1..20: note = chemically synthesized
  source 1..20: mol_type = other DNA
ctgtctcccaccttcagaag

SEQ ID NO: 37643 - DNA, 20 bp, synthetic construct
  misc_feature 1..20: note = chemically synthesized
  source 1..20: mol_type = other DNA
caccttcagaagcagatact

SEQ ID NO: 37644 - DNA, 20 bp, synthetic construct
  misc_feature 1..20: note = chemically synthesized
  source 1..20: mol_type = other DNA
tactgagccacaaatctgct

SEQ ID NO: 37645 - DNA, 20 bp, synthetic construct
  misc_feature 1..20: note = chemically synthesized
  source 1..20: mol_type = other DNA
ctgctaagattgccctgaat

SEQ ID NO: 37646 - DNA, 20 bp, synthetic construct
  misc_feature 1..20: note = chemically synthesized
  source 1..20: mol_type = other DNA
gctaagattgccctgaatga

SEQ ID NO: 37647 - DNA, 20 bp, synthetic construct
  misc_feature 1..20: note = chemically synthesized
  source 1..20: mol_type = other DNA
aatgagagttttaactcctg

SEQ ID NO: 37648 - DNA, 20 bp, synthetic construct
  misc_feature 1..20: note = chemically synthesized
  source 1..20: mol_type = other DNA
tgagagttttaactcctgta

SEQ ID NO: 37649 - DNA, 20 bp, synthetic construct
  misc_feature 1..20: note = chemically synthesized
  source 1..20: mol_type = other DNA
agttttaactcctgtagaga

SEQ ID NO: 37650 - DNA, 20 bp, synthetic construct
  misc_feature 1..20: note = chemically synthesized
  source 1..20: mol_type = other DNA
ttttaactcctgtagagaaa

SEQ ID NO: 37651 - DNA, 20 bp, synthetic construct
  misc_feature 1..20: note = chemically synthesized
  source 1..20: mol_type = other DNA
gagttgaaattgtgaaaaaa

SEQ ID NO: 37652 - DNA, 20 bp, synthetic construct
  misc_feature 1..20: note = chemically synthesized
  source 1..20: mol_type = other DNA
gttgaaattgtgaaaaaaca

SEQ ID NO: 37653 - DNA, 20 bp, synthetic construct
  misc_feature 1..20: note = chemically synthesized
  source 1..20: mol_type = other DNA
aattgtgaaaaaacagagac

SEQ ID NO: 37654 - DNA, 20 bp, synthetic construct
  misc_feature 1..20: note = chemically synthesized
  source 1..20: mol_type = other DNA
gagacaagctgttatcatgc

SEQ ID NO: 37655 - DNA, 20 bp, synthetic construct
  misc_feature 1..20: note = chemically synthesized
  source 1..20: mol_type = other DNA
acaagctgttatcatgcgag

SEQ ID NO: 37656 - DNA, 20 bp, synthetic construct
  misc_feature 1..20: note = chemically synthesized
  source 1..20: mol_type = other DNA
gcgagtagctgatctgcaac

SEQ ID NO: 37657 - DNA, 20 bp, synthetic construct
  misc_feature 1..20: note = chemically synthesized
  source 1..20: mol_type = other DNA
gagtagctgatctgcaacaa

SEQ ID NO: 37658 - DNA, 20 bp, synthetic construct
  misc_feature 1..20: note = chemically synthesized
  source 1..20: mol_type = other DNA
agtagctgatctgcaacaag

SEQ ID NO: 37659 - DNA, 20 bp, synthetic construct
  misc_feature 1..20: note = chemically synthesized
  source 1..20: mol_type = other DNA
tgcaacaagaggtgcatgca

SEQ ID NO: 37660 - DNA, 20 bp, synthetic construct
  misc_feature 1..20: note = chemically synthesized
  source 1..20: mol_type = other DNA
aggtgcatgcacagccttgc

SEQ ID NO: 37661 - DNA, 20 bp, synthetic construct
  misc_feature 1..20: note = chemically synthesized
  source 1..20: mol_type = other DNA
ggtgcatgcacagccttgcc

SEQ ID NO: 37662 - DNA, 20 bp, synthetic construct
  misc_feature 1..20: note = chemically synthesized
  source 1..20: mol_type = other DNA
ttgccaggtgtttactgtta

SEQ ID NO: 37663 - DNA, 20 bp, synthetic construct
  misc_feature 1..20: note = chemically synthesized
  source 1..20: mol_type = other DNA
caggtgtttactgttaaagt

SEQ ID NO: 37664 - DNA, 20 bp, synthetic construct
  misc_feature 1..20: note = chemically synthesized
  source 1..20: mol_type = other DNA
aggtgtttactgttaaagtg

SEQ ID NO: 37665 - DNA, 20 bp, synthetic construct
  misc_feature 1..20: note = chemically synthesized
  source 1..20: mol_type = other DNA
ggtgtttactgttaaagtga

SEQ ID NO: 37666 - DNA, 20 bp, synthetic construct
  misc_feature 1..20: note = chemically synthesized
  source 1..20: mol_type = other DNA
gttaaagtgagggcattgac

SEQ ID NO: 37667 - DNA, 20 bp, synthetic construct
  misc_feature 1..20: note = chemically synthesized
  source 1..20: mol_type = other DNA
gggcattgactggaaaaaaa

SEQ ID NO: 37668 - DNA, 20 bp, synthetic construct
  misc_feature 1..20: note = chemically synthesized
  source 1..20: mol_type = other DNA
ggcattgactggaaaaaaat

SEQ ID NO: 37669 - DNA, 20 bp, synthetic construct
  misc_feature 1..20: note = chemically synthesized
  source 1..20: mol_type = other DNA
actggaaaaaaatgggaccc

SEQ ID NO: 37670 - DNA, 20 bp, synthetic construct
  misc_feature 1..20: note = chemically synthesized
  source 1..20: mol_type = other DNA
aaaaatgggaccctggaact

SEQ ID NO: 37671 - DNA, 20 bp, synthetic construct
  misc_feature 1..20: note = chemically synthesized
  source 1..20: mol_type = other DNA
aaatgggaccctggaacttg

SEQ ID NO: 37672 - DNA, 20 bp, synthetic construct
  misc_feature 1..20: note = chemically synthesized
  source 1..20: mol_type = other DNA
tgggaccctggaacttggag

SEQ ID NO: 37673 - DNA, 20 bp, synthetic construct
  misc_feature 1..20: note = chemically synthesized
  source 1..20: mol_type = other DNA
gggaccctggaacttggagt

SEQ ID NO: 37674 - DNA, 20 bp, synthetic construct
  misc_feature 1..20: note = chemically synthesized
  source 1..20: mol_type = other DNA
ggaccctggaacttggagtg

SEQ ID NO: 37675 - DNA, 20 bp, synthetic construct
  misc_feature 1..20: note = chemically synthesized
  source 1..20: mol_type = other DNA
gaacttggagtggggatgtg

SEQ ID NO: 37676 - DNA, 20 bp, synthetic construct
  misc_feature 1..20: note = chemically synthesized
  source 1..20: mol_type = other DNA
aacttggagtggggatgtgt

SEQ ID NO: 37677 - DNA, 20 bp, synthetic construct
  misc_feature 1..20: note = chemically synthesized
  source 1..20: mol_type = other DNA
cttggagtggggatgtgtgg

SEQ ID NO: 37678 - DNA, 20 bp, synthetic construct
  misc_feature 1..20: note = chemically synthesized
  source 1..20: mol_type = other DNA
tgtgtgggagaaccctgatg

SEQ ID NO: 37679 - DNA, 20 bp, synthetic construct
  misc_feature 1..20: note = chemically synthesized
  source 1..20: mol_type = other DNA
gggagaaccctgatgaagct

SEQ ID NO: 37680 - DNA, 20 bp, synthetic construct
  misc_feature 1..20: note = chemically synthesized
  source 1..20: mol_type = other DNA
ggagaaccctgatgaagctg

SEQ ID NO: 37681 - DNA, 20 bp, synthetic construct
  misc_feature 1..20: note = chemically synthesized
  source 1..20: mol_type = other DNA
ctgatgaagctgaggacact

SEQ ID NO: 37682 - DNA, 20 bp, synthetic construct
  misc_feature 1..20: note = chemically synthesized
  source 1..20: mol_type = other DNA
ctctgatgaaacttttttgc

SEQ ID NO: 37683 - DNA, 20 bp, synthetic construct
  misc_feature 1..20: note = chemically synthesized
  source 1..20: mol_type = other DNA
tgatgaaacttttttgccag

SEQ ID NO: 37684 - DNA, 20 bp, synthetic construct
  misc_feature 1..20: note = chemically synthesized
  source 1..20: mol_type = other DNA
aacttttttgccagaagaaa

SEQ ID NO: 37685 - DNA, 20 bp, synthetic construct
  misc_feature 1..20: note = chemically synthesized
  source 1..20: mol_type = other DNA
agaaacagtttccccatccc

SEQ ID NO: 37686 - DNA, 20 bp, synthetic construct
  misc_feature 1..20: note = chemically synthesized
  source 1..20: mol_type = other DNA
aacagtttccccatccccag

SEQ ID NO: 37687 - DNA, 20 bp, synthetic construct
  misc_feature 1..20: note = chemically synthesized
  source 1..20: mol_type = other DNA
agtttccccatccccagtag

SEQ ID NO: 37688 - DNA, 20 bp, synthetic construct
  misc_feature 1..20: note = chemically synthesized
  source 1..20: mol_type = other DNA
tccctgacccgtgctgccat

SEQ ID NO: 37689 - DNA, 20 bp, synthetic construct
  misc_feature 1..20: note = chemically synthesized
  source 1..20: mol_type = other DNA
tagcctttccacctttgtct

SEQ ID NO: 37690 - DNA, 20 bp, synthetic construct
  misc_feature 1..20: note = chemically synthesized
  source 1..20: mol_type = other DNA
agcctttccacctttgtctg

SEQ ID NO: 37691 - DNA, 20 bp, synthetic construct
  misc_feature 1..20: note = chemically synthesized
  source 1..20: mol_type = other DNA
atgtaaaccctgcactgctt

SEQ ID NO: 37692 - DNA, 20 bp, synthetic construct
  misc_feature 1..20: note = chemically synthesized
  source 1..20: mol_type = other DNA
tgtaaaccctgcactgcttg

SEQ ID NO: 37693 - DNA, 20 bp, synthetic construct
  misc_feature 1..20: note = chemically synthesized
  source 1..20: mol_type = other DNA
ccctgcactgcttgaggcaa

SEQ ID NO: 37694 - DNA, 20 bp, synthetic construct
  misc_feature 1..20: note = chemically synthesized
  source 1..20: mol_type = other DNA
actgcttgaggcaacagtga

SEQ ID NO: 37695 - DNA, 20 bp, synthetic construct
  misc_feature 1..20: note = chemically synthesized
  source 1..20: mol_type = other DNA
caacagtgatggccttccct

SEQ ID NO: 37696 - DNA, 20 bp, synthetic construct
  misc_feature 1..20: note = chemically synthesized
  source 1..20: mol_type = other DNA
aacagtgatggccttccctg

SEQ ID NO: 37697 - DNA, 20 bp, synthetic construct
  misc_feature 1..20: note = chemically synthesized
  source 1..20: mol_type = other DNA
agtgatggccttccctgagg

SEQ ID NO: 37698 - DNA, 20 bp, synthetic construct
  misc_feature 1..20: note = chemically synthesized
  source 1..20: mol_type = other DNA
gccttccctgaggcagctgc

SEQ ID NO: 37699 - DNA, 20 bp, synthetic construct
  misc_feature 1..20: note = chemically synthesized
  source 1..20: mol_type = other DNA
ccttccctgaggcagctgcc

SEQ ID NO: 37700 - DNA, 20 bp, synthetic construct
  misc_feature 1..20: note = chemically synthesized
  source 1..20: mol_type = other DNA
ccctgaggcagctgccaggc

SEQ ID NO: 37701 - DNA, 20 bp, synthetic construct
  misc_feature 1..20: note = chemically synthesized
  source 1..20: mol_type = other DNA
agataatgttgattctcctc

SEQ ID NO: 37702 - DNA, 20 bp, synthetic construct
  misc_feature 1..20: note = chemically synthesized
  source 1..20: mol_type = other DNA
ataatgttgattctcctcaa

SEQ ID NO: 37703 - DNA, 20 bp, synthetic construct
  misc_feature 1..20: note = chemically synthesized
  source 1..20: mol_type = other DNA
taatgttgattctcctcaag

SEQ ID NO: 37704 - DNA, 20 bp, synthetic construct
  misc_feature 1..20: note = chemically synthesized
  source 1..20: mol_type = other DNA
ctaatgcccctgaatgcttc

SEQ ID NO: 37705 - DNA, 20 bp, synthetic construct
  misc_feature 1..20: note = chemically synthesized
  source 1..20: mol_type = other DNA
aatgcttctagacctataac

SEQ ID NO: 37706 - DNA, 20 bp, synthetic construct
  misc_feature 1..20: note = chemically synthesized
  source 1..20: mol_type = other DNA
atgcttctagacctataact

SEQ ID NO: 37707 - DNA, 20 bp, synthetic construct
  misc_feature 1..20: note = chemically synthesized
  source 1..20: mol_type = other DNA
taactaggctaaattccttg

SEQ ID NO: 37708 - DNA, 20 bp, synthetic construct
  misc_feature 1..20: note = chemically synthesized
  source 1..20: mol_type = other DNA
aactaggctaaattccttgc

SEQ ID NO: 37709 - DNA, 20 bp, synthetic construct
  misc_feature 1..20: note = chemically synthesized
  source 1..20: mol_type = other DNA
gctaaattccttgcgggccc

SEQ ID NO: 37710 - DNA, 20 bp, synthetic construct
  misc_feature 1..20: note = chemically synthesized
  source 1..20: mol_type = other DNA
taaattccttgcgggcccca

SEQ ID NO: 37711 - DNA, 20 bp, synthetic construct
  misc_feature 1..20: note = chemically synthesized
  source 1..20: mol_type = other DNA
aaattccttgcgggccccag

SEQ ID NO: 37712 - DNA, 20 bp, synthetic construct
  misc_feature 1..20: note = chemically synthesized
  source 1..20: mol_type = other DNA
tccttgcgggccccagaggt

SEQ ID NO: 37713 - DNA, 20 bp, synthetic construct
  misc_feature 1..20: note = chemically synthesized
  source 1..20: mol_type = other DNA
ccttgcgggccccagaggtg

SEQ ID NO: 37714 - DNA, 20 bp, synthetic construct
  misc_feature 1..20: note = chemically synthesized
  source 1..20: mol_type = other DNA
cgggccccagaggtgaggtt

SEQ ID NO: 37715 - DNA, 20 bp, synthetic construct
  misc_feature 1..20: note = chemically synthesized
  source 1..20: mol_type = other DNA
ggccccagaggtgaggttca

SEQ ID NO: 37716 - DNA, 20 bp, synthetic construct
  misc_feature 1..20: note = chemically synthesized
  source 1..20: mol_type = other DNA
aggttcagagtgtgacccat

SEQ ID NO: 37717 - DNA, 20 bp, synthetic construct
  misc_feature 1..20: note = chemically synthesized
  source 1..20: mol_type = other DNA
ggttcagagtgtgacccatg

SEQ ID NO: 37718 - DNA, 20 bp, synthetic construct
  misc_feature 1..20: note = chemically synthesized
  source 1..20: mol_type = other DNA
ttcagagtgtgacccatgag

SEQ ID NO: 37719 - DNA, 20 bp, synthetic construct
  misc_feature 1..20: note = chemically synthesized
  source 1..20: mol_type = other DNA
tcagagtgtgacccatgagg

SEQ ID NO: 37720 - DNA, 20 bp, synthetic construct
  misc_feature 1..20: note = chemically synthesized
  source 1..20: mol_type = other DNA
ggaggtgcattatactctaa

SEQ ID NO: 37721 - DNA, 20 bp, synthetic construct
  misc_feature 1..20: note = chemically synthesized
  source 1..20: mol_type = other DNA
atactctaaaagaactgctt

SEQ ID NO: 37722 - DNA, 20 bp, synthetic construct
  misc_feature 1..20: note = chemically synthesized
  source 1..20: mol_type = other DNA
ttaagctttctaatttatat

SEQ ID NO: 37723 - DNA, 20 bp, synthetic construct
  misc_feature 1..20: note = chemically synthesized
  source 1..20: mol_type = other DNA
agctttctaatttatattgg

SEQ ID NO: 37724 - DNA, 20 bp, synthetic construct
  misc_feature 1..20: note = chemically synthesized
  source 1..20: mol_type = other DNA
aatttatattggcagaaatc

SEQ ID NO: 37725 - DNA, 20 bp, synthetic construct
  misc_feature 1..20: note = chemically synthesized
  source 1..20: mol_type = other DNA
tttatattggcagaaatctg

SEQ ID NO: 37726 - DNA, 20 bp, synthetic construct
  misc_feature 1..20: note = chemically synthesized
  source 1..20: mol_type = other DNA
attggcagaaatctggagaa

SEQ ID NO: 37727 - DNA, 20 bp, synthetic construct
  misc_feature 1..20: note = chemically synthesized
  source 1..20: mol_type = other DNA
ttggcagaaatctggagaac

SEQ ID NO: 37728 - DNA, 20 bp, synthetic construct
  misc_feature 1..20: note = chemically synthesized
  source 1..20: mol_type = other DNA
agaaatctggagaacaggca

SEQ ID NO: 37729 - DNA, 20 bp, synthetic construct
  misc_feature 1..20: note = chemically synthesized
  source 1..20: mol_type = other DNA
gaaatctggagaacaggcat

SEQ ID NO: 37730 - DNA, 20 bp, synthetic construct
  misc_feature 1..20: note = chemically synthesized
  source 1..20: mol_type = other DNA
ctggagaacaggcatgggaa

SEQ ID NO: 37731 - DNA, 20 bp, synthetic construct
  misc_feature 1..20: note = chemically synthesized
  source 1..20: mol_type = other DNA
caggcatgggaatggatatt

SEQ ID NO: 37732 - DNA, 20 bp, synthetic construct
  misc_feature 1..20: note = chemically synthesized
  source 1..20: mol_type = other DNA
aggcatgggaatggatatta

SEQ ID NO: 37733 - DNA, 20 bp, synthetic construct
  misc_feature 1..20: note = chemically synthesized
  source 1..20: mol_type = other DNA
ggcatgggaatggatattaa

SEQ ID NO: 37734 - DNA, 20 bp, synthetic construct
  misc_feature 1..20: note = chemically synthesized
  source 1..20: mol_type = other DNA
tgggaatggatattaagggt

SEQ ID NO: 37735 - DNA, 20 bp, synthetic construct
  misc_feature 1..20: note = chemically synthesized
  source 1..20: mol_type = other DNA
gggaatggatattaagggta

SEQ ID NO: 37736 - DNA, 20 bp, synthetic construct
  misc_feature 1..20: note = chemically synthesized
  source 1..20: mol_type = other DNA
ggaatggatattaagggtaa

SEQ ID NO: 37737 - DNA, 20 bp, synthetic construct
  misc_feature 1..20: note = chemically synthesized
  source 1..20: mol_type = other DNA
atattaagggtaagggataa

SEQ ID NO: 37738 - DNA, 20 bp, synthetic construct
  misc_feature 1..20: note = chemically synthesized
  source 1..20: mol_type = other DNA
ttaagggtaagggataatgg

SEQ ID NO: 37739 - DNA, 20 bp, synthetic construct
  misc_feature 1..20: note = chemically synthesized
  source 1..20: mol_type = other DNA
agggtaagggataatggtgg

SEQ ID NO: 37740 - DNA, 20 bp, synthetic construct
  misc_feature 1..20: note = chemically synthesized
  source 1..20: mol_type = other DNA
gggtaagggataatggtgga

SEQ ID NO: 37741 - DNA, 20 bp, synthetic construct
  misc_feature 1..20: note = chemically synthesized
  source 1..20: mol_type = other DNA
ggtaagggataatggtggaa

SEQ ID NO: 37742 - DNA, 20 bp, synthetic construct
  misc_feature 1..20: note = chemically synthesized
  source 1..20: mol_type = other DNA
ggataatggtggaagggaca

SEQ ID NO: 37743 - DNA, 20 bp, synthetic construct
  misc_feature 1..20: note = chemically synthesized
  source 1..20: mol_type = other DNA
ataatggtggaagggacata

SEQ ID NO: 37744 - DNA, 20 bp, synthetic construct
  misc_feature 1..20: note = chemically synthesized
  source 1..20: mol_type = other DNA
tggtggaagggacatagagt

SEQ ID NO: 37745 - DNA, 20 bp, synthetic construct
  misc_feature 1..20: note = chemically synthesized
  source 1..20: mol_type = other DNA
aagggacatagagttggatc

SEQ ID NO: 37746 - DNA, 20 bp, synthetic construct
  misc_feature 1..20: note = chemically synthesized
  source 1..20: mol_type = other DNA
ttggatcaagctgaatttat

SEQ ID NO: 37747 - DNA, 20 bp, synthetic construct
  misc_feature 1..20: note = chemically synthesized
  source 1..20: mol_type = other DNA
tcaagctgaatttattggtt

SEQ ID NO: 37748 - DNA, 20 bp, synthetic construct
  misc_feature 1..20: note = chemically synthesized
  source 1..20: mol_type = other DNA
tttattggtttggccctact

SEQ ID NO: 37749 - DNA, 20 bp, synthetic construct
  misc_feature 1..20: note = chemically synthesized
  source 1..20: mol_type = other DNA
attggtttggccctactaag

SEQ ID NO: 37750 - DNA, 20 bp, synthetic construct
  misc_feature 1..20: note = chemically synthesized
  source 1..20: mol_type = other DNA
ttggtttggccctactaagt

SEQ ID NO: 37751 - DNA, 20 bp, synthetic construct
  misc_feature 1..20: note = chemically synthesized
  source 1..20: mol_type = other DNA
tggtttggccctactaagta

SEQ ID NO: 37752 - DNA, 20 bp, synthetic construct
  misc_feature 1..20: note = chemically synthesized
  source 1..20: mol_type = other DNA
ggattctgcatttaatgttg

SEQ ID NO: 37753 - DNA, 20 bp, synthetic construct
  misc_feature 1..20: note = chemically synthesized
  source 1..20: mol_type = other DNA
ctgcatttaatgttgcagct

SEQ ID NO: 37754 - DNA, 20 bp, synthetic construct
  misc_feature 1..20: note = chemically synthesized
  source 1..20: mol_type = other DNA
tgcatttaatgttgcagctc

SEQ ID NO: 37755 - DNA, 20 bp, synthetic construct
  misc_feature 1..20: note = chemically synthesized
  source 1..20: mol_type = other DNA
gcatttaatgttgcagctcg

SEQ ID NO: 37756 - DNA, 20 bp, synthetic construct
  misc_feature 1..20: note = chemically synthesized
  source 1..20: mol_type = other DNA
aatgttgcagctcggggact

SEQ ID NO: 37757 - DNA, 20 bp, synthetic construct
  misc_feature 1..20: note = chemically synthesized
  source 1..20: mol_type = other DNA
tgcagctcggggacttagaa

SEQ ID NO: 37758 - DNA, 20 bp, synthetic construct
  misc_feature 1..20: note = chemically synthesized
  source 1..20: mol_type = other DNA
gcagctcggggacttagaaa

SEQ ID NO: 37759 - DNA, 20 bp, synthetic construct
  misc_feature 1..20: note = chemically synthesized
  source 1..20: mol_type = other DNA
ggacttagaaaaggttctga

SEQ ID NO: 37760 - DNA, 20 bp, synthetic construct
  misc_feature 1..20: note = chemically synthesized
  source 1..20: mol_type = other DNA
gacttagaaaaggttctgat

SEQ ID NO: 37761 - DNA, 20 bp, synthetic construct
  misc_feature 1..20: note = chemically synthesized
  source 1..20: mol_type = other DNA
acttagaaaaggttctgata

SEQ ID NO: 37762 - DNA, 20 bp, synthetic construct
  misc_feature 1..20: note = chemically synthesized
  source 1..20: mol_type = other DNA
agaaaaggttctgatagggc

SEQ ID NO: 37763 - DNA, 20 bp, synthetic construct
  misc_feature 1..20: note = chemically synthesized
  source 1..20: mol_type = other DNA
gaaaaggttctgatagggcc

SEQ ID NO: 37764 - DNA, 20 bp, synthetic construct
  misc_feature 1..20: note = chemically synthesized
  source 1..20: mol_type = other DNA
aaaggttctgatagggccgg

SEQ ID NO: 37765 - DNA, 20 bp, synthetic construct
  misc_feature 1..20: note = chemically synthesized
  source 1..20: mol_type = other DNA
ggttctgatagggccgggag

SEQ ID NO: 37766 - DNA, 20 bp, synthetic construct
  misc_feature 1..20: note = chemically synthesized
  source 1..20: mol_type = other DNA
tctgatagggccgggagcag

SEQ ID NO: 37767 - DNA, 20 bp, synthetic construct
  misc_feature 1..20: note = chemically synthesized
  source 1..20: mol_type = other DNA
gtggctcacgcctgtaatcc

SEQ ID NO: 37768 - DNA, 20 bp, synthetic construct
  misc_feature 1..20: note = chemically synthesized
  source 1..20: mol_type = other DNA
cgcctgtaatcccagcacct

SEQ ID NO: 37769 - DNA, 20 bp, synthetic construct
  misc_feature 1..20: note = chemically synthesized
  source 1..20: mol_type = other DNA
gcctgtaatcccagcacctt

SEQ ID NO: 37770 - DNA, 20 bp, synthetic construct
  misc_feature 1..20: note = chemically synthesized
  source 1..20: mol_type = other DNA
ctgtaatcccagcaccttgg

SEQ ID NO: 37771 - DNA, 20 bp, synthetic construct
  misc_feature 1..20: note = chemically synthesized
  source 1..20: mol_type = other DNA
tgtaatcccagcaccttggg

SEQ ID NO: 37772 - DNA, 20 bp, synthetic construct
  misc_feature 1..20: note = chemically synthesized
  source 1..20: mol_type = other DNA
aatcccagcaccttgggagg

SEQ ID NO: 37773 - DNA, 20 bp, synthetic construct
  misc_feature 1..20: note = chemically synthesized
  source 1..20: mol_type = other DNA
atcccagcaccttgggaggc

SEQ ID NO: 37774 - DNA, 20 bp, synthetic construct
  misc_feature 1..20: note = chemically synthesized
  source 1..20: mol_type = other DNA
tcccagcaccttgggaggcg

SEQ ID NO: 37775 - DNA, 20 bp, synthetic construct
  misc_feature 1..20: note = chemically synthesized
  source 1..20: mol_type = other DNA
cccagcaccttgggaggcgg

SEQ ID NO: 37776 - DNA, 20 bp, synthetic construct
  misc_feature 1..20: note = chemically synthesized
  source 1..20: mol_type = other DNA
agcaccttgggaggcggggg

SEQ ID NO: 37777 - DNA, 20 bp, synthetic construct
  misc_feature 1..20: note = chemically synthesized
  source 1..20: mol_type = other DNA
gcaccttgggaggcgggggc

SEQ ID NO: 37778 - DNA, 20 bp, synthetic construct
  misc_feature 1..20: note = chemically synthesized
  source 1..20: mol_type = other DNA
ccttgggaggcgggggcggg

SEQ ID NO: 37779 - DNA, 20 bp, synthetic construct
  misc_feature 1..20: note = chemically synthesized
  source 1..20: mol_type = other DNA
ggcgggggcgggcagatcac

SEQ ID NO: 37780 - DNA, 20 bp, synthetic construct
  misc_feature 1..20: note = chemically synthesized
  source 1..20: mol_type = other DNA
gggcgggcagatcacgagat

SEQ ID NO: 37781 - DNA, 20 bp, synthetic construct
  misc_feature 1..20: note = chemically synthesized
  source 1..20: mol_type = other DNA
ggcgggcagatcacgagatc

SEQ ID NO: 37782 - DNA, 20 bp, synthetic construct
  misc_feature 1..20: note = chemically synthesized
  source 1..20: mol_type = other DNA
cgggcagatcacgagatcag

SEQ ID NO: 37783 - DNA, 20 bp, synthetic construct
  misc_feature 1..20: note = chemically synthesized
  source 1..20: mol_type = other DNA
gatcacgagatcaggagatt

SEQ ID NO: 37784 - DNA, 20 bp, synthetic construct
  misc_feature 1..20: note = chemically synthesized
  source 1..20: mol_type = other DNA
tcaggagattgagacaattc

SEQ ID NO: 37785 - DNA, 20 bp, synthetic construct
  misc_feature 1..20: note = chemically synthesized
  source 1..20: mol_type = other DNA
tgagacaattctggctaaaa

SEQ ID NO: 37786 - DNA, 20 bp, synthetic construct
  misc_feature 1..20: note = chemically synthesized
  source 1..20: mol_type = other DNA
tctgctaaaaatacaaaaat

SEQ ID NO: 37787 - DNA, 20 bp, synthetic construct
  misc_feature 1..20: note = chemically synthesized
  source 1..20: mol_type = other DNA
ctaaaaatacaaaaattagc

SEQ ID NO: 37788 - DNA, 20 bp, synthetic construct
  misc_feature 1..20: note = chemically synthesized
  source 1..20: mol_type = other DNA
taaaaatacaaaaattagct

SEQ ID NO: 37789 - DNA, 20 bp, synthetic construct
  misc_feature 1..20: note = chemically synthesized
  source 1..20: mol_type = other DNA
atacaaaaattagctgggca

SEQ ID NO: 37790 - DNA, 20 bp, synthetic construct
  misc_feature 1..20: note = chemically synthesized
  source 1..20: mol_type = other DNA
taactgtaatctcatctact

SEQ ID NO: 37791 - DNA, 20 bp, synthetic construct
  misc_feature 1..20: note = chemically synthesized
  source 1..20: mol_type = other DNA
aactgtaatctcatctactt

SEQ ID NO: 37792 - DNA, 20 bp, synthetic construct
  misc_feature 1..20: note = chemically synthesized
  source 1..20: mol_type = other DNA
ctgtaatctcatctacttgg

SEQ ID NO: 37793 - DNA, 20 bp, synthetic construct
  misc_feature 1..20: note = chemically synthesized
  source 1..20: mol_type = other DNA
tgtaatctcatctacttggg

SEQ ID NO: 37794 - DNA, 20 bp, synthetic construct
  misc_feature 1..20: note = chemically synthesized
  source 1..20: mol_type = other DNA
tctcatctacttgggaggct

SEQ ID NO: 37795 - DNA, 20 bp, synthetic construct
  misc_feature 1..20: note = chemically synthesized
  source 1..20: mol_type = other DNA
ctcatctacttgggaggctg

SEQ ID NO: 37796 - DNA, 20 bp, synthetic construct
  misc_feature 1..20: note = chemically synthesized
  source 1..20: mol_type = other DNA
tctacttgggaggctgaggc

SEQ ID NO: 37797 - DNA, 20 bp, synthetic construct
  misc_feature 1..20: note = chemically synthesized
  source 1..20: mol_type = other DNA
tacttgggaggctgaggcaa

SEQ ID NO: 37798 - DNA, 20 bp, synthetic construct
  misc_feature 1..20: note = chemically synthesized
  source 1..20: mol_type = other DNA
agagaactgcttgaacctgt

SEQ ID NO: 37799 - DNA, 20 bp, synthetic construct
  misc_feature 1..20: note = chemically synthesized
  source 1..20: mol_type = other DNA
gagaactgcttgaacctgtg

SEQ ID NO: 37800 - DNA, 20 bp, synthetic construct
  misc_feature 1..20: note = chemically synthesized
  source 1..20: mol_type = other DNA
aactgcttgaacctgtgagg

SEQ ID NO: 37801 - DNA, 20 bp, synthetic construct
  misc_feature 1..20: note = chemically synthesized
  source 1..20: mol_type = other DNA
ctgcttgaacctgtgaggca

SEQ ID NO: 37802 - DNA, 20 bp, synthetic construct
  misc_feature 1..20: note = chemically synthesized
  source 1..20: mol_type = other DNA
aacctgtgaggcagagattg

SEQ ID NO: 37803 - DNA, 20 bp, synthetic construct
  misc_feature 1..20: note = chemically synthesized
  source 1..20: mol_type = other DNA
tgtgaggcagagattgcagt

SEQ ID NO: 37804 - DNA, 20 bp, synthetic construct
  misc_feature 1..20: note = chemically synthesized
  source 1..20: mol_type = other DNA
ggcagagattgcagtgagcc

SEQ ID NO: 37805 - DNA, 20 bp, synthetic construct
  misc_feature 1..20: note = chemically synthesized
  source 1..20: mol_type = other DNA
aagatcgccccactgcattc

SEQ ID NO: 37806 - DNA, 20 bp, synthetic construct
  misc_feature 1..20: note = chemically synthesized
  source 1..20: mol_type = other DNA
cgccccactgcattccagcc

SEQ ID NO: 37807 - DNA, 20 bp, synthetic construct
  misc_feature 1..20: note = chemically synthesized
  source 1..20: mol_type = other DNA
actgcattccagcctggtaa

SEQ ID NO: 37808 - DNA, 20 bp, synthetic construct
  misc_feature 1..20: note = chemically synthesized
  source 1..20: mol_type = other DNA
tgcattccagcctggtaaca

SEQ ID NO: 37809 - DNA, 20 bp, synthetic construct
  misc_feature 1..20: note = chemically synthesized
  source 1..20: mol_type = other DNA
ttccagcctggtaacagagc

SEQ ID NO: 37810 - DNA, 20 bp, synthetic construct
  misc_feature 1..20: note = chemically synthesized
  source 1..20: mol_type = other DNA
ttccaaaaaaaaaaaaaaaa

SEQ ID NO: 37811 - DNA, 20 bp, synthetic construct
  misc_feature 1..20: note = chemically synthesized
  source 1..20: mol_type = other DNA
aaaaaaaaaaaaagttataa

SEQ ID NO: 37812 - DNA, 20 bp, synthetic construct
  misc_feature 1..20: note = chemically synthesized
  source 1..20: mol_type = other DNA
gttataatagtttatttgct

SEQ ID NO: 37813 - DNA, 20 bp, synthetic construct
  misc_feature 1..20: note = chemically synthesized
  source 1..20: mol_type = other DNA
taatagtttatttgcttggt

SEQ ID NO: 37814 - DNA, 20 bp, synthetic construct
  misc_feature 1..20: note = chemically synthesized
  source 1..20: mol_type = other DNA
ttgcttggttagctgaaata

SEQ ID NO: 37815 - DNA, 20 bp, synthetic construct
  misc_feature 1..20: note = chemically synthesized
  source 1..20: mol_type = other DNA
ttagctgaaatatggattaa

SEQ ID NO: 37816 - DNA, 20 bp, synthetic construct
  misc_feature 1..20: note = chemically synthesized
  source 1..20: mol_type = other DNA
ctgaaatatggattaaaaga

SEQ ID NO: 37817 - DNA, 20 bp, synthetic construct
  misc_feature 1..20: note = chemically synthesized
  source 1..20: mol_type = other DNA
attaaaagatggtccaatgt

SEQ ID NO: 37818 - DNA, 20 bp, synthetic construct
  misc_feature 1..20: note = chemically synthesized
  source 1..20: mol_type = other DNA
aaagatggtccaatgttagt

SEQ ID NO: 37819 - DNA, 20 bp, synthetic construct
  misc_feature 1..20: note = chemically synthesized
  source 1..20: mol_type = other DNA
atggtccaatgttagtgagc

SEQ ID NO: 37820 - DNA, 20 bp, synthetic construct
  misc_feature 1..20: note = chemically synthesized
  source 1..20: mol_type = other DNA
ttagtgagctggaaatgcct

SEQ ID NO: 37821 - DNA, 20 bp, synthetic construct
  misc_feature 1..20: note = chemically synthesized
  source 1..20: mol_type = other DNA
ggaaatgccttggtttaatg

SEQ ID NO: 37822 - DNA, 20 bp, synthetic construct
  misc_feature 1..20: note = chemically synthesized
  source 1..20: mol_type = other DNA
aaatgccttggtttaatgta

SEQ ID NO: 37823 - DNA, 20 bp, synthetic construct
  misc_feature 1..20: note = chemically synthesized
  source 1..20: mol_type = other DNA
aatgccttggtttaatgtag

SEQ ID NO: 37824 - DNA, 20 bp, synthetic construct
  misc_feature 1..20: note = chemically synthesized
  source 1..20: mol_type = other DNA
gccttggtttaatgtagagg

SEQ ID NO: 37825 - DNA, 20 bp, synthetic construct
  misc_feature 1..20: note = chemically synthesized
  source 1..20: mol_type = other DNA
aatgtagaggaagtgatcca

SEQ ID NO: 37826 - DNA, 20 bp, synthetic construct
  misc_feature 1..20: note = chemically synthesized
  source 1..20: mol_type = other DNA
atgtagaggaagtgatccaa

SEQ ID NO: 37827 - DNA, 20 bp, synthetic construct
  misc_feature 1..20: note = chemically synthesized
  source 1..20: mol_type = other DNA
gaggaagtgatccaaaggct

SEQ ID NO: 37828 - DNA, 20 bp, synthetic construct
  misc_feature 1..20: note = chemically synthesized
  source 1..20: mol_type = other DNA
aggaagtgatccaaaggctt

SEQ ID NO: 37829 - DNA, 20 bp, synthetic construct
  misc_feature 1..20: note = chemically synthesized
  source 1..20: mol_type = other DNA
ggaagtgatccaaaggctta

SEQ ID NO: 37830 - DNA, 20 bp, synthetic construct
  misc_feature 1..20: note = chemically synthesized
  source 1..20: mol_type = other DNA
aagtgatccaaaggcttagg

SEQ ID NO: 37831 - DNA, 20 bp, synthetic construct
  misc_feature 1..20: note = chemically synthesized
  source 1..20: mol_type = other DNA
atccaaaggcttagggagat

SEQ ID NO: 37832 - DNA, 20 bp, synthetic construct
  misc_feature 1..20: note = chemically synthesized
  source 1..20: mol_type = other DNA
tccaaaggcttagggagatt

SEQ ID NO: 37833 - DNA, 20 bp, synthetic construct
  misc_feature 1..20: note = chemically synthesized
  source 1..20: mol_type = other DNA
aaggcttagggagattagga

SEQ ID NO: 37834 - DNA, 20 bp, synthetic construct
  misc_feature 1..20: note = chemically synthesized
  source 1..20: mol_type = other DNA
gcttagggagattaggatgg

SEQ ID NO: 37835 - DNA, 20 bp, synthetic construct
  misc_feature 1..20: note = chemically synthesized
  source 1..20: mol_type = other DNA
ttagggagattaggatggtg

SEQ ID NO: 37836 - DNA, 20 bp, synthetic construct
  misc_feature 1..20: note = chemically synthesized
  source 1..20: mol_type = other DNA
gggagattaggatggtggag

SEQ ID NO: 37837 - DNA, 20 bp, synthetic construct
  misc_feature 1..20: note = chemically synthesized
  source 1..20: mol_type = other DNA
attaggatggtggagtggat

SEQ ID NO: 37838 - DNA, 20 bp, synthetic construct
  misc_feature 1..20: note = chemically synthesized
  source 1..20: mol_type = other DNA
gtggagtggattagtcactt

SEQ ID NO: 37839 - DNA, 20 bp, synthetic construct
  misc_feature 1..20: note = chemically synthesized
  source 1..20: mol_type = other DNA
cactttagacctactcatcc

SEQ ID NO: 37840 - DNA, 20 bp, synthetic construct
  misc_feature 1..20: note = chemically synthesized
  source 1..20: mol_type = other DNA
ttagacctactcatcccagc

SEQ ID NO: 37841 - DNA, 20 bp, synthetic construct
  misc_feature 1..20: note = chemically synthesized
  source 1..20: mol_type = other DNA
tagacctactcatcccagct

SEQ ID NO: 37842 - DNA, 20 bp, synthetic construct
  misc_feature 1..20: note = chemically synthesized
  source 1..20: mol_type = other DNA
gacctactcatcccagctgg

SEQ ID NO: 37843 - DNA, 20 bp, synthetic construct
  misc_feature 1..20: note = chemically synthesized
  source 1..20: mol_type = other DNA
acctactcatcccagctggg

SEQ ID NO: 37844 - DNA, 20 bp, synthetic construct
  misc_feature 1..20: note = chemically synthesized
  source 1..20: mol_type = other DNA
cctactcatcccagctggga

SEQ ID NO: 37845 - DNA, 20 bp, synthetic construct
  misc_feature 1..20: note = chemically synthesized
  source 1..20: mol_type = other DNA
tcatcccagctgggagggtc

SEQ ID NO: 37846 - DNA, 20 bp, synthetic construct
  misc_feature 1..20: note = chemically synthesized
  source 1..20: mol_type = other DNA
tcccagctgggagggtccag

SEQ ID NO: 37847 - DNA, 20 bp, synthetic construct
  misc_feature 1..20: note = chemically synthesized
  source 1..20: mol_type = other DNA
gggtccagaagatacaccct

SEQ ID NO: 37848 - DNA, 20 bp, synthetic construct
  misc_feature 1..20: note = chemically synthesized
  source 1..20: mol_type = other DNA
agaagatacacccttggccg

SEQ ID NO: 37849 - DNA, 20 bp, synthetic construct
  misc_feature 1..20: note = chemically synthesized
  source 1..20: mol_type = other DNA
ttggccgaagctttgtgaaa

SEQ ID NO: 37850 - DNA, 20 bp, synthetic construct
  misc_feature 1..20: note = chemically synthesized
  source 1..20: mol_type = other DNA
gctttgtgaaatagatttgt

SEQ ID NO: 37851 - DNA, 20 bp, synthetic construct
  misc_feature 1..20: note = chemically synthesized
  source 1..20: mol_type = other DNA
tttgtgaaatagatttgtga

SEQ ID NO: 37852 - DNA, 20 bp, synthetic construct
  misc_feature 1..20: note = chemically synthesized
  source 1..20: mol_type = other DNA
gtgaaatagatttgtgagag

SEQ ID NO: 37853 - DNA, 20 bp, synthetic construct
  misc_feature 1..20: note = chemically synthesized
  source 1..20: mol_type = other DNA
gagcagcacctgtatttttg

SEQ ID NO: 37854 - DNA, 20 bp, synthetic construct
  misc_feature 1..20: note = chemically synthesized
  source 1..20: mol_type = other DNA
gcagcacctgtatttttgaa

SEQ ID NO: 37855 - DNA, 20 bp, synthetic construct
  misc_feature 1..20: note = chemically synthesized
  source 1..20: mol_type = other DNA
aattgctcttctctgtatgt

SEQ ID NO: 37856 - DNA, 20 bp, synthetic construct
  misc_feature 1..20: note = chemically synthesized
  source 1..20: mol_type = other DNA
tctctgtatgtcagatctaa

SEQ ID NO: 37857 - DNA, 20 bp, synthetic construct
  misc_feature 1..20: note = chemically synthesized
  source 1..20: mol_type = other DNA
ctgtatgtcagatctaacag

SEQ ID NO: 37858 - DNA, 20 bp, synthetic construct
  misc_feature 1..20: note = chemically synthesized
  source 1..20: mol_type = other DNA
tgtatgtcagatctaacagt

SEQ ID NO: 37859 - DNA, 20 bp, synthetic construct
  misc_feature 1..20: note = chemically synthesized
  source 1..20: mol_type = other DNA
agatctaacagtaggaacca

SEQ ID NO: 37860 - DNA, 20 bp, synthetic construct
  misc_feature 1..20: note = chemically synthesized
  source 1..20: mol_type = other DNA
actacaaaatttaaatacaa

SEQ ID NO: 37861 - DNA, 20 bp, synthetic construct
  misc_feature 1..20: note = chemically synthesized
  source 1..20: mol_type = other DNA
ctacaaaatttaaatacaat

SEQ ID NO: 37862 - DNA, 20 bp, synthetic construct
  misc_feature 1..20: note = chemically synthesized
  source 1..20: mol_type = other DNA
ttaaatacaatgggaataat

SEQ ID NO: 37863 - DNA, 20 bp, synthetic construct
  misc_feature 1..20: note = chemically synthesized
  source 1..20: mol_type = other DNA
aatgggaataattggatcct

SEQ ID NO: 37864 - DNA, 20 bp, synthetic construct
  misc_feature 1..20: note = chemically synthesized
  source 1..20: mol_type = other DNA
atgggaataattggatcctg

SEQ ID NO: 37865 - DNA, 20 bp, synthetic construct
  misc_feature 1..20: note = chemically synthesized
  source 1..20: mol_type = other DNA
ggaataattggatcctgagg

SEQ ID NO: 37866 - DNA, 20 bp, synthetic construct
  misc_feature 1..20: note = chemically synthesized
  source 1..20: mol_type = other DNA
ataattggatcctgaggtgg

SEQ ID NO: 37867 - DNA, 20 bp, synthetic construct
  misc_feature 1..20: note = chemically synthesized
  source 1..20: mol_type = other DNA
taattggatcctgaggtggc

SEQ ID NO: 37868 - DNA, 20 bp, synthetic construct
  misc_feature 1..20: note = chemically synthesized
  source 1..20: mol_type = other DNA
aattggatcctgaggtggca

SEQ ID NO: 37869 - DNA, 20 bp, synthetic construct
  misc_feature 1..20: note = chemically synthesized
  source 1..20: mol_type = other DNA
attggatcctgaggtggcag

SEQ ID NO: 37870 - DNA, 20 bp, synthetic construct
  misc_feature 1..20: note = chemically synthesized
  source 1..20: mol_type = other DNA
atcctgaggtggcaggggcc

SEQ ID NO: 37871 - DNA, 20 bp, synthetic construct
  misc_feature 1..20: note = chemically synthesized
  source 1..20: mol_type = other DNA
aggtggcaggggccaagtgt

SEQ ID NO: 37872 - DNA, 20 bp, synthetic construct
  misc_feature 1..20: note = chemically synthesized
  source 1..20: mol_type = other DNA
gtgttggcactgaaccatca

SEQ ID NO: 37873 - DNA, 20 bp, synthetic construct
  misc_feature 1..20: note = chemically synthesized
  source 1..20: mol_type = other DNA
tgttggcactgaaccatcaa

SEQ ID NO: 37874 - DNA, 20 bp, synthetic construct
  misc_feature 1..20: note = chemically synthesized
  source 1..20: mol_type = other DNA
ggcactgaaccatcaaaggc

SEQ ID NO: 37875 - DNA, 20 bp, synthetic construct
  misc_feature 1..20: note = chemically synthesized
  source 1..20: mol_type = other DNA
gcactgaaccatcaaaggca

SEQ ID NO: 37876 - DNA, 20 bp, synthetic construct
  misc_feature 1..20: note = chemically synthesized
  source 1..20: mol_type = other DNA
ctgaaccatcaaaggcaagg

SEQ ID NO: 37877 - DNA, 20 bp, synthetic construct
  misc_feature 1..20: note = chemically synthesized
  source 1..20: mol_type = other DNA
tgaaccatcaaaggcaaggt

SEQ ID NO: 37878 - DNA, 20 bp, synthetic construct
  misc_feature 1..20: note = chemically synthesized
  source 1..20: mol_type = other DNA
ggtgggcataactaccataa

SEQ ID NO: 37879 - DNA, 20 bp, synthetic construct
  misc_feature 1..20: note = chemically synthesized
  source 1..20: mol_type = other DNA
ggcataactaccataataga

SEQ ID NO: 37880 - DNA, 20 bp, synthetic construct
  misc_feature 1..20: note = chemically synthesized
  source 1..20: mol_type = other DNA
ataactaccataatagacag

SEQ ID NO: 37881 - DNA, 20 bp, synthetic construct
  misc_feature 1..20: note = chemically synthesized
  source 1..20: mol_type = other DNA
aactaccataatagacagca

SEQ ID NO: 37882 - DNA, 20 bp, synthetic construct
  misc_feature 1..20: note = chemically synthesized
  source 1..20: mol_type = other DNA
actaccataatagacagcag

SEQ ID NO: 37883 - DNA, 20 bp, synthetic construct
  misc_feature 1..20: note = chemically synthesized
  source 1..20: mol_type = other DNA
cataatagacagcagaggca

SEQ ID NO: 37884 - DNA, 20 bp, synthetic construct
  misc_feature 1..20: note = chemically synthesized
  source 1..20: mol_type = other DNA
aatagacagcagaggcaaag

SEQ ID NO: 37885 - DNA, 20 bp, synthetic construct
  misc_feature 1..20: note = chemically synthesized
  source 1..20: mol_type = other DNA
agcagaggcaaagcagccat

SEQ ID NO: 37886 - DNA, 20 bp, synthetic construct
  misc_feature 1..20: note = chemically synthesized
  source 1..20: mol_type = other DNA
aggcaaagcagccatcagaa

SEQ ID NO: 37887 - DNA, 20 bp, synthetic construct
  misc_feature 1..20: note = chemically synthesized
  source 1..20: mol_type = other DNA
tcagaatagtctgactcatg

SEQ ID NO: 37888 - DNA, 20 bp, synthetic construct
  misc_feature 1..20: note = chemically synthesized
  source 1..20: mol_type = other DNA
agaatagtctgactcatgta

SEQ ID NO: 37889 - DNA, 20 bp, synthetic construct
  misc_feature 1..20: note = chemically synthesized
  source 1..20: mol_type = other DNA
gtctgactcatgtagagctc

SEQ ID NO: 37890 - DNA, 20 bp, synthetic construct
  misc_feature 1..20: note = chemically synthesized
  source 1..20: mol_type = other DNA
ctcatgtagagctctggcat

SEQ ID NO: 37891 - DNA, 20 bp, synthetic construct
  misc_feature 1..20: note = chemically synthesized
  source 1..20: mol_type = other DNA
tggcattggctaattaatca

SEQ ID NO: 37892 - DNA, 20 bp, synthetic construct
  misc_feature 1..20: note = chemically synthesized
  source 1..20: mol_type = other DNA
ctaattaatcatggtgttcc

SEQ ID NO: 37893 - DNA, 20 bp, synthetic construct
  misc_feature 1..20: note = chemically synthesized
  source 1..20: mol_type = other DNA
attaatcatggtgttcctag

SEQ ID NO: 37894 - DNA, 20 bp, synthetic construct
  misc_feature 1..20: note = chemically synthesized
  source 1..20: mol_type = other DNA
gttcctagaagtgaaattga

SEQ ID NO: 37895 - DNA, 20 bp, synthetic construct
  misc_feature 1..20: note = chemically synthesized
  source 1..20: mol_type = other DNA
ttcctagaagtgaaattgat

SEQ ID NO: 37896 - DNA, 20 bp, synthetic construct
  misc_feature 1..20: note = chemically synthesized
  source 1..20: mol_type = other DNA
ttatataaacaaaaaactgc

SEQ ID NO: 37897 - DNA, 20 bp, synthetic construct
  misc_feature 1..20: note = chemically synthesized
  source 1..20: mol_type = other DNA
tatataaacaaaaaactgcc

SEQ ID NO: 37898 - DNA, 20 bp, synthetic construct
  misc_feature 1..20: note = chemically synthesized
  source 1..20: mol_type = other DNA
ataaacaaaaaactgccagg

SEQ ID NO: 37899 - DNA, 20 bp, synthetic construct
  misc_feature 1..20: note = chemically synthesized
  source 1..20: mol_type = other DNA
caaaaaactgccaggtagaa

SEQ ID NO: 37900 - DNA, 20 bp, synthetic construct
  misc_feature 1..20: note = chemically synthesized
  source 1..20: mol_type = other DNA
ctgccaggtagaatggacta

SEQ ID NO: 37901 - DNA, 20 bp, synthetic construct
  misc_feature 1..20: note = chemically synthesized
  source 1..20: mol_type = other DNA
actaatctgaattataaaaa

SEQ ID NO: 37902 - DNA, 20 bp, synthetic construct
  misc_feature 1..20: note = chemically synthesized
  source 1..20: mol_type = other DNA
taatctgaattataaaaaca

SEQ ID NO: 37903 - DNA, 20 bp, synthetic construct
  misc_feature 1..20: note = chemically synthesized
  source 1..20: mol_type = other DNA
attataaaaacagagaatca

SEQ ID NO: 37904 - DNA, 20 bp, synthetic construct
  misc_feature 1..20: note = chemically synthesized
  source 1..20: mol_type = other DNA
ttataaaaacagagaatcat

SEQ ID NO: 37905 - DNA, 20 bp, synthetic construct
  misc_feature 1..20: note = chemically synthesized
  source 1..20: mol_type = other DNA
atgggccctcaatcaatttc

SEQ ID NO: 37906 - DNA, 20 bp, synthetic construct
  misc_feature 1..20: note = chemically synthesized
  source 1..20: mol_type = other DNA
ttccagactcgaacctgtta

SEQ ID NO: 37907 - DNA, 20 bp, synthetic construct
  misc_feature 1..20: note = chemically synthesized
  source 1..20: mol_type = other DNA
actcgaacctgttacagttc

SEQ ID NO: 37908 - DNA, 20 bp, synthetic construct
  misc_feature 1..20: note = chemically synthesized
  source 1..20: mol_type = other DNA
gttccagaacccactgaatg

SEQ ID NO: 37909 - DNA, 20 bp, synthetic construct
  misc_feature 1..20: note = chemically synthesized
  source 1..20: mol_type = other DNA
ttccagaacccactgaatga

SEQ ID NO: 37910 - DNA, 20 bp, synthetic construct
  misc_feature 1..20: note = chemically synthesized
  source 1..20: mol_type = other DNA
tccagaacccactgaatgaa

SEQ ID NO: 37911 - DNA, 20 bp, synthetic construct
  misc_feature 1..20: note = chemically synthesized
  source 1..20: mol_type = other DNA
ccagaacccactgaatgaag

SEQ ID NO: 37912 - DNA, 20 bp, synthetic construct
  misc_feature 1..20: note = chemically synthesized
  source 1..20: mol_type = other DNA
agaacccactgaatgaaggg

SEQ ID NO: 37913 - DNA, 20 bp, synthetic construct
  misc_feature 1..20: note = chemically synthesized
  source 1..20: mol_type = other DNA
gaacccactgaatgaagggg

SEQ ID NO: 37914 - DNA, 20 bp, synthetic construct
  misc_feature 1..20: note = chemically synthesized
  source 1..20: mol_type = other DNA
ccactgaatgaaggggaggc

SEQ ID NO: 37915 - DNA, 20 bp, synthetic construct
  misc_feature 1..20: note = chemically synthesized
  source 1..20: mol_type = other DNA
aggggaggctggatcccctt

SEQ ID NO: 37916 - DNA, 20 bp, synthetic construct
  misc_feature 1..20: note = chemically synthesized
  source 1..20: mol_type = other DNA
ggggaggctggatccccttg

SEQ ID NO: 37917 - DNA, 20 bp, synthetic construct
  misc_feature 1..20: note = chemically synthesized
  source 1..20: mol_type = other DNA
gaggctggatccccttgagg

SEQ ID NO: 37918 - DNA, 20 bp, synthetic construct
  misc_feature 1..20: note = chemically synthesized
  source 1..20: mol_type = other DNA
aggctggatccccttgagga

SEQ ID NO: 37919 - DNA, 20 bp, synthetic construct
  misc_feature 1..20: note = chemically synthesized
  source 1..20: mol_type = other DNA
cccttgaggaaggacaccac

SEQ ID NO: 37920 - DNA, 20 bp, synthetic construct
  misc_feature 1..20: note = chemically synthesized
  source 1..20: mol_type = other DNA
ccttgaggaaggacaccact

SEQ ID NO: 37921 - DNA, 20 bp, synthetic construct
  misc_feature 1..20: note = chemically synthesized
  source 1..20: mol_type = other DNA
tctttctcccatccttccct

SEQ ID NO: 37922 - DNA, 20 bp, synthetic construct
  misc_feature 1..20: note = chemically synthesized
  source 1..20: mol_type = other DNA
ctttctcccatccttcccta

SEQ ID NO: 37923 - DNA, 20 bp, synthetic construct
  misc_feature 1..20: note = chemically synthesized
  source 1..20: mol_type = other DNA
ttctcccatccttccctaag

SEQ ID NO: 37924 - DNA, 20 bp, synthetic construct
  misc_feature 1..20: note = chemically synthesized
  source 1..20: mol_type = other DNA
tccttccctaaggagacctc

SEQ ID NO: 37925 - DNA, 20 bp, synthetic construct
  misc_feature 1..20: note = chemically synthesized
  source 1..20: mol_type = other DNA
ggagacctctggccttttac

SEQ ID NO: 37926 - DNA, 20 bp, synthetic construct
  misc_feature 1..20: note = chemically synthesized
  source 1..20: mol_type = other DNA
gagacctctggccttttacc

SEQ ID NO: 37927 - DNA, 20 bp, synthetic construct
  misc_feature 1..20: note = chemically synthesized
  source 1..20: mol_type = other DNA
agacctctggccttttacca

SEQ ID NO: 37928 - DNA, 20 bp, synthetic construct
  misc_feature 1..20: note = chemically synthesized
  source 1..20: mol_type = other DNA
accagggtaactgtgtgtac

SEQ ID NO: 37929 - DNA, 20 bp, synthetic construct
  misc_feature 1..20: note = chemically synthesized
  source 1..20: mol_type = other DNA
cagggtaactgtgtgtactg

SEQ ID NO: 37930 - DNA, 20 bp, synthetic construct
  misc_feature 1..20: note = chemically synthesized
  source 1..20: mol_type = other DNA
gtaactgtgtgtactggaga

SEQ ID NO: 37931 - DNA, 20 bp, synthetic construct
  misc_feature 1..20: note = chemically synthesized
  source 1..20: mol_type = other DNA
taactgtgtgtactggagaa

SEQ ID NO: 37932 - DNA, 20 bp, synthetic construct
  misc_feature 1..20: note = chemically synthesized
  source 1..20: mol_type = other DNA
aactgtgtgtactggagaaa

SEQ ID NO: 37933 - DNA, 20 bp, synthetic construct
  misc_feature 1..20: note = chemically synthesized
  source 1..20: mol_type = other DNA
tgtgtgtactggagaaaggg

SEQ ID NO: 37934 - DNA, 20 bp, synthetic construct
  misc_feature 1..20: note = chemically synthesized
  source 1..20: mol_type = other DNA
actggagaaagggaagtaat

SEQ ID NO: 37935 - DNA, 20 bp, synthetic construct
  misc_feature 1..20: note = chemically synthesized
  source 1..20: mol_type = other DNA
agggaagtaatgagacattt

SEQ ID NO: 37936 - DNA, 20 bp, synthetic construct
  misc_feature 1..20: note = chemically synthesized
  source 1..20: mol_type = other DNA
aagtaatgagacatttcaga

SEQ ID NO: 37937 - DNA, 20 bp, synthetic construct
  misc_feature 1..20: note = chemically synthesized
  source 1..20: mol_type = other DNA
tgagacatttcagaaagtac

SEQ ID NO: 37938 - DNA, 20 bp, synthetic construct
  misc_feature 1..20: note = chemically synthesized
  source 1..20: mol_type = other DNA
tttcagaaagtactggacac

SEQ ID NO: 37939 - DNA, 20 bp, synthetic construct
  misc_feature 1..20: note = chemically synthesized
  source 1..20: mol_type = other DNA
aagtactggacactggctct

SEQ ID NO: 37940 - DNA, 20 bp, synthetic construct
  misc_feature 1..20: note = chemically synthesized
  source 1..20: mol_type = other DNA
ctctgagctgacgttgattc

SEQ ID NO: 37941 - DNA, 20 bp, synthetic construct
  misc_feature 1..20: note = chemically synthesized
  source 1..20: mol_type = other DNA
tctgagctgacgttgattcc

SEQ ID NO: 37942 - DNA, 20 bp, synthetic construct
  misc_feature 1..20: note = chemically synthesized
  source 1..20: mol_type = other DNA
ctgagctgacgttgattcca

SEQ ID NO: 37943 - DNA, 20 bp, synthetic construct
  misc_feature 1..20: note = chemically synthesized
  source 1..20: mol_type = other DNA
gggtacccaaaacgttattg

SEQ ID NO: 37944 - DNA, 20 bp, synthetic construct
  misc_feature 1..20: note = chemically synthesized
  source 1..20: mol_type = other DNA
aaaacgttattgtggttccc

SEQ ID NO: 37945 - DNA, 20 bp, synthetic construct
  misc_feature 1..20: note = chemically synthesized
  source 1..20: mol_type = other DNA
ttattgtggttccccagtta

SEQ ID NO: 37946 - DNA, 20 bp, synthetic construct
  misc_feature 1..20: note = chemically synthesized
  source 1..20: mol_type = other DNA
ttgtggttccccagttaaag

SEQ ID NO: 37947 - DNA, 20 bp, synthetic construct
  misc_feature 1..20: note = chemically synthesized
  source 1..20: mol_type = other DNA
tgtggttccccagttaaagt

SEQ ID NO: 37948 - DNA, 20 bp, synthetic construct
  misc_feature 1..20: note = chemically synthesized
  source 1..20: mol_type = other DNA
gtggttccccagttaaagta

SEQ ID NO: 37949 - DNA, 20 bp, synthetic construct
  misc_feature 1..20: note = chemically synthesized
  source 1..20: mol_type = other DNA
tggttccccagttaaagtag

SEQ ID NO: 37950 - DNA, 20 bp, synthetic construct
  misc_feature 1..20: note = chemically synthesized
  source 1..20: mol_type = other DNA
ccagttaaagtaggggctta

SEQ ID NO: 37951 - DNA, 20 bp, synthetic construct
  misc_feature 1..20: note = chemically synthesized
  source 1..20: mol_type = other DNA
agttaaagtaggggcttatg

SEQ ID NO: 37952 - DNA, 20 bp, synthetic construct
  misc_feature 1..20: note = chemically synthesized
  source 1..20: mol_type = other DNA
gttaaagtaggggcttatgg

SEQ ID NO: 37953 - DNA, 20 bp, synthetic construct
  misc_feature 1..20: note = chemically synthesized
  source 1..20: mol_type = other DNA
aagtaggggcttatggaggt

SEQ ID NO: 37954 - DNA, 20 bp, synthetic construct
  misc_feature 1..20: note = chemically synthesized
  source 1..20: mol_type = other DNA
agtaggggcttatggaggtt

SEQ ID NO: 37955 - DNA, 20 bp, synthetic construct
  misc_feature 1..20: note = chemically synthesized
  source 1..20: mol_type = other DNA
tatggaggttaggtaattaa

SEQ ID NO: 37956 - DNA, 20 bp, synthetic construct
  misc_feature 1..20: note = chemically synthesized
  source 1..20: mol_type = other DNA
tggaggttaggtaattaatg

SEQ ID NO: 37957 - DNA, 20 bp, synthetic construct
  misc_feature 1..20: note = chemically synthesized
  source 1..20: mol_type = other DNA
ttaggtaattaatggagttt

SEQ ID NO: 37958 - DNA, 20 bp, synthetic construct
  misc_feature 1..20: note = chemically synthesized
  source 1..20: mol_type = other DNA
tttagctcatttctgactta

SEQ ID NO: 37959 - DNA, 20 bp, synthetic construct
  misc_feature 1..20: note = chemically synthesized
  source 1..20: mol_type = other DNA
agctcatttctgacttacag

SEQ ID NO: 37960 - DNA, 20 bp, synthetic construct
  misc_feature 1..20: note = chemically synthesized
  source 1..20: mol_type = other DNA
tttctgacttacagtggttc

SEQ ID NO: 37961 - DNA, 20 bp, synthetic construct
  misc_feature 1..20: note = chemically synthesized
  source 1..20: mol_type = other DNA
ctgacttacagtggttccag

SEQ ID NO: 37962 - DNA, 20 bp, synthetic construct
  misc_feature 1..20: note = chemically synthesized
  source 1..20: mol_type = other DNA
tgacttacagtggttccagt

SEQ ID NO: 37963 - DNA, 20 bp, synthetic construct
  misc_feature 1..20: note = chemically synthesized
  source 1..20: mol_type = other DNA
cagtggttccagtgggtccc

SEQ ID NO: 37964 - DNA, 20 bp, synthetic construct
  misc_feature 1..20: note = chemically synthesized
  source 1..20: mol_type = other DNA
gggtccctggacttatcctc

SEQ ID NO: 37965 - DNA, 20 bp, synthetic construct
  misc_feature 1..20: note = chemically synthesized
  source 1..20: mol_type = other DNA
ttatcctctggtcattttcc

SEQ ID NO: 37966 - DNA, 20 bp, synthetic construct
  misc_feature 1..20: note = chemically synthesized
  source 1..20: mol_type = other DNA
gccaaaatgcataatttgta

SEQ ID NO: 37967 - DNA, 20 bp, synthetic construct
  misc_feature 1..20: note = chemically synthesized
  source 1..20: mol_type = other DNA
atttgtatagacatacttat

SEQ ID NO: 37968 - DNA, 20 bp, synthetic construct
  misc_feature 1..20: note = chemically synthesized
  source 1..20: mol_type = other DNA
gtatagacatacttattagc

SEQ ID NO: 37969 - DNA, 20 bp, synthetic construct
  misc_feature 1..20: note = chemically synthesized
  source 1..20: mol_type = other DNA
tagacatacttattagctgg

SEQ ID NO: 37970 - DNA, 20 bp, synthetic construct
  misc_feature 1..20: note = chemically synthesized
  source 1..20: mol_type = other DNA
agctggcagaaatgccacat

SEQ ID NO: 37971 - DNA, 20 bp, synthetic construct
  misc_feature 1..20: note = chemically synthesized
  source 1..20: mol_type = other DNA
tgccacattggctccctgac

SEQ ID NO: 37972 - DNA, 20 bp, synthetic construct
  misc_feature 1..20: note = chemically synthesized
  source 1..20: mol_type = other DNA
cacattggctccctgactgg

SEQ ID NO: 37973 - DNA, 20 bp, synthetic construct
  misc_feature 1..20: note = chemically synthesized
  source 1..20: mol_type = other DNA
acattggctccctgactggt

SEQ ID NO: 37974 - DNA, 20 bp, synthetic construct
  misc_feature 1..20: note = chemically synthesized
  source 1..20: mol_type = other DNA
ggctccctgactggtaggat

SEQ ID NO: 37975 - DNA, 20 bp, synthetic construct
  misc_feature 1..20: note = chemically synthesized
  source 1..20: mol_type = other DNA
gctccctgactggtaggatg

SEQ ID NO: 37976 - DNA, 20 bp, synthetic construct
  misc_feature 1..20: note = chemically synthesized
  source 1..20: mol_type = other DNA
ctccctgactggtaggatga

SEQ ID NO: 37977 - DNA, 20 bp, synthetic construct
  misc_feature 1..20: note = chemically synthesized
  source 1..20: mol_type = other DNA
tggtaggatgagggctatta

SEQ ID NO: 37978 - DNA, 20 bp, synthetic construct
  misc_feature 1..20: note = chemically synthesized
  source 1..20: mol_type = other DNA
taggatgagggctattatgg

SEQ ID NO: 37979 - DNA, 20 bp, synthetic construct
  misc_feature 1..20: note = chemically synthesized
  source 1..20: mol_type = other DNA
aggatgagggctattatggt

SEQ ID NO: 37980 - DNA, 20 bp, synthetic construct
  misc_feature 1..20: note = chemically synthesized
  source 1..20: mol_type = other DNA
tgagggctattatggtggga

SEQ ID NO: 37981 - DNA, 20 bp, synthetic construct
  misc_feature 1..20: note = chemically synthesized
  source 1..20: mol_type = other DNA
gagggctattatggtgggaa

SEQ ID NO: 37982 - DNA, 20 bp, synthetic construct
  misc_feature 1..20: note = chemically synthesized
  source 1..20: mol_type = other DNA
ttatggtgggaaaggccaaa

SEQ ID NO: 37983 - DNA, 20 bp, synthetic construct
  misc_feature 1..20: note = chemically synthesized
  source 1..20: mol_type = other DNA
tggtgggaaaggccaaacag

SEQ ID NO: 37984 - DNA, 20 bp, synthetic construct
  misc_feature 1..20: note = chemically synthesized
  source 1..20: mol_type = other DNA
aaaggccaaacagaagccat

SEQ ID NO: 37985 - DNA, 20 bp, synthetic construct
  misc_feature 1..20: note = chemically synthesized
  source 1..20: mol_type = other DNA
aggccaaacagaagccatta

SEQ ID NO: 37986 - DNA, 20 bp, synthetic construct
  misc_feature 1..20: note = chemically synthesized
  source 1..20: mol_type = other DNA
ccattagagctgtctctacc

SEQ ID NO: 37987 - DNA, 20 bp, synthetic construct
  misc_feature 1..20: note = chemically synthesized
  source 1..20: mol_type = other DNA
caaaaacaatatcccatccc

SEQ ID NO: 37988 - DNA, 20 bp, synthetic construct
  misc_feature 1..20: note = chemically synthesized
  source 1..20: mol_type = other DNA
aaaacaatatcccatccctg

SEQ ID NO: 37989 - DNA, 20 bp, synthetic construct
  misc_feature 1..20: note = chemically synthesized
  source 1..20: mol_type = other DNA
aaacaatatcccatccctgg

SEQ ID NO: 37990 - DNA, 20 bp, synthetic construct
  misc_feature 1..20: note = chemically synthesized
  source 1..20: mol_type = other DNA
aacaatatcccatccctgga

SEQ ID NO: 37991 - DNA, 20 bp, synthetic construct
  misc_feature 1..20: note = chemically synthesized
  source 1..20: mol_type = other DNA
tcccatccctggagggactg

SEQ ID NO: 37992 - DNA, 20 bp, synthetic construct
  misc_feature 1..20: note = chemically synthesized
  source 1..20: mol_type = other DNA
cctggagggactgaagtgat

SEQ ID NO: 37993 - DNA, 20 bp, synthetic construct
  misc_feature 1..20: note = chemically synthesized
  source 1..20: mol_type = other DNA
aagtgattagtgtcaccatc

SEQ ID NO: 37994 - DNA, 20 bp, synthetic construct
  misc_feature 1..20: note = chemically synthesized
  source 1..20: mol_type = other DNA
agtgattagtgtcaccatca

SEQ ID NO: 37995 - DNA, 20 bp, synthetic construct
  misc_feature 1..20: note = chemically synthesized
  source 1..20: mol_type = other DNA
tgtcaccatcaaggacttga

SEQ ID NO: 37996 - DNA, 20 bp, synthetic construct
  misc_feature 1..20: note = chemically synthesized
  source 1..20: mol_type = other DNA
catcaaggacttgaaagacg

SEQ ID NO: 37997 - DNA, 20 bp, synthetic construct
  misc_feature 1..20: note = chemically synthesized
  source 1..20: mol_type = other DNA
atcaaggacttgaaagacgc

SEQ ID NO: 37998 - DNA, 20 bp, synthetic construct
  misc_feature 1..20: note = chemically synthesized
  source 1..20: mol_type = other DNA
tcaaggacttgaaagacgca

SEQ ID NO: 37999 - DNA, 20 bp, synthetic construct
  misc_feature 1..20: note = chemically synthesized
  source 1..20: mol_type = other DNA
caaggacttgaaagacgcag

SEQ ID NO: 38000 - DNA, 20 bp, synthetic construct
  misc_feature 1..20: note = chemically synthesized
  source 1..20: mol_type = other DNA
ggacttgaaagacgcagggg

SEQ ID NO: 38001 - DNA, 20 bp, synthetic construct
  misc_feature 1..20: note = chemically synthesized
  source 1..20: mol_type = other DNA
actctcccatttgacctgtg

SEQ ID NO: 38002 - DNA, 20 bp, synthetic construct
  misc_feature 1..20: note = chemically synthesized
  source 1..20: mol_type = other DNA
tctcccatttgacctgtgca

SEQ ID NO: 38003 - DNA, 20 bp, synthetic construct
  misc_feature 1..20: note = chemically synthesized
  source 1..20: mol_type = other DNA
ctcccatttgacctgtgcag

SEQ ID NO: 38004 - DNA, 20 bp, synthetic construct
  misc_feature 1..20: note = chemically synthesized
  source 1..20: mol_type = other DNA
catttgacctgtgcagagga

SEQ ID NO: 38005 - DNA, 20 bp, synthetic construct
  misc_feature 1..20: note = chemically synthesized
  source 1..20: mol_type = other DNA
tgacctgtgcagaggacaga

SEQ ID NO: 38006 - DNA, 20 bp, synthetic construct
  misc_feature 1..20: note = chemically synthesized
  source 1..20: mol_type = other DNA
tgcagaggacagatggatct

SEQ ID NO: 38007 - DNA, 20 bp, synthetic construct
  misc_feature 1..20: note = chemically synthesized
  source 1..20: mol_type = other DNA
agatggatcttggaaaatga

SEQ ID NO: 38008 - DNA, 20 bp, synthetic construct
  misc_feature 1..20: note = chemically synthesized
  source 1..20: mol_type = other DNA
tggatcttggaaaatgatgg

SEQ ID NO: 38009 - DNA, 20 bp, synthetic construct
  misc_feature 1..20: note = chemically synthesized
  source 1..20: mol_type = other DNA
aaatgatggtggattatttt

SEQ ID NO: 38010 - DNA, 20 bp, synthetic construct
  misc_feature 1..20: note = chemically synthesized
  source 1..20: mol_type = other DNA
ggattattttaagcttaacc

SEQ ID NO: 38011 - DNA, 20 bp, synthetic construct
  misc_feature 1..20: note = chemically synthesized
  source 1..20: mol_type = other DNA
ttattttaagcttaaccaag

SEQ ID NO: 38012 - DNA, 20 bp, synthetic construct
  misc_feature 1..20: note = chemically synthesized
  source 1..20: mol_type = other DNA
ccaagtggtgactccaattg

SEQ ID NO: 38013 - DNA, 20 bp, synthetic construct
  misc_feature 1..20: note = chemically synthesized
  source 1..20: mol_type = other DNA
tccaattgcagctgctctac

SEQ ID NO: 38014 - DNA, 20 bp, synthetic construct
  misc_feature 1..20: note = chemically synthesized
  source 1..20: mol_type = other DNA
tgcagctgctctaccagttg

SEQ ID NO: 38015 - DNA, 20 bp, synthetic construct
  misc_feature 1..20: note = chemically synthesized
  source 1..20: mol_type = other DNA
cagttgtggttttgttgctt

SEQ ID NO: 38016 - DNA, 20 bp, synthetic construct
  misc_feature 1..20: note = chemically synthesized
  source 1..20: mol_type = other DNA
gagcaaattaacacatctcc

SEQ ID NO: 38017 - DNA, 20 bp, synthetic construct
  misc_feature 1..20: note = chemically synthesized
  source 1..20: mol_type = other DNA
ttaacacatctcctggtgcc

SEQ ID NO: 38018 - DNA, 20 bp, synthetic construct
  misc_feature 1..20: note = chemically synthesized
  source 1..20: mol_type = other DNA
atctcctggtgcctggtatg

SEQ ID NO: 38019 - DNA, 20 bp, synthetic construct
  misc_feature 1..20: note = chemically synthesized
  source 1..20: mol_type = other DNA
ggtgcctggtatgcagccat

SEQ ID NO: 38020 - DNA, 20 bp, synthetic construct
  misc_feature 1..20: note = chemically synthesized
  source 1..20: mol_type = other DNA
ctggtatgcagccattggct

SEQ ID NO: 38021 - DNA, 20 bp, synthetic construct
  misc_feature 1..20: note = chemically synthesized
  source 1..20: mol_type = other DNA
tatgcagccattggcttggc

SEQ ID NO: 38022 - DNA, 20 bp, synthetic construct
  misc_feature 1..20: note = chemically synthesized
  source 1..20: mol_type = other DNA
gcagccattggcttggcaag

SEQ ID NO: 38023 - DNA, 20 bp, synthetic construct
  misc_feature 1..20: note = chemically synthesized
  source 1..20: mol_type = other DNA
ttttctccattcctgtccat

SEQ ID NO: 38024 - DNA, 20 bp, synthetic construct
  misc_feature 1..20: note = chemically synthesized
  source 1..20: mol_type = other DNA
ttcctgtccataagacccac

SEQ ID NO: 38025 - DNA, 20 bp, synthetic construct
  misc_feature 1..20: note = chemically synthesized
  source 1..20: mol_type = other DNA
ctgtccataagacccaccag

SEQ ID NO: 38026 - DNA, 20 bp, synthetic construct
  misc_feature 1..20: note = chemically synthesized
  source 1..20: mol_type = other DNA
caccagaagcaatttgcctt

SEQ ID NO: 38027 - DNA, 20 bp, synthetic construct
  misc_feature 1..20: note = chemically synthesized
  source 1..20: mol_type = other DNA
gcaatttgccttcagctgac

SEQ ID NO: 38028 - DNA, 20 bp, synthetic construct
  misc_feature 1..20: note = chemically synthesized
  source 1..20: mol_type = other DNA
caatttgccttcagctgaca

SEQ ID NO: 38029 - DNA, 20 bp, synthetic construct
  misc_feature 1..20: note = chemically synthesized
  source 1..20: mol_type = other DNA
ttgccttcagctgacaaggc

SEQ ID NO: 38030 - DNA, 20 bp, synthetic construct
  misc_feature 1..20: note = chemically synthesized
  source 1..20: mol_type = other DNA
atacctttaccaccctacct

SEQ ID NO: 38031 - DNA, 20 bp, synthetic construct
  misc_feature 1..20: note = chemically synthesized
  source 1..20: mol_type = other DNA
tacctttaccaccctacctc

SEQ ID NO: 38032 - DNA, 20 bp, synthetic construct
  misc_feature 1..20: note = chemically synthesized
  source 1..20: mol_type = other DNA
acctttaccaccctacctca

SEQ ID NO: 38033 - DNA, 20 bp, synthetic construct
  misc_feature 1..20: note = chemically synthesized
  source 1..20: mol_type = other DNA
cctttaccaccctacctcag

SEQ ID NO: 38034 - DNA, 20 bp, synthetic construct
  misc_feature 1..20: note = chemically synthesized
  source 1..20: mol_type = other DNA
tcaggggtgtatcaactctc

SEQ ID NO: 38035 - DNA, 20 bp, synthetic construct
  misc_feature 1..20: note = chemically synthesized
  source 1..20: mol_type = other DNA
ctttgtgtcataatcttatt

SEQ ID NO: 38036 - DNA, 20 bp, synthetic construct
  misc_feature 1..20: note = chemically synthesized
  source 1..20: mol_type = other DNA
ttgtgtcataatcttatttg

SEQ ID NO: 38037 - DNA, 20 bp, synthetic construct
  misc_feature 1..20: note = chemically synthesized
  source 1..20: mol_type = other DNA
gtgtcataatcttatttgga

SEQ ID NO: 38038 - DNA, 20 bp, synthetic construct
  misc_feature 1..20: note = chemically synthesized
  source 1..20: mol_type = other DNA
tgctcgcttttcacttccac

SEQ ID NO: 38039 - DNA, 20 bp, synthetic construct
  misc_feature 1..20: note = chemically synthesized
  source 1..20: mol_type = other DNA
acttccacgagatataacac

SEQ ID NO: 38040 - DNA, 20 bp, synthetic construct
  misc_feature 1..20: note = chemically synthesized
  source 1..20: mol_type = other DNA
attcatgacattatgatgat

SEQ ID NO: 38041 - DNA, 20 bp, synthetic construct
  misc_feature 1..20: note = chemically synthesized
  source 1..20: mol_type = other DNA
gacattatgatgattggata

SEQ ID NO: 38042 - DNA, 20 bp, synthetic construct
  misc_feature 1..20: note = chemically synthesized
  source 1..20: mol_type = other DNA
ttatgatgattggatacagt

SEQ ID NO: 38043 - DNA, 20 bp, synthetic construct
  misc_feature 1..20: note = chemically synthesized
  source 1..20: mol_type = other DNA
gatgattggatacagtgagc

SEQ ID NO: 38044 - DNA, 20 bp, synthetic construct
  misc_feature 1..20: note = chemically synthesized
  source 1..20: mol_type = other DNA
gattggatacagtgagcaag

SEQ ID NO: 38045 - DNA, 20 bp, synthetic construct
  misc_feature 1..20: note = chemically synthesized
  source 1..20: mol_type = other DNA
tggatacagtgagcaagaag

SEQ ID NO: 38046 - DNA, 20 bp, synthetic construct
  misc_feature 1..20: note = chemically synthesized
  source 1..20: mol_type = other DNA
agcaaacacactgaacttat

SEQ ID NO: 38047 - DNA, 20 bp, synthetic construct
  misc_feature 1..20: note = chemically synthesized
  source 1..20: mol_type = other DNA
aacacactgaacttattggt

SEQ ID NO: 38048 - DNA, 20 bp, synthetic construct
  misc_feature 1..20: note = chemically synthesized
  source 1..20: mol_type = other DNA
ttggtgagacatttgtatgc

SEQ ID NO: 38049 - DNA, 20 bp, synthetic construct
  misc_feature 1..20: note = chemically synthesized
  source 1..20: mol_type = other DNA
ggtgagacatttgtatgcca

SEQ ID NO: 38050 - DNA, 20 bp, synthetic construct
  misc_feature 1..20: note = chemically synthesized
  source 1..20: mol_type = other DNA
gtgagacatttgtatgccag

SEQ ID NO: 38051 - DNA, 20 bp, synthetic construct
  misc_feature 1..20: note = chemically synthesized
  source 1..20: mol_type = other DNA
gacatttgtatgccagagga

SEQ ID NO: 38052 - DNA, 20 bp, synthetic construct
  misc_feature 1..20: note = chemically synthesized
  source 1..20: mol_type = other DNA
acatttgtatgccagaggat

SEQ ID NO: 38053 - DNA, 20 bp, synthetic construct
  misc_feature 1..20: note = chemically synthesized
  source 1..20: mol_type = other DNA
cagaggatgggaaataaatc

SEQ ID NO: 38054 - DNA, 20 bp, synthetic construct
  misc_feature 1..20: note = chemically synthesized
  source 1..20: mol_type = other DNA
aaataaatccagctaaaatt

SEQ ID NO: 38055 - DNA, 20 bp, synthetic construct
  misc_feature 1..20: note = chemically synthesized
  source 1..20: mol_type = other DNA
aataaatccagctaaaattt

SEQ ID NO: 38056 - DNA, 20 bp, synthetic construct
  misc_feature 1..20: note = chemically synthesized
  source 1..20: mol_type = other DNA
ataaatccagctaaaattta

SEQ ID NO: 38057 - DNA, 20 bp, synthetic construct
  misc_feature 1..20: note = chemically synthesized
  source 1..20: mol_type = other DNA
aatttagggactttctacct

SEQ ID NO: 38058 - DNA, 20 bp, synthetic construct
  misc_feature 1..20: note = chemically synthesized
  source 1..20: mol_type = other DNA
ttctacctcggtaaaatttc

SEQ ID NO: 38059 - DNA, 20 bp, synthetic construct
  misc_feature 1..20: note = chemically synthesized
  source 1..20: mol_type = other DNA
tctacctcggtaaaatttct

SEQ ID NO: 38060 - DNA, 20 bp, synthetic construct
  misc_feature 1..20: note = chemically synthesized
  source 1..20: mol_type = other DNA
ctacctcggtaaaatttcta

SEQ ID NO: 38061 - DNA, 20 bp, synthetic construct
  misc_feature 1..20: note = chemically synthesized
  source 1..20: mol_type = other DNA
cggtaaaatttctagggttc

SEQ ID NO: 38062 - DNA, 20 bp, synthetic construct
  misc_feature 1..20: note = chemically synthesized
  source 1..20: mol_type = other DNA
taaaatttctagggttccag

SEQ ID NO: 38063 - DNA, 20 bp, synthetic construct
  misc_feature 1..20: note = chemically synthesized
  source 1..20: mol_type = other DNA
ttctagggttccagtggcat

SEQ ID NO: 38064 - DNA, 20 bp, synthetic construct
  misc_feature 1..20: note = chemically synthesized
  source 1..20: mol_type = other DNA
ttccagtggcatgagaccta

SEQ ID NO: 38065 - DNA, 20 bp, synthetic construct
  misc_feature 1..20: note = chemically synthesized
  source 1..20: mol_type = other DNA
ccagtggcatgagacctatg

SEQ ID NO: 38066 - DNA, 20 bp, synthetic construct
  misc_feature 1..20: note = chemically synthesized
  source 1..20: mol_type = other DNA
cctatggagatattccttct

SEQ ID NO: 38067 - DNA, 20 bp, synthetic construct
  misc_feature 1..20: note = chemically synthesized
  source 1..20: mol_type = other DNA
ctatggagatattccttcta

SEQ ID NO: 38068 - DNA, 20 bp, synthetic construct
  misc_feature 1..20: note = chemically synthesized
  source 1..20: mol_type = other DNA
gagatattccttctaaggtg

SEQ ID NO: 38069 - DNA, 20 bp, synthetic construct
  misc_feature 1..20: note = chemically synthesized
  source 1..20: mol_type = other DNA
gaagcataacttgctgcgtt

SEQ ID NO: 38070 - DNA, 20 bp, synthetic construct
  misc_feature 1..20: note = chemically synthesized
  source 1..20: mol_type = other DNA
gtttggcccctcttacaacc

SEQ ID NO: 38071 - DNA, 20 bp, synthetic construct
  misc_feature 1..20: note = chemically synthesized
  source 1..20: mol_type = other DNA
ggcccctcttacaaccaaga

SEQ ID NO: 38072 - DNA, 20 bp, synthetic construct
  misc_feature 1..20: note = chemically synthesized
  source 1..20: mol_type = other DNA
cccctcttacaaccaagaaa

SEQ ID NO: 38073 - DNA, 20 bp, synthetic construct
  misc_feature 1..20: note = chemically synthesized
  source 1..20: mol_type = other DNA
ccctcttacaaccaagaaag

SEQ ID NO: 38074 - DNA, 20 bp, synthetic construct
  misc_feature 1..20: note = chemically synthesized
  source 1..20: mol_type = other DNA
caagaaagaggcacaatgcc

SEQ ID NO: 38075 - DNA, 20 bp, synthetic construct
  misc_feature 1..20: note = chemically synthesized
  source 1..20: mol_type = other DNA
gaaagaggcacaatgcctgg

SEQ ID NO: 38076 - DNA, 20 bp, synthetic construct
  misc_feature 1..20: note = chemically synthesized
  source 1..20: mol_type = other DNA
aaagaggcacaatgcctggt

SEQ ID NO: 38077 - DNA, 20 bp, synthetic construct
  misc_feature 1..20: note = chemically synthesized
  source 1..20: mol_type = other DNA
caatgcctggtgggcctatt

SEQ ID NO: 38078 - DNA, 20 bp, synthetic construct
  misc_feature 1..20: note = chemically synthesized
  source 1..20: mol_type = other DNA
tggtgggcctatttggattt

SEQ ID NO: 38079 - DNA, 20 bp, synthetic construct
  misc_feature 1..20: note = chemically synthesized
  source 1..20: mol_type = other DNA
gtgggcctatttggattttg

SEQ ID NO: 38080 - DNA, 20 bp, synthetic construct
  misc_feature 1..20: note = chemically synthesized
  source 1..20: mol_type = other DNA
tgggcctatttggattttgg

SEQ ID NO: 38081 - DNA, 20 bp, synthetic construct
  misc_feature 1..20: note = chemically synthesized
  source 1..20: mol_type = other DNA
gaggcaacacattcctcgtt

SEQ ID NO: 38082 - DNA, 20 bp, synthetic construct
  misc_feature 1..20: note = chemically synthesized
  source 1..20: mol_type = other DNA
aggcaacacattcctcgttt

SEQ ID NO: 38083 - DNA, 20 bp, synthetic construct
  misc_feature 1..20: note = chemically synthesized
  source 1..20: mol_type = other DNA
ctcgtttgggtgtgttactc

SEQ ID NO: 38084 - DNA, 20 bp, synthetic construct
  misc_feature 1..20: note = chemically synthesized
  source 1..20: mol_type = other DNA
gttactctggcccatttatc

SEQ ID NO: 38085 - DNA, 20 bp, synthetic construct
  misc_feature 1..20: note = chemically synthesized
  source 1..20: mol_type = other DNA
ccatttatcgagtgacctga

SEQ ID NO: 38086 - DNA, 20 bp, synthetic construct
  misc_feature 1..20: note = chemically synthesized
  source 1..20: mol_type = other DNA
catttatcgagtgacctgaa

SEQ ID NO: 38087 - DNA, 20 bp, synthetic construct
  misc_feature 1..20: note = chemically synthesized
  source 1..20: mol_type = other DNA
cgagtgacctgaaaggctgc

SEQ ID NO: 38088 - DNA, 20 bp, synthetic construct
  misc_feature 1..20: note = chemically synthesized
  source 1..20: mol_type = other DNA
cctgaaaggctgccagattt

SEQ ID NO: 38089 - DNA, 20 bp, synthetic construct
  misc_feature 1..20: note = chemically synthesized
  source 1..20: mol_type = other DNA
aaggctgccagatttaagtg

SEQ ID NO: 38090 - DNA, 20 bp, synthetic construct
  misc_feature 1..20: note = chemically synthesized
  source 1..20: mol_type = other DNA
tgccagatttaagtgcagtc

SEQ ID NO: 38091 - DNA, 20 bp, synthetic construct
  misc_feature 1..20: note = chemically synthesized
  source 1..20: mol_type = other DNA
ttaagtgcagtctagaacaa

SEQ ID NO: 38092 - DNA, 20 bp, synthetic construct
  misc_feature 1..20: note = chemically synthesized
  source 1..20: mol_type = other DNA
agtgcagtctagaacaaaag

SEQ ID NO: 38093 - DNA, 20 bp, synthetic construct
  misc_feature 1..20: note = chemically synthesized
  source 1..20: mol_type = other DNA
gtgcagtctagaacaaaaga

SEQ ID NO: 38094 - DNA, 20 bp, synthetic construct
  misc_feature 1..20: note = chemically synthesized
  source 1..20: mol_type = other DNA
aacaaaagaaggctctgaaa

SEQ ID NO: 38095 - DNA, 20 bp, synthetic construct
  misc_feature 1..20: note = chemically synthesized
  source 1..20: mol_type = other DNA
acaaaagaaggctctgaaac

SEQ ID NO: 38096 - DNA, 20 bp, synthetic construct
  misc_feature 1..20: note = chemically synthesized
  source 1..20: mol_type = other DNA
agaaggctctgaaacaggtc

SEQ ID NO: 38097 - DNA, 20 bp, synthetic construct
  misc_feature 1..20: note = chemically synthesized
  source 1..20: mol_type = other DNA
gaaggctctgaaacaggtcc

SEQ ID NO: 38098 - DNA, 20 bp, synthetic construct
  misc_feature 1..20: note = chemically synthesized
  source 1..20: mol_type = other DNA
acaggtccaggctgctgtga

SEQ ID NO: 38099 - DNA, 20 bp, synthetic construct
  misc_feature 1..20: note = chemically synthesized
  source 1..20: mol_type = other DNA
gtgaaagctgctctgccatt

SEQ ID NO: 38100 - DNA, 20 bp, synthetic construct
  misc_feature 1..20: note = chemically synthesized
  source 1..20: mol_type = other DNA
tgaaagctgctctgccattt

SEQ ID NO: 38101 - DNA, 20 bp, synthetic construct
  misc_feature 1..20: note = chemically synthesized
  source 1..20: mol_type = other DNA
atttgggccacatgaccccg

SEQ ID NO: 38102 - DNA, 20 bp, synthetic construct
  misc_feature 1..20: note = chemically synthesized
  source 1..20: mol_type = other DNA
acatgaccccgcagatccaa

SEQ ID NO: 38103 - DNA, 20 bp, synthetic construct
  misc_feature 1..20: note = chemically synthesized
  source 1..20: mol_type = other DNA
ccgcagatccaatggtgctt

SEQ ID NO: 38104 - DNA, 20 bp, synthetic construct
  misc_feature 1..20: note = chemically synthesized
  source 1..20: mol_type = other DNA
cgcagatccaatggtgcttg

SEQ ID NO: 38105 - DNA, 20 bp, synthetic construct
  misc_feature 1..20: note = chemically synthesized
  source 1..20: mol_type = other DNA
tccaatggtgcttgaggtgt

SEQ ID NO: 38106 - DNA, 20 bp, synthetic construct
  misc_feature 1..20: note = chemically synthesized
  source 1..20: mol_type = other DNA
aatggtgcttgaggtgtcag

SEQ ID NO: 38107 - DNA, 20 bp, synthetic construct
  misc_feature 1..20: note = chemically synthesized
  source 1..20: mol_type = other DNA
ggtgcttgaggtgtcagtgg

SEQ ID NO: 38108 - DNA, 20 bp, synthetic construct
  misc_feature 1..20: note = chemically synthesized
  source 1..20: mol_type = other DNA
cttgaggtgtcagtggcaga

SEQ ID NO: 38109 - DNA, 20 bp, synthetic construct
  misc_feature 1..20: note = chemically synthesized
  source 1..20: mol_type = other DNA
ttgaggtgtcagtggcagat

SEQ ID NO: 38110 - DNA, 20 bp, synthetic construct
  misc_feature 1..20: note = chemically synthesized
  source 1..20: mol_type = other DNA
tgaggtgtcagtggcagata

SEQ ID NO: 38111 - DNA, 20 bp, synthetic construct
  misc_feature 1..20: note = chemically synthesized
  source 1..20: mol_type = other DNA
tggcagatagggatgctgtt

SEQ ID NO: 38112 - DNA, 20 bp, synthetic construct
  misc_feature 1..20: note = chemically synthesized
  source 1..20: mol_type = other DNA
gcagatagggatgctgtttg

SEQ ID NO: 38113 - DNA, 20 bp, synthetic construct
  misc_feature 1..20: note = chemically synthesized
  source 1..20: mol_type = other DNA
gggatgctgtttggagcctt

SEQ ID NO: 38114 - DNA, 20 bp, synthetic construct
  misc_feature 1..20: note = chemically synthesized
  source 1..20: mol_type = other DNA
atgctgtttggagcctttgg

SEQ ID NO: 38115 - DNA, 20 bp, synthetic construct
  misc_feature 1..20: note = chemically synthesized
  source 1..20: mol_type = other DNA
tgctgtttggagcctttggc

SEQ ID NO: 38116 - DNA, 20 bp, synthetic construct
  misc_feature 1..20: note = chemically synthesized
  source 1..20: mol_type = other DNA
gagcctttggcaggccccca

SEQ ID NO: 38117 - DNA, 20 bp, synthetic construct
  misc_feature 1..20: note = chemically synthesized
  source 1..20: mol_type = other DNA
agcctttggcaggcccccat

SEQ ID NO: 38118 - DNA, 20 bp, synthetic construct
  misc_feature 1..20: note = chemically synthesized
  source 1..20: mol_type = other DNA
aggcccccataggtgaatca

SEQ ID NO: 38119 - DNA, 20 bp, synthetic construct
  misc_feature 1..20: note = chemically synthesized
  source 1..20: mol_type = other DNA
cccccataggtgaatcacag

SEQ ID NO: 38120 - DNA, 20 bp, synthetic construct
  misc_feature 1..20: note = chemically synthesized
  source 1..20: mol_type = other DNA
cccataggtgaatcacagtg

SEQ ID NO: 38121 - DNA, 20 bp, synthetic construct
  misc_feature 1..20: note = chemically synthesized
  source 1..20: mol_type = other DNA
tgaatcacagtggagacctc

SEQ ID NO: 38122 - DNA, 20 bp, synthetic construct
  misc_feature 1..20: note = chemically synthesized
  source 1..20: mol_type = other DNA
gaatcacagtggagacctct

SEQ ID NO: 38123 - DNA, 20 bp, synthetic construct
  misc_feature 1..20: note = chemically synthesized
  source 1..20: mol_type = other DNA
agtggagacctctaggattt

SEQ ID NO: 38124 - DNA, 20 bp, synthetic construct
  misc_feature 1..20: note = chemically synthesized
  source 1..20: mol_type = other DNA
tggagacctctaggattttg

SEQ ID NO: 38125 - DNA, 20 bp, synthetic construct
  misc_feature 1..20: note = chemically synthesized
  source 1..20: mol_type = other DNA
gacctctaggattttggagc

SEQ ID NO: 38126 - DNA, 20 bp, synthetic construct
  misc_feature 1..20: note = chemically synthesized
  source 1..20: mol_type = other DNA
acctctaggattttggagca

SEQ ID NO: 38127 - DNA, 20 bp, synthetic construct
  misc_feature 1..20: note = chemically synthesized
  source 1..20: mol_type = other DNA
gcaaggccctgccacttctg

SEQ ID NO: 38128 - DNA, 20 bp, synthetic construct
  misc_feature 1..20: note = chemically synthesized
  source 1..20: mol_type = other DNA
cagataactactctcctttt

SEQ ID NO: 38129 - DNA, 20 bp, synthetic construct
  misc_feature 1..20: note = chemically synthesized
  source 1..20: mol_type = other DNA
gataactactctccttttga

SEQ ID NO: 38130 - DNA, 20 bp, synthetic construct
  misc_feature 1..20: note = chemically synthesized
  source 1..20: mol_type = other DNA
actactctccttttgagaga

SEQ ID NO: 38131 - DNA, 20 bp, synthetic construct
  misc_feature 1..20: note = chemically synthesized
  source 1..20: mol_type = other DNA
tccttttgagagacagctat

SEQ ID NO: 38132 - DNA, 20 bp, synthetic construct
  misc_feature 1..20: note = chemically synthesized
  source 1..20: mol_type = other DNA
gacagctattggtctgttat

SEQ ID NO: 38133 - DNA, 20 bp, synthetic construct
  misc_feature 1..20: note = chemically synthesized
  source 1..20: mol_type = other DNA
acagctattggtctgttatt

SEQ ID NO: 38134 - DNA, 20 bp, synthetic construct
  misc_feature 1..20: note = chemically synthesized
  source 1..20: mol_type = other DNA
attggtctgttattgggctt

SEQ ID NO: 38135 - DNA, 20 bp, synthetic construct
  misc_feature 1..20: note = chemically synthesized
  source 1..20: mol_type = other DNA
ggtctgttattgggctttgg

SEQ ID NO: 38136 - DNA, 20 bp, synthetic construct
  misc_feature 1..20: note = chemically synthesized
  source 1..20: mol_type = other DNA
ggtaactgaacgtttgactg

SEQ ID NO: 38137 - DNA, 20 bp, synthetic construct
  misc_feature 1..20: note = chemically synthesized
  source 1..20: mol_type = other DNA
gtaactgaacgtttgactgt

SEQ ID NO: 38138 - DNA, 20 bp, synthetic construct
  misc_feature 1..20: note = chemically synthesized
  source 1..20: mol_type = other DNA
acgtttgactgtgggtcata

SEQ ID NO: 38139 - DNA, 20 bp, synthetic construct
  misc_feature 1..20: note = chemically synthesized
  source 1..20: mol_type = other DNA
tgaacctgcctatcatgaac

SEQ ID NO: 38140 - DNA, 20 bp, synthetic construct
  misc_feature 1..20: note = chemically synthesized
  source 1..20: mol_type = other DNA
tggttgctttctgacccatc

SEQ ID NO: 38141 - DNA, 20 bp, synthetic construct
  misc_feature 1..20: note = chemically synthesized
  source 1..20: mol_type = other DNA
ttctgacccatctagccatg

SEQ ID NO: 38142 - DNA, 20 bp, synthetic construct
  misc_feature 1..20: note = chemically synthesized
  source 1..20: mol_type = other DNA
tgacccatctagccatgaag

SEQ ID NO: 38143 - DNA, 20 bp, synthetic construct
  misc_feature 1..20: note = chemically synthesized
  source 1..20: mol_type = other DNA
gacccatctagccatgaagt

SEQ ID NO: 38144 - DNA, 20 bp, synthetic construct
  misc_feature 1..20: note = chemically synthesized
  source 1..20: mol_type = other DNA
catctagccatgaagtgggt

SEQ ID NO: 38145 - DNA, 20 bp, synthetic construct
  misc_feature 1..20: note = chemically synthesized
  source 1..20: mol_type = other DNA
agccatgaagtgggtcagca

SEQ ID NO: 38146 - DNA, 20 bp, synthetic construct
  misc_feature 1..20: note = chemically synthesized
  source 1..20: mol_type = other DNA
catgaagtgggtcagcacag

SEQ ID NO: 38147 - DNA, 20 bp, synthetic construct
  misc_feature 1..20: note = chemically synthesized
  source 1..20: mol_type = other DNA
ggcatttcatcatcaaattg

SEQ ID NO: 38148 - DNA, 20 bp, synthetic construct
  misc_feature 1..20: note = chemically synthesized
  source 1..20: mol_type = other DNA
atttcatcatcaaattgaag

SEQ ID NO: 38149 - DNA, 20 bp, synthetic construct
  misc_feature 1..20: note = chemically synthesized
  source 1..20: mol_type = other DNA
tgaagtggtgtgtatgtgat

SEQ ID NO: 38150 - DNA, 20 bp, synthetic construct
  misc_feature 1..20: note = chemically synthesized
  source 1..20: mol_type = other DNA
gaagtggtgtgtatgtgatc

SEQ ID NO: 38151 - DNA, 20 bp, synthetic construct
  misc_feature 1..20: note = chemically synthesized
  source 1..20: mol_type = other DNA
gtgtgtatgtgatcgggctt

SEQ ID NO: 38152 - DNA, 20 bp, synthetic construct
  misc_feature 1..20: note = chemically synthesized
  source 1..20: mol_type = other DNA
tgtatgtgatcgggcttgag

SEQ ID NO: 38153 - DNA, 20 bp, synthetic construct
  misc_feature 1..20: note = chemically synthesized
  source 1..20: mol_type = other DNA
gtatgtgatcgggcttgagc

SEQ ID NO: 38154 - DNA, 20 bp, synthetic construct
  misc_feature 1..20: note = chemically synthesized
  source 1..20: mol_type = other DNA
tcgggcttgagcaggtcctg

SEQ ID NO: 38155 - DNA, 20 bp, synthetic construct
  misc_feature 1..20: note = chemically synthesized
  source 1..20: mol_type = other DNA
cgggcttgagcaggtcctga

SEQ ID NO: 38156 - DNA, 20 bp, synthetic construct
  misc_feature 1..20: note = chemically synthesized
  source 1..20: mol_type = other DNA
tgagcaggtcctgaaggcac

SEQ ID NO: 38157 - DNA, 20 bp, synthetic construct
  misc_feature 1..20: note = chemically synthesized
  source 1..20: mol_type = other DNA
caggtcctgaaggcacaagt

SEQ ID NO: 38158 - DNA, 20 bp, synthetic construct
  misc_feature 1..20: note = chemically synthesized
  source 1..20: mol_type = other DNA
aaggcacaagtaagttacat

SEQ ID NO: 38159 - DNA, 20 bp, synthetic construct
  misc_feature 1..20: note = chemically synthesized
  source 1..20: mol_type = other DNA
aggcacaagtaagttacata

SEQ ID NO: 38160 - DNA, 20 bp, synthetic construct
  misc_feature 1..20: note = chemically synthesized
  source 1..20: mol_type = other DNA
cacaagtaagttacataagg

SEQ ID NO: 38161 - DNA, 20 bp, synthetic construct
  misc_feature 1..20: note = chemically synthesized
  source 1..20: mol_type = other DNA
aagtaagttacataaggaag

SEQ ID NO: 38162 - DNA, 20 bp, synthetic construct
  misc_feature 1..20: note = chemically synthesized
  source 1..20: mol_type = other DNA
ccaccctgccttccctcccc

SEQ ID NO: 38163 - DNA, 20 bp, synthetic construct
  misc_feature 1..20: note = chemically synthesized
  source 1..20: mol_type = other DNA
cctcccccagcctgcaccaa

SEQ ID NO: 38164 - DNA, 20 bp, synthetic construct
  misc_feature 1..20: note = chemically synthesized
  source 1..20: mol_type = other DNA
agcctgcaccaatggcctca

SEQ ID NO: 38165 - DNA, 20 bp, synthetic construct
  misc_feature 1..20: note = chemically synthesized
  source 1..20: mol_type = other DNA
gcctgcaccaatggcctcat

SEQ ID NO: 38166 - DNA, 20 bp, synthetic construct
  misc_feature 1..20: note = chemically synthesized
  source 1..20: mol_type = other DNA
cctgcaccaatggcctcatg

SEQ ID NO: 38167 - DNA, 20 bp, synthetic construct
  misc_feature 1..20: note = chemically synthesized
  source 1..20: mol_type = other DNA
tgcaccaatggcctcatggg

SEQ ID NO: 38168 - DNA, 20 bp, synthetic construct
  misc_feature 1..20: note = chemically synthesized
  source 1..20: mol_type = other DNA
catggggagttccctatgat

SEQ ID NO: 38169 - DNA, 20 bp, synthetic construct
  misc_feature 1..20: note = chemically synthesized
  source 1..20: mol_type = other DNA
agttccctatgatcagttga

SEQ ID NO: 38170 - DNA, 20 bp, synthetic construct
  misc_feature 1..20: note = chemically synthesized
  source 1..20: mol_type = other DNA
ttccctatgatcagttgaca

SEQ ID NO: 38171 - DNA, 20 bp, synthetic construct
  misc_feature 1..20: note = chemically synthesized
  source 1..20: mol_type = other DNA
tccctatgatcagttgacag

SEQ ID NO: 38172 - DNA, 20 bp, synthetic construct
  misc_feature 1..20: note = chemically synthesized
  source 1..20: mol_type = other DNA
ctatgatcagttgacagagg

SEQ ID NO: 38173 - DNA, 20 bp, synthetic construct
  misc_feature 1..20: note = chemically synthesized
  source 1..20: mol_type = other DNA
tatgatcagttgacagagga

SEQ ID NO: 38174 - DNA, 20 bp, synthetic construct
  misc_feature 1..20: note = chemically synthesized
  source 1..20: mol_type = other DNA
atgatcagttgacagaggaa

SEQ ID NO: 38175 - DNA, 20 bp, synthetic construct
  misc_feature 1..20: note = chemically synthesized
  source 1..20: mol_type = other DNA
atcagttgacagaggaaggg

SEQ ID NO: 38176 - DNA, 20 bp, synthetic construct
  misc_feature 1..20: note = chemically synthesized
  source 1..20: mol_type = other DNA
tgacagaggaagggaagact

SEQ ID NO: 38177 - DNA, 20 bp, synthetic construct
  misc_feature 1..20: note = chemically synthesized
  source 1..20: mol_type = other DNA
gacagaggaagggaagacta

SEQ ID NO: 38178 - DNA, 20 bp, synthetic construct
  misc_feature 1..20: note = chemically synthesized
  source 1..20: mol_type = other DNA
aggaagggaagactaaggac

SEQ ID NO: 38179 - DNA, 20 bp, synthetic construct
  misc_feature 1..20: note = chemically synthesized
  source 1..20: mol_type = other DNA
gaagactaaggactggttca

SEQ ID NO: 38180 - DNA, 20 bp, synthetic construct
  misc_feature 1..20: note = chemically synthesized
  source 1..20: mol_type = other DNA
actaaggactggttcataga

SEQ ID NO: 38181 - DNA, 20 bp, synthetic construct
  misc_feature 1..20: note = chemically synthesized
  source 1..20: mol_type = other DNA
agatggttctgcacgatatg

SEQ ID NO: 38182 - DNA, 20 bp, synthetic construct
  misc_feature 1..20: note = chemically synthesized
  source 1..20: mol_type = other DNA
gatggttctgcacgatatgc

SEQ ID NO: 38183 - DNA, 20 bp, synthetic construct
  misc_feature 1..20: note = chemically synthesized
  source 1..20: mol_type = other DNA
gatatgcaggcaccacccga

SEQ ID NO: 38184 - DNA, 20 bp, synthetic construct
  misc_feature 1..20: note = chemically synthesized
  source 1..20: mol_type = other DNA
atgcaggcaccacccgaaag

SEQ ID NO: 38185 - DNA, 20 bp, synthetic construct
  misc_feature 1..20: note = chemically synthesized
  source 1..20: mol_type = other DNA
aggcaccacccgaaagtgga

SEQ ID NO: 38186 - DNA, 20 bp, synthetic construct
  misc_feature 1..20: note = chemically synthesized
  source 1..20: mol_type = other DNA
cacccgaaagtggacagctg

SEQ ID NO: 38187 - DNA, 20 bp, synthetic construct
  misc_feature 1..20: note = chemically synthesized
  source 1..20: mol_type = other DNA
tgcatgtgtacacttgtgct

SEQ ID NO: 38188 - DNA, 20 bp, synthetic construct
  misc_feature 1..20: note = chemically synthesized
  source 1..20: mol_type = other DNA
tttcctttatcatgtgacct

SEQ ID NO: 38189 - DNA, 20 bp, synthetic construct
  misc_feature 1..20: note = chemically synthesized
  source 1..20: mol_type = other DNA
atcatgtgaccttagattta

SEQ ID NO: 38190 - DNA, 20 bp, synthetic construct
  misc_feature 1..20: note = chemically synthesized
  source 1..20: mol_type = other DNA
tagatttatggacttcacat

SEQ ID NO: 38191 - DNA, 20 bp, synthetic construct
  misc_feature 1..20: note = chemically synthesized
  source 1..20: mol_type = other DNA
tggacttcacatcagcattt

SEQ ID NO: 38192 - DNA, 20 bp, synthetic construct
  misc_feature 1..20: note = chemically synthesized
  source 1..20: mol_type = other DNA
acatcagcatttaagcattt

SEQ ID NO: 38193 - DNA, 20 bp, synthetic construct
  misc_feature 1..20: note = chemically synthesized
  source 1..20: mol_type = other DNA
catttaagtgttgttcatat

SEQ ID NO: 38194 - DNA, 20 bp, synthetic construct
  misc_feature 1..20: note = chemically synthesized
  source 1..20: mol_type = other DNA
taaccttatgtaataacttt

SEQ ID NO: 38195 - DNA, 20 bp, synthetic construct
  misc_feature 1..20: note = chemically synthesized
  source 1..20: mol_type = other DNA
ttatgtaataacttttggtt

SEQ ID NO: 38196 - DNA, 20 bp, synthetic construct
  misc_feature 1..20: note = chemically synthesized
  source 1..20: mol_type = other DNA
tatgtaataacttttggttt

SEQ ID NO: 38197 - DNA, 20 bp, synthetic construct
  misc_feature 1..20: note = chemically synthesized
  source 1..20: mol_type = other DNA
atgtaataacttttggtttg

SEQ ID NO: 38198 - DNA, 20 bp, synthetic construct
  misc_feature 1..20: note = chemically synthesized
  source 1..20: mol_type = other DNA
ataacttttggtttggggat

SEQ ID NO: 38199 - DNA, 20 bp, synthetic construct
  misc_feature 1..20: note = chemically synthesized
  source 1..20: mol_type = other DNA
tttggggattggtgcgtttc

SEQ ID NO: 38200 - DNA, 20 bp, synthetic construct
  misc_feature 1..20: note = chemically synthesized
  source 1..20: mol_type = other DNA
tggtgcgtttctggttgtat

SEQ ID NO: 38201 - DNA, 20 bp, synthetic construct
  misc_feature 1..20: note = chemically synthesized
  source 1..20: mol_type = other DNA
ggtgcgtttctggttgtatg

SEQ ID NO: 38202 - DNA, 20 bp, synthetic construct
  misc_feature 1..20: note = chemically synthesized
  source 1..20: mol_type = other DNA
cgtttctggttgtatgagga

SEQ ID NO: 38203 - DNA, 20 bp, synthetic construct
  misc_feature 1..20: note = chemically synthesized
  source 1..20: mol_type = other DNA
tgaggatagttgtattatat

SEQ ID NO: 38204 - DNA, 20 bp, synthetic construct
  misc_feature 1..20: note = chemically synthesized
  source 1..20: mol_type = other DNA
gaggatagttgtattatatt

SEQ ID NO: 38205 - DNA, 20 bp, synthetic construct
  misc_feature 1..20: note = chemically synthesized
  source 1..20: mol_type = other DNA
cttattattgtctttatttg

SEQ ID NO: 38206 - DNA, 20 bp, synthetic construct
  misc_feature 1..20: note = chemically synthesized
  source 1..20: mol_type = other DNA
ttgaagattatgtatgattt

SEQ ID NO: 38207 - DNA, 20 bp, synthetic construct
  misc_feature 1..20: note = chemically synthesized
  source 1..20: mol_type = other DNA
tgaagattatgtatgatttc

SEQ ID NO: 38208 - DNA, 20 bp, synthetic construct
  misc_feature 1..20: note = chemically synthesized
  source 1..20: mol_type = other DNA
atgatttcaggatgtgtgta

SEQ ID NO: 38209 - DNA, 20 bp, synthetic construct
  misc_feature 1..20: note = chemically synthesized
  source 1..20: mol_type = other DNA
tgatttcaggatgtgtgtat

SEQ ID NO: 38210 - DNA, 20 bp, synthetic construct
  misc_feature 1..20: note = chemically synthesized
  source 1..20: mol_type = other DNA
caggatgtgtgtatgggttc

SEQ ID NO: 38211 - DNA, 20 bp, synthetic construct
  misc_feature 1..20: note = chemically synthesized
  source 1..20: mol_type = other DNA
gtgtatgggttcaagttgac

SEQ ID NO: 38212 - DNA, 20 bp, synthetic construct
  misc_feature 1..20: note = chemically synthesized
  source 1..20: mol_type = other DNA
tgtatgggttcaagttgaca

SEQ ID NO: 38213 - DNA, 20 bp, synthetic construct
  misc_feature 1..20: note = chemically synthesized
  source 1..20: mol_type = other DNA
tatgggttcaagttgacaag

SEQ ID NO: 38214 - DNA, 20 bp, synthetic construct
  misc_feature 1..20: note = chemically synthesized
  source 1..20: mol_type = other DNA
ggttcaagttgacaaggagt

SEQ ID NO: 38215 - DNA, 20 bp, synthetic construct
  misc_feature 1..20: note = chemically synthesized
  source 1..20: mol_type = other DNA
acaaggagttggacttgtga

SEQ ID NO: 38216 - DNA, 20 bp, synthetic construct
  misc_feature 1..20: note = chemically synthesized
  source 1..20: mol_type = other DNA
gttaatactgtcaacttgat

SEQ ID NO: 38217 - DNA, 20 bp, synthetic construct
  misc_feature 1..20: note = chemically synthesized
  source 1..20: mol_type = other DNA
tgtcaacttgattggattga

SEQ ID NO: 38218 - DNA, 20 bp, synthetic construct
  misc_feature 1..20: note = chemically synthesized
  source 1..20: mol_type = other DNA
tgattggattgaaagatgca

SEQ ID NO: 38219 - DNA, 20 bp, synthetic construct
  misc_feature 1..20: note = chemically synthesized
  source 1..20: mol_type = other DNA
aagatgcaaagtattaatct

SEQ ID NO: 38220 - DNA, 20 bp, synthetic construct
  misc_feature 1..20: note = chemically synthesized
  source 1..20: mol_type = other DNA
ttaatctcggttatgtctgt

SEQ ID NO: 38221 - DNA, 20 bp, synthetic construct
  misc_feature 1..20: note = chemically synthesized
  source 1..20: mol_type = other DNA
taatctcggttatgtctgtg

SEQ ID NO: 38222 - DNA, 20 bp, synthetic construct
  misc_feature 1..20: note = chemically synthesized
  source 1..20: mol_type = other DNA
aatctcggttatgtctgtga

SEQ ID NO: 38223 - DNA, 20 bp, synthetic construct
  misc_feature 1..20: note = chemically synthesized
  source 1..20: mol_type = other DNA
cggttatgtctgtgagggtg

SEQ ID NO: 38224 - DNA, 20 bp, synthetic construct
  misc_feature 1..20: note = chemically synthesized
  source 1..20: mol_type = other DNA
tgtctgtgagggtgtggcaa

SEQ ID NO: 38225 - DNA, 20 bp, synthetic construct
  misc_feature 1..20: note = chemically synthesized
  source 1..20: mol_type = other DNA
gtctgtgagggtgtggcaaa

SEQ ID NO: 38226 - DNA, 20 bp, synthetic construct
  misc_feature 1..20: note = chemically synthesized
  source 1..20: mol_type = other DNA
ctgtgagggtgtggcaaaag

SEQ ID NO: 38227 - DNA, 20 bp, synthetic construct
  misc_feature 1..20: note = chemically synthesized
  source 1..20: mol_type = other DNA
gcaaaaggagattaacattt

SEQ ID NO: 38228 - DNA, 20 bp, synthetic construct
  misc_feature 1..20: note = chemically synthesized
  source 1..20: mol_type = other DNA
aaggagattaacatttgagt

SEQ ID NO: 38229 - DNA, 20 bp, synthetic construct
  misc_feature 1..20: note = chemically synthesized
  source 1..20: mol_type = other DNA
gagattaacatttgagtcag

SEQ ID NO: 38230 - DNA, 20 bp, synthetic construct
  misc_feature 1..20: note = chemically synthesized
  source 1..20: mol_type = other DNA
agattaacatttgagtcagt

SEQ ID NO: 38231 - DNA, 20 bp, synthetic construct
  misc_feature 1..20: note = chemically synthesized
  source 1..20: mol_type = other DNA
taacatttgagtcagtgggc

SEQ ID NO: 38232 - DNA, 20 bp, synthetic construct
  misc_feature 1..20: note = chemically synthesized
  source 1..20: mol_type = other DNA
aacatttgagtcagtgggct

SEQ ID NO: 38233 - DNA, 20 bp, synthetic construct
  misc_feature 1..20: note = chemically synthesized
  source 1..20: mol_type = other DNA
tgtacacatgcatttagaaa

SEQ ID NO: 38234 - DNA, 20 bp, synthetic construct
  misc_feature 1..20: note = chemically synthesized
  source 1..20: mol_type = other DNA
agtgctgcagctgtccactt

SEQ ID NO: 38235 - DNA, 20 bp, synthetic construct
  misc_feature 1..20: note = chemically synthesized
  source 1..20: mol_type = other DNA
gcaggctgggggagggaagg

SEQ ID NO: 38236 - DNA, 20 bp, synthetic construct
  misc_feature 1..20: note = chemically synthesized
  source 1..20: mol_type = other DNA
gggagggaaggcagggtggc

SEQ ID NO: 38237 - DNA, 20 bp, synthetic construct
  misc_feature 1..20: note = chemically synthesized
  source 1..20: mol_type = other DNA
ctgacccacttcatggctag

SEQ ID NO: 38238 - DNA, 20 bp, synthetic construct
  misc_feature 1..20: note = chemically synthesized
  source 1..20: mol_type = other DNA
caatagctgtctctcaaaag

SEQ ID NO: 38239 - DNA, 20 bp, synthetic construct
  misc_feature 1..20: note = chemically synthesized
  source 1..20: mol_type = other DNA
cactgacacctcaagcacca

SEQ ID NO: 38240 - DNA, 20 bp, synthetic construct
  misc_feature 1..20: note = chemically synthesized
  source 1..20: mol_type = other DNA
ctcaagcaccattggatctg

SEQ ID NO: 38241 - DNA, 20 bp, synthetic construct
  misc_feature 1..20: note = chemically synthesized
  source 1..20: mol_type = other DNA
aggtcactcgataaatgggc

SEQ ID NO: 38242 - DNA, 20 bp, synthetic construct
  misc_feature 1..20: note = chemically synthesized
  source 1..20: mol_type = other DNA
cagagtaacacacccaaacg

SEQ ID NO: 38243 - DNA, 20 bp, synthetic construct
  misc_feature 1..20: note = chemically synthesized
  source 1..20: mol_type = other DNA
aagttatgcttcaccttaga

SEQ ID NO: 38244 - DNA, 20 bp, synthetic construct
  misc_feature 1..20: note = chemically synthesized
  source 1..20: mol_type = other DNA
agaaagtccctaaattttag

SEQ ID NO: 38245 - DNA, 20 bp, synthetic construct
  misc_feature 1..20: note = chemically synthesized
  source 1..20: mol_type = other DNA
tatccaatcatcataatgtc

SEQ ID NO: 38246 - DNA, 20 bp, synthetic construct
  misc_feature 1..20: note = chemically synthesized
  source 1..20: mol_type = other DNA
aagattatgacacaaagctg

SEQ ID NO: 38247 - DNA, 20 bp, synthetic construct
  misc_feature 1..20: note = chemically synthesized
  source 1..20: mol_type = other DNA
gagttgatacacccctgagg

SEQ ID NO: 38248 - DNA, 20 bp, synthetic construct
  misc_feature 1..20: note = chemically synthesized
  source 1..20: mol_type = other DNA
ctgaaggcaaattgcttctg

SEQ ID NO: 38249 - DNA, 20 bp, synthetic construct
  misc_feature 1..20: note = chemically synthesized
  source 1..20: mol_type = other DNA
ttctggtgggtcttatggac

SEQ ID NO: 38250 - DNA, 20 bp, synthetic construct
  misc_feature 1..20: note = chemically synthesized
  source 1..20: mol_type = other DNA
actggtagagcagctgcaat

SEQ ID NO: 38251 - DNA, 20 bp, synthetic construct
  misc_feature 1..20: note = chemically synthesized
  source 1..20: mol_type = other DNA
cctctgcacaggtcaaatgg

SEQ ID NO: 38252 - DNA, 20 bp, synthetic construct
  misc_feature 1..20: note = chemically synthesized
  source 1..20: mol_type = other DNA
gtcaaatgggagagttgaac

SEQ ID NO: 38253 - DNA, 20 bp, synthetic construct
  misc_feature 1..20: note = chemically synthesized
  source 1..20: mol_type = other DNA
gagttgaacagggatgtggt

SEQ ID NO: 38254 - DNA, 20 bp, synthetic construct
  misc_feature 1..20: note = chemically synthesized
  source 1..20: mol_type = other DNA
ctaatcacttcagtccctcc

SEQ ID NO: 38255 - DNA, 20 bp, synthetic construct
  misc_feature 1..20: note = chemically synthesized
  source 1..20: mol_type = other DNA
cacttcagtccctccaggga

SEQ ID NO: 38256 - DNA, 20 bp, synthetic construct
  misc_feature 1..20: note = chemically synthesized
  source 1..20: mol_type = other DNA
tggcactgggaaaatgacca

SEQ ID NO: 38257 - DNA, 20 bp, synthetic construct
  misc_feature 1..20: note = chemically synthesized
  source 1..20: mol_type = other DNA
tggggaaccacaataacgtt

SEQ ID NO: 38258 - DNA, 20 bp, synthetic construct
  misc_feature 1..20: note = chemically synthesized
  source 1..20: mol_type = other DNA
caataacgttttgggtaccc

SEQ ID NO: 38259 - DNA, 20 bp, synthetic construct
  misc_feature 1..20: note = chemically synthesized
  source 1..20: mol_type = other DNA
ggccagaggtctccttaggg

SEQ ID NO: 38260 - DNA, 20 bp, synthetic construct
  misc_feature 1..20: note = chemically synthesized
  source 1..20: mol_type = other DNA
ccttagggaaggatgggaga

SEQ ID NO: 38261 - DNA, 20 bp, synthetic construct
  misc_feature 1..20: note = chemically synthesized
  source 1..20: mol_type = other DNA
ctagtggtgtccttcctcaa

SEQ ID NO: 38262 - DNA, 20 bp, synthetic construct
  misc_feature 1..20: note = chemically synthesized
  source 1..20: mol_type = other DNA
tccagcctccccttcattca

SEQ ID NO: 38263 - DNA, 20 bp, synthetic construct
  misc_feature 1..20: note = chemically synthesized
  source 1..20: mol_type = other DNA
gttctggaactgtaacaggt

SEQ ID NO: 38264 - DNA, 20 bp, synthetic construct
  misc_feature 1..20: note = chemically synthesized
  source 1..20: mol_type = other DNA
tttgtttatataaatcaagt

SEQ ID NO: 38265 - DNA, 20 bp, synthetic construct
  misc_feature 1..20: note = chemically synthesized
  source 1..20: mol_type = other DNA
agccaatgccagagctctac

SEQ ID NO: 38266 - DNA, 20 bp, synthetic construct
  misc_feature 1..20: note = chemically synthesized
  source 1..20: mol_type = other DNA
acacttggcccctgccacct

SEQ ID NO: 38267 - DNA, 20 bp, synthetic construct
  misc_feature 1..20: note = chemically synthesized
  source 1..20: mol_type = other DNA
attgtatttaaattttgtag

SEQ ID NO: 38268 - DNA, 20 bp, synthetic construct
  misc_feature 1..20: note = chemically synthesized
  source 1..20: mol_type = other DNA
tatttcacaaagcttcggcc

SEQ ID NO: 38269 - DNA, 20 bp, synthetic construct
  misc_feature 1..20: note = chemically synthesized
  source 1..20: mol_type = other DNA
atcttctggaccctcccagc

SEQ ID NO: 38270 - DNA, 20 bp, synthetic construct
  misc_feature 1..20: note = chemically synthesized
  source 1..20: mol_type = other DNA
tctggaccctcccagctggg

SEQ ID NO: 38271 - DNA, 20 bp, synthetic construct
  misc_feature 1..20: note = chemically synthesized
  source 1..20: mol_type = other DNA
atcctaatctccctaagcct

SEQ ID NO: 38272 - DNA, 20 bp, synthetic construct
  misc_feature 1..20: note = chemically synthesized
  source 1..20: mol_type = other DNA
tttttttttttttttggaaa

SEQ ID NO: 38273 - DNA, 20 bp, synthetic construct
  misc_feature 1..20: note = chemically synthesized
  source 1..20: mol_type = other DNA
gtcttgctctgttaccaggc

SEQ ID NO: 38274 - DNA, 20 bp, synthetic construct
  misc_feature 1..20: note = chemically synthesized
  source 1..20: mol_type = other DNA
ttttgtatttttagcagaga

SEQ ID NO: 38275 - DNA, 20 bp, synthetic construct
  misc_feature 1..20: note = chemically synthesized
  source 1..20: mol_type = other DNA
tggggtttcaccattttagc

SEQ ID NO: 38276 - DNA, 20 bp, synthetic construct
  misc_feature 1..20: note = chemically synthesized
  source 1..20: mol_type = other DNA
gcccccgcctcccaaggtgc

SEQ ID NO: 38277 - DNA, 20 bp, synthetic construct
  misc_feature 1..20: note = chemically synthesized
  source 1..20: mol_type = other DNA
ccgagctgcaacattaaatg

SEQ ID NO: 38278 - DNA, 20 bp, synthetic construct
  misc_feature 1..20: note = chemically synthesized
  source 1..20: mol_type = other DNA
gaaagcttaagcagttcttt

SEQ ID NO: 38279 - DNA, 20 bp, synthetic construct
  misc_feature 1..20: note = chemically synthesized
  source 1..20: mol_type = other DNA
agagtataatgcacctcctc

SEQ ID NO: 38280 - DNA, 20 bp, synthetic construct
  misc_feature 1..20: note = chemically synthesized
  source 1..20: mol_type = other DNA
cctcacctctggggcccgca

SEQ ID NO: 38281 - DNA, 20 bp, synthetic construct
  misc_feature 1..20: note = chemically synthesized
  source 1..20: mol_type = other DNA
tagaagcattcaggggcatt

SEQ ID NO: 38282 - DNA, 20 bp, synthetic construct
  misc_feature 1..20: note = chemically synthesized
  source 1..20: mol_type = other DNA
cattaggggtgcctcttgag

SEQ ID NO: 38283 - DNA, 20 bp, synthetic construct
  misc_feature 1..20: note = chemically synthesized
  source 1..20: mol_type = other DNA
cactgttgcctcaagcagtg

SEQ ID NO: 38284 - DNA, 20 bp, synthetic construct
  misc_feature 1..20: note = chemically synthesized
  source 1..20: mol_type = other DNA
gtggaaaggctaatggcagc

SEQ ID NO: 38285 - DNA, 20 bp, synthetic construct
  misc_feature 1..20: note = chemically synthesized
  source 1..20: mol_type = other DNA
atggcagcacgggtcaggga

SEQ ID NO: 38286 - DNA, 20 bp, synthetic construct
  misc_feature 1..20: note = chemically synthesized
  source 1..20: mol_type = other DNA
gaggggatgttaccactact

SEQ ID NO: 38287 - DNA, 20 bp, synthetic construct
  misc_feature 1..20: note = chemically synthesized
  source 1..20: mol_type = other DNA
ttctggcaaaaaagtttcat

SEQ ID NO: 38288 - DNA, 20 bp, synthetic construct
  misc_feature 1..20: note = chemically synthesized
  source 1..20: mol_type = other DNA
ctcagtgtcctcagcttcat

SEQ ID NO: 38289 - DNA, 20 bp, synthetic construct
  misc_feature 1..20: note = chemically synthesized
  source 1..20: mol_type = other DNA
cacatccccactccaagttc

SEQ ID NO: 38290 - DNA, 20 bp, synthetic construct
  misc_feature 1..20: note = chemically synthesized
  source 1..20: mol_type = other DNA
aatttcaactctttctctac

SEQ ID NO: 38291 - DNA, 20 bp, synthetic construct
  misc_feature 1..20: note = chemically synthesized
  source 1..20: mol_type = other DNA
atagtcaaaggtattatgta

SEQ ID NO: 38292 - DNA, 20 bp, synthetic construct
  misc_feature 1..20: note = chemically synthesized
  source 1..20: mol_type = other DNA
ctccttgcctctcataagtg

SEQ ID NO: 38293 - DNA, 20 bp, synthetic construct
  misc_feature 1..20: note = chemically synthesized
  source 1..20: mol_type = other DNA
gttctccatactattagaag

SEQ ID NO: 38294 - DNA, 20 bp, synthetic construct
  misc_feature 1..20: note = chemically synthesized
  source 1..20: mol_type = other DNA
agaagtcccaaaaccaatga

SEQ ID NO: 38295 - DNA, 20 bp, synthetic construct
  misc_feature 1..20: note = chemically synthesized
  source 1..20: mol_type = other DNA
gtatgaaaatctgtattagt

SEQ ID NO: 38296 - DNA, 20 bp, synthetic construct
  misc_feature 1..20: note = chemically synthesized
  source 1..20: mol_type = other DNA
atatatgagagagagagaga

SEQ ID NO: 38297 - DNA, 20 bp, synthetic construct
  misc_feature 1..20: note = chemically synthesized
  source 1..20: mol_type = other DNA
tgtatatatgtgtatatata

SEQ ID NO: 38298 - DNA, 20 bp, synthetic construct
  misc_feature 1..20: note = chemically synthesized
  source 1..20: mol_type = other DNA
agtcccacagctgaagaact

SEQ ID NO: 38299 - DNA, 20 bp, synthetic construct
  misc_feature 1..20: note = chemically synthesized
  source 1..20: mol_type = other DNA
gtccgatgttcaagagcagg

SEQ ID NO: 38300 - DNA, 20 bp, synthetic construct
  misc_feature 1..20: note = chemically synthesized
  source 1..20: mol_type = other DNA
ggcagcaggggcaggggcct

SEQ ID NO: 38301 - DNA, 20 bp, synthetic construct
  misc_feature 1..20: note = chemically synthesized
  source 1..20: mol_type = other DNA
aggggcctcagggtgcttgc

SEQ ID NO: 38302 - DNA, 20 bp, synthetic construct
  misc_feature 1..20: note = chemically synthesized
  source 1..20: mol_type = other DNA
acacactggcctcttttcca

SEQ ID NO: 38303 - DNA, 20 bp, synthetic construct
  misc_feature 1..20: note = chemically synthesized
  source 1..20: mol_type = other DNA
atagggtggctggggcacac

SEQ ID NO: 38304 - DNA, 20 bp, synthetic construct
  misc_feature 1..20: note = chemically synthesized
  source 1..20: mol_type = other DNA
tggctggggcacactggggt

SEQ ID NO: 38305 - DNA, 20 bp, synthetic construct
  misc_feature 1..20: note = chemically synthesized
  source 1..20: mol_type = other DNA
tggggtgtgagtaaagcact

SEQ ID NO: 38306 - DNA, 20 bp, synthetic construct
  misc_feature 1..20: note = chemically synthesized
  source 1..20: mol_type = other DNA
agcttcaccccacaaaaaca

SEQ ID NO: 38307 - DNA, 20 bp, synthetic construct
  misc_feature 1..20: note = chemically synthesized
  source 1..20: mol_type = other DNA
cagccagtggaaatgttcaa

SEQ ID NO: 38308 - DNA, 20 bp, synthetic construct
  misc_feature 1..20: note = chemically synthesized
  source 1..20: mol_type = other DNA
gccaggagccttgcctggtg

SEQ ID NO: 38309 - DNA, 20 bp, synthetic construct
  misc_feature 1..20: note = chemically synthesized
  source 1..20: mol_type = other DNA
agctcacaagaaagagaaac

SEQ ID NO: 38310 - DNA, 20 bp, synthetic construct
  misc_feature 1..20: note = chemically synthesized
  source 1..20: mol_type = other DNA
gctgaaatggcagaggggct

SEQ ID NO: 38311 - DNA, 20 bp, synthetic construct
  misc_feature 1..20: note = chemically synthesized
  source 1..20: mol_type = other DNA
gaggggctgtgggttgtctc

SEQ ID NO: 38312 - DNA, 20 bp, synthetic construct
  misc_feature 1..20: note = chemically synthesized
  source 1..20: mol_type = other DNA
ctaaaatgttcaggcagggc

SEQ ID NO: 38313 - DNA, 20 bp, synthetic construct
  misc_feature 1..20: note = chemically synthesized
  source 1..20: mol_type = other DNA
tggctgtgctctgcccagtg

SEQ ID NO: 38314 - DNA, 20 bp, synthetic construct
  misc_feature 1..20: note = chemically synthesized
  source 1..20: mol_type = other DNA
acactgtgctggaggtccgt

SEQ ID NO: 38315 - DNA, 20 bp, synthetic construct
  misc_feature 1..20: note = chemically synthesized
  source 1..20: mol_type = other DNA
tgagcccatactttaatctc

SEQ ID NO: 38316 - DNA, 20 bp, synthetic construct
  misc_feature 1..20: note = chemically synthesized
  source 1..20: mol_type = other DNA
gtggtaaggaagaaagtaca

SEQ ID NO: 38317 - DNA, 20 bp, synthetic construct
  misc_feature 1..20: note = chemically synthesized
  source 1..20: mol_type = other DNA
caatattgcaaatcattatt

SEQ ID NO: 38318 - DNA, 20 bp, synthetic construct
  misc_feature 1..20: note = chemically synthesized
  source 1..20: mol_type = other DNA
ctgtgatacaggtgtttgat

SEQ ID NO: 38319 - DNA, 20 bp, synthetic construct
  misc_feature 1..20: note = chemically synthesized
  source 1..20: mol_type = other DNA
actgcaaccgtgtatctctt

SEQ ID NO: 38320 - DNA, 20 bp, synthetic construct
  misc_feature 1..20: note = chemically synthesized
  source 1..20: mol_type = other DNA
tcatgtctagcatgcaggac

SEQ ID NO: 38321 - DNA, 20 bp, synthetic construct
  misc_feature 1..20: note = chemically synthesized
  source 1..20: mol_type = other DNA
tgcaggacttgggtaatctc

SEQ ID NO: 38322 - DNA, 20 bp, synthetic construct
  misc_feature 1..20: note = chemically synthesized
  source 1..20: mol_type = other DNA
ctaaccataaaatcttaaat

SEQ ID NO: 38323 - DNA, 20 bp, synthetic construct
  misc_feature 1..20: note = chemically synthesized
  source 1..20: mol_type = other DNA
tgacagttgataagcatctt

SEQ ID NO: 38324 - DNA, 20 bp, synthetic construct
  misc_feature 1..20: note = chemically synthesized
  source 1..20: mol_type = other DNA
agttacaaaaatgttggtgc

SEQ ID NO: 38325 - DNA, 20 bp, synthetic construct
  misc_feature 1..20: note = chemically synthesized
  source 1..20: mol_type = other DNA
gttggtgcatggatgatgtt

SEQ ID NO: 38326 - DNA, 20 bp, synthetic construct
  misc_feature 1..20: note = chemically synthesized
  source 1..20: mol_type = other DNA
aattaagcaaaaaaaaaatg

SEQ ID NO: 38327 - DNA, 20 bp, synthetic construct
  misc_feature 1..20: note = chemically synthesized
  source 1..20: mol_type = other DNA
acacaccactattagttggg

SEQ ID NO: 38328 - DNA, 20 bp, synthetic construct
  misc_feature 1..20: note = chemically synthesized
  source 1..20: mol_type = other DNA
ctttctgcctggttgtggca

SEQ ID NO: 38329 - DNA, 20 bp, synthetic construct
  misc_feature 1..20: note = chemically synthesized
  source 1..20: mol_type = other DNA
acaaaatgtagtgattttca

SEQ ID NO: 38330 - DNA, 20 bp, synthetic construct
  misc_feature 1..20: note = chemically synthesized
  source 1..20: mol_type = other DNA
tgaagatagccaagcttcca

SEQ ID NO: 38331 - DNA, 20 bp, synthetic construct
  misc_feature 1..20: note = chemically synthesized
  source 1..20: mol_type = other DNA
ggacaaccttgaccactttg

SEQ ID NO: 38332 - DNA, 20 bp, synthetic construct
  misc_feature 1..20: note = chemically synthesized
  source 1..20: mol_type = other DNA
tggtgggggccacatgcaga

SEQ ID NO: 38333 - DNA, 20 bp, synthetic construct
  misc_feature 1..20: note = chemically synthesized
  source 1..20: mol_type = other DNA
gggggccacatgcagatgga

SEQ ID NO: 38334 - DNA, 20 bp, synthetic construct
  misc_feature 1..20: note = chemically synthesized
  source 1..20: mol_type = other DNA
catgcagatggagtgggtta

SEQ ID NO: 38335 - DNA, 20 bp, synthetic construct
  misc_feature 1..20: note = chemically synthesized
  source 1..20: mol_type = other DNA
agagtgactagaagagcagt

SEQ ID NO: 38336 - DNA, 20 bp, synthetic construct
  misc_feature 1..20: note = chemically synthesized
  source 1..20: mol_type = other DNA
tgaaagcagcgagacttcta

SEQ ID NO: 38337 - DNA, 20 bp, synthetic construct
  misc_feature 1..20: note = chemically synthesized
  source 1..20: mol_type = other DNA
agcgagacttctagggaata

SEQ ID NO: 38338 - DNA, 20 bp, synthetic construct
  misc_feature 1..20: note = chemically synthesized
  source 1..20: mol_type = other DNA
aaggcctgtcctgacctcct

SEQ ID NO: 38339 - DNA, 20 bp, synthetic construct
  misc_feature 1..20: note = chemically synthesized
  source 1..20: mol_type = other DNA
catgagggcagggcaaggag

SEQ ID NO: 38340 - DNA, 20 bp, synthetic construct
  misc_feature 1..20: note = chemically synthesized
  source 1..20: mol_type = other DNA
atatgctctatgctggaaaa

SEQ ID NO: 38341 - DNA, 20 bp, synthetic construct
  misc_feature 1..20: note = chemically synthesized
  source 1..20: mol_type = other DNA
tttgaactctcttttccagg

SEQ ID NO: 38342 - DNA, 20 bp, synthetic construct
  misc_feature 1..20: note = chemically synthesized
  source 1..20: mol_type = other DNA
ttttccaggaagagttgtgc

SEQ ID NO: 38343 - DNA, 20 bp, synthetic construct
  misc_feature 1..20: note = chemically synthesized
  source 1..20: mol_type = other DNA
ttaataaggtgcttcctaca

SEQ ID NO: 38344 - DNA, 20 bp, synthetic construct
  misc_feature 1..20: note = chemically synthesized
  source 1..20: mol_type = other DNA
gagttcagttaaacattttg

SEQ ID NO: 38345 - DNA, 20 bp, synthetic construct
  misc_feature 1..20: note = chemically synthesized
  source 1..20: mol_type = other DNA
tgctaggaaatatcccaaaa

SEQ ID NO: 38346 - DNA, 20 bp, synthetic construct
  misc_feature 1..20: note = chemically synthesized
  source 1..20: mol_type = other DNA
tccagggctcatatggcaat

SEQ ID NO: 38347 - DNA, 20 bp, synthetic construct
  misc_feature 1..20: note = chemically synthesized
  source 1..20: mol_type = other DNA
atatggcaatggggatttaa

SEQ ID NO: 38348 - DNA, 20 bp, synthetic construct
  misc_feature 1..20: note = chemically synthesized
  source 1..20: mol_type = other DNA
atgtattttattaatggtgt

SEQ ID NO: 38349 - DNA, 20 bp, synthetic construct
  misc_feature 1..20: note = chemically synthesized
  source 1..20: mol_type = other DNA
tttcttcctcactgtggtgt

SEQ ID NO: 38350 - DNA, 20 bp, synthetic construct
  misc_feature 1..20: note = chemically synthesized
  source 1..20: mol_type = other DNA
tgtaaaagacttagcaattt

SEQ ID NO: 38351 - DNA, 20 bp, synthetic construct
  misc_feature 1..20: note = chemically synthesized
  source 1..20: mol_type = other DNA
ctttccaaaagagcttatca

SEQ ID NO: 38352 - DNA, 20 bp, synthetic construct
  misc_feature 1..20: note = chemically synthesized
  source 1..20: mol_type = other DNA
agagaagtttgttctagcct

SEQ ID NO: 38353 - DNA, 20 bp, synthetic construct
  misc_feature 1..20: note = chemically synthesized
  source 1..20: mol_type = other DNA
tagcctttgggtgtagcctg

SEQ ID NO: 38354 - DNA, 20 bp, synthetic construct
  misc_feature 1..20: note = chemically synthesized
  source 1..20: mol_type = other DNA
ctagtttccatgggctgaaa

SEQ ID NO: 38355 - DNA, 20 bp, synthetic construct
  misc_feature 1..20: note = chemically synthesized
  source 1..20: mol_type = other DNA
gtattttctttgatattttc

SEQ ID NO: 38356 - DNA, 20 bp, synthetic construct
  misc_feature 1..20: note = chemically synthesized
  source 1..20: mol_type = other DNA
tgtgcttcaagatggaactc

SEQ ID NO: 38357 - DNA, 20 bp, synthetic construct
  misc_feature 1..20: note = chemically synthesized
  source 1..20: mol_type = other DNA
ggcaactgctcaactacctg

SEQ ID NO: 38358 - DNA, 20 bp, synthetic construct
  misc_feature 1..20: note = chemically synthesized
  source 1..20: mol_type = other DNA
gcccaagctagcatggaccc

SEQ ID NO: 38359 - DNA, 20 bp, synthetic construct
  misc_feature 1..20: note = chemically synthesized
  source 1..20: mol_type = other DNA
ccagacttctctcttcttaa

SEQ ID NO: 38360 - DNA, 20 bp, synthetic construct
  misc_feature 1..20: note = chemically synthesized
  source 1..20: mol_type = other DNA
aacctgctcttcagttacat

SEQ ID NO: 38361 - DNA, 20 bp, synthetic construct
  misc_feature 1..20: note = chemically synthesized
  source 1..20: mol_type = other DNA
tttctttatttccttgattt

SEQ ID NO: 38362 - DNA, 20 bp, synthetic construct
  misc_feature 1..20: note = chemically synthesized
  source 1..20: mol_type = other DNA
gatttctttgtttataaaat

SEQ ID NO: 38363 - DNA, 20 bp, synthetic construct
  misc_feature 1..20: note = chemically synthesized
  source 1..20: mol_type = other DNA
taacccactcaacaaatacc

SEQ ID NO: 38364 - DNA, 20 bp, synthetic construct
  misc_feature 1..20: note = chemically synthesized
  source 1..20: mol_type = other DNA
acaaataccctgagtatttg

SEQ ID NO: 38365 - DNA, 20 bp, synthetic construct
  misc_feature 1..20: note = chemically synthesized
  source 1..20: mol_type = other DNA
atgcgtatatcatctggcaa

SEQ ID NO: 38366 - DNA, 20 bp, synthetic construct
  misc_feature 1..20: note = chemically synthesized
  source 1..20: mol_type = other DNA
tggatgtgtataatttctcc

SEQ ID NO: 38367 - DNA, 20 bp, synthetic construct
  misc_feature 1..20: note = chemically synthesized
  source 1..20: mol_type = other DNA
ccataacaaagagagaaatg

SEQ ID NO: 38368 - DNA, 20 bp, synthetic construct
  misc_feature 1..20: note = chemically synthesized
  source 1..20: mol_type = other DNA
caaggaaccaaacatattca

SEQ ID NO: 38369 - DNA, 20 bp, synthetic construct
  misc_feature 1..20: note = chemically synthesized
  source 1..20: mol_type = other DNA
gaaattaaacttattttttt

SEQ ID NO: 38370 - DNA, 20 bp, synthetic construct
  misc_feature 1..20: note = chemically synthesized
  source 1..20: mol_type = other DNA
catatacaagattttgaact

SEQ ID NO: 38371 - DNA, 20 bp, synthetic construct
  misc_feature 1..20: note = chemically synthesized
  source 1..20: mol_type = other DNA
gattttgaactgggaatttc

SEQ ID NO: 38372 - DNA, 20 bp, synthetic construct
  misc_feature 1..20: note = chemically synthesized
  source 1..20: mol_type = other DNA
tttcatgaatcaaaaattaa

SEQ ID NO: 38373 - DNA, 20 bp, synthetic construct
  misc_feature 1..20: note = chemically synthesized
  source 1..20: mol_type = other DNA
aggacattgttgacttacat

SEQ ID NO: 38374 - DNA, 20 bp, synthetic construct
  misc_feature 1..20: note = chemically synthesized
  source 1..20: mol_type = other DNA
gacccatgccactggctcag

SEQ ID NO: 38375 - DNA, 20 bp, synthetic construct
  misc_feature 1..20: note = chemically synthesized
  source 1..20: mol_type = other DNA
agcagggttcaaacattacc

SEQ ID NO: 38376 - DNA, 20 bp, synthetic construct
  misc_feature 1..20: note = chemically synthesized
  source 1..20: mol_type = other DNA
ttcaaacattaccttgaata

SEQ ID NO: 38377 - DNA, 20 bp, synthetic construct
  misc_feature 1..20: note = chemically synthesized
  source 1..20: mol_type = other DNA
tagagtcttataaaatattt

SEQ ID NO: 38378 - DNA, 20 bp, synthetic construct
  misc_feature 1..20: note = chemically synthesized
  source 1..20: mol_type = other DNA
cttctttcattctctttctt

SEQ ID NO: 38379 - DNA, 20 bp, synthetic construct
  misc_feature 1..20: note = chemically synthesized
  source 1..20: mol_type = other DNA
ccgaggttgtgtcgctaccc

SEQ ID NO: 38380 - DNA, 20 bp, synthetic construct
  misc_feature 1..20: note = chemically synthesized
  source 1..20: mol_type = other DNA
agatatcaatccttccagga

SEQ ID NO: 38381 - DNA, 20 bp, synthetic construct
  misc_feature 1..20: note = chemically synthesized
  source 1..20: mol_type = other DNA
attttgggaggccacggcag

SEQ ID NO: 38382 - DNA, 20 bp, synthetic construct
  misc_feature 1..20: note = chemically synthesized
  source 1..20: mol_type = other DNA
cagatggatcacctgaggcc

SEQ ID NO: 38383 - DNA, 20 bp, synthetic construct
  misc_feature 1..20: note = chemically synthesized
  source 1..20: mol_type = other DNA
acaaaaaatacaaaaattag

SEQ ID NO: 38384 - DNA, 20 bp, synthetic construct
  misc_feature 1..20: note = chemically synthesized
  source 1..20: mol_type = other DNA
tactaagtaggctgaggcac

SEQ ID NO: 38385 - DNA, 20 bp, synthetic construct
  misc_feature 1..20: note = chemically synthesized
  source 1..20: mol_type = other DNA
gatggaggttgcagtgagcc

SEQ ID NO: 38386 - DNA, 20 bp, synthetic construct
  misc_feature 1..20: note = chemically synthesized
  source 1..20: mol_type = other DNA
atgtgccactgcactccagc

SEQ ID NO: 38387 - DNA, 20 bp, synthetic construct
  misc_feature 1..20: note = chemically synthesized
  source 1..20: mol_type = other DNA
tccagcctgggtgacagagc

SEQ ID NO: 38388 - DNA, 20 bp, synthetic construct
  misc_feature 1..20: note = chemically synthesized
  source 1..20: mol_type = other DNA
atatttttaaaaataaaaca

SEQ ID NO: 38389 - DNA, 20 bp, synthetic construct
  misc_feature 1..20: note = chemically synthesized
  source 1..20: mol_type = other DNA
tttaaaaataaaacataggg

SEQ ID NO: 38390 - DNA, 20 bp, synthetic construct
  misc_feature 1..20: note = chemically synthesized
  source 1..20: mol_type = other DNA
actttgggaggccaagacag

SEQ ID NO: 38391 - DNA, 20 bp, synthetic construct
  misc_feature 1..20: note = chemically synthesized
  source 1..20: mol_type = other DNA
gacaggtggatcacaaggtc

SEQ ID NO: 38392 - DNA, 20 bp, synthetic construct
  misc_feature 1..20: note = chemically synthesized
  source 1..20: mol_type = other DNA
atcccagctactagggaggc

SEQ ID NO: 38393 - DNA, 20 bp, synthetic construct
  misc_feature 1..20: note = chemically synthesized
  source 1..20: mol_type = other DNA
tcacgtcagtgcacttcaac

SEQ ID NO: 38394 - DNA, 20 bp, synthetic construct
  misc_feature 1..20: note = chemically synthesized
  source 1..20: mol_type = other DNA
cagtgcacttcaaccggggt

SEQ ID NO: 38395 - DNA, 20 bp, synthetic construct
  misc_feature 1..20: note = chemically synthesized
  source 1..20: mol_type = other DNA
tagtatcaatctttccgcaa

SEQ ID NO: 38396 - DNA, 20 bp, synthetic construct
  misc_feature 1..20: note = chemically synthesized
  source 1..20: mol_type = other DNA
tcgttctcatgaagtaaagc

SEQ ID NO: 38397 - DNA, 20 bp, synthetic construct
  misc_feature 1..20: note = chemically synthesized
  source 1..20: mol_type = other DNA
atgaagtaaagcaagagtgg

SEQ ID NO: 38398 - DNA, 20 bp, synthetic construct
  misc_feature 1..20: note = chemically synthesized
  source 1..20: mol_type = other DNA
gagtggtagaattaagtgga

SEQ ID NO: 38399 - DNA, 20 bp, synthetic construct
  misc_feature 1..20: note = chemically synthesized
  source 1..20: mol_type = other DNA
tggccaccgggacaccccag

SEQ ID NO: 38400 - DNA, 20 bp, synthetic construct
  misc_feature 1..20: note = chemically synthesized
  source 1..20: mol_type = other DNA
caccgggacaccccaggagg

SEQ ID NO: 38401 - DNA, 20 bp, synthetic construct
  misc_feature 1..20: note = chemically synthesized
  source 1..20: mol_type = other DNA
tcaagccccaagaagtcccc

SEQ ID NO: 38402 - DNA, 20 bp, synthetic construct
  misc_feature 1..20: note = chemically synthesized
  source 1..20: mol_type = other DNA
aagaagtccccttggatgat

SEQ ID NO: 38403 - DNA, 20 bp, synthetic construct
  misc_feature 1..20: note = chemically synthesized
  source 1..20: mol_type = other DNA
atacatttgggacagatcta

SEQ ID NO: 38404 - DNA, 20 bp, synthetic construct
  misc_feature 1..20: note = chemically synthesized
  source 1..20: mol_type = other DNA
tttctgagcaacacttagac

SEQ ID NO: 38405 - DNA, 20 bp, synthetic construct
  misc_feature 1..20: note = chemically synthesized
  source 1..20: mol_type = other DNA
ttccattgattaaatcctac

SEQ ID NO: 38406 - DNA, 20 bp, synthetic construct
  misc_feature 1..20: note = chemically synthesized
  source 1..20: mol_type = other DNA
aatgcccagcacagagctca

SEQ ID NO: 38407 - DNA, 20 bp, synthetic construct
  misc_feature 1..20: note = chemically synthesized
  source 1..20: mol_type = other DNA
gccagactctctgaaccctg

SEQ ID NO: 38408 - DNA, 20 bp, synthetic construct
  misc_feature 1..20: note = chemically synthesized
  source 1..20: mol_type = other DNA
ggagagtgtaaacgtcatat

SEQ ID NO: 38409 - DNA, 20 bp, synthetic construct
  misc_feature 1..20: note = chemically synthesized
  source 1..20: mol_type = other DNA
agagtctatgttccaaaaac

SEQ ID NO: 38410 - DNA, 20 bp, synthetic construct
  misc_feature 1..20: note = chemically synthesized
  source 1..20: mol_type = other DNA
tctttgcttttaaaaccata

SEQ ID NO: 38411 - DNA, 20 bp, synthetic construct
  misc_feature 1..20: note = chemically synthesized
  source 1..20: mol_type = other DNA
taaagaataatgtttaaatg

SEQ ID NO: 38412 - DNA, 20 bp, synthetic construct
  misc_feature 1..20: note = chemically synthesized
  source 1..20: mol_type = other DNA
ttttcactcaacattacata

SEQ ID NO: 38413 - DNA, 20 bp, synthetic construct
  misc_feature 1..20: note = chemically synthesized
  source 1..20: mol_type = other DNA
atgagcatgaggtttccttt

SEQ ID NO: 38414 - DNA, 20 bp, synthetic construct
  misc_feature 1..20: note = chemically synthesized
  source 1..20: mol_type = other DNA
gatgatggttgcacaccact

SEQ ID NO: 38415 - DNA, 20 bp, synthetic construct
  misc_feature 1..20: note = chemically synthesized
  source 1..20: mol_type = other DNA
tacattttattgcaataaaa

SEQ ID NO: 38416 - DNA, 20 bp, synthetic construct
  misc_feature 1..20: note = chemically synthesized
  source 1..20: mol_type = other DNA
ttgtctagttcaacctgagc

SEQ ID NO: 38417 - DNA, 20 bp, synthetic construct
  misc_feature 1..20: note = chemically synthesized
  source 1..20: mol_type = other DNA
tcaacctgagcctgggtctg

SEQ ID NO: 38418 - DNA, 20 bp, synthetic construct
  misc_feature 1..20: note = chemically synthesized
  source 1..20: mol_type = other DNA
aatcacttcaccacacttgt

SEQ ID NO: 38419 - DNA, 20 bp, synthetic construct
  misc_feature 1..20: note = chemically synthesized
  source 1..20: mol_type = other DNA
atacttctttgacaatttgg

SEQ ID NO: 38420 - DNA, 20 bp, synthetic construct
  misc_feature 1..20: note = chemically synthesized
  source 1..20: mol_type = other DNA
ttttccagatggacacaccc

SEQ ID NO: 38421 - DNA, 20 bp, synthetic construct
  misc_feature 1..20: note = chemically synthesized
  source 1..20: mol_type = other DNA
tttgcaagcccagctttcat

SEQ ID NO: 38422 - DNA, 20 bp, synthetic construct
  misc_feature 1..20: note = chemically synthesized
  source 1..20: mol_type = other DNA
ttcagaaacctgactgcatc

SEQ ID NO: 38423 - DNA, 20 bp, synthetic construct
  misc_feature 1..20: note = chemically synthesized
  source 1..20: mol_type = other DNA
tgactaccaagcatcgggca

SEQ ID NO: 38424 - DNA, 20 bp, synthetic construct
  misc_feature 1..20: note = chemically synthesized
  source 1..20: mol_type = other DNA
tgtgagggagcaccgttctc

SEQ ID NO: 38425 - DNA, 20 bp, synthetic construct
  misc_feature 1..20: note = chemically synthesized
  source 1..20: mol_type = other DNA
caggaaagttgatgtggtct

SEQ ID NO: 38426 - DNA, 20 bp, synthetic construct
  misc_feature 1..20: note = chemically synthesized
  source 1..20: mol_type = other DNA
aggtaggccacaggtgacaa

SEQ ID NO: 38427 - DNA, 20 bp, synthetic construct
  misc_feature 1..20: note = chemically synthesized
  source 1..20: mol_type = other DNA
gggccttggggagagggcag

SEQ ID NO: 38428 - DNA, 20 bp, synthetic construct
  misc_feature 1..20: note = chemically synthesized
  source 1..20: mol_type = other DNA
cagcagggtaagtccagcgg

SEQ ID NO: 38429 - DNA, 20 bp, synthetic construct
  misc_feature 1..20: note = chemically synthesized
  source 1..20: mol_type = other DNA
gcaggatcagtccattgatt

SEQ ID NO: 38430 - DNA, 20 bp, synthetic construct
  misc_feature 1..20: note = chemically synthesized
  source 1..20: mol_type = other DNA
tagaaaattgatgaacaggc

SEQ ID NO: 38431 - DNA, 20 bp, synthetic construct
  misc_feature 1..20: note = chemically synthesized
  source 1..20: mol_type = other DNA
catggtctagttagtgttct

SEQ ID NO: 38432 - DNA, 20 bp, synthetic construct
  misc_feature 1..20: note = chemically synthesized
  source 1..20: mol_type = other DNA
ggcgaggcagaagcctagtg

SEQ ID NO: 38433 - DNA, 20 bp, synthetic construct
  misc_feature 1..20: note = chemically synthesized
  source 1..20: mol_type = other DNA
gggatggtggttagaaatgt

SEQ ID NO: 38434 - DNA, 20 bp, synthetic construct
  misc_feature 1..20: note = chemically synthesized
  source 1..20: mol_type = other DNA
ggtaataattgtgatggtgg

SEQ ID NO: 38435 - DNA, 20 bp, synthetic construct
  misc_feature 1..20: note = chemically synthesized
  source 1..20: mol_type = other DNA
gaatgatgatgatggtggtg

SEQ ID NO: 38436 - DNA, 20 bp, synthetic construct
  misc_feature 1..20: note = chemically synthesized
  source 1..20: mol_type = other DNA
gatgataatggtgatggtgg

SEQ ID NO: 38437 - DNA, 20 bp, synthetic construct
  misc_feature 1..20: note = chemically synthesized
  source 1..20: mol_type = other DNA
atggtggtggtgatgatgtt

SEQ ID NO: 38438 - DNA, 20 bp, synthetic construct
  misc_feature 1..20: note = chemically synthesized
  source 1..20: mol_type = other DNA
ggtaatgataatggtgatgg

SEQ ID NO: 38439 - DNA, 20 bp, synthetic construct
  misc_feature 1..20: note = chemically synthesized
  source 1..20: mol_type = other DNA
tggaatgatggtgatggtgg

SEQ ID NO: 38440 - DNA, 20 bp, synthetic construct
  misc_feature 1..20: note = chemically synthesized
  source 1..20: mol_type = other DNA
gtggaatgatgatggtggtg

SEQ ID NO: 38441 - DNA, 20 bp, synthetic construct
  misc_feature 1..20: note = chemically synthesized
  source 1..20: mol_type = other DNA
gtgatgatggtgatgatgtt

SEQ ID NO: 38442 - DNA, 20 bp, synthetic construct
  misc_feature 1..20: note = chemically synthesized
  source 1..20: mol_type = other DNA
gtttccaggtgttccctgac

SEQ ID NO: 38443 - DNA, 20 bp, synthetic construct
  misc_feature 1..20: note = chemically synthesized
  source 1..20: mol_type = other DNA
tccctgacttggatcaaatg

SEQ ID NO: 38444 - DNA, 20 bp, synthetic construct
  misc_feature 1..20: note = chemically synthesized
  source 1..20: mol_type = other DNA
tttggaggtgttgaggccaa

SEQ ID NO: 38445 - DNA, 20 bp, synthetic construct
  misc_feature 1..20: note = chemically synthesized
  source 1..20: mol_type = other DNA
tgacatctctatgtcggcca

SEQ ID NO: 38446 - DNA, 20 bp, synthetic construct
  misc_feature 1..20: note = chemically synthesized
  source 1..20: mol_type = other DNA
cggtaggttttcaccattat

SEQ ID NO: 38447 - DNA, 20 bp, synthetic construct
  misc_feature 1..20: note = chemically synthesized
  source 1..20: mol_type = other DNA
gattgagctgagctggcctc

SEQ ID NO: 38448 - DNA, 20 bp, synthetic construct
  misc_feature 1..20: note = chemically synthesized
  source 1..20: mol_type = other DNA
aggctctgggggaagaaaga

SEQ ID NO: 38449 - DNA, 20 bp, synthetic construct
  misc_feature 1..20: note = chemically synthesized
  source 1..20: mol_type = other DNA
ctgtgccatgctcgcaaagc

SEQ ID NO: 38450 - DNA, 20 bp, synthetic construct
  misc_feature 1..20: note = chemically synthesized
  source 1..20: mol_type = other DNA
gggcttgcaaaattagaaaa

SEQ ID NO: 38451 - DNA, 20 bp, synthetic construct
  misc_feature 1..20: note = chemically synthesized
  source 1..20: mol_type = other DNA
gtgagaacactgaaacatcc

SEQ ID NO: 38452 - DNA, 20 bp, synthetic construct
  misc_feature 1..20: note = chemically synthesized
  source 1..20: mol_type = other DNA
caattttgcaaccgttctat

SEQ ID NO: 38453 - DNA, 20 bp, synthetic construct
  misc_feature 1..20: note = chemically synthesized
  source 1..20: mol_type = other DNA
aataaagcagtttttcacaa

SEQ ID NO: 38454 - DNA, 20 bp, synthetic construct
  misc_feature 1..20: note = chemically synthesized
  source 1..20: mol_type = other DNA
aaaagaataaacacaaccag

SEQ ID NO: 38455 - DNA, 20 bp, synthetic construct
  misc_feature 1..20: note = chemically synthesized
  source 1..20: mol_type = other DNA
aaagaagtataaattagaaa

SEQ ID NO: 38456 - DNA, 20 bp, synthetic construct
  misc_feature 1..20: note = chemically synthesized
  source 1..20: mol_type = other DNA
cttaggctcagaaaatatta

SEQ ID NO: 38457 - DNA, 20 bp, synthetic construct
  misc_feature 1..20: note = chemically synthesized
  source 1..20: mol_type = other DNA
ctcagaaaatattaaggaat

SEQ ID NO: 38458 - DNA, 20 bp, synthetic construct
  misc_feature 1..20: note = chemically synthesized
  source 1..20: mol_type = other DNA
actttatgaacaaagatgtg

SEQ ID NO: 38459 - DNA, 20 bp, synthetic construct
  misc_feature 1..20: note = chemically synthesized
  source 1..20: mol_type = other DNA
agtttccttaactgtagagc

SEQ ID NO: 38460 - DNA, 20 bp, synthetic construct
  misc_feature 1..20: note = chemically synthesized
  source 1..20: mol_type = other DNA
ctgtttcataggactgttgt

SEQ ID NO: 38461 - DNA, 20 bp, synthetic construct
  misc_feature 1..20: note = chemically synthesized
  source 1..20: mol_type = other DNA
attataagcttgtgcctgga

SEQ ID NO: 38462 - DNA, 20 bp, synthetic construct
  misc_feature 1..20: note = chemically synthesized
  source 1..20: mol_type = other DNA
caataaaatgtacacagcgt

SEQ ID NO: 38463 - DNA, 20 bp, synthetic construct
  misc_feature 1..20: note = chemically synthesized
  source 1..20: mol_type = other DNA
tactattttaaccatttttg

SEQ ID NO: 38464 - DNA, 20 bp, synthetic construct
  misc_feature 1..20: note = chemically synthesized
  source 1..20: mol_type = other DNA
tgcaaccatcatcatatttc

SEQ ID NO: 38465 - DNA, 20 bp, synthetic construct
  misc_feature 1..20: note = chemically synthesized
  source 1..20: mol_type = other DNA
acaaaactcattatgtaatg

SEQ ID NO: 38466 - DNA, 20 bp, synthetic construct
  misc_feature 1..20: note = chemically synthesized
  source 1..20: mol_type = other DNA
gtaatgttgagtgaaaaaat

SEQ ID NO: 38467 - DNA, 20 bp, synthetic construct
  misc_feature 1..20: note = chemically synthesized
  source 1..20: mol_type = other DNA
tatatgacgtttacactctc

SEQ ID NO: 38468 - DNA, 20 bp, synthetic construct
  misc_feature 1..20: note = chemically synthesized
  source 1..20: mol_type = other DNA
tttacactctccagggttca

SEQ ID NO: 38469 - DNA, 20 bp, synthetic construct
  misc_feature 1..20: note = chemically synthesized
  source 1..20: mol_type = other DNA
tcaccactgctctgttcttc

SEQ ID NO: 38470 - DNA, 20 bp, synthetic construct
  misc_feature 1..20: note = chemically synthesized
  source 1..20: mol_type = other DNA
aagcccagctccctgtgatt

SEQ ID NO: 38471 - DNA, 20 bp, synthetic construct
  misc_feature 1..20: note = chemically synthesized
  source 1..20: mol_type = other DNA
gaatgaagtgtgcaatcgct

SEQ ID NO: 38472 - DNA, 20 bp, synthetic construct
  misc_feature 1..20: note = chemically synthesized
  source 1..20: mol_type = other DNA
tgtgcaatcgctatgagttt

SEQ ID NO: 38473 - DNA, 20 bp, synthetic construct
  misc_feature 1..20: note = chemically synthesized
  source 1..20: mol_type = other DNA
cgctatgagtttctgaatgg

SEQ ID NO: 38474 - DNA, 20 bp, synthetic construct
  misc_feature 1..20: note = chemically synthesized
  source 1..20: mol_type = other DNA
tcagtctcagtcccttagac

SEQ ID NO: 38475 - DNA, 20 bp, synthetic construct
  misc_feature 1..20: note = chemically synthesized
  source 1..20: mol_type = other DNA
tagacttgagtcccaaagta

SEQ ID NO: 38476 - DNA, 20 bp, synthetic construct
  misc_feature 1..20: note = chemically synthesized
  source 1..20: mol_type = other DNA
cccaaagtagcgaattcaag

SEQ ID NO: 38477 - DNA, 20 bp, synthetic construct
  misc_feature 1..20: note = chemically synthesized
  source 1..20: mol_type = other DNA
ccaaggggacttcttggggc

SEQ ID NO: 38478 - DNA, 20 bp, synthetic construct
  misc_feature 1..20: note = chemically synthesized
  source 1..20: mol_type = other DNA
cctcagaccactcaccctcc

SEQ ID NO: 38479 - DNA, 20 bp, synthetic construct
  misc_feature 1..20: note = chemically synthesized
  source 1..20: mol_type = other DNA
ttctggtagggaaggaggta

SEQ ID NO: 38480 - DNA, 20 bp, synthetic construct
  misc_feature 1..20: note = chemically synthesized
  source 1..20: mol_type = other DNA
gctcagatattgctgatgat

SEQ ID NO: 38481 - DNA, 20 bp, synthetic construct
  misc_feature 1..20: note = chemically synthesized
  source 1..20: mol_type = other DNA
aattgatttacaactggggc

SEQ ID NO: 38482 - DNA, 20 bp, synthetic construct
  misc_feature 1..20: note = chemically synthesized
  source 1..20: mol_type = other DNA
cgaaaatgtaagattgcacc

SEQ ID NO: 38483 - DNA, 20 bp, synthetic construct
  misc_feature 1..20: note = chemically synthesized
  source 1..20: mol_type = other DNA
ctcactgcaacttccacctc

SEQ ID NO: 38484 - DNA, 20 bp, synthetic construct
  misc_feature 1..20: note = chemically synthesized
  source 1..20: mol_type = other DNA
cttccacctcctgggttcaa

SEQ ID NO: 38485 - DNA, 20 bp, synthetic construct
  misc_feature 1..20: note = chemically synthesized
  source 1..20: mol_type = other DNA
actccagcctccctagtagc

SEQ ID NO: 38486 - DNA, 20 bp, synthetic construct
  misc_feature 1..20: note = chemically synthesized
  source 1..20: mol_type = other DNA
ttttgtatttttagtagaga

SEQ ID NO: 38487 - DNA, 20 bp, synthetic construct
  misc_feature 1..20: note = chemically synthesized
  source 1..20: mol_type = other DNA
gtcttggcctcccaaagtgc

SEQ ID NO: 38488 - DNA, 20 bp, synthetic construct
  misc_feature 1..20: note = chemically synthesized
  source 1..20: mol_type = other DNA
ctcccaaagtgctgggatta

SEQ ID NO: 38489 - DNA, 20 bp, synthetic construct
  misc_feature 1..20: note = chemically synthesized
  source 1..20: mol_type = other DNA
tttatttaagccacaactac

SEQ ID NO: 38490 - DNA, 20 bp, synthetic construct
  misc_feature 1..20: note = chemically synthesized
  source 1..20: mol_type = other DNA
gccacaactactagaatagg

SEQ ID NO: 38491 - DNA, 20 bp, synthetic construct
  misc_feature 1..20: note = chemically synthesized
  source 1..20: mol_type = other DNA
tcttgctctgtcacccaggc

SEQ ID NO: 38492 - DNA, 20 bp, synthetic construct
  misc_feature 1..20: note = chemically synthesized
  source 1..20: mol_type = other DNA
gcctcagcctacttagtagc

SEQ ID NO: 38493 - DNA, 20 bp, synthetic construct
  misc_feature 1..20: note = chemically synthesized
  source 1..20: mol_type = other DNA
ttttgtattttttgtagaga

SEQ ID NO: 38494 - DNA, 20 bp, synthetic construct
  misc_feature 1..20: note = chemically synthesized
  source 1..20: mol_type = other DNA
gccgtggcctcccaaaatgc

SEQ ID NO: 38495 - DNA, 20 bp, synthetic construct
  misc_feature 1..20: note = chemically synthesized
  source 1..20: mol_type = other DNA
gagccaccaccccctcctgg

SEQ ID NO: 38496 - DNA, 20 bp, synthetic construct
  misc_feature 1..20: note = chemically synthesized
  source 1..20: mol_type = other DNA
tttataattacagaaaacat

SEQ ID NO: 38497 - DNA, 20 bp, synthetic construct
  misc_feature 1..20: note = chemically synthesized
  source 1..20: mol_type = other DNA
agaaaacatgtgagttcact

SEQ ID NO: 38498 - DNA, 20 bp, synthetic construct
  misc_feature 1..20: note = chemically synthesized
  source 1..20: mol_type = other DNA
catttcggcacagtttggta

SEQ ID NO: 38499 - DNA, 20 bp, synthetic construct
  misc_feature 1..20: note = chemically synthesized
  source 1..20: mol_type = other DNA
gctcgtaaactaagacctga

SEQ ID NO: 38500 - DNA, 20 bp, synthetic construct
  misc_feature 1..20: note = chemically synthesized
  source 1..20: mol_type = other DNA
tgtgtctatcagctgcaccc

SEQ ID NO: 38501 - DNA, 20 bp, synthetic construct
  misc_feature 1..20: note = chemically synthesized
  source 1..20: mol_type = other DNA
tggaaagcttgagggaggct

SEQ ID NO: 38502 - DNA, 20 bp, synthetic construct
  misc_feature 1..20: note = chemically synthesized
  source 1..20: mol_type = other DNA
tggatgtgcagcacttggca

SEQ ID NO: 38503 - DNA, 20 bp, synthetic construct
  misc_feature 1..20: note = chemically synthesized
  source 1..20: mol_type = other DNA
tttattttatccaaaagaaa

SEQ ID NO: 38504 - DNA, 20 bp, synthetic construct
  misc_feature 1..20: note = chemically synthesized
  source 1..20: mol_type = other DNA
atcaggaaagatgaaggtct

SEQ ID NO: 38505 - DNA, 20 bp, synthetic construct
  misc_feature 1..20: note = chemically synthesized
  source 1..20: mol_type = other DNA
gaaggtctaggggtgaggga

SEQ ID NO: 38506 - DNA, 20 bp, synthetic construct
  misc_feature 1..20: note = chemically synthesized
  source 1..20: mol_type = other DNA
aaccctgctgagccagtggc

SEQ ID NO: 38507 - DNA, 20 bp, synthetic construct
  misc_feature 1..20: note = chemically synthesized
  source 1..20: mol_type = other DNA
ccagtggcatgggtctctga

SEQ ID NO: 38508 - DNA, 20 bp, synthetic construct
  misc_feature 1..20: note = chemically synthesized
  source 1..20: mol_type = other DNA
ttaatttgactatctggttt

SEQ ID NO: 38509 - DNA, 20 bp, synthetic construct
  misc_feature 1..20: note = chemically synthesized
  source 1..20: mol_type = other DNA
catgtaagtcaacaatgtcc

SEQ ID NO: 38510 - DNA, 20 bp, synthetic construct
  misc_feature 1..20: note = chemically synthesized
  source 1..20: mol_type = other DNA
acatagtttttttaaattat

SEQ ID NO: 38511 - DNA, 20 bp, synthetic construct
  misc_feature 1..20: note = chemically synthesized
  source 1..20: mol_type = other DNA
cgtgaagactgtcacggtgc

SEQ ID NO: 38512 - DNA, 20 bp, synthetic construct
  misc_feature 1..20: note = chemically synthesized
  source 1..20: mol_type = other DNA
aagactgtcacggtgctgga

SEQ ID NO: 38513 - DNA, 20 bp, synthetic construct
  misc_feature 1..20: note = chemically synthesized
  source 1..20: mol_type = other DNA
ggttgatttttctaatctaa

SEQ ID NO: 38514 - DNA, 20 bp, synthetic construct
  misc_feature 1..20: note = chemically synthesized
  source 1..20: mol_type = other DNA
ccattgtagctaactatgca

SEQ ID NO: 38515 - DNA, 20 bp, synthetic construct
  misc_feature 1..20: note = chemically synthesized
  source 1..20: mol_type = other DNA
tgaaacaatgaaataactct

SEQ ID NO: 38516 - DNA, 20 bp, synthetic construct
  misc_feature 1..20: note = chemically synthesized
  source 1..20: mol_type = other DNA
ttggttccttgacctgttca

SEQ ID NO: 38517 - DNA, 20 bp, synthetic construct
  misc_feature 1..20: note = chemically synthesized
  source 1..20: mol_type = other DNA
atttctctctttgttatggc

SEQ ID NO: 38518 - DNA, 20 bp, synthetic construct
  misc_feature 1..20: note = chemically synthesized
  source 1..20: mol_type = other DNA
ataatgattcaacaaatact

SEQ ID NO: 38519 - DNA, 20 bp, synthetic construct
  misc_feature 1..20: note = chemically synthesized
  source 1..20: mol_type = other DNA
acaaatactcagggtatttg

SEQ ID NO: 38520 - DNA, 20 bp, synthetic construct
  misc_feature 1..20: note = chemically synthesized
  source 1..20: mol_type = other DNA
atactcagggtatttgttga

SEQ ID NO: 38521 - DNA, 20 bp, synthetic construct
  misc_feature 1..20: note = chemically synthesized
  source 1..20: mol_type = other DNA
catacacaccgtgtgtgatt

SEQ ID NO: 38522 - DNA, 20 bp, synthetic construct
  misc_feature 1..20: note = chemically synthesized
  source 1..20: mol_type = other DNA
tatttagctcatggtatagg

SEQ ID NO: 38523 - DNA, 20 bp, synthetic construct
  misc_feature 1..20: note = chemically synthesized
  source 1..20: mol_type = other DNA
aatcaaggaaataaagaaac

SEQ ID NO: 38524 - DNA, 20 bp, synthetic construct
  misc_feature 1..20: note = chemically synthesized
  source 1..20: mol_type = other DNA
ggttaattgtttgccacttg

SEQ ID NO: 38525 - DNA, 20 bp, synthetic construct
  misc_feature 1..20: note = chemically synthesized
  source 1..20: mol_type = other DNA
aggcaacagaggaggcgagc

SEQ ID NO: 38526 - DNA, 20 bp, synthetic construct
  misc_feature 1..20: note = chemically synthesized
  source 1..20: mol_type = other DNA
gaggaggcgagcaaggattc

SEQ ID NO: 38527 - DNA, 20 bp, synthetic construct
  misc_feature 1..20: note = chemically synthesized
  source 1..20: mol_type = other DNA
cctgctggtgcctttgtgag

SEQ ID NO: 38528 - DNA, 20 bp, synthetic construct
  misc_feature 1..20: note = chemically synthesized
  source 1..20: mol_type = other DNA
tcccttgaggcaaatctctg

SEQ ID NO: 38529 - DNA, 20 bp, synthetic construct
  misc_feature 1..20: note = chemically synthesized
  source 1..20: mol_type = other DNA
gaggcaaatctctggagggt

SEQ ID NO: 38530 - DNA, 20 bp, synthetic construct
  misc_feature 1..20: note = chemically synthesized
  source 1..20: mol_type = other DNA
tataaatcacctgtgaactc

SEQ ID NO: 38531 - DNA, 20 bp, synthetic construct
  misc_feature 1..20: note = chemically synthesized
  source 1..20: mol_type = other DNA
agatgaacttgccctgcagg

SEQ ID NO: 38532 - DNA, 20 bp, synthetic construct
  misc_feature 1..20: note = chemically synthesized
  source 1..20: mol_type = other DNA
gactttaaagtcaaacacat

SEQ ID NO: 38533 - DNA, 20 bp, synthetic construct
  misc_feature 1..20: note = chemically synthesized
  source 1..20: mol_type = other DNA
gagcaggagaagattaagca

SEQ ID NO: 38534 - DNA, 20 bp, synthetic construct
  misc_feature 1..20: note = chemically synthesized
  source 1..20: mol_type = other DNA
tgtctatgtctgtgtgtgta

SEQ ID NO: 38535 - DNA, 20 bp, synthetic construct
  misc_feature 1..20: note = chemically synthesized
  source 1..20: mol_type = other DNA
ctgtgtgtgtagggagtgca

SEQ ID NO: 38536 - DNA, 20 bp, synthetic construct
  misc_feature 1..20: note = chemically synthesized
  source 1..20: mol_type = other DNA
gtgtagggagtgcaggggat

SEQ ID NO: 38537 - DNA, 20 bp, synthetic construct
  misc_feature 1..20: note = chemically synthesized
  source 1..20: mol_type = other DNA
ctatttcagcccatggaaac

SEQ ID NO: 38538 - DNA, 20 bp, synthetic construct
  misc_feature 1..20: note = chemically synthesized
  source 1..20: mol_type = other DNA
tagaacaaacttctctgcca

SEQ ID NO: 38539 - DNA, 20 bp, synthetic construct
  misc_feature 1..20: note = chemically synthesized
  source 1..20: mol_type = other DNA
gttatctttccaatgtgtgc

SEQ ID NO: 38540 - DNA, 20 bp, synthetic construct
  misc_feature 1..20: note = chemically synthesized
  source 1..20: mol_type = other DNA
ttgccatatgagccctggag

SEQ ID NO: 38541 - DNA, 20 bp, synthetic construct
  misc_feature 1..20: note = chemically synthesized
  source 1..20: mol_type = other DNA
gaggtgaatcagagaaacaa

SEQ ID NO: 38542 - DNA, 20 bp, synthetic construct
  misc_feature 1..20: note = chemically synthesized
  source 1..20: mol_type = other DNA
aagaaaaattgattctgttt

SEQ ID NO: 38543 - DNA, 20 bp, synthetic construct
  misc_feature 1..20: note = chemically synthesized
  source 1..20: mol_type = other DNA
ctagcaacatgagctgggga

SEQ ID NO: 38544 - DNA, 20 bp, synthetic construct
  misc_feature 1..20: note = chemically synthesized
  source 1..20: mol_type = other DNA
taaatggaagtttcctcttt

SEQ ID NO: 38545 - DNA, 20 bp, synthetic construct
  misc_feature 1..20: note = chemically synthesized
  source 1..20: mol_type = other DNA
tgaagtcacactgtgagcta

SEQ ID NO: 38546 - DNA, 20 bp, synthetic construct
  misc_feature 1..20: note = chemically synthesized
  source 1..20: mol_type = other DNA
gcacaactcttcctggaaaa

SEQ ID NO: 38547 - DNA, 20 bp, synthetic construct
  misc_feature 1..20: note = chemically synthesized
  source 1..20: mol_type = other DNA
agttcaaatgagaaacagtg

SEQ ID NO: 38548 - DNA, 20 bp, synthetic construct
  misc_feature 1..20: note = chemically synthesized
  source 1..20: mol_type = other DNA
aaacagtgcggggtgaagac

SEQ ID NO: 38549 - DNA, 20 bp, synthetic construct
  misc_feature 1..20: note = chemically synthesized
  source 1..20: mol_type = other DNA
tatctatcaagtgcttttta

SEQ ID NO: 38550 - DNA, 20 bp, synthetic construct
  misc_feature 1..20: note = chemically synthesized
  source 1..20: mol_type = other DNA
gctttttagtggattaggtt

SEQ ID NO: 38551 - DNA, 20 bp, synthetic construct
  misc_feature 1..20: note = chemically synthesized
  source 1..20: mol_type = other DNA
aggtcaggacaggcctttct

SEQ ID NO: 38552 - DNA, 20 bp, synthetic construct
  misc_feature 1..20: note = chemically synthesized
  source 1..20: mol_type = other DNA
ggacaggcctttctgagaat

SEQ ID NO: 38553 - DNA, 20 bp, synthetic construct
  misc_feature 1..20: note = chemically synthesized
  source 1..20: mol_type = other DNA
tctgttcatctgcctttcta

SEQ ID NO: 38554 - DNA, 20 bp, synthetic construct
  misc_feature 1..20: note = chemically synthesized
  source 1..20: mol_type = other DNA
tcctaaggagcctcaggaca

SEQ ID NO: 38555 - DNA, 20 bp, synthetic construct
  misc_feature 1..20: note = chemically synthesized
  source 1..20: mol_type = other DNA
tttacaatttcctctgaaat

SEQ ID NO: 38556 - DNA, 20 bp, synthetic construct
  misc_feature 1..20: note = chemically synthesized
  source 1..20: mol_type = other DNA
ctatcaacaccttggaaaaa

SEQ ID NO: 38557 - DNA, 20 bp, synthetic construct
  misc_feature 1..20: note = chemically synthesized
  source 1..20: mol_type = other DNA
tccaaggttcatttctacac

SEQ ID NO: 38558 - DNA, 20 bp, synthetic construct
  misc_feature 1..20: note = chemically synthesized
  source 1..20: mol_type = other DNA
caggaggtggaagcccctga

SEQ ID NO: 38559 - DNA, 20 bp, synthetic construct
  misc_feature 1..20: note = chemically synthesized
  source 1..20: mol_type = other DNA
cctgagagaatggaggtctg

SEQ ID NO: 38560 - DNA, 20 bp, synthetic construct
  misc_feature 1..20: note = chemically synthesized
  source 1..20: mol_type = other DNA
ccaagtcctgcatgctagac

SEQ ID NO: 38561 - DNA, 20 bp, synthetic construct
  misc_feature 1..20: note = chemically synthesized
  source 1..20: mol_type = other DNA
ctagacatgagtggaggagg

SEQ ID NO: 38562 - DNA, 20 bp, synthetic construct
  misc_feature 1..20: note = chemically synthesized
  source 1..20: mol_type = other DNA
gggggaatacctaggtagaa

SEQ ID NO: 38563 - DNA, 20 bp, synthetic construct
  misc_feature 1..20: note = chemically synthesized
  source 1..20: mol_type = other DNA
tcactgtgcagttaactttt

SEQ ID NO: 38564 - DNA, 20 bp, synthetic construct
  misc_feature 1..20: note = chemically synthesized
  source 1..20: mol_type = other DNA
cggttgcagttagtatacat

SEQ ID NO: 38565 - DNA, 20 bp, synthetic construct
  misc_feature 1..20: note = chemically synthesized
  source 1..20: mol_type = other DNA
tgagtgctatacaaccttct

SEQ ID NO: 38566 - DNA, 20 bp, synthetic construct
  misc_feature 1..20: note = chemically synthesized
  source 1..20: mol_type = other DNA
gaagcaatgcagccattacg

SEQ ID NO: 38567 - DNA, 20 bp, synthetic construct
  misc_feature 1..20: note = chemically synthesized
  source 1..20: mol_type = other DNA
taaaaagtatttctttaggt

SEQ ID NO: 38568 - DNA, 20 bp, synthetic construct
  misc_feature 1..20: note = chemically synthesized
  source 1..20: mol_type = other DNA
ctacgcattgacttatcttc

SEQ ID NO: 38569 - DNA, 20 bp, synthetic construct
  misc_feature 1..20: note = chemically synthesized
  source 1..20: mol_type = other DNA
cctccagcacacagcaggga

SEQ ID NO: 38570 - DNA, 20 bp, synthetic construct
  misc_feature 1..20: note = chemically synthesized
  source 1..20: mol_type = other DNA
ggctgcactctgtgtttttg

SEQ ID NO: 38571 - DNA, 20 bp, synthetic construct
  misc_feature 1..20: note = chemically synthesized
  source 1..20: mol_type = other DNA
ctagggaaggaaaaaagatc

SEQ ID NO: 38572 - DNA, 20 bp, synthetic construct
  misc_feature 1..20: note = chemically synthesized
  source 1..20: mol_type = other DNA
ctgcccccaagctgtagagc

SEQ ID NO: 38573 - DNA, 20 bp, synthetic construct
  misc_feature 1..20: note = chemically synthesized
  source 1..20: mol_type = other DNA
gcctacatctttctcctgtg

SEQ ID NO: 38574 - DNA, 20 bp, synthetic construct
  misc_feature 1..20: note = chemically synthesized
  source 1..20: mol_type = other DNA
ttatgggaccttgtaatctt

SEQ ID NO: 38575 - DNA, 20 bp, synthetic construct
  misc_feature 1..20: note = chemically synthesized
  source 1..20: mol_type = other DNA
cttaataagctcccctttgt

SEQ ID NO: 38576 - DNA, 20 bp, synthetic construct
  misc_feature 1..20: note = chemically synthesized
  source 1..20: mol_type = other DNA
cagaagtggttcttgaggaa

SEQ ID NO: 38577 - DNA, 20 bp, synthetic construct
  misc_feature 1..20: note = chemically synthesized
  source 1..20: mol_type = other DNA
ttcttgaggaacagaatatt

SEQ ID NO: 38578 - DNA, 20 bp, synthetic construct
  misc_feature 1..20: note = chemically synthesized
  source 1..20: mol_type = other DNA
gaggaacagaatattaagga

SEQ ID NO: 38579 - DNA, 20 bp, synthetic construct
  misc_feature 1..20: note = chemically synthesized
  source 1..20: mol_type = other DNA
gaacactgatagtacttggc

SEQ ID NO: 38580 - DNA, 20 bp, synthetic construct
  misc_feature 1..20: note = chemically synthesized
  source 1..20: mol_type = other DNA
tacttggcctgaattgttta

SEQ ID NO: 38581 - DNA, 20 bp, synthetic construct
  misc_feature 1..20: note = chemically synthesized
  source 1..20: mol_type = other DNA
ttcatcacttatgagaggca

SEQ ID NO: 38582 - DNA, 20 bp, synthetic construct
  misc_feature 1..20: note = chemically synthesized
  source 1..20: mol_type = other DNA
gaaagaaaatgatgatctca

SEQ ID NO: 38583 - DNA, 20 bp, synthetic construct
  misc_feature 1..20: note = chemically synthesized
  source 1..20: mol_type = other DNA
acaaatctgctaagattgcc

SEQ ID NO: 38584 - DNA, 20 bp, synthetic construct
  misc_feature 1..20: note = chemically synthesized
  source 1..20: mol_type = other DNA
ctgctaagattgccctgaat

SEQ ID NO: 38585 - DNA, 20 bp, synthetic construct
  misc_feature 1..20: note = chemically synthesized
  source 1..20: mol_type = other DNA
agttttaactcctgtagaga

SEQ ID NO: 38586 - DNA, 20 bp, synthetic construct
  misc_feature 1..20: note = chemically synthesized
  source 1..20: mol_type = other DNA
cagagacaagctgttatcat

SEQ ID NO: 38587 - DNA, 20 bp, synthetic construct
  misc_feature 1..20: note = chemically synthesized
  source 1..20: mol_type = other DNA
aaaaatgggaccctggaact

SEQ ID NO: 38588 - DNA, 20 bp, synthetic construct
  misc_feature 1..20: note = chemically synthesized
  source 1..20: mol_type = other DNA
gggaccctggaacttggagt

SEQ ID NO: 38589 - DNA, 20 bp, synthetic construct
  misc_feature 1..20: note = chemically synthesized
  source 1..20: mol_type = other DNA
ccctgatgaagctgaggaca

SEQ ID NO: 38590 - DNA, 20 bp, synthetic construct
  misc_feature 1..20: note = chemically synthesized
  source 1..20: mol_type = other DNA
tagcctttccacctttgtct

SEQ ID NO: 38591 - DNA, 20 bp, synthetic construct
  misc_feature 1..20: note = chemically synthesized
  source 1..20: mol_type = other DNA
aagaggcacccctaatgccc

SEQ ID NO: 38592 - DNA, 20 bp, synthetic construct
  misc_feature 1..20: note = chemically synthesized
  source 1..20: mol_type = other DNA
cgggccccagaggtgaggtt

SEQ ID NO: 38593 - DNA, 20 bp, synthetic construct
  misc_feature 1..20: note = chemically synthesized
  source 1..20: mol_type = other DNA
gaaatctggagaacaggcat

SEQ ID NO: 38594 - DNA, 20 bp, synthetic construct
  misc_feature 1..20: note = chemically synthesized
  source 1..20: mol_type = other DNA
tctggagaacaggcatggga

SEQ ID NO: 38595 - DNA, 20 bp, synthetic construct
  misc_feature 1..20: note = chemically synthesized
  source 1..20: mol_type = other DNA
caggcatgggaatggatatt

SEQ ID NO: 38596 - DNA, 20 bp, synthetic construct
  misc_feature 1..20: note = chemically synthesized
  source 1..20: mol_type = other DNA
gggaatggatattaagggta

SEQ ID NO: 38597 - DNA, 20 bp, synthetic construct
  misc_feature 1..20: note = chemically synthesized
  source 1..20: mol_type = other DNA
ggataatggtggaagggaca

SEQ ID NO: 38598 - DNA, 20 bp, synthetic construct
  misc_feature 1..20: note = chemically synthesized
  source 1..20: mol_type = other DNA
atggtggaagggacatagag

SEQ ID NO: 38599 - DNA, 20 bp, synthetic construct
  misc_feature 1..20: note = chemically synthesized
  source 1..20: mol_type = other DNA
ggacatagagttggatcaag

SEQ ID NO: 38600 - DNA, 20 bp, synthetic construct
  misc_feature 1..20: note = chemically synthesized
  source 1..20: mol_type = other DNA
ttggtttggccctactaagt

SEQ ID NO: 38601 - DNA, 20 bp, synthetic construct
  misc_feature 1..20: note = chemically synthesized
  source 1..20: mol_type = other DNA
tttgcttggttagctgaaat

SEQ ID NO: 38602 - DNA, 20 bp, synthetic construct
  misc_feature 1..20: note = chemically synthesized
  source 1..20: mol_type = other DNA
atccaaaggcttagggagat

SEQ ID NO: 38603 - DNA, 20 bp, synthetic construct
  misc_feature 1..20: note = chemically synthesized
  source 1..20: mol_type = other DNA
gcttagggagattaggatgg

SEQ ID NO: 38604 - DNA, 20 bp, synthetic construct
  misc_feature 1..20: note = chemically synthesized
  source 1..20: mol_type = other DNA
agggagattaggatggtgga

SEQ ID NO: 38605 - DNA, 20 bp, synthetic construct
  misc_feature 1..20: note = chemically synthesized
  source 1..20: mol_type = other DNA
gacctactcatcccagctgg

SEQ ID NO: 38606 - DNA, 20 bp, synthetic construct
  misc_feature 1..20: note = chemically synthesized
  source 1..20: mol_type = other DNA
ctacaaaatttaaatacaat

SEQ ID NO: 38607 - DNA, 20 bp, synthetic construct
  misc_feature 1..20: note = chemically synthesized
  source 1..20: mol_type = other DNA
tttaaatacaatgggaataa

SEQ ID NO: 38608 - DNA, 20 bp, synthetic construct
  misc_feature 1..20: note = chemically synthesized
  source 1..20: mol_type = other DNA
agcagaggcaaagcagccat

SEQ ID NO: 38609 - DNA, 20 bp, synthetic construct
  misc_feature 1..20: note = chemically synthesized
  source 1..20: mol_type = other DNA
ataaacaaaaaactgccagg

SEQ ID NO: 38610 - DNA, 20 bp, synthetic construct
  misc_feature 1..20: note = chemically synthesized
  source 1..20: mol_type = other DNA
agaatggactaaagactaat

SEQ ID NO: 38611 - DNA, 20 bp, synthetic construct
  misc_feature 1..20: note = chemically synthesized
  source 1..20: mol_type = other DNA
taatctgaattataaaaaca

SEQ ID NO: 38612 - DNA, 20 bp, synthetic construct
  misc_feature 1..20: note = chemically synthesized
  source 1..20: mol_type = other DNA
tgttacagttccagaaccca

SEQ ID NO: 38613 - DNA, 20 bp, synthetic construct
  misc_feature 1..20: note = chemically synthesized
  source 1..20: mol_type = other DNA
cccactgaatgaaggggagg

SEQ ID NO: 38614 - DNA, 20 bp, synthetic construct
  misc_feature 1..20: note = chemically synthesized
  source 1..20: mol_type = other DNA
ggagacctctggccttttac

SEQ ID NO: 38615 - DNA, 20 bp, synthetic construct
  misc_feature 1..20: note = chemically synthesized
  source 1..20: mol_type = other DNA
ctctgagctgacgttgattc

SEQ ID NO: 38616 - DNA, 20 bp, synthetic construct
  misc_feature 1..20: note = chemically synthesized
  source 1..20: mol_type = other DNA
tatggaggttaggtaattaa

SEQ ID NO: 38617 - DNA, 20 bp, synthetic construct
  misc_feature 1..20: note = chemically synthesized
  source 1..20: mol_type = other DNA
tctgacttacagtggttcca

SEQ ID NO: 38618 - DNA, 20 bp, synthetic construct
  misc_feature 1..20: note = chemically synthesized
  source 1..20: mol_type = other DNA
cacattggctccctgactgg

SEQ ID NO: 38619 - DNA, 20 bp, synthetic construct
  misc_feature 1..20: note = chemically synthesized
  source 1..20: mol_type = other DNA
atcaaggacttgaaagacgc

SEQ ID NO: 38620 - DNA, 20 bp, synthetic construct
  misc_feature 1..20: note = chemically synthesized
  source 1..20: mol_type = other DNA
ttgacctgtgcagaggacag

SEQ ID NO: 38621 - DNA, 20 bp, synthetic construct
  misc_feature 1..20: note = chemically synthesized
  source 1..20: mol_type = other DNA
atggatcttggaaaatgatg

SEQ ID NO: 38622 - DNA, 20 bp, synthetic construct
  misc_feature 1..20: note = chemically synthesized
  source 1..20: mol_type = other DNA
tacctttaccaccctacctc

SEQ ID NO: 38623 - DNA, 20 bp, synthetic construct
  misc_feature 1..20: note = chemically synthesized
  source 1..20: mol_type = other DNA
cattcatgacattatgatga

SEQ ID NO: 38624 - DNA, 20 bp, synthetic construct
  misc_feature 1..20: note = chemically synthesized
  source 1..20: mol_type = other DNA
ggtgagacatttgtatgcca

SEQ ID NO: 38625 - DNA, 20 bp, synthetic construct
  misc_feature 1..20: note = chemically synthesized
  source 1..20: mol_type = other DNA
ttctacctcggtaaaatttc

SEQ ID NO: 38626 - DNA, 20 bp, synthetic construct
  misc_feature 1..20: note = chemically synthesized
  source 1..20: mol_type = other DNA
acaatgcctggtgggcctat

SEQ ID NO: 38627 - DNA, 20 bp, synthetic construct
  misc_feature 1..20: note = chemically synthesized
  source 1..20: mol_type = other DNA
ggaggcaacacattcctcgt

SEQ ID NO: 38628 - DNA, 20 bp, synthetic construct
  misc_feature 1..20: note = chemically synthesized
  source 1..20: mol_type = other DNA
gtgttactctggcccattta

SEQ ID NO: 38629 - DNA, 20 bp, synthetic construct
  misc_feature 1..20: note = chemically synthesized
  source 1..20: mol_type = other DNA
ttgaggtgtcagtggcagat

SEQ ID NO: 38630 - DNA, 20 bp, synthetic construct
  misc_feature 1..20: note = chemically synthesized
  source 1..20: mol_type = other DNA
cctttggcaggcccccatag

SEQ ID NO: 38631 - DNA, 20 bp, synthetic construct
  misc_feature 1..20: note = chemically synthesized
  source 1..20: mol_type = other DNA
tgaatcacagtggagacctc

SEQ ID NO: 38632 - DNA, 20 bp, synthetic construct
  misc_feature 1..20: note = chemically synthesized
  source 1..20: mol_type = other DNA
tggtaactgaacgtttgact

SEQ ID NO: 38633 - DNA, 20 bp, synthetic construct
  misc_feature 1..20: note = chemically synthesized
  source 1..20: mol_type = other DNA
ctgacccatctagccatgaa

SEQ ID NO: 38634 - DNA, 20 bp, synthetic construct
  misc_feature 1..20: note = chemically synthesized
  source 1..20: mol_type = other DNA
cctgcaccaatggcctcatg

SEQ ID NO: 38635 - DNA, 20 bp, synthetic construct
  misc_feature 1..20: note = chemically synthesized
  source 1..20: mol_type = other DNA
tatgtaataacttttggttt

SEQ ID NO: 38636 - DNA, 20 bp, synthetic construct
  misc_feature 1..20: note = chemically synthesized
  source 1..20: mol_type = other DNA
tggtgcgtttctggttgtat

SEQ ID NO: 38637 - DNA, 20 bp, synthetic construct
  misc_feature 1..20: note = chemically synthesized
  source 1..20: mol_type = other DNA
ttgaagattatgtatgattt

SEQ ID NO: 38638 - DNA, 20 bp, synthetic construct
  misc_feature 1..20: note = chemically synthesized
  source 1..20: mol_type = other DNA
tatgatttcaggatgtgtgt

SEQ ID NO: 38639 - DNA, 20 bp, synthetic construct
  misc_feature 1..20: note = chemically synthesized
  source 1..20: mol_type = other DNA
tgtatgggttcaagttgaca

SEQ ID NO: 38640 - DNA, 20 bp, synthetic construct
  misc_feature 1..20: note = chemically synthesized
  source 1..20: mol_type = other DNA
ggttaatactgtcaacttga

SEQ ID NO: 38641 - DNA, 20 bp, synthetic construct
  misc_feature 1..20: note = chemically synthesized
  source 1..20: mol_type = other DNA
ttaatctcggttatgtctgt

SEQ ID NO: 38642 - DNA, 20 bp, synthetic construct
  misc_feature 1..20: note = chemically synthesized
  source 1..20: mol_type = other DNA
tggcaaaaggagattaacat

SEQ ID NO: 38643 - DNA, 20 bp, synthetic construct
  misc_feature 1..20: note = chemically synthesized
  source 1..20: mol_type = other DNA
atacaactatcctcatacaa

SEQ ID NO: 38644 - DNA, 20 bp, synthetic construct
  misc_feature 1..20: note = chemically synthesized
  source 1..20: mol_type = other DNA
gcacaagtgtacacatgcat

SEQ ID NO: 38645 - DNA, 20 bp, synthetic construct
  misc_feature 1..20: note = chemically synthesized
  source 1..20: mol_type = other DNA
ccacttcatggctagatggg

SEQ ID NO: 38646 - DNA, 20 bp, synthetic construct
  misc_feature 1..20: note = chemically synthesized
  source 1..20: mol_type = other DNA
ggtctcatgccactggaacc

SEQ ID NO: 38647 - DNA, 20 bp, synthetic construct
  misc_feature 1..20: note = chemically synthesized
  source 1..20: mol_type = other DNA
accctagaaattttaccgag

SEQ ID NO: 38648 - DNA, 20 bp, synthetic construct
  misc_feature 1..20: note = chemically synthesized
  source 1..20: mol_type = other DNA
tgggtcttatggacaggaat

SEQ ID NO: 38649 - DNA, 20 bp, synthetic construct
  misc_feature 1..20: note = chemically synthesized
  source 1..20: mol_type = other DNA
cccactggaaccactgtaag

SEQ ID NO: 38650 - DNA, 20 bp, synthetic construct
  misc_feature 1..20: note = chemically synthesized
  source 1..20: mol_type = other DNA
ggtctccttagggaaggatg

SEQ ID NO: 38651 - DNA, 20 bp, synthetic construct
  misc_feature 1..20: note = chemically synthesized
  source 1..20: mol_type = other DNA
atggggtttcaccattttag

SEQ ID NO: 38652 - DNA, 20 bp, synthetic construct
  misc_feature 1..20: note = chemically synthesized
  source 1..20: mol_type = other DNA
cccgagctgcaacattaaat

SEQ ID NO: 38653 - DNA, 20 bp, synthetic construct
  misc_feature 1..20: note = chemically synthesized
  source 1..20: mol_type = other DNA
cagatttctgccaatataaa

SEQ ID NO: 38654 - DNA, 20 bp, synthetic construct
  misc_feature 1..20: note = chemically synthesized
  source 1..20: mol_type = other DNA
gcattaggggtgcctcttga

SEQ ID NO: 38655 - DNA, 20 bp, synthetic construct
  misc_feature 1..20: note = chemically synthesized
  source 1..20: mol_type = other DNA
cagaagtcccaaaaccaatg

SEQ ID NO: 38656 - DNA, 20 bp, synthetic construct
  misc_feature 1..20: note = chemically synthesized
  source 1..20: mol_type = other DNA
agcaggaaggatccagcaca

SEQ ID NO: 38657 - DNA, 20 bp, synthetic construct
  misc_feature 1..20: note = chemically synthesized
  source 1..20: mol_type = other DNA
gagtagcaggtgaaagctca

SEQ ID NO: 38658 - DNA, 20 bp, synthetic construct
  misc_feature 1..20: note = chemically synthesized
  source 1..20: mol_type = other DNA
caggtgaaagctcacaagaa

SEQ ID NO: 38659 - DNA, 20 bp, synthetic construct
  misc_feature 1..20: note = chemically synthesized
  source 1..20: mol_type = other DNA
tagtaggggcagggaccagt

SEQ ID NO: 38660 - DNA, 20 bp, synthetic construct
  misc_feature 1..20: note = chemically synthesized
  source 1..20: mol_type = other DNA
ttgagataaacagtggtaag

SEQ ID NO: 38661 - DNA, 20 bp, synthetic construct
  misc_feature 1..20: note = chemically synthesized
  source 1..20: mol_type = other DNA
cgtagaagtaattccaacct

SEQ ID NO: 38662 - DNA, 20 bp, synthetic construct
  misc_feature 1..20: note = chemically synthesized
  source 1..20: mol_type = other DNA
acaatattgcaaatcattat

SEQ ID NO: 38663 - DNA, 20 bp, synthetic construct
  misc_feature 1..20: note = chemically synthesized
  source 1..20: mol_type = other DNA
tctaaccataaaatcttaaa

SEQ ID NO: 38664 - DNA, 20 bp, synthetic construct
  misc_feature 1..20: note = chemically synthesized
  source 1..20: mol_type = other DNA
gttgatctgctaatccctgt

SEQ ID NO: 38665 - DNA, 20 bp, synthetic construct
  misc_feature 1..20: note = chemically synthesized
  source 1..20: mol_type = other DNA
gacacaccactattagttgg

SEQ ID NO: 38666 - DNA, 20 bp, synthetic construct
  misc_feature 1..20: note = chemically synthesized
  source 1..20: mol_type = other DNA
atgccgatgacaagtatcca

SEQ ID NO: 38667 - DNA, 20 bp, synthetic construct
  misc_feature 1..20: note = chemically synthesized
  source 1..20: mol_type = other DNA
agatgaacagattctcattc

SEQ ID NO: 38668 - DNA, 20 bp, synthetic construct
  misc_feature 1..20: note = chemically synthesized
  source 1..20: mol_type = other DNA
tagatatatcaaaatatcat

SEQ ID NO: 38669 - DNA, 20 bp, synthetic construct
  misc_feature 1..20: note = chemically synthesized
  source 1..20: mol_type = other DNA
ttgctaggaaatatcccaaa

SEQ ID NO: 38670 - DNA, 20 bp, synthetic construct
  misc_feature 1..20: note = chemically synthesized
  source 1..20: mol_type = other DNA
aatagggtttatttgttggt

SEQ ID NO: 38671 - DNA, 20 bp, synthetic construct
  misc_feature 1..20: note = chemically synthesized
  source 1..20: mol_type = other DNA
aatgtattttattaatggtg

SEQ ID NO: 38672 - DNA, 20 bp, synthetic construct
  misc_feature 1..20: note = chemically synthesized
  source 1..20: mol_type = other DNA
tctcactgagcatggctgta

SEQ ID NO: 38673 - DNA, 20 bp, synthetic construct
  misc_feature 1..20: note = chemically synthesized
  source 1..20: mol_type = other DNA
attggaaagataacacgtcc

SEQ ID NO: 38674 - DNA, 20 bp, synthetic construct
  misc_feature 1..20: note = chemically synthesized
  source 1..20: mol_type = other DNA
gctttccaaaagagcttatc

SEQ ID NO: 38675 - DNA, 20 bp, synthetic construct
  misc_feature 1..20: note = chemically synthesized
  source 1..20: mol_type = other DNA
cctagtttccatgggctgaa

SEQ ID NO: 38676 - DNA, 20 bp, synthetic construct
  misc_feature 1..20: note = chemically synthesized
  source 1..20: mol_type = other DNA
ttactcaggccataacaaag

SEQ ID NO: 38677 - DNA, 20 bp, synthetic construct
  misc_feature 1..20: note = chemically synthesized
  source 1..20: mol_type = other DNA
tgtaggcacactcttttaga

SEQ ID NO: 38678 - DNA, 20 bp, synthetic construct
  misc_feature 1..20: note = chemically synthesized
  source 1..20: mol_type = other DNA
ggaaattaaacttatttttt

SEQ ID NO: 38679 - DNA, 20 bp, synthetic construct
  misc_feature 1..20: note = chemically synthesized
  source 1..20: mol_type = other DNA
tgtatttttactacattgtg

SEQ ID NO: 38680 - DNA, 20 bp, synthetic construct
  misc_feature 1..20: note = chemically synthesized
  source 1..20: mol_type = other DNA
aaactatgtcttacctgatt

SEQ ID NO: 38681 - DNA, 20 bp, synthetic construct
  misc_feature 1..20: note = chemically synthesized
  source 1..20: mol_type = other DNA
ttgggactggccagcagtgc

SEQ ID NO: 38682 - DNA, 20 bp, synthetic construct
  misc_feature 1..20: note = chemically synthesized
  source 1..20: mol_type = other DNA
ctactaagtaggctgaggca

SEQ ID NO: 38683 - DNA, 20 bp, synthetic construct
  misc_feature 1..20: note = chemically synthesized
  source 1..20: mol_type = other DNA
agatggaggttgcagtgagc

SEQ ID NO: 38684 - DNA, 20 bp, synthetic construct
  misc_feature 1..20: note = chemically synthesized
  source 1..20: mol_type = other DNA
ctccagcctgggtgacagag

SEQ ID NO: 38685 - DNA, 20 bp, synthetic construct
  misc_feature 1..20: note = chemically synthesized
  source 1..20: mol_type = other DNA
cagagcaagaatgtctcagg

SEQ ID NO: 38686 - DNA, 20 bp, synthetic construct
  misc_feature 1..20: note = chemically synthesized
  source 1..20: mol_type = other DNA
catgaagtaaagcaagagtg

SEQ ID NO: 38687 - DNA, 20 bp, synthetic construct
  misc_feature 1..20: note = chemically synthesized
  source 1..20: mol_type = other DNA
accctctacctccttcccta

SEQ ID NO: 38688 - DNA, 20 bp, synthetic construct
  misc_feature 1..20: note = chemically synthesized
  source 1..20: mol_type = other DNA
agtggatttgactcttccat

SEQ ID NO: 38689 - DNA, 20 bp, synthetic construct
  misc_feature 1..20: note = chemically synthesized
  source 1..20: mol_type = other DNA
cacagggagctgggcttcct

SEQ ID NO: 38690 - DNA, 20 bp, synthetic construct
  misc_feature 1..20: note = chemically synthesized
  source 1..20: mol_type = other DNA
tacctgtgtttaaaaagatg

SEQ ID NO: 38691 - DNA, 20 bp, synthetic construct
  misc_feature 1..20: note = chemically synthesized
  source 1..20: mol_type = other DNA
ttctttgcttttaaaaccat

SEQ ID NO: 38692 - DNA, 20 bp, synthetic construct
  misc_feature 1..20: note = chemically synthesized
  source 1..20: mol_type = other DNA
taatgtttaaatgtagagtc

SEQ ID NO: 38693 - DNA, 20 bp, synthetic construct
  misc_feature 1..20: note = chemically synthesized
  source 1..20: mol_type = other DNA
gtacattttattgcaataaa

SEQ ID NO: 38694 - DNA, 20 bp, synthetic construct
  misc_feature 1..20: note = chemically synthesized
  source 1..20: mol_type = other DNA
tatgacagtgtaaaatgtca

SEQ ID NO: 38695 - DNA, 20 bp, synthetic construct
  misc_feature 1..20: note = chemically synthesized
  source 1..20: mol_type = other DNA
ttttgcaagcccagctttca

SEQ ID NO: 38696 - DNA, 20 bp, synthetic construct
  misc_feature 1..20: note = chemically synthesized
  source 1..20: mol_type = other DNA
cttagatcattgactttggt

SEQ ID NO: 38697 - DNA, 20 bp, synthetic construct
  misc_feature 1..20: note = chemically synthesized
  source 1..20: mol_type = other DNA
gtgtgagggagcaccgttct

SEQ ID NO: 38698 - DNA, 20 bp, synthetic construct
  misc_feature 1..20: note = chemically synthesized
  source 1..20: mol_type = other DNA
cctgatgtcattattgacat

SEQ ID NO: 38699 - DNA, 20 bp, synthetic construct
  misc_feature 1..20: note = chemically synthesized
  source 1..20: mol_type = other DNA
tcatggtctagttagtgttc

SEQ ID NO: 38700 - DNA, 20 bp, synthetic construct
  misc_feature 1..20: note = chemically synthesized
  source 1..20: mol_type = other DNA
agcctagtgggggatggtgg

SEQ ID NO: 38701 - DNA, 20 bp, synthetic construct
  misc_feature 1..20: note = chemically synthesized
  source 1..20: mol_type = other DNA
gtgtggatggttgtggggca

SEQ ID NO: 38702 - DNA, 20 bp, synthetic construct
  misc_feature 1..20: note = chemically synthesized
  source 1..20: mol_type = other DNA
tgatgataatggtgatggtg

SEQ ID NO: 38703 - DNA, 20 bp, synthetic construct
  misc_feature 1..20: note = chemically synthesized
  source 1..20: mol_type = other DNA
ggtctcacctgcaggtccac

SEQ ID NO: 38704 - DNA, 20 bp, synthetic construct
  misc_feature 1..20: note = chemically synthesized
  source 1..20: mol_type = other DNA
ctctgcccgatgcttggtag

SEQ ID NO: 38705 - DNA, 20 bp, synthetic construct
  misc_feature 1..20: note = chemically synthesized
  source 1..20: mol_type = other DNA
tgcagtcaaaggctctgggg

SEQ ID NO: 38706 - DNA, 20 bp, synthetic construct
  misc_feature 1..20: note = chemically synthesized
  source 1..20: mol_type = other DNA
tgaaagctgggcttgcaaaa

SEQ ID NO: 38707 - DNA, 20 bp, synthetic construct
  misc_feature 1..20: note = chemically synthesized
  source 1..20: mol_type = other DNA
ccgttctatttgaatttggc

SEQ ID NO: 38708 - DNA, 20 bp, synthetic construct
  misc_feature 1..20: note = chemically synthesized
  source 1..20: mol_type = other DNA
aaataaagcagtttttcaca

SEQ ID NO: 38709 - DNA, 20 bp, synthetic construct
  misc_feature 1..20: note = chemically synthesized
  source 1..20: mol_type = other DNA
caaaagaataaacacaacca

SEQ ID NO: 38710 - DNA, 20 bp, synthetic construct
  misc_feature 1..20: note = chemically synthesized
  source 1..20: mol_type = other DNA
aattgtcaaagaagtataaa

SEQ ID NO: 38711 - DNA, 20 bp, synthetic construct
  misc_feature 1..20: note = chemically synthesized
  source 1..20: mol_type = other DNA
ttttacactgtcataacctt

SEQ ID NO: 38712 - DNA, 20 bp, synthetic construct
  misc_feature 1..20: note = chemically synthesized
  source 1..20: mol_type = other DNA
attggcagtgttattgggag

SEQ ID NO: 38713 - DNA, 20 bp, synthetic construct
  misc_feature 1..20: note = chemically synthesized
  source 1..20: mol_type = other DNA
taatttatgggaacttaggc

SEQ ID NO: 38714 - DNA, 20 bp, synthetic construct
  misc_feature 1..20: note = chemically synthesized
  source 1..20: mol_type = other DNA
gctcagaaaatattaaggaa

SEQ ID NO: 38715 - DNA, 20 bp, synthetic construct
  misc_feature 1..20: note = chemically synthesized
  source 1..20: mol_type = other DNA
gtgcaaccatcatcatattt

SEQ ID NO: 38716 - DNA, 20 bp, synthetic construct
  misc_feature 1..20: note = chemically synthesized
  source 1..20: mol_type = other DNA
ttctttatggttttaaaagc

SEQ ID NO: 38717 - DNA, 20 bp, synthetic construct
  misc_feature 1..20: note = chemically synthesized
  source 1..20: mol_type = other DNA
ttaaaagcaaagaaaaaggt

SEQ ID NO: 38718 - DNA, 20 bp, synthetic construct
  misc_feature 1..20: note = chemically synthesized
  source 1..20: mol_type = other DNA
gaagcccagctccctgtgat

SEQ ID NO: 38719 - DNA, 20 bp, synthetic construct
  misc_feature 1..20: note = chemically synthesized
  source 1..20: mol_type = other DNA
aggcattgacagttgcaagg

SEQ ID NO: 38720 - DNA, 20 bp, synthetic construct
  misc_feature 1..20: note = chemically synthesized
  source 1..20: mol_type = other DNA
gaccccagtctaagtgttgc

SEQ ID NO: 38721 - DNA, 20 bp, synthetic construct
  misc_feature 1..20: note = chemically synthesized
  source 1..20: mol_type = other DNA
atttatttaagccacaacta

SEQ ID NO: 38722 - DNA, 20 bp, synthetic construct
  misc_feature 1..20: note = chemically synthesized
  source 1..20: mol_type = other DNA
ttataacataatttataatt

SEQ ID NO: 38723 - DNA, 20 bp, synthetic construct
  misc_feature 1..20: note = chemically synthesized
  source 1..20: mol_type = other DNA
ttatgattttattttatcca

SEQ ID NO: 38724 - DNA, 20 bp, synthetic construct
  misc_feature 1..20: note = chemically synthesized
  source 1..20: mol_type = other DNA
ttttattttatccaaaagaa

SEQ ID NO: 38725 - DNA, 20 bp, synthetic construct
  misc_feature 1..20: note = chemically synthesized
  source 1..20: mol_type = other DNA
gccagtggcatgggtctctg

SEQ ID NO: 38726 - DNA, 20 bp, synthetic construct
  misc_feature 1..20: note = chemically synthesized
  source 1..20: mol_type = other DNA
gacatagtttttttaaatta

SEQ ID NO: 38727 - DNA, 20 bp, synthetic construct
  misc_feature 1..20: note = chemically synthesized
  source 1..20: mol_type = other DNA
cacggtgctggaatgaatgg

SEQ ID NO: 38728 - DNA, 20 bp, synthetic construct
  misc_feature 1..20: note = chemically synthesized
  source 1..20: mol_type = other DNA
tacatttgcttcttatccct

SEQ ID NO: 38729 - DNA, 20 bp, synthetic construct
  misc_feature 1..20: note = chemically synthesized
  source 1..20: mol_type = other DNA
gtcatccccattttataaac

SEQ ID NO: 38730 - DNA, 20 bp, synthetic construct
  misc_feature 1..20: note = chemically synthesized
  source 1..20: mol_type = other DNA
aattcccaaatcaaggaaat

SEQ ID NO: 38731 - DNA, 20 bp, synthetic construct
  misc_feature 1..20: note = chemically synthesized
  source 1..20: mol_type = other DNA
ctggatttaagccagatttc

SEQ ID NO: 38732 - DNA, 20 bp, synthetic construct
  misc_feature 1..20: note = chemically synthesized
  source 1..20: mol_type = other DNA
aggttaattgtttgccactt

SEQ ID NO: 38733 - DNA, 20 bp, synthetic construct
  misc_feature 1..20: note = chemically synthesized
  source 1..20: mol_type = other DNA
agaagagagaagtctggtat

SEQ ID NO: 38734 - DNA, 20 bp, synthetic construct
  misc_feature 1..20: note = chemically synthesized
  source 1..20: mol_type = other DNA
cttccaaagctagcttaggg

SEQ ID NO: 38735 - DNA, 20 bp, synthetic construct
  misc_feature 1..20: note = chemically synthesized
  source 1..20: mol_type = other DNA
cgtactacttcactttagga

SEQ ID NO: 38736 - DNA, 20 bp, synthetic construct
  misc_feature 1..20: note = chemically synthesized
  source 1..20: mol_type = other DNA
tgaatttagtggaagccatt

SEQ ID NO: 38737 - DNA, 20 bp, synthetic construct
  misc_feature 1..20: note = chemically synthesized
  source 1..20: mol_type = other DNA
aagccattcaagaaaatatc

SEQ ID NO: 38738 - DNA, 20 bp, synthetic construct
  misc_feature 1..20: note = chemically synthesized
  source 1..20: mol_type = other DNA
agccatgctcagtgagaagc

SEQ ID NO: 38739 - DNA, 20 bp, synthetic construct
  misc_feature 1..20: note = chemically synthesized
  source 1..20: mol_type = other DNA
cattcacacaccacagtgag

SEQ ID NO: 38740 - DNA, 20 bp, synthetic construct
  misc_feature 1..20: note = chemically synthesized
  source 1..20: mol_type = other DNA
atgagccctggaggtgaatc

SEQ ID NO: 38741 - DNA, 20 bp, synthetic construct
  misc_feature 1..20: note = chemically synthesized
  source 1..20: mol_type = other DNA
gaaaaatcatcaggttaaaa

SEQ ID NO: 38742 - DNA, 20 bp, synthetic construct
  misc_feature 1..20: note = chemically synthesized
  source 1..20: mol_type = other DNA
ttgaagtcacactgtgagct

SEQ ID NO: 38743 - DNA, 20 bp, synthetic construct
  misc_feature 1..20: note = chemically synthesized
  source 1..20: mol_type = other DNA
cctggaaaagagagttcaaa

SEQ ID NO: 38744 - DNA, 20 bp, synthetic construct
  misc_feature 1..20: note = chemically synthesized
  source 1..20: mol_type = other DNA
tgctttttagtggattaggt

SEQ ID NO: 38745 - DNA, 20 bp, synthetic construct
  misc_feature 1..20: note = chemically synthesized
  source 1..20: mol_type = other DNA
gaggtcaggacaggcctttc

SEQ ID NO: 38746 - DNA, 20 bp, synthetic construct
  misc_feature 1..20: note = chemically synthesized
  source 1..20: mol_type = other DNA
aggacaggcctttctgagaa

SEQ ID NO: 38747 - DNA, 20 bp, synthetic construct
  misc_feature 1..20: note = chemically synthesized
  source 1..20: mol_type = other DNA
ccaccctttgccacaaccag

SEQ ID NO: 38748 - DNA, 20 bp, synthetic construct
  misc_feature 1..20: note = chemically synthesized
  source 1..20: mol_type = other DNA
gttgcctcagatttgatctc

SEQ ID NO: 38749 - DNA, 20 bp, synthetic construct
  misc_feature 1..20: note = chemically synthesized
  source 1..20: mol_type = other DNA
tacaaccaatgcacatattg

SEQ ID NO: 38750 - DNA, 20 bp, synthetic construct
  misc_feature 1..20: note = chemically synthesized
  source 1..20: mol_type = other DNA
gcaggaggtggaagcccctg

SEQ ID NO: 38751 - DNA, 20 bp, synthetic construct
  misc_feature 1..20: note = chemically synthesized
  source 1..20: mol_type = other DNA
ccctgagagaatggaggtct

SEQ ID NO: 38752 - DNA, 20 bp, synthetic construct
  misc_feature 1..20: note = chemically synthesized
  source 1..20: mol_type = other DNA
ggaggagggggaatacctag

SEQ ID NO: 38753 - DNA, 20 bp, synthetic construct
  misc_feature 1..20: note = chemically synthesized
  source 1..20: mol_type = other DNA
agggggaatacctaggtaga

SEQ ID NO: 38754 - DNA, 20 bp, synthetic construct
  misc_feature 1..20: note = chemically synthesized
  source 1..20: mol_type = other DNA
ctcactgtgcagttaacttt

SEQ ID NO: 38755 - DNA, 20 bp, synthetic construct
  misc_feature 1..20: note = chemically synthesized
  source 1..20: mol_type = other DNA
tagggagggaagagggcaaa

SEQ ID NO: 38756 - DNA, 20 bp, synthetic construct
  misc_feature 1..20: note = chemically synthesized
  source 1..20: mol_type = other DNA
agaagcaatgcagccattac

SEQ ID NO: 38757 - DNA, 20 bp, synthetic construct
  misc_feature 1..20: note = chemically synthesized
  source 1..20: mol_type = other DNA
acacctgtatcacaggtgtt

SEQ ID NO: 38758 - DNA, 20 bp, synthetic construct
  misc_feature 1..20: note = chemically synthesized
  source 1..20: mol_type = other DNA
tatcacaggtgttaaagaaa

SEQ ID NO: 38759 - DNA, 20 bp, synthetic construct
  misc_feature 1..20: note = chemically synthesized
  source 1..20: mol_type = other DNA
accgttaatgcccttgggct

SEQ ID NO: 38760 - DNA, 20 bp, synthetic construct
  misc_feature 1..20: note = chemically synthesized
  source 1..20: mol_type = other DNA
acctccagcacacagcaggg

SEQ ID NO: 38761 - DNA, 20 bp, synthetic construct
  misc_feature 1..20: note = chemically synthesized
  source 1..20: mol_type = other DNA
gctgcccccaagctgtagag

SEQ ID NO: 38762 - DNA, 20 bp, synthetic construct
  misc_feature 1..20: note = chemically synthesized
  source 1..20: mol_type = other DNA
agagccagaatataaagctg

SEQ ID NO: 38763 - DNA, 20 bp, synthetic construct
  misc_feature 1..20: note = chemically synthesized
  source 1..20: mol_type = other DNA
ccagaagtggttcttgagga

SEQ ID NO: 38764 - DNA, 20 bp, synthetic construct
  misc_feature 1..20: note = chemically synthesized
  source 1..20: mol_type = other DNA
tgattgctcctaagttctct

SEQ ID NO: 38765 - DNA, 20 bp, synthetic construct
  misc_feature 1..20: note = chemically synthesized
  source 1..20: mol_type = other DNA
gttctctggagaaagagatg

SEQ ID NO: 38766 - DNA, 20 bp, synthetic construct
  misc_feature 1..20: note = chemically synthesized
  source 1..20: mol_type = other DNA
atgagagttttaactcctgt

SEQ ID NO: 38767 - DNA, 20 bp, synthetic construct
  misc_feature 1..20: note = chemically synthesized
  source 1..20: mol_type = other DNA
ctgatgaaacttttttgcca

SEQ ID NO: 38768 - DNA, 20 bp, synthetic construct
  misc_feature 1..20: note = chemically synthesized
  source 1..20: mol_type = other DNA
aagctttctaatttatattg

SEQ ID NO: 38769 - DNA, 20 bp, synthetic construct
  misc_feature 1..20: note = chemically synthesized
  source 1..20: mol_type = other DNA
taatgttgcagctcggggac

SEQ ID NO: 38770 - DNA, 20 bp, synthetic construct
  misc_feature 1..20: note = chemically synthesized
  source 1..20: mol_type = other DNA
cagcagaggcaaagcagcca

SEQ ID NO: 38771 - DNA, 20 bp, synthetic construct
  misc_feature 1..20: note = chemically synthesized
  source 1..20: mol_type = other DNA
tataaacaaaaaactgccag

SEQ ID NO: 38772 - DNA, 20 bp, synthetic construct
  misc_feature 1..20: note = chemically synthesized
  source 1..20: mol_type = other DNA
ctaatctgaattataaaaac

SEQ ID NO: 38773 - DNA, 20 bp, synthetic construct
  misc_feature 1..20: note = chemically synthesized
  source 1..20: mol_type = other DNA
ccagggtaactgtgtgtact

SEQ ID NO: 38774 - DNA, 20 bp, synthetic construct
  misc_feature 1..20: note = chemically synthesized
  source 1..20: mol_type = other DNA
aagggaagtaatgagacatt

SEQ ID NO: 38775 - DNA, 20 bp, synthetic construct
  misc_feature 1..20: note = chemically synthesized
  source 1..20: mol_type = other DNA
atagacatacttattagctg

SEQ ID NO: 38776 - DNA, 20 bp, synthetic construct
  misc_feature 1..20: note = chemically synthesized
  source 1..20: mol_type = other DNA
gccattagagctgtctctac

SEQ ID NO: 38777 - DNA, 20 bp, synthetic construct
  misc_feature 1..20: note = chemically synthesized
  source 1..20: mol_type = other DNA
cgtttggcccctcttacaac

SEQ ID NO: 38778 - DNA, 20 bp, synthetic construct
  misc_feature 1..20: note = chemically synthesized
  source 1..20: mol_type = other DNA
atgcatgtgtacacttgtgc

SEQ ID NO: 38779 - DNA, 20 bp, synthetic construct
  misc_feature 1..20: note = chemically synthesized
  source 1..20: mol_type = other DNA
gtgttaatttgctcaagcaa

SEQ ID NO: 38780 - DNA, 20 bp, synthetic construct
  misc_feature 1..20: note = chemically synthesized
  source 1..20: mol_type = other DNA
actgtaagtcagaaatgagc

SEQ ID NO: 38781 - DNA, 20 bp, synthetic construct
  misc_feature 1..20: note = chemically synthesized
  source 1..20: mol_type = other DNA
aactctttctctacaggagt

SEQ ID NO: 38782 - DNA, 20 bp, synthetic construct
  misc_feature 1..20: note = chemically synthesized
  source 1..20: mol_type = other DNA
tcagccaacaccagaagtcc

SEQ ID NO: 38783 - DNA, 20 bp, synthetic construct
  misc_feature 1..20: note = chemically synthesized
  source 1..20: mol_type = other DNA
ctctgggagcttcaccccac

SEQ ID NO: 38784 - DNA, 20 bp, synthetic construct
  misc_feature 1..20: note = chemically synthesized
  source 1..20: mol_type = other DNA
taggggcagggaccagtgca

SEQ ID NO: 38785 - DNA, 20 bp, synthetic construct
  misc_feature 1..20: note = chemically synthesized
  source 1..20: mol_type = other DNA
atttaatatgctctatgctg

SEQ ID NO: 38786 - DNA, 20 bp, synthetic construct
  misc_feature 1..20: note = chemically synthesized
  source 1..20: mol_type = other DNA
tatagctcacagtgtgactt

SEQ ID NO: 38787 - DNA, 20 bp, synthetic construct
  misc_feature 1..20: note = chemically synthesized
  source 1..20: mol_type = other DNA
catgttgctaggaaatatcc

SEQ ID NO: 38788 - DNA, 20 bp, synthetic construct
  misc_feature 1..20: note = chemically synthesized
  source 1..20: mol_type = other DNA
aatgtgccccccaggtcgat

SEQ ID NO: 38789 - DNA, 20 bp, synthetic construct
  misc_feature 1..20: note = chemically synthesized
  source 1..20: mol_type = other DNA
catagacaccaatttcccca

SEQ ID NO: 38790 - DNA, 20 bp, synthetic construct
  misc_feature 1..20: note = chemically synthesized
  source 1..20: mol_type = other DNA
aaaccaaagcatgcccacta

SEQ ID NO: 38791 - DNA, 20 bp, synthetic construct
  misc_feature 1..20: note = chemically synthesized
  source 1..20: mol_type = other DNA
aaataattcttataatttaa

SEQ ID NO: 38792 - DNA, 20 bp, synthetic construct
  misc_feature 1..20: note = chemically synthesized
  source 1..20: mol_type = other DNA
gacaagcctgggcaacatgc

SEQ ID NO: 38793 - DNA, 20 bp, synthetic construct
  misc_feature 1..20: note = chemically synthesized
  source 1..20: mol_type = other DNA
taaataaatatttttaaaaa

SEQ ID NO: 38794 - DNA, 20 bp, synthetic construct
  misc_feature 1..20: note = chemically synthesized
  source 1..20: mol_type = other DNA
gttaggaggctcctcccgtt

SEQ ID NO: 38795 - DNA, 20 bp, synthetic construct
  misc_feature 1..20: note = chemically synthesized
  source 1..20: mol_type = other DNA
catataagagtctatgttcc

SEQ ID NO: 38796 - DNA, 20 bp, synthetic construct
  misc_feature 1..20: note = chemically synthesized
  source 1..20: mol_type = other DNA
tttacctttttctttgcttt

SEQ ID NO: 38797 - DNA, 20 bp, synthetic construct
  misc_feature 1..20: note = chemically synthesized
  source 1..20: mol_type = other DNA
gacagtgtaaaatgtcacta

SEQ ID NO: 38798 - DNA, 20 bp, synthetic construct
  misc_feature 1..20: note = chemically synthesized
  source 1..20: mol_type = other DNA
gttgtgtttattcttttgtg

SEQ ID NO: 38799 - DNA, 20 bp, synthetic construct
  misc_feature 1..20: note = chemically synthesized
  source 1..20: mol_type = other DNA
gcaaacatcctgataatggt

SEQ ID NO: 38800 - DNA, 20 bp, synthetic construct
  misc_feature 1..20: note = chemically synthesized
  source 1..20: mol_type = other DNA
aaacatgaaggggagagcag

SEQ ID NO: 38801 - DNA, 20 bp, synthetic construct
  misc_feature 1..20: note = chemically synthesized
  source 1..20: mol_type = other DNA
aactagaccatgaggtgcca

SEQ ID NO: 38802 - DNA, 20 bp, synthetic construct
  misc_feature 1..20: note = chemically synthesized
  source 1..20: mol_type = other DNA
aagctgggcttgcaaaatta

SEQ ID NO: 38803 - DNA, 20 bp, synthetic construct
  misc_feature 1..20: note = chemically synthesized
  source 1..20: mol_type = other DNA
ccctgggtgtgtccatctgg

SEQ ID NO: 38804 - DNA, 20 bp, synthetic construct
  misc_feature 1..20: note = chemically synthesized
  source 1..20: mol_type = other DNA
atgaagatcatagcactata

SEQ ID NO: 38805 - DNA, 20 bp, synthetic construct
  misc_feature 1..20: note = chemically synthesized
  source 1..20: mol_type = other DNA
tacaaaaagtctgaaaatat

SEQ ID NO: 38806 - DNA, 20 bp, synthetic construct
  misc_feature 1..20: note = chemically synthesized
  source 1..20: mol_type = other DNA
taacataatttataattaca

SEQ ID NO: 38807 - DNA, 20 bp, synthetic construct
  misc_feature 1..20: note = chemically synthesized
  source 1..20: mol_type = other DNA
agcctgctctgctacatttc

SEQ ID NO: 38808 - DNA, 20 bp, synthetic construct
  misc_feature 1..20: note = chemically synthesized
  source 1..20: mol_type = other DNA
gatgcctatcaacaccttgg

SEQ ID NO: 38809 - DNA, 20 bp, synthetic construct
  misc_feature 1..20: note = chemically synthesized
  source 1..20: mol_type = other DNA
agaaagagttgaaattgtga

SEQ ID NO: 38810 - DNA, 20 bp, synthetic construct
  misc_feature 1..20: note = chemically synthesized
  source 1..20: mol_type = other DNA
ctacttgatttatataaaca

SEQ ID NO: 38811 - DNA, 20 bp, synthetic construct
  misc_feature 1..20: note = chemically synthesized
  source 1..20: mol_type = other DNA
taaagactaatctgaattat

SEQ ID NO: 38812 - DNA, 20 bp, synthetic construct
  misc_feature 1..20: note = chemically synthesized
  source 1..20: mol_type = other DNA
gacgttgattccagggtacc

SEQ ID NO: 38813 - DNA, 20 bp, synthetic construct
  misc_feature 1..20: note = chemically synthesized
  source 1..20: mol_type = other DNA
cctagaaaaataaaaaaatc

SEQ ID NO: 38814 - DNA, 20 bp, synthetic construct
  misc_feature 1..20: note = chemically synthesized
  source 1..20: mol_type = other DNA
ccacaccctcacagacataa

SEQ ID NO: 38815 - DNA, 20 bp, synthetic construct
  misc_feature 1..20: note = chemically synthesized
  source 1..20: mol_type = other DNA
tgctgatatgaacaacactt

SEQ ID NO: 38816 - DNA, 20 bp, synthetic construct
  misc_feature 1..20: note = chemically synthesized
  source 1..20: mol_type = other DNA
caaaatcctagaggtctcca

SEQ ID NO: 38817 - DNA, 20 bp, synthetic construct
  misc_feature 1..20: note = chemically synthesized
  source 1..20: mol_type = other DNA
tcatgtggcccaaatggcag

SEQ ID NO: 38818 - DNA, 20 bp, synthetic construct
  misc_feature 1..20: note = chemically synthesized
  source 1..20: mol_type = other DNA
cagctttcacagcagcctgg

SEQ ID NO: 38819 - DNA, 20 bp, synthetic construct
  misc_feature 1..20: note = chemically synthesized
  source 1..20: mol_type = other DNA
gaggggccaaacgcagcaag

SEQ ID NO: 38820 - DNA, 20 bp, synthetic construct
  misc_feature 1..20: note = chemically synthesized
  source 1..20: mol_type = other DNA
tagaaagtccctaaatttta

SEQ ID NO: 38821 - DNA, 20 bp, synthetic construct
  misc_feature 1..20: note = chemically synthesized
  source 1..20: mol_type = other DNA
atgtctcaccaataagttca

SEQ ID NO: 38822 - DNA, 20 bp, synthetic construct
  misc_feature 1..20: note = chemically synthesized
  source 1..20: mol_type = other DNA
agcgagcaaggtctctccaa

SEQ ID NO: 38823 - DNA, 20 bp, synthetic construct
  misc_feature 1..20: note = chemically synthesized
  source 1..20: mol_type = other DNA
ggccttgtcagctgaaggca

SEQ ID NO: 38824 - DNA, 20 bp, synthetic construct
  misc_feature 1..20: note = chemically synthesized
  source 1..20: mol_type = other DNA
caattggagtcaccacttgg

SEQ ID NO: 38825 - DNA, 20 bp, synthetic construct
  misc_feature 1..20: note = chemically synthesized
  source 1..20: mol_type = other DNA
cagtccctccagggatggga

SEQ ID NO: 38826 - DNA, 20 bp, synthetic construct
  misc_feature 1..20: note = chemically synthesized
  source 1..20: mol_type = other DNA
ctccagggatgggatattgt

SEQ ID NO: 38827 - DNA, 20 bp, synthetic construct
  misc_feature 1..20: note = chemically synthesized
  source 1..20: mol_type = other DNA
ttctaggtagagacagctct

SEQ ID NO: 38828 - DNA, 20 bp, synthetic construct
  misc_feature 1..20: note = chemically synthesized
  source 1..20: mol_type = other DNA
gtagagacagctctaatggc

SEQ ID NO: 38829 - DNA, 20 bp, synthetic construct
  misc_feature 1..20: note = chemically synthesized
  source 1..20: mol_type = other DNA
ctttaactggggaaccacaa

SEQ ID NO: 38830 - DNA, 20 bp, synthetic construct
  misc_feature 1..20: note = chemically synthesized
  source 1..20: mol_type = other DNA
gtaacaggttcgagtctgga

SEQ ID NO: 38831 - DNA, 20 bp, synthetic construct
  misc_feature 1..20: note = chemically synthesized
  source 1..20: mol_type = other DNA
tctggaaattgattgagggc

SEQ ID NO: 38832 - DNA, 20 bp, synthetic construct
  misc_feature 1..20: note = chemically synthesized
  source 1..20: mol_type = other DNA
ttgattgagggcccatgatt

SEQ ID NO: 38833 - DNA, 20 bp, synthetic construct
  misc_feature 1..20: note = chemically synthesized
  source 1..20: mol_type = other DNA
atgattctctgtttttataa

SEQ ID NO: 38834 - DNA, 20 bp, synthetic construct
  misc_feature 1..20: note = chemically synthesized
  source 1..20: mol_type = other DNA
gtctttagtccattctacct

SEQ ID NO: 38835 - DNA, 20 bp, synthetic construct
  misc_feature 1..20: note = chemically synthesized
  source 1..20: mol_type = other DNA
gtccattctacctggcagtt

SEQ ID NO: 38836 - DNA, 20 bp, synthetic construct
  misc_feature 1..20: note = chemically synthesized
  source 1..20: mol_type = other DNA
ataaatcaagtaggaataca

SEQ ID NO: 38837 - DNA, 20 bp, synthetic construct
  misc_feature 1..20: note = chemically synthesized
  source 1..20: mol_type = other DNA
caatttcacttctaggaaca

SEQ ID NO: 38838 - DNA, 20 bp, synthetic construct
  misc_feature 1..20: note = chemically synthesized
  source 1..20: mol_type = other DNA
atgagtcagactattctgat

SEQ ID NO: 38839 - DNA, 20 bp, synthetic construct
  misc_feature 1..20: note = chemically synthesized
  source 1..20: mol_type = other DNA
gctctcacaaatctatttca

SEQ ID NO: 38840 - DNA, 20 bp, synthetic construct
  misc_feature 1..20: note = chemically synthesized
  source 1..20: mol_type = other DNA
tgcctcagcctcccaagtag

SEQ ID NO: 38841 - DNA, 20 bp, synthetic construct
  misc_feature 1..20: note = chemically synthesized
  source 1..20: mol_type = other DNA
ttttgtatttttagcagaga

SEQ ID NO: 38842 - DNA, 20 bp, synthetic construct
  misc_feature 1..20: note = chemically synthesized
  source 1..20: mol_type = other DNA
cgcccccgcctcccaaggtg

SEQ ID NO: 38843 - DNA, 20 bp, synthetic construct
  misc_feature 1..20: note = chemically synthesized
  source 1..20: mol_type = other DNA
agtagggccaaaccaataaa

SEQ ID NO: 38844 - DNA, 20 bp, synthetic construct
  misc_feature 1..20: note = chemically synthesized
  source 1..20: mol_type = other DNA
atccattcccatgcctgttc

SEQ ID NO: 38845 - DNA, 20 bp, synthetic construct
  misc_feature 1..20: note = chemically synthesized
  source 1..20: mol_type = other DNA
atttctgccaatataaatta

SEQ ID NO: 38846 - DNA, 20 bp, synthetic construct
  misc_feature 1..20: note = chemically synthesized
  source 1..20: mol_type = other DNA
cactgttgcctcaagcagtg

SEQ ID NO: 38847 - DNA, 20 bp, synthetic construct
  misc_feature 1..20: note = chemically synthesized
  source 1..20: mol_type = other DNA
accactactggggatgggga

SEQ ID NO: 38848 - DNA, 20 bp, synthetic construct
  misc_feature 1..20: note = chemically synthesized
  source 1..20: mol_type = other DNA
gaaactgtttcttctggcaa

SEQ ID NO: 38849 - DNA, 20 bp, synthetic construct
  misc_feature 1..20: note = chemically synthesized
  source 1..20: mol_type = other DNA
gagttcacaaactcagtgtc

SEQ ID NO: 38850 - DNA, 20 bp, synthetic construct
  misc_feature 1..20: note = chemically synthesized
  source 1..20: mol_type = other DNA
agatcagctactcgcatgat

SEQ ID NO: 38851 - DNA, 20 bp, synthetic construct
  misc_feature 1..20: note = chemically synthesized
  source 1..20: mol_type = other DNA
ctcgcatgataacagcttgt

SEQ ID NO: 38852 - DNA, 20 bp, synthetic construct
  misc_feature 1..20: note = chemically synthesized
  source 1..20: mol_type = other DNA
ctctcattcagggcaatctt

SEQ ID NO: 38853 - DNA, 20 bp, synthetic construct
  misc_feature 1..20: note = chemically synthesized
  source 1..20: mol_type = other DNA
tagcagatttgtggctcagt

SEQ ID NO: 38854 - DNA, 20 bp, synthetic construct
  misc_feature 1..20: note = chemically synthesized
  source 1..20: mol_type = other DNA
tctagagggacagaactaat

SEQ ID NO: 38855 - DNA, 20 bp, synthetic construct
  misc_feature 1..20: note = chemically synthesized
  source 1..20: mol_type = other DNA
atagatatactcacacaaag

SEQ ID NO: 38856 - DNA, 20 bp, synthetic construct
  misc_feature 1..20: note = chemically synthesized
  source 1..20: mol_type = other DNA
ttattaagtggtattaactc

SEQ ID NO: 38857 - DNA, 20 bp, synthetic construct
  misc_feature 1..20: note = chemically synthesized
  source 1..20: mol_type = other DNA
tagcctttttacatttttct

SEQ ID NO: 38858 - DNA, 20 bp, synthetic construct
  misc_feature 1..20: note = chemically synthesized
  source 1..20: mol_type = other DNA
ccagctttatattctggctc

SEQ ID NO: 38859 - DNA, 20 bp, synthetic construct
  misc_feature 1..20: note = chemically synthesized
  source 1..20: mol_type = other DNA
cagcaggggcaggggcctca

SEQ ID NO: 38860 - DNA, 20 bp, synthetic construct
  misc_feature 1..20: note = chemically synthesized
  source 1..20: mol_type = other DNA
aaggactttcagtcacctct

SEQ ID NO: 38861 - DNA, 20 bp, synthetic construct
  misc_feature 1..20: note = chemically synthesized
  source 1..20: mol_type = other DNA
agaggggctgtgggttgtct

SEQ ID NO: 38862 - DNA, 20 bp, synthetic construct
  misc_feature 1..20: note = chemically synthesized
  source 1..20: mol_type = other DNA
tgagcccatactttaatctc

SEQ ID NO: 38863 - DNA, 20 bp, synthetic construct
  misc_feature 1..20: note = chemically synthesized
  source 1..20: mol_type = other DNA
tttttaaaaatcatatttat

SEQ ID NO: 38864 - DNA, 20 bp, synthetic construct
  misc_feature 1..20: note = chemically synthesized
  source 1..20: mol_type = other DNA
tattaagaatacaagaagta

SEQ ID NO: 38865 - DNA, 20 bp, synthetic construct
  misc_feature 1..20: note = chemically synthesized
  source 1..20: mol_type = other DNA
aatacaagaagtacaatgtt

SEQ ID NO: 38866 - DNA, 20 bp, synthetic construct
  misc_feature 1..20: note = chemically synthesized
  source 1..20: mol_type = other DNA
ttctttaacacctgtgatac

SEQ ID NO: 38867 - DNA, 20 bp, synthetic construct
  misc_feature 1..20: note = chemically synthesized
  source 1..20: mol_type = other DNA
tgaattctacgtaatggctg

SEQ ID NO: 38868 - DNA, 20 bp, synthetic construct
  misc_feature 1..20: note = chemically synthesized
  source 1..20: mol_type = other DNA
tgcaggacttgggtaatctc

SEQ ID NO: 38869 - DNA, 20 bp, synthetic construct
  misc_feature 1..20: note = chemically synthesized
  source 1..20: mol_type = other DNA
acttgggtaatctctggggt

SEQ ID NO: 38870 - DNA, 20 bp, synthetic construct
  misc_feature 1..20: note = chemically synthesized
  source 1..20: mol_type = other DNA
ctccagacctccattctctc

SEQ ID NO: 38871 - DNA, 20 bp, synthetic construct
  misc_feature 1..20: note = chemically synthesized
  source 1..20: mol_type = other DNA
aaatcttaaataagaataaa

SEQ ID NO: 38872 - DNA, 20 bp, synthetic construct
  misc_feature 1..20: note = chemically synthesized
  source 1..20: mol_type = other DNA
taagaataaatcatgtttgc

SEQ ID NO: 38873 - DNA, 20 bp, synthetic construct
  misc_feature 1..20: note = chemically synthesized
  source 1..20: mol_type = other DNA
catcagtggcaactgtgttg

SEQ ID NO: 38874 - DNA, 20 bp, synthetic construct
  misc_feature 1..20: note = chemically synthesized
  source 1..20: mol_type = other DNA
tagaaatgaaccttggaggc

SEQ ID NO: 38875 - DNA, 20 bp, synthetic construct
  misc_feature 1..20: note = chemically synthesized
  source 1..20: mol_type = other DNA
aatgaaccttggaggccatt

SEQ ID NO: 38876 - DNA, 20 bp, synthetic construct
  misc_feature 1..20: note = chemically synthesized
  source 1..20: mol_type = other DNA
caaagaaggccatttttgta

SEQ ID NO: 38877 - DNA, 20 bp, synthetic construct
  misc_feature 1..20: note = chemically synthesized
  source 1..20: mol_type = other DNA
ccactattagttggggagaa

SEQ ID NO: 38878 - DNA, 20 bp, synthetic construct
  misc_feature 1..20: note = chemically synthesized
  source 1..20: mol_type = other DNA
ttccaaggtgttgataggca

SEQ ID NO: 38879 - DNA, 20 bp, synthetic construct
  misc_feature 1..20: note = chemically synthesized
  source 1..20: mol_type = other DNA
gaacctgggaccaatactgc

SEQ ID NO: 38880 - DNA, 20 bp, synthetic construct
  misc_feature 1..20: note = chemically synthesized
  source 1..20: mol_type = other DNA
aggcaacaaatctgttcaaa

SEQ ID NO: 38881 - DNA, 20 bp, synthetic construct
  misc_feature 1..20: note = chemically synthesized
  source 1..20: mol_type = other DNA
aggctccttaggacacctgg

SEQ ID NO: 38882 - DNA, 20 bp, synthetic construct
  misc_feature 1..20: note = chemically synthesized
  source 1..20: mol_type = other DNA
tccatctctggcacaaaatg

SEQ ID NO: 38883 - DNA, 20 bp, synthetic construct
  misc_feature 1..20: note = chemically synthesized
  source 1..20: mol_type = other DNA
ggctaataaaatgaagatag

SEQ ID NO: 38884 - DNA, 20 bp, synthetic construct
  misc_feature 1..20: note = chemically synthesized
  source 1..20: mol_type = other DNA
gatgacacactgcagagaac

SEQ ID NO: 38885 - DNA, 20 bp, synthetic construct
  misc_feature 1..20: note = chemically synthesized
  source 1..20: mol_type = other DNA
atccagtagaaaggcagatg

SEQ ID NO: 38886 - DNA, 20 bp, synthetic construct
  misc_feature 1..20: note = chemically synthesized
  source 1..20: mol_type = other DNA
caaggaggaggatgcacgct

SEQ ID NO: 38887 - DNA, 20 bp, synthetic construct
  misc_feature 1..20: note = chemically synthesized
  source 1..20: mol_type = other DNA
aatatgctctatgctggaaa

SEQ ID NO: 38888 - DNA, 20 bp, synthetic construct
  misc_feature 1..20: note = chemically synthesized
  source 1..20: mol_type = other DNA
atatccatgtcttcaccccg

SEQ ID NO: 38889 - DNA, 20 bp, synthetic construct
  misc_feature 1..20: note = chemically synthesized
  source 1..20: mol_type = other DNA
actctcttttccaggaagag

SEQ ID NO: 38890 - DNA, 20 bp, synthetic construct
  misc_feature 1..20: note = chemically synthesized
  source 1..20: mol_type = other DNA
aaacacacaataaattaata

SEQ ID NO: 38891 - DNA, 20 bp, synthetic construct
  misc_feature 1..20: note = chemically synthesized
  source 1..20: mol_type = other DNA
gttcagttaaacattttgaa

SEQ ID NO: 38892 - DNA, 20 bp, synthetic construct
  misc_feature 1..20: note = chemically synthesized
  source 1..20: mol_type = other DNA
cctgtaactgtgtcatttta

SEQ ID NO: 38893 - DNA, 20 bp, synthetic construct
  misc_feature 1..20: note = chemically synthesized
  source 1..20: mol_type = other DNA
caatttttctttttttaacc

SEQ ID NO: 38894 - DNA, 20 bp, synthetic construct
  misc_feature 1..20: note = chemically synthesized
  source 1..20: mol_type = other DNA
tgatgatttttccacaatcc

SEQ ID NO: 38895 - DNA, 20 bp, synthetic construct
  misc_feature 1..20: note = chemically synthesized
  source 1..20: mol_type = other DNA
tttccacaatccttttgttt

SEQ ID NO: 38896 - DNA, 20 bp, synthetic construct
  misc_feature 1..20: note = chemically synthesized
  source 1..20: mol_type = other DNA
ctccagggctcatatggcaa

SEQ ID NO: 38897 - DNA, 20 bp, synthetic construct
  misc_feature 1..20: note = chemically synthesized
  source 1..20: mol_type = other DNA
atatggcaatggggatttaa

SEQ ID NO: 38898 - DNA, 20 bp, synthetic construct
  misc_feature 1..20: note = chemically synthesized
  source 1..20: mol_type = other DNA
cttagcaatttgtgaataga

SEQ ID NO: 38899 - DNA, 20 bp, synthetic construct
  misc_feature 1..20: note = chemically synthesized
  source 1..20: mol_type = other DNA
tttgtgaatagaagatgttt

SEQ ID NO: 38900 - DNA, 20 bp, synthetic construct
  misc_feature 1..20: note = chemically synthesized
  source 1..20: mol_type = other DNA
gataacacgtccacagaaag

SEQ ID NO: 38901 - DNA, 20 bp, synthetic construct
  misc_feature 1..20: note = chemically synthesized
  source 1..20: mol_type = other DNA
cagaaagcctggctttccaa

SEQ ID NO: 38902 - DNA, 20 bp, synthetic construct
  misc_feature 1..20: note = chemically synthesized
  source 1..20: mol_type = other DNA
atcagagaatgtgcccccca

SEQ ID NO: 38903 - DNA, 20 bp, synthetic construct
  misc_feature 1..20: note = chemically synthesized
  source 1..20: mol_type = other DNA
atatgttaatcctgtggcag

SEQ ID NO: 38904 - DNA, 20 bp, synthetic construct
  misc_feature 1..20: note = chemically synthesized
  source 1..20: mol_type = other DNA
aagttcacagtgatctacat

SEQ ID NO: 38905 - DNA, 20 bp, synthetic construct
  misc_feature 1..20: note = chemically synthesized
  source 1..20: mol_type = other DNA
accaatttccccaaaaaact

SEQ ID NO: 38906 - DNA, 20 bp, synthetic construct
  misc_feature 1..20: note = chemically synthesized
  source 1..20: mol_type = other DNA
ttttctttgatattttcttg

SEQ ID NO: 38907 - DNA, 20 bp, synthetic construct
  misc_feature 1..20: note = chemically synthesized
  source 1..20: mol_type = other DNA
atggcttccactaaattcaa

SEQ ID NO: 38908 - DNA, 20 bp, synthetic construct
  misc_feature 1..20: note = chemically synthesized
  source 1..20: mol_type = other DNA
taaaattttatctggtaatt

SEQ ID NO: 38909 - DNA, 20 bp, synthetic construct
  misc_feature 1..20: note = chemically synthesized
  source 1..20: mol_type = other DNA
gcaagttcatctaactatgt

SEQ ID NO: 38910 - DNA, 20 bp, synthetic construct
  misc_feature 1..20: note = chemically synthesized
  source 1..20: mol_type = other DNA
gatggaactcctgagttcac

SEQ ID NO: 38911 - DNA, 20 bp, synthetic construct
  misc_feature 1..20: note = chemically synthesized
  source 1..20: mol_type = other DNA
actacaaaactctcaccctc

SEQ ID NO: 38912 - DNA, 20 bp, synthetic construct
  misc_feature 1..20: note = chemically synthesized
  source 1..20: mol_type = other DNA
tgctgcatttcttcccctaa

SEQ ID NO: 38913 - DNA, 20 bp, synthetic construct
  misc_feature 1..20: note = chemically synthesized
  source 1..20: mol_type = other DNA
accagacttctctcttctta

SEQ ID NO: 38914 - DNA, 20 bp, synthetic construct
  misc_feature 1..20: note = chemically synthesized
  source 1..20: mol_type = other DNA
tgctcttcagttacattgga

SEQ ID NO: 38915 - DNA, 20 bp, synthetic construct
  misc_feature 1..20: note = chemically synthesized
  source 1..20: mol_type = other DNA
ttcagttacattggaatgtg

SEQ ID NO: 38916 - DNA, 20 bp, synthetic construct
  misc_feature 1..20: note = chemically synthesized
  source 1..20: mol_type = other DNA
gatgaaaaagtgagaagagc

SEQ ID NO: 38917 - DNA, 20 bp, synthetic construct
  misc_feature 1..20: note = chemically synthesized
  source 1..20: mol_type = other DNA
cctagattttttcttggaaa

SEQ ID NO: 38918 - DNA, 20 bp, synthetic construct
  misc_feature 1..20: note = chemically synthesized
  source 1..20: mol_type = other DNA
cttggaaatctggcttaaat

SEQ ID NO: 38919 - DNA, 20 bp, synthetic construct
  misc_feature 1..20: note = chemically synthesized
  source 1..20: mol_type = other DNA
aaatccaggtttctttattt

SEQ ID NO: 38920 - DNA, 20 bp, synthetic construct
  misc_feature 1..20: note = chemically synthesized
  source 1..20: mol_type = other DNA
atttggtcacgagacaaata

SEQ ID NO: 38921 - DNA, 20 bp, synthetic construct
  misc_feature 1..20: note = chemically synthesized
  source 1..20: mol_type = other DNA
aataacatgattttcctaag

SEQ ID NO: 38922 - DNA, 20 bp, synthetic construct
  misc_feature 1..20: note = chemically synthesized
  source 1..20: mol_type = other DNA
attttcctaagtctagattt

SEQ ID NO: 38923 - DNA, 20 bp, synthetic construct
  misc_feature 1..20: note = chemically synthesized
  source 1..20: mol_type = other DNA
acatattcaaagagttattt

SEQ ID NO: 38924 - DNA, 20 bp, synthetic construct
  misc_feature 1..20: note = chemically synthesized
  source 1..20: mol_type = other DNA
atgaaactgagaaccaagcg

SEQ ID NO: 38925 - DNA, 20 bp, synthetic construct
  misc_feature 1..20: note = chemically synthesized
  source 1..20: mol_type = other DNA
ccatcatgtaggcacactct

SEQ ID NO: 38926 - DNA, 20 bp, synthetic construct
  misc_feature 1..20: note = chemically synthesized
  source 1..20: mol_type = other DNA
taagaatttttcaatcatat

SEQ ID NO: 38927 - DNA, 20 bp, synthetic construct
  misc_feature 1..20: note = chemically synthesized
  source 1..20: mol_type = other DNA
atttaaaaaaactatgtctt

SEQ ID NO: 38928 - DNA, 20 bp, synthetic construct
  misc_feature 1..20: note = chemically synthesized
  source 1..20: mol_type = other DNA
accagatagtcaaattaagt

SEQ ID NO: 38929 - DNA, 20 bp, synthetic construct
  misc_feature 1..20: note = chemically synthesized
  source 1..20: mol_type = other DNA
cacccctagaccttcatctt

SEQ ID NO: 38930 - DNA, 20 bp, synthetic construct
  misc_feature 1..20: note = chemically synthesized
  source 1..20: mol_type = other DNA
ccttcatctttcctgattag

SEQ ID NO: 38931 - DNA, 20 bp, synthetic construct
  misc_feature 1..20: note = chemically synthesized
  source 1..20: mol_type = other DNA
ctgcacatccatagcctccc

SEQ ID NO: 38932 - DNA, 20 bp, synthetic construct
  misc_feature 1..20: note = chemically synthesized
  source 1..20: mol_type = other DNA
tagacacaaccctttcaggt

SEQ ID NO: 38933 - DNA, 20 bp, synthetic construct
  misc_feature 1..20: note = chemically synthesized
  source 1..20: mol_type = other DNA
tatttattcctagtgaactc

SEQ ID NO: 38934 - DNA, 20 bp, synthetic construct
  misc_feature 1..20: note = chemically synthesized
  source 1..20: mol_type = other DNA
cagatggatcacctgaggcc

SEQ ID NO: 38935 - DNA, 20 bp, synthetic construct
  misc_feature 1..20: note = chemically synthesized
  source 1..20: mol_type = other DNA
taagtaggctgaggcactag

SEQ ID NO: 38936 - DNA, 20 bp, synthetic construct
  misc_feature 1..20: note = chemically synthesized
  source 1..20: mol_type = other DNA
atccttcctattctagtagt

SEQ ID NO: 38937 - DNA, 20 bp, synthetic construct
  misc_feature 1..20: note = chemically synthesized
  source 1..20: mol_type = other DNA
gacaggtggatcacaaggtc

SEQ ID NO: 38938 - DNA, 20 bp, synthetic construct
  misc_feature 1..20: note = chemically synthesized
  source 1..20: mol_type = other DNA
caagatggttaggaggctcc

SEQ ID NO: 38939 - DNA, 20 bp, synthetic construct
  misc_feature 1..20: note = chemically synthesized
  source 1..20: mol_type = other DNA
atacatttgggacagatcta

SEQ ID NO: 38940 - DNA, 20 bp, synthetic construct
  misc_feature 1..20: note = chemically synthesized
  source 1..20: mol_type = other DNA
acacttagactggggtcttc

SEQ ID NO: 38941 - DNA, 20 bp, synthetic construct
  misc_feature 1..20: note = chemically synthesized
  source 1..20: mol_type = other DNA
aaatgcccagcacagagctc

SEQ ID NO: 38942 - DNA, 20 bp, synthetic construct
  misc_feature 1..20: note = chemically synthesized
  source 1..20: mol_type = other DNA
ctcttccattcagaaactca

SEQ ID NO: 38943 - DNA, 20 bp, synthetic construct
  misc_feature 1..20: note = chemically synthesized
  source 1..20: mol_type = other DNA
tcattctcaatcacagggag

SEQ ID NO: 38944 - DNA, 20 bp, synthetic construct
  misc_feature 1..20: note = chemically synthesized
  source 1..20: mol_type = other DNA
aaagccagccccaaaggtac

SEQ ID NO: 38945 - DNA, 20 bp, synthetic construct
  misc_feature 1..20: note = chemically synthesized
  source 1..20: mol_type = other DNA
aagagtctatgttccaaaaa

SEQ ID NO: 38946 - DNA, 20 bp, synthetic construct
  misc_feature 1..20: note = chemically synthesized
  source 1..20: mol_type = other DNA
aaaaacctggatttaacaat

SEQ ID NO: 38947 - DNA, 20 bp, synthetic construct
  misc_feature 1..20: note = chemically synthesized
  source 1..20: mol_type = other DNA
taacaatctgagctttgtca

SEQ ID NO: 38948 - DNA, 20 bp, synthetic construct
  misc_feature 1..20: note = chemically synthesized
  source 1..20: mol_type = other DNA
catggtgctttgcggttggt

SEQ ID NO: 38949 - DNA, 20 bp, synthetic construct
  misc_feature 1..20: note = chemically synthesized
  source 1..20: mol_type = other DNA
tgttgtttctttaccttttt

SEQ ID NO: 38950 - DNA, 20 bp, synthetic construct
  misc_feature 1..20: note = chemically synthesized
  source 1..20: mol_type = other DNA
gcttttaaaaccataaagaa

SEQ ID NO: 38951 - DNA, 20 bp, synthetic construct
  misc_feature 1..20: note = chemically synthesized
  source 1..20: mol_type = other DNA
agtctgagaaatgcaattgc

SEQ ID NO: 38952 - DNA, 20 bp, synthetic construct
  misc_feature 1..20: note = chemically synthesized
  source 1..20: mol_type = other DNA
tttatattttcagacttttt

SEQ ID NO: 38953 - DNA, 20 bp, synthetic construct
  misc_feature 1..20: note = chemically synthesized
  source 1..20: mol_type = other DNA
tcatatcacaaaatttcaca

SEQ ID NO: 38954 - DNA, 20 bp, synthetic construct
  misc_feature 1..20: note = chemically synthesized
  source 1..20: mol_type = other DNA
ttttcactcaacattacata

SEQ ID NO: 38955 - DNA, 20 bp, synthetic construct
  misc_feature 1..20: note = chemically synthesized
  source 1..20: mol_type = other DNA
ctaatattttaaaggagagc

SEQ ID NO: 38956 - DNA, 20 bp, synthetic construct
  misc_feature 1..20: note = chemically synthesized
  source 1..20: mol_type = other DNA
gagctactgattaatgagca

SEQ ID NO: 38957 - DNA, 20 bp, synthetic construct
  misc_feature 1..20: note = chemically synthesized
  source 1..20: mol_type = other DNA
aagcattatcctttccaggc

SEQ ID NO: 38958 - DNA, 20 bp, synthetic construct
  misc_feature 1..20: note = chemically synthesized
  source 1..20: mol_type = other DNA
ggtctgcggagtcactgccc

SEQ ID NO: 38959 - DNA, 20 bp, synthetic construct
  misc_feature 1..20: note = chemically synthesized
  source 1..20: mol_type = other DNA
cccgtgcgcgttggcccccc

SEQ ID NO: 38960 - DNA, 20 bp, synthetic construct
  misc_feature 1..20: note = chemically synthesized
  source 1..20: mol_type = other DNA
aatctaacaggttgaaattg

SEQ ID NO: 38961 - DNA, 20 bp, synthetic construct
  misc_feature 1..20: note = chemically synthesized
  source 1..20: mol_type = other DNA
tctttgacaatttgggagag

SEQ ID NO: 38962 - DNA, 20 bp, synthetic construct
  misc_feature 1..20: note = chemically synthesized
  source 1..20: mol_type = other DNA
gagagtgaagattctcctgg

SEQ ID NO: 38963 - DNA, 20 bp, synthetic construct
  misc_feature 1..20: note = chemically synthesized
  source 1..20: mol_type = other DNA
gtgtttattcttttgtgaaa

SEQ ID NO: 38964 - DNA, 20 bp, synthetic construct
  misc_feature 1..20: note = chemically synthesized
  source 1..20: mol_type = other DNA
tgcaaaattgccagaggaaa

SEQ ID NO: 38965 - DNA, 20 bp, synthetic construct
  misc_feature 1..20: note = chemically synthesized
  source 1..20: mol_type = other DNA
ttccagatggacacacccag

SEQ ID NO: 38966 - DNA, 20 bp, synthetic construct
  misc_feature 1..20: note = chemically synthesized
  source 1..20: mol_type = other DNA
ttcagtgttctcacaaataa

SEQ ID NO: 38967 - DNA, 20 bp, synthetic construct
  misc_feature 1..20: note = chemically synthesized
  source 1..20: mol_type = other DNA
cagttttctaattttgcaag

SEQ ID NO: 38968 - DNA, 20 bp, synthetic construct
  misc_feature 1..20: note = chemically synthesized
  source 1..20: mol_type = other DNA
cattagaattttgcaaaaat

SEQ ID NO: 38969 - DNA, 20 bp, synthetic construct
  misc_feature 1..20: note = chemically synthesized
  source 1..20: mol_type = other DNA
gttgacatgagcagcatgga

SEQ ID NO: 38970 - DNA, 20 bp, synthetic construct
  misc_feature 1..20: note = chemically synthesized
  source 1..20: mol_type = other DNA
tctgggcagagctgcatgat

SEQ ID NO: 38971 - DNA, 20 bp, synthetic construct
  misc_feature 1..20: note = chemically synthesized
  source 1..20: mol_type = other DNA
caggtaggccacaggtgaca

SEQ ID NO: 38972 - DNA, 20 bp, synthetic construct
  misc_feature 1..20: note = chemically synthesized
  source 1..20: mol_type = other DNA
gtccagcggcaggatcagtc

SEQ ID NO: 38973 - DNA, 20 bp, synthetic construct
  misc_feature 1..20: note = chemically synthesized
  source 1..20: mol_type = other DNA
aattgatgaacaggcctgag

SEQ ID NO: 38974 - DNA, 20 bp, synthetic construct
  misc_feature 1..20: note = chemically synthesized
  source 1..20: mol_type = other DNA
gctaatggtggtggtaatga

SEQ ID NO: 38975 - DNA, 20 bp, synthetic construct
  misc_feature 1..20: note = chemically synthesized
  source 1..20: mol_type = other DNA
tcatcagtagacatcatata

SEQ ID NO: 38976 - DNA, 20 bp, synthetic construct
  misc_feature 1..20: note = chemically synthesized
  source 1..20: mol_type = other DNA
tagctggcccagagcctact

SEQ ID NO: 38977 - DNA, 20 bp, synthetic construct
  misc_feature 1..20: note = chemically synthesized
  source 1..20: mol_type = other DNA
tttctaaccaccatccccca

SEQ ID NO: 38978 - DNA, 20 bp, synthetic construct
  misc_feature 1..20: note = chemically synthesized
  source 1..20: mol_type = other DNA
cacctgcaggtccactgaga

SEQ ID NO: 38979 - DNA, 20 bp, synthetic construct
  misc_feature 1..20: note = chemically synthesized
  source 1..20: mol_type = other DNA
tcagcctctgagagggaggt

SEQ ID NO: 38980 - DNA, 20 bp, synthetic construct
  misc_feature 1..20: note = chemically synthesized
  source 1..20: mol_type = other DNA
aagttttcctgctctcccct

SEQ ID NO: 38981 - DNA, 20 bp, synthetic construct
  misc_feature 1..20: note = chemically synthesized
  source 1..20: mol_type = other DNA
tccctgacttggatcaaatg

SEQ ID NO: 38982 - DNA, 20 bp, synthetic construct
  misc_feature 1..20: note = chemically synthesized
  source 1..20: mol_type = other DNA
gtttggaggtgttgaggcca

SEQ ID NO: 38983 - DNA, 20 bp, synthetic construct
  misc_feature 1..20: note = chemically synthesized
  source 1..20: mol_type = other DNA
ctccccaaggccccatcagg

SEQ ID NO: 38984 - DNA, 20 bp, synthetic construct
  misc_feature 1..20: note = chemically synthesized
  source 1..20: mol_type = other DNA
aactttcctggcaacttgcg

SEQ ID NO: 38985 - DNA, 20 bp, synthetic construct
  misc_feature 1..20: note = chemically synthesized
  source 1..20: mol_type = other DNA
gtaggttttcaccattatca

SEQ ID NO: 38986 - DNA, 20 bp, synthetic construct
  misc_feature 1..20: note = chemically synthesized
  source 1..20: mol_type = other DNA
gatgtttgccttgctcaaat

SEQ ID NO: 38987 - DNA, 20 bp, synthetic construct
  misc_feature 1..20: note = chemically synthesized
  source 1..20: mol_type = other DNA
caggtgatgcaccctctgcc

SEQ ID NO: 38988 - DNA, 20 bp, synthetic construct
  misc_feature 1..20: note = chemically synthesized
  source 1..20: mol_type = other DNA
acttccatcatgcagctctg

SEQ ID NO: 38989 - DNA, 20 bp, synthetic construct
  misc_feature 1..20: note = chemically synthesized
  source 1..20: mol_type = other DNA
catgtcaactccagatgcag

SEQ ID NO: 38990 - DNA, 20 bp, synthetic construct
  misc_feature 1..20: note = chemically synthesized
  source 1..20: mol_type = other DNA
cctgtgccatgctcgcaaag

SEQ ID NO: 38991 - DNA, 20 bp, synthetic construct
  misc_feature 1..20: note = chemically synthesized
  source 1..20: mol_type = other DNA
ttgcaaaattctaatgaaag

SEQ ID NO: 38992 - DNA, 20 bp, synthetic construct
  misc_feature 1..20: note = chemically synthesized
  source 1..20: mol_type = other DNA
tgggcttgcaaaattagaaa

SEQ ID NO: 38993 - DNA, 20 bp, synthetic construct
  misc_feature 1..20: note = chemically synthesized
  source 1..20: mol_type = other DNA
gaatttggcaaagaaaataa

SEQ ID NO: 38994 - DNA, 20 bp, synthetic construct
  misc_feature 1..20: note = chemically synthesized
  source 1..20: mol_type = other DNA
aatcaggacaatttcaacct

SEQ ID NO: 38995 - DNA, 20 bp, synthetic construct
  misc_feature 1..20: note = chemically synthesized
  source 1..20: mol_type = other DNA
acactcatacaagtgtggtg

SEQ ID NO: 38996 - DNA, 20 bp, synthetic construct
  misc_feature 1..20: note = chemically synthesized
  source 1..20: mol_type = other DNA
tcatacaagtgtggtgaagt

SEQ ID NO: 38997 - DNA, 20 bp, synthetic construct
  misc_feature 1..20: note = chemically synthesized
  source 1..20: mol_type = other DNA
actagacaacctccttacac

SEQ ID NO: 38998 - DNA, 20 bp, synthetic construct
  misc_feature 1..20: note = chemically synthesized
  source 1..20: mol_type = other DNA
agagcaggagtgatggaact

SEQ ID NO: 38999 - DNA, 20 bp, synthetic construct
  misc_feature 1..20: note = chemically synthesized
  source 1..20: mol_type = other DNA
gaagtgagatacaccacatt

SEQ ID NO: 39000 - DNA, 20 bp, synthetic construct
  misc_feature 1..20: note = chemically synthesized
  source 1..20: mol_type = other DNA
aagcttgtgcctggaaagga

SEQ ID NO: 39001 - DNA, 20 bp, synthetic construct
  misc_feature 1..20: note = chemically synthesized
  source 1..20: mol_type = other DNA
tacatttaaacattattctt

SEQ ID NO: 39002 - DNA, 20 bp, synthetic construct
  misc_feature 1..20: note = chemically synthesized
  source 1..20: mol_type = other DNA
cgcaaagcaccatgacaaag

SEQ ID NO: 39003 - DNA, 20 bp, synthetic construct
  misc_feature 1..20: note = chemically synthesized
  source 1..20: mol_type = other DNA
caaagctcagattgttaaat

SEQ ID NO: 39004 - DNA, 20 bp, synthetic construct
  misc_feature 1..20: note = chemically synthesized
  source 1..20: mol_type = other DNA
ttggaacatagactcttata

SEQ ID NO: 39005 - DNA, 20 bp, synthetic construct
  misc_feature 1..20: note = chemically synthesized
  source 1..20: mol_type = other DNA
tcaccactgctctgttcttc

SEQ ID NO: 39006 - DNA, 20 bp, synthetic construct
  misc_feature 1..20: note = chemically synthesized
  source 1..20: mol_type = other DNA
taaacacaggtacctttggg

SEQ ID NO: 39007 - DNA, 20 bp, synthetic construct
  misc_feature 1..20: note = chemically synthesized
  source 1..20: mol_type = other DNA
tctcaaggaagcccagctcc

SEQ ID NO: 39008 - DNA, 20 bp, synthetic construct
  misc_feature 1..20: note = chemically synthesized
  source 1..20: mol_type = other DNA
gaatgaagtgtgcaatcgct

SEQ ID NO: 39009 - DNA, 20 bp, synthetic construct
  misc_feature 1..20: note = chemically synthesized
  source 1..20: mol_type = other DNA
tcccaaagtagcgaattcaa

SEQ ID NO: 39010 - DNA, 20 bp, synthetic construct
  misc_feature 1..20: note = chemically synthesized
  source 1..20: mol_type = other DNA
gatcatccaaggggacttct

SEQ ID NO: 39011 - DNA, 20 bp, synthetic construct
  misc_feature 1..20: note = chemically synthesized
  source 1..20: mol_type = other DNA
ccggtggccagggactaaag

SEQ ID NO: 39012 - DNA, 20 bp, synthetic construct
  misc_feature 1..20: note = chemically synthesized
  source 1..20: mol_type = other DNA
cagagttggcgtgtctcccc

SEQ ID NO: 39013 - DNA, 20 bp, synthetic construct
  misc_feature 1..20: note = chemically synthesized
  source 1..20: mol_type = other DNA
ctccccaattgatttacaac

SEQ ID NO: 39014 - DNA, 20 bp, synthetic construct
  misc_feature 1..20: note = chemically synthesized
  source 1..20: mol_type = other DNA
atttacaactggggcttgga

SEQ ID NO: 39015 - DNA, 20 bp, synthetic construct
  misc_feature 1..20: note = chemically synthesized
  source 1..20: mol_type = other DNA
tttccacttaattctaccac

SEQ ID NO: 39016 - DNA, 20 bp, synthetic construct
  misc_feature 1..20: note = chemically synthesized
  source 1..20: mol_type = other DNA
tacttcatgagaacgaaaat

SEQ ID NO: 39017 - DNA, 20 bp, synthetic construct
  misc_feature 1..20: note = chemically synthesized
  source 1..20: mol_type = other DNA
gcaccatgaattcatttgcg

SEQ ID NO: 39018 - DNA, 20 bp, synthetic construct
  misc_feature 1..20: note = chemically synthesized
  source 1..20: mol_type = other DNA
catttgcggaaagattgata

SEQ ID NO: 39019 - DNA, 20 bp, synthetic construct
  misc_feature 1..20: note = chemically synthesized
  source 1..20: mol_type = other DNA
accccggttgaagtgcactg

SEQ ID NO: 39020 - DNA, 20 bp, synthetic construct
  misc_feature 1..20: note = chemically synthesized
  source 1..20: mol_type = other DNA
tactccagcctccctagtag

SEQ ID NO: 39021 - DNA, 20 bp, synthetic construct
  misc_feature 1..20: note = chemically synthesized
  source 1..20: mol_type = other DNA
ttttgtatttttagtagaga

SEQ ID NO: 39022 - DNA, 20 bp, synthetic construct
  misc_feature 1..20: note = chemically synthesized
  source 1..20: mol_type = other DNA
tgtcttggcctcccaaagtg

SEQ ID NO: 39023 - DNA, 20 bp, synthetic construct
  misc_feature 1..20: note = chemically synthesized
  source 1..20: mol_type = other DNA
ttgagccaccgcactcgacc

SEQ ID NO: 39024 - DNA, 20 bp, synthetic construct
  misc_feature 1..20: note = chemically synthesized
  source 1..20: mol_type = other DNA
agccacaactactagaatag

SEQ ID NO: 39025 - DNA, 20 bp, synthetic construct
  misc_feature 1..20: note = chemically synthesized
  source 1..20: mol_type = other DNA
ttttgtattttttgtagaga

SEQ ID NO: 39026 - DNA, 20 bp, synthetic construct
  misc_feature 1..20: note = chemically synthesized
  source 1..20: mol_type = other DNA
acagggttttggcatgttgc

SEQ ID NO: 39027 - DNA, 20 bp, synthetic construct
  misc_feature 1..20: note = chemically synthesized
  source 1..20: mol_type = other DNA
tgccgtggcctcccaaaatg

SEQ ID NO: 39028 - DNA, 20 bp, synthetic construct
  misc_feature 1..20: note = chemically synthesized
  source 1..20: mol_type = other DNA
tgagccaccaccccctcctg

SEQ ID NO: 39029 - DNA, 20 bp, synthetic construct
  misc_feature 1..20: note = chemically synthesized
  source 1..20: mol_type = other DNA
aaataaattttgaagataat

SEQ ID NO: 39030 - DNA, 20 bp, synthetic construct
  misc_feature 1..20: note = chemically synthesized
  source 1..20: mol_type = other DNA
cacttatgttgtcatttcgg

SEQ ID NO: 39031 - DNA, 20 bp, synthetic construct
  misc_feature 1..20: note = chemically synthesized
  source 1..20: mol_type = other DNA
tggagatgttaacatttata

SEQ ID NO: 39032 - DNA, 20 bp, synthetic construct
  misc_feature 1..20: note = chemically synthesized
  source 1..20: mol_type = other DNA
tcgtacagcactgcctgttg

SEQ ID NO: 39033 - DNA, 20 bp, synthetic construct
  misc_feature 1..20: note = chemically synthesized
  source 1..20: mol_type = other DNA
ccagcaaatatgagctactt

SEQ ID NO: 39034 - DNA, 20 bp, synthetic construct
  misc_feature 1..20: note = chemically synthesized
  source 1..20: mol_type = other DNA
gtggagcagctgagggggga

SEQ ID NO: 39035 - DNA, 20 bp, synthetic construct
  misc_feature 1..20: note = chemically synthesized
  source 1..20: mol_type = other DNA
ataagactctatattcaagg

SEQ ID NO: 39036 - DNA, 20 bp, synthetic construct
  misc_feature 1..20: note = chemically synthesized
  source 1..20: mol_type = other DNA
tcattaacttaatttgacta

SEQ ID NO: 39037 - DNA, 20 bp, synthetic construct
  misc_feature 1..20: note = chemically synthesized
  source 1..20: mol_type = other DNA
tttgactatctggtttgtgg

SEQ ID NO: 39038 - DNA, 20 bp, synthetic construct
  misc_feature 1..20: note = chemically synthesized
  source 1..20: mol_type = other DNA
tcatgtaagtcaacaatgtc

SEQ ID NO: 39039 - DNA, 20 bp, synthetic construct
  misc_feature 1..20: note = chemically synthesized
  source 1..20: mol_type = other DNA
atttctgaaatcaggtaaga

SEQ ID NO: 39040 - DNA, 20 bp, synthetic construct
  misc_feature 1..20: note = chemically synthesized
  source 1..20: mol_type = other DNA
tgtagtaaaaatacatatgc

SEQ ID NO: 39041 - DNA, 20 bp, synthetic construct
  misc_feature 1..20: note = chemically synthesized
  source 1..20: mol_type = other DNA
ttatgtgcaattcatttaat

SEQ ID NO: 39042 - DNA, 20 bp, synthetic construct
  misc_feature 1..20: note = chemically synthesized
  source 1..20: mol_type = other DNA
ttcccagttcaaaatcttgt

SEQ ID NO: 39043 - DNA, 20 bp, synthetic construct
  misc_feature 1..20: note = chemically synthesized
  source 1..20: mol_type = other DNA
attgaaaaattcttaaaaaa

SEQ ID NO: 39044 - DNA, 20 bp, synthetic construct
  misc_feature 1..20: note = chemically synthesized
  source 1..20: mol_type = other DNA
gaatgggcagaaaaaataat

SEQ ID NO: 39045 - DNA, 20 bp, synthetic construct
  misc_feature 1..20: note = chemically synthesized
  source 1..20: mol_type = other DNA
atgcaaaggatggctaagct

SEQ ID NO: 39046 - DNA, 20 bp, synthetic construct
  misc_feature 1..20: note = chemically synthesized
  source 1..20: mol_type = other DNA
gctaagctcttcgcttggtt

SEQ ID NO: 39047 - DNA, 20 bp, synthetic construct
  misc_feature 1..20: note = chemically synthesized
  source 1..20: mol_type = other DNA
acaatgaaataactctttga

SEQ ID NO: 39048 - DNA, 20 bp, synthetic construct
  misc_feature 1..20: note = chemically synthesized
  source 1..20: mol_type = other DNA
tctctttgttatggcctgag

SEQ ID NO: 39049 - DNA, 20 bp, synthetic construct
  misc_feature 1..20: note = chemically synthesized
  source 1..20: mol_type = other DNA
aaggctttccatcggtatac

SEQ ID NO: 39050 - DNA, 20 bp, synthetic construct
  misc_feature 1..20: note = chemically synthesized
  source 1..20: mol_type = other DNA
tgccagatgatatacgcata

SEQ ID NO: 39051 - DNA, 20 bp, synthetic construct
  misc_feature 1..20: note = chemically synthesized
  source 1..20: mol_type = other DNA
catacacacatacacaccgt

SEQ ID NO: 39052 - DNA, 20 bp, synthetic construct
  misc_feature 1..20: note = chemically synthesized
  source 1..20: mol_type = other DNA
agtgtgtgtcctttacaaat

SEQ ID NO: 39053 - DNA, 20 bp, synthetic construct
  misc_feature 1..20: note = chemically synthesized
  source 1..20: mol_type = other DNA
aaatcaaggaaataaagaaa

SEQ ID NO: 39054 - DNA, 20 bp, synthetic construct
  misc_feature 1..20: note = chemically synthesized
  source 1..20: mol_type = other DNA
ataaagaaacctggatttaa

SEQ ID NO: 39055 - DNA, 20 bp, synthetic construct
  misc_feature 1..20: note = chemically synthesized
  source 1..20: mol_type = other DNA
atgtaactgaagagcaggtt

SEQ ID NO: 39056 - DNA, 20 bp, synthetic construct
  misc_feature 1..20: note = chemically synthesized
  source 1..20: mol_type = other DNA
agagaagtctggtataaaga

SEQ ID NO: 39057 - DNA, 20 bp, synthetic construct
  misc_feature 1..20: note = chemically synthesized
  source 1..20: mol_type = other DNA
agtctggtataaagaaagtg

SEQ ID NO: 39058 - DNA, 20 bp, synthetic construct
  misc_feature 1..20: note = chemically synthesized
  source 1..20: mol_type = other DNA
gaaagtgatttgcttccaaa

SEQ ID NO: 39059 - DNA, 20 bp, synthetic construct
  misc_feature 1..20: note = chemically synthesized
  source 1..20: mol_type = other DNA
aaggcaacagaggaggcgag

SEQ ID NO: 39060 - DNA, 20 bp, synthetic construct
  misc_feature 1..20: note = chemically synthesized
  source 1..20: mol_type = other DNA
gcaaggattcaggggtccat

SEQ ID NO: 39061 - DNA, 20 bp, synthetic construct
  misc_feature 1..20: note = chemically synthesized
  source 1..20: mol_type = other DNA
gaggcaaatctctggagggt

SEQ ID NO: 39062 - DNA, 20 bp, synthetic construct
  misc_feature 1..20: note = chemically synthesized
  source 1..20: mol_type = other DNA
gggtgagagttttgtagtgg

SEQ ID NO: 39063 - DNA, 20 bp, synthetic construct
  misc_feature 1..20: note = chemically synthesized
  source 1..20: mol_type = other DNA
gagttttgtagtgggcatgc

SEQ ID NO: 39064 - DNA, 20 bp, synthetic construct
  misc_feature 1..20: note = chemically synthesized
  source 1..20: mol_type = other DNA
gagtctgatgaaagggaggt

SEQ ID NO: 39065 - DNA, 20 bp, synthetic construct
  misc_feature 1..20: note = chemically synthesized
  source 1..20: mol_type = other DNA
caaagaaaatacagagcagg

SEQ ID NO: 39066 - DNA, 20 bp, synthetic construct
  misc_feature 1..20: note = chemically synthesized
  source 1..20: mol_type = other DNA
gagcaggagaagattaagca

SEQ ID NO: 39067 - DNA, 20 bp, synthetic construct
  misc_feature 1..20: note = chemically synthesized
  source 1..20: mol_type = other DNA
ctagaacaaacttctctgcc

SEQ ID NO: 39068 - DNA, 20 bp, synthetic construct
  misc_feature 1..20: note = chemically synthesized
  source 1..20: mol_type = other DNA
ttctctgccacaggattaac

SEQ ID NO: 39069 - DNA, 20 bp, synthetic construct
  misc_feature 1..20: note = chemically synthesized
  source 1..20: mol_type = other DNA
tgataagctcttttggaaag

SEQ ID NO: 39070 - DNA, 20 bp, synthetic construct
  misc_feature 1..20: note = chemically synthesized
  source 1..20: mol_type = other DNA
tggaatgcccggggagagga

SEQ ID NO: 39071 - DNA, 20 bp, synthetic construct
  misc_feature 1..20: note = chemically synthesized
  source 1..20: mol_type = other DNA
ataaaagtatttttcctatt

SEQ ID NO: 39072 - DNA, 20 bp, synthetic construct
  misc_feature 1..20: note = chemically synthesized
  source 1..20: mol_type = other DNA
agtatttttcctattaaaag

SEQ ID NO: 39073 - DNA, 20 bp, synthetic construct
  misc_feature 1..20: note = chemically synthesized
  source 1..20: mol_type = other DNA
ttcctattaaaagatttgtt

SEQ ID NO: 39074 - DNA, 20 bp, synthetic construct
  misc_feature 1..20: note = chemically synthesized
  source 1..20: mol_type = other DNA
ggaggtgaatcagagaaaca

SEQ ID NO: 39075 - DNA, 20 bp, synthetic construct
  misc_feature 1..20: note = chemically synthesized
  source 1..20: mol_type = other DNA
catcaggttaaaaaaagaaa

SEQ ID NO: 39076 - DNA, 20 bp, synthetic construct
  misc_feature 1..20: note = chemically synthesized
  source 1..20: mol_type = other DNA
gttaaaaaaagaaaaattga

SEQ ID NO: 39077 - DNA, 20 bp, synthetic construct
  misc_feature 1..20: note = chemically synthesized
  source 1..20: mol_type = other DNA
agttaaagggggaaataaat

SEQ ID NO: 39078 - DNA, 20 bp, synthetic construct
  misc_feature 1..20: note = chemically synthesized
  source 1..20: mol_type = other DNA
catttcaaaaacactcttca

SEQ ID NO: 39079 - DNA, 20 bp, synthetic construct
  misc_feature 1..20: note = chemically synthesized
  source 1..20: mol_type = other DNA
aagcaccttattaatttatt

SEQ ID NO: 39080 - DNA, 20 bp, synthetic construct
  misc_feature 1..20: note = chemically synthesized
  source 1..20: mol_type = other DNA
gatattttgatatatctatc

SEQ ID NO: 39081 - DNA, 20 bp, synthetic construct
  misc_feature 1..20: note = chemically synthesized
  source 1..20: mol_type = other DNA
atatctatcaagtgcttttt

SEQ ID NO: 39082 - DNA, 20 bp, synthetic construct
  misc_feature 1..20: note = chemically synthesized
  source 1..20: mol_type = other DNA
agccaatgcctgttcaataa

SEQ ID NO: 39083 - DNA, 20 bp, synthetic construct
  misc_feature 1..20: note = chemically synthesized
  source 1..20: mol_type = other DNA
cctgtattccctagaagtct

SEQ ID NO: 39084 - DNA, 20 bp, synthetic construct
  misc_feature 1..20: note = chemically synthesized
  source 1..20: mol_type = other DNA
aagtctcgctgctttcagag

SEQ ID NO: 39085 - DNA, 20 bp, synthetic construct
  misc_feature 1..20: note = chemically synthesized
  source 1..20: mol_type = other DNA
caaagtggtcaaggttgtcc

SEQ ID NO: 39086 - DNA, 20 bp, synthetic construct
  misc_feature 1..20: note = chemically synthesized
  source 1..20: mol_type = other DNA
gtcctgttgcttaattccat

SEQ ID NO: 39087 - DNA, 20 bp, synthetic construct
  misc_feature 1..20: note = chemically synthesized
  source 1..20: mol_type = other DNA
cagagatggagctggcatct

SEQ ID NO: 39088 - DNA, 20 bp, synthetic construct
  misc_feature 1..20: note = chemically synthesized
  source 1..20: mol_type = other DNA
tttgccacaaccaggcagaa

SEQ ID NO: 39089 - DNA, 20 bp, synthetic construct
  misc_feature 1..20: note = chemically synthesized
  source 1..20: mol_type = other DNA
caggcagaaagcagcttttg

SEQ ID NO: 39090 - DNA, 20 bp, synthetic construct
  misc_feature 1..20: note = chemically synthesized
  source 1..20: mol_type = other DNA
cttttgaacagatttgttgc

SEQ ID NO: 39091 - DNA, 20 bp, synthetic construct
  misc_feature 1..20: note = chemically synthesized
  source 1..20: mol_type = other DNA
tgggcagtattggtcccagg

SEQ ID NO: 39092 - DNA, 20 bp, synthetic construct
  misc_feature 1..20: note = chemically synthesized
  source 1..20: mol_type = other DNA
aaaaatggccttctttgtgg

SEQ ID NO: 39093 - DNA, 20 bp, synthetic construct
  misc_feature 1..20: note = chemically synthesized
  source 1..20: mol_type = other DNA
cttcatatcctccatttttt

SEQ ID NO: 39094 - DNA, 20 bp, synthetic construct
  misc_feature 1..20: note = chemically synthesized
  source 1..20: mol_type = other DNA
taaaggagggaccattcaga

SEQ ID NO: 39095 - DNA, 20 bp, synthetic construct
  misc_feature 1..20: note = chemically synthesized
  source 1..20: mol_type = other DNA
ctccaaggttcatttctaca

SEQ ID NO: 39096 - DNA, 20 bp, synthetic construct
  misc_feature 1..20: note = chemically synthesized
  source 1..20: mol_type = other DNA
gacatggcaatcaagagcaa

SEQ ID NO: 39097 - DNA, 20 bp, synthetic construct
  misc_feature 1..20: note = chemically synthesized
  source 1..20: mol_type = other DNA
caaacatgatttattcttat

SEQ ID NO: 39098 - DNA, 20 bp, synthetic construct
  misc_feature 1..20: note = chemically synthesized
  source 1..20: mol_type = other DNA
gtctggagaatctgaaaccc

SEQ ID NO: 39099 - DNA, 20 bp, synthetic construct
  misc_feature 1..20: note = chemically synthesized
  source 1..20: mol_type = other DNA
tgtacttcttgtattcttaa

SEQ ID NO: 39100 - DNA, 20 bp, synthetic construct
  misc_feature 1..20: note = chemically synthesized
  source 1..20: mol_type = other DNA
atcactgcaaacctctataa

SEQ ID NO: 39101 - DNA, 20 bp, synthetic construct
  misc_feature 1..20: note = chemically synthesized
  source 1..20: mol_type = other DNA
ctacgcattgacttatcttc

SEQ ID NO: 39102 - DNA, 20 bp, synthetic construct
  misc_feature 1..20: note = chemically synthesized
  source 1..20: mol_type = other DNA
cgttgtactttcttccttac

SEQ ID NO: 39103 - DNA, 20 bp, synthetic construct
  misc_feature 1..20: note = chemically synthesized
  source 1..20: mol_type = other DNA
ccactgtttatctcaaactc

SEQ ID NO: 39104 - DNA, 20 bp, synthetic construct
  misc_feature 1..20: note = chemically synthesized
  source 1..20: mol_type = other DNA
tatgggctcaggagggagcg

SEQ ID NO: 39105 - DNA, 20 bp, synthetic construct
  misc_feature 1..20: note = chemically synthesized
  source 1..20: mol_type = other DNA
gccttatggaaaagtggcca

SEQ ID NO: 39106 - DNA, 20 bp, synthetic construct
  misc_feature 1..20: note = chemically synthesized
  source 1..20: mol_type = other DNA
cattttagtcagtgttggct

SEQ ID NO: 39107 - DNA, 20 bp, synthetic construct
  misc_feature 1..20: note = chemically synthesized
  source 1..20: mol_type = other DNA
cagtaccaccgttaatgccc

SEQ ID NO: 39108 - DNA, 20 bp, synthetic construct
  misc_feature 1..20: note = chemically synthesized
  source 1..20: mol_type = other DNA
gcacacagcagggaaagaat

SEQ ID NO: 39109 - DNA, 20 bp, synthetic construct
  misc_feature 1..20: note = chemically synthesized
  source 1..20: mol_type = other DNA
aattccagtttctctttctt

SEQ ID NO: 39110 - DNA, 20 bp, synthetic construct
  misc_feature 1..20: note = chemically synthesized
  source 1..20: mol_type = other DNA
actcttcaccaggcaaggct

SEQ ID NO: 39111 - DNA, 20 bp, synthetic construct
  misc_feature 1..20: note = chemically synthesized
  source 1..20: mol_type = other DNA
acatttccactggctgcact

SEQ ID NO: 39112 - DNA, 20 bp, synthetic construct
  misc_feature 1..20: note = chemically synthesized
  source 1..20: mol_type = other DNA
agggaaggaaaaaagatcct

SEQ ID NO: 39113 - DNA, 20 bp, synthetic construct
  misc_feature 1..20: note = chemically synthesized
  source 1..20: mol_type = other DNA
gaaaaatgtaaaaaggctag

SEQ ID NO: 39114 - DNA, 20 bp, synthetic construct
  misc_feature 1..20: note = chemically synthesized
  source 1..20: mol_type = other DNA
ttggactgtcttccttgctc

SEQ ID NO: 39115 - DNA, 20 bp, synthetic construct
  misc_feature 1..20: note = chemically synthesized
  source 1..20: mol_type = other DNA
ctctagagaaccccgactaa

SEQ ID NO: 39116 - DNA, 20 bp, synthetic construct
  misc_feature 1..20: note = chemically synthesized
  source 1..20: mol_type = other DNA
attaaggatggaattctttc

SEQ ID NO: 39117 - DNA, 20 bp, synthetic construct
  misc_feature 1..20: note = chemically synthesized
  source 1..20: mol_type = other DNA
gttttgggacttctggtgtt

SEQ ID NO: 39118 - DNA, 20 bp, synthetic construct
  misc_feature 1..20: note = chemically synthesized
  source 1..20: mol_type = other DNA
cttctggtgttggctgatta

SEQ ID NO: 39119 - DNA, 20 bp, synthetic construct
  misc_feature 1..20: note = chemically synthesized
  source 1..20: mol_type = other DNA
cactgatagtacttggcctg

SEQ ID NO: 39120 - DNA, 20 bp, synthetic construct
  misc_feature 1..20: note = chemically synthesized
  source 1..20: mol_type = other DNA
aaaataaatgcatttgacac

SEQ ID NO: 39121 - DNA, 20 bp, synthetic construct
  misc_feature 1..20: note = chemically synthesized
  source 1..20: mol_type = other DNA
ttcatcacttatgagaggca

SEQ ID NO: 39122 - DNA, 20 bp, synthetic construct
  misc_feature 1..20: note = chemically synthesized
  source 1..20: mol_type = other DNA
ccaaggaacataatgaagtt

SEQ ID NO: 39123 - DNA, 20 bp, synthetic construct
  misc_feature 1..20: note = chemically synthesized
  source 1..20: mol_type = other DNA
gatactgagccacaaatctg

SEQ ID NO: 39124 - DNA, 20 bp, synthetic construct
  misc_feature 1..20: note = chemically synthesized
  source 1..20: mol_type = other DNA
ctgctaagattgccctgaat

SEQ ID NO: 39125 - DNA, 20 bp, synthetic construct
  misc_feature 1..20: note = chemically synthesized
  source 1..20: mol_type = other DNA
ggtgcatgcacagccttgcc

SEQ ID NO: 39126 - DNA, 20 bp, synthetic construct
  misc_feature 1..20: note = chemically synthesized
  source 1..20: mol_type = other DNA
ccctgatgaagctgaggaca

SEQ ID NO: 39127 - DNA, 20 bp, synthetic construct
  misc_feature 1..20: note = chemically synthesized
  source 1..20: mol_type = other DNA
gaaacttttttgccagaaga

SEQ ID NO: 39128 - DNA, 20 bp, synthetic construct
  misc_feature 1..20: note = chemically synthesized
  source 1..20: mol_type = other DNA
gtctgaggatgtaaaccctg

SEQ ID NO: 39129 - DNA, 20 bp, synthetic construct
  misc_feature 1..20: note = chemically synthesized
  source 1..20: mol_type = other DNA
gcagctgccaggcaagataa

SEQ ID NO: 39130 - DNA, 20 bp, synthetic construct
  misc_feature 1..20: note = chemically synthesized
  source 1..20: mol_type = other DNA
gaggcacccctaatgcccct

SEQ ID NO: 39131 - DNA, 20 bp, synthetic construct
  misc_feature 1..20: note = chemically synthesized
  source 1..20: mol_type = other DNA
ggtgcattatactctaaaag

SEQ ID NO: 39132 - DNA, 20 bp, synthetic construct
  misc_feature 1..20: note = chemically synthesized
  source 1..20: mol_type = other DNA
ttatactctaaaagaactgc

SEQ ID NO: 39133 - DNA, 20 bp, synthetic construct
  misc_feature 1..20: note = chemically synthesized
  source 1..20: mol_type = other DNA
agttggatcaagctgaattt

SEQ ID NO: 39134 - DNA, 20 bp, synthetic construct
  misc_feature 1..20: note = chemically synthesized
  source 1..20: mol_type = other DNA
attggtttggccctactaag

SEQ ID NO: 39135 - DNA, 20 bp, synthetic construct
  misc_feature 1..20: note = chemically synthesized
  source 1..20: mol_type = other DNA
ggcgggcagatcacgagatc

SEQ ID NO: 39136 - DNA, 20 bp, synthetic construct
  misc_feature 1..20: note = chemically synthesized
  source 1..20: mol_type = other DNA
ttgggaggctgaggcaagag

SEQ ID NO: 39137 - DNA, 20 bp, synthetic construct
  misc_feature 1..20: note = chemically synthesized
  source 1..20: mol_type = other DNA
aactgcttgaacctgtgagg

SEQ ID NO: 39138 - DNA, 20 bp, synthetic construct
  misc_feature 1..20: note = chemically synthesized
  source 1..20: mol_type = other DNA
aaaaaaaaaaaaaaagttat

SEQ ID NO: 39139 - DNA, 20 bp, synthetic construct
  misc_feature 1..20: note = chemically synthesized
  source 1..20: mol_type = other DNA
aaaaaaagttataatagttt

SEQ ID NO: 39140 - DNA, 20 bp, synthetic construct
  misc_feature 1..20: note = chemically synthesized
  source 1..20: mol_type = other DNA
atttgcttggttagctgaaa

SEQ ID NO: 39141 - DNA, 20 bp, synthetic construct
  misc_feature 1..20: note = chemically synthesized
  source 1..20: mol_type = other DNA
tgttagtgagctggaaatgc

SEQ ID NO: 39142 - DNA, 20 bp, synthetic construct
  misc_feature 1..20: note = chemically synthesized
  source 1..20: mol_type = other DNA
taatgtagaggaagtgatcc

SEQ ID NO: 39143 - DNA, 20 bp, synthetic construct
  misc_feature 1..20: note = chemically synthesized
  source 1..20: mol_type = other DNA
ggaagtgatccaaaggctta

SEQ ID NO: 39144 - DNA, 20 bp, synthetic construct
  misc_feature 1..20: note = chemically synthesized
  source 1..20: mol_type = other DNA
tagggagattaggatggtgg

SEQ ID NO: 39145 - DNA, 20 bp, synthetic construct
  misc_feature 1..20: note = chemically synthesized
  source 1..20: mol_type = other DNA
ccagaagatacacccttggc

SEQ ID NO: 39146 - DNA, 20 bp, synthetic construct
  misc_feature 1..20: note = chemically synthesized
  source 1..20: mol_type = other DNA
ccttggccgaagctttgtga

SEQ ID NO: 39147 - DNA, 20 bp, synthetic construct
  misc_feature 1..20: note = chemically synthesized
  source 1..20: mol_type = other DNA
gggaaacctactgtattcct

SEQ ID NO: 39148 - DNA, 20 bp, synthetic construct
  misc_feature 1..20: note = chemically synthesized
  source 1..20: mol_type = other DNA
ggacactggctctgagctga

SEQ ID NO: 39149 - DNA, 20 bp, synthetic construct
  misc_feature 1..20: note = chemically synthesized
  source 1..20: mol_type = other DNA
tgtggttccccagttaaagt

SEQ ID NO: 39150 - DNA, 20 bp, synthetic construct
  misc_feature 1..20: note = chemically synthesized
  source 1..20: mol_type = other DNA
tatggaggttaggtaattaa

SEQ ID NO: 39151 - DNA, 20 bp, synthetic construct
  misc_feature 1..20: note = chemically synthesized
  source 1..20: mol_type = other DNA
tcccatccctggagggactg

SEQ ID NO: 39152 - DNA, 20 bp, synthetic construct
  misc_feature 1..20: note = chemically synthesized
  source 1..20: mol_type = other DNA
ggacttgaaagacgcagggg

SEQ ID NO: 39153 - DNA, 20 bp, synthetic construct
  misc_feature 1..20: note = chemically synthesized
  source 1..20: mol_type = other DNA
gatggatcttggaaaatgat

SEQ ID NO: 39154 - DNA, 20 bp, synthetic construct
  misc_feature 1..20: note = chemically synthesized
  source 1..20: mol_type = other DNA
gaaaatgatggtggattatt

SEQ ID NO: 39155 - DNA, 20 bp, synthetic construct
  misc_feature 1..20: note = chemically synthesized
  source 1..20: mol_type = other DNA
attgcagctgctctaccagt

SEQ ID NO: 39156 - DNA, 20 bp, synthetic construct
  misc_feature 1..20: note = chemically synthesized
  source 1..20: mol_type = other DNA
tgctctaccagttgtggttt

SEQ ID NO: 39157 - DNA, 20 bp, synthetic construct
  misc_feature 1..20: note = chemically synthesized
  source 1..20: mol_type = other DNA
ctggtgcctggtatgcagcc

SEQ ID NO: 39158 - DNA, 20 bp, synthetic construct
  misc_feature 1..20: note = chemically synthesized
  source 1..20: mol_type = other DNA
atgcagccattggcttggca

SEQ ID NO: 39159 - DNA, 20 bp, synthetic construct
  misc_feature 1..20: note = chemically synthesized
  source 1..20: mol_type = other DNA
cctcaggggtgtatcaactc

SEQ ID NO: 39160 - DNA, 20 bp, synthetic construct
  misc_feature 1..20: note = chemically synthesized
  source 1..20: mol_type = other DNA
atcttatttggagagacctt

SEQ ID NO: 39161 - DNA, 20 bp, synthetic construct
  misc_feature 1..20: note = chemically synthesized
  source 1..20: mol_type = other DNA
ccattacattcatgacatta

SEQ ID NO: 39162 - DNA, 20 bp, synthetic construct
  misc_feature 1..20: note = chemically synthesized
  source 1..20: mol_type = other DNA
ctaaggtgaagcataacttg

SEQ ID NO: 39163 - DNA, 20 bp, synthetic construct
  misc_feature 1..20: note = chemically synthesized
  source 1..20: mol_type = other DNA
cacaatgcctggtgggccta

SEQ ID NO: 39164 - DNA, 20 bp, synthetic construct
  misc_feature 1..20: note = chemically synthesized
  source 1..20: mol_type = other DNA
gattttggaggcaacacatt

SEQ ID NO: 39165 - DNA, 20 bp, synthetic construct
  misc_feature 1..20: note = chemically synthesized
  source 1..20: mol_type = other DNA
atcgagtgacctgaaaggct

SEQ ID NO: 39166 - DNA, 20 bp, synthetic construct
  misc_feature 1..20: note = chemically synthesized
  source 1..20: mol_type = other DNA
acatgaccccgcagatccaa

SEQ ID NO: 39167 - DNA, 20 bp, synthetic construct
  misc_feature 1..20: note = chemically synthesized
  source 1..20: mol_type = other DNA
gtgtcagtggcagataggga

SEQ ID NO: 39168 - DNA, 20 bp, synthetic construct
  misc_feature 1..20: note = chemically synthesized
  source 1..20: mol_type = other DNA
gtgaatcacagtggagacct

SEQ ID NO: 39169 - DNA, 20 bp, synthetic construct
  misc_feature 1..20: note = chemically synthesized
  source 1..20: mol_type = other DNA
agacagctattggtctgtta

SEQ ID NO: 39170 - DNA, 20 bp, synthetic construct
  misc_feature 1..20: note = chemically synthesized
  source 1..20: mol_type = other DNA
attgggctttggtggtaact

SEQ ID NO: 39171 - DNA, 20 bp, synthetic construct
  misc_feature 1..20: note = chemically synthesized
  source 1..20: mol_type = other DNA
gaacctgcctatcatgaact

SEQ ID NO: 39172 - DNA, 20 bp, synthetic construct
  misc_feature 1..20: note = chemically synthesized
  source 1..20: mol_type = other DNA
ttgaagtggtgtgtatgtga

SEQ ID NO: 39173 - DNA, 20 bp, synthetic construct
  misc_feature 1..20: note = chemically synthesized
  source 1..20: mol_type = other DNA
tttttcctttatcatgtgac

SEQ ID NO: 39174 - DNA, 20 bp, synthetic construct
  misc_feature 1..20: note = chemically synthesized
  source 1..20: mol_type = other DNA
gttaaccttatgtaataact

SEQ ID NO: 39175 - DNA, 20 bp, synthetic construct
  misc_feature 1..20: note = chemically synthesized
  source 1..20: mol_type = other DNA
ttatgtaataacttttggtt

SEQ ID NO: 39176 - DNA, 20 bp, synthetic construct
  misc_feature 1..20: note = chemically synthesized
  source 1..20: mol_type = other DNA
aacttttggtttggggattg

SEQ ID NO: 39177 - DNA, 20 bp, synthetic construct
  misc_feature 1..20: note = chemically synthesized
  source 1..20: mol_type = other DNA
accttattattgtctttatt

SEQ ID NO: 39178 - DNA, 20 bp, synthetic construct
  misc_feature 1..20: note = chemically synthesized
  source 1..20: mol_type = other DNA
tgtctttatttgaagattat

SEQ ID NO: 39179 - DNA, 20 bp, synthetic construct
  misc_feature 1..20: note = chemically synthesized
  source 1..20: mol_type = other DNA
tgtgatggttaatactgtca

SEQ ID NO: 39180 - DNA, 20 bp, synthetic construct
  misc_feature 1..20: note = chemically synthesized
  source 1..20: mol_type = other DNA
tggttaatactgtcaacttg

SEQ ID NO: 39181 - DNA, 20 bp, synthetic construct
  misc_feature 1..20: note = chemically synthesized
  source 1..20: mol_type = other DNA
gtctgtgagggtgtggcaaa

SEQ ID NO: 39182 - DNA, 22 bp, synthetic construct
  misc_feature 1..22: note = chemically synthesized
  source 1..22: mol_type = other DNA
ccagcccactgactcaaatgtt

SEQ ID NO: 39183 - DNA, 22 bp, synthetic construct
  misc_feature 1..22: note = chemically synthesized
  source 1..22: mol_type = other DNA
actcaaatgttaatctcctttt

SEQ ID NO: 39184 - DNA, 22 bp, synthetic construct
  misc_feature 1..22: note = chemically synthesized
  source 1..22: mol_type = other DNA
aaatgttaatctccttttgcca

SEQ ID NO: 39185 - DNA, 22 bp, synthetic construct
  misc_feature 1..22: note = chemically synthesized
  source 1..22: mol_type = other DNA
atctccttttgccacaccctca

SEQ ID NO: 39186 - DNA, 22 bp, synthetic construct
  misc_feature 1..22: note = chemically synthesized
  source 1..22: mol_type = other DNA
cttttgccacaccctcacagac

SEQ ID NO: 39187 - DNA, 22 bp, synthetic construct
  misc_feature 1..22: note = chemically synthesized
  source 1..22: mol_type = other DNA
ttgccacaccctcacagacata

SEQ ID NO: 39188 - DNA, 22 bp, synthetic construct
  misc_feature 1..22: note = chemically synthesized
  source 1..22: mol_type = other DNA
tgccacaccctcacagacataa

SEQ ID NO: 39189 - DNA, 22 bp, synthetic construct
  misc_feature 1..22: note = chemically synthesized
  source 1..22: mol_type = other DNA
gccacaccctcacagacataac

SEQ ID NO: 39190 - DNA, 22 bp, synthetic construct
  misc_feature 1..22: note = chemically synthesized
  source 1..22: mol_type = other DNA
ccacaccctcacagacataacc

SEQ ID NO: 39191 - DNA, 22 bp, synthetic construct
  misc_feature 1..22: note = chemically synthesized
  source 1..22: mol_type = other DNA
acagacataaccgagattaata

SEQ ID NO: 39192 - DNA, 22 bp, synthetic construct
  misc_feature 1..22: note = chemically synthesized
  source 1..22: mol_type = other DNA
atactttgcatctttcaatcca

SEQ ID NO: 39193 - DNA, 22 bp, synthetic construct
  misc_feature 1..22: note = chemically synthesized
  source 1..22: mol_type = other DNA
tgcatctttcaatccaatcaag

SEQ ID NO: 39194 - DNA, 22 bp, synthetic construct
  misc_feature 1..22: note = chemically synthesized
  source 1..22: mol_type = other DNA
gcatctttcaatccaatcaagt

SEQ ID NO: 39195 - DNA, 22 bp, synthetic construct
  misc_feature 1..22: note = chemically synthesized
  source 1..22: mol_type = other DNA
catctttcaatccaatcaagtt

SEQ ID NO: 39196 - DNA, 22 bp, synthetic construct
  misc_feature 1..22: note = chemically synthesized
  source 1..22: mol_type = other DNA
tcaatccaatcaagttgacagt

SEQ ID NO: 39197 - DNA, 22 bp, synthetic construct
  misc_feature 1..22: note = chemically synthesized
  source 1..22: mol_type = other DNA
caatccaatcaagttgacagta

SEQ ID NO: 39198 - DNA, 22 bp, synthetic construct
  misc_feature 1..22: note = chemically synthesized
  source 1..22: mol_type = other DNA
aatccaatcaagttgacagtat

SEQ ID NO: 39199 - DNA, 22 bp, synthetic construct
  misc_feature 1..22: note = chemically synthesized
  source 1..22: mol_type = other DNA
acagtattaaccatcacaagtc

SEQ ID NO: 39200 - DNA, 22 bp, synthetic construct
  misc_feature 1..22: note = chemically synthesized
  source 1..22: mol_type = other DNA
accatcacaagtccaactcctt

SEQ ID NO: 39201 - DNA, 22 bp, synthetic construct
  misc_feature 1..22: note = chemically synthesized
  source 1..22: mol_type = other DNA
cttgtcaacttgaacccataca

SEQ ID NO: 39202 - DNA, 22 bp, synthetic construct
  misc_feature 1..22: note = chemically synthesized
  source 1..22: mol_type = other DNA
gtcaacttgaacccatacacac

SEQ ID NO: 39203 - DNA, 22 bp, synthetic construct
  misc_feature 1..22: note = chemically synthesized
  source 1..22: mol_type = other DNA
tcaacttgaacccatacacaca

SEQ ID NO: 39204 - DNA, 22 bp, synthetic construct
  misc_feature 1..22: note = chemically synthesized
  source 1..22: mol_type = other DNA
gaacccatacacacatcctgaa

SEQ ID NO: 39205 - DNA, 22 bp, synthetic construct
  misc_feature 1..22: note = chemically synthesized
  source 1..22: mol_type = other DNA
aacccatacacacatcctgaaa

SEQ ID NO: 39206 - DNA, 22 bp, synthetic construct
  misc_feature 1..22: note = chemically synthesized
  source 1..22: mol_type = other DNA
aaatcatacataatcttcaaat

SEQ ID NO: 39207 - DNA, 22 bp, synthetic construct
  misc_feature 1..22: note = chemically synthesized
  source 1..22: mol_type = other DNA
caaataaagacaataataaggt

SEQ ID NO: 39208 - DNA, 22 bp, synthetic construct
  misc_feature 1..22: note = chemically synthesized
  source 1..22: mol_type = other DNA
aaataaagacaataataaggtc

SEQ ID NO: 39209 - DNA, 22 bp, synthetic construct
  misc_feature 1..22: note = chemically synthesized
  source 1..22: mol_type = other DNA
tgcctaatataatacaactatc

SEQ ID NO: 39210 - DNA, 22 bp, synthetic construct
  misc_feature 1..22: note = chemically synthesized
  source 1..22: mol_type = other DNA
atataatacaactatcctcata

SEQ ID NO: 39211 - DNA, 22 bp, synthetic construct
  misc_feature 1..22: note = chemically synthesized
  source 1..22: mol_type = other DNA
tcctcatacaaccagaaacgca

SEQ ID NO: 39212 - DNA, 22 bp, synthetic construct
  misc_feature 1..22: note = chemically synthesized
  source 1..22: mol_type = other DNA
atacaaccagaaacgcaccaat

SEQ ID NO: 39213 - DNA, 22 bp, synthetic construct
  misc_feature 1..22: note = chemically synthesized
  source 1..22: mol_type = other DNA
ttacataaggttaacaatattt

SEQ ID NO: 39214 - DNA, 22 bp, synthetic construct
  misc_feature 1..22: note = chemically synthesized
  source 1..22: mol_type = other DNA
cataaggttaacaatatttaaa

SEQ ID NO: 39215 - DNA, 22 bp, synthetic construct
  misc_feature 1..22: note = chemically synthesized
  source 1..22: mol_type = other DNA
acaatatttaaatgctgatatg

SEQ ID NO: 39216 - DNA, 22 bp, synthetic construct
  misc_feature 1..22: note = chemically synthesized
  source 1..22: mol_type = other DNA
aaatgctgatatgaacaacact

SEQ ID NO: 39217 - DNA, 22 bp, synthetic construct
  misc_feature 1..22: note = chemically synthesized
  source 1..22: mol_type = other DNA
aatgctgatatgaacaacactt

SEQ ID NO: 39218 - DNA, 22 bp, synthetic construct
  misc_feature 1..22: note = chemically synthesized
  source 1..22: mol_type = other DNA
atatgaacaacacttaaatgct

SEQ ID NO: 39219 - DNA, 22 bp, synthetic construct
  misc_feature 1..22: note = chemically synthesized
  source 1..22: mol_type = other DNA
aaatgcttaaatgctgatgtga

SEQ ID NO: 39220 - DNA, 22 bp, synthetic construct
  misc_feature 1..22: note = chemically synthesized
  source 1..22: mol_type = other DNA
aatgcttaaatgctgatgtgaa

SEQ ID NO: 39221 - DNA, 22 bp, synthetic construct
  misc_feature 1..22: note = chemically synthesized
  source 1..22: mol_type = other DNA
aaatgctgatgtgaagtccata

SEQ ID NO: 39222 - DNA, 22 bp, synthetic construct
  misc_feature 1..22: note = chemically synthesized
  source 1..22: mol_type = other DNA
aatgctgatgtgaagtccataa

SEQ ID NO: 39223 - DNA, 22 bp, synthetic construct
  misc_feature 1..22: note = chemically synthesized
  source 1..22: mol_type = other DNA
atgtgaagtccataaatctaag

SEQ ID NO: 39224 - DNA, 22 bp, synthetic construct
  misc_feature 1..22: note = chemically synthesized
  source 1..22: mol_type = other DNA
aggtcacatgataaaggaaaaa

SEQ ID NO: 39225 - DNA, 22 bp, synthetic construct
  misc_feature 1..22: note = chemically synthesized
  source 1..22: mol_type = other DNA
tcttagcacaagtgtacacatg

SEQ ID NO: 39226 - DNA, 22 bp, synthetic construct
  misc_feature 1..22: note = chemically synthesized
  source 1..22: mol_type = other DNA
cttagcacaagtgtacacatgc

SEQ ID NO: 39227 - DNA, 22 bp, synthetic construct
  misc_feature 1..22: note = chemically synthesized
  source 1..22: mol_type = other DNA
ttagcacaagtgtacacatgca

SEQ ID NO: 39228 - DNA, 22 bp, synthetic construct
  misc_feature 1..22: note = chemically synthesized
  source 1..22: mol_type = other DNA
agcacaagtgtacacatgcatt

SEQ ID NO: 39229 - DNA, 22 bp, synthetic construct
  misc_feature 1..22: note = chemically synthesized
  source 1..22: mol_type = other DNA
gcacaagtgtacacatgcattt

SEQ ID NO: 39230 - DNA, 22 bp, synthetic construct
  misc_feature 1..22: note = chemically synthesized
  source 1..22: mol_type = other DNA
agaaagtggatatagtgctgca

SEQ ID NO: 39231 - DNA, 22 bp, synthetic construct
  misc_feature 1..22: note = chemically synthesized
  source 1..22: mol_type = other DNA
gaaagtggatatagtgctgcag

SEQ ID NO: 39232 - DNA, 22 bp, synthetic construct
  misc_feature 1..22: note = chemically synthesized
  source 1..22: mol_type = other DNA
cagctgtccactttcgggtggt

SEQ ID NO: 39233 - DNA, 22 bp, synthetic construct
  misc_feature 1..22: note = chemically synthesized
  source 1..22: mol_type = other DNA
tccactttcgggtggtgcctgc

SEQ ID NO: 39234 - DNA, 22 bp, synthetic construct
  misc_feature 1..22: note = chemically synthesized
  source 1..22: mol_type = other DNA
tcgggtggtgcctgcatatcgt

SEQ ID NO: 39235 - DNA, 22 bp, synthetic construct
  misc_feature 1..22: note = chemically synthesized
  source 1..22: mol_type = other DNA
cgggtggtgcctgcatatcgtg

SEQ ID NO: 39236 - DNA, 22 bp, synthetic construct
  misc_feature 1..22: note = chemically synthesized
  source 1..22: mol_type = other DNA
gggtggtgcctgcatatcgtgc

SEQ ID NO: 39237 - DNA, 22 bp, synthetic construct
  misc_feature 1..22: note = chemically synthesized
  source 1..22: mol_type = other DNA
catatcgtgcagaaccatctat

SEQ ID NO: 39238 - DNA, 22 bp, synthetic construct
  misc_feature 1..22: note = chemically synthesized
  source 1..22: mol_type = other DNA
tgaaccagtccttagtcttccc

SEQ ID NO: 39239 - DNA, 22 bp, synthetic construct
  misc_feature 1..22: note = chemically synthesized
  source 1..22: mol_type = other DNA
agtcttcccttcctctgtcaac

SEQ ID NO: 39240 - DNA, 22 bp, synthetic construct
  misc_feature 1..22: note = chemically synthesized
  source 1..22: mol_type = other DNA
gtcttcccttcctctgtcaact

SEQ ID NO: 39241 - DNA, 22 bp, synthetic construct
  misc_feature 1..22: note = chemically synthesized
  source 1..22: mol_type = other DNA
cccttcctctgtcaactgatca

SEQ ID NO: 39242 - DNA, 22 bp, synthetic construct
  misc_feature 1..22: note = chemically synthesized
  source 1..22: mol_type = other DNA
ccttcctctgtcaactgatcat

SEQ ID NO: 39243 - DNA, 22 bp, synthetic construct
  misc_feature 1..22: note = chemically synthesized
  source 1..22: mol_type = other DNA
cctctgtcaactgatcataggg

SEQ ID NO: 39244 - DNA, 22 bp, synthetic construct
  misc_feature 1..22: note = chemically synthesized
  source 1..22: mol_type = other DNA
ctctgtcaactgatcataggga

SEQ ID NO: 39245 - DNA, 22 bp, synthetic construct
  misc_feature 1..22: note = chemically synthesized
  source 1..22: mol_type = other DNA
tgtcaactgatcatagggaact

SEQ ID NO: 39246 - DNA, 22 bp, synthetic construct
  misc_feature 1..22: note = chemically synthesized
  source 1..22: mol_type = other DNA
tcaactgatcatagggaactcc

SEQ ID NO: 39247 - DNA, 22 bp, synthetic construct
  misc_feature 1..22: note = chemically synthesized
  source 1..22: mol_type = other DNA
atcatagggaactccccatgag

SEQ ID NO: 39248 - DNA, 22 bp, synthetic construct
  misc_feature 1..22: note = chemically synthesized
  source 1..22: mol_type = other DNA
cccatgaggccattggtgcagg

SEQ ID NO: 39249 - DNA, 22 bp, synthetic construct
  misc_feature 1..22: note = chemically synthesized
  source 1..22: mol_type = other DNA
gtgcaggctgggggagggaagg

SEQ ID NO: 39250 - DNA, 22 bp, synthetic construct
  misc_feature 1..22: note = chemically synthesized
  source 1..22: mol_type = other DNA
ggggagggaaggcagggtggca

SEQ ID NO: 39251 - DNA, 22 bp, synthetic construct
  misc_feature 1..22: note = chemically synthesized
  source 1..22: mol_type = other DNA
gagccacttccttatgtaactt

SEQ ID NO: 39252 - DNA, 22 bp, synthetic construct
  misc_feature 1..22: note = chemically synthesized
  source 1..22: mol_type = other DNA
agccacttccttatgtaactta

SEQ ID NO: 39253 - DNA, 22 bp, synthetic construct
  misc_feature 1..22: note = chemically synthesized
  source 1..22: mol_type = other DNA
ccttatgtaacttacttgtgcc

SEQ ID NO: 39254 - DNA, 22 bp, synthetic construct
  misc_feature 1..22: note = chemically synthesized
  source 1..22: mol_type = other DNA
cttatgtaacttacttgtgcct

SEQ ID NO: 39255 - DNA, 22 bp, synthetic construct
  misc_feature 1..22: note = chemically synthesized
  source 1..22: mol_type = other DNA
atgtaacttacttgtgccttca

SEQ ID NO: 39256 - DNA, 22 bp, synthetic construct
  misc_feature 1..22: note = chemically synthesized
  source 1..22: mol_type = other DNA
tgtaacttacttgtgccttcag

SEQ ID NO: 39257 - DNA, 22 bp, synthetic construct
  misc_feature 1..22: note = chemically synthesized
  source 1..22: mol_type = other DNA
acttgtgccttcaggacctgct

SEQ ID NO: 39258 - DNA, 22 bp, synthetic construct
  misc_feature 1..22: note = chemically synthesized
  source 1..22: mol_type = other DNA
cttgtgccttcaggacctgctc

SEQ ID NO: 39259 - DNA, 22 bp, synthetic construct
  misc_feature 1..22: note = chemically synthesized
  source 1..22: mol_type = other DNA
gtgccttcaggacctgctcaag

SEQ ID NO: 39260 - DNA, 22 bp, synthetic construct
  misc_feature 1..22: note = chemically synthesized
  source 1..22: mol_type = other DNA
tgccttcaggacctgctcaagc

SEQ ID NO: 39261 - DNA, 22 bp, synthetic construct
  misc_feature 1..22: note = chemically synthesized
  source 1..22: mol_type = other DNA
caggacctgctcaagcccgatc

SEQ ID NO: 39262 - DNA, 22 bp, synthetic construct
  misc_feature 1..22: note = chemically synthesized
  source 1..22: mol_type = other DNA
aggacctgctcaagcccgatca

SEQ ID NO: 39263 - DNA, 22 bp, synthetic construct
  misc_feature 1..22: note = chemically synthesized
  source 1..22: mol_type = other DNA
ctcaagcccgatcacatacaca

SEQ ID NO: 39264 - DNA, 22 bp, synthetic construct
  misc_feature 1..22: note = chemically synthesized
  source 1..22: mol_type = other DNA
aagcccgatcacatacacacca

SEQ ID NO: 39265 - DNA, 22 bp, synthetic construct
  misc_feature 1..22: note = chemically synthesized
  source 1..22: mol_type = other DNA
caatttgatgatgaaatgccgc

SEQ ID NO: 39266 - DNA, 22 bp, synthetic construct
  misc_feature 1..22: note = chemically synthesized
  source 1..22: mol_type = other DNA
aatttgatgatgaaatgccgct

SEQ ID NO: 39267 - DNA, 22 bp, synthetic construct
  misc_feature 1..22: note = chemically synthesized
  source 1..22: mol_type = other DNA
gatgatgaaatgccgctgtgct

SEQ ID NO: 39268 - DNA, 22 bp, synthetic construct
  misc_feature 1..22: note = chemically synthesized
  source 1..22: mol_type = other DNA
atgatgaaatgccgctgtgctg

SEQ ID NO: 39269 - DNA, 22 bp, synthetic construct
  misc_feature 1..22: note = chemically synthesized
  source 1..22: mol_type = other DNA
tgctgacccacttcatggctag

SEQ ID NO: 39270 - DNA, 22 bp, synthetic construct
  misc_feature 1..22: note = chemically synthesized
  source 1..22: mol_type = other DNA
acccacttcatggctagatggg

SEQ ID NO: 39271 - DNA, 22 bp, synthetic construct
  misc_feature 1..22: note = chemically synthesized
  source 1..22: mol_type = other DNA
catggctagatgggtcagaaag

SEQ ID NO: 39272 - DNA, 22 bp, synthetic construct
  misc_feature 1..22: note = chemically synthesized
  source 1..22: mol_type = other DNA
atggctagatgggtcagaaagc

SEQ ID NO: 39273 - DNA, 22 bp, synthetic construct
  misc_feature 1..22: note = chemically synthesized
  source 1..22: mol_type = other DNA
gatgggtcagaaagcaaccagt

SEQ ID NO: 39274 - DNA, 22 bp, synthetic construct
  misc_feature 1..22: note = chemically synthesized
  source 1..22: mol_type = other DNA
atgataggcaggttcaggtagc

SEQ ID NO: 39275 - DNA, 22 bp, synthetic construct
  misc_feature 1..22: note = chemically synthesized
  source 1..22: mol_type = other DNA
aggtagcatggtgactttatga

SEQ ID NO: 39276 - DNA, 22 bp, synthetic construct
  misc_feature 1..22: note = chemically synthesized
  source 1..22: mol_type = other DNA
tatgacccacagtcaaacgttc

SEQ ID NO: 39277 - DNA, 22 bp, synthetic construct
  misc_feature 1..22: note = chemically synthesized
  source 1..22: mol_type = other DNA
atgacccacagtcaaacgttca

SEQ ID NO: 39278 - DNA, 22 bp, synthetic construct
  misc_feature 1..22: note = chemically synthesized
  source 1..22: mol_type = other DNA
tgacccacagtcaaacgttcag

SEQ ID NO: 39279 - DNA, 22 bp, synthetic construct
  misc_feature 1..22: note = chemically synthesized
  source 1..22: mol_type = other DNA
agttaccaccaaagcccaataa

SEQ ID NO: 39280 - DNA, 22 bp, synthetic construct
  misc_feature 1..22: note = chemically synthesized
  source 1..22: mol_type = other DNA
ccaccaaagcccaataacagac

SEQ ID NO: 39281 - DNA, 22 bp, synthetic construct
  misc_feature 1..22: note = chemically synthesized
  source 1..22: mol_type = other DNA
tctctcaaaaggagagtagtta

SEQ ID NO: 39282 - DNA, 22 bp, synthetic construct
  misc_feature 1..22: note = chemically synthesized
  source 1..22: mol_type = other DNA
tcaaaaggagagtagttatctg

SEQ ID NO: 39283 - DNA, 22 bp, synthetic construct
  misc_feature 1..22: note = chemically synthesized
  source 1..22: mol_type = other DNA
aaaaggagagtagttatctgca

SEQ ID NO: 39284 - DNA, 22 bp, synthetic construct
  misc_feature 1..22: note = chemically synthesized
  source 1..22: mol_type = other DNA
tctgcagaagtggcagggcctt

SEQ ID NO: 39285 - DNA, 22 bp, synthetic construct
  misc_feature 1..22: note = chemically synthesized
  source 1..22: mol_type = other DNA
cagaagtggcagggccttgctc

SEQ ID NO: 39286 - DNA, 22 bp, synthetic construct
  misc_feature 1..22: note = chemically synthesized
  source 1..22: mol_type = other DNA
gctccaaaatcctagaggtctc

SEQ ID NO: 39287 - DNA, 22 bp, synthetic construct
  misc_feature 1..22: note = chemically synthesized
  source 1..22: mol_type = other DNA
ctccaaaatcctagaggtctcc

SEQ ID NO: 39288 - DNA, 22 bp, synthetic construct
  misc_feature 1..22: note = chemically synthesized
  source 1..22: mol_type = other DNA
caaaatcctagaggtctccact

SEQ ID NO: 39289 - DNA, 22 bp, synthetic construct
  misc_feature 1..22: note = chemically synthesized
  source 1..22: mol_type = other DNA
gaggtctccactgtgattcacc

SEQ ID NO: 39290 - DNA, 22 bp, synthetic construct
  misc_feature 1..22: note = chemically synthesized
  source 1..22: mol_type = other DNA
cactgtgattcacctatggggg

SEQ ID NO: 39291 - DNA, 22 bp, synthetic construct
  misc_feature 1..22: note = chemically synthesized
  source 1..22: mol_type = other DNA
tgattcacctatgggggcctgc

SEQ ID NO: 39292 - DNA, 22 bp, synthetic construct
  misc_feature 1..22: note = chemically synthesized
  source 1..22: mol_type = other DNA
acctatgggggcctgccaaagg

SEQ ID NO: 39293 - DNA, 22 bp, synthetic construct
  misc_feature 1..22: note = chemically synthesized
  source 1..22: mol_type = other DNA
tgggggcctgccaaaggctcca

SEQ ID NO: 39294 - DNA, 22 bp, synthetic construct
  misc_feature 1..22: note = chemically synthesized
  source 1..22: mol_type = other DNA
ccaaaggctccaaacagcatcc

SEQ ID NO: 39295 - DNA, 22 bp, synthetic construct
  misc_feature 1..22: note = chemically synthesized
  source 1..22: mol_type = other DNA
caaacagcatccctatctgcca

SEQ ID NO: 39296 - DNA, 22 bp, synthetic construct
  misc_feature 1..22: note = chemically synthesized
  source 1..22: mol_type = other DNA
tctgccactgacacctcaagca

SEQ ID NO: 39297 - DNA, 22 bp, synthetic construct
  misc_feature 1..22: note = chemically synthesized
  source 1..22: mol_type = other DNA
ccactgacacctcaagcaccat

SEQ ID NO: 39298 - DNA, 22 bp, synthetic construct
  misc_feature 1..22: note = chemically synthesized
  source 1..22: mol_type = other DNA
acacctcaagcaccattggatc

SEQ ID NO: 39299 - DNA, 22 bp, synthetic construct
  misc_feature 1..22: note = chemically synthesized
  source 1..22: mol_type = other DNA
aagcaccattggatctgcgggg

SEQ ID NO: 39300 - DNA, 22 bp, synthetic construct
  misc_feature 1..22: note = chemically synthesized
  source 1..22: mol_type = other DNA
gatctgcggggtcatgtggccc

SEQ ID NO: 39301 - DNA, 22 bp, synthetic construct
  misc_feature 1..22: note = chemically synthesized
  source 1..22: mol_type = other DNA
cggggtcatgtggcccaaatgg

SEQ ID NO: 39302 - DNA, 22 bp, synthetic construct
  misc_feature 1..22: note = chemically synthesized
  source 1..22: mol_type = other DNA
tcacagcagcctggacctgttt

SEQ ID NO: 39303 - DNA, 22 bp, synthetic construct
  misc_feature 1..22: note = chemically synthesized
  source 1..22: mol_type = other DNA
cacagcagcctggacctgtttc

SEQ ID NO: 39304 - DNA, 22 bp, synthetic construct
  misc_feature 1..22: note = chemically synthesized
  source 1..22: mol_type = other DNA
acagcagcctggacctgtttca

SEQ ID NO: 39305 - DNA, 22 bp, synthetic construct
  misc_feature 1..22: note = chemically synthesized
  source 1..22: mol_type = other DNA
gacctgtttcagagccttcttt

SEQ ID NO: 39306 - DNA, 22 bp, synthetic construct
  misc_feature 1..22: note = chemically synthesized
  source 1..22: mol_type = other DNA
tttcagagccttcttttgttct

SEQ ID NO: 39307 - DNA, 22 bp, synthetic construct
  misc_feature 1..22: note = chemically synthesized
  source 1..22: mol_type = other DNA
cagagccttcttttgttctaga

SEQ ID NO: 39308 - DNA, 22 bp, synthetic construct
  misc_feature 1..22: note = chemically synthesized
  source 1..22: mol_type = other DNA
agagccttcttttgttctagac

SEQ ID NO: 39309 - DNA, 22 bp, synthetic construct
  misc_feature 1..22: note = chemically synthesized
  source 1..22: mol_type = other DNA
cttttgttctagactgcactta

SEQ ID NO: 39310 - DNA, 22 bp, synthetic construct
  misc_feature 1..22: note = chemically synthesized
  source 1..22: mol_type = other DNA
ttttgttctagactgcacttaa

SEQ ID NO: 39311 - DNA, 22 bp, synthetic construct
  misc_feature 1..22: note = chemically synthesized
  source 1..22: mol_type = other DNA
ttgttctagactgcacttaaat

SEQ ID NO: 39312 - DNA, 22 bp, synthetic construct
  misc_feature 1..22: note = chemically synthesized
  source 1..22: mol_type = other DNA
tgttctagactgcacttaaatc

SEQ ID NO: 39313 - DNA, 22 bp, synthetic construct
  misc_feature 1..22: note = chemically synthesized
  source 1..22: mol_type = other DNA
gttctagactgcacttaaatct

SEQ ID NO: 39314 - DNA, 22 bp, synthetic construct
  misc_feature 1..22: note = chemically synthesized
  source 1..22: mol_type = other DNA
ttctagactgcacttaaatctg

SEQ ID NO: 39315 - DNA, 22 bp, synthetic construct
  misc_feature 1..22: note = chemically synthesized
  source 1..22: mol_type = other DNA
tagactgcacttaaatctggca

SEQ ID NO: 39316 - DNA, 22 bp, synthetic construct
  misc_feature 1..22: note = chemically synthesized
  source 1..22: mol_type = other DNA
gactgcacttaaatctggcagc

SEQ ID NO: 39317 - DNA, 22 bp, synthetic construct
  misc_feature 1..22: note = chemically synthesized
  source 1..22: mol_type = other DNA
cacttaaatctggcagcctttc

SEQ ID NO: 39318 - DNA, 22 bp, synthetic construct
  misc_feature 1..22: note = chemically synthesized
  source 1..22: mol_type = other DNA
aaatctggcagcctttcaggtc

SEQ ID NO: 39319 - DNA, 22 bp, synthetic construct
  misc_feature 1..22: note = chemically synthesized
  source 1..22: mol_type = other DNA
aatctggcagcctttcaggtca

SEQ ID NO: 39320 - DNA, 22 bp, synthetic construct
  misc_feature 1..22: note = chemically synthesized
  source 1..22: mol_type = other DNA
gcagcctttcaggtcactcgat

SEQ ID NO: 39321 - DNA, 22 bp, synthetic construct
  misc_feature 1..22: note = chemically synthesized
  source 1..22: mol_type = other DNA
tcaggtcactcgataaatgggc

SEQ ID NO: 39322 - DNA, 22 bp, synthetic construct
  misc_feature 1..22: note = chemically synthesized
  source 1..22: mol_type = other DNA
caggtcactcgataaatgggcc

SEQ ID NO: 39323 - DNA, 22 bp, synthetic construct
  misc_feature 1..22: note = chemically synthesized
  source 1..22: mol_type = other DNA
aggtcactcgataaatgggcca

SEQ ID NO: 39324 - DNA, 22 bp, synthetic construct
  misc_feature 1..22: note = chemically synthesized
  source 1..22: mol_type = other DNA
gataaatgggccagagtaacac

SEQ ID NO: 39325 - DNA, 22 bp, synthetic construct
  misc_feature 1..22: note = chemically synthesized
  source 1..22: mol_type = other DNA
cctccaaaatccaaataggccc

SEQ ID NO: 39326 - DNA, 22 bp, synthetic construct
  misc_feature 1..22: note = chemically synthesized
  source 1..22: mol_type = other DNA
caaaatccaaataggcccacca

SEQ ID NO: 39327 - DNA, 22 bp, synthetic construct
  misc_feature 1..22: note = chemically synthesized
  source 1..22: mol_type = other DNA
tgcctctttcttggttgtaaga

SEQ ID NO: 39328 - DNA, 22 bp, synthetic construct
  misc_feature 1..22: note = chemically synthesized
  source 1..22: mol_type = other DNA
tttcttggttgtaagaggggcc

SEQ ID NO: 39329 - DNA, 22 bp, synthetic construct
  misc_feature 1..22: note = chemically synthesized
  source 1..22: mol_type = other DNA
tcttggttgtaagaggggccaa

SEQ ID NO: 39330 - DNA, 22 bp, synthetic construct
  misc_feature 1..22: note = chemically synthesized
  source 1..22: mol_type = other DNA
cttggttgtaagaggggccaaa

SEQ ID NO: 39331 - DNA, 22 bp, synthetic construct
  misc_feature 1..22: note = chemically synthesized
  source 1..22: mol_type = other DNA
ttggttgtaagaggggccaaac

SEQ ID NO: 39332 - DNA, 22 bp, synthetic construct
  misc_feature 1..22: note = chemically synthesized
  source 1..22: mol_type = other DNA
ggttgtaagaggggccaaacgc

SEQ ID NO: 39333 - DNA, 22 bp, synthetic construct
  misc_feature 1..22: note = chemically synthesized
  source 1..22: mol_type = other DNA
gttgtaagaggggccaaacgca

SEQ ID NO: 39334 - DNA, 22 bp, synthetic construct
  misc_feature 1..22: note = chemically synthesized
  source 1..22: mol_type = other DNA
taagaggggccaaacgcagcaa

SEQ ID NO: 39335 - DNA, 22 bp, synthetic construct
  misc_feature 1..22: note = chemically synthesized
  source 1..22: mol_type = other DNA
tgcttcaccttagaaggaatat

SEQ ID NO: 39336 - DNA, 22 bp, synthetic construct
  misc_feature 1..22: note = chemically synthesized
  source 1..22: mol_type = other DNA
caccttagaaggaatatctcca

SEQ ID NO: 39337 - DNA, 22 bp, synthetic construct
  misc_feature 1..22: note = chemically synthesized
  source 1..22: mol_type = other DNA
accttagaaggaatatctccat

SEQ ID NO: 39338 - DNA, 22 bp, synthetic construct
  misc_feature 1..22: note = chemically synthesized
  source 1..22: mol_type = other DNA
agaaggaatatctccataggtc

SEQ ID NO: 39339 - DNA, 22 bp, synthetic construct
  misc_feature 1..22: note = chemically synthesized
  source 1..22: mol_type = other DNA
gaaggaatatctccataggtct

SEQ ID NO: 39340 - DNA, 22 bp, synthetic construct
  misc_feature 1..22: note = chemically synthesized
  source 1..22: mol_type = other DNA
cataggtctcatgccactggaa

SEQ ID NO: 39341 - DNA, 22 bp, synthetic construct
  misc_feature 1..22: note = chemically synthesized
  source 1..22: mol_type = other DNA
atgccactggaaccctagaaat

SEQ ID NO: 39342 - DNA, 22 bp, synthetic construct
  misc_feature 1..22: note = chemically synthesized
  source 1..22: mol_type = other DNA
gaaccctagaaattttaccgag

SEQ ID NO: 39343 - DNA, 22 bp, synthetic construct
  misc_feature 1..22: note = chemically synthesized
  source 1..22: mol_type = other DNA
gaaattttaccgaggtagaaag

SEQ ID NO: 39344 - DNA, 22 bp, synthetic construct
  misc_feature 1..22: note = chemically synthesized
  source 1..22: mol_type = other DNA
taccgaggtagaaagtccctaa

SEQ ID NO: 39345 - DNA, 22 bp, synthetic construct
  misc_feature 1..22: note = chemically synthesized
  source 1..22: mol_type = other DNA
accgaggtagaaagtccctaaa

SEQ ID NO: 39346 - DNA, 22 bp, synthetic construct
  misc_feature 1..22: note = chemically synthesized
  source 1..22: mol_type = other DNA
ccgaggtagaaagtccctaaat

SEQ ID NO: 39347 - DNA, 22 bp, synthetic construct
  misc_feature 1..22: note = chemically synthesized
  source 1..22: mol_type = other DNA
aattttagctggatttatttcc

SEQ ID NO: 39348 - DNA, 22 bp, synthetic construct
  misc_feature 1..22: note = chemically synthesized
  source 1..22: mol_type = other DNA
tagctggatttatttcccatcc

SEQ ID NO: 39349 - DNA, 22 bp, synthetic construct
  misc_feature 1..22: note = chemically synthesized
  source 1..22: mol_type = other DNA
agctggatttatttcccatcct

SEQ ID NO: 39350 - DNA, 22 bp, synthetic construct
  misc_feature 1..22: note = chemically synthesized
  source 1..22: mol_type = other DNA
gctggatttatttcccatcctc

SEQ ID NO: 39351 - DNA, 22 bp, synthetic construct
  misc_feature 1..22: note = chemically synthesized
  source 1..22: mol_type = other DNA
gatttatttcccatcctctggc

SEQ ID NO: 39352 - DNA, 22 bp, synthetic construct
  misc_feature 1..22: note = chemically synthesized
  source 1..22: mol_type = other DNA
atttcccatcctctggcataca

SEQ ID NO: 39353 - DNA, 22 bp, synthetic construct
  misc_feature 1..22: note = chemically synthesized
  source 1..22: mol_type = other DNA
tttcccatcctctggcatacaa

SEQ ID NO: 39354 - DNA, 22 bp, synthetic construct
  misc_feature 1..22: note = chemically synthesized
  source 1..22: mol_type = other DNA
cccatcctctggcatacaaatg

SEQ ID NO: 39355 - DNA, 22 bp, synthetic construct
  misc_feature 1..22: note = chemically synthesized
  source 1..22: mol_type = other DNA
ccatcctctggcatacaaatgt

SEQ ID NO: 39356 - DNA, 22 bp, synthetic construct
  misc_feature 1..22: note = chemically synthesized
  source 1..22: mol_type = other DNA
tggcatacaaatgtctcaccaa

SEQ ID NO: 39357 - DNA, 22 bp, synthetic construct
  misc_feature 1..22: note = chemically synthesized
  source 1..22: mol_type = other DNA
gcatacaaatgtctcaccaata

SEQ ID NO: 39358 - DNA, 22 bp, synthetic construct
  misc_feature 1..22: note = chemically synthesized
  source 1..22: mol_type = other DNA
accaataagttcagtgtgtttg

SEQ ID NO: 39359 - DNA, 22 bp, synthetic construct
  misc_feature 1..22: note = chemically synthesized
  source 1..22: mol_type = other DNA
agtgtgtttgctacttcttgct

SEQ ID NO: 39360 - DNA, 22 bp, synthetic construct
  misc_feature 1..22: note = chemically synthesized
  source 1..22: mol_type = other DNA
gctacttcttgctcactgtatc

SEQ ID NO: 39361 - DNA, 22 bp, synthetic construct
  misc_feature 1..22: note = chemically synthesized
  source 1..22: mol_type = other DNA
ctacttcttgctcactgtatcc

SEQ ID NO: 39362 - DNA, 22 bp, synthetic construct
  misc_feature 1..22: note = chemically synthesized
  source 1..22: mol_type = other DNA
cttcttgctcactgtatccaat

SEQ ID NO: 39363 - DNA, 22 bp, synthetic construct
  misc_feature 1..22: note = chemically synthesized
  source 1..22: mol_type = other DNA
cttgctcactgtatccaatcat

SEQ ID NO: 39364 - DNA, 22 bp, synthetic construct
  misc_feature 1..22: note = chemically synthesized
  source 1..22: mol_type = other DNA
ttgctcactgtatccaatcatc

SEQ ID NO: 39365 - DNA, 22 bp, synthetic construct
  misc_feature 1..22: note = chemically synthesized
  source 1..22: mol_type = other DNA
gctcactgtatccaatcatcat

SEQ ID NO: 39366 - DNA, 22 bp, synthetic construct
  misc_feature 1..22: note = chemically synthesized
  source 1..22: mol_type = other DNA
ctcactgtatccaatcatcata

SEQ ID NO: 39367 - DNA, 22 bp, synthetic construct
  misc_feature 1..22: note = chemically synthesized
  source 1..22: mol_type = other DNA
actgtatccaatcatcataatg

SEQ ID NO: 39368 - DNA, 22 bp, synthetic construct
  misc_feature 1..22: note = chemically synthesized
  source 1..22: mol_type = other DNA
tatccaatcatcataatgtcat

SEQ ID NO: 39369 - DNA, 22 bp, synthetic construct
  misc_feature 1..22: note = chemically synthesized
  source 1..22: mol_type = other DNA
tatctcgtggaagtgaaaagcg

SEQ ID NO: 39370 - DNA, 22 bp, synthetic construct
  misc_feature 1..22: note = chemically synthesized
  source 1..22: mol_type = other DNA
gtggaagtgaaaagcgagcaag

SEQ ID NO: 39371 - DNA, 22 bp, synthetic construct
  misc_feature 1..22: note = chemically synthesized
  source 1..22: mol_type = other DNA
tccaaataagattatgacacaa

SEQ ID NO: 39372 - DNA, 22 bp, synthetic construct
  misc_feature 1..22: note = chemically synthesized
  source 1..22: mol_type = other DNA
caaataagattatgacacaaag

SEQ ID NO: 39373 - DNA, 22 bp, synthetic construct
  misc_feature 1..22: note = chemically synthesized
  source 1..22: mol_type = other DNA
tgacacaaagctggagagttga

SEQ ID NO: 39374 - DNA, 22 bp, synthetic construct
  misc_feature 1..22: note = chemically synthesized
  source 1..22: mol_type = other DNA
gagagttgatacacccctgagg

SEQ ID NO: 39375 - DNA, 22 bp, synthetic construct
  misc_feature 1..22: note = chemically synthesized
  source 1..22: mol_type = other DNA
atacacccctgaggtagggtgg

SEQ ID NO: 39376 - DNA, 22 bp, synthetic construct
  misc_feature 1..22: note = chemically synthesized
  source 1..22: mol_type = other DNA
aggtagggtggtaaaggtataa

SEQ ID NO: 39377 - DNA, 22 bp, synthetic construct
  misc_feature 1..22: note = chemically synthesized
  source 1..22: mol_type = other DNA
gccttgtcagctgaaggcaaat

SEQ ID NO: 39378 - DNA, 22 bp, synthetic construct
  misc_feature 1..22: note = chemically synthesized
  source 1..22: mol_type = other DNA
gtcagctgaaggcaaattgctt

SEQ ID NO: 39379 - DNA, 22 bp, synthetic construct
  misc_feature 1..22: note = chemically synthesized
  source 1..22: mol_type = other DNA
tcagctgaaggcaaattgcttc

SEQ ID NO: 39380 - DNA, 22 bp, synthetic construct
  misc_feature 1..22: note = chemically synthesized
  source 1..22: mol_type = other DNA
aaggcaaattgcttctggtggg

SEQ ID NO: 39381 - DNA, 22 bp, synthetic construct
  misc_feature 1..22: note = chemically synthesized
  source 1..22: mol_type = other DNA
cttctggtgggtcttatggaca

SEQ ID NO: 39382 - DNA, 22 bp, synthetic construct
  misc_feature 1..22: note = chemically synthesized
  source 1..22: mol_type = other DNA
ctggtgggtcttatggacagga

SEQ ID NO: 39383 - DNA, 22 bp, synthetic construct
  misc_feature 1..22: note = chemically synthesized
  source 1..22: mol_type = other DNA
tggtgggtcttatggacaggaa

SEQ ID NO: 39384 - DNA, 22 bp, synthetic construct
  misc_feature 1..22: note = chemically synthesized
  source 1..22: mol_type = other DNA
gtgggtcttatggacaggaatg

SEQ ID NO: 39385 - DNA, 22 bp, synthetic construct
  misc_feature 1..22: note = chemically synthesized
  source 1..22: mol_type = other DNA
atggacaggaatggagaaaaag

SEQ ID NO: 39386 - DNA, 22 bp, synthetic construct
  misc_feature 1..22: note = chemically synthesized
  source 1..22: mol_type = other DNA
tggacaggaatggagaaaaagc

SEQ ID NO: 39387 - DNA, 22 bp, synthetic construct
  misc_feature 1..22: note = chemically synthesized
  source 1..22: mol_type = other DNA
gccaagccaatggctgcatacc

SEQ ID NO: 39388 - DNA, 22 bp, synthetic construct
  misc_feature 1..22: note = chemically synthesized
  source 1..22: mol_type = other DNA
ccaagccaatggctgcatacca

SEQ ID NO: 39389 - DNA, 22 bp, synthetic construct
  misc_feature 1..22: note = chemically synthesized
  source 1..22: mol_type = other DNA
cataccaggcaccaggagatgt

SEQ ID NO: 39390 - DNA, 22 bp, synthetic construct
  misc_feature 1..22: note = chemically synthesized
  source 1..22: mol_type = other DNA
atttgctcaagcaacaaaacca

SEQ ID NO: 39391 - DNA, 22 bp, synthetic construct
  misc_feature 1..22: note = chemically synthesized
  source 1..22: mol_type = other DNA
gctcaagcaacaaaaccacaac

SEQ ID NO: 39392 - DNA, 22 bp, synthetic construct
  misc_feature 1..22: note = chemically synthesized
  source 1..22: mol_type = other DNA
ctcaagcaacaaaaccacaact

SEQ ID NO: 39393 - DNA, 22 bp, synthetic construct
  misc_feature 1..22: note = chemically synthesized
  source 1..22: mol_type = other DNA
aagcaacaaaaccacaactggt

SEQ ID NO: 39394 - DNA, 22 bp, synthetic construct
  misc_feature 1..22: note = chemically synthesized
  source 1..22: mol_type = other DNA
gtagagcagctgcaattggagt

SEQ ID NO: 39395 - DNA, 22 bp, synthetic construct
  misc_feature 1..22: note = chemically synthesized
  source 1..22: mol_type = other DNA
caattggagtcaccacttggtt

SEQ ID NO: 39396 - DNA, 22 bp, synthetic construct
  misc_feature 1..22: note = chemically synthesized
  source 1..22: mol_type = other DNA
gagtcaccacttggttaagctt

SEQ ID NO: 39397 - DNA, 22 bp, synthetic construct
  misc_feature 1..22: note = chemically synthesized
  source 1..22: mol_type = other DNA
ggttaagcttaaaataatccac

SEQ ID NO: 39398 - DNA, 22 bp, synthetic construct
  misc_feature 1..22: note = chemically synthesized
  source 1..22: mol_type = other DNA
gttaagcttaaaataatccacc

SEQ ID NO: 39399 - DNA, 22 bp, synthetic construct
  misc_feature 1..22: note = chemically synthesized
  source 1..22: mol_type = other DNA
agcttaaaataatccaccatca

SEQ ID NO: 39400 - DNA, 22 bp, synthetic construct
  misc_feature 1..22: note = chemically synthesized
  source 1..22: mol_type = other DNA
aaaataatccaccatcattttc

SEQ ID NO: 39401 - DNA, 22 bp, synthetic construct
  misc_feature 1..22: note = chemically synthesized
  source 1..22: mol_type = other DNA
aaataatccaccatcattttcc

SEQ ID NO: 39402 - DNA, 22 bp, synthetic construct
  misc_feature 1..22: note = chemically synthesized
  source 1..22: mol_type = other DNA
tccaagatccatctgtcctctg

SEQ ID NO: 39403 - DNA, 22 bp, synthetic construct
  misc_feature 1..22: note = chemically synthesized
  source 1..22: mol_type = other DNA
ccaagatccatctgtcctctgc

SEQ ID NO: 39404 - DNA, 22 bp, synthetic construct
  misc_feature 1..22: note = chemically synthesized
  source 1..22: mol_type = other DNA
caagatccatctgtcctctgca

SEQ ID NO: 39405 - DNA, 22 bp, synthetic construct
  misc_feature 1..22: note = chemically synthesized
  source 1..22: mol_type = other DNA
tcctctgcacaggtcaaatggg

SEQ ID NO: 39406 - DNA, 22 bp, synthetic construct
  misc_feature 1..22: note = chemically synthesized
  source 1..22: mol_type = other DNA
tgcacaggtcaaatgggagagt

SEQ ID NO: 39407 - DNA, 22 bp, synthetic construct
  misc_feature 1..22: note = chemically synthesized
  source 1..22: mol_type = other DNA
cacaggtcaaatgggagagttg

SEQ ID NO: 39408 - DNA, 22 bp, synthetic construct
  misc_feature 1..22: note = chemically synthesized
  source 1..22: mol_type = other DNA
aacagggatgtggtgggaatca

SEQ ID NO: 39409 - DNA, 22 bp, synthetic construct
  misc_feature 1..22: note = chemically synthesized
  source 1..22: mol_type = other DNA
cgtctttcaagtccttgatggt

SEQ ID NO: 39410 - DNA, 22 bp, synthetic construct
  misc_feature 1..22: note = chemically synthesized
  source 1..22: mol_type = other DNA
tcaagtccttgatggtgacact

SEQ ID NO: 39411 - DNA, 22 bp, synthetic construct
  misc_feature 1..22: note = chemically synthesized
  source 1..22: mol_type = other DNA
caagtccttgatggtgacacta

SEQ ID NO: 39412 - DNA, 22 bp, synthetic construct
  misc_feature 1..22: note = chemically synthesized
  source 1..22: mol_type = other DNA
aagtccttgatggtgacactaa

SEQ ID NO: 39413 - DNA, 22 bp, synthetic construct
  misc_feature 1..22: note = chemically synthesized
  source 1..22: mol_type = other DNA
gatggtgacactaatcacttca

SEQ ID NO: 39414 - DNA, 22 bp, synthetic construct
  misc_feature 1..22: note = chemically synthesized
  source 1..22: mol_type = other DNA
atggtgacactaatcacttcag

SEQ ID NO: 39415 - DNA, 22 bp, synthetic construct
  misc_feature 1..22: note = chemically synthesized
  source 1..22: mol_type = other DNA
atcacttcagtccctccaggga

SEQ ID NO: 39416 - DNA, 22 bp, synthetic construct
  misc_feature 1..22: note = chemically synthesized
  source 1..22: mol_type = other DNA
cagtccctccagggatgggata

SEQ ID NO: 39417 - DNA, 22 bp, synthetic construct
  misc_feature 1..22: note = chemically synthesized
  source 1..22: mol_type = other DNA
agtccctccagggatgggatat

SEQ ID NO: 39418 - DNA, 22 bp, synthetic construct
  misc_feature 1..22: note = chemically synthesized
  source 1..22: mol_type = other DNA
cagggatgggatattgtttttg

SEQ ID NO: 39419 - DNA, 22 bp, synthetic construct
  misc_feature 1..22: note = chemically synthesized
  source 1..22: mol_type = other DNA
tttttgatttttttatttttct

SEQ ID NO: 39420 - DNA, 22 bp, synthetic construct
  misc_feature 1..22: note = chemically synthesized
  source 1..22: mol_type = other DNA
ttgatttttttatttttctagg

SEQ ID NO: 39421 - DNA, 22 bp, synthetic construct
  misc_feature 1..22: note = chemically synthesized
  source 1..22: mol_type = other DNA
tgatttttttatttttctaggt

SEQ ID NO: 39422 - DNA, 22 bp, synthetic construct
  misc_feature 1..22: note = chemically synthesized
  source 1..22: mol_type = other DNA
gatttttttatttttctaggta

SEQ ID NO: 39423 - DNA, 22 bp, synthetic construct
  misc_feature 1..22: note = chemically synthesized
  source 1..22: mol_type = other DNA
atttttttatttttctaggtag

SEQ ID NO: 39424 - DNA, 22 bp, synthetic construct
  misc_feature 1..22: note = chemically synthesized
  source 1..22: mol_type = other DNA
ttttatttttctaggtagagac

SEQ ID NO: 39425 - DNA, 22 bp, synthetic construct
  misc_feature 1..22: note = chemically synthesized
  source 1..22: mol_type = other DNA
tttatttttctaggtagagaca

SEQ ID NO: 39426 - DNA, 22 bp, synthetic construct
  misc_feature 1..22: note = chemically synthesized
  source 1..22: mol_type = other DNA
ttatttttctaggtagagacag

SEQ ID NO: 39427 - DNA, 22 bp, synthetic construct
  misc_feature 1..22: note = chemically synthesized
  source 1..22: mol_type = other DNA
tatttttctaggtagagacagc

SEQ ID NO: 39428 - DNA, 22 bp, synthetic construct
  misc_feature 1..22: note = chemically synthesized
  source 1..22: mol_type = other DNA
atttttctaggtagagacagct

SEQ ID NO: 39429 - DNA, 22 bp, synthetic construct
  misc_feature 1..22: note = chemically synthesized
  source 1..22: mol_type = other DNA
tttttctaggtagagacagctc

SEQ ID NO: 39430 - DNA, 22 bp, synthetic construct
  misc_feature 1..22: note = chemically synthesized
  source 1..22: mol_type = other DNA
ttctaggtagagacagctctaa

SEQ ID NO: 39431 - DNA, 22 bp, synthetic construct
  misc_feature 1..22: note = chemically synthesized
  source 1..22: mol_type = other DNA
tctaggtagagacagctctaat

SEQ ID NO: 39432 - DNA, 22 bp, synthetic construct
  misc_feature 1..22: note = chemically synthesized
  source 1..22: mol_type = other DNA
ctaggtagagacagctctaatg

SEQ ID NO: 39433 - DNA, 22 bp, synthetic construct
  misc_feature 1..22: note = chemically synthesized
  source 1..22: mol_type = other DNA
taggtagagacagctctaatgg

SEQ ID NO: 39434 - DNA, 22 bp, synthetic construct
  misc_feature 1..22: note = chemically synthesized
  source 1..22: mol_type = other DNA
ggtagagacagctctaatggct

SEQ ID NO: 39435 - DNA, 22 bp, synthetic construct
  misc_feature 1..22: note = chemically synthesized
  source 1..22: mol_type = other DNA
taatggcttctgtttggccttt

SEQ ID NO: 39436 - DNA, 22 bp, synthetic construct
  misc_feature 1..22: note = chemically synthesized
  source 1..22: mol_type = other DNA
atggcttctgtttggcctttcc

SEQ ID NO: 39437 - DNA, 22 bp, synthetic construct
  misc_feature 1..22: note = chemically synthesized
  source 1..22: mol_type = other DNA
ctgtttggcctttcccaccata

SEQ ID NO: 39438 - DNA, 22 bp, synthetic construct
  misc_feature 1..22: note = chemically synthesized
  source 1..22: mol_type = other DNA
tgtttggcctttcccaccataa

SEQ ID NO: 39439 - DNA, 22 bp, synthetic construct
  misc_feature 1..22: note = chemically synthesized
  source 1..22: mol_type = other DNA
tttggcctttcccaccataata

SEQ ID NO: 39440 - DNA, 22 bp, synthetic construct
  misc_feature 1..22: note = chemically synthesized
  source 1..22: mol_type = other DNA
ggcctttcccaccataatagcc

SEQ ID NO: 39441 - DNA, 22 bp, synthetic construct
  misc_feature 1..22: note = chemically synthesized
  source 1..22: mol_type = other DNA
gcctttcccaccataatagccc

SEQ ID NO: 39442 - DNA, 22 bp, synthetic construct
  misc_feature 1..22: note = chemically synthesized
  source 1..22: mol_type = other DNA
tcccaccataatagccctcatc

SEQ ID NO: 39443 - DNA, 22 bp, synthetic construct
  misc_feature 1..22: note = chemically synthesized
  source 1..22: mol_type = other DNA
cccaccataatagccctcatcc

SEQ ID NO: 39444 - DNA, 22 bp, synthetic construct
  misc_feature 1..22: note = chemically synthesized
  source 1..22: mol_type = other DNA
ccaccataatagccctcatcct

SEQ ID NO: 39445 - DNA, 22 bp, synthetic construct
  misc_feature 1..22: note = chemically synthesized
  source 1..22: mol_type = other DNA
atcctaccagtcagggagccaa

SEQ ID NO: 39446 - DNA, 22 bp, synthetic construct
  misc_feature 1..22: note = chemically synthesized
  source 1..22: mol_type = other DNA
ccagtcagggagccaatgtggc

SEQ ID NO: 39447 - DNA, 22 bp, synthetic construct
  misc_feature 1..22: note = chemically synthesized
  source 1..22: mol_type = other DNA
ctgccagctaataagtatgtct

SEQ ID NO: 39448 - DNA, 22 bp, synthetic construct
  misc_feature 1..22: note = chemically synthesized
  source 1..22: mol_type = other DNA
tgccagctaataagtatgtcta

SEQ ID NO: 39449 - DNA, 22 bp, synthetic construct
  misc_feature 1..22: note = chemically synthesized
  source 1..22: mol_type = other DNA
ccagctaataagtatgtctata

SEQ ID NO: 39450 - DNA, 22 bp, synthetic construct
  misc_feature 1..22: note = chemically synthesized
  source 1..22: mol_type = other DNA
ataagtatgtctatacaaatta

SEQ ID NO: 39451 - DNA, 22 bp, synthetic construct
  misc_feature 1..22: note = chemically synthesized
  source 1..22: mol_type = other DNA
tacaaattatgcattttggcac

SEQ ID NO: 39452 - DNA, 22 bp, synthetic construct
  misc_feature 1..22: note = chemically synthesized
  source 1..22: mol_type = other DNA
tgcattttggcactgggaaaat

SEQ ID NO: 39453 - DNA, 22 bp, synthetic construct
  misc_feature 1..22: note = chemically synthesized
  source 1..22: mol_type = other DNA
tggcactgggaaaatgaccaga

SEQ ID NO: 39454 - DNA, 22 bp, synthetic construct
  misc_feature 1..22: note = chemically synthesized
  source 1..22: mol_type = other DNA
ggcactgggaaaatgaccagag

SEQ ID NO: 39455 - DNA, 22 bp, synthetic construct
  misc_feature 1..22: note = chemically synthesized
  source 1..22: mol_type = other DNA
gcactgggaaaatgaccagagg

SEQ ID NO: 39456 - DNA, 22 bp, synthetic construct
  misc_feature 1..22: note = chemically synthesized
  source 1..22: mol_type = other DNA
ggaaaatgaccagaggataagt

SEQ ID NO: 39457 - DNA, 22 bp, synthetic construct
  misc_feature 1..22: note = chemically synthesized
  source 1..22: mol_type = other DNA
gaaccactgtaagtcagaaatg

SEQ ID NO: 39458 - DNA, 22 bp, synthetic construct
  misc_feature 1..22: note = chemically synthesized
  source 1..22: mol_type = other DNA
taagtcagaaatgagctaaaac

SEQ ID NO: 39459 - DNA, 22 bp, synthetic construct
  misc_feature 1..22: note = chemically synthesized
  source 1..22: mol_type = other DNA
aaactccattaattacctaacc

SEQ ID NO: 39460 - DNA, 22 bp, synthetic construct
  misc_feature 1..22: note = chemically synthesized
  source 1..22: mol_type = other DNA
cattaattacctaacctccata

SEQ ID NO: 39461 - DNA, 22 bp, synthetic construct
  misc_feature 1..22: note = chemically synthesized
  source 1..22: mol_type = other DNA
attacctaacctccataagccc

SEQ ID NO: 39462 - DNA, 22 bp, synthetic construct
  misc_feature 1..22: note = chemically synthesized
  source 1..22: mol_type = other DNA
cctaacctccataagcccctac

SEQ ID NO: 39463 - DNA, 22 bp, synthetic construct
  misc_feature 1..22: note = chemically synthesized
  source 1..22: mol_type = other DNA
acctccataagcccctacttta

SEQ ID NO: 39464 - DNA, 22 bp, synthetic construct
  misc_feature 1..22: note = chemically synthesized
  source 1..22: mol_type = other DNA
cataagcccctactttaactgg

SEQ ID NO: 39465 - DNA, 22 bp, synthetic construct
  misc_feature 1..22: note = chemically synthesized
  source 1..22: mol_type = other DNA
ctttaactggggaaccacaata

SEQ ID NO: 39466 - DNA, 22 bp, synthetic construct
  misc_feature 1..22: note = chemically synthesized
  source 1..22: mol_type = other DNA
taactggggaaccacaataacg

SEQ ID NO: 39467 - DNA, 22 bp, synthetic construct
  misc_feature 1..22: note = chemically synthesized
  source 1..22: mol_type = other DNA
aactggggaaccacaataacgt

SEQ ID NO: 39468 - DNA, 22 bp, synthetic construct
  misc_feature 1..22: note = chemically synthesized
  source 1..22: mol_type = other DNA
actggggaaccacaataacgtt

SEQ ID NO: 39469 - DNA, 22 bp, synthetic construct
  misc_feature 1..22: note = chemically synthesized
  source 1..22: mol_type = other DNA
gggaaccacaataacgttttgg

SEQ ID NO: 39470 - DNA, 22 bp, synthetic construct
  misc_feature 1..22: note = chemically synthesized
  source 1..22: mol_type = other DNA
tgggtaccctggaatcaacgtc

SEQ ID NO: 39471 - DNA, 22 bp, synthetic construct
  misc_feature 1..22: note = chemically synthesized
  source 1..22: mol_type = other DNA
gggtaccctggaatcaacgtca

SEQ ID NO: 39472 - DNA, 22 bp, synthetic construct
  misc_feature 1..22: note = chemically synthesized
  source 1..22: mol_type = other DNA
ggtaccctggaatcaacgtcag

SEQ ID NO: 39473 - DNA, 22 bp, synthetic construct
  misc_feature 1..22: note = chemically synthesized
  source 1..22: mol_type = other DNA
gaatcaacgtcagctcagagcc

SEQ ID NO: 39474 - DNA, 22 bp, synthetic construct
  misc_feature 1..22: note = chemically synthesized
  source 1..22: mol_type = other DNA
agagccagtgtccagtactttc

SEQ ID NO: 39475 - DNA, 22 bp, synthetic construct
  misc_feature 1..22: note = chemically synthesized
  source 1..22: mol_type = other DNA
tctgaaatgtctcattacttcc

SEQ ID NO: 39476 - DNA, 22 bp, synthetic construct
  misc_feature 1..22: note = chemically synthesized
  source 1..22: mol_type = other DNA
ctgaaatgtctcattacttccc

SEQ ID NO: 39477 - DNA, 22 bp, synthetic construct
  misc_feature 1..22: note = chemically synthesized
  source 1..22: mol_type = other DNA
tgaaatgtctcattacttccct

SEQ ID NO: 39478 - DNA, 22 bp, synthetic construct
  misc_feature 1..22: note = chemically synthesized
  source 1..22: mol_type = other DNA
aaatgtctcattacttcccttt

SEQ ID NO: 39479 - DNA, 22 bp, synthetic construct
  misc_feature 1..22: note = chemically synthesized
  source 1..22: mol_type = other DNA
attacttccctttctccagtac

SEQ ID NO: 39480 - DNA, 22 bp, synthetic construct
  misc_feature 1..22: note = chemically synthesized
  source 1..22: mol_type = other DNA
cttccctttctccagtacacac

SEQ ID NO: 39481 - DNA, 22 bp, synthetic construct
  misc_feature 1..22: note = chemically synthesized
  source 1..22: mol_type = other DNA
ccctttctccagtacacacagt

SEQ ID NO: 39482 - DNA, 22 bp, synthetic construct
  misc_feature 1..22: note = chemically synthesized
  source 1..22: mol_type = other DNA
cctttctccagtacacacagtt

SEQ ID NO: 39483 - DNA, 22 bp, synthetic construct
  misc_feature 1..22: note = chemically synthesized
  source 1..22: mol_type = other DNA
tctccagtacacacagttaccc

SEQ ID NO: 39484 - DNA, 22 bp, synthetic construct
  misc_feature 1..22: note = chemically synthesized
  source 1..22: mol_type = other DNA
ctccagtacacacagttaccct

SEQ ID NO: 39485 - DNA, 22 bp, synthetic construct
  misc_feature 1..22: note = chemically synthesized
  source 1..22: mol_type = other DNA
tccagtacacacagttaccctg

SEQ ID NO: 39486 - DNA, 22 bp, synthetic construct
  misc_feature 1..22: note = chemically synthesized
  source 1..22: mol_type = other DNA
cagtacacacagttaccctggt

SEQ ID NO: 39487 - DNA, 22 bp, synthetic construct
  misc_feature 1..22: note = chemically synthesized
  source 1..22: mol_type = other DNA
ccctggtaaaaggccagaggtc

SEQ ID NO: 39488 - DNA, 22 bp, synthetic construct
  misc_feature 1..22: note = chemically synthesized
  source 1..22: mol_type = other DNA
gtaaaaggccagaggtctcctt

SEQ ID NO: 39489 - DNA, 22 bp, synthetic construct
  misc_feature 1..22: note = chemically synthesized
  source 1..22: mol_type = other DNA
cttagggaaggatgggagaaag

SEQ ID NO: 39490 - DNA, 22 bp, synthetic construct
  misc_feature 1..22: note = chemically synthesized
  source 1..22: mol_type = other DNA
agggaaggatgggagaaagagt

SEQ ID NO: 39491 - DNA, 22 bp, synthetic construct
  misc_feature 1..22: note = chemically synthesized
  source 1..22: mol_type = other DNA
gggaaggatgggagaaagagta

SEQ ID NO: 39492 - DNA, 22 bp, synthetic construct
  misc_feature 1..22: note = chemically synthesized
  source 1..22: mol_type = other DNA
tcagtagcctagtggtgtcctt

SEQ ID NO: 39493 - DNA, 22 bp, synthetic construct
  misc_feature 1..22: note = chemically synthesized
  source 1..22: mol_type = other DNA
gtggtgtccttcctcaagggga

SEQ ID NO: 39494 - DNA, 22 bp, synthetic construct
  misc_feature 1..22: note = chemically synthesized
  source 1..22: mol_type = other DNA
cctcaaggggatccagcctccc

SEQ ID NO: 39495 - DNA, 22 bp, synthetic construct
  misc_feature 1..22: note = chemically synthesized
  source 1..22: mol_type = other DNA
ctcaaggggatccagcctcccc

SEQ ID NO: 39496 - DNA, 22 bp, synthetic construct
  misc_feature 1..22: note = chemically synthesized
  source 1..22: mol_type = other DNA
aaggggatccagcctccccttc

SEQ ID NO: 39497 - DNA, 22 bp, synthetic construct
  misc_feature 1..22: note = chemically synthesized
  source 1..22: mol_type = other DNA
cccttcattcagtgggttctgg

SEQ ID NO: 39498 - DNA, 22 bp, synthetic construct
  misc_feature 1..22: note = chemically synthesized
  source 1..22: mol_type = other DNA
cattcagtgggttctggaactg

SEQ ID NO: 39499 - DNA, 22 bp, synthetic construct
  misc_feature 1..22: note = chemically synthesized
  source 1..22: mol_type = other DNA
attcagtgggttctggaactgt

SEQ ID NO: 39500 - DNA, 22 bp, synthetic construct
  misc_feature 1..22: note = chemically synthesized
  source 1..22: mol_type = other DNA
agtgggttctggaactgtaaca

SEQ ID NO: 39501 - DNA, 22 bp, synthetic construct
  misc_feature 1..22: note = chemically synthesized
  source 1..22: mol_type = other DNA
tggaactgtaacaggttcgagt

SEQ ID NO: 39502 - DNA, 22 bp, synthetic construct
  misc_feature 1..22: note = chemically synthesized
  source 1..22: mol_type = other DNA
gaactgtaacaggttcgagtct

SEQ ID NO: 39503 - DNA, 22 bp, synthetic construct
  misc_feature 1..22: note = chemically synthesized
  source 1..22: mol_type = other DNA
taacaggttcgagtctggaaat

SEQ ID NO: 39504 - DNA, 22 bp, synthetic construct
  misc_feature 1..22: note = chemically synthesized
  source 1..22: mol_type = other DNA
gagtctggaaattgattgaggg

SEQ ID NO: 39505 - DNA, 22 bp, synthetic construct
  misc_feature 1..22: note = chemically synthesized
  source 1..22: mol_type = other DNA
gaaattgattgagggcccatga

SEQ ID NO: 39506 - DNA, 22 bp, synthetic construct
  misc_feature 1..22: note = chemically synthesized
  source 1..22: mol_type = other DNA
attgagggcccatgattctctg

SEQ ID NO: 39507 - DNA, 22 bp, synthetic construct
  misc_feature 1..22: note = chemically synthesized
  source 1..22: mol_type = other DNA
agggcccatgattctctgtttt

SEQ ID NO: 39508 - DNA, 22 bp, synthetic construct
  misc_feature 1..22: note = chemically synthesized
  source 1..22: mol_type = other DNA
tctgtttttataattcagatta

SEQ ID NO: 39509 - DNA, 22 bp, synthetic construct
  misc_feature 1..22: note = chemically synthesized
  source 1..22: mol_type = other DNA
tgtttttataattcagattagt

SEQ ID NO: 39510 - DNA, 22 bp, synthetic construct
  misc_feature 1..22: note = chemically synthesized
  source 1..22: mol_type = other DNA
tttttataattcagattagtct

SEQ ID NO: 39511 - DNA, 22 bp, synthetic construct
  misc_feature 1..22: note = chemically synthesized
  source 1..22: mol_type = other DNA
ttataattcagattagtcttta

SEQ ID NO: 39512 - DNA, 22 bp, synthetic construct
  misc_feature 1..22: note = chemically synthesized
  source 1..22: mol_type = other DNA
tataattcagattagtctttag

SEQ ID NO: 39513 - DNA, 22 bp, synthetic construct
  misc_feature 1..22: note = chemically synthesized
  source 1..22: mol_type = other DNA
ataattcagattagtctttagt

SEQ ID NO: 39514 - DNA, 22 bp, synthetic construct
  misc_feature 1..22: note = chemically synthesized
  source 1..22: mol_type = other DNA
taattcagattagtctttagtc

SEQ ID NO: 39515 - DNA, 22 bp, synthetic construct
  misc_feature 1..22: note = chemically synthesized
  source 1..22: mol_type = other DNA
agattagtctttagtccattct

SEQ ID NO: 39516 - DNA, 22 bp, synthetic construct
  misc_feature 1..22: note = chemically synthesized
  source 1..22: mol_type = other DNA
gtctttagtccattctacctgg

SEQ ID NO: 39517 - DNA, 22 bp, synthetic construct
  misc_feature 1..22: note = chemically synthesized
  source 1..22: mol_type = other DNA
tagtccattctacctggcagtt

SEQ ID NO: 39518 - DNA, 22 bp, synthetic construct
  misc_feature 1..22: note = chemically synthesized
  source 1..22: mol_type = other DNA
agtccattctacctggcagttt

SEQ ID NO: 39519 - DNA, 22 bp, synthetic construct
  misc_feature 1..22: note = chemically synthesized
  source 1..22: mol_type = other DNA
gtccattctacctggcagtttt

SEQ ID NO: 39520 - DNA, 22 bp, synthetic construct
  misc_feature 1..22: note = chemically synthesized
  source 1..22: mol_type = other DNA
tacctggcagttttttgtttat

SEQ ID NO: 39521 - DNA, 22 bp, synthetic construct
  misc_feature 1..22: note = chemically synthesized
  source 1..22: mol_type = other DNA
cctggcagttttttgtttatat

SEQ ID NO: 39522 - DNA, 22 bp, synthetic construct
  misc_feature 1..22: note = chemically synthesized
  source 1..22: mol_type = other DNA
gcagttttttgtttatataaat

SEQ ID NO: 39523 - DNA, 22 bp, synthetic construct
  misc_feature 1..22: note = chemically synthesized
  source 1..22: mol_type = other DNA
tttgtttatataaatcaagtag

SEQ ID NO: 39524 - DNA, 22 bp, synthetic construct
  misc_feature 1..22: note = chemically synthesized
  source 1..22: mol_type = other DNA
ttgtttatataaatcaagtagg

SEQ ID NO: 39525 - DNA, 22 bp, synthetic construct
  misc_feature 1..22: note = chemically synthesized
  source 1..22: mol_type = other DNA
tgtttatataaatcaagtagga

SEQ ID NO: 39526 - DNA, 22 bp, synthetic construct
  misc_feature 1..22: note = chemically synthesized
  source 1..22: mol_type = other DNA
gtttatataaatcaagtaggaa

SEQ ID NO: 39527 - DNA, 22 bp, synthetic construct
  misc_feature 1..22: note = chemically synthesized
  source 1..22: mol_type = other DNA
tttatataaatcaagtaggaat

SEQ ID NO: 39528 - DNA, 22 bp, synthetic construct
  misc_feature 1..22: note = chemically synthesized
  source 1..22: mol_type = other DNA
atataaatcaagtaggaataca

SEQ ID NO: 39529 - DNA, 22 bp, synthetic construct
  misc_feature 1..22: note = chemically synthesized
  source 1..22: mol_type = other DNA
tataaatcaagtaggaatacag

SEQ ID NO: 39530 - DNA, 22 bp, synthetic construct
  misc_feature 1..22: note = chemically synthesized
  source 1..22: mol_type = other DNA
cccatcaatttcacttctagga

SEQ ID NO: 39531 - DNA, 22 bp, synthetic construct
  misc_feature 1..22: note = chemically synthesized
  source 1..22: mol_type = other DNA
ccatcaatttcacttctaggaa

SEQ ID NO: 39532 - DNA, 22 bp, synthetic construct
  misc_feature 1..22: note = chemically synthesized
  source 1..22: mol_type = other DNA
cacttctaggaacaccatgatt

SEQ ID NO: 39533 - DNA, 22 bp, synthetic construct
  misc_feature 1..22: note = chemically synthesized
  source 1..22: mol_type = other DNA
acttctaggaacaccatgatta

SEQ ID NO: 39534 - DNA, 22 bp, synthetic construct
  misc_feature 1..22: note = chemically synthesized
  source 1..22: mol_type = other DNA
ctaggaacaccatgattaatta

SEQ ID NO: 39535 - DNA, 22 bp, synthetic construct
  misc_feature 1..22: note = chemically synthesized
  source 1..22: mol_type = other DNA
taggaacaccatgattaattag

SEQ ID NO: 39536 - DNA, 22 bp, synthetic construct
  misc_feature 1..22: note = chemically synthesized
  source 1..22: mol_type = other DNA
ggaacaccatgattaattagcc

SEQ ID NO: 39537 - DNA, 22 bp, synthetic construct
  misc_feature 1..22: note = chemically synthesized
  source 1..22: mol_type = other DNA
attagccaatgccagagctcta

SEQ ID NO: 39538 - DNA, 22 bp, synthetic construct
  misc_feature 1..22: note = chemically synthesized
  source 1..22: mol_type = other DNA
gccaatgccagagctctacatg

SEQ ID NO: 39539 - DNA, 22 bp, synthetic construct
  misc_feature 1..22: note = chemically synthesized
  source 1..22: mol_type = other DNA
tacatgagtcagactattctga

SEQ ID NO: 39540 - DNA, 22 bp, synthetic construct
  misc_feature 1..22: note = chemically synthesized
  source 1..22: mol_type = other DNA
catgagtcagactattctgatg

SEQ ID NO: 39541 - DNA, 22 bp, synthetic construct
  misc_feature 1..22: note = chemically synthesized
  source 1..22: mol_type = other DNA
ttctgatggctgctttgcctct

SEQ ID NO: 39542 - DNA, 22 bp, synthetic construct
  misc_feature 1..22: note = chemically synthesized
  source 1..22: mol_type = other DNA
tgatggctgctttgcctctgct

SEQ ID NO: 39543 - DNA, 22 bp, synthetic construct
  misc_feature 1..22: note = chemically synthesized
  source 1..22: mol_type = other DNA
atggctgctttgcctctgctgt

SEQ ID NO: 39544 - DNA, 22 bp, synthetic construct
  misc_feature 1..22: note = chemically synthesized
  source 1..22: mol_type = other DNA
ctttgcctctgctgtctattat

SEQ ID NO: 39545 - DNA, 22 bp, synthetic construct
  misc_feature 1..22: note = chemically synthesized
  source 1..22: mol_type = other DNA
tgcctctgctgtctattatggt

SEQ ID NO: 39546 - DNA, 22 bp, synthetic construct
  misc_feature 1..22: note = chemically synthesized
  source 1..22: mol_type = other DNA
gcctctgctgtctattatggta

SEQ ID NO: 39547 - DNA, 22 bp, synthetic construct
  misc_feature 1..22: note = chemically synthesized
  source 1..22: mol_type = other DNA
cctctgctgtctattatggtag

SEQ ID NO: 39548 - DNA, 22 bp, synthetic construct
  misc_feature 1..22: note = chemically synthesized
  source 1..22: mol_type = other DNA
tgctgtctattatggtagttat

SEQ ID NO: 39549 - DNA, 22 bp, synthetic construct
  misc_feature 1..22: note = chemically synthesized
  source 1..22: mol_type = other DNA
ctgtctattatggtagttatgc

SEQ ID NO: 39550 - DNA, 22 bp, synthetic construct
  misc_feature 1..22: note = chemically synthesized
  source 1..22: mol_type = other DNA
tctattatggtagttatgccca

SEQ ID NO: 39551 - DNA, 22 bp, synthetic construct
  misc_feature 1..22: note = chemically synthesized
  source 1..22: mol_type = other DNA
ttatggtagttatgcccacctt

SEQ ID NO: 39552 - DNA, 22 bp, synthetic construct
  misc_feature 1..22: note = chemically synthesized
  source 1..22: mol_type = other DNA
tggtagttatgcccaccttgcc

SEQ ID NO: 39553 - DNA, 22 bp, synthetic construct
  misc_feature 1..22: note = chemically synthesized
  source 1..22: mol_type = other DNA
tgcccaccttgcctttgatggt

SEQ ID NO: 39554 - DNA, 22 bp, synthetic construct
  misc_feature 1..22: note = chemically synthesized
  source 1..22: mol_type = other DNA
gcctttgatggttcagtgccaa

SEQ ID NO: 39555 - DNA, 22 bp, synthetic construct
  misc_feature 1..22: note = chemically synthesized
  source 1..22: mol_type = other DNA
cctttgatggttcagtgccaac

SEQ ID NO: 39556 - DNA, 22 bp, synthetic construct
  misc_feature 1..22: note = chemically synthesized
  source 1..22: mol_type = other DNA
tgatggttcagtgccaacactt

SEQ ID NO: 39557 - DNA, 22 bp, synthetic construct
  misc_feature 1..22: note = chemically synthesized
  source 1..22: mol_type = other DNA
gatggttcagtgccaacacttg

SEQ ID NO: 39558 - DNA, 22 bp, synthetic construct
  misc_feature 1..22: note = chemically synthesized
  source 1..22: mol_type = other DNA
atggttcagtgccaacacttgg

SEQ ID NO: 39559 - DNA, 22 bp, synthetic construct
  misc_feature 1..22: note = chemically synthesized
  source 1..22: mol_type = other DNA
agtgccaacacttggcccctgc

SEQ ID NO: 39560 - DNA, 22 bp, synthetic construct
  misc_feature 1..22: note = chemically synthesized
  source 1..22: mol_type = other DNA
ggcccctgccacctcaggatcc

SEQ ID NO: 39561 - DNA, 22 bp, synthetic construct
  misc_feature 1..22: note = chemically synthesized
  source 1..22: mol_type = other DNA
gcccctgccacctcaggatcca

SEQ ID NO: 39562 - DNA, 22 bp, synthetic construct
  misc_feature 1..22: note = chemically synthesized
  source 1..22: mol_type = other DNA
ccacctcaggatccaattattc

SEQ ID NO: 39563 - DNA, 22 bp, synthetic construct
  misc_feature 1..22: note = chemically synthesized
  source 1..22: mol_type = other DNA
aggatccaattattcccattgt

SEQ ID NO: 39564 - DNA, 22 bp, synthetic construct
  misc_feature 1..22: note = chemically synthesized
  source 1..22: mol_type = other DNA
ttcccattgtatttaaattttg

SEQ ID NO: 39565 - DNA, 22 bp, synthetic construct
  misc_feature 1..22: note = chemically synthesized
  source 1..22: mol_type = other DNA
ccattgtatttaaattttgtag

SEQ ID NO: 39566 - DNA, 22 bp, synthetic construct
  misc_feature 1..22: note = chemically synthesized
  source 1..22: mol_type = other DNA
tatttaaattttgtagttgagt

SEQ ID NO: 39567 - DNA, 22 bp, synthetic construct
  misc_feature 1..22: note = chemically synthesized
  source 1..22: mol_type = other DNA
aaattttgtagttgagtgactg

SEQ ID NO: 39568 - DNA, 22 bp, synthetic construct
  misc_feature 1..22: note = chemically synthesized
  source 1..22: mol_type = other DNA
aattttgtagttgagtgactgt

SEQ ID NO: 39569 - DNA, 22 bp, synthetic construct
  misc_feature 1..22: note = chemically synthesized
  source 1..22: mol_type = other DNA
tgtagttgagtgactgtggttc

SEQ ID NO: 39570 - DNA, 22 bp, synthetic construct
  misc_feature 1..22: note = chemically synthesized
  source 1..22: mol_type = other DNA
gtagttgagtgactgtggttcc

SEQ ID NO: 39571 - DNA, 22 bp, synthetic construct
  misc_feature 1..22: note = chemically synthesized
  source 1..22: mol_type = other DNA
tagttgagtgactgtggttcct

SEQ ID NO: 39572 - DNA, 22 bp, synthetic construct
  misc_feature 1..22: note = chemically synthesized
  source 1..22: mol_type = other DNA
agtgactgtggttcctactgtt

SEQ ID NO: 39573 - DNA, 22 bp, synthetic construct
  misc_feature 1..22: note = chemically synthesized
  source 1..22: mol_type = other DNA
tggttcctactgttagatctga

SEQ ID NO: 39574 - DNA, 22 bp, synthetic construct
  misc_feature 1..22: note = chemically synthesized
  source 1..22: mol_type = other DNA
ctactgttagatctgacataca

SEQ ID NO: 39575 - DNA, 22 bp, synthetic construct
  misc_feature 1..22: note = chemically synthesized
  source 1..22: mol_type = other DNA
ctgttagatctgacatacagag

SEQ ID NO: 39576 - DNA, 22 bp, synthetic construct
  misc_feature 1..22: note = chemically synthesized
  source 1..22: mol_type = other DNA
ttagatctgacatacagagaag

SEQ ID NO: 39577 - DNA, 22 bp, synthetic construct
  misc_feature 1..22: note = chemically synthesized
  source 1..22: mol_type = other DNA
gatctgacatacagagaagagc

SEQ ID NO: 39578 - DNA, 22 bp, synthetic construct
  misc_feature 1..22: note = chemically synthesized
  source 1..22: mol_type = other DNA
acatacagagaagagcaattac

SEQ ID NO: 39579 - DNA, 22 bp, synthetic construct
  misc_feature 1..22: note = chemically synthesized
  source 1..22: mol_type = other DNA
cgggctcttcaaaaatacaggt

SEQ ID NO: 39580 - DNA, 22 bp, synthetic construct
  misc_feature 1..22: note = chemically synthesized
  source 1..22: mol_type = other DNA
ttcaaaaatacaggtgctgctc

SEQ ID NO: 39581 - DNA, 22 bp, synthetic construct
  misc_feature 1..22: note = chemically synthesized
  source 1..22: mol_type = other DNA
caaaaatacaggtgctgctctc

SEQ ID NO: 39582 - DNA, 22 bp, synthetic construct
  misc_feature 1..22: note = chemically synthesized
  source 1..22: mol_type = other DNA
aaaaatacaggtgctgctctca

SEQ ID NO: 39583 - DNA, 22 bp, synthetic construct
  misc_feature 1..22: note = chemically synthesized
  source 1..22: mol_type = other DNA
ctctcacaaatctatttcacaa

SEQ ID NO: 39584 - DNA, 22 bp, synthetic construct
  misc_feature 1..22: note = chemically synthesized
  source 1..22: mol_type = other DNA
tcacaaatctatttcacaaagc

SEQ ID NO: 39585 - DNA, 22 bp, synthetic construct
  misc_feature 1..22: note = chemically synthesized
  source 1..22: mol_type = other DNA
acaaatctatttcacaaagctt

SEQ ID NO: 39586 - DNA, 22 bp, synthetic construct
  misc_feature 1..22: note = chemically synthesized
  source 1..22: mol_type = other DNA
tttcacaaagcttcggccaagg

SEQ ID NO: 39587 - DNA, 22 bp, synthetic construct
  misc_feature 1..22: note = chemically synthesized
  source 1..22: mol_type = other DNA
cacaaagcttcggccaagggtg

SEQ ID NO: 39588 - DNA, 22 bp, synthetic construct
  misc_feature 1..22: note = chemically synthesized
  source 1..22: mol_type = other DNA
acaaagcttcggccaagggtgt

SEQ ID NO: 39589 - DNA, 22 bp, synthetic construct
  misc_feature 1..22: note = chemically synthesized
  source 1..22: mol_type = other DNA
cggccaagggtgtatcttctgg

SEQ ID NO: 39590 - DNA, 22 bp, synthetic construct
  misc_feature 1..22: note = chemically synthesized
  source 1..22: mol_type = other DNA
ggccaagggtgtatcttctgga

SEQ ID NO: 39591 - DNA, 22 bp, synthetic construct
  misc_feature 1..22: note = chemically synthesized
  source 1..22: mol_type = other DNA
ctggaccctcccagctgggatg

SEQ ID NO: 39592 - DNA, 22 bp, synthetic construct
  misc_feature 1..22: note = chemically synthesized
  source 1..22: mol_type = other DNA
tggaccctcccagctgggatga

SEQ ID NO: 39593 - DNA, 22 bp, synthetic construct
  misc_feature 1..22: note = chemically synthesized
  source 1..22: mol_type = other DNA
gaccctcccagctgggatgagt

SEQ ID NO: 39594 - DNA, 22 bp, synthetic construct
  misc_feature 1..22: note = chemically synthesized
  source 1..22: mol_type = other DNA
ccagctgggatgagtaggtcta

SEQ ID NO: 39595 - DNA, 22 bp, synthetic construct
  misc_feature 1..22: note = chemically synthesized
  source 1..22: mol_type = other DNA
ggatgagtaggtctaaagtgac

SEQ ID NO: 39596 - DNA, 22 bp, synthetic construct
  misc_feature 1..22: note = chemically synthesized
  source 1..22: mol_type = other DNA
aagtgactaatccactccacca

SEQ ID NO: 39597 - DNA, 22 bp, synthetic construct
  misc_feature 1..22: note = chemically synthesized
  source 1..22: mol_type = other DNA
atccactccaccatcctaatct

SEQ ID NO: 39598 - DNA, 22 bp, synthetic construct
  misc_feature 1..22: note = chemically synthesized
  source 1..22: mol_type = other DNA
caccatcctaatctccctaagc

SEQ ID NO: 39599 - DNA, 22 bp, synthetic construct
  misc_feature 1..22: note = chemically synthesized
  source 1..22: mol_type = other DNA
atctccctaagcctttggatca

SEQ ID NO: 39600 - DNA, 22 bp, synthetic construct
  misc_feature 1..22: note = chemically synthesized
  source 1..22: mol_type = other DNA
cctaagcctttggatcacttcc

SEQ ID NO: 39601 - DNA, 22 bp, synthetic construct
  misc_feature 1..22: note = chemically synthesized
  source 1..22: mol_type = other DNA
agcctttggatcacttcctcta

SEQ ID NO: 39602 - DNA, 22 bp, synthetic construct
  misc_feature 1..22: note = chemically synthesized
  source 1..22: mol_type = other DNA
tggatcacttcctctacattaa

SEQ ID NO: 39603 - DNA, 22 bp, synthetic construct
  misc_feature 1..22: note = chemically synthesized
  source 1..22: mol_type = other DNA
ggatcacttcctctacattaaa

SEQ ID NO: 39604 - DNA, 22 bp, synthetic construct
  misc_feature 1..22: note = chemically synthesized
  source 1..22: mol_type = other DNA
gatcacttcctctacattaaac

SEQ ID NO: 39605 - DNA, 22 bp, synthetic construct
  misc_feature 1..22: note = chemically synthesized
  source 1..22: mol_type = other DNA
cctctacattaaaccaaggcat

SEQ ID NO: 39606 - DNA, 22 bp, synthetic construct
  misc_feature 1..22: note = chemically synthesized
  source 1..22: mol_type = other DNA
ctctacattaaaccaaggcatt

SEQ ID NO: 39607 - DNA, 22 bp, synthetic construct
  misc_feature 1..22: note = chemically synthesized
  source 1..22: mol_type = other DNA
tacattaaaccaaggcatttcc

SEQ ID NO: 39608 - DNA, 22 bp, synthetic construct
  misc_feature 1..22: note = chemically synthesized
  source 1..22: mol_type = other DNA
cattaaaccaaggcatttccag

SEQ ID NO: 39609 - DNA, 22 bp, synthetic construct
  misc_feature 1..22: note = chemically synthesized
  source 1..22: mol_type = other DNA
aaccaaggcatttccagctcac

SEQ ID NO: 39610 - DNA, 22 bp, synthetic construct
  misc_feature 1..22: note = chemically synthesized
  source 1..22: mol_type = other DNA
ccagctcactaacattggacca

SEQ ID NO: 39611 - DNA, 22 bp, synthetic construct
  misc_feature 1..22: note = chemically synthesized
  source 1..22: mol_type = other DNA
cagctcactaacattggaccat

SEQ ID NO: 39612 - DNA, 22 bp, synthetic construct
  misc_feature 1..22: note = chemically synthesized
  source 1..22: mol_type = other DNA
actaacattggaccatctttta

SEQ ID NO: 39613 - DNA, 22 bp, synthetic construct
  misc_feature 1..22: note = chemically synthesized
  source 1..22: mol_type = other DNA
acattggaccatcttttaatcc

SEQ ID NO: 39614 - DNA, 22 bp, synthetic construct
  misc_feature 1..22: note = chemically synthesized
  source 1..22: mol_type = other DNA
gaccatcttttaatccatattt

SEQ ID NO: 39615 - DNA, 22 bp, synthetic construct
  misc_feature 1..22: note = chemically synthesized
  source 1..22: mol_type = other DNA
ttaatccatatttcagctaacc

SEQ ID NO: 39616 - DNA, 22 bp, synthetic construct
  misc_feature 1..22: note = chemically synthesized
  source 1..22: mol_type = other DNA
taatccatatttcagctaacca

SEQ ID NO: 39617 - DNA, 22 bp, synthetic construct
  misc_feature 1..22: note = chemically synthesized
  source 1..22: mol_type = other DNA
aatccatatttcagctaaccaa

SEQ ID NO: 39618 - DNA, 22 bp, synthetic construct
  misc_feature 1..22: note = chemically synthesized
  source 1..22: mol_type = other DNA
atccatatttcagctaaccaag

SEQ ID NO: 39619 - DNA, 22 bp, synthetic construct
  misc_feature 1..22: note = chemically synthesized
  source 1..22: mol_type = other DNA
cagctaaccaagcaaataaact

SEQ ID NO: 39620 - DNA, 22 bp, synthetic construct
  misc_feature 1..22: note = chemically synthesized
  source 1..22: mol_type = other DNA
agctaaccaagcaaataaacta

SEQ ID NO: 39621 - DNA, 22 bp, synthetic construct
  misc_feature 1..22: note = chemically synthesized
  source 1..22: mol_type = other DNA
accaagcaaataaactattata

SEQ ID NO: 39622 - DNA, 22 bp, synthetic construct
  misc_feature 1..22: note = chemically synthesized
  source 1..22: mol_type = other DNA
ttataacttttttttttttttt

SEQ ID NO: 39623 - DNA, 22 bp, synthetic construct
  misc_feature 1..22: note = chemically synthesized
  source 1..22: mol_type = other DNA
taactttttttttttttttttt

SEQ ID NO: 39624 - DNA, 22 bp, synthetic construct
  misc_feature 1..22: note = chemically synthesized
  source 1..22: mol_type = other DNA
ttttttttttttttttggaaat

SEQ ID NO: 39625 - DNA, 22 bp, synthetic construct
  misc_feature 1..22: note = chemically synthesized
  source 1..22: mol_type = other DNA
tttttttttttttttggaaatg

SEQ ID NO: 39626 - DNA, 22 bp, synthetic construct
  misc_feature 1..22: note = chemically synthesized
  source 1..22: mol_type = other DNA
ttttttttttttttggaaatgg

SEQ ID NO: 39627 - DNA, 22 bp, synthetic construct
  misc_feature 1..22: note = chemically synthesized
  source 1..22: mol_type = other DNA
tttttttttttttggaaatgga

SEQ ID NO: 39628 - DNA, 22 bp, synthetic construct
  misc_feature 1..22: note = chemically synthesized
  source 1..22: mol_type = other DNA
ttttttttttttggaaatggag

SEQ ID NO: 39629 - DNA, 22 bp, synthetic construct
  misc_feature 1..22: note = chemically synthesized
  source 1..22: mol_type = other DNA
tttttttttttggaaatggagt

SEQ ID NO: 39630 - DNA, 22 bp, synthetic construct
  misc_feature 1..22: note = chemically synthesized
  source 1..22: mol_type = other DNA
ttttttttttggaaatggagtc

SEQ ID NO: 39631 - DNA, 22 bp, synthetic construct
  misc_feature 1..22: note = chemically synthesized
  source 1..22: mol_type = other DNA
tttttttttggaaatggagtct

SEQ ID NO: 39632 - DNA, 22 bp, synthetic construct
  misc_feature 1..22: note = chemically synthesized
  source 1..22: mol_type = other DNA
ttttttttggaaatggagtctt

SEQ ID NO: 39633 - DNA, 22 bp, synthetic construct
  misc_feature 1..22: note = chemically synthesized
  source 1..22: mol_type = other DNA
tttttttggaaatggagtcttg

SEQ ID NO: 39634 - DNA, 22 bp, synthetic construct
  misc_feature 1..22: note = chemically synthesized
  source 1..22: mol_type = other DNA
ttttttggaaatggagtcttgc

SEQ ID NO: 39635 - DNA, 22 bp, synthetic construct
  misc_feature 1..22: note = chemically synthesized
  source 1..22: mol_type = other DNA
tttttggaaatggagtcttgct

SEQ ID NO: 39636 - DNA, 22 bp, synthetic construct
  misc_feature 1..22: note = chemically synthesized
  source 1..22: mol_type = other DNA
ttttggaaatggagtcttgctc

SEQ ID NO: 39637 - DNA, 22 bp, synthetic construct
  misc_feature 1..22: note = chemically synthesized
  source 1..22: mol_type = other DNA
tttggaaatggagtcttgctct

SEQ ID NO: 39638 - DNA, 22 bp, synthetic construct
  misc_feature 1..22: note = chemically synthesized
  source 1..22: mol_type = other DNA
ttggaaatggagtcttgctctg

SEQ ID NO: 39639 - DNA, 22 bp, synthetic construct
  misc_feature 1..22: note = chemically synthesized
  source 1..22: mol_type = other DNA
tggaaatggagtcttgctctgt

SEQ ID NO: 39640 - DNA, 22 bp, synthetic construct
  misc_feature 1..22: note = chemically synthesized
  source 1..22: mol_type = other DNA
ggaaatggagtcttgctctgtt

SEQ ID NO: 39641 - DNA, 22 bp, synthetic construct
  misc_feature 1..22: note = chemically synthesized
  source 1..22: mol_type = other DNA
gaaatggagtcttgctctgtta

SEQ ID NO: 39642 - DNA, 22 bp, synthetic construct
  misc_feature 1..22: note = chemically synthesized
  source 1..22: mol_type = other DNA
gctctgttaccaggctggaatg

SEQ ID NO: 39643 - DNA, 22 bp, synthetic construct
  misc_feature 1..22: note = chemically synthesized
  source 1..22: mol_type = other DNA
ctctgttaccaggctggaatgc

SEQ ID NO: 39644 - DNA, 22 bp, synthetic construct
  misc_feature 1..22: note = chemically synthesized
  source 1..22: mol_type = other DNA
tgttaccaggctggaatgcagt

SEQ ID NO: 39645 - DNA, 22 bp, synthetic construct
  misc_feature 1..22: note = chemically synthesized
  source 1..22: mol_type = other DNA
ttaccaggctggaatgcagtgg

SEQ ID NO: 39646 - DNA, 22 bp, synthetic construct
  misc_feature 1..22: note = chemically synthesized
  source 1..22: mol_type = other DNA
ccaggctggaatgcagtggggc

SEQ ID NO: 39647 - DNA, 22 bp, synthetic construct
  misc_feature 1..22: note = chemically synthesized
  source 1..22: mol_type = other DNA
gaatgcagtggggcgatcttgg

SEQ ID NO: 39648 - DNA, 22 bp, synthetic construct
  misc_feature 1..22: note = chemically synthesized
  source 1..22: mol_type = other DNA
ggctcactgcaatctctgcctc

SEQ ID NO: 39649 - DNA, 22 bp, synthetic construct
  misc_feature 1..22: note = chemically synthesized
  source 1..22: mol_type = other DNA
gctcactgcaatctctgcctca

SEQ ID NO: 39650 - DNA, 22 bp, synthetic construct
  misc_feature 1..22: note = chemically synthesized
  source 1..22: mol_type = other DNA
actgcaatctctgcctcacagg

SEQ ID NO: 39651 - DNA, 22 bp, synthetic construct
  misc_feature 1..22: note = chemically synthesized
  source 1..22: mol_type = other DNA
caatctctgcctcacaggttca

SEQ ID NO: 39652 - DNA, 22 bp, synthetic construct
  misc_feature 1..22: note = chemically synthesized
  source 1..22: mol_type = other DNA
tgcctcacaggttcaagcagtt

SEQ ID NO: 39653 - DNA, 22 bp, synthetic construct
  misc_feature 1..22: note = chemically synthesized
  source 1..22: mol_type = other DNA
cctcacaggttcaagcagttct

SEQ ID NO: 39654 - DNA, 22 bp, synthetic construct
  misc_feature 1..22: note = chemically synthesized
  source 1..22: mol_type = other DNA
acaggttcaagcagttctcttg

SEQ ID NO: 39655 - DNA, 22 bp, synthetic construct
  misc_feature 1..22: note = chemically synthesized
  source 1..22: mol_type = other DNA
aagcagttctcttgcctcagcc

SEQ ID NO: 39656 - DNA, 22 bp, synthetic construct
  misc_feature 1..22: note = chemically synthesized
  source 1..22: mol_type = other DNA
tcttgcctcagcctcccaagta

SEQ ID NO: 39657 - DNA, 22 bp, synthetic construct
  misc_feature 1..22: note = chemically synthesized
  source 1..22: mol_type = other DNA
ttgcctcagcctcccaagtaga

SEQ ID NO: 39658 - DNA, 22 bp, synthetic construct
  misc_feature 1..22: note = chemically synthesized
  source 1..22: mol_type = other DNA
gcctcagcctcccaagtagatg

SEQ ID NO: 39659 - DNA, 22 bp, synthetic construct
  misc_feature 1..22: note = chemically synthesized
  source 1..22: mol_type = other DNA
cctcagcctcccaagtagatga

SEQ ID NO: 39660 - DNA, 22 bp, synthetic construct
  misc_feature 1..22: note = chemically synthesized
  source 1..22: mol_type = other DNA
agcctcccaagtagatgagatt

SEQ ID NO: 39661 - DNA, 22 bp, synthetic construct
  misc_feature 1..22: note = chemically synthesized
  source 1..22: mol_type = other DNA
ccaagtagatgagattacagtt

SEQ ID NO: 39662 - DNA, 22 bp, synthetic construct
  misc_feature 1..22: note = chemically synthesized
  source 1..22: mol_type = other DNA
cagttacgcatcaccatgccca

SEQ ID NO: 39663 - DNA, 22 bp, synthetic construct
  misc_feature 1..22: note = chemically synthesized
  source 1..22: mol_type = other DNA
cgcatcaccatgcccagctaat

SEQ ID NO: 39664 - DNA, 22 bp, synthetic construct
  misc_feature 1..22: note = chemically synthesized
  source 1..22: mol_type = other DNA
atttttgtatttttagcagaga

SEQ ID NO: 39665 - DNA, 22 bp, synthetic construct
  misc_feature 1..22: note = chemically synthesized
  source 1..22: mol_type = other DNA
ttgtatttttagcagagatggg

SEQ ID NO: 39666 - DNA, 22 bp, synthetic construct
  misc_feature 1..22: note = chemically synthesized
  source 1..22: mol_type = other DNA
tgtatttttagcagagatgggg

SEQ ID NO: 39667 - DNA, 22 bp, synthetic construct
  misc_feature 1..22: note = chemically synthesized
  source 1..22: mol_type = other DNA
gtatttttagcagagatggggt

SEQ ID NO: 39668 - DNA, 22 bp, synthetic construct
  misc_feature 1..22: note = chemically synthesized
  source 1..22: mol_type = other DNA
tatttttagcagagatggggtt

SEQ ID NO: 39669 - DNA, 22 bp, synthetic construct
  misc_feature 1..22: note = chemically synthesized
  source 1..22: mol_type = other DNA
ttagcagagatggggtttcacc

SEQ ID NO: 39670 - DNA, 22 bp, synthetic construct
  misc_feature 1..22: note = chemically synthesized
  source 1..22: mol_type = other DNA
tagcagagatggggtttcacca

SEQ ID NO: 39671 - DNA, 22 bp, synthetic construct
  misc_feature 1..22: note = chemically synthesized
  source 1..22: mol_type = other DNA
agcagagatggggtttcaccat

SEQ ID NO: 39672 - DNA, 22 bp, synthetic construct
  misc_feature 1..22: note = chemically synthesized
  source 1..22: mol_type = other DNA
gcagagatggggtttcaccatt

SEQ ID NO: 39673 - DNA, 22 bp, synthetic construct
  misc_feature 1..22: note = chemically synthesized
  source 1..22: mol_type = other DNA
caccattttagccagaattgtc

SEQ ID NO: 39674 - DNA, 22 bp, synthetic construct
  misc_feature 1..22: note = chemically synthesized
  source 1..22: mol_type = other DNA
accattttagccagaattgtct

SEQ ID NO: 39675 - DNA, 22 bp, synthetic construct
  misc_feature 1..22: note = chemically synthesized
  source 1..22: mol_type = other DNA
tagccagaattgtctcaatctc

SEQ ID NO: 39676 - DNA, 22 bp, synthetic construct
  misc_feature 1..22: note = chemically synthesized
  source 1..22: mol_type = other DNA
agccagaattgtctcaatctcc

SEQ ID NO: 39677 - DNA, 22 bp, synthetic construct
  misc_feature 1..22: note = chemically synthesized
  source 1..22: mol_type = other DNA
gccagaattgtctcaatctcct

SEQ ID NO: 39678 - DNA, 22 bp, synthetic construct
  misc_feature 1..22: note = chemically synthesized
  source 1..22: mol_type = other DNA
tctcaatctcctgatctcgtga

SEQ ID NO: 39679 - DNA, 22 bp, synthetic construct
  misc_feature 1..22: note = chemically synthesized
  source 1..22: mol_type = other DNA
aatctcctgatctcgtgatctg

SEQ ID NO: 39680 - DNA, 22 bp, synthetic construct
  misc_feature 1..22: note = chemically synthesized
  source 1..22: mol_type = other DNA
ctgatctcgtgatctgcccgcc

SEQ ID NO: 39681 - DNA, 22 bp, synthetic construct
  misc_feature 1..22: note = chemically synthesized
  source 1..22: mol_type = other DNA
atctcgtgatctgcccgccccc

SEQ ID NO: 39682 - DNA, 22 bp, synthetic construct
  misc_feature 1..22: note = chemically synthesized
  source 1..22: mol_type = other DNA
gtgatctgcccgcccccgcctc

SEQ ID NO: 39683 - DNA, 22 bp, synthetic construct
  misc_feature 1..22: note = chemically synthesized
  source 1..22: mol_type = other DNA
cccgcccccgcctcccaaggtg

SEQ ID NO: 39684 - DNA, 22 bp, synthetic construct
  misc_feature 1..22: note = chemically synthesized
  source 1..22: mol_type = other DNA
ccaaggtgctgggattacaggc

SEQ ID NO: 39685 - DNA, 22 bp, synthetic construct
  misc_feature 1..22: note = chemically synthesized
  source 1..22: mol_type = other DNA
ggattacaggcgtgagccactg

SEQ ID NO: 39686 - DNA, 22 bp, synthetic construct
  misc_feature 1..22: note = chemically synthesized
  source 1..22: mol_type = other DNA
caggcgtgagccactgctcccg

SEQ ID NO: 39687 - DNA, 22 bp, synthetic construct
  misc_feature 1..22: note = chemically synthesized
  source 1..22: mol_type = other DNA
ctcccggccctatcagaacctt

SEQ ID NO: 39688 - DNA, 22 bp, synthetic construct
  misc_feature 1..22: note = chemically synthesized
  source 1..22: mol_type = other DNA
ccggccctatcagaaccttttc

SEQ ID NO: 39689 - DNA, 22 bp, synthetic construct
  misc_feature 1..22: note = chemically synthesized
  source 1..22: mol_type = other DNA
tcagaaccttttctaagtcccc

SEQ ID NO: 39690 - DNA, 22 bp, synthetic construct
  misc_feature 1..22: note = chemically synthesized
  source 1..22: mol_type = other DNA
ttctaagtccccgagctgcaac

SEQ ID NO: 39691 - DNA, 22 bp, synthetic construct
  misc_feature 1..22: note = chemically synthesized
  source 1..22: mol_type = other DNA
tctaagtccccgagctgcaaca

SEQ ID NO: 39692 - DNA, 22 bp, synthetic construct
  misc_feature 1..22: note = chemically synthesized
  source 1..22: mol_type = other DNA
ctaagtccccgagctgcaacat

SEQ ID NO: 39693 - DNA, 22 bp, synthetic construct
  misc_feature 1..22: note = chemically synthesized
  source 1..22: mol_type = other DNA
taagtccccgagctgcaacatt

SEQ ID NO: 39694 - DNA, 22 bp, synthetic construct
  misc_feature 1..22: note = chemically synthesized
  source 1..22: mol_type = other DNA
agtccccgagctgcaacattaa

SEQ ID NO: 39695 - DNA, 22 bp, synthetic construct
  misc_feature 1..22: note = chemically synthesized
  source 1..22: mol_type = other DNA
caacattaaatgcagaatccct

SEQ ID NO: 39696 - DNA, 22 bp, synthetic construct
  misc_feature 1..22: note = chemically synthesized
  source 1..22: mol_type = other DNA
aatgcagaatccctacttagta

SEQ ID NO: 39697 - DNA, 22 bp, synthetic construct
  misc_feature 1..22: note = chemically synthesized
  source 1..22: mol_type = other DNA
cttagtagggccaaaccaataa

SEQ ID NO: 39698 - DNA, 22 bp, synthetic construct
  misc_feature 1..22: note = chemically synthesized
  source 1..22: mol_type = other DNA
agtagggccaaaccaataaatt

SEQ ID NO: 39699 - DNA, 22 bp, synthetic construct
  misc_feature 1..22: note = chemically synthesized
  source 1..22: mol_type = other DNA
gtagggccaaaccaataaattc

SEQ ID NO: 39700 - DNA, 22 bp, synthetic construct
  misc_feature 1..22: note = chemically synthesized
  source 1..22: mol_type = other DNA
agcttgatccaactctatgtcc

SEQ ID NO: 39701 - DNA, 22 bp, synthetic construct
  misc_feature 1..22: note = chemically synthesized
  source 1..22: mol_type = other DNA
gatccaactctatgtcccttcc

SEQ ID NO: 39702 - DNA, 22 bp, synthetic construct
  misc_feature 1..22: note = chemically synthesized
  source 1..22: mol_type = other DNA
atccaactctatgtcccttcca

SEQ ID NO: 39703 - DNA, 22 bp, synthetic construct
  misc_feature 1..22: note = chemically synthesized
  source 1..22: mol_type = other DNA
tatgtcccttccaccattatcc

SEQ ID NO: 39704 - DNA, 22 bp, synthetic construct
  misc_feature 1..22: note = chemically synthesized
  source 1..22: mol_type = other DNA
tgtcccttccaccattatccct

SEQ ID NO: 39705 - DNA, 22 bp, synthetic construct
  misc_feature 1..22: note = chemically synthesized
  source 1..22: mol_type = other DNA
ccaccattatcccttaccctta

SEQ ID NO: 39706 - DNA, 22 bp, synthetic construct
  misc_feature 1..22: note = chemically synthesized
  source 1..22: mol_type = other DNA
caccattatcccttacccttaa

SEQ ID NO: 39707 - DNA, 22 bp, synthetic construct
  misc_feature 1..22: note = chemically synthesized
  source 1..22: mol_type = other DNA
tcccttacccttaatatccatt

SEQ ID NO: 39708 - DNA, 22 bp, synthetic construct
  misc_feature 1..22: note = chemically synthesized
  source 1..22: mol_type = other DNA
acccttaatatccattcccatg

SEQ ID NO: 39709 - DNA, 22 bp, synthetic construct
  misc_feature 1..22: note = chemically synthesized
  source 1..22: mol_type = other DNA
cccttaatatccattcccatgc

SEQ ID NO: 39710 - DNA, 22 bp, synthetic construct
  misc_feature 1..22: note = chemically synthesized
  source 1..22: mol_type = other DNA
aatatccattcccatgcctgtt

SEQ ID NO: 39711 - DNA, 22 bp, synthetic construct
  misc_feature 1..22: note = chemically synthesized
  source 1..22: mol_type = other DNA
atatccattcccatgcctgttc

SEQ ID NO: 39712 - DNA, 22 bp, synthetic construct
  misc_feature 1..22: note = chemically synthesized
  source 1..22: mol_type = other DNA
ccatgcctgttctccagatttc

SEQ ID NO: 39713 - DNA, 22 bp, synthetic construct
  misc_feature 1..22: note = chemically synthesized
  source 1..22: mol_type = other DNA
ttctccagatttctgccaatat

SEQ ID NO: 39714 - DNA, 22 bp, synthetic construct
  misc_feature 1..22: note = chemically synthesized
  source 1..22: mol_type = other DNA
tccagatttctgccaatataaa

SEQ ID NO: 39715 - DNA, 22 bp, synthetic construct
  misc_feature 1..22: note = chemically synthesized
  source 1..22: mol_type = other DNA
cagatttctgccaatataaatt

SEQ ID NO: 39716 - DNA, 22 bp, synthetic construct
  misc_feature 1..22: note = chemically synthesized
  source 1..22: mol_type = other DNA
ctgccaatataaattagaaagc

SEQ ID NO: 39717 - DNA, 22 bp, synthetic construct
  misc_feature 1..22: note = chemically synthesized
  source 1..22: mol_type = other DNA
tgccaatataaattagaaagct

SEQ ID NO: 39718 - DNA, 22 bp, synthetic construct
  misc_feature 1..22: note = chemically synthesized
  source 1..22: mol_type = other DNA
ccaatataaattagaaagctta

SEQ ID NO: 39719 - DNA, 22 bp, synthetic construct
  misc_feature 1..22: note = chemically synthesized
  source 1..22: mol_type = other DNA
gaaagcttaagcagttctttta

SEQ ID NO: 39720 - DNA, 22 bp, synthetic construct
  misc_feature 1..22: note = chemically synthesized
  source 1..22: mol_type = other DNA
aagcagttcttttagagtataa

SEQ ID NO: 39721 - DNA, 22 bp, synthetic construct
  misc_feature 1..22: note = chemically synthesized
  source 1..22: mol_type = other DNA
agcagttcttttagagtataat

SEQ ID NO: 39722 - DNA, 22 bp, synthetic construct
  misc_feature 1..22: note = chemically synthesized
  source 1..22: mol_type = other DNA
ttttagagtataatgcacctcc

SEQ ID NO: 39723 - DNA, 22 bp, synthetic construct
  misc_feature 1..22: note = chemically synthesized
  source 1..22: mol_type = other DNA
ttagagtataatgcacctcctc

SEQ ID NO: 39724 - DNA, 22 bp, synthetic construct
  misc_feature 1..22: note = chemically synthesized
  source 1..22: mol_type = other DNA
tagagtataatgcacctcctca

SEQ ID NO: 39725 - DNA, 22 bp, synthetic construct
  misc_feature 1..22: note = chemically synthesized
  source 1..22: mol_type = other DNA
agagtataatgcacctcctcat

SEQ ID NO: 39726 - DNA, 22 bp, synthetic construct
  misc_feature 1..22: note = chemically synthesized
  source 1..22: mol_type = other DNA
gagtataatgcacctcctcatg

SEQ ID NO: 39727 - DNA, 22 bp, synthetic construct
  misc_feature 1..22: note = chemically synthesized
  source 1..22: mol_type = other DNA
ctcatgggtcacactctgaacc

SEQ ID NO: 39728 - DNA, 22 bp, synthetic construct
  misc_feature 1..22: note = chemically synthesized
  source 1..22: mol_type = other DNA
atgggtcacactctgaacctca

SEQ ID NO: 39729 - DNA, 22 bp, synthetic construct
  misc_feature 1..22: note = chemically synthesized
  source 1..22: mol_type = other DNA
tgaacctcacctctggggcccg

SEQ ID NO: 39730 - DNA, 22 bp, synthetic construct
  misc_feature 1..22: note = chemically synthesized
  source 1..22: mol_type = other DNA
aacctcacctctggggcccgca

SEQ ID NO: 39731 - DNA, 22 bp, synthetic construct
  misc_feature 1..22: note = chemically synthesized
  source 1..22: mol_type = other DNA
acctctggggcccgcaaggaat

SEQ ID NO: 39732 - DNA, 22 bp, synthetic construct
  misc_feature 1..22: note = chemically synthesized
  source 1..22: mol_type = other DNA
tggggcccgcaaggaatttagc

SEQ ID NO: 39733 - DNA, 22 bp, synthetic construct
  misc_feature 1..22: note = chemically synthesized
  source 1..22: mol_type = other DNA
gggcccgcaaggaatttagcct

SEQ ID NO: 39734 - DNA, 22 bp, synthetic construct
  misc_feature 1..22: note = chemically synthesized
  source 1..22: mol_type = other DNA
agcctagttataggtctagaag

SEQ ID NO: 39735 - DNA, 22 bp, synthetic construct
  misc_feature 1..22: note = chemically synthesized
  source 1..22: mol_type = other DNA
gcctagttataggtctagaagc

SEQ ID NO: 39736 - DNA, 22 bp, synthetic construct
  misc_feature 1..22: note = chemically synthesized
  source 1..22: mol_type = other DNA
gttataggtctagaagcattca

SEQ ID NO: 39737 - DNA, 22 bp, synthetic construct
  misc_feature 1..22: note = chemically synthesized
  source 1..22: mol_type = other DNA
taggtctagaagcattcagggg

SEQ ID NO: 39738 - DNA, 22 bp, synthetic construct
  misc_feature 1..22: note = chemically synthesized
  source 1..22: mol_type = other DNA
gaagcattcaggggcattaggg

SEQ ID NO: 39739 - DNA, 22 bp, synthetic construct
  misc_feature 1..22: note = chemically synthesized
  source 1..22: mol_type = other DNA
aggggcattaggggtgcctctt

SEQ ID NO: 39740 - DNA, 22 bp, synthetic construct
  misc_feature 1..22: note = chemically synthesized
  source 1..22: mol_type = other DNA
ggggtgcctcttgaggagaatc

SEQ ID NO: 39741 - DNA, 22 bp, synthetic construct
  misc_feature 1..22: note = chemically synthesized
  source 1..22: mol_type = other DNA
ttgaggagaatcaacattatct

SEQ ID NO: 39742 - DNA, 22 bp, synthetic construct
  misc_feature 1..22: note = chemically synthesized
  source 1..22: mol_type = other DNA
gaggagaatcaacattatcttg

SEQ ID NO: 39743 - DNA, 22 bp, synthetic construct
  misc_feature 1..22: note = chemically synthesized
  source 1..22: mol_type = other DNA
aggagaatcaacattatcttgc

SEQ ID NO: 39744 - DNA, 22 bp, synthetic construct
  misc_feature 1..22: note = chemically synthesized
  source 1..22: mol_type = other DNA
tcttgcctggcagctgcctcag

SEQ ID NO: 39745 - DNA, 22 bp, synthetic construct
  misc_feature 1..22: note = chemically synthesized
  source 1..22: mol_type = other DNA
gcctggcagctgcctcagggaa

SEQ ID NO: 39746 - DNA, 22 bp, synthetic construct
  misc_feature 1..22: note = chemically synthesized
  source 1..22: mol_type = other DNA
cctggcagctgcctcagggaag

SEQ ID NO: 39747 - DNA, 22 bp, synthetic construct
  misc_feature 1..22: note = chemically synthesized
  source 1..22: mol_type = other DNA
gcagctgcctcagggaaggcca

SEQ ID NO: 39748 - DNA, 22 bp, synthetic construct
  misc_feature 1..22: note = chemically synthesized
  source 1..22: mol_type = other DNA
cctcagggaaggccatcactgt

SEQ ID NO: 39749 - DNA, 22 bp, synthetic construct
  misc_feature 1..22: note = chemically synthesized
  source 1..22: mol_type = other DNA
agggaaggccatcactgttgcc

SEQ ID NO: 39750 - DNA, 22 bp, synthetic construct
  misc_feature 1..22: note = chemically synthesized
  source 1..22: mol_type = other DNA
ttgcctcaagcagtgcagggtt

SEQ ID NO: 39751 - DNA, 22 bp, synthetic construct
  misc_feature 1..22: note = chemically synthesized
  source 1..22: mol_type = other DNA
cctcaagcagtgcagggtttac

SEQ ID NO: 39752 - DNA, 22 bp, synthetic construct
  misc_feature 1..22: note = chemically synthesized
  source 1..22: mol_type = other DNA
aagcagtgcagggtttacatcc

SEQ ID NO: 39753 - DNA, 22 bp, synthetic construct
  misc_feature 1..22: note = chemically synthesized
  source 1..22: mol_type = other DNA
acatcctcagacaaaggtggaa

SEQ ID NO: 39754 - DNA, 22 bp, synthetic construct
  misc_feature 1..22: note = chemically synthesized
  source 1..22: mol_type = other DNA
catcctcagacaaaggtggaaa

SEQ ID NO: 39755 - DNA, 22 bp, synthetic construct
  misc_feature 1..22: note = chemically synthesized
  source 1..22: mol_type = other DNA
agacaaaggtggaaaggctaat

SEQ ID NO: 39756 - DNA, 22 bp, synthetic construct
  misc_feature 1..22: note = chemically synthesized
  source 1..22: mol_type = other DNA
atggcagcacgggtcagggagg

SEQ ID NO: 39757 - DNA, 22 bp, synthetic construct
  misc_feature 1..22: note = chemically synthesized
  source 1..22: mol_type = other DNA
ccactactggggatggggaaac

SEQ ID NO: 39758 - DNA, 22 bp, synthetic construct
  misc_feature 1..22: note = chemically synthesized
  source 1..22: mol_type = other DNA
ctggggatggggaaactgtttc

SEQ ID NO: 39759 - DNA, 22 bp, synthetic construct
  misc_feature 1..22: note = chemically synthesized
  source 1..22: mol_type = other DNA
gggatggggaaactgtttcttc

SEQ ID NO: 39760 - DNA, 22 bp, synthetic construct
  misc_feature 1..22: note = chemically synthesized
  source 1..22: mol_type = other DNA
tttcttctggcaaaaaagtttc

SEQ ID NO: 39761 - DNA, 22 bp, synthetic construct
  misc_feature 1..22: note = chemically synthesized
  source 1..22: mol_type = other DNA
cttctggcaaaaaagtttcatc

SEQ ID NO: 39762 - DNA, 22 bp, synthetic construct
  misc_feature 1..22: note = chemically synthesized
  source 1..22: mol_type = other DNA
ttctggcaaaaaagtttcatca

SEQ ID NO: 39763 - DNA, 22 bp, synthetic construct
  misc_feature 1..22: note = chemically synthesized
  source 1..22: mol_type = other DNA
ctggcaaaaaagtttcatcaga

SEQ ID NO: 39764 - DNA, 22 bp, synthetic construct
  misc_feature 1..22: note = chemically synthesized
  source 1..22: mol_type = other DNA
tggcaaaaaagtttcatcagag

SEQ ID NO: 39765 - DNA, 22 bp, synthetic construct
  misc_feature 1..22: note = chemically synthesized
  source 1..22: mol_type = other DNA
gcaaaaaagtttcatcagagtt

SEQ ID NO: 39766 - DNA, 22 bp, synthetic construct
  misc_feature 1..22: note = chemically synthesized
  source 1..22: mol_type = other DNA
catcagagttcacaaactcagt

SEQ ID NO: 39767 - DNA, 22 bp, synthetic construct
  misc_feature 1..22: note = chemically synthesized
  source 1..22: mol_type = other DNA
atcagagttcacaaactcagtg

SEQ ID NO: 39768 - DNA, 22 bp, synthetic construct
  misc_feature 1..22: note = chemically synthesized
  source 1..22: mol_type = other DNA
acaaactcagtgtcctcagctt

SEQ ID NO: 39769 - DNA, 22 bp, synthetic construct
  misc_feature 1..22: note = chemically synthesized
  source 1..22: mol_type = other DNA
agtgtcctcagcttcatcaggg

SEQ ID NO: 39770 - DNA, 22 bp, synthetic construct
  misc_feature 1..22: note = chemically synthesized
  source 1..22: mol_type = other DNA
agcttcatcagggttctcccac

SEQ ID NO: 39771 - DNA, 22 bp, synthetic construct
  misc_feature 1..22: note = chemically synthesized
  source 1..22: mol_type = other DNA
catcagggttctcccacacatc

SEQ ID NO: 39772 - DNA, 22 bp, synthetic construct
  misc_feature 1..22: note = chemically synthesized
  source 1..22: mol_type = other DNA
atcagggttctcccacacatcc

SEQ ID NO: 39773 - DNA, 22 bp, synthetic construct
  misc_feature 1..22: note = chemically synthesized
  source 1..22: mol_type = other DNA
tcccacacatccccactccaag

SEQ ID NO: 39774 - DNA, 22 bp, synthetic construct
  misc_feature 1..22: note = chemically synthesized
  source 1..22: mol_type = other DNA
ccacacatccccactccaagtt

SEQ ID NO: 39775 - DNA, 22 bp, synthetic construct
  misc_feature 1..22: note = chemically synthesized
  source 1..22: mol_type = other DNA
caagttccagggtcccattttt

SEQ ID NO: 39776 - DNA, 22 bp, synthetic construct
  misc_feature 1..22: note = chemically synthesized
  source 1..22: mol_type = other DNA
cagggtcccatttttttccagt

SEQ ID NO: 39777 - DNA, 22 bp, synthetic construct
  misc_feature 1..22: note = chemically synthesized
  source 1..22: mol_type = other DNA
ttttccagtcaatgccctcact

SEQ ID NO: 39778 - DNA, 22 bp, synthetic construct
  misc_feature 1..22: note = chemically synthesized
  source 1..22: mol_type = other DNA
tttccagtcaatgccctcactt

SEQ ID NO: 39779 - DNA, 22 bp, synthetic construct
  misc_feature 1..22: note = chemically synthesized
  source 1..22: mol_type = other DNA
ttccagtcaatgccctcacttt

SEQ ID NO: 39780 - DNA, 22 bp, synthetic construct
  misc_feature 1..22: note = chemically synthesized
  source 1..22: mol_type = other DNA
tccagtcaatgccctcacttta

SEQ ID NO: 39781 - DNA, 22 bp, synthetic construct
  misc_feature 1..22: note = chemically synthesized
  source 1..22: mol_type = other DNA
ccagtcaatgccctcactttaa

SEQ ID NO: 39782 - DNA, 22 bp, synthetic construct
  misc_feature 1..22: note = chemically synthesized
  source 1..22: mol_type = other DNA
cagtcaatgccctcactttaac

SEQ ID NO: 39783 - DNA, 22 bp, synthetic construct
  misc_feature 1..22: note = chemically synthesized
  source 1..22: mol_type = other DNA
actttaacagtaaacacctggc

SEQ ID NO: 39784 - DNA, 22 bp, synthetic construct
  misc_feature 1..22: note = chemically synthesized
  source 1..22: mol_type = other DNA
taacagtaaacacctggcaagg

SEQ ID NO: 39785 - DNA, 22 bp, synthetic construct
  misc_feature 1..22: note = chemically synthesized
  source 1..22: mol_type = other DNA
aacagtaaacacctggcaaggc

SEQ ID NO: 39786 - DNA, 22 bp, synthetic construct
  misc_feature 1..22: note = chemically synthesized
  source 1..22: mol_type = other DNA
acagtaaacacctggcaaggct

SEQ ID NO: 39787 - DNA, 22 bp, synthetic construct
  misc_feature 1..22: note = chemically synthesized
  source 1..22: mol_type = other DNA
gcaaggctgtgcatgcacctct

SEQ ID NO: 39788 - DNA, 22 bp, synthetic construct
  misc_feature 1..22: note = chemically synthesized
  source 1..22: mol_type = other DNA
tgcatgcacctcttgttgcaga

SEQ ID NO: 39789 - DNA, 22 bp, synthetic construct
  misc_feature 1..22: note = chemically synthesized
  source 1..22: mol_type = other DNA
ttgttgcagatcagctactcgc

SEQ ID NO: 39790 - DNA, 22 bp, synthetic construct
  misc_feature 1..22: note = chemically synthesized
  source 1..22: mol_type = other DNA
gttgcagatcagctactcgcat

SEQ ID NO: 39791 - DNA, 22 bp, synthetic construct
  misc_feature 1..22: note = chemically synthesized
  source 1..22: mol_type = other DNA
ttgcagatcagctactcgcatg

SEQ ID NO: 39792 - DNA, 22 bp, synthetic construct
  misc_feature 1..22: note = chemically synthesized
  source 1..22: mol_type = other DNA
cagatcagctactcgcatgata

SEQ ID NO: 39793 - DNA, 22 bp, synthetic construct
  misc_feature 1..22: note = chemically synthesized
  source 1..22: mol_type = other DNA
ctcgcatgataacagcttgtct

SEQ ID NO: 39794 - DNA, 22 bp, synthetic construct
  misc_feature 1..22: note = chemically synthesized
  source 1..22: mol_type = other DNA
gcatgataacagcttgtctctg

SEQ ID NO: 39795 - DNA, 22 bp, synthetic construct
  misc_feature 1..22: note = chemically synthesized
  source 1..22: mol_type = other DNA
gtctctgttttttcacaatttc

SEQ ID NO: 39796 - DNA, 22 bp, synthetic construct
  misc_feature 1..22: note = chemically synthesized
  source 1..22: mol_type = other DNA
tctctgttttttcacaatttca

SEQ ID NO: 39797 - DNA, 22 bp, synthetic construct
  misc_feature 1..22: note = chemically synthesized
  source 1..22: mol_type = other DNA
tgttttttcacaatttcaactc

SEQ ID NO: 39798 - DNA, 22 bp, synthetic construct
  misc_feature 1..22: note = chemically synthesized
  source 1..22: mol_type = other DNA
ttttttcacaatttcaactctt

SEQ ID NO: 39799 - DNA, 22 bp, synthetic construct
  misc_feature 1..22: note = chemically synthesized
  source 1..22: mol_type = other DNA
tttcacaatttcaactctttct

SEQ ID NO: 39800 - DNA, 22 bp, synthetic construct
  misc_feature 1..22: note = chemically synthesized
  source 1..22: mol_type = other DNA
ttcacaatttcaactctttctc

SEQ ID NO: 39801 - DNA, 22 bp, synthetic construct
  misc_feature 1..22: note = chemically synthesized
  source 1..22: mol_type = other DNA
tcacaatttcaactctttctct

SEQ ID NO: 39802 - DNA, 22 bp, synthetic construct
  misc_feature 1..22: note = chemically synthesized
  source 1..22: mol_type = other DNA
cacaatttcaactctttctcta

SEQ ID NO: 39803 - DNA, 22 bp, synthetic construct
  misc_feature 1..22: note = chemically synthesized
  source 1..22: mol_type = other DNA
acaatttcaactctttctctac

SEQ ID NO: 39804 - DNA, 22 bp, synthetic construct
  misc_feature 1..22: note = chemically synthesized
  source 1..22: mol_type = other DNA
caactctttctctacaggagtt

SEQ ID NO: 39805 - DNA, 22 bp, synthetic construct
  misc_feature 1..22: note = chemically synthesized
  source 1..22: mol_type = other DNA
aactctttctctacaggagtta

SEQ ID NO: 39806 - DNA, 22 bp, synthetic construct
  misc_feature 1..22: note = chemically synthesized
  source 1..22: mol_type = other DNA
tttctctacaggagttaaaact

SEQ ID NO: 39807 - DNA, 22 bp, synthetic construct
  misc_feature 1..22: note = chemically synthesized
  source 1..22: mol_type = other DNA
tctctacaggagttaaaactct

SEQ ID NO: 39808 - DNA, 22 bp, synthetic construct
  misc_feature 1..22: note = chemically synthesized
  source 1..22: mol_type = other DNA
ctctacaggagttaaaactctc

SEQ ID NO: 39809 - DNA, 22 bp, synthetic construct
  misc_feature 1..22: note = chemically synthesized
  source 1..22: mol_type = other DNA
tctacaggagttaaaactctca

SEQ ID NO: 39810 - DNA, 22 bp, synthetic construct
  misc_feature 1..22: note = chemically synthesized
  source 1..22: mol_type = other DNA
tacaggagttaaaactctcatt

SEQ ID NO: 39811 - DNA, 22 bp, synthetic construct
  misc_feature 1..22: note = chemically synthesized
  source 1..22: mol_type = other DNA
caggagttaaaactctcattca

SEQ ID NO: 39812 - DNA, 22 bp, synthetic construct
  misc_feature 1..22: note = chemically synthesized
  source 1..22: mol_type = other DNA
aaactctcattcagggcaatct

SEQ ID NO: 39813 - DNA, 22 bp, synthetic construct
  misc_feature 1..22: note = chemically synthesized
  source 1..22: mol_type = other DNA
tcattcagggcaatcttagcag

SEQ ID NO: 39814 - DNA, 22 bp, synthetic construct
  misc_feature 1..22: note = chemically synthesized
  source 1..22: mol_type = other DNA
attcagggcaatcttagcagat

SEQ ID NO: 39815 - DNA, 22 bp, synthetic construct
  misc_feature 1..22: note = chemically synthesized
  source 1..22: mol_type = other DNA
agggcaatcttagcagatttgt

SEQ ID NO: 39816 - DNA, 22 bp, synthetic construct
  misc_feature 1..22: note = chemically synthesized
  source 1..22: mol_type = other DNA
agcagatttgtggctcagtatc

SEQ ID NO: 39817 - DNA, 22 bp, synthetic construct
  misc_feature 1..22: note = chemically synthesized
  source 1..22: mol_type = other DNA
gcagatttgtggctcagtatct

SEQ ID NO: 39818 - DNA, 22 bp, synthetic construct
  misc_feature 1..22: note = chemically synthesized
  source 1..22: mol_type = other DNA
gtggctcagtatctgcttctga

SEQ ID NO: 39819 - DNA, 22 bp, synthetic construct
  misc_feature 1..22: note = chemically synthesized
  source 1..22: mol_type = other DNA
tggctcagtatctgcttctgaa

SEQ ID NO: 39820 - DNA, 22 bp, synthetic construct
  misc_feature 1..22: note = chemically synthesized
  source 1..22: mol_type = other DNA
agtatctgcttctgaaggtggg

SEQ ID NO: 39821 - DNA, 22 bp, synthetic construct
  misc_feature 1..22: note = chemically synthesized
  source 1..22: mol_type = other DNA
cttctgaaggtgggagacagat

SEQ ID NO: 39822 - DNA, 22 bp, synthetic construct
  misc_feature 1..22: note = chemically synthesized
  source 1..22: mol_type = other DNA
ctgaaggtgggagacagatccc

SEQ ID NO: 39823 - DNA, 22 bp, synthetic construct
  misc_feature 1..22: note = chemically synthesized
  source 1..22: mol_type = other DNA
tgaaggtgggagacagatcccc

SEQ ID NO: 39824 - DNA, 22 bp, synthetic construct
  misc_feature 1..22: note = chemically synthesized
  source 1..22: mol_type = other DNA
aaggtgggagacagatcccctg

SEQ ID NO: 39825 - DNA, 22 bp, synthetic construct
  misc_feature 1..22: note = chemically synthesized
  source 1..22: mol_type = other DNA
agatcatcattttctttcatct

SEQ ID NO: 39826 - DNA, 22 bp, synthetic construct
  misc_feature 1..22: note = chemically synthesized
  source 1..22: mol_type = other DNA
tctttcatctctttctccagag

SEQ ID NO: 39827 - DNA, 22 bp, synthetic construct
  misc_feature 1..22: note = chemically synthesized
  source 1..22: mol_type = other DNA
ctttcatctctttctccagaga

SEQ ID NO: 39828 - DNA, 22 bp, synthetic construct
  misc_feature 1..22: note = chemically synthesized
  source 1..22: mol_type = other DNA
tttcatctctttctccagagaa

SEQ ID NO: 39829 - DNA, 22 bp, synthetic construct
  misc_feature 1..22: note = chemically synthesized
  source 1..22: mol_type = other DNA
tcatctctttctccagagaact

SEQ ID NO: 39830 - DNA, 22 bp, synthetic construct
  misc_feature 1..22: note = chemically synthesized
  source 1..22: mol_type = other DNA
catctctttctccagagaactt

SEQ ID NO: 39831 - DNA, 22 bp, synthetic construct
  misc_feature 1..22: note = chemically synthesized
  source 1..22: mol_type = other DNA
atctctttctccagagaactta

SEQ ID NO: 39832 - DNA, 22 bp, synthetic construct
  misc_feature 1..22: note = chemically synthesized
  source 1..22: mol_type = other DNA
tttctccagagaacttaggagc

SEQ ID NO: 39833 - DNA, 22 bp, synthetic construct
  misc_feature 1..22: note = chemically synthesized
  source 1..22: mol_type = other DNA
tctccagagaacttaggagcaa

SEQ ID NO: 39834 - DNA, 22 bp, synthetic construct
  misc_feature 1..22: note = chemically synthesized
  source 1..22: mol_type = other DNA
ctccagagaacttaggagcaat

SEQ ID NO: 39835 - DNA, 22 bp, synthetic construct
  misc_feature 1..22: note = chemically synthesized
  source 1..22: mol_type = other DNA
tccagagaacttaggagcaatc

SEQ ID NO: 39836 - DNA, 22 bp, synthetic construct
  misc_feature 1..22: note = chemically synthesized
  source 1..22: mol_type = other DNA
cagagaacttaggagcaatcaa

SEQ ID NO: 39837 - DNA, 22 bp, synthetic construct
  misc_feature 1..22: note = chemically synthesized
  source 1..22: mol_type = other DNA
aggagcaatcaaccaacttcat

SEQ ID NO: 39838 - DNA, 22 bp, synthetic construct
  misc_feature 1..22: note = chemically synthesized
  source 1..22: mol_type = other DNA
ggagcaatcaaccaacttcatt

SEQ ID NO: 39839 - DNA, 22 bp, synthetic construct
  misc_feature 1..22: note = chemically synthesized
  source 1..22: mol_type = other DNA
cattatgttccttggttctcca

SEQ ID NO: 39840 - DNA, 22 bp, synthetic construct
  misc_feature 1..22: note = chemically synthesized
  source 1..22: mol_type = other DNA
attatgttccttggttctccac

SEQ ID NO: 39841 - DNA, 22 bp, synthetic construct
  misc_feature 1..22: note = chemically synthesized
  source 1..22: mol_type = other DNA
tgttccttggttctccacatat

SEQ ID NO: 39842 - DNA, 22 bp, synthetic construct
  misc_feature 1..22: note = chemically synthesized
  source 1..22: mol_type = other DNA
cttggttctccacatatagtca

SEQ ID NO: 39843 - DNA, 22 bp, synthetic construct
  misc_feature 1..22: note = chemically synthesized
  source 1..22: mol_type = other DNA
ggttctccacatatagtcaaag

SEQ ID NO: 39844 - DNA, 22 bp, synthetic construct
  misc_feature 1..22: note = chemically synthesized
  source 1..22: mol_type = other DNA
gttctccacatatagtcaaagg

SEQ ID NO: 39845 - DNA, 22 bp, synthetic construct
  misc_feature 1..22: note = chemically synthesized
  source 1..22: mol_type = other DNA
tccacatatagtcaaaggtatt

SEQ ID NO: 39846 - DNA, 22 bp, synthetic construct
  misc_feature 1..22: note = chemically synthesized
  source 1..22: mol_type = other DNA
cacatatagtcaaaggtattat

SEQ ID NO: 39847 - DNA, 22 bp, synthetic construct
  misc_feature 1..22: note = chemically synthesized
  source 1..22: mol_type = other DNA
tgtatagagtcactaaactcct

SEQ ID NO: 39848 - DNA, 22 bp, synthetic construct
  misc_feature 1..22: note = chemically synthesized
  source 1..22: mol_type = other DNA
aactccttgcctctcataagtg

SEQ ID NO: 39849 - DNA, 22 bp, synthetic construct
  misc_feature 1..22: note = chemically synthesized
  source 1..22: mol_type = other DNA
cttgcctctcataagtgatgaa

SEQ ID NO: 39850 - DNA, 22 bp, synthetic construct
  misc_feature 1..22: note = chemically synthesized
  source 1..22: mol_type = other DNA
gcctctcataagtgatgaatca

SEQ ID NO: 39851 - DNA, 22 bp, synthetic construct
  misc_feature 1..22: note = chemically synthesized
  source 1..22: mol_type = other DNA
cctctcataagtgatgaatcag

SEQ ID NO: 39852 - DNA, 22 bp, synthetic construct
  misc_feature 1..22: note = chemically synthesized
  source 1..22: mol_type = other DNA
tcataagtgatgaatcagtagt

SEQ ID NO: 39853 - DNA, 22 bp, synthetic construct
  misc_feature 1..22: note = chemically synthesized
  source 1..22: mol_type = other DNA
ataagtgatgaatcagtagtgt

SEQ ID NO: 39854 - DNA, 22 bp, synthetic construct
  misc_feature 1..22: note = chemically synthesized
  source 1..22: mol_type = other DNA
attttgcataactctctaaaca

SEQ ID NO: 39855 - DNA, 22 bp, synthetic construct
  misc_feature 1..22: note = chemically synthesized
  source 1..22: mol_type = other DNA
ttttgcataactctctaaacaa

SEQ ID NO: 39856 - DNA, 22 bp, synthetic construct
  misc_feature 1..22: note = chemically synthesized
  source 1..22: mol_type = other DNA
tgcataactctctaaacaattc

SEQ ID NO: 39857 - DNA, 22 bp, synthetic construct
  misc_feature 1..22: note = chemically synthesized
  source 1..22: mol_type = other DNA
gcataactctctaaacaattca

SEQ ID NO: 39858 - DNA, 22 bp, synthetic construct
  misc_feature 1..22: note = chemically synthesized
  source 1..22: mol_type = other DNA
cataactctctaaacaattcag

SEQ ID NO: 39859 - DNA, 22 bp, synthetic construct
  misc_feature 1..22: note = chemically synthesized
  source 1..22: mol_type = other DNA
tctaaacaattcaggccaagta

SEQ ID NO: 39860 - DNA, 22 bp, synthetic construct
  misc_feature 1..22: note = chemically synthesized
  source 1..22: mol_type = other DNA
taaacaattcaggccaagtact

SEQ ID NO: 39861 - DNA, 22 bp, synthetic construct
  misc_feature 1..22: note = chemically synthesized
  source 1..22: mol_type = other DNA
aacaattcaggccaagtactat

SEQ ID NO: 39862 - DNA, 22 bp, synthetic construct
  misc_feature 1..22: note = chemically synthesized
  source 1..22: mol_type = other DNA
aggccaagtactatcagtgttc

SEQ ID NO: 39863 - DNA, 22 bp, synthetic construct
  misc_feature 1..22: note = chemically synthesized
  source 1..22: mol_type = other DNA
tcagtgttctccatactattag

SEQ ID NO: 39864 - DNA, 22 bp, synthetic construct
  misc_feature 1..22: note = chemically synthesized
  source 1..22: mol_type = other DNA
tccatactattagaagtagagt

SEQ ID NO: 39865 - DNA, 22 bp, synthetic construct
  misc_feature 1..22: note = chemically synthesized
  source 1..22: mol_type = other DNA
catactattagaagtagagtcc

SEQ ID NO: 39866 - DNA, 22 bp, synthetic construct
  misc_feature 1..22: note = chemically synthesized
  source 1..22: mol_type = other DNA
ttagaagtagagtccttagcat

SEQ ID NO: 39867 - DNA, 22 bp, synthetic construct
  misc_feature 1..22: note = chemically synthesized
  source 1..22: mol_type = other DNA
gaagtagagtccttagcatttt

SEQ ID NO: 39868 - DNA, 22 bp, synthetic construct
  misc_feature 1..22: note = chemically synthesized
  source 1..22: mol_type = other DNA
agcattttttggtctaatcata

SEQ ID NO: 39869 - DNA, 22 bp, synthetic construct
  misc_feature 1..22: note = chemically synthesized
  source 1..22: mol_type = other DNA
gcattttttggtctaatcatat

SEQ ID NO: 39870 - DNA, 22 bp, synthetic construct
  misc_feature 1..22: note = chemically synthesized
  source 1..22: mol_type = other DNA
tttggtctaatcatattaatca

SEQ ID NO: 39871 - DNA, 22 bp, synthetic construct
  misc_feature 1..22: note = chemically synthesized
  source 1..22: mol_type = other DNA
ttggtctaatcatattaatcag

SEQ ID NO: 39872 - DNA, 22 bp, synthetic construct
  misc_feature 1..22: note = chemically synthesized
  source 1..22: mol_type = other DNA
tggtctaatcatattaatcagc

SEQ ID NO: 39873 - DNA, 22 bp, synthetic construct
  misc_feature 1..22: note = chemically synthesized
  source 1..22: mol_type = other DNA
ggtctaatcatattaatcagcc

SEQ ID NO: 39874 - DNA, 22 bp, synthetic construct
  misc_feature 1..22: note = chemically synthesized
  source 1..22: mol_type = other DNA
gtctaatcatattaatcagcca

SEQ ID NO: 39875 - DNA, 22 bp, synthetic construct
  misc_feature 1..22: note = chemically synthesized
  source 1..22: mol_type = other DNA
atcatattaatcagccaacacc

SEQ ID NO: 39876 - DNA, 22 bp, synthetic construct
  misc_feature 1..22: note = chemically synthesized
  source 1..22: mol_type = other DNA
atcagccaacaccagaagtccc

SEQ ID NO: 39877 - DNA, 22 bp, synthetic construct
  misc_feature 1..22: note = chemically synthesized
  source 1..22: mol_type = other DNA
catccttaatattctgttcctc

SEQ ID NO: 39878 - DNA, 22 bp, synthetic construct
  misc_feature 1..22: note = chemically synthesized
  source 1..22: mol_type = other DNA
aatattctgttcctcaagaacc

SEQ ID NO: 39879 - DNA, 22 bp, synthetic construct
  misc_feature 1..22: note = chemically synthesized
  source 1..22: mol_type = other DNA
atattctgttcctcaagaacca

SEQ ID NO: 39880 - DNA, 22 bp, synthetic construct
  misc_feature 1..22: note = chemically synthesized
  source 1..22: mol_type = other DNA
tgttcctcaagaaccacttctg

SEQ ID NO: 39881 - DNA, 22 bp, synthetic construct
  misc_feature 1..22: note = chemically synthesized
  source 1..22: mol_type = other DNA
ttcctcaagaaccacttctggt

SEQ ID NO: 39882 - DNA, 22 bp, synthetic construct
  misc_feature 1..22: note = chemically synthesized
  source 1..22: mol_type = other DNA
ctcaagaaccacttctggtatg

SEQ ID NO: 39883 - DNA, 22 bp, synthetic construct
  misc_feature 1..22: note = chemically synthesized
  source 1..22: mol_type = other DNA
aagaaccacttctggtatgaaa

SEQ ID NO: 39884 - DNA, 22 bp, synthetic construct
  misc_feature 1..22: note = chemically synthesized
  source 1..22: mol_type = other DNA
ctggtatgaaaatctgtattag

SEQ ID NO: 39885 - DNA, 22 bp, synthetic construct
  misc_feature 1..22: note = chemically synthesized
  source 1..22: mol_type = other DNA
tggtatgaaaatctgtattagt

SEQ ID NO: 39886 - DNA, 22 bp, synthetic construct
  misc_feature 1..22: note = chemically synthesized
  source 1..22: mol_type = other DNA
gtatgaaaatctgtattagtcg

SEQ ID NO: 39887 - DNA, 22 bp, synthetic construct
  misc_feature 1..22: note = chemically synthesized
  source 1..22: mol_type = other DNA
tattagtcggggttctctagag

SEQ ID NO: 39888 - DNA, 22 bp, synthetic construct
  misc_feature 1..22: note = chemically synthesized
  source 1..22: mol_type = other DNA
gtcggggttctctagagggaca

SEQ ID NO: 39889 - DNA, 22 bp, synthetic construct
  misc_feature 1..22: note = chemically synthesized
  source 1..22: mol_type = other DNA
tctagagggacagaactaatag

SEQ ID NO: 39890 - DNA, 22 bp, synthetic construct
  misc_feature 1..22: note = chemically synthesized
  source 1..22: mol_type = other DNA
tagagggacagaactaatagga

SEQ ID NO: 39891 - DNA, 22 bp, synthetic construct
  misc_feature 1..22: note = chemically synthesized
  source 1..22: mol_type = other DNA
gagggacagaactaataggaga

SEQ ID NO: 39892 - DNA, 22 bp, synthetic construct
  misc_feature 1..22: note = chemically synthesized
  source 1..22: mol_type = other DNA
ataggagattatatatatatat

SEQ ID NO: 39893 - DNA, 22 bp, synthetic construct
  misc_feature 1..22: note = chemically synthesized
  source 1..22: mol_type = other DNA
tatatatatatatatgagagag

SEQ ID NO: 39894 - DNA, 22 bp, synthetic construct
  misc_feature 1..22: note = chemically synthesized
  source 1..22: mol_type = other DNA
tatctatctatagatatagata

SEQ ID NO: 39895 - DNA, 22 bp, synthetic construct
  misc_feature 1..22: note = chemically synthesized
  source 1..22: mol_type = other DNA
tctatagatatagatatactca

SEQ ID NO: 39896 - DNA, 22 bp, synthetic construct
  misc_feature 1..22: note = chemically synthesized
  source 1..22: mol_type = other DNA
tagatatagatatactcacaca

SEQ ID NO: 39897 - DNA, 22 bp, synthetic construct
  misc_feature 1..22: note = chemically synthesized
  source 1..22: mol_type = other DNA
acacaaaggggagcttattaag

SEQ ID NO: 39898 - DNA, 22 bp, synthetic construct
  misc_feature 1..22: note = chemically synthesized
  source 1..22: mol_type = other DNA
attaagtggtattaactcacaa

SEQ ID NO: 39899 - DNA, 22 bp, synthetic construct
  misc_feature 1..22: note = chemically synthesized
  source 1..22: mol_type = other DNA
ttaagtggtattaactcacaag

SEQ ID NO: 39900 - DNA, 22 bp, synthetic construct
  misc_feature 1..22: note = chemically synthesized
  source 1..22: mol_type = other DNA
agtggtattaactcacaagatt

SEQ ID NO: 39901 - DNA, 22 bp, synthetic construct
  misc_feature 1..22: note = chemically synthesized
  source 1..22: mol_type = other DNA
actcacaagattacaaggtccc

SEQ ID NO: 39902 - DNA, 22 bp, synthetic construct
  misc_feature 1..22: note = chemically synthesized
  source 1..22: mol_type = other DNA
acaagattacaaggtcccataa

SEQ ID NO: 39903 - DNA, 22 bp, synthetic construct
  misc_feature 1..22: note = chemically synthesized
  source 1..22: mol_type = other DNA
caaggtcccataataggccacc

SEQ ID NO: 39904 - DNA, 22 bp, synthetic construct
  misc_feature 1..22: note = chemically synthesized
  source 1..22: mol_type = other DNA
caatctgaggagcaaggaagac

SEQ ID NO: 39905 - DNA, 22 bp, synthetic construct
  misc_feature 1..22: note = chemically synthesized
  source 1..22: mol_type = other DNA
aggagcaaggaagacagtccaa

SEQ ID NO: 39906 - DNA, 22 bp, synthetic construct
  misc_feature 1..22: note = chemically synthesized
  source 1..22: mol_type = other DNA
aagaacttggagtccgatgttc

SEQ ID NO: 39907 - DNA, 22 bp, synthetic construct
  misc_feature 1..22: note = chemically synthesized
  source 1..22: mol_type = other DNA
ggagtccgatgttcaagagcag

SEQ ID NO: 39908 - DNA, 22 bp, synthetic construct
  misc_feature 1..22: note = chemically synthesized
  source 1..22: mol_type = other DNA
gagtccgatgttcaagagcagg

SEQ ID NO: 39909 - DNA, 22 bp, synthetic construct
  misc_feature 1..22: note = chemically synthesized
  source 1..22: mol_type = other DNA
aagagcaggaaggatccagcac

SEQ ID NO: 39910 - DNA, 22 bp, synthetic construct
  misc_feature 1..22: note = chemically synthesized
  source 1..22: mol_type = other DNA
ggaggctaagccagtctagcct

SEQ ID NO: 39911 - DNA, 22 bp, synthetic construct
  misc_feature 1..22: note = chemically synthesized
  source 1..22: mol_type = other DNA
agccagtctagcctttttacat

SEQ ID NO: 39912 - DNA, 22 bp, synthetic construct
  misc_feature 1..22: note = chemically synthesized
  source 1..22: mol_type = other DNA
gcctttttacatttttctgcca

SEQ ID NO: 39913 - DNA, 22 bp, synthetic construct
  misc_feature 1..22: note = chemically synthesized
  source 1..22: mol_type = other DNA
tttacatttttctgccagcttt

SEQ ID NO: 39914 - DNA, 22 bp, synthetic construct
  misc_feature 1..22: note = chemically synthesized
  source 1..22: mol_type = other DNA
ttacatttttctgccagcttta

SEQ ID NO: 39915 - DNA, 22 bp, synthetic construct
  misc_feature 1..22: note = chemically synthesized
  source 1..22: mol_type = other DNA
tacatttttctgccagctttat

SEQ ID NO: 39916 - DNA, 22 bp, synthetic construct
  misc_feature 1..22: note = chemically synthesized
  source 1..22: mol_type = other DNA
acatttttctgccagctttata

SEQ ID NO: 39917 - DNA, 22 bp, synthetic construct
  misc_feature 1..22: note = chemically synthesized
  source 1..22: mol_type = other DNA
catttttctgccagctttatat

SEQ ID NO: 39918 - DNA, 22 bp, synthetic construct
  misc_feature 1..22: note = chemically synthesized
  source 1..22: mol_type = other DNA
ttctgccagctttatattctgg

SEQ ID NO: 39919 - DNA, 22 bp, synthetic construct
  misc_feature 1..22: note = chemically synthesized
  source 1..22: mol_type = other DNA
tctgccagctttatattctggc

SEQ ID NO: 39920 - DNA, 22 bp, synthetic construct
  misc_feature 1..22: note = chemically synthesized
  source 1..22: mol_type = other DNA
ctgccagctttatattctggct

SEQ ID NO: 39921 - DNA, 22 bp, synthetic construct
  misc_feature 1..22: note = chemically synthesized
  source 1..22: mol_type = other DNA
tgccagctttatattctggctc

SEQ ID NO: 39922 - DNA, 22 bp, synthetic construct
  misc_feature 1..22: note = chemically synthesized
  source 1..22: mol_type = other DNA
ccagctttatattctggctcta

SEQ ID NO: 39923 - DNA, 22 bp, synthetic construct
  misc_feature 1..22: note = chemically synthesized
  source 1..22: mol_type = other DNA
tatattctggctctacagcttg

SEQ ID NO: 39924 - DNA, 22 bp, synthetic construct
  misc_feature 1..22: note = chemically synthesized
  source 1..22: mol_type = other DNA
atattctggctctacagcttgg

SEQ ID NO: 39925 - DNA, 22 bp, synthetic construct
  misc_feature 1..22: note = chemically synthesized
  source 1..22: mol_type = other DNA
tattctggctctacagcttggg

SEQ ID NO: 39926 - DNA, 22 bp, synthetic construct
  misc_feature 1..22: note = chemically synthesized
  source 1..22: mol_type = other DNA
tggctctacagcttgggggcag

SEQ ID NO: 39927 - DNA, 22 bp, synthetic construct
  misc_feature 1..22: note = chemically synthesized
  source 1..22: mol_type = other DNA
gctctacagcttgggggcagca

SEQ ID NO: 39928 - DNA, 22 bp, synthetic construct
  misc_feature 1..22: note = chemically synthesized
  source 1..22: mol_type = other DNA
tacagcttgggggcagcagggg

SEQ ID NO: 39929 - DNA, 22 bp, synthetic construct
  misc_feature 1..22: note = chemically synthesized
  source 1..22: mol_type = other DNA
cagcttgggggcagcaggggca

SEQ ID NO: 39930 - DNA, 22 bp, synthetic construct
  misc_feature 1..22: note = chemically synthesized
  source 1..22: mol_type = other DNA
gggggcagcaggggcaggggcc

SEQ ID NO: 39931 - DNA, 22 bp, synthetic construct
  misc_feature 1..22: note = chemically synthesized
  source 1..22: mol_type = other DNA
ggggcagcaggggcaggggcct

SEQ ID NO: 39932 - DNA, 22 bp, synthetic construct
  misc_feature 1..22: note = chemically synthesized
  source 1..22: mol_type = other DNA
agggtgcttgcagggatgacac

SEQ ID NO: 39933 - DNA, 22 bp, synthetic construct
  misc_feature 1..22: note = chemically synthesized
  source 1..22: mol_type = other DNA
gcagggatgacacactggcctc

SEQ ID NO: 39934 - DNA, 22 bp, synthetic construct
  misc_feature 1..22: note = chemically synthesized
  source 1..22: mol_type = other DNA
cagggatgacacactggcctct

SEQ ID NO: 39935 - DNA, 22 bp, synthetic construct
  misc_feature 1..22: note = chemically synthesized
  source 1..22: mol_type = other DNA
gcctcttttccatagggtggct

SEQ ID NO: 39936 - DNA, 22 bp, synthetic construct
  misc_feature 1..22: note = chemically synthesized
  source 1..22: mol_type = other DNA
ttttccatagggtggctggggc

SEQ ID NO: 39937 - DNA, 22 bp, synthetic construct
  misc_feature 1..22: note = chemically synthesized
  source 1..22: mol_type = other DNA
ttccatagggtggctggggcac

SEQ ID NO: 39938 - DNA, 22 bp, synthetic construct
  misc_feature 1..22: note = chemically synthesized
  source 1..22: mol_type = other DNA
tccatagggtggctggggcaca

SEQ ID NO: 39939 - DNA, 22 bp, synthetic construct
  misc_feature 1..22: note = chemically synthesized
  source 1..22: mol_type = other DNA
ccatagggtggctggggcacac

SEQ ID NO: 39940 - DNA, 22 bp, synthetic construct
  misc_feature 1..22: note = chemically synthesized
  source 1..22: mol_type = other DNA
catagggtggctggggcacact

SEQ ID NO: 39941 - DNA, 22 bp, synthetic construct
  misc_feature 1..22: note = chemically synthesized
  source 1..22: mol_type = other DNA
gggcacactggggtgtgagtaa

SEQ ID NO: 39942 - DNA, 22 bp, synthetic construct
  misc_feature 1..22: note = chemically synthesized
  source 1..22: mol_type = other DNA
gggtgtgagtaaagcactcagg

SEQ ID NO: 39943 - DNA, 22 bp, synthetic construct
  misc_feature 1..22: note = chemically synthesized
  source 1..22: mol_type = other DNA
aggatcttttttccttccctag

SEQ ID NO: 39944 - DNA, 22 bp, synthetic construct
  misc_feature 1..22: note = chemically synthesized
  source 1..22: mol_type = other DNA
ttttccttccctagtccaagta

SEQ ID NO: 39945 - DNA, 22 bp, synthetic construct
  misc_feature 1..22: note = chemically synthesized
  source 1..22: mol_type = other DNA
tttccttccctagtccaagtac

SEQ ID NO: 39946 - DNA, 22 bp, synthetic construct
  misc_feature 1..22: note = chemically synthesized
  source 1..22: mol_type = other DNA
ttccttccctagtccaagtaca

SEQ ID NO: 39947 - DNA, 22 bp, synthetic construct
  misc_feature 1..22: note = chemically synthesized
  source 1..22: mol_type = other DNA
tccttccctagtccaagtacag

SEQ ID NO: 39948 - DNA, 22 bp, synthetic construct
  misc_feature 1..22: note = chemically synthesized
  source 1..22: mol_type = other DNA
ccttccctagtccaagtacagc

SEQ ID NO: 39949 - DNA, 22 bp, synthetic construct
  misc_feature 1..22: note = chemically synthesized
  source 1..22: mol_type = other DNA
cttccctagtccaagtacagca

SEQ ID NO: 39950 - DNA, 22 bp, synthetic construct
  misc_feature 1..22: note = chemically synthesized
  source 1..22: mol_type = other DNA
ccctagtccaagtacagcaagg

SEQ ID NO: 39951 - DNA, 22 bp, synthetic construct
  misc_feature 1..22: note = chemically synthesized
  source 1..22: mol_type = other DNA
cctagtccaagtacagcaaggg

SEQ ID NO: 39952 - DNA, 22 bp, synthetic construct
  misc_feature 1..22: note = chemically synthesized
  source 1..22: mol_type = other DNA
gtccaagtacagcaagggcagt

SEQ ID NO: 39953 - DNA, 22 bp, synthetic construct
  misc_feature 1..22: note = chemically synthesized
  source 1..22: mol_type = other DNA
cagtgttagtggcagaaggact

SEQ ID NO: 39954 - DNA, 22 bp, synthetic construct
  misc_feature 1..22: note = chemically synthesized
  source 1..22: mol_type = other DNA
gtggcagaaggactttcagtca

SEQ ID NO: 39955 - DNA, 22 bp, synthetic construct
  misc_feature 1..22: note = chemically synthesized
  source 1..22: mol_type = other DNA
tcagtcacctctgggagcttca

SEQ ID NO: 39956 - DNA, 22 bp, synthetic construct
  misc_feature 1..22: note = chemically synthesized
  source 1..22: mol_type = other DNA
cagtcacctctgggagcttcac

SEQ ID NO: 39957 - DNA, 22 bp, synthetic construct
  misc_feature 1..22: note = chemically synthesized
  source 1..22: mol_type = other DNA
agtcacctctgggagcttcacc

SEQ ID NO: 39958 - DNA, 22 bp, synthetic construct
  misc_feature 1..22: note = chemically synthesized
  source 1..22: mol_type = other DNA
tgggagcttcaccccacaaaaa

SEQ ID NO: 39959 - DNA, 22 bp, synthetic construct
  misc_feature 1..22: note = chemically synthesized
  source 1..22: mol_type = other DNA
ggagcttcaccccacaaaaaca

SEQ ID NO: 39960 - DNA, 22 bp, synthetic construct
  misc_feature 1..22: note = chemically synthesized
  source 1..22: mol_type = other DNA
caccccacaaaaacacagagtg

SEQ ID NO: 39961 - DNA, 22 bp, synthetic construct
  misc_feature 1..22: note = chemically synthesized
  source 1..22: mol_type = other DNA
accccacaaaaacacagagtgc

SEQ ID NO: 39962 - DNA, 22 bp, synthetic construct
  misc_feature 1..22: note = chemically synthesized
  source 1..22: mol_type = other DNA
aactgagttcgaggtgcctgca

SEQ ID NO: 39963 - DNA, 22 bp, synthetic construct
  misc_feature 1..22: note = chemically synthesized
  source 1..22: mol_type = other DNA
agttcgaggtgcctgcactgtg

SEQ ID NO: 39964 - DNA, 22 bp, synthetic construct
  misc_feature 1..22: note = chemically synthesized
  source 1..22: mol_type = other DNA
gaggtgcctgcactgtgggccc

SEQ ID NO: 39965 - DNA, 22 bp, synthetic construct
  misc_feature 1..22: note = chemically synthesized
  source 1..22: mol_type = other DNA
cactgtgggcccaagccaggag

SEQ ID NO: 39966 - DNA, 22 bp, synthetic construct
  misc_feature 1..22: note = chemically synthesized
  source 1..22: mol_type = other DNA
tgggcccaagccaggagccttg

SEQ ID NO: 39967 - DNA, 22 bp, synthetic construct
  misc_feature 1..22: note = chemically synthesized
  source 1..22: mol_type = other DNA
gcctggtgaagagtagcaggtg

SEQ ID NO: 39968 - DNA, 22 bp, synthetic construct
  misc_feature 1..22: note = chemically synthesized
  source 1..22: mol_type = other DNA
cctggtgaagagtagcaggtga

SEQ ID NO: 39969 - DNA, 22 bp, synthetic construct
  misc_feature 1..22: note = chemically synthesized
  source 1..22: mol_type = other DNA
gtgaagagtagcaggtgaaagc

SEQ ID NO: 39970 - DNA, 22 bp, synthetic construct
  misc_feature 1..22: note = chemically synthesized
  source 1..22: mol_type = other DNA
acaagaaagagaaactggaatt

SEQ ID NO: 39971 - DNA, 22 bp, synthetic construct
  misc_feature 1..22: note = chemically synthesized
  source 1..22: mol_type = other DNA
gaattctttccctgctgtgtgc

SEQ ID NO: 39972 - DNA, 22 bp, synthetic construct
  misc_feature 1..22: note = chemically synthesized
  source 1..22: mol_type = other DNA
tttccctgctgtgtgctggagg

SEQ ID NO: 39973 - DNA, 22 bp, synthetic construct
  misc_feature 1..22: note = chemically synthesized
  source 1..22: mol_type = other DNA
tccctgctgtgtgctggaggtg

SEQ ID NO: 39974 - DNA, 22 bp, synthetic construct
  misc_feature 1..22: note = chemically synthesized
  source 1..22: mol_type = other DNA
ccctgctgtgtgctggaggtgt

SEQ ID NO: 39975 - DNA, 22 bp, synthetic construct
  misc_feature 1..22: note = chemically synthesized
  source 1..22: mol_type = other DNA
cctgctgtgtgctggaggtgtc

SEQ ID NO: 39976 - DNA, 22 bp, synthetic construct
  misc_feature 1..22: note = chemically synthesized
  source 1..22: mol_type = other DNA
ctgtgtgctggaggtgtcaggg

SEQ ID NO: 39977 - DNA, 22 bp, synthetic construct
  misc_feature 1..22: note = chemically synthesized
  source 1..22: mol_type = other DNA
tgtgctggaggtgtcagggaag

SEQ ID NO: 39978 - DNA, 22 bp, synthetic construct
  misc_feature 1..22: note = chemically synthesized
  source 1..22: mol_type = other DNA
gaggtgtcagggaagtggccag

SEQ ID NO: 39979 - DNA, 22 bp, synthetic construct
  misc_feature 1..22: note = chemically synthesized
  source 1..22: mol_type = other DNA
ctttctcaagcccaagggcatt

SEQ ID NO: 39980 - DNA, 22 bp, synthetic construct
  misc_feature 1..22: note = chemically synthesized
  source 1..22: mol_type = other DNA
tttctcaagcccaagggcatta

SEQ ID NO: 39981 - DNA, 22 bp, synthetic construct
  misc_feature 1..22: note = chemically synthesized
  source 1..22: mol_type = other DNA
tctcaagcccaagggcattaac

SEQ ID NO: 39982 - DNA, 22 bp, synthetic construct
  misc_feature 1..22: note = chemically synthesized
  source 1..22: mol_type = other DNA
ctcaagcccaagggcattaacg

SEQ ID NO: 39983 - DNA, 22 bp, synthetic construct
  misc_feature 1..22: note = chemically synthesized
  source 1..22: mol_type = other DNA
tcaagcccaagggcattaacgg

SEQ ID NO: 39984 - DNA, 22 bp, synthetic construct
  misc_feature 1..22: note = chemically synthesized
  source 1..22: mol_type = other DNA
aagcccaagggcattaacggtg

SEQ ID NO: 39985 - DNA, 22 bp, synthetic construct
  misc_feature 1..22: note = chemically synthesized
  source 1..22: mol_type = other DNA
acggtggtactgctgcagctga

SEQ ID NO: 39986 - DNA, 22 bp, synthetic construct
  misc_feature 1..22: note = chemically synthesized
  source 1..22: mol_type = other DNA
ctgcagctgaaatggcagaggg

SEQ ID NO: 39987 - DNA, 22 bp, synthetic construct
  misc_feature 1..22: note = chemically synthesized
  source 1..22: mol_type = other DNA
cagctgaaatggcagaggggct

SEQ ID NO: 39988 - DNA, 22 bp, synthetic construct
  misc_feature 1..22: note = chemically synthesized
  source 1..22: mol_type = other DNA
aaatggcagaggggctgtgggt

SEQ ID NO: 39989 - DNA, 22 bp, synthetic construct
  misc_feature 1..22: note = chemically synthesized
  source 1..22: mol_type = other DNA
tgggttgtctcttggatttcct

SEQ ID NO: 39990 - DNA, 22 bp, synthetic construct
  misc_feature 1..22: note = chemically synthesized
  source 1..22: mol_type = other DNA
tctcttggatttcctccccaga

SEQ ID NO: 39991 - DNA, 22 bp, synthetic construct
  misc_feature 1..22: note = chemically synthesized
  source 1..22: mol_type = other DNA
ttggatttcctccccagagaag

SEQ ID NO: 39992 - DNA, 22 bp, synthetic construct
  misc_feature 1..22: note = chemically synthesized
  source 1..22: mol_type = other DNA
ggatttcctccccagagaagca

SEQ ID NO: 39993 - DNA, 22 bp, synthetic construct
  misc_feature 1..22: note = chemically synthesized
  source 1..22: mol_type = other DNA
gatttcctccccagagaagcac

SEQ ID NO: 39994 - DNA, 22 bp, synthetic construct
  misc_feature 1..22: note = chemically synthesized
  source 1..22: mol_type = other DNA
cctccccagagaagcacagagc

SEQ ID NO: 39995 - DNA, 22 bp, synthetic construct
  misc_feature 1..22: note = chemically synthesized
  source 1..22: mol_type = other DNA
ctccccagagaagcacagagcc

SEQ ID NO: 39996 - DNA, 22 bp, synthetic construct
  misc_feature 1..22: note = chemically synthesized
  source 1..22: mol_type = other DNA
cccagagaagcacagagccaac

SEQ ID NO: 39997 - DNA, 22 bp, synthetic construct
  misc_feature 1..22: note = chemically synthesized
  source 1..22: mol_type = other DNA
actaaaatgttcaggcagggcc

SEQ ID NO: 39998 - DNA, 22 bp, synthetic construct
  misc_feature 1..22: note = chemically synthesized
  source 1..22: mol_type = other DNA
aaatgttcaggcagggccaggg

SEQ ID NO: 39999 - DNA, 22 bp, synthetic construct
  misc_feature 1..22: note = chemically synthesized
  source 1..22: mol_type = other DNA
aggcagggccagggtggctgtg

SEQ ID NO: 40000 - DNA, 22 bp, synthetic construct
  misc_feature 1..22: note = chemically synthesized
  source 1..22: mol_type = other DNA
tgctctgcccagtgaggaatag

SEQ ID NO: 40001 - DNA, 22 bp, synthetic construct
  misc_feature 1..22: note = chemically synthesized
  source 1..22: mol_type = other DNA
tgcccagtgaggaatagtaggg

SEQ ID NO: 40002 - DNA, 22 bp, synthetic construct
  misc_feature 1..22: note = chemically synthesized
  source 1..22: mol_type = other DNA
cccagtgaggaatagtaggggc

SEQ ID NO: 40003 - DNA, 22 bp, synthetic construct
  misc_feature 1..22: note = chemically synthesized
  source 1..22: mol_type = other DNA
ttccataaggcagctacactgt

SEQ ID NO: 40004 - DNA, 22 bp, synthetic construct
  misc_feature 1..22: note = chemically synthesized
  source 1..22: mol_type = other DNA
tccataaggcagctacactgtg

SEQ ID NO: 40005 - DNA, 22 bp, synthetic construct
  misc_feature 1..22: note = chemically synthesized
  source 1..22: mol_type = other DNA
ccataaggcagctacactgtgc

SEQ ID NO: 40006 - DNA, 22 bp, synthetic construct
  misc_feature 1..22: note = chemically synthesized
  source 1..22: mol_type = other DNA
cataaggcagctacactgtgct

SEQ ID NO: 40007 - DNA, 22 bp, synthetic construct
  misc_feature 1..22: note = chemically synthesized
  source 1..22: mol_type = other DNA
cactgtgctggaggtccgtgag

SEQ ID NO: 40008 - DNA, 22 bp, synthetic construct
  misc_feature 1..22: note = chemically synthesized
  source 1..22: mol_type = other DNA
tgctggaggtccgtgagagtcc

SEQ ID NO: 40009 - DNA, 22 bp, synthetic construct
  misc_feature 1..22: note = chemically synthesized
  source 1..22: mol_type = other DNA
gaggtccgtgagagtcctgaag

SEQ ID NO: 40010 - DNA, 22 bp, synthetic construct
  misc_feature 1..22: note = chemically synthesized
  source 1..22: mol_type = other DNA
aagctcctcgctccctcctgag

SEQ ID NO: 40011 - DNA, 22 bp, synthetic construct
  misc_feature 1..22: note = chemically synthesized
  source 1..22: mol_type = other DNA
ctcgctccctcctgagcccata

SEQ ID NO: 40012 - DNA, 22 bp, synthetic construct
  misc_feature 1..22: note = chemically synthesized
  source 1..22: mol_type = other DNA
gctccctcctgagcccatactt

SEQ ID NO: 40013 - DNA, 22 bp, synthetic construct
  misc_feature 1..22: note = chemically synthesized
  source 1..22: mol_type = other DNA
cctcctgagcccatactttaat

SEQ ID NO: 40014 - DNA, 22 bp, synthetic construct
  misc_feature 1..22: note = chemically synthesized
  source 1..22: mol_type = other DNA
ctgagcccatactttaatctca

SEQ ID NO: 40015 - DNA, 22 bp, synthetic construct
  misc_feature 1..22: note = chemically synthesized
  source 1..22: mol_type = other DNA
agcccatactttaatctcaaga

SEQ ID NO: 40016 - DNA, 22 bp, synthetic construct
  misc_feature 1..22: note = chemically synthesized
  source 1..22: mol_type = other DNA
taatctcaagagtttgagataa

SEQ ID NO: 40017 - DNA, 22 bp, synthetic construct
  misc_feature 1..22: note = chemically synthesized
  source 1..22: mol_type = other DNA
aatctcaagagtttgagataaa

SEQ ID NO: 40018 - DNA, 22 bp, synthetic construct
  misc_feature 1..22: note = chemically synthesized
  source 1..22: mol_type = other DNA
atctcaagagtttgagataaac

SEQ ID NO: 40019 - DNA, 22 bp, synthetic construct
  misc_feature 1..22: note = chemically synthesized
  source 1..22: mol_type = other DNA
aagagtttgagataaacagtgg

SEQ ID NO: 40020 - DNA, 22 bp, synthetic construct
  misc_feature 1..22: note = chemically synthesized
  source 1..22: mol_type = other DNA
gagataaacagtggtaaggaag

SEQ ID NO: 40021 - DNA, 22 bp, synthetic construct
  misc_feature 1..22: note = chemically synthesized
  source 1..22: mol_type = other DNA
agataaacagtggtaaggaaga

SEQ ID NO: 40022 - DNA, 22 bp, synthetic construct
  misc_feature 1..22: note = chemically synthesized
  source 1..22: mol_type = other DNA
atgaaacccaggaagataagtc

SEQ ID NO: 40023 - DNA, 22 bp, synthetic construct
  misc_feature 1..22: note = chemically synthesized
  source 1..22: mol_type = other DNA
caacctaaagaaatacttttta

SEQ ID NO: 40024 - DNA, 22 bp, synthetic construct
  misc_feature 1..22: note = chemically synthesized
  source 1..22: mol_type = other DNA
aagaaatactttttaaaaatca

SEQ ID NO: 40025 - DNA, 22 bp, synthetic construct
  misc_feature 1..22: note = chemically synthesized
  source 1..22: mol_type = other DNA
tttaaaaatcatatttatagag

SEQ ID NO: 40026 - DNA, 22 bp, synthetic construct
  misc_feature 1..22: note = chemically synthesized
  source 1..22: mol_type = other DNA
ttaaaaatcatatttatagagg

SEQ ID NO: 40027 - DNA, 22 bp, synthetic construct
  misc_feature 1..22: note = chemically synthesized
  source 1..22: mol_type = other DNA
taaaaatcatatttatagaggt

SEQ ID NO: 40028 - DNA, 22 bp, synthetic construct
  misc_feature 1..22: note = chemically synthesized
  source 1..22: mol_type = other DNA
aaaaatcatatttatagaggtt

SEQ ID NO: 40029 - DNA, 22 bp, synthetic construct
  misc_feature 1..22: note = chemically synthesized
  source 1..22: mol_type = other DNA
aaaatcatatttatagaggttt

SEQ ID NO: 40030 - DNA, 22 bp, synthetic construct
  misc_feature 1..22: note = chemically synthesized
  source 1..22: mol_type = other DNA
atagaggtttgcagtgatacta

SEQ ID NO: 40031 - DNA, 22 bp, synthetic construct
  misc_feature 1..22: note = chemically synthesized
  source 1..22: mol_type = other DNA
tagaggtttgcagtgatactaa

SEQ ID NO: 40032 - DNA, 22 bp, synthetic construct
  misc_feature 1..22: note = chemically synthesized
  source 1..22: mol_type = other DNA
gcagtgatactaaagacaatat

SEQ ID NO: 40033 - DNA, 22 bp, synthetic construct
  misc_feature 1..22: note = chemically synthesized
  source 1..22: mol_type = other DNA
cagtgatactaaagacaatatt

SEQ ID NO: 40034 - DNA, 22 bp, synthetic construct
  misc_feature 1..22: note = chemically synthesized
  source 1..22: mol_type = other DNA
aagacaatattgcaaatcatta

SEQ ID NO: 40035 - DNA, 22 bp, synthetic construct
  misc_feature 1..22: note = chemically synthesized
  source 1..22: mol_type = other DNA
caaatcattattaagaatacaa

SEQ ID NO: 40036 - DNA, 22 bp, synthetic construct
  misc_feature 1..22: note = chemically synthesized
  source 1..22: mol_type = other DNA
ttaagaatacaagaagtacaat

SEQ ID NO: 40037 - DNA, 22 bp, synthetic construct
  misc_feature 1..22: note = chemically synthesized
  source 1..22: mol_type = other DNA
agaatacaagaagtacaatgtt

SEQ ID NO: 40038 - DNA, 22 bp, synthetic construct
  misc_feature 1..22: note = chemically synthesized
  source 1..22: mol_type = other DNA
cttgtttctttaacacctgtga

SEQ ID NO: 40039 - DNA, 22 bp, synthetic construct
  misc_feature 1..22: note = chemically synthesized
  source 1..22: mol_type = other DNA
ttgtttctttaacacctgtgat

SEQ ID NO: 40040 - DNA, 22 bp, synthetic construct
  misc_feature 1..22: note = chemically synthesized
  source 1..22: mol_type = other DNA
gtttctttaacacctgtgatac

SEQ ID NO: 40041 - DNA, 22 bp, synthetic construct
  misc_feature 1..22: note = chemically synthesized
  source 1..22: mol_type = other DNA
tttctttaacacctgtgataca

SEQ ID NO: 40042 - DNA, 22 bp, synthetic construct
  misc_feature 1..22: note = chemically synthesized
  source 1..22: mol_type = other DNA
ctttaacacctgtgatacaggt

SEQ ID NO: 40043 - DNA, 22 bp, synthetic construct
  misc_feature 1..22: note = chemically synthesized
  source 1..22: mol_type = other DNA
tttaacacctgtgatacaggtg

SEQ ID NO: 40044 - DNA, 22 bp, synthetic construct
  misc_feature 1..22: note = chemically synthesized
  source 1..22: mol_type = other DNA
taacacctgtgatacaggtgtt

SEQ ID NO: 40045 - DNA, 22 bp, synthetic construct
  misc_feature 1..22: note = chemically synthesized
  source 1..22: mol_type = other DNA
aacacctgtgatacaggtgttt

SEQ ID NO: 40046 - DNA, 22 bp, synthetic construct
  misc_feature 1..22: note = chemically synthesized
  source 1..22: mol_type = other DNA
acacctgtgatacaggtgtttg

SEQ ID NO: 40047 - DNA, 22 bp, synthetic construct
  misc_feature 1..22: note = chemically synthesized
  source 1..22: mol_type = other DNA
tgatacaggtgtttgatatgaa

SEQ ID NO: 40048 - DNA, 22 bp, synthetic construct
  misc_feature 1..22: note = chemically synthesized
  source 1..22: mol_type = other DNA
gatatgaattctacgtaatggc

SEQ ID NO: 40049 - DNA, 22 bp, synthetic construct
  misc_feature 1..22: note = chemically synthesized
  source 1..22: mol_type = other DNA
atatgaattctacgtaatggct

SEQ ID NO: 40050 - DNA, 22 bp, synthetic construct
  misc_feature 1..22: note = chemically synthesized
  source 1..22: mol_type = other DNA
tacgtaatggctgcattgcttc

SEQ ID NO: 40051 - DNA, 22 bp, synthetic construct
  misc_feature 1..22: note = chemically synthesized
  source 1..22: mol_type = other DNA
cgtaatggctgcattgcttctt

SEQ ID NO: 40052 - DNA, 22 bp, synthetic construct
  misc_feature 1..22: note = chemically synthesized
  source 1..22: mol_type = other DNA
cattgcttcttgccaccaccca

SEQ ID NO: 40053 - DNA, 22 bp, synthetic construct
  misc_feature 1..22: note = chemically synthesized
  source 1..22: mol_type = other DNA
cttcttgccaccacccaaagaa

SEQ ID NO: 40054 - DNA, 22 bp, synthetic construct
  misc_feature 1..22: note = chemically synthesized
  source 1..22: mol_type = other DNA
cttgccaccacccaaagaaggt

SEQ ID NO: 40055 - DNA, 22 bp, synthetic construct
  misc_feature 1..22: note = chemically synthesized
  source 1..22: mol_type = other DNA
ttgccaccacccaaagaaggtt

SEQ ID NO: 40056 - DNA, 22 bp, synthetic construct
  misc_feature 1..22: note = chemically synthesized
  source 1..22: mol_type = other DNA
gccaccacccaaagaaggttgt

SEQ ID NO: 40057 - DNA, 22 bp, synthetic construct
  misc_feature 1..22: note = chemically synthesized
  source 1..22: mol_type = other DNA
ccaccacccaaagaaggttgta

SEQ ID NO: 40058 - DNA, 22 bp, synthetic construct
  misc_feature 1..22: note = chemically synthesized
  source 1..22: mol_type = other DNA
tatagcactcagatgtatacta

SEQ ID NO: 40059 - DNA, 22 bp, synthetic construct
  misc_feature 1..22: note = chemically synthesized
  source 1..22: mol_type = other DNA
agatgtatactaactgcaaccg

SEQ ID NO: 40060 - DNA, 22 bp, synthetic construct
  misc_feature 1..22: note = chemically synthesized
  source 1..22: mol_type = other DNA
actgcaaccgtgtatctcttag

SEQ ID NO: 40061 - DNA, 22 bp, synthetic construct
  misc_feature 1..22: note = chemically synthesized
  source 1..22: mol_type = other DNA
caaccgtgtatctcttaggaat

SEQ ID NO: 40062 - DNA, 22 bp, synthetic construct
  misc_feature 1..22: note = chemically synthesized
  source 1..22: mol_type = other DNA
ttaggaatttctcctttgccct

SEQ ID NO: 40063 - DNA, 22 bp, synthetic construct
  misc_feature 1..22: note = chemically synthesized
  source 1..22: mol_type = other DNA
aggaatttctcctttgccctct

SEQ ID NO: 40064 - DNA, 22 bp, synthetic construct
  misc_feature 1..22: note = chemically synthesized
  source 1..22: mol_type = other DNA
ggaatttctcctttgccctctt

SEQ ID NO: 40065 - DNA, 22 bp, synthetic construct
  misc_feature 1..22: note = chemically synthesized
  source 1..22: mol_type = other DNA
ctcctttgccctcttccctccc

SEQ ID NO: 40066 - DNA, 22 bp, synthetic construct
  misc_feature 1..22: note = chemically synthesized
  source 1..22: mol_type = other DNA
tcctttgccctcttccctccct

SEQ ID NO: 40067 - DNA, 22 bp, synthetic construct
  misc_feature 1..22: note = chemically synthesized
  source 1..22: mol_type = other DNA
ctttgccctcttccctccctat

SEQ ID NO: 40068 - DNA, 22 bp, synthetic construct
  misc_feature 1..22: note = chemically synthesized
  source 1..22: mol_type = other DNA
tgccctcttccctccctatcag

SEQ ID NO: 40069 - DNA, 22 bp, synthetic construct
  misc_feature 1..22: note = chemically synthesized
  source 1..22: mol_type = other DNA
gccctcttccctccctatcagc

SEQ ID NO: 40070 - DNA, 22 bp, synthetic construct
  misc_feature 1..22: note = chemically synthesized
  source 1..22: mol_type = other DNA
ccctcttccctccctatcagca

SEQ ID NO: 40071 - DNA, 22 bp, synthetic construct
  misc_feature 1..22: note = chemically synthesized
  source 1..22: mol_type = other DNA
ttccctccctatcagcatgtat

SEQ ID NO: 40072 - DNA, 22 bp, synthetic construct
  misc_feature 1..22: note = chemically synthesized
  source 1..22: mol_type = other DNA
ccctccctatcagcatgtatct

SEQ ID NO: 40073 - DNA, 22 bp, synthetic construct
  misc_feature 1..22: note = chemically synthesized
  source 1..22: mol_type = other DNA
cctccctatcagcatgtatcta

SEQ ID NO: 40074 - DNA, 22 bp, synthetic construct
  misc_feature 1..22: note = chemically synthesized
  source 1..22: mol_type = other DNA
cctatcagcatgtatctagcag

SEQ ID NO: 40075 - DNA, 22 bp, synthetic construct
  misc_feature 1..22: note = chemically synthesized
  source 1..22: mol_type = other DNA
tcagcatgtatctagcagcatt

SEQ ID NO: 40076 - DNA, 22 bp, synthetic construct
  misc_feature 1..22: note = chemically synthesized
  source 1..22: mol_type = other DNA
gcagcattctgaaaagttaact

SEQ ID NO: 40077 - DNA, 22 bp, synthetic construct
  misc_feature 1..22: note = chemically synthesized
  source 1..22: mol_type = other DNA
tgaaaagttaactgcacagtga

SEQ ID NO: 40078 - DNA, 22 bp, synthetic construct
  misc_feature 1..22: note = chemically synthesized
  source 1..22: mol_type = other DNA
aaaagttaactgcacagtgagc

SEQ ID NO: 40079 - DNA, 22 bp, synthetic construct
  misc_feature 1..22: note = chemically synthesized
  source 1..22: mol_type = other DNA
actgcacagtgagcgactgctg

SEQ ID NO: 40080 - DNA, 22 bp, synthetic construct
  misc_feature 1..22: note = chemically synthesized
  source 1..22: mol_type = other DNA
cacagtgagcgactgctgggca

SEQ ID NO: 40081 - DNA, 22 bp, synthetic construct
  misc_feature 1..22: note = chemically synthesized
  source 1..22: mol_type = other DNA
ctgggcatcttaaggggcattc

SEQ ID NO: 40082 - DNA, 22 bp, synthetic construct
  misc_feature 1..22: note = chemically synthesized
  source 1..22: mol_type = other DNA
ggcatcttaaggggcattcttt

SEQ ID NO: 40083 - DNA, 22 bp, synthetic construct
  misc_feature 1..22: note = chemically synthesized
  source 1..22: mol_type = other DNA
aaggggcattcttttctaccta

SEQ ID NO: 40084 - DNA, 22 bp, synthetic construct
  misc_feature 1..22: note = chemically synthesized
  source 1..22: mol_type = other DNA
aggggcattcttttctacctag

SEQ ID NO: 40085 - DNA, 22 bp, synthetic construct
  misc_feature 1..22: note = chemically synthesized
  source 1..22: mol_type = other DNA
ttttctacctaggtattccccc

SEQ ID NO: 40086 - DNA, 22 bp, synthetic construct
  misc_feature 1..22: note = chemically synthesized
  source 1..22: mol_type = other DNA
ttctacctaggtattccccctc

SEQ ID NO: 40087 - DNA, 22 bp, synthetic construct
  misc_feature 1..22: note = chemically synthesized
  source 1..22: mol_type = other DNA
tctacctaggtattccccctcc

SEQ ID NO: 40088 - DNA, 22 bp, synthetic construct
  misc_feature 1..22: note = chemically synthesized
  source 1..22: mol_type = other DNA
ctacctaggtattccccctcct

SEQ ID NO: 40089 - DNA, 22 bp, synthetic construct
  misc_feature 1..22: note = chemically synthesized
  source 1..22: mol_type = other DNA
tacctaggtattccccctcctc

SEQ ID NO: 40090 - DNA, 22 bp, synthetic construct
  misc_feature 1..22: note = chemically synthesized
  source 1..22: mol_type = other DNA
cctaggtattccccctcctcca

SEQ ID NO: 40091 - DNA, 22 bp, synthetic construct
  misc_feature 1..22: note = chemically synthesized
  source 1..22: mol_type = other DNA
ggtattccccctcctccactca

SEQ ID NO: 40092 - DNA, 22 bp, synthetic construct
  misc_feature 1..22: note = chemically synthesized
  source 1..22: mol_type = other DNA
cccctcctccactcatgtctag

SEQ ID NO: 40093 - DNA, 22 bp, synthetic construct
  misc_feature 1..22: note = chemically synthesized
  source 1..22: mol_type = other DNA
ctccactcatgtctagcatgca

SEQ ID NO: 40094 - DNA, 22 bp, synthetic construct
  misc_feature 1..22: note = chemically synthesized
  source 1..22: mol_type = other DNA
cactcatgtctagcatgcagga

SEQ ID NO: 40095 - DNA, 22 bp, synthetic construct
  misc_feature 1..22: note = chemically synthesized
  source 1..22: mol_type = other DNA
atgtctagcatgcaggacttgg

SEQ ID NO: 40096 - DNA, 22 bp, synthetic construct
  misc_feature 1..22: note = chemically synthesized
  source 1..22: mol_type = other DNA
gcatgcaggacttgggtaatct

SEQ ID NO: 40097 - DNA, 22 bp, synthetic construct
  misc_feature 1..22: note = chemically synthesized
  source 1..22: mol_type = other DNA
gggtaatctctggggtttcaga

SEQ ID NO: 40098 - DNA, 22 bp, synthetic construct
  misc_feature 1..22: note = chemically synthesized
  source 1..22: mol_type = other DNA
ggtaatctctggggtttcagat

SEQ ID NO: 40099 - DNA, 22 bp, synthetic construct
  misc_feature 1..22: note = chemically synthesized
  source 1..22: mol_type = other DNA
tggggtttcagattctccagac

SEQ ID NO: 40100 - DNA, 22 bp, synthetic construct
  misc_feature 1..22: note = chemically synthesized
  source 1..22: mol_type = other DNA
gggtttcagattctccagacct

SEQ ID NO: 40101 - DNA, 22 bp, synthetic construct
  misc_feature 1..22: note = chemically synthesized
  source 1..22: mol_type = other DNA
cagattctccagacctccattc

SEQ ID NO: 40102 - DNA, 22 bp, synthetic construct
  misc_feature 1..22: note = chemically synthesized
  source 1..22: mol_type = other DNA
agattctccagacctccattct

SEQ ID NO: 40103 - DNA, 22 bp, synthetic construct
  misc_feature 1..22: note = chemically synthesized
  source 1..22: mol_type = other DNA
tccagacctccattctctcagg

SEQ ID NO: 40104 - DNA, 22 bp, synthetic construct
  misc_feature 1..22: note = chemically synthesized
  source 1..22: mol_type = other DNA
cagacctccattctctcagggg

SEQ ID NO: 40105 - DNA, 22 bp, synthetic construct
  misc_feature 1..22: note = chemically synthesized
  source 1..22: mol_type = other DNA
cattctctcaggggcttccacc

SEQ ID NO: 40106 - DNA, 22 bp, synthetic construct
  misc_feature 1..22: note = chemically synthesized
  source 1..22: mol_type = other DNA
tctcaggggcttccacctcctg

SEQ ID NO: 40107 - DNA, 22 bp, synthetic construct
  misc_feature 1..22: note = chemically synthesized
  source 1..22: mol_type = other DNA
tcaggggcttccacctcctgct

SEQ ID NO: 40108 - DNA, 22 bp, synthetic construct
  misc_feature 1..22: note = chemically synthesized
  source 1..22: mol_type = other DNA
aggggcttccacctcctgctca

SEQ ID NO: 40109 - DNA, 22 bp, synthetic construct
  misc_feature 1..22: note = chemically synthesized
  source 1..22: mol_type = other DNA
ccacctcctgctcatatctagc

SEQ ID NO: 40110 - DNA, 22 bp, synthetic construct
  misc_feature 1..22: note = chemically synthesized
  source 1..22: mol_type = other DNA
cacctcctgctcatatctagct

SEQ ID NO: 40111 - DNA, 22 bp, synthetic construct
  misc_feature 1..22: note = chemically synthesized
  source 1..22: mol_type = other DNA
ctgctcatatctagctatctgc

SEQ ID NO: 40112 - DNA, 22 bp, synthetic construct
  misc_feature 1..22: note = chemically synthesized
  source 1..22: mol_type = other DNA
ctcatatctagctatctgccta

SEQ ID NO: 40113 - DNA, 22 bp, synthetic construct
  misc_feature 1..22: note = chemically synthesized
  source 1..22: mol_type = other DNA
atatctagctatctgcctagtc

SEQ ID NO: 40114 - DNA, 22 bp, synthetic construct
  misc_feature 1..22: note = chemically synthesized
  source 1..22: mol_type = other DNA
gctatctgcctagtctaaccat

SEQ ID NO: 40115 - DNA, 22 bp, synthetic construct
  misc_feature 1..22: note = chemically synthesized
  source 1..22: mol_type = other DNA
tctgcctagtctaaccataaaa

SEQ ID NO: 40116 - DNA, 22 bp, synthetic construct
  misc_feature 1..22: note = chemically synthesized
  source 1..22: mol_type = other DNA
cctagtctaaccataaaatctt

SEQ ID NO: 40117 - DNA, 22 bp, synthetic construct
  misc_feature 1..22: note = chemically synthesized
  source 1..22: mol_type = other DNA
gtctaaccataaaatcttaaat

SEQ ID NO: 40118 - DNA, 22 bp, synthetic construct
  misc_feature 1..22: note = chemically synthesized
  source 1..22: mol_type = other DNA
accataaaatcttaaataagaa

SEQ ID NO: 40119 - DNA, 22 bp, synthetic construct
  misc_feature 1..22: note = chemically synthesized
  source 1..22: mol_type = other DNA
aaataagaataaatcatgtttg

SEQ ID NO: 40120 - DNA, 22 bp, synthetic construct
  misc_feature 1..22: note = chemically synthesized
  source 1..22: mol_type = other DNA
aataagaataaatcatgtttgc

SEQ ID NO: 40121 - DNA, 22 bp, synthetic construct
  misc_feature 1..22: note = chemically synthesized
  source 1..22: mol_type = other DNA
gctcttgattgccatgtcatga

SEQ ID NO: 40122 - DNA, 22 bp, synthetic construct
  misc_feature 1..22: note = chemically synthesized
  source 1..22: mol_type = other DNA
ctcttgattgccatgtcatgat

SEQ ID NO: 40123 - DNA, 22 bp, synthetic construct
  misc_feature 1..22: note = chemically synthesized
  source 1..22: mol_type = other DNA
ttgattgccatgtcatgataaa

SEQ ID NO: 40124 - DNA, 22 bp, synthetic construct
  misc_feature 1..22: note = chemically synthesized
  source 1..22: mol_type = other DNA
gattgccatgtcatgataaaaa

SEQ ID NO: 40125 - DNA, 22 bp, synthetic construct
  misc_feature 1..22: note = chemically synthesized
  source 1..22: mol_type = other DNA
attgccatgtcatgataaaaaa

SEQ ID NO: 40126 - DNA, 22 bp, synthetic construct
  misc_feature 1..22: note = chemically synthesized
  source 1..22: mol_type = other DNA
ccatgtcatgataaaaaaaata

SEQ ID NO: 40127 - DNA, 22 bp, synthetic construct
  misc_feature 1..22: note = chemically synthesized
  source 1..22: mol_type = other DNA
tgttgccaagattgatgttgat

SEQ ID NO: 40128 - DNA, 22 bp, synthetic construct
  misc_feature 1..22: note = chemically synthesized
  source 1..22: mol_type = other DNA
ccaagattgatgttgatctgct

SEQ ID NO: 40129 - DNA, 22 bp, synthetic construct
  misc_feature 1..22: note = chemically synthesized
  source 1..22: mol_type = other DNA
atgttgatctgctaatccctgt

SEQ ID NO: 40130 - DNA, 22 bp, synthetic construct
  misc_feature 1..22: note = chemically synthesized
  source 1..22: mol_type = other DNA
atctgctaatccctgtgtagaa

SEQ ID NO: 40131 - DNA, 22 bp, synthetic construct
  misc_feature 1..22: note = chemically synthesized
  source 1..22: mol_type = other DNA
ctaatccctgtgtagaaatgaa

SEQ ID NO: 40132 - DNA, 22 bp, synthetic construct
  misc_feature 1..22: note = chemically synthesized
  source 1..22: mol_type = other DNA
atccctgtgtagaaatgaacct

SEQ ID NO: 40133 - DNA, 22 bp, synthetic construct
  misc_feature 1..22: note = chemically synthesized
  source 1..22: mol_type = other DNA
tgtagaaatgaaccttggaggc

SEQ ID NO: 40134 - DNA, 22 bp, synthetic construct
  misc_feature 1..22: note = chemically synthesized
  source 1..22: mol_type = other DNA
ggaggccattgtttgatttctt

SEQ ID NO: 40135 - DNA, 22 bp, synthetic construct
  misc_feature 1..22: note = chemically synthesized
  source 1..22: mol_type = other DNA
gaggccattgtttgatttctta

SEQ ID NO: 40136 - DNA, 22 bp, synthetic construct
  misc_feature 1..22: note = chemically synthesized
  source 1..22: mol_type = other DNA
tttgatttcttacaatatgtgc

SEQ ID NO: 40137 - DNA, 22 bp, synthetic construct
  misc_feature 1..22: note = chemically synthesized
  source 1..22: mol_type = other DNA
gatttcttacaatatgtgcatt

SEQ ID NO: 40138 - DNA, 22 bp, synthetic construct
  misc_feature 1..22: note = chemically synthesized
  source 1..22: mol_type = other DNA
atttcttacaatatgtgcattg

SEQ ID NO: 40139 - DNA, 22 bp, synthetic construct
  misc_feature 1..22: note = chemically synthesized
  source 1..22: mol_type = other DNA
cttacaatatgtgcattggttg

SEQ ID NO: 40140 - DNA, 22 bp, synthetic construct
  misc_feature 1..22: note = chemically synthesized
  source 1..22: mol_type = other DNA
ttacaatatgtgcattggttgt

SEQ ID NO: 40141 - DNA, 22 bp, synthetic construct
  misc_feature 1..22: note = chemically synthesized
  source 1..22: mol_type = other DNA
acaatatgtgcattggttgtaa

SEQ ID NO: 40142 - DNA, 22 bp, synthetic construct
  misc_feature 1..22: note = chemically synthesized
  source 1..22: mol_type = other DNA
caatatgtgcattggttgtaac

SEQ ID NO: 40143 - DNA, 22 bp, synthetic construct
  misc_feature 1..22: note = chemically synthesized
  source 1..22: mol_type = other DNA
gttgtaacactgtcactttgac

SEQ ID NO: 40144 - DNA, 22 bp, synthetic construct
  misc_feature 1..22: note = chemically synthesized
  source 1..22: mol_type = other DNA
taacactgtcactttgacagtt

SEQ ID NO: 40145 - DNA, 22 bp, synthetic construct
  misc_feature 1..22: note = chemically synthesized
  source 1..22: mol_type = other DNA
tcactttgacagttgataagca

SEQ ID NO: 40146 - DNA, 22 bp, synthetic construct
  misc_feature 1..22: note = chemically synthesized
  source 1..22: mol_type = other DNA
tgacagttgataagcatcttct

SEQ ID NO: 40147 - DNA, 22 bp, synthetic construct
  misc_feature 1..22: note = chemically synthesized
  source 1..22: mol_type = other DNA
gacagttgataagcatcttctg

SEQ ID NO: 40148 - DNA, 22 bp, synthetic construct
  misc_feature 1..22: note = chemically synthesized
  source 1..22: mol_type = other DNA
acagttgataagcatcttctga

SEQ ID NO: 40149 - DNA, 22 bp, synthetic construct
  misc_feature 1..22: note = chemically synthesized
  source 1..22: mol_type = other DNA
ataagcatcttctgaatggtcc

SEQ ID NO: 40150 - DNA, 22 bp, synthetic construct
  misc_feature 1..22: note = chemically synthesized
  source 1..22: mol_type = other DNA
ctgaatggtccctcctttagtt

SEQ ID NO: 40151 - DNA, 22 bp, synthetic construct
  misc_feature 1..22: note = chemically synthesized
  source 1..22: mol_type = other DNA
tgaatggtccctcctttagtta

SEQ ID NO: 40152 - DNA, 22 bp, synthetic construct
  misc_feature 1..22: note = chemically synthesized
  source 1..22: mol_type = other DNA
aatggtccctcctttagttaca

SEQ ID NO: 40153 - DNA, 22 bp, synthetic construct
  misc_feature 1..22: note = chemically synthesized
  source 1..22: mol_type = other DNA
ctttagttacaaaaatgttggt

SEQ ID NO: 40154 - DNA, 22 bp, synthetic construct
  misc_feature 1..22: note = chemically synthesized
  source 1..22: mol_type = other DNA
tagttacaaaaatgttggtgca

SEQ ID NO: 40155 - DNA, 22 bp, synthetic construct
  misc_feature 1..22: note = chemically synthesized
  source 1..22: mol_type = other DNA
agttacaaaaatgttggtgcat

SEQ ID NO: 40156 - DNA, 22 bp, synthetic construct
  misc_feature 1..22: note = chemically synthesized
  source 1..22: mol_type = other DNA
gttacaaaaatgttggtgcatg

SEQ ID NO: 40157 - DNA, 22 bp, synthetic construct
  misc_feature 1..22: note = chemically synthesized
  source 1..22: mol_type = other DNA
caaaaatgttggtgcatggatg

SEQ ID NO: 40158 - DNA, 22 bp, synthetic construct
  misc_feature 1..22: note = chemically synthesized
  source 1..22: mol_type = other DNA
gtgcatggatgatgttgggaat

SEQ ID NO: 40159 - DNA, 22 bp, synthetic construct
  misc_feature 1..22: note = chemically synthesized
  source 1..22: mol_type = other DNA
ggaataaataaaaagtgaacta

SEQ ID NO: 40160 - DNA, 22 bp, synthetic construct
  misc_feature 1..22: note = chemically synthesized
  source 1..22: mol_type = other DNA
aattatgttctcatcttgggca

SEQ ID NO: 40161 - DNA, 22 bp, synthetic construct
  misc_feature 1..22: note = chemically synthesized
  source 1..22: mol_type = other DNA
tgttctcatcttgggcaaaaat

SEQ ID NO: 40162 - DNA, 22 bp, synthetic construct
  misc_feature 1..22: note = chemically synthesized
  source 1..22: mol_type = other DNA
tcatcttgggcaaaaattaagc

SEQ ID NO: 40163 - DNA, 22 bp, synthetic construct
  misc_feature 1..22: note = chemically synthesized
  source 1..22: mol_type = other DNA
atcttgggcaaaaattaagcaa

SEQ ID NO: 40164 - DNA, 22 bp, synthetic construct
  misc_feature 1..22: note = chemically synthesized
  source 1..22: mol_type = other DNA
gggcaaaaattaagcaaaaaaa

SEQ ID NO: 40165 - DNA, 22 bp, synthetic construct
  misc_feature 1..22: note = chemically synthesized
  source 1..22: mol_type = other DNA
ggcaaaaattaagcaaaaaaaa

SEQ ID NO: 40166 - DNA, 22 bp, synthetic construct
  misc_feature 1..22: note = chemically synthesized
  source 1..22: mol_type = other DNA
agcaaaaaaaaaatggaggata

SEQ ID NO: 40167 - DNA, 22 bp, synthetic construct
  misc_feature 1..22: note = chemically synthesized
  source 1..22: mol_type = other DNA
ctccacaaagaaggccattttt

SEQ ID NO: 40168 - DNA, 22 bp, synthetic construct
  misc_feature 1..22: note = chemically synthesized
  source 1..22: mol_type = other DNA
cacaaagaaggccatttttgta

SEQ ID NO: 40169 - DNA, 22 bp, synthetic construct
  misc_feature 1..22: note = chemically synthesized
  source 1..22: mol_type = other DNA
ttgtactaggcttactacagtg

SEQ ID NO: 40170 - DNA, 22 bp, synthetic construct
  misc_feature 1..22: note = chemically synthesized
  source 1..22: mol_type = other DNA
tgtactaggcttactacagtga

SEQ ID NO: 40171 - DNA, 22 bp, synthetic construct
  misc_feature 1..22: note = chemically synthesized
  source 1..22: mol_type = other DNA
gtactaggcttactacagtgac

SEQ ID NO: 40172 - DNA, 22 bp, synthetic construct
  misc_feature 1..22: note = chemically synthesized
  source 1..22: mol_type = other DNA
tactaggcttactacagtgaca

SEQ ID NO: 40173 - DNA, 22 bp, synthetic construct
  misc_feature 1..22: note = chemically synthesized
  source 1..22: mol_type = other DNA
ggcttactacagtgacacacca

SEQ ID NO: 40174 - DNA, 22 bp, synthetic construct
  misc_feature 1..22: note = chemically synthesized
  source 1..22: mol_type = other DNA
actacagtgacacaccactatt

SEQ ID NO: 40175 - DNA, 22 bp, synthetic construct
  misc_feature 1..22: note = chemically synthesized
  source 1..22: mol_type = other DNA
ctacagtgacacaccactatta

SEQ ID NO: 40176 - DNA, 22 bp, synthetic construct
  misc_feature 1..22: note = chemically synthesized
  source 1..22: mol_type = other DNA
cagtgacacaccactattagtt

SEQ ID NO: 40177 - DNA, 22 bp, synthetic construct
  misc_feature 1..22: note = chemically synthesized
  source 1..22: mol_type = other DNA
ttagttggggagaattcagttt

SEQ ID NO: 40178 - DNA, 22 bp, synthetic construct
  misc_feature 1..22: note = chemically synthesized
  source 1..22: mol_type = other DNA
gttggggagaattcagtttttc

SEQ ID NO: 40179 - DNA, 22 bp, synthetic construct
  misc_feature 1..22: note = chemically synthesized
  source 1..22: mol_type = other DNA
gggagaattcagtttttccaag

SEQ ID NO: 40180 - DNA, 22 bp, synthetic construct
  misc_feature 1..22: note = chemically synthesized
  source 1..22: mol_type = other DNA
agtttttccaaggtgttgatag

SEQ ID NO: 40181 - DNA, 22 bp, synthetic construct
  misc_feature 1..22: note = chemically synthesized
  source 1..22: mol_type = other DNA
ttccaaggtgttgataggcatc

SEQ ID NO: 40182 - DNA, 22 bp, synthetic construct
  misc_feature 1..22: note = chemically synthesized
  source 1..22: mol_type = other DNA
tccaaggtgttgataggcatcc

SEQ ID NO: 40183 - DNA, 22 bp, synthetic construct
  misc_feature 1..22: note = chemically synthesized
  source 1..22: mol_type = other DNA
ccaaggtgttgataggcatcca

SEQ ID NO: 40184 - DNA, 22 bp, synthetic construct
  misc_feature 1..22: note = chemically synthesized
  source 1..22: mol_type = other DNA
caaggtgttgataggcatccag

SEQ ID NO: 40185 - DNA, 22 bp, synthetic construct
  misc_feature 1..22: note = chemically synthesized
  source 1..22: mol_type = other DNA
ataggcatccagatttcagagg

SEQ ID NO: 40186 - DNA, 22 bp, synthetic construct
  misc_feature 1..22: note = chemically synthesized
  source 1..22: mol_type = other DNA
cagaggaaattgtaaaaaagca

SEQ ID NO: 40187 - DNA, 22 bp, synthetic construct
  misc_feature 1..22: note = chemically synthesized
  source 1..22: mol_type = other DNA
agaggaaattgtaaaaaagcag

SEQ ID NO: 40188 - DNA, 22 bp, synthetic construct
  misc_feature 1..22: note = chemically synthesized
  source 1..22: mol_type = other DNA
taaaaaagcagaacctgggacc

SEQ ID NO: 40189 - DNA, 22 bp, synthetic construct
  misc_feature 1..22: note = chemically synthesized
  source 1..22: mol_type = other DNA
ggaccaatactgcccacgattt

SEQ ID NO: 40190 - DNA, 22 bp, synthetic construct
  misc_feature 1..22: note = chemically synthesized
  source 1..22: mol_type = other DNA
cccacgatttttctttgagatc

SEQ ID NO: 40191 - DNA, 22 bp, synthetic construct
  misc_feature 1..22: note = chemically synthesized
  source 1..22: mol_type = other DNA
ttctttgagatcaaatctgagg

SEQ ID NO: 40192 - DNA, 22 bp, synthetic construct
  misc_feature 1..22: note = chemically synthesized
  source 1..22: mol_type = other DNA
tctttgagatcaaatctgaggc

SEQ ID NO: 40193 - DNA, 22 bp, synthetic construct
  misc_feature 1..22: note = chemically synthesized
  source 1..22: mol_type = other DNA
ctttgagatcaaatctgaggca

SEQ ID NO: 40194 - DNA, 22 bp, synthetic construct
  misc_feature 1..22: note = chemically synthesized
  source 1..22: mol_type = other DNA
tttgagatcaaatctgaggcaa

SEQ ID NO: 40195 - DNA, 22 bp, synthetic construct
  misc_feature 1..22: note = chemically synthesized
  source 1..22: mol_type = other DNA
tgagatcaaatctgaggcaaca

SEQ ID NO: 40196 - DNA, 22 bp, synthetic construct
  misc_feature 1..22: note = chemically synthesized
  source 1..22: mol_type = other DNA
gagatcaaatctgaggcaacaa

SEQ ID NO: 40197 - DNA, 22 bp, synthetic construct
  misc_feature 1..22: note = chemically synthesized
  source 1..22: mol_type = other DNA
agatcaaatctgaggcaacaaa

SEQ ID NO: 40198 - DNA, 22 bp, synthetic construct
  misc_feature 1..22: note = chemically synthesized
  source 1..22: mol_type = other DNA
aggcaacaaatctgttcaaaag

SEQ ID NO: 40199 - DNA, 22 bp, synthetic construct
  misc_feature 1..22: note = chemically synthesized
  source 1..22: mol_type = other DNA
ttcaaaagctgctttctgcctg

SEQ ID NO: 40200 - DNA, 22 bp, synthetic construct
  misc_feature 1..22: note = chemically synthesized
  source 1..22: mol_type = other DNA
aaaagctgctttctgcctggtt

SEQ ID NO: 40201 - DNA, 22 bp, synthetic construct
  misc_feature 1..22: note = chemically synthesized
  source 1..22: mol_type = other DNA
ctttctgcctggttgtggcaaa

SEQ ID NO: 40202 - DNA, 22 bp, synthetic construct
  misc_feature 1..22: note = chemically synthesized
  source 1..22: mol_type = other DNA
tctgcctggttgtggcaaaggg

SEQ ID NO: 40203 - DNA, 22 bp, synthetic construct
  misc_feature 1..22: note = chemically synthesized
  source 1..22: mol_type = other DNA
ctgcctggttgtggcaaagggt

SEQ ID NO: 40204 - DNA, 22 bp, synthetic construct
  misc_feature 1..22: note = chemically synthesized
  source 1..22: mol_type = other DNA
tgcctggttgtggcaaagggtg

SEQ ID NO: 40205 - DNA, 22 bp, synthetic construct
  misc_feature 1..22: note = chemically synthesized
  source 1..22: mol_type = other DNA
cctggttgtggcaaagggtggc

SEQ ID NO: 40206 - DNA, 22 bp, synthetic construct
  misc_feature 1..22: note = chemically synthesized
  source 1..22: mol_type = other DNA
gttgtggcaaagggtggccaag

SEQ ID NO: 40207 - DNA, 22 bp, synthetic construct
  misc_feature 1..22: note = chemically synthesized
  source 1..22: mol_type = other DNA
tggcaaagggtggccaagtggg

SEQ ID NO: 40208 - DNA, 22 bp, synthetic construct
  misc_feature 1..22: note = chemically synthesized
  source 1..22: mol_type = other DNA
agctgtgttcccattgcaaggc

SEQ ID NO: 40209 - DNA, 22 bp, synthetic construct
  misc_feature 1..22: note = chemically synthesized
  source 1..22: mol_type = other DNA
tgttcccattgcaaggctactg

SEQ ID NO: 40210 - DNA, 22 bp, synthetic construct
  misc_feature 1..22: note = chemically synthesized
  source 1..22: mol_type = other DNA
ccattgcaaggctactgagcat

SEQ ID NO: 40211 - DNA, 22 bp, synthetic construct
  misc_feature 1..22: note = chemically synthesized
  source 1..22: mol_type = other DNA
caaggctactgagcatcccctg

SEQ ID NO: 40212 - DNA, 22 bp, synthetic construct
  misc_feature 1..22: note = chemically synthesized
  source 1..22: mol_type = other DNA
ctgagcatcccctgtcctgagg

SEQ ID NO: 40213 - DNA, 22 bp, synthetic construct
  misc_feature 1..22: note = chemically synthesized
  source 1..22: mol_type = other DNA
agcatcccctgtcctgaggctc

SEQ ID NO: 40214 - DNA, 22 bp, synthetic construct
  misc_feature 1..22: note = chemically synthesized
  source 1..22: mol_type = other DNA
tcctgaggctccttaggacacc

SEQ ID NO: 40215 - DNA, 22 bp, synthetic construct
  misc_feature 1..22: note = chemically synthesized
  source 1..22: mol_type = other DNA
aggctccttaggacacctggct

SEQ ID NO: 40216 - DNA, 22 bp, synthetic construct
  misc_feature 1..22: note = chemically synthesized
  source 1..22: mol_type = other DNA
cttaggacacctggctgagctt

SEQ ID NO: 40217 - DNA, 22 bp, synthetic construct
  misc_feature 1..22: note = chemically synthesized
  source 1..22: mol_type = other DNA
aggacacctggctgagcttcag

SEQ ID NO: 40218 - DNA, 22 bp, synthetic construct
  misc_feature 1..22: note = chemically synthesized
  source 1..22: mol_type = other DNA
ggacacctggctgagcttcagc

SEQ ID NO: 40219 - DNA, 22 bp, synthetic construct
  misc_feature 1..22: note = chemically synthesized
  source 1..22: mol_type = other DNA
gctgagcttcagcagccctctt

SEQ ID NO: 40220 - DNA, 22 bp, synthetic construct
  misc_feature 1..22: note = chemically synthesized
  source 1..22: mol_type = other DNA
agcttcagcagccctcttccaa

SEQ ID NO: 40221 - DNA, 22 bp, synthetic construct
  misc_feature 1..22: note = chemically synthesized
  source 1..22: mol_type = other DNA
cagcagccctcttccaagcctg

SEQ ID NO: 40222 - DNA, 22 bp, synthetic construct
  misc_feature 1..22: note = chemically synthesized
  source 1..22: mol_type = other DNA
agcagccctcttccaagcctgg

SEQ ID NO: 40223 - DNA, 22 bp, synthetic construct
  misc_feature 1..22: note = chemically synthesized
  source 1..22: mol_type = other DNA
ttccaagcctggagatgccagc

SEQ ID NO: 40224 - DNA, 22 bp, synthetic construct
  misc_feature 1..22: note = chemically synthesized
  source 1..22: mol_type = other DNA
ccaagcctggagatgccagctc

SEQ ID NO: 40225 - DNA, 22 bp, synthetic construct
  misc_feature 1..22: note = chemically synthesized
  source 1..22: mol_type = other DNA
caagcctggagatgccagctcc

SEQ ID NO: 40226 - DNA, 22 bp, synthetic construct
  misc_feature 1..22: note = chemically synthesized
  source 1..22: mol_type = other DNA
gagatgccagctccatctctgg

SEQ ID NO: 40227 - DNA, 22 bp, synthetic construct
  misc_feature 1..22: note = chemically synthesized
  source 1..22: mol_type = other DNA
catctctggcacaaaatgtagt

SEQ ID NO: 40228 - DNA, 22 bp, synthetic construct
  misc_feature 1..22: note = chemically synthesized
  source 1..22: mol_type = other DNA
tggcacaaaatgtagtgatttt

SEQ ID NO: 40229 - DNA, 22 bp, synthetic construct
  misc_feature 1..22: note = chemically synthesized
  source 1..22: mol_type = other DNA
gcacaaaatgtagtgattttca

SEQ ID NO: 40230 - DNA, 22 bp, synthetic construct
  misc_feature 1..22: note = chemically synthesized
  source 1..22: mol_type = other DNA
tcacagggtgagaggccaaaag

SEQ ID NO: 40231 - DNA, 22 bp, synthetic construct
  misc_feature 1..22: note = chemically synthesized
  source 1..22: mol_type = other DNA
cacagggtgagaggccaaaaga

SEQ ID NO: 40232 - DNA, 22 bp, synthetic construct
  misc_feature 1..22: note = chemically synthesized
  source 1..22: mol_type = other DNA
acagggtgagaggccaaaagag

SEQ ID NO: 40233 - DNA, 22 bp, synthetic construct
  misc_feature 1..22: note = chemically synthesized
  source 1..22: mol_type = other DNA
ataaaatgaagatagccaagct

SEQ ID NO: 40234 - DNA, 22 bp, synthetic construct
  misc_feature 1..22: note = chemically synthesized
  source 1..22: mol_type = other DNA
ccatggaattaagcaacaggac

SEQ ID NO: 40235 - DNA, 22 bp, synthetic construct
  misc_feature 1..22: note = chemically synthesized
  source 1..22: mol_type = other DNA
catggaattaagcaacaggaca

SEQ ID NO: 40236 - DNA, 22 bp, synthetic construct
  misc_feature 1..22: note = chemically synthesized
  source 1..22: mol_type = other DNA
agcaacaggacaaccttgacca

SEQ ID NO: 40237 - DNA, 22 bp, synthetic construct
  misc_feature 1..22: note = chemically synthesized
  source 1..22: mol_type = other DNA
gaccactttgaggggtgtggtg

SEQ ID NO: 40238 - DNA, 22 bp, synthetic construct
  misc_feature 1..22: note = chemically synthesized
  source 1..22: mol_type = other DNA
accactttgaggggtgtggtgg

SEQ ID NO: 40239 - DNA, 22 bp, synthetic construct
  misc_feature 1..22: note = chemically synthesized
  source 1..22: mol_type = other DNA
tgaggggtgtggtgggggccac

SEQ ID NO: 40240 - DNA, 22 bp, synthetic construct
  misc_feature 1..22: note = chemically synthesized
  source 1..22: mol_type = other DNA
gaggggtgtggtgggggccaca

SEQ ID NO: 40241 - DNA, 22 bp, synthetic construct
  misc_feature 1..22: note = chemically synthesized
  source 1..22: mol_type = other DNA
aggggtgtggtgggggccacat

SEQ ID NO: 40242 - DNA, 22 bp, synthetic construct
  misc_feature 1..22: note = chemically synthesized
  source 1..22: mol_type = other DNA
aagagtgactagaagagcagtg

SEQ ID NO: 40243 - DNA, 22 bp, synthetic construct
  misc_feature 1..22: note = chemically synthesized
  source 1..22: mol_type = other DNA
gaagagcagtgggggtggcagc

SEQ ID NO: 40244 - DNA, 22 bp, synthetic construct
  misc_feature 1..22: note = chemically synthesized
  source 1..22: mol_type = other DNA
gctctgaaagcagcgagacttc

SEQ ID NO: 40245 - DNA, 22 bp, synthetic construct
  misc_feature 1..22: note = chemically synthesized
  source 1..22: mol_type = other DNA
tgaaagcagcgagacttctagg

SEQ ID NO: 40246 - DNA, 22 bp, synthetic construct
  misc_feature 1..22: note = chemically synthesized
  source 1..22: mol_type = other DNA
aaagcagcgagacttctaggga

SEQ ID NO: 40247 - DNA, 22 bp, synthetic construct
  misc_feature 1..22: note = chemically synthesized
  source 1..22: mol_type = other DNA
ctagggaatacagggtcagggg

SEQ ID NO: 40248 - DNA, 22 bp, synthetic construct
  misc_feature 1..22: note = chemically synthesized
  source 1..22: mol_type = other DNA
tagggaatacagggtcagggga

SEQ ID NO: 40249 - DNA, 22 bp, synthetic construct
  misc_feature 1..22: note = chemically synthesized
  source 1..22: mol_type = other DNA
gggaatacagggtcaggggagg

SEQ ID NO: 40250 - DNA, 22 bp, synthetic construct
  misc_feature 1..22: note = chemically synthesized
  source 1..22: mol_type = other DNA
tgaaagatgacacactgcagag

SEQ ID NO: 40251 - DNA, 22 bp, synthetic construct
  misc_feature 1..22: note = chemically synthesized
  source 1..22: mol_type = other DNA
aaagatgacacactgcagagaa

SEQ ID NO: 40252 - DNA, 22 bp, synthetic construct
  misc_feature 1..22: note = chemically synthesized
  source 1..22: mol_type = other DNA
cagagaacatgtgtttgtatgc

SEQ ID NO: 40253 - DNA, 22 bp, synthetic construct
  misc_feature 1..22: note = chemically synthesized
  source 1..22: mol_type = other DNA
gtatgccgatgacaagtatcca

SEQ ID NO: 40254 - DNA, 22 bp, synthetic construct
  misc_feature 1..22: note = chemically synthesized
  source 1..22: mol_type = other DNA
tatgccgatgacaagtatccag

SEQ ID NO: 40255 - DNA, 22 bp, synthetic construct
  misc_feature 1..22: note = chemically synthesized
  source 1..22: mol_type = other DNA
tcattctcagaaaggcctgtcc

SEQ ID NO: 40256 - DNA, 22 bp, synthetic construct
  misc_feature 1..22: note = chemically synthesized
  source 1..22: mol_type = other DNA
attctcagaaaggcctgtcctg

SEQ ID NO: 40257 - DNA, 22 bp, synthetic construct
  misc_feature 1..22: note = chemically synthesized
  source 1..22: mol_type = other DNA
tcagaaaggcctgtcctgacct

SEQ ID NO: 40258 - DNA, 22 bp, synthetic construct
  misc_feature 1..22: note = chemically synthesized
  source 1..22: mol_type = other DNA
agaaaggcctgtcctgacctcc

SEQ ID NO: 40259 - DNA, 22 bp, synthetic construct
  misc_feature 1..22: note = chemically synthesized
  source 1..22: mol_type = other DNA
tcctgacctcctgagagtacac

SEQ ID NO: 40260 - DNA, 22 bp, synthetic construct
  misc_feature 1..22: note = chemically synthesized
  source 1..22: mol_type = other DNA
acctcctgagagtacacagacc

SEQ ID NO: 40261 - DNA, 22 bp, synthetic construct
  misc_feature 1..22: note = chemically synthesized
  source 1..22: mol_type = other DNA
ctgagagtacacagaccatgag

SEQ ID NO: 40262 - DNA, 22 bp, synthetic construct
  misc_feature 1..22: note = chemically synthesized
  source 1..22: mol_type = other DNA
agagtacacagaccatgagggc

SEQ ID NO: 40263 - DNA, 22 bp, synthetic construct
  misc_feature 1..22: note = chemically synthesized
  source 1..22: mol_type = other DNA
actgtttcatgcaaagtccttg

SEQ ID NO: 40264 - DNA, 22 bp, synthetic construct
  misc_feature 1..22: note = chemically synthesized
  source 1..22: mol_type = other DNA
tttcatgcaaagtccttggcca

SEQ ID NO: 40265 - DNA, 22 bp, synthetic construct
  misc_feature 1..22: note = chemically synthesized
  source 1..22: mol_type = other DNA
catgcaaagtccttggccacag

SEQ ID NO: 40266 - DNA, 22 bp, synthetic construct
  misc_feature 1..22: note = chemically synthesized
  source 1..22: mol_type = other DNA
atgcaaagtccttggccacagt

SEQ ID NO: 40267 - DNA, 22 bp, synthetic construct
  misc_feature 1..22: note = chemically synthesized
  source 1..22: mol_type = other DNA
ggccacagtccacctgctcccc

SEQ ID NO: 40268 - DNA, 22 bp, synthetic construct
  misc_feature 1..22: note = chemically synthesized
  source 1..22: mol_type = other DNA
gccacagtccacctgctcccca

SEQ ID NO: 40269 - DNA, 22 bp, synthetic construct
  misc_feature 1..22: note = chemically synthesized
  source 1..22: mol_type = other DNA
ctccccacctctgtgactttgt

SEQ ID NO: 40270 - DNA, 22 bp, synthetic construct
  misc_feature 1..22: note = chemically synthesized
  source 1..22: mol_type = other DNA
cccacctctgtgactttgtcct

SEQ ID NO: 40271 - DNA, 22 bp, synthetic construct
  misc_feature 1..22: note = chemically synthesized
  source 1..22: mol_type = other DNA
tgtgactttgtccttcctcaat

SEQ ID NO: 40272 - DNA, 22 bp, synthetic construct
  misc_feature 1..22: note = chemically synthesized
  source 1..22: mol_type = other DNA
tgactttgtccttcctcaattt

SEQ ID NO: 40273 - DNA, 22 bp, synthetic construct
  misc_feature 1..22: note = chemically synthesized
  source 1..22: mol_type = other DNA
tgtccttcctcaatttaatatg

SEQ ID NO: 40274 - DNA, 22 bp, synthetic construct
  misc_feature 1..22: note = chemically synthesized
  source 1..22: mol_type = other DNA
gtccttcctcaatttaatatgc

SEQ ID NO: 40275 - DNA, 22 bp, synthetic construct
  misc_feature 1..22: note = chemically synthesized
  source 1..22: mol_type = other DNA
tccttcctcaatttaatatgct

SEQ ID NO: 40276 - DNA, 22 bp, synthetic construct
  misc_feature 1..22: note = chemically synthesized
  source 1..22: mol_type = other DNA
cctcaatttaatatgctctatg

SEQ ID NO: 40277 - DNA, 22 bp, synthetic construct
  misc_feature 1..22: note = chemically synthesized
  source 1..22: mol_type = other DNA
ctcaatttaatatgctctatgc

SEQ ID NO: 40278 - DNA, 22 bp, synthetic construct
  misc_feature 1..22: note = chemically synthesized
  source 1..22: mol_type = other DNA
aatttaatatgctctatgctgg

SEQ ID NO: 40279 - DNA, 22 bp, synthetic construct
  misc_feature 1..22: note = chemically synthesized
  source 1..22: mol_type = other DNA
aatatgctctatgctggaaaac

SEQ ID NO: 40280 - DNA, 22 bp, synthetic construct
  misc_feature 1..22: note = chemically synthesized
  source 1..22: mol_type = other DNA
atatgctctatgctggaaaact

SEQ ID NO: 40281 - DNA, 22 bp, synthetic construct
  misc_feature 1..22: note = chemically synthesized
  source 1..22: mol_type = other DNA
tatgctggaaaactggattatt

SEQ ID NO: 40282 - DNA, 22 bp, synthetic construct
  misc_feature 1..22: note = chemically synthesized
  source 1..22: mol_type = other DNA
tgctggaaaactggattattga

SEQ ID NO: 40283 - DNA, 22 bp, synthetic construct
  misc_feature 1..22: note = chemically synthesized
  source 1..22: mol_type = other DNA
gaaaactggattattgaacagg

SEQ ID NO: 40284 - DNA, 22 bp, synthetic construct
  misc_feature 1..22: note = chemically synthesized
  source 1..22: mol_type = other DNA
gattattgaacaggcattggct

SEQ ID NO: 40285 - DNA, 22 bp, synthetic construct
  misc_feature 1..22: note = chemically synthesized
  source 1..22: mol_type = other DNA
ttgaacaggcattggctgatgc

SEQ ID NO: 40286 - DNA, 22 bp, synthetic construct
  misc_feature 1..22: note = chemically synthesized
  source 1..22: mol_type = other DNA
aacaggcattggctgatgcatt

SEQ ID NO: 40287 - DNA, 22 bp, synthetic construct
  misc_feature 1..22: note = chemically synthesized
  source 1..22: mol_type = other DNA
gctgatgcattctgaacctaat

SEQ ID NO: 40288 - DNA, 22 bp, synthetic construct
  misc_feature 1..22: note = chemically synthesized
  source 1..22: mol_type = other DNA
atgcattctgaacctaatccac

SEQ ID NO: 40289 - DNA, 22 bp, synthetic construct
  misc_feature 1..22: note = chemically synthesized
  source 1..22: mol_type = other DNA
tgaacctaatccactaaaaagc

SEQ ID NO: 40290 - DNA, 22 bp, synthetic construct
  misc_feature 1..22: note = chemically synthesized
  source 1..22: mol_type = other DNA
aacctaatccactaaaaagcac

SEQ ID NO: 40291 - DNA, 22 bp, synthetic construct
  misc_feature 1..22: note = chemically synthesized
  source 1..22: mol_type = other DNA
atccactaaaaagcacttgata

SEQ ID NO: 40292 - DNA, 22 bp, synthetic construct
  misc_feature 1..22: note = chemically synthesized
  source 1..22: mol_type = other DNA
aaaagcacttgatagatatatc

SEQ ID NO: 40293 - DNA, 22 bp, synthetic construct
  misc_feature 1..22: note = chemically synthesized
  source 1..22: mol_type = other DNA
gatagatatatcaaaatatcat

SEQ ID NO: 40294 - DNA, 22 bp, synthetic construct
  misc_feature 1..22: note = chemically synthesized
  source 1..22: mol_type = other DNA
atagatatatcaaaatatcatt

SEQ ID NO: 40295 - DNA, 22 bp, synthetic construct
  misc_feature 1..22: note = chemically synthesized
  source 1..22: mol_type = other DNA
agaaatagatattttaggccca

SEQ ID NO: 40296 - DNA, 22 bp, synthetic construct
  misc_feature 1..22: note = chemically synthesized
  source 1..22: mol_type = other DNA
taggcccatatccatgtcttca

SEQ ID NO: 40297 - DNA, 22 bp, synthetic construct
  misc_feature 1..22: note = chemically synthesized
  source 1..22: mol_type = other DNA
aggcccatatccatgtcttcac

SEQ ID NO: 40298 - DNA, 22 bp, synthetic construct
  misc_feature 1..22: note = chemically synthesized
  source 1..22: mol_type = other DNA
ggcccatatccatgtcttcacc

SEQ ID NO: 40299 - DNA, 22 bp, synthetic construct
  misc_feature 1..22: note = chemically synthesized
  source 1..22: mol_type = other DNA
caccccgcactgtttctcattt

SEQ ID NO: 40300 - DNA, 22 bp, synthetic construct
  misc_feature 1..22: note = chemically synthesized
  source 1..22: mol_type = other DNA
accccgcactgtttctcatttg

SEQ ID NO: 40301 - DNA, 22 bp, synthetic construct
  misc_feature 1..22: note = chemically synthesized
  source 1..22: mol_type = other DNA
tttctcatttgaactctctttt

SEQ ID NO: 40302 - DNA, 22 bp, synthetic construct
  misc_feature 1..22: note = chemically synthesized
  source 1..22: mol_type = other DNA
ctcatttgaactctcttttcca

SEQ ID NO: 40303 - DNA, 22 bp, synthetic construct
  misc_feature 1..22: note = chemically synthesized
  source 1..22: mol_type = other DNA
tcatttgaactctcttttccag

SEQ ID NO: 40304 - DNA, 22 bp, synthetic construct
  misc_feature 1..22: note = chemically synthesized
  source 1..22: mol_type = other DNA
atttgaactctcttttccagga

SEQ ID NO: 40305 - DNA, 22 bp, synthetic construct
  misc_feature 1..22: note = chemically synthesized
  source 1..22: mol_type = other DNA
gaactctcttttccaggaagag

SEQ ID NO: 40306 - DNA, 22 bp, synthetic construct
  misc_feature 1..22: note = chemically synthesized
  source 1..22: mol_type = other DNA
aactctcttttccaggaagagt

SEQ ID NO: 40307 - DNA, 22 bp, synthetic construct
  misc_feature 1..22: note = chemically synthesized
  source 1..22: mol_type = other DNA
tcttttccaggaagagttgtgc

SEQ ID NO: 40308 - DNA, 22 bp, synthetic construct
  misc_feature 1..22: note = chemically synthesized
  source 1..22: mol_type = other DNA
ttttccaggaagagttgtgctt

SEQ ID NO: 40309 - DNA, 22 bp, synthetic construct
  misc_feature 1..22: note = chemically synthesized
  source 1..22: mol_type = other DNA
ttccaggaagagttgtgcttgg

SEQ ID NO: 40310 - DNA, 22 bp, synthetic construct
  misc_feature 1..22: note = chemically synthesized
  source 1..22: mol_type = other DNA
tccaggaagagttgtgcttggg

SEQ ID NO: 40311 - DNA, 22 bp, synthetic construct
  misc_feature 1..22: note = chemically synthesized
  source 1..22: mol_type = other DNA
ccaggaagagttgtgcttgggt

SEQ ID NO: 40312 - DNA, 22 bp, synthetic construct
  misc_feature 1..22: note = chemically synthesized
  source 1..22: mol_type = other DNA
caggaagagttgtgcttgggta

SEQ ID NO: 40313 - DNA, 22 bp, synthetic construct
  misc_feature 1..22: note = chemically synthesized
  source 1..22: mol_type = other DNA
tgcttgggtaaattctatagct

SEQ ID NO: 40314 - DNA, 22 bp, synthetic construct
  misc_feature 1..22: note = chemically synthesized
  source 1..22: mol_type = other DNA
gggtaaattctatagctcacag

SEQ ID NO: 40315 - DNA, 22 bp, synthetic construct
  misc_feature 1..22: note = chemically synthesized
  source 1..22: mol_type = other DNA
ggtaaattctatagctcacagt

SEQ ID NO: 40316 - DNA, 22 bp, synthetic construct
  misc_feature 1..22: note = chemically synthesized
  source 1..22: mol_type = other DNA
tatagctcacagtgtgacttca

SEQ ID NO: 40317 - DNA, 22 bp, synthetic construct
  misc_feature 1..22: note = chemically synthesized
  source 1..22: mol_type = other DNA
tagctcacagtgtgacttcaaa

SEQ ID NO: 40318 - DNA, 22 bp, synthetic construct
  misc_feature 1..22: note = chemically synthesized
  source 1..22: mol_type = other DNA
acagtgtgacttcaaaacacac

SEQ ID NO: 40319 - DNA, 22 bp, synthetic construct
  misc_feature 1..22: note = chemically synthesized
  source 1..22: mol_type = other DNA
caaaacacacaataaattaata

SEQ ID NO: 40320 - DNA, 22 bp, synthetic construct
  misc_feature 1..22: note = chemically synthesized
  source 1..22: mol_type = other DNA
aaaacacacaataaattaataa

SEQ ID NO: 40321 - DNA, 22 bp, synthetic construct
  misc_feature 1..22: note = chemically synthesized
  source 1..22: mol_type = other DNA
ataaggtgcttcctacagtgag

SEQ ID NO: 40322 - DNA, 22 bp, synthetic construct
  misc_feature 1..22: note = chemically synthesized
  source 1..22: mol_type = other DNA
cctacagtgagttcagttaaac

SEQ ID NO: 40323 - DNA, 22 bp, synthetic construct
  misc_feature 1..22: note = chemically synthesized
  source 1..22: mol_type = other DNA
ctacagtgagttcagttaaaca

SEQ ID NO: 40324 - DNA, 22 bp, synthetic construct
  misc_feature 1..22: note = chemically synthesized
  source 1..22: mol_type = other DNA
cagtgagttcagttaaacattt

SEQ ID NO: 40325 - DNA, 22 bp, synthetic construct
  misc_feature 1..22: note = chemically synthesized
  source 1..22: mol_type = other DNA
agttaaacattttgaagagtgt

SEQ ID NO: 40326 - DNA, 22 bp, synthetic construct
  misc_feature 1..22: note = chemically synthesized
  source 1..22: mol_type = other DNA
aacattttgaagagtgtttttg

SEQ ID NO: 40327 - DNA, 22 bp, synthetic construct
  misc_feature 1..22: note = chemically synthesized
  source 1..22: mol_type = other DNA
tgaagagtgtttttgaaatgta

SEQ ID NO: 40328 - DNA, 22 bp, synthetic construct
  misc_feature 1..22: note = chemically synthesized
  source 1..22: mol_type = other DNA
gaagagtgtttttgaaatgtag

SEQ ID NO: 40329 - DNA, 22 bp, synthetic construct
  misc_feature 1..22: note = chemically synthesized
  source 1..22: mol_type = other DNA
aagagtgtttttgaaatgtagc

SEQ ID NO: 40330 - DNA, 22 bp, synthetic construct
  misc_feature 1..22: note = chemically synthesized
  source 1..22: mol_type = other DNA
ttgaaatgtagcagagcaggct

SEQ ID NO: 40331 - DNA, 22 bp, synthetic construct
  misc_feature 1..22: note = chemically synthesized
  source 1..22: mol_type = other DNA
tgaaatgtagcagagcaggcta

SEQ ID NO: 40332 - DNA, 22 bp, synthetic construct
  misc_feature 1..22: note = chemically synthesized
  source 1..22: mol_type = other DNA
gaaatgtagcagagcaggctac

SEQ ID NO: 40333 - DNA, 22 bp, synthetic construct
  misc_feature 1..22: note = chemically synthesized
  source 1..22: mol_type = other DNA
aaatgtagcagagcaggctaca

SEQ ID NO: 40334 - DNA, 22 bp, synthetic construct
  misc_feature 1..22: note = chemically synthesized
  source 1..22: mol_type = other DNA
caattgatattcaaaaagagga

SEQ ID NO: 40335 - DNA, 22 bp, synthetic construct
  misc_feature 1..22: note = chemically synthesized
  source 1..22: mol_type = other DNA
atattcaaaaagaggaaacttc

SEQ ID NO: 40336 - DNA, 22 bp, synthetic construct
  misc_feature 1..22: note = chemically synthesized
  source 1..22: mol_type = other DNA
aaaaagaggaaacttccattta

SEQ ID NO: 40337 - DNA, 22 bp, synthetic construct
  misc_feature 1..22: note = chemically synthesized
  source 1..22: mol_type = other DNA
ccatttatttccccctttaact

SEQ ID NO: 40338 - DNA, 22 bp, synthetic construct
  misc_feature 1..22: note = chemically synthesized
  source 1..22: mol_type = other DNA
catttatttccccctttaacta

SEQ ID NO: 40339 - DNA, 22 bp, synthetic construct
  misc_feature 1..22: note = chemically synthesized
  source 1..22: mol_type = other DNA
atttccccctttaactaagtta

SEQ ID NO: 40340 - DNA, 22 bp, synthetic construct
  misc_feature 1..22: note = chemically synthesized
  source 1..22: mol_type = other DNA
tttccccctttaactaagttac

SEQ ID NO: 40341 - DNA, 22 bp, synthetic construct
  misc_feature 1..22: note = chemically synthesized
  source 1..22: mol_type = other DNA
ccccctttaactaagttacctg

SEQ ID NO: 40342 - DNA, 22 bp, synthetic construct
  misc_feature 1..22: note = chemically synthesized
  source 1..22: mol_type = other DNA
cccctttaactaagttacctgt

SEQ ID NO: 40343 - DNA, 22 bp, synthetic construct
  misc_feature 1..22: note = chemically synthesized
  source 1..22: mol_type = other DNA
taactaagttacctgtaactgt

SEQ ID NO: 40344 - DNA, 22 bp, synthetic construct
  misc_feature 1..22: note = chemically synthesized
  source 1..22: mol_type = other DNA
aactaagttacctgtaactgtg

SEQ ID NO: 40345 - DNA, 22 bp, synthetic construct
  misc_feature 1..22: note = chemically synthesized
  source 1..22: mol_type = other DNA
actaagttacctgtaactgtgt

SEQ ID NO: 40346 - DNA, 22 bp, synthetic construct
  misc_feature 1..22: note = chemically synthesized
  source 1..22: mol_type = other DNA
agttacctgtaactgtgtcatt

SEQ ID NO: 40347 - DNA, 22 bp, synthetic construct
  misc_feature 1..22: note = chemically synthesized
  source 1..22: mol_type = other DNA
cctgtaactgtgtcattttatt

SEQ ID NO: 40348 - DNA, 22 bp, synthetic construct
  misc_feature 1..22: note = chemically synthesized
  source 1..22: mol_type = other DNA
taactgtgtcattttattatgc

SEQ ID NO: 40349 - DNA, 22 bp, synthetic construct
  misc_feature 1..22: note = chemically synthesized
  source 1..22: mol_type = other DNA
tgtcattttattatgcttcata

SEQ ID NO: 40350 - DNA, 22 bp, synthetic construct
  misc_feature 1..22: note = chemically synthesized
  source 1..22: mol_type = other DNA
tattatgcttcatagagcatca

SEQ ID NO: 40351 - DNA, 22 bp, synthetic construct
  misc_feature 1..22: note = chemically synthesized
  source 1..22: mol_type = other DNA
attatgcttcatagagcatcac

SEQ ID NO: 40352 - DNA, 22 bp, synthetic construct
  misc_feature 1..22: note = chemically synthesized
  source 1..22: mol_type = other DNA
ttatgcttcatagagcatcact

SEQ ID NO: 40353 - DNA, 22 bp, synthetic construct
  misc_feature 1..22: note = chemically synthesized
  source 1..22: mol_type = other DNA
tgcttcatagagcatcactgct

SEQ ID NO: 40354 - DNA, 22 bp, synthetic construct
  misc_feature 1..22: note = chemically synthesized
  source 1..22: mol_type = other DNA
catagagcatcactgctgagat

SEQ ID NO: 40355 - DNA, 22 bp, synthetic construct
  misc_feature 1..22: note = chemically synthesized
  source 1..22: mol_type = other DNA
atagagcatcactgctgagatc

SEQ ID NO: 40356 - DNA, 22 bp, synthetic construct
  misc_feature 1..22: note = chemically synthesized
  source 1..22: mol_type = other DNA
ctgagatcccctccccagctca

SEQ ID NO: 40357 - DNA, 22 bp, synthetic construct
  misc_feature 1..22: note = chemically synthesized
  source 1..22: mol_type = other DNA
agatcccctccccagctcatgt

SEQ ID NO: 40358 - DNA, 22 bp, synthetic construct
  misc_feature 1..22: note = chemically synthesized
  source 1..22: mol_type = other DNA
cccagctcatgttgctaggaaa

SEQ ID NO: 40359 - DNA, 22 bp, synthetic construct
  misc_feature 1..22: note = chemically synthesized
  source 1..22: mol_type = other DNA
atgttgctaggaaatatcccaa

SEQ ID NO: 40360 - DNA, 22 bp, synthetic construct
  misc_feature 1..22: note = chemically synthesized
  source 1..22: mol_type = other DNA
ctaggaaatatcccaaaacaga

SEQ ID NO: 40361 - DNA, 22 bp, synthetic construct
  misc_feature 1..22: note = chemically synthesized
  source 1..22: mol_type = other DNA
ggaaatatcccaaaacagaatc

SEQ ID NO: 40362 - DNA, 22 bp, synthetic construct
  misc_feature 1..22: note = chemically synthesized
  source 1..22: mol_type = other DNA
ttctttttttaacctgatgatt

SEQ ID NO: 40363 - DNA, 22 bp, synthetic construct
  misc_feature 1..22: note = chemically synthesized
  source 1..22: mol_type = other DNA
tctttttttaacctgatgattt

SEQ ID NO: 40364 - DNA, 22 bp, synthetic construct
  misc_feature 1..22: note = chemically synthesized
  source 1..22: mol_type = other DNA
ctttttttaacctgatgatttt

SEQ ID NO: 40365 - DNA, 22 bp, synthetic construct
  misc_feature 1..22: note = chemically synthesized
  source 1..22: mol_type = other DNA
tttttttaacctgatgattttt

SEQ ID NO: 40366 - DNA, 22 bp, synthetic construct
  misc_feature 1..22: note = chemically synthesized
  source 1..22: mol_type = other DNA
tttttaacctgatgatttttcc

SEQ ID NO: 40367 - DNA, 22 bp, synthetic construct
  misc_feature 1..22: note = chemically synthesized
  source 1..22: mol_type = other DNA
ttttaacctgatgatttttcca

SEQ ID NO: 40368 - DNA, 22 bp, synthetic construct
  misc_feature 1..22: note = chemically synthesized
  source 1..22: mol_type = other DNA
tttaacctgatgatttttccac

SEQ ID NO: 40369 - DNA, 22 bp, synthetic construct
  misc_feature 1..22: note = chemically synthesized
  source 1..22: mol_type = other DNA
ttaacctgatgatttttccaca

SEQ ID NO: 40370 - DNA, 22 bp, synthetic construct
  misc_feature 1..22: note = chemically synthesized
  source 1..22: mol_type = other DNA
taacctgatgatttttccacaa

SEQ ID NO: 40371 - DNA, 22 bp, synthetic construct
  misc_feature 1..22: note = chemically synthesized
  source 1..22: mol_type = other DNA
aacctgatgatttttccacaat

SEQ ID NO: 40372 - DNA, 22 bp, synthetic construct
  misc_feature 1..22: note = chemically synthesized
  source 1..22: mol_type = other DNA
acctgatgatttttccacaatc

SEQ ID NO: 40373 - DNA, 22 bp, synthetic construct
  misc_feature 1..22: note = chemically synthesized
  source 1..22: mol_type = other DNA
atgatttttccacaatcctttt

SEQ ID NO: 40374 - DNA, 22 bp, synthetic construct
  misc_feature 1..22: note = chemically synthesized
  source 1..22: mol_type = other DNA
ttccacaatccttttgtttctc

SEQ ID NO: 40375 - DNA, 22 bp, synthetic construct
  misc_feature 1..22: note = chemically synthesized
  source 1..22: mol_type = other DNA
tccacaatccttttgtttctct

SEQ ID NO: 40376 - DNA, 22 bp, synthetic construct
  misc_feature 1..22: note = chemically synthesized
  source 1..22: mol_type = other DNA
ccacaatccttttgtttctctg

SEQ ID NO: 40377 - DNA, 22 bp, synthetic construct
  misc_feature 1..22: note = chemically synthesized
  source 1..22: mol_type = other DNA
cacaatccttttgtttctctga

SEQ ID NO: 40378 - DNA, 22 bp, synthetic construct
  misc_feature 1..22: note = chemically synthesized
  source 1..22: mol_type = other DNA
ttgtttctctgattcacctcca

SEQ ID NO: 40379 - DNA, 22 bp, synthetic construct
  misc_feature 1..22: note = chemically synthesized
  source 1..22: mol_type = other DNA
tgtttctctgattcacctccag

SEQ ID NO: 40380 - DNA, 22 bp, synthetic construct
  misc_feature 1..22: note = chemically synthesized
  source 1..22: mol_type = other DNA
gtttctctgattcacctccagg

SEQ ID NO: 40381 - DNA, 22 bp, synthetic construct
  misc_feature 1..22: note = chemically synthesized
  source 1..22: mol_type = other DNA
tttctctgattcacctccaggg

SEQ ID NO: 40382 - DNA, 22 bp, synthetic construct
  misc_feature 1..22: note = chemically synthesized
  source 1..22: mol_type = other DNA
ctctgattcacctccagggctc

SEQ ID NO: 40383 - DNA, 22 bp, synthetic construct
  misc_feature 1..22: note = chemically synthesized
  source 1..22: mol_type = other DNA
tctgattcacctccagggctca

SEQ ID NO: 40384 - DNA, 22 bp, synthetic construct
  misc_feature 1..22: note = chemically synthesized
  source 1..22: mol_type = other DNA
tgattcacctccagggctcata

SEQ ID NO: 40385 - DNA, 22 bp, synthetic construct
  misc_feature 1..22: note = chemically synthesized
  source 1..22: mol_type = other DNA
attcacctccagggctcatatg

SEQ ID NO: 40386 - DNA, 22 bp, synthetic construct
  misc_feature 1..22: note = chemically synthesized
  source 1..22: mol_type = other DNA
acctccagggctcatatggcaa

SEQ ID NO: 40387 - DNA, 22 bp, synthetic construct
  misc_feature 1..22: note = chemically synthesized
  source 1..22: mol_type = other DNA
cagggctcatatggcaatgggg

SEQ ID NO: 40388 - DNA, 22 bp, synthetic construct
  misc_feature 1..22: note = chemically synthesized
  source 1..22: mol_type = other DNA
atatggcaatggggatttaata

SEQ ID NO: 40389 - DNA, 22 bp, synthetic construct
  misc_feature 1..22: note = chemically synthesized
  source 1..22: mol_type = other DNA
aatagggtttatttgttggtga

SEQ ID NO: 40390 - DNA, 22 bp, synthetic construct
  misc_feature 1..22: note = chemically synthesized
  source 1..22: mol_type = other DNA
atagggtttatttgttggtgaa

SEQ ID NO: 40391 - DNA, 22 bp, synthetic construct
  misc_feature 1..22: note = chemically synthesized
  source 1..22: mol_type = other DNA
atttgttggtgaagaaacatta

SEQ ID NO: 40392 - DNA, 22 bp, synthetic construct
  misc_feature 1..22: note = chemically synthesized
  source 1..22: mol_type = other DNA
tttgttggtgaagaaacattaa

SEQ ID NO: 40393 - DNA, 22 bp, synthetic construct
  misc_feature 1..22: note = chemically synthesized
  source 1..22: mol_type = other DNA
gttggtgaagaaacattaaaca

SEQ ID NO: 40394 - DNA, 22 bp, synthetic construct
  misc_feature 1..22: note = chemically synthesized
  source 1..22: mol_type = other DNA
ttggtgaagaaacattaaacaa

SEQ ID NO: 40395 - DNA, 22 bp, synthetic construct
  misc_feature 1..22: note = chemically synthesized
  source 1..22: mol_type = other DNA
gtgaagaaacattaaacaaatc

SEQ ID NO: 40396 - DNA, 22 bp, synthetic construct
  misc_feature 1..22: note = chemically synthesized
  source 1..22: mol_type = other DNA
aacaaatcttttaataggaaaa

SEQ ID NO: 40397 - DNA, 22 bp, synthetic construct
  misc_feature 1..22: note = chemically synthesized
  source 1..22: mol_type = other DNA
ttaataggaaaaatacttttat

SEQ ID NO: 40398 - DNA, 22 bp, synthetic construct
  misc_feature 1..22: note = chemically synthesized
  source 1..22: mol_type = other DNA
taataggaaaaatacttttata

SEQ ID NO: 40399 - DNA, 22 bp, synthetic construct
  misc_feature 1..22: note = chemically synthesized
  source 1..22: mol_type = other DNA
aataggaaaaatacttttatat

SEQ ID NO: 40400 - DNA, 22 bp, synthetic construct
  misc_feature 1..22: note = chemically synthesized
  source 1..22: mol_type = other DNA
ataggaaaaatacttttatatt

SEQ ID NO: 40401 - DNA, 22 bp, synthetic construct
  misc_feature 1..22: note = chemically synthesized
  source 1..22: mol_type = other DNA
ttatattataggcaaaatgtag

SEQ ID NO: 40402 - DNA, 22 bp, synthetic construct
  misc_feature 1..22: note = chemically synthesized
  source 1..22: mol_type = other DNA
tatattataggcaaaatgtaga

SEQ ID NO: 40403 - DNA, 22 bp, synthetic construct
  misc_feature 1..22: note = chemically synthesized
  source 1..22: mol_type = other DNA
atattataggcaaaatgtagat

SEQ ID NO: 40404 - DNA, 22 bp, synthetic construct
  misc_feature 1..22: note = chemically synthesized
  source 1..22: mol_type = other DNA
tattataggcaaaatgtagatg

SEQ ID NO: 40405 - DNA, 22 bp, synthetic construct
  misc_feature 1..22: note = chemically synthesized
  source 1..22: mol_type = other DNA
taggcaaaatgtagatgtatat

SEQ ID NO: 40406 - DNA, 22 bp, synthetic construct
  misc_feature 1..22: note = chemically synthesized
  source 1..22: mol_type = other DNA
ctactgaagtaaatgtatttta

SEQ ID NO: 40407 - DNA, 22 bp, synthetic construct
  misc_feature 1..22: note = chemically synthesized
  source 1..22: mol_type = other DNA
ctgaagtaaatgtattttatta

SEQ ID NO: 40408 - DNA, 22 bp, synthetic construct
  misc_feature 1..22: note = chemically synthesized
  source 1..22: mol_type = other DNA
aagtaaatgtattttattaatg

SEQ ID NO: 40409 - DNA, 22 bp, synthetic construct
  misc_feature 1..22: note = chemically synthesized
  source 1..22: mol_type = other DNA
tattaatggtgtgagaatttct

SEQ ID NO: 40410 - DNA, 22 bp, synthetic construct
  misc_feature 1..22: note = chemically synthesized
  source 1..22: mol_type = other DNA
attaatggtgtgagaatttctt

SEQ ID NO: 40411 - DNA, 22 bp, synthetic construct
  misc_feature 1..22: note = chemically synthesized
  source 1..22: mol_type = other DNA
ttaatggtgtgagaatttcttc

SEQ ID NO: 40412 - DNA, 22 bp, synthetic construct
  misc_feature 1..22: note = chemically synthesized
  source 1..22: mol_type = other DNA
atggtgtgagaatttcttcctc

SEQ ID NO: 40413 - DNA, 22 bp, synthetic construct
  misc_feature 1..22: note = chemically synthesized
  source 1..22: mol_type = other DNA
cttcctcactgtggtgtgtgaa

SEQ ID NO: 40414 - DNA, 22 bp, synthetic construct
  misc_feature 1..22: note = chemically synthesized
  source 1..22: mol_type = other DNA
ttcctcactgtggtgtgtgaat

SEQ ID NO: 40415 - DNA, 22 bp, synthetic construct
  misc_feature 1..22: note = chemically synthesized
  source 1..22: mol_type = other DNA
cctcactgtggtgtgtgaatgt

SEQ ID NO: 40416 - DNA, 22 bp, synthetic construct
  misc_feature 1..22: note = chemically synthesized
  source 1..22: mol_type = other DNA
ctcactgtggtgtgtgaatgtg

SEQ ID NO: 40417 - DNA, 22 bp, synthetic construct
  misc_feature 1..22: note = chemically synthesized
  source 1..22: mol_type = other DNA
actgtggtgtgtgaatgtgtat

SEQ ID NO: 40418 - DNA, 22 bp, synthetic construct
  misc_feature 1..22: note = chemically synthesized
  source 1..22: mol_type = other DNA
tggtgtgtgaatgtgtatgcat

SEQ ID NO: 40419 - DNA, 22 bp, synthetic construct
  misc_feature 1..22: note = chemically synthesized
  source 1..22: mol_type = other DNA
gcatgtgtaaaagacttagcaa

SEQ ID NO: 40420 - DNA, 22 bp, synthetic construct
  misc_feature 1..22: note = chemically synthesized
  source 1..22: mol_type = other DNA
catgtgtaaaagacttagcaat

SEQ ID NO: 40421 - DNA, 22 bp, synthetic construct
  misc_feature 1..22: note = chemically synthesized
  source 1..22: mol_type = other DNA
agcaatttgtgaatagaagatg

SEQ ID NO: 40422 - DNA, 22 bp, synthetic construct
  misc_feature 1..22: note = chemically synthesized
  source 1..22: mol_type = other DNA
gcaatttgtgaatagaagatgt

SEQ ID NO: 40423 - DNA, 22 bp, synthetic construct
  misc_feature 1..22: note = chemically synthesized
  source 1..22: mol_type = other DNA
gtgaatagaagatgtttctccg

SEQ ID NO: 40424 - DNA, 22 bp, synthetic construct
  misc_feature 1..22: note = chemically synthesized
  source 1..22: mol_type = other DNA
tgaatagaagatgtttctccgc

SEQ ID NO: 40425 - DNA, 22 bp, synthetic construct
  misc_feature 1..22: note = chemically synthesized
  source 1..22: mol_type = other DNA
ctccgcttctcactgagcatgg

SEQ ID NO: 40426 - DNA, 22 bp, synthetic construct
  misc_feature 1..22: note = chemically synthesized
  source 1..22: mol_type = other DNA
tccgcttctcactgagcatggc

SEQ ID NO: 40427 - DNA, 22 bp, synthetic construct
  misc_feature 1..22: note = chemically synthesized
  source 1..22: mol_type = other DNA
cgcttctcactgagcatggctg

SEQ ID NO: 40428 - DNA, 22 bp, synthetic construct
  misc_feature 1..22: note = chemically synthesized
  source 1..22: mol_type = other DNA
ctcactgagcatggctgtaaaa

SEQ ID NO: 40429 - DNA, 22 bp, synthetic construct
  misc_feature 1..22: note = chemically synthesized
  source 1..22: mol_type = other DNA
tcactgagcatggctgtaaaag

SEQ ID NO: 40430 - DNA, 22 bp, synthetic construct
  misc_feature 1..22: note = chemically synthesized
  source 1..22: mol_type = other DNA
actgagcatggctgtaaaagaa

SEQ ID NO: 40431 - DNA, 22 bp, synthetic construct
  misc_feature 1..22: note = chemically synthesized
  source 1..22: mol_type = other DNA
agcatggctgtaaaagaaactt

SEQ ID NO: 40432 - DNA, 22 bp, synthetic construct
  misc_feature 1..22: note = chemically synthesized
  source 1..22: mol_type = other DNA
taaaagaaactttttcctctcc

SEQ ID NO: 40433 - DNA, 22 bp, synthetic construct
  misc_feature 1..22: note = chemically synthesized
  source 1..22: mol_type = other DNA
tttcctctccccgggcattcca

SEQ ID NO: 40434 - DNA, 22 bp, synthetic construct
  misc_feature 1..22: note = chemically synthesized
  source 1..22: mol_type = other DNA
ttcctctccccgggcattccag

SEQ ID NO: 40435 - DNA, 22 bp, synthetic construct
  misc_feature 1..22: note = chemically synthesized
  source 1..22: mol_type = other DNA
tcctctccccgggcattccagc

SEQ ID NO: 40436 - DNA, 22 bp, synthetic construct
  misc_feature 1..22: note = chemically synthesized
  source 1..22: mol_type = other DNA
cctctccccgggcattccagca

SEQ ID NO: 40437 - DNA, 22 bp, synthetic construct
  misc_feature 1..22: note = chemically synthesized
  source 1..22: mol_type = other DNA
ctctccccgggcattccagcac

SEQ ID NO: 40438 - DNA, 22 bp, synthetic construct
  misc_feature 1..22: note = chemically synthesized
  source 1..22: mol_type = other DNA
tccccgggcattccagcacaca

SEQ ID NO: 40439 - DNA, 22 bp, synthetic construct
  misc_feature 1..22: note = chemically synthesized
  source 1..22: mol_type = other DNA
cccgggcattccagcacacatt

SEQ ID NO: 40440 - DNA, 22 bp, synthetic construct
  misc_feature 1..22: note = chemically synthesized
  source 1..22: mol_type = other DNA
cagcacacattggaaagataac

SEQ ID NO: 40441 - DNA, 22 bp, synthetic construct
  misc_feature 1..22: note = chemically synthesized
  source 1..22: mol_type = other DNA
gaaagataacacgtccacagaa

SEQ ID NO: 40442 - DNA, 22 bp, synthetic construct
  misc_feature 1..22: note = chemically synthesized
  source 1..22: mol_type = other DNA
gctttccaaaagagcttatcag

SEQ ID NO: 40443 - DNA, 22 bp, synthetic construct
  misc_feature 1..22: note = chemically synthesized
  source 1..22: mol_type = other DNA
tccaaaagagcttatcagagaa

SEQ ID NO: 40444 - DNA, 22 bp, synthetic construct
  misc_feature 1..22: note = chemically synthesized
  source 1..22: mol_type = other DNA
ccaaaagagcttatcagagaat

SEQ ID NO: 40445 - DNA, 22 bp, synthetic construct
  misc_feature 1..22: note = chemically synthesized
  source 1..22: mol_type = other DNA
caaaagagcttatcagagaatg

SEQ ID NO: 40446 - DNA, 22 bp, synthetic construct
  misc_feature 1..22: note = chemically synthesized
  source 1..22: mol_type = other DNA
atcagagaatgtgccccccagg

SEQ ID NO: 40447 - DNA, 22 bp, synthetic construct
  misc_feature 1..22: note = chemically synthesized
  source 1..22: mol_type = other DNA
tcagagaatgtgccccccaggt

SEQ ID NO: 40448 - DNA, 22 bp, synthetic construct
  misc_feature 1..22: note = chemically synthesized
  source 1..22: mol_type = other DNA
aaacatatgttaatcctgtggc

SEQ ID NO: 40449 - DNA, 22 bp, synthetic construct
  misc_feature 1..22: note = chemically synthesized
  source 1..22: mol_type = other DNA
atcctgtggcagagaagtttgt

SEQ ID NO: 40450 - DNA, 22 bp, synthetic construct
  misc_feature 1..22: note = chemically synthesized
  source 1..22: mol_type = other DNA
tggcagagaagtttgttctagc

SEQ ID NO: 40451 - DNA, 22 bp, synthetic construct
  misc_feature 1..22: note = chemically synthesized
  source 1..22: mol_type = other DNA
gttctagcctttgggtgtagcc

SEQ ID NO: 40452 - DNA, 22 bp, synthetic construct
  misc_feature 1..22: note = chemically synthesized
  source 1..22: mol_type = other DNA
ttctagcctttgggtgtagcct

SEQ ID NO: 40453 - DNA, 22 bp, synthetic construct
  misc_feature 1..22: note = chemically synthesized
  source 1..22: mol_type = other DNA
tagcctttgggtgtagcctgct

SEQ ID NO: 40454 - DNA, 22 bp, synthetic construct
  misc_feature 1..22: note = chemically synthesized
  source 1..22: mol_type = other DNA
gcctttgggtgtagcctgctga

SEQ ID NO: 40455 - DNA, 22 bp, synthetic construct
  misc_feature 1..22: note = chemically synthesized
  source 1..22: mol_type = other DNA
tgggtgtagcctgctgaataag

SEQ ID NO: 40456 - DNA, 22 bp, synthetic construct
  misc_feature 1..22: note = chemically synthesized
  source 1..22: mol_type = other DNA
gggtgtagcctgctgaataagt

SEQ ID NO: 40457 - DNA, 22 bp, synthetic construct
  misc_feature 1..22: note = chemically synthesized
  source 1..22: mol_type = other DNA
ggtgtagcctgctgaataagtt

SEQ ID NO: 40458 - DNA, 22 bp, synthetic construct
  misc_feature 1..22: note = chemically synthesized
  source 1..22: mol_type = other DNA
ctgaataagttcacagtgatct

SEQ ID NO: 40459 - DNA, 22 bp, synthetic construct
  misc_feature 1..22: note = chemically synthesized
  source 1..22: mol_type = other DNA
aataagttcacagtgatctaca

SEQ ID NO: 40460 - DNA, 22 bp, synthetic construct
  misc_feature 1..22: note = chemically synthesized
  source 1..22: mol_type = other DNA
acagtgatctacatcctagttt

SEQ ID NO: 40461 - DNA, 22 bp, synthetic construct
  misc_feature 1..22: note = chemically synthesized
  source 1..22: mol_type = other DNA
catcctagtttccatgggctga

SEQ ID NO: 40462 - DNA, 22 bp, synthetic construct
  misc_feature 1..22: note = chemically synthesized
  source 1..22: mol_type = other DNA
gtttccatgggctgaaatagaa

SEQ ID NO: 40463 - DNA, 22 bp, synthetic construct
  misc_feature 1..22: note = chemically synthesized
  source 1..22: mol_type = other DNA
ccatgggctgaaatagaatatt

SEQ ID NO: 40464 - DNA, 22 bp, synthetic construct
  misc_feature 1..22: note = chemically synthesized
  source 1..22: mol_type = other DNA
catgggctgaaatagaatattc

SEQ ID NO: 40465 - DNA, 22 bp, synthetic construct
  misc_feature 1..22: note = chemically synthesized
  source 1..22: mol_type = other DNA
aaatagaatattcatatcccct

SEQ ID NO: 40466 - DNA, 22 bp, synthetic construct
  misc_feature 1..22: note = chemically synthesized
  source 1..22: mol_type = other DNA
atatcccctgcactccctacac

SEQ ID NO: 40467 - DNA, 22 bp, synthetic construct
  misc_feature 1..22: note = chemically synthesized
  source 1..22: mol_type = other DNA
cactccctacacacacagacat

SEQ ID NO: 40468 - DNA, 22 bp, synthetic construct
  misc_feature 1..22: note = chemically synthesized
  source 1..22: mol_type = other DNA
cctacacacacagacatagaca

SEQ ID NO: 40469 - DNA, 22 bp, synthetic construct
  misc_feature 1..22: note = chemically synthesized
  source 1..22: mol_type = other DNA
cacacacagacatagacaccaa

SEQ ID NO: 40470 - DNA, 22 bp, synthetic construct
  misc_feature 1..22: note = chemically synthesized
  source 1..22: mol_type = other DNA
ccccaaaaaactctttgcttaa

SEQ ID NO: 40471 - DNA, 22 bp, synthetic construct
  misc_feature 1..22: note = chemically synthesized
  source 1..22: mol_type = other DNA
cccaaaaaactctttgcttaat

SEQ ID NO: 40472 - DNA, 22 bp, synthetic construct
  misc_feature 1..22: note = chemically synthesized
  source 1..22: mol_type = other DNA
tttgcttaatcttctcctgctc

SEQ ID NO: 40473 - DNA, 22 bp, synthetic construct
  misc_feature 1..22: note = chemically synthesized
  source 1..22: mol_type = other DNA
tgcttaatcttctcctgctctg

SEQ ID NO: 40474 - DNA, 22 bp, synthetic construct
  misc_feature 1..22: note = chemically synthesized
  source 1..22: mol_type = other DNA
gcttaatcttctcctgctctgt

SEQ ID NO: 40475 - DNA, 22 bp, synthetic construct
  misc_feature 1..22: note = chemically synthesized
  source 1..22: mol_type = other DNA
cttaatcttctcctgctctgta

SEQ ID NO: 40476 - DNA, 22 bp, synthetic construct
  misc_feature 1..22: note = chemically synthesized
  source 1..22: mol_type = other DNA
aatcttctcctgctctgtattt

SEQ ID NO: 40477 - DNA, 22 bp, synthetic construct
  misc_feature 1..22: note = chemically synthesized
  source 1..22: mol_type = other DNA
atcttctcctgctctgtatttt

SEQ ID NO: 40478 - DNA, 22 bp, synthetic construct
  misc_feature 1..22: note = chemically synthesized
  source 1..22: mol_type = other DNA
ctcctgctctgtattttctttg

SEQ ID NO: 40479 - DNA, 22 bp, synthetic construct
  misc_feature 1..22: note = chemically synthesized
  source 1..22: mol_type = other DNA
tcctgctctgtattttctttga

SEQ ID NO: 40480 - DNA, 22 bp, synthetic construct
  misc_feature 1..22: note = chemically synthesized
  source 1..22: mol_type = other DNA
ctgctctgtattttctttgata

SEQ ID NO: 40481 - DNA, 22 bp, synthetic construct
  misc_feature 1..22: note = chemically synthesized
  source 1..22: mol_type = other DNA
ctctgtattttctttgatattt

SEQ ID NO: 40482 - DNA, 22 bp, synthetic construct
  misc_feature 1..22: note = chemically synthesized
  source 1..22: mol_type = other DNA
tgtattttctttgatattttct

SEQ ID NO: 40483 - DNA, 22 bp, synthetic construct
  misc_feature 1..22: note = chemically synthesized
  source 1..22: mol_type = other DNA
tattttctttgatattttcttg

SEQ ID NO: 40484 - DNA, 22 bp, synthetic construct
  misc_feature 1..22: note = chemically synthesized
  source 1..22: mol_type = other DNA
tctttgatattttcttgaatgg

SEQ ID NO: 40485 - DNA, 22 bp, synthetic construct
  misc_feature 1..22: note = chemically synthesized
  source 1..22: mol_type = other DNA
ctttgatattttcttgaatggc

SEQ ID NO: 40486 - DNA, 22 bp, synthetic construct
  misc_feature 1..22: note = chemically synthesized
  source 1..22: mol_type = other DNA
tttgatattttcttgaatggct

SEQ ID NO: 40487 - DNA, 22 bp, synthetic construct
  misc_feature 1..22: note = chemically synthesized
  source 1..22: mol_type = other DNA
tgatattttcttgaatggcttc

SEQ ID NO: 40488 - DNA, 22 bp, synthetic construct
  misc_feature 1..22: note = chemically synthesized
  source 1..22: mol_type = other DNA
gatattttcttgaatggcttcc

SEQ ID NO: 40489 - DNA, 22 bp, synthetic construct
  misc_feature 1..22: note = chemically synthesized
  source 1..22: mol_type = other DNA
atattttcttgaatggcttcca

SEQ ID NO: 40490 - DNA, 22 bp, synthetic construct
  misc_feature 1..22: note = chemically synthesized
  source 1..22: mol_type = other DNA
tcttgaatggcttccactaaat

SEQ ID NO: 40491 - DNA, 22 bp, synthetic construct
  misc_feature 1..22: note = chemically synthesized
  source 1..22: mol_type = other DNA
cttgaatggcttccactaaatt

SEQ ID NO: 40492 - DNA, 22 bp, synthetic construct
  misc_feature 1..22: note = chemically synthesized
  source 1..22: mol_type = other DNA
ttgaatggcttccactaaattc

SEQ ID NO: 40493 - DNA, 22 bp, synthetic construct
  misc_feature 1..22: note = chemically synthesized
  source 1..22: mol_type = other DNA
gaatggcttccactaaattcaa

SEQ ID NO: 40494 - DNA, 22 bp, synthetic construct
  misc_feature 1..22: note = chemically synthesized
  source 1..22: mol_type = other DNA
aatggcttccactaaattcaaa

SEQ ID NO: 40495 - DNA, 22 bp, synthetic construct
  misc_feature 1..22: note = chemically synthesized
  source 1..22: mol_type = other DNA
ccactaaattcaaatgtgtttg

SEQ ID NO: 40496 - DNA, 22 bp, synthetic construct
  misc_feature 1..22: note = chemically synthesized
  source 1..22: mol_type = other DNA
cactaaattcaaatgtgtttga

SEQ ID NO: 40497 - DNA, 22 bp, synthetic construct
  misc_feature 1..22: note = chemically synthesized
  source 1..22: mol_type = other DNA
aattcaaatgtgtttgacttta

SEQ ID NO: 40498 - DNA, 22 bp, synthetic construct
  misc_feature 1..22: note = chemically synthesized
  source 1..22: mol_type = other DNA
aaatgtgtttgactttaaagtc

SEQ ID NO: 40499 - DNA, 22 bp, synthetic construct
  misc_feature 1..22: note = chemically synthesized
  source 1..22: mol_type = other DNA
gactttaaagtcaacttgtaaa

SEQ ID NO: 40500 - DNA, 22 bp, synthetic construct
  misc_feature 1..22: note = chemically synthesized
  source 1..22: mol_type = other DNA
actttaaagtcaacttgtaaaa

SEQ ID NO: 40501 - DNA, 22 bp, synthetic construct
  misc_feature 1..22: note = chemically synthesized
  source 1..22: mol_type = other DNA
taaagtcaacttgtaaaatttt

SEQ ID NO: 40502 - DNA, 22 bp, synthetic construct
  misc_feature 1..22: note = chemically synthesized
  source 1..22: mol_type = other DNA
aaagtcaacttgtaaaatttta

SEQ ID NO: 40503 - DNA, 22 bp, synthetic construct
  misc_feature 1..22: note = chemically synthesized
  source 1..22: mol_type = other DNA
aagtcaacttgtaaaattttat

SEQ ID NO: 40504 - DNA, 22 bp, synthetic construct
  misc_feature 1..22: note = chemically synthesized
  source 1..22: mol_type = other DNA
gtaaaattttatctggtaattt

SEQ ID NO: 40505 - DNA, 22 bp, synthetic construct
  misc_feature 1..22: note = chemically synthesized
  source 1..22: mol_type = other DNA
taaaattttatctggtaattta

SEQ ID NO: 40506 - DNA, 22 bp, synthetic construct
  misc_feature 1..22: note = chemically synthesized
  source 1..22: mol_type = other DNA
tatctggtaatttatagattaa

SEQ ID NO: 40507 - DNA, 22 bp, synthetic construct
  misc_feature 1..22: note = chemically synthesized
  source 1..22: mol_type = other DNA
atctggtaatttatagattaaa

SEQ ID NO: 40508 - DNA, 22 bp, synthetic construct
  misc_feature 1..22: note = chemically synthesized
  source 1..22: mol_type = other DNA
tctggtaatttatagattaaat

SEQ ID NO: 40509 - DNA, 22 bp, synthetic construct
  misc_feature 1..22: note = chemically synthesized
  source 1..22: mol_type = other DNA
gtaatttatagattaaattgca

SEQ ID NO: 40510 - DNA, 22 bp, synthetic construct
  misc_feature 1..22: note = chemically synthesized
  source 1..22: mol_type = other DNA
atagattaaattgcaagcatct

SEQ ID NO: 40511 - DNA, 22 bp, synthetic construct
  misc_feature 1..22: note = chemically synthesized
  source 1..22: mol_type = other DNA
tagattaaattgcaagcatcta

SEQ ID NO: 40512 - DNA, 22 bp, synthetic construct
  misc_feature 1..22: note = chemically synthesized
  source 1..22: mol_type = other DNA
aattgcaagcatctacctccct

SEQ ID NO: 40513 - DNA, 22 bp, synthetic construct
  misc_feature 1..22: note = chemically synthesized
  source 1..22: mol_type = other DNA
caagcatctacctccctttcat

SEQ ID NO: 40514 - DNA, 22 bp, synthetic construct
  misc_feature 1..22: note = chemically synthesized
  source 1..22: mol_type = other DNA
cctccctttcatcagactctcc

SEQ ID NO: 40515 - DNA, 22 bp, synthetic construct
  misc_feature 1..22: note = chemically synthesized
  source 1..22: mol_type = other DNA
cctttcatcagactctccctgc

SEQ ID NO: 40516 - DNA, 22 bp, synthetic construct
  misc_feature 1..22: note = chemically synthesized
  source 1..22: mol_type = other DNA
tcatcagactctccctgcaggg

SEQ ID NO: 40517 - DNA, 22 bp, synthetic construct
  misc_feature 1..22: note = chemically synthesized
  source 1..22: mol_type = other DNA
catcagactctccctgcagggc

SEQ ID NO: 40518 - DNA, 22 bp, synthetic construct
  misc_feature 1..22: note = chemically synthesized
  source 1..22: mol_type = other DNA
atcagactctccctgcagggca

SEQ ID NO: 40519 - DNA, 22 bp, synthetic construct
  misc_feature 1..22: note = chemically synthesized
  source 1..22: mol_type = other DNA
tccctgcagggcaagttcatct

SEQ ID NO: 40520 - DNA, 22 bp, synthetic construct
  misc_feature 1..22: note = chemically synthesized
  source 1..22: mol_type = other DNA
cctgcagggcaagttcatctaa

SEQ ID NO: 40521 - DNA, 22 bp, synthetic construct
  misc_feature 1..22: note = chemically synthesized
  source 1..22: mol_type = other DNA
cagggcaagttcatctaactat

SEQ ID NO: 40522 - DNA, 22 bp, synthetic construct
  misc_feature 1..22: note = chemically synthesized
  source 1..22: mol_type = other DNA
atctaactatgtatgtgcttca

SEQ ID NO: 40523 - DNA, 22 bp, synthetic construct
  misc_feature 1..22: note = chemically synthesized
  source 1..22: mol_type = other DNA
actatgtatgtgcttcaagatg

SEQ ID NO: 40524 - DNA, 22 bp, synthetic construct
  misc_feature 1..22: note = chemically synthesized
  source 1..22: mol_type = other DNA
tgtatgtgcttcaagatggaac

SEQ ID NO: 40525 - DNA, 22 bp, synthetic construct
  misc_feature 1..22: note = chemically synthesized
  source 1..22: mol_type = other DNA
caagatggaactcctgagttca

SEQ ID NO: 40526 - DNA, 22 bp, synthetic construct
  misc_feature 1..22: note = chemically synthesized
  source 1..22: mol_type = other DNA
aagatggaactcctgagttcac

SEQ ID NO: 40527 - DNA, 22 bp, synthetic construct
  misc_feature 1..22: note = chemically synthesized
  source 1..22: mol_type = other DNA
ctgagttcacaggtgatttata

SEQ ID NO: 40528 - DNA, 22 bp, synthetic construct
  misc_feature 1..22: note = chemically synthesized
  source 1..22: mol_type = other DNA
agttcacaggtgatttataaac

SEQ ID NO: 40529 - DNA, 22 bp, synthetic construct
  misc_feature 1..22: note = chemically synthesized
  source 1..22: mol_type = other DNA
acaggtgatttataaaccaaag

SEQ ID NO: 40530 - DNA, 22 bp, synthetic construct
  misc_feature 1..22: note = chemically synthesized
  source 1..22: mol_type = other DNA
ataaaccaaagcatgcccacta

SEQ ID NO: 40531 - DNA, 22 bp, synthetic construct
  misc_feature 1..22: note = chemically synthesized
  source 1..22: mol_type = other DNA
taaaccaaagcatgcccactac

SEQ ID NO: 40532 - DNA, 22 bp, synthetic construct
  misc_feature 1..22: note = chemically synthesized
  source 1..22: mol_type = other DNA
caaaactctcaccctccagaga

SEQ ID NO: 40533 - DNA, 22 bp, synthetic construct
  misc_feature 1..22: note = chemically synthesized
  source 1..22: mol_type = other DNA
tcaccctccagagatttgcctc

SEQ ID NO: 40534 - DNA, 22 bp, synthetic construct
  misc_feature 1..22: note = chemically synthesized
  source 1..22: mol_type = other DNA
accctccagagatttgcctcaa

SEQ ID NO: 40535 - DNA, 22 bp, synthetic construct
  misc_feature 1..22: note = chemically synthesized
  source 1..22: mol_type = other DNA
cagagatttgcctcaagggaca

SEQ ID NO: 40536 - DNA, 22 bp, synthetic construct
  misc_feature 1..22: note = chemically synthesized
  source 1..22: mol_type = other DNA
gcctcaagggacaacaccctgc

SEQ ID NO: 40537 - DNA, 22 bp, synthetic construct
  misc_feature 1..22: note = chemically synthesized
  source 1..22: mol_type = other DNA
cctcaagggacaacaccctgct

SEQ ID NO: 40538 - DNA, 22 bp, synthetic construct
  misc_feature 1..22: note = chemically synthesized
  source 1..22: mol_type = other DNA
aagggacaacaccctgctcaca

SEQ ID NO: 40539 - DNA, 22 bp, synthetic construct
  misc_feature 1..22: note = chemically synthesized
  source 1..22: mol_type = other DNA
ctcacaaaggcaccagcaggca

SEQ ID NO: 40540 - DNA, 22 bp, synthetic construct
  misc_feature 1..22: note = chemically synthesized
  source 1..22: mol_type = other DNA
acaaaggcaccagcaggcaact

SEQ ID NO: 40541 - DNA, 22 bp, synthetic construct
  misc_feature 1..22: note = chemically synthesized
  source 1..22: mol_type = other DNA
ctcaactacctggtggataagg

SEQ ID NO: 40542 - DNA, 22 bp, synthetic construct
  misc_feature 1..22: note = chemically synthesized
  source 1..22: mol_type = other DNA
aactacctggtggataaggtgc

SEQ ID NO: 40543 - DNA, 22 bp, synthetic construct
  misc_feature 1..22: note = chemically synthesized
  source 1..22: mol_type = other DNA
cctggtggataaggtgcccaag

SEQ ID NO: 40544 - DNA, 22 bp, synthetic construct
  misc_feature 1..22: note = chemically synthesized
  source 1..22: mol_type = other DNA
gtggataaggtgcccaagctag

SEQ ID NO: 40545 - DNA, 22 bp, synthetic construct
  misc_feature 1..22: note = chemically synthesized
  source 1..22: mol_type = other DNA
gcatggacccctgaatccttgc

SEQ ID NO: 40546 - DNA, 22 bp, synthetic construct
  misc_feature 1..22: note = chemically synthesized
  source 1..22: mol_type = other DNA
aatccttgctcgcctcctctgt

SEQ ID NO: 40547 - DNA, 22 bp, synthetic construct
  misc_feature 1..22: note = chemically synthesized
  source 1..22: mol_type = other DNA
gctcgcctcctctgttgccttt

SEQ ID NO: 40548 - DNA, 22 bp, synthetic construct
  misc_feature 1..22: note = chemically synthesized
  source 1..22: mol_type = other DNA
ctcgcctcctctgttgcctttt

SEQ ID NO: 40549 - DNA, 22 bp, synthetic construct
  misc_feature 1..22: note = chemically synthesized
  source 1..22: mol_type = other DNA
gcctcctctgttgccttttaaa

SEQ ID NO: 40550 - DNA, 22 bp, synthetic construct
  misc_feature 1..22: note = chemically synthesized
  source 1..22: mol_type = other DNA
ctctgttgccttttaaaagtgc

SEQ ID NO: 40551 - DNA, 22 bp, synthetic construct
  misc_feature 1..22: note = chemically synthesized
  source 1..22: mol_type = other DNA
tgttgccttttaaaagtgccac

SEQ ID NO: 40552 - DNA, 22 bp, synthetic construct
  misc_feature 1..22: note = chemically synthesized
  source 1..22: mol_type = other DNA
ttgccttttaaaagtgccactt

SEQ ID NO: 40553 - DNA, 22 bp, synthetic construct
  misc_feature 1..22: note = chemically synthesized
  source 1..22: mol_type = other DNA
ccttttaaaagtgccactttct

SEQ ID NO: 40554 - DNA, 22 bp, synthetic construct
  misc_feature 1..22: note = chemically synthesized
  source 1..22: mol_type = other DNA
ttaaaagtgccactttctgctc

SEQ ID NO: 40555 - DNA, 22 bp, synthetic construct
  misc_feature 1..22: note = chemically synthesized
  source 1..22: mol_type = other DNA
taaaagtgccactttctgctcc

SEQ ID NO: 40556 - DNA, 22 bp, synthetic construct
  misc_feature 1..22: note = chemically synthesized
  source 1..22: mol_type = other DNA
aaaagtgccactttctgctcct

SEQ ID NO: 40557 - DNA, 22 bp, synthetic construct
  misc_feature 1..22: note = chemically synthesized
  source 1..22: mol_type = other DNA
aaagtgccactttctgctccta

SEQ ID NO: 40558 - DNA, 22 bp, synthetic construct
  misc_feature 1..22: note = chemically synthesized
  source 1..22: mol_type = other DNA
tctgctcctaaagtgaagtagt

SEQ ID NO: 40559 - DNA, 22 bp, synthetic construct
  misc_feature 1..22: note = chemically synthesized
  source 1..22: mol_type = other DNA
ctgctcctaaagtgaagtagta

SEQ ID NO: 40560 - DNA, 22 bp, synthetic construct
  misc_feature 1..22: note = chemically synthesized
  source 1..22: mol_type = other DNA
tgctcctaaagtgaagtagtac

SEQ ID NO: 40561 - DNA, 22 bp, synthetic construct
  misc_feature 1..22: note = chemically synthesized
  source 1..22: mol_type = other DNA
ctcctaaagtgaagtagtacgg

SEQ ID NO: 40562 - DNA, 22 bp, synthetic construct
  misc_feature 1..22: note = chemically synthesized
  source 1..22: mol_type = other DNA
ctaaagtgaagtagtacggcag

SEQ ID NO: 40563 - DNA, 22 bp, synthetic construct
  misc_feature 1..22: note = chemically synthesized
  source 1..22: mol_type = other DNA
aagtgaagtagtacggcaggac

SEQ ID NO: 40564 - DNA, 22 bp, synthetic construct
  misc_feature 1..22: note = chemically synthesized
  source 1..22: mol_type = other DNA
ctgcatttcttcccctaagcta

SEQ ID NO: 40565 - DNA, 22 bp, synthetic construct
  misc_feature 1..22: note = chemically synthesized
  source 1..22: mol_type = other DNA
catttcttcccctaagctagct

SEQ ID NO: 40566 - DNA, 22 bp, synthetic construct
  misc_feature 1..22: note = chemically synthesized
  source 1..22: mol_type = other DNA
cttcccctaagctagctttgga

SEQ ID NO: 40567 - DNA, 22 bp, synthetic construct
  misc_feature 1..22: note = chemically synthesized
  source 1..22: mol_type = other DNA
ttcccctaagctagctttggaa

SEQ ID NO: 40568 - DNA, 22 bp, synthetic construct
  misc_feature 1..22: note = chemically synthesized
  source 1..22: mol_type = other DNA
cccctaagctagctttggaagc

SEQ ID NO: 40569 - DNA, 22 bp, synthetic construct
  misc_feature 1..22: note = chemically synthesized
  source 1..22: mol_type = other DNA
ccctaagctagctttggaagca

SEQ ID NO: 40570 - DNA, 22 bp, synthetic construct
  misc_feature 1..22: note = chemically synthesized
  source 1..22: mol_type = other DNA
agctagctttggaagcaaatca

SEQ ID NO: 40571 - DNA, 22 bp, synthetic construct
  misc_feature 1..22: note = chemically synthesized
  source 1..22: mol_type = other DNA
gctttggaagcaaatcactttc

SEQ ID NO: 40572 - DNA, 22 bp, synthetic construct
  misc_feature 1..22: note = chemically synthesized
  source 1..22: mol_type = other DNA
tggaagcaaatcactttcttta

SEQ ID NO: 40573 - DNA, 22 bp, synthetic construct
  misc_feature 1..22: note = chemically synthesized
  source 1..22: mol_type = other DNA
ggaagcaaatcactttctttat

SEQ ID NO: 40574 - DNA, 22 bp, synthetic construct
  misc_feature 1..22: note = chemically synthesized
  source 1..22: mol_type = other DNA
gaagcaaatcactttctttata

SEQ ID NO: 40575 - DNA, 22 bp, synthetic construct
  misc_feature 1..22: note = chemically synthesized
  source 1..22: mol_type = other DNA
tctttataccagacttctctct

SEQ ID NO: 40576 - DNA, 22 bp, synthetic construct
  misc_feature 1..22: note = chemically synthesized
  source 1..22: mol_type = other DNA
ctttataccagacttctctctt

SEQ ID NO: 40577 - DNA, 22 bp, synthetic construct
  misc_feature 1..22: note = chemically synthesized
  source 1..22: mol_type = other DNA
tttataccagacttctctcttc

SEQ ID NO: 40578 - DNA, 22 bp, synthetic construct
  misc_feature 1..22: note = chemically synthesized
  source 1..22: mol_type = other DNA
tataccagacttctctcttctt

SEQ ID NO: 40579 - DNA, 22 bp, synthetic construct
  misc_feature 1..22: note = chemically synthesized
  source 1..22: mol_type = other DNA
ataccagacttctctcttctta

SEQ ID NO: 40580 - DNA, 22 bp, synthetic construct
  misc_feature 1..22: note = chemically synthesized
  source 1..22: mol_type = other DNA
taccagacttctctcttcttaa

SEQ ID NO: 40581 - DNA, 22 bp, synthetic construct
  misc_feature 1..22: note = chemically synthesized
  source 1..22: mol_type = other DNA
ctctcttcttaattggattctg

SEQ ID NO: 40582 - DNA, 22 bp, synthetic construct
  misc_feature 1..22: note = chemically synthesized
  source 1..22: mol_type = other DNA
tctcttcttaattggattctgc

SEQ ID NO: 40583 - DNA, 22 bp, synthetic construct
  misc_feature 1..22: note = chemically synthesized
  source 1..22: mol_type = other DNA
tcttcttaattggattctgcaa

SEQ ID NO: 40584 - DNA, 22 bp, synthetic construct
  misc_feature 1..22: note = chemically synthesized
  source 1..22: mol_type = other DNA
ttcttaattggattctgcaagt

SEQ ID NO: 40585 - DNA, 22 bp, synthetic construct
  misc_feature 1..22: note = chemically synthesized
  source 1..22: mol_type = other DNA
cttaattggattctgcaagtgg

SEQ ID NO: 40586 - DNA, 22 bp, synthetic construct
  misc_feature 1..22: note = chemically synthesized
  source 1..22: mol_type = other DNA
ttaattggattctgcaagtggc

SEQ ID NO: 40587 - DNA, 22 bp, synthetic construct
  misc_feature 1..22: note = chemically synthesized
  source 1..22: mol_type = other DNA
aattggattctgcaagtggcaa

SEQ ID NO: 40588 - DNA, 22 bp, synthetic construct
  misc_feature 1..22: note = chemically synthesized
  source 1..22: mol_type = other DNA
attggattctgcaagtggcaaa

SEQ ID NO: 40589 - DNA, 22 bp, synthetic construct
  misc_feature 1..22: note = chemically synthesized
  source 1..22: mol_type = other DNA
gattctgcaagtggcaaacaat

SEQ ID NO: 40590 - DNA, 22 bp, synthetic construct
  misc_feature 1..22: note = chemically synthesized
  source 1..22: mol_type = other DNA
tgcaagtggcaaacaattaacc

SEQ ID NO: 40591 - DNA, 22 bp, synthetic construct
  misc_feature 1..22: note = chemically synthesized
  source 1..22: mol_type = other DNA
caagtggcaaacaattaacctg

SEQ ID NO: 40592 - DNA, 22 bp, synthetic construct
  misc_feature 1..22: note = chemically synthesized
  source 1..22: mol_type = other DNA
acctgctcttcagttacattgg

SEQ ID NO: 40593 - DNA, 22 bp, synthetic construct
  misc_feature 1..22: note = chemically synthesized
  source 1..22: mol_type = other DNA
ctcttcagttacattggaatgt

SEQ ID NO: 40594 - DNA, 22 bp, synthetic construct
  misc_feature 1..22: note = chemically synthesized
  source 1..22: mol_type = other DNA
ttcagttacattggaatgtgtt

SEQ ID NO: 40595 - DNA, 22 bp, synthetic construct
  misc_feature 1..22: note = chemically synthesized
  source 1..22: mol_type = other DNA
cagttacattggaatgtgttta

SEQ ID NO: 40596 - DNA, 22 bp, synthetic construct
  misc_feature 1..22: note = chemically synthesized
  source 1..22: mol_type = other DNA
agttacattggaatgtgtttag

SEQ ID NO: 40597 - DNA, 22 bp, synthetic construct
  misc_feature 1..22: note = chemically synthesized
  source 1..22: mol_type = other DNA
cattggaatgtgtttagattta

SEQ ID NO: 40598 - DNA, 22 bp, synthetic construct
  misc_feature 1..22: note = chemically synthesized
  source 1..22: mol_type = other DNA
gaatgtgtttagatttattttt

SEQ ID NO: 40599 - DNA, 22 bp, synthetic construct
  misc_feature 1..22: note = chemically synthesized
  source 1..22: mol_type = other DNA
agatttattttttcaaatgttg

SEQ ID NO: 40600 - DNA, 22 bp, synthetic construct
  misc_feature 1..22: note = chemically synthesized
  source 1..22: mol_type = other DNA
gatttattttttcaaatgttgg

SEQ ID NO: 40601 - DNA, 22 bp, synthetic construct
  misc_feature 1..22: note = chemically synthesized
  source 1..22: mol_type = other DNA
attttttcaaatgttggaacaa

SEQ ID NO: 40602 - DNA, 22 bp, synthetic construct
  misc_feature 1..22: note = chemically synthesized
  source 1..22: mol_type = other DNA
ttttttcaaatgttggaacaaa

SEQ ID NO: 40603 - DNA, 22 bp, synthetic construct
  misc_feature 1..22: note = chemically synthesized
  source 1..22: mol_type = other DNA
tttcaaatgttggaacaaagat

SEQ ID NO: 40604 - DNA, 22 bp, synthetic construct
  misc_feature 1..22: note = chemically synthesized
  source 1..22: mol_type = other DNA
ttcaaatgttggaacaaagatg

SEQ ID NO: 40605 - DNA, 22 bp, synthetic construct
  misc_feature 1..22: note = chemically synthesized
  source 1..22: mol_type = other DNA
tcaaatgttggaacaaagatga

SEQ ID NO: 40606 - DNA, 22 bp, synthetic construct
  misc_feature 1..22: note = chemically synthesized
  source 1..22: mol_type = other DNA
caaatgttggaacaaagatgaa

SEQ ID NO: 40607 - DNA, 22 bp, synthetic construct
  misc_feature 1..22: note = chemically synthesized
  source 1..22: mol_type = other DNA
aaatgttggaacaaagatgaaa

SEQ ID NO: 40608 - DNA, 22 bp, synthetic construct
  misc_feature 1..22: note = chemically synthesized
  source 1..22: mol_type = other DNA
gaacaaagatgaaaaagtgaga

SEQ ID NO: 40609 - DNA, 22 bp, synthetic construct
  misc_feature 1..22: note = chemically synthesized
  source 1..22: mol_type = other DNA
gattttttcttggaaatctggc

SEQ ID NO: 40610 - DNA, 22 bp, synthetic construct
  misc_feature 1..22: note = chemically synthesized
  source 1..22: mol_type = other DNA
tttcttggaaatctggcttaaa

SEQ ID NO: 40611 - DNA, 22 bp, synthetic construct
  misc_feature 1..22: note = chemically synthesized
  source 1..22: mol_type = other DNA
ttcttggaaatctggcttaaat

SEQ ID NO: 40612 - DNA, 22 bp, synthetic construct
  misc_feature 1..22: note = chemically synthesized
  source 1..22: mol_type = other DNA
tcttggaaatctggcttaaatc

SEQ ID NO: 40613 - DNA, 22 bp, synthetic construct
  misc_feature 1..22: note = chemically synthesized
  source 1..22: mol_type = other DNA
cttggaaatctggcttaaatcc

SEQ ID NO: 40614 - DNA, 22 bp, synthetic construct
  misc_feature 1..22: note = chemically synthesized
  source 1..22: mol_type = other DNA
ttggaaatctggcttaaatcca

SEQ ID NO: 40615 - DNA, 22 bp, synthetic construct
  misc_feature 1..22: note = chemically synthesized
  source 1..22: mol_type = other DNA
ggaaatctggcttaaatccagg

SEQ ID NO: 40616 - DNA, 22 bp, synthetic construct
  misc_feature 1..22: note = chemically synthesized
  source 1..22: mol_type = other DNA
gaaatctggcttaaatccaggt

SEQ ID NO: 40617 - DNA, 22 bp, synthetic construct
  misc_feature 1..22: note = chemically synthesized
  source 1..22: mol_type = other DNA
gcttaaatccaggtttctttat

SEQ ID NO: 40618 - DNA, 22 bp, synthetic construct
  misc_feature 1..22: note = chemically synthesized
  source 1..22: mol_type = other DNA
aaatccaggtttctttatttcc

SEQ ID NO: 40619 - DNA, 22 bp, synthetic construct
  misc_feature 1..22: note = chemically synthesized
  source 1..22: mol_type = other DNA
aatccaggtttctttatttcct

SEQ ID NO: 40620 - DNA, 22 bp, synthetic construct
  misc_feature 1..22: note = chemically synthesized
  source 1..22: mol_type = other DNA
ctttatttccttgatttgggaa

SEQ ID NO: 40621 - DNA, 22 bp, synthetic construct
  misc_feature 1..22: note = chemically synthesized
  source 1..22: mol_type = other DNA
tttatttccttgatttgggaat

SEQ ID NO: 40622 - DNA, 22 bp, synthetic construct
  misc_feature 1..22: note = chemically synthesized
  source 1..22: mol_type = other DNA
tatttccttgatttgggaattt

SEQ ID NO: 40623 - DNA, 22 bp, synthetic construct
  misc_feature 1..22: note = chemically synthesized
  source 1..22: mol_type = other DNA
atttccttgatttgggaatttg

SEQ ID NO: 40624 - DNA, 22 bp, synthetic construct
  misc_feature 1..22: note = chemically synthesized
  source 1..22: mol_type = other DNA
tttccttgatttgggaatttgg

SEQ ID NO: 40625 - DNA, 22 bp, synthetic construct
  misc_feature 1..22: note = chemically synthesized
  source 1..22: mol_type = other DNA
ccttgatttgggaatttggtca

SEQ ID NO: 40626 - DNA, 22 bp, synthetic construct
  misc_feature 1..22: note = chemically synthesized
  source 1..22: mol_type = other DNA
cttgatttgggaatttggtcac

SEQ ID NO: 40627 - DNA, 22 bp, synthetic construct
  misc_feature 1..22: note = chemically synthesized
  source 1..22: mol_type = other DNA
gatttgggaatttggtcacgag

SEQ ID NO: 40628 - DNA, 22 bp, synthetic construct
  misc_feature 1..22: note = chemically synthesized
  source 1..22: mol_type = other DNA
atttgggaatttggtcacgaga

SEQ ID NO: 40629 - DNA, 22 bp, synthetic construct
  misc_feature 1..22: note = chemically synthesized
  source 1..22: mol_type = other DNA
gggaatttggtcacgagacaaa

SEQ ID NO: 40630 - DNA, 22 bp, synthetic construct
  misc_feature 1..22: note = chemically synthesized
  source 1..22: mol_type = other DNA
ggaatttggtcacgagacaaat

SEQ ID NO: 40631 - DNA, 22 bp, synthetic construct
  misc_feature 1..22: note = chemically synthesized
  source 1..22: mol_type = other DNA
ggtcacgagacaaataacatga

SEQ ID NO: 40632 - DNA, 22 bp, synthetic construct
  misc_feature 1..22: note = chemically synthesized
  source 1..22: mol_type = other DNA
gtcacgagacaaataacatgat

SEQ ID NO: 40633 - DNA, 22 bp, synthetic construct
  misc_feature 1..22: note = chemically synthesized
  source 1..22: mol_type = other DNA
tcctaagtctagatttctttgt

SEQ ID NO: 40634 - DNA, 22 bp, synthetic construct
  misc_feature 1..22: note = chemically synthesized
  source 1..22: mol_type = other DNA
cctaagtctagatttctttgtt

SEQ ID NO: 40635 - DNA, 22 bp, synthetic construct
  misc_feature 1..22: note = chemically synthesized
  source 1..22: mol_type = other DNA
ctaagtctagatttctttgttt

SEQ ID NO: 40636 - DNA, 22 bp, synthetic construct
  misc_feature 1..22: note = chemically synthesized
  source 1..22: mol_type = other DNA
agtctagatttctttgtttata

SEQ ID NO: 40637 - DNA, 22 bp, synthetic construct
  misc_feature 1..22: note = chemically synthesized
  source 1..22: mol_type = other DNA
gatttctttgtttataaaatgg

SEQ ID NO: 40638 - DNA, 22 bp, synthetic construct
  misc_feature 1..22: note = chemically synthesized
  source 1..22: mol_type = other DNA
ctttgtttataaaatggggatg

SEQ ID NO: 40639 - DNA, 22 bp, synthetic construct
  misc_feature 1..22: note = chemically synthesized
  source 1..22: mol_type = other DNA
tttgtttataaaatggggatga

SEQ ID NO: 40640 - DNA, 22 bp, synthetic construct
  misc_feature 1..22: note = chemically synthesized
  source 1..22: mol_type = other DNA
tgtttataaaatggggatgact

SEQ ID NO: 40641 - DNA, 22 bp, synthetic construct
  misc_feature 1..22: note = chemically synthesized
  source 1..22: mol_type = other DNA
gtttataaaatggggatgacta

SEQ ID NO: 40642 - DNA, 22 bp, synthetic construct
  misc_feature 1..22: note = chemically synthesized
  source 1..22: mol_type = other DNA
tttataaaatggggatgactat

SEQ ID NO: 40643 - DNA, 22 bp, synthetic construct
  misc_feature 1..22: note = chemically synthesized
  source 1..22: mol_type = other DNA
ataaaatggggatgactatgct

SEQ ID NO: 40644 - DNA, 22 bp, synthetic construct
  misc_feature 1..22: note = chemically synthesized
  source 1..22: mol_type = other DNA
taaaatggggatgactatgcta

SEQ ID NO: 40645 - DNA, 22 bp, synthetic construct
  misc_feature 1..22: note = chemically synthesized
  source 1..22: mol_type = other DNA
tgctaccctacctataccatga

SEQ ID NO: 40646 - DNA, 22 bp, synthetic construct
  misc_feature 1..22: note = chemically synthesized
  source 1..22: mol_type = other DNA
ccctacctataccatgagctaa

SEQ ID NO: 40647 - DNA, 22 bp, synthetic construct
  misc_feature 1..22: note = chemically synthesized
  source 1..22: mol_type = other DNA
cctataccatgagctaaataag

SEQ ID NO: 40648 - DNA, 22 bp, synthetic construct
  misc_feature 1..22: note = chemically synthesized
  source 1..22: mol_type = other DNA
taccatgagctaaataagctag

SEQ ID NO: 40649 - DNA, 22 bp, synthetic construct
  misc_feature 1..22: note = chemically synthesized
  source 1..22: mol_type = other DNA
aataagctagtatttgtaaagg

SEQ ID NO: 40650 - DNA, 22 bp, synthetic construct
  misc_feature 1..22: note = chemically synthesized
  source 1..22: mol_type = other DNA
gtatttgtaaaggacacacact

SEQ ID NO: 40651 - DNA, 22 bp, synthetic construct
  misc_feature 1..22: note = chemically synthesized
  source 1..22: mol_type = other DNA
gtaaaggacacacacttacatt

SEQ ID NO: 40652 - DNA, 22 bp, synthetic construct
  misc_feature 1..22: note = chemically synthesized
  source 1..22: mol_type = other DNA
taaaggacacacacttacattc

SEQ ID NO: 40653 - DNA, 22 bp, synthetic construct
  misc_feature 1..22: note = chemically synthesized
  source 1..22: mol_type = other DNA
acattcacaatcacacacggtg

SEQ ID NO: 40654 - DNA, 22 bp, synthetic construct
  misc_feature 1..22: note = chemically synthesized
  source 1..22: mol_type = other DNA
cattcacaatcacacacggtgt

SEQ ID NO: 40655 - DNA, 22 bp, synthetic construct
  misc_feature 1..22: note = chemically synthesized
  source 1..22: mol_type = other DNA
acaatcacacacggtgtgtatg

SEQ ID NO: 40656 - DNA, 22 bp, synthetic construct
  misc_feature 1..22: note = chemically synthesized
  source 1..22: mol_type = other DNA
acccactcaacaaataccctga

SEQ ID NO: 40657 - DNA, 22 bp, synthetic construct
  misc_feature 1..22: note = chemically synthesized
  source 1..22: mol_type = other DNA
aacaaataccctgagtatttgt

SEQ ID NO: 40658 - DNA, 22 bp, synthetic construct
  misc_feature 1..22: note = chemically synthesized
  source 1..22: mol_type = other DNA
agtatttgttgaatcattatat

SEQ ID NO: 40659 - DNA, 22 bp, synthetic construct
  misc_feature 1..22: note = chemically synthesized
  source 1..22: mol_type = other DNA
gttgaatcattatatgcgtata

SEQ ID NO: 40660 - DNA, 22 bp, synthetic construct
  misc_feature 1..22: note = chemically synthesized
  source 1..22: mol_type = other DNA
ttgaatcattatatgcgtatat

SEQ ID NO: 40661 - DNA, 22 bp, synthetic construct
  misc_feature 1..22: note = chemically synthesized
  source 1..22: mol_type = other DNA
aatcattatatgcgtatatcat

SEQ ID NO: 40662 - DNA, 22 bp, synthetic construct
  misc_feature 1..22: note = chemically synthesized
  source 1..22: mol_type = other DNA
tatgcgtatatcatctggcaaa

SEQ ID NO: 40663 - DNA, 22 bp, synthetic construct
  misc_feature 1..22: note = chemically synthesized
  source 1..22: mol_type = other DNA
gcaaatggatgtgtataatttc

SEQ ID NO: 40664 - DNA, 22 bp, synthetic construct
  misc_feature 1..22: note = chemically synthesized
  source 1..22: mol_type = other DNA
ctccagggataagaagcaaatg

SEQ ID NO: 40665 - DNA, 22 bp, synthetic construct
  misc_feature 1..22: note = chemically synthesized
  source 1..22: mol_type = other DNA
tccagggataagaagcaaatgt

SEQ ID NO: 40666 - DNA, 22 bp, synthetic construct
  misc_feature 1..22: note = chemically synthesized
  source 1..22: mol_type = other DNA
cagggataagaagcaaatgtat

SEQ ID NO: 40667 - DNA, 22 bp, synthetic construct
  misc_feature 1..22: note = chemically synthesized
  source 1..22: mol_type = other DNA
actcaggccataacaaagagag

SEQ ID NO: 40668 - DNA, 22 bp, synthetic construct
  misc_feature 1..22: note = chemically synthesized
  source 1..22: mol_type = other DNA
ctcaggccataacaaagagaga

SEQ ID NO: 40669 - DNA, 22 bp, synthetic construct
  misc_feature 1..22: note = chemically synthesized
  source 1..22: mol_type = other DNA
aggccataacaaagagagaaat

SEQ ID NO: 40670 - DNA, 22 bp, synthetic construct
  misc_feature 1..22: note = chemically synthesized
  source 1..22: mol_type = other DNA
agtcccactccatgaacaggtc

SEQ ID NO: 40671 - DNA, 22 bp, synthetic construct
  misc_feature 1..22: note = chemically synthesized
  source 1..22: mol_type = other DNA
catgaacaggtcaaggaaccaa

SEQ ID NO: 40672 - DNA, 22 bp, synthetic construct
  misc_feature 1..22: note = chemically synthesized
  source 1..22: mol_type = other DNA
aaagagttatttcattgtttca

SEQ ID NO: 40673 - DNA, 22 bp, synthetic construct
  misc_feature 1..22: note = chemically synthesized
  source 1..22: mol_type = other DNA
tttcattgtttcaacttgctag

SEQ ID NO: 40674 - DNA, 22 bp, synthetic construct
  misc_feature 1..22: note = chemically synthesized
  source 1..22: mol_type = other DNA
cattgtttcaacttgctagtga

SEQ ID NO: 40675 - DNA, 22 bp, synthetic construct
  misc_feature 1..22: note = chemically synthesized
  source 1..22: mol_type = other DNA
attgtttcaacttgctagtgag

SEQ ID NO: 40676 - DNA, 22 bp, synthetic construct
  misc_feature 1..22: note = chemically synthesized
  source 1..22: mol_type = other DNA
tttcaacttgctagtgagggga

SEQ ID NO: 40677 - DNA, 22 bp, synthetic construct
  misc_feature 1..22: note = chemically synthesized
  source 1..22: mol_type = other DNA
caacttgctagtgaggggagca

SEQ ID NO: 40678 - DNA, 22 bp, synthetic construct
  misc_feature 1..22: note = chemically synthesized
  source 1..22: mol_type = other DNA
aacttgctagtgaggggagcat

SEQ ID NO: 40679 - DNA, 22 bp, synthetic construct
  misc_feature 1..22: note = chemically synthesized
  source 1..22: mol_type = other DNA
gctagtgaggggagcatggcac

SEQ ID NO: 40680 - DNA, 22 bp, synthetic construct
  misc_feature 1..22: note = chemically synthesized
  source 1..22: mol_type = other DNA
ctagtgaggggagcatggcacc

SEQ ID NO: 40681 - DNA, 22 bp, synthetic construct
  misc_feature 1..22: note = chemically synthesized
  source 1..22: mol_type = other DNA
gtgaggggagcatggcacctga

SEQ ID NO: 40682 - DNA, 22 bp, synthetic construct
  misc_feature 1..22: note = chemically synthesized
  source 1..22: mol_type = other DNA
aacagagatgatataaattaat

SEQ ID NO: 40683 - DNA, 22 bp, synthetic construct
  misc_feature 1..22: note = chemically synthesized
  source 1..22: mol_type = other DNA
atgaaactgagaaccaagcgaa

SEQ ID NO: 40684 - DNA, 22 bp, synthetic construct
  misc_feature 1..22: note = chemically synthesized
  source 1..22: mol_type = other DNA
agaaccaagcgaagagcttagc

SEQ ID NO: 40685 - DNA, 22 bp, synthetic construct
  misc_feature 1..22: note = chemically synthesized
  source 1..22: mol_type = other DNA
agccatcctttgcatagttagc

SEQ ID NO: 40686 - DNA, 22 bp, synthetic construct
  misc_feature 1..22: note = chemically synthesized
  source 1..22: mol_type = other DNA
gccatcctttgcatagttagct

SEQ ID NO: 40687 - DNA, 22 bp, synthetic construct
  misc_feature 1..22: note = chemically synthesized
  source 1..22: mol_type = other DNA
tgcatagttagctacaatggct

SEQ ID NO: 40688 - DNA, 22 bp, synthetic construct
  misc_feature 1..22: note = chemically synthesized
  source 1..22: mol_type = other DNA
gcatagttagctacaatggcta

SEQ ID NO: 40689 - DNA, 22 bp, synthetic construct
  misc_feature 1..22: note = chemically synthesized
  source 1..22: mol_type = other DNA
catagttagctacaatggctat

SEQ ID NO: 40690 - DNA, 22 bp, synthetic construct
  misc_feature 1..22: note = chemically synthesized
  source 1..22: mol_type = other DNA
gctacaatggctatttattttt

SEQ ID NO: 40691 - DNA, 22 bp, synthetic construct
  misc_feature 1..22: note = chemically synthesized
  source 1..22: mol_type = other DNA
caatggctatttatttttcagc

SEQ ID NO: 40692 - DNA, 22 bp, synthetic construct
  misc_feature 1..22: note = chemically synthesized
  source 1..22: mol_type = other DNA
tttatttttcagccagactggc

SEQ ID NO: 40693 - DNA, 22 bp, synthetic construct
  misc_feature 1..22: note = chemically synthesized
  source 1..22: mol_type = other DNA
atttttcagccagactggccat

SEQ ID NO: 40694 - DNA, 22 bp, synthetic construct
  misc_feature 1..22: note = chemically synthesized
  source 1..22: mol_type = other DNA
tttttcagccagactggccatc

SEQ ID NO: 40695 - DNA, 22 bp, synthetic construct
  misc_feature 1..22: note = chemically synthesized
  source 1..22: mol_type = other DNA
ttcagccagactggccatcatg

SEQ ID NO: 40696 - DNA, 22 bp, synthetic construct
  misc_feature 1..22: note = chemically synthesized
  source 1..22: mol_type = other DNA
tcagccagactggccatcatgt

SEQ ID NO: 40697 - DNA, 22 bp, synthetic construct
  misc_feature 1..22: note = chemically synthesized
  source 1..22: mol_type = other DNA
cagccagactggccatcatgta

SEQ ID NO: 40698 - DNA, 22 bp, synthetic construct
  misc_feature 1..22: note = chemically synthesized
  source 1..22: mol_type = other DNA
agccagactggccatcatgtag

SEQ ID NO: 40699 - DNA, 22 bp, synthetic construct
  misc_feature 1..22: note = chemically synthesized
  source 1..22: mol_type = other DNA
gccatcatgtaggcacactctt

SEQ ID NO: 40700 - DNA, 22 bp, synthetic construct
  misc_feature 1..22: note = chemically synthesized
  source 1..22: mol_type = other DNA
ttttagattagaaaaatcaacc

SEQ ID NO: 40701 - DNA, 22 bp, synthetic construct
  misc_feature 1..22: note = chemically synthesized
  source 1..22: mol_type = other DNA
ttagattagaaaaatcaaccat

SEQ ID NO: 40702 - DNA, 22 bp, synthetic construct
  misc_feature 1..22: note = chemically synthesized
  source 1..22: mol_type = other DNA
tagattagaaaaatcaaccatt

SEQ ID NO: 40703 - DNA, 22 bp, synthetic construct
  misc_feature 1..22: note = chemically synthesized
  source 1..22: mol_type = other DNA
agattagaaaaatcaaccatta

SEQ ID NO: 40704 - DNA, 22 bp, synthetic construct
  misc_feature 1..22: note = chemically synthesized
  source 1..22: mol_type = other DNA
gattagaaaaatcaaccattat

SEQ ID NO: 40705 - DNA, 22 bp, synthetic construct
  misc_feature 1..22: note = chemically synthesized
  source 1..22: mol_type = other DNA
gaaaaatcaaccattatttttt

SEQ ID NO: 40706 - DNA, 22 bp, synthetic construct
  misc_feature 1..22: note = chemically synthesized
  source 1..22: mol_type = other DNA
ttttttctgcccattcattcca

SEQ ID NO: 40707 - DNA, 22 bp, synthetic construct
  misc_feature 1..22: note = chemically synthesized
  source 1..22: mol_type = other DNA
tttctgcccattcattccagca

SEQ ID NO: 40708 - DNA, 22 bp, synthetic construct
  misc_feature 1..22: note = chemically synthesized
  source 1..22: mol_type = other DNA
ttctgcccattcattccagcac

SEQ ID NO: 40709 - DNA, 22 bp, synthetic construct
  misc_feature 1..22: note = chemically synthesized
  source 1..22: mol_type = other DNA
tctgcccattcattccagcacc

SEQ ID NO: 40710 - DNA, 22 bp, synthetic construct
  misc_feature 1..22: note = chemically synthesized
  source 1..22: mol_type = other DNA
ctgcccattcattccagcaccg

SEQ ID NO: 40711 - DNA, 22 bp, synthetic construct
  misc_feature 1..22: note = chemically synthesized
  source 1..22: mol_type = other DNA
tgcccattcattccagcaccgt

SEQ ID NO: 40712 - DNA, 22 bp, synthetic construct
  misc_feature 1..22: note = chemically synthesized
  source 1..22: mol_type = other DNA
cccattcattccagcaccgtga

SEQ ID NO: 40713 - DNA, 22 bp, synthetic construct
  misc_feature 1..22: note = chemically synthesized
  source 1..22: mol_type = other DNA
attccagcaccgtgacagtctt

SEQ ID NO: 40714 - DNA, 22 bp, synthetic construct
  misc_feature 1..22: note = chemically synthesized
  source 1..22: mol_type = other DNA
cagcaccgtgacagtcttcacg

SEQ ID NO: 40715 - DNA, 22 bp, synthetic construct
  misc_feature 1..22: note = chemically synthesized
  source 1..22: mol_type = other DNA
cacggggaaattaaacttattt

SEQ ID NO: 40716 - DNA, 22 bp, synthetic construct
  misc_feature 1..22: note = chemically synthesized
  source 1..22: mol_type = other DNA
acggggaaattaaacttatttt

SEQ ID NO: 40717 - DNA, 22 bp, synthetic construct
  misc_feature 1..22: note = chemically synthesized
  source 1..22: mol_type = other DNA
aacttatttttttaagaatttt

SEQ ID NO: 40718 - DNA, 22 bp, synthetic construct
  misc_feature 1..22: note = chemically synthesized
  source 1..22: mol_type = other DNA
atttttttaagaatttttcaat

SEQ ID NO: 40719 - DNA, 22 bp, synthetic construct
  misc_feature 1..22: note = chemically synthesized
  source 1..22: mol_type = other DNA
tttttttaagaatttttcaatc

SEQ ID NO: 40720 - DNA, 22 bp, synthetic construct
  misc_feature 1..22: note = chemically synthesized
  source 1..22: mol_type = other DNA
ttttaagaatttttcaatcata

SEQ ID NO: 40721 - DNA, 22 bp, synthetic construct
  misc_feature 1..22: note = chemically synthesized
  source 1..22: mol_type = other DNA
tttaagaatttttcaatcatat

SEQ ID NO: 40722 - DNA, 22 bp, synthetic construct
  misc_feature 1..22: note = chemically synthesized
  source 1..22: mol_type = other DNA
ttaagaatttttcaatcatata

SEQ ID NO: 40723 - DNA, 22 bp, synthetic construct
  misc_feature 1..22: note = chemically synthesized
  source 1..22: mol_type = other DNA
taagaatttttcaatcatatac

SEQ ID NO: 40724 - DNA, 22 bp, synthetic construct
  misc_feature 1..22: note = chemically synthesized
  source 1..22: mol_type = other DNA
aagaatttttcaatcatataca

SEQ ID NO: 40725 - DNA, 22 bp, synthetic construct
  misc_feature 1..22: note = chemically synthesized
  source 1..22: mol_type = other DNA
agaatttttcaatcatatacaa

SEQ ID NO: 40726 - DNA, 22 bp, synthetic construct
  misc_feature 1..22: note = chemically synthesized
  source 1..22: mol_type = other DNA
ttcaatcatatacaagattttg

SEQ ID NO: 40727 - DNA, 22 bp, synthetic construct
  misc_feature 1..22: note = chemically synthesized
  source 1..22: mol_type = other DNA
tcaatcatatacaagattttga

SEQ ID NO: 40728 - DNA, 22 bp, synthetic construct
  misc_feature 1..22: note = chemically synthesized
  source 1..22: mol_type = other DNA
caatcatatacaagattttgaa

SEQ ID NO: 40729 - DNA, 22 bp, synthetic construct
  misc_feature 1..22: note = chemically synthesized
  source 1..22: mol_type = other DNA
aatcatatacaagattttgaac

SEQ ID NO: 40730 - DNA, 22 bp, synthetic construct
  misc_feature 1..22: note = chemically synthesized
  source 1..22: mol_type = other DNA
tgaactgggaatttcatgaatc

SEQ ID NO: 40731 - DNA, 22 bp, synthetic construct
  misc_feature 1..22: note = chemically synthesized
  source 1..22: mol_type = other DNA
gaactgggaatttcatgaatca

SEQ ID NO: 40732 - DNA, 22 bp, synthetic construct
  misc_feature 1..22: note = chemically synthesized
  source 1..22: mol_type = other DNA
aactgggaatttcatgaatcaa

SEQ ID NO: 40733 - DNA, 22 bp, synthetic construct
  misc_feature 1..22: note = chemically synthesized
  source 1..22: mol_type = other DNA
ggaatttcatgaatcaaaaatt

SEQ ID NO: 40734 - DNA, 22 bp, synthetic construct
  misc_feature 1..22: note = chemically synthesized
  source 1..22: mol_type = other DNA
catgaatcaaaaattaaatgaa

SEQ ID NO: 40735 - DNA, 22 bp, synthetic construct
  misc_feature 1..22: note = chemically synthesized
  source 1..22: mol_type = other DNA
atgaatcaaaaattaaatgaat

SEQ ID NO: 40736 - DNA, 22 bp, synthetic construct
  misc_feature 1..22: note = chemically synthesized
  source 1..22: mol_type = other DNA
aatgaattgcacataaagccat

SEQ ID NO: 40737 - DNA, 22 bp, synthetic construct
  misc_feature 1..22: note = chemically synthesized
  source 1..22: mol_type = other DNA
cacataaagccatggcatatgt

SEQ ID NO: 40738 - DNA, 22 bp, synthetic construct
  misc_feature 1..22: note = chemically synthesized
  source 1..22: mol_type = other DNA
ttactacattgtgggagaaaaa

SEQ ID NO: 40739 - DNA, 22 bp, synthetic construct
  misc_feature 1..22: note = chemically synthesized
  source 1..22: mol_type = other DNA
tactacattgtgggagaaaaaa

SEQ ID NO: 40740 - DNA, 22 bp, synthetic construct
  misc_feature 1..22: note = chemically synthesized
  source 1..22: mol_type = other DNA
actacattgtgggagaaaaaat

SEQ ID NO: 40741 - DNA, 22 bp, synthetic construct
  misc_feature 1..22: note = chemically synthesized
  source 1..22: mol_type = other DNA
ctacattgtgggagaaaaaata

SEQ ID NO: 40742 - DNA, 22 bp, synthetic construct
  misc_feature 1..22: note = chemically synthesized
  source 1..22: mol_type = other DNA
cattgtgggagaaaaaataatt

SEQ ID NO: 40743 - DNA, 22 bp, synthetic construct
  misc_feature 1..22: note = chemically synthesized
  source 1..22: mol_type = other DNA
tgggagaaaaaataattcttat

SEQ ID NO: 40744 - DNA, 22 bp, synthetic construct
  misc_feature 1..22: note = chemically synthesized
  source 1..22: mol_type = other DNA
ttataatttaaaaaaactatgt

SEQ ID NO: 40745 - DNA, 22 bp, synthetic construct
  misc_feature 1..22: note = chemically synthesized
  source 1..22: mol_type = other DNA
ataatttaaaaaaactatgtct

SEQ ID NO: 40746 - DNA, 22 bp, synthetic construct
  misc_feature 1..22: note = chemically synthesized
  source 1..22: mol_type = other DNA
taatttaaaaaaactatgtctt

SEQ ID NO: 40747 - DNA, 22 bp, synthetic construct
  misc_feature 1..22: note = chemically synthesized
  source 1..22: mol_type = other DNA
aaaaaaactatgtcttacctga

SEQ ID NO: 40748 - DNA, 22 bp, synthetic construct
  misc_feature 1..22: note = chemically synthesized
  source 1..22: mol_type = other DNA
aaaaaactatgtcttacctgat

SEQ ID NO: 40749 - DNA, 22 bp, synthetic construct
  misc_feature 1..22: note = chemically synthesized
  source 1..22: mol_type = other DNA
tgtcttacctgatttcagaaat

SEQ ID NO: 40750 - DNA, 22 bp, synthetic construct
  misc_feature 1..22: note = chemically synthesized
  source 1..22: mol_type = other DNA
acctgatttcagaaataaaaga

SEQ ID NO: 40751 - DNA, 22 bp, synthetic construct
  misc_feature 1..22: note = chemically synthesized
  source 1..22: mol_type = other DNA
cctgatttcagaaataaaagaa

SEQ ID NO: 40752 - DNA, 22 bp, synthetic construct
  misc_feature 1..22: note = chemically synthesized
  source 1..22: mol_type = other DNA
atttcagaaataaaagaagtag

SEQ ID NO: 40753 - DNA, 22 bp, synthetic construct
  misc_feature 1..22: note = chemically synthesized
  source 1..22: mol_type = other DNA
cagaaataaaagaagtagaaga

SEQ ID NO: 40754 - DNA, 22 bp, synthetic construct
  misc_feature 1..22: note = chemically synthesized
  source 1..22: mol_type = other DNA
agaaataaaagaagtagaagaa

SEQ ID NO: 40755 - DNA, 22 bp, synthetic construct
  misc_feature 1..22: note = chemically synthesized
  source 1..22: mol_type = other DNA
ccttatgttccattttgggact

SEQ ID NO: 40756 - DNA, 22 bp, synthetic construct
  misc_feature 1..22: note = chemically synthesized
  source 1..22: mol_type = other DNA
cttatgttccattttgggactg

SEQ ID NO: 40757 - DNA, 22 bp, synthetic construct
  misc_feature 1..22: note = chemically synthesized
  source 1..22: mol_type = other DNA
atgttccattttgggactggcc

SEQ ID NO: 40758 - DNA, 22 bp, synthetic construct
  misc_feature 1..22: note = chemically synthesized
  source 1..22: mol_type = other DNA
tgttccattttgggactggcca

SEQ ID NO: 40759 - DNA, 22 bp, synthetic construct
  misc_feature 1..22: note = chemically synthesized
  source 1..22: mol_type = other DNA
cattttgggactggccagcagt

SEQ ID NO: 40760 - DNA, 22 bp, synthetic construct
  misc_feature 1..22: note = chemically synthesized
  source 1..22: mol_type = other DNA
tgggactggccagcagtgccca

SEQ ID NO: 40761 - DNA, 22 bp, synthetic construct
  misc_feature 1..22: note = chemically synthesized
  source 1..22: mol_type = other DNA
gggactggccagcagtgcccag

SEQ ID NO: 40762 - DNA, 22 bp, synthetic construct
  misc_feature 1..22: note = chemically synthesized
  source 1..22: mol_type = other DNA
ggactggccagcagtgcccaga

SEQ ID NO: 40763 - DNA, 22 bp, synthetic construct
  misc_feature 1..22: note = chemically synthesized
  source 1..22: mol_type = other DNA
gccagcagtgcccagaaagtgt

SEQ ID NO: 40764 - DNA, 22 bp, synthetic construct
  misc_feature 1..22: note = chemically synthesized
  source 1..22: mol_type = other DNA
ttgacttacatgagagtaaacg

SEQ ID NO: 40765 - DNA, 22 bp, synthetic construct
  misc_feature 1..22: note = chemically synthesized
  source 1..22: mol_type = other DNA
acttacatgagagtaaacgcac

SEQ ID NO: 40766 - DNA, 22 bp, synthetic construct
  misc_feature 1..22: note = chemically synthesized
  source 1..22: mol_type = other DNA
acatgagagtaaacgcacccac

SEQ ID NO: 40767 - DNA, 22 bp, synthetic construct
  misc_feature 1..22: note = chemically synthesized
  source 1..22: mol_type = other DNA
catgagagtaaacgcacccaca

SEQ ID NO: 40768 - DNA, 22 bp, synthetic construct
  misc_feature 1..22: note = chemically synthesized
  source 1..22: mol_type = other DNA
agttaatgattctctcagagac

SEQ ID NO: 40769 - DNA, 22 bp, synthetic construct
  misc_feature 1..22: note = chemically synthesized
  source 1..22: mol_type = other DNA
atgattctctcagagacccatg

SEQ ID NO: 40770 - DNA, 22 bp, synthetic construct
  misc_feature 1..22: note = chemically synthesized
  source 1..22: mol_type = other DNA
tctcagagacccatgccactgg

SEQ ID NO: 40771 - DNA, 22 bp, synthetic construct
  misc_feature 1..22: note = chemically synthesized
  source 1..22: mol_type = other DNA
tcagagacccatgccactggct

SEQ ID NO: 40772 - DNA, 22 bp, synthetic construct
  misc_feature 1..22: note = chemically synthesized
  source 1..22: mol_type = other DNA
agagacccatgccactggctca

SEQ ID NO: 40773 - DNA, 22 bp, synthetic construct
  misc_feature 1..22: note = chemically synthesized
  source 1..22: mol_type = other DNA
gctcagcagggttcaaacatta

SEQ ID NO: 40774 - DNA, 22 bp, synthetic construct
  misc_feature 1..22: note = chemically synthesized
  source 1..22: mol_type = other DNA
agcagggttcaaacattacctt

SEQ ID NO: 40775 - DNA, 22 bp, synthetic construct
  misc_feature 1..22: note = chemically synthesized
  source 1..22: mol_type = other DNA
aaacattaccttgaatatagag

SEQ ID NO: 40776 - DNA, 22 bp, synthetic construct
  misc_feature 1..22: note = chemically synthesized
  source 1..22: mol_type = other DNA
ccttgaatatagagtcttataa

SEQ ID NO: 40777 - DNA, 22 bp, synthetic construct
  misc_feature 1..22: note = chemically synthesized
  source 1..22: mol_type = other DNA
gaatatagagtcttataaaata

SEQ ID NO: 40778 - DNA, 22 bp, synthetic construct
  misc_feature 1..22: note = chemically synthesized
  source 1..22: mol_type = other DNA
aatatagagtcttataaaatat

SEQ ID NO: 40779 - DNA, 22 bp, synthetic construct
  misc_feature 1..22: note = chemically synthesized
  source 1..22: mol_type = other DNA
ataaaatatttgagagtgcaat

SEQ ID NO: 40780 - DNA, 22 bp, synthetic construct
  misc_feature 1..22: note = chemically synthesized
  source 1..22: mol_type = other DNA
taaaatatttgagagtgcaatg

SEQ ID NO: 40781 - DNA, 22 bp, synthetic construct
  misc_feature 1..22: note = chemically synthesized
  source 1..22: mol_type = other DNA
gagagtgcaatgtcaatagatg

SEQ ID NO: 40782 - DNA, 22 bp, synthetic construct
  misc_feature 1..22: note = chemically synthesized
  source 1..22: mol_type = other DNA
agagtgcaatgtcaatagatgc

SEQ ID NO: 40783 - DNA, 22 bp, synthetic construct
  misc_feature 1..22: note = chemically synthesized
  source 1..22: mol_type = other DNA
ggaagtggtgaaagccatttcc

SEQ ID NO: 40784 - DNA, 22 bp, synthetic construct
  misc_feature 1..22: note = chemically synthesized
  source 1..22: mol_type = other DNA
cccccctcagctgctccacatt

SEQ ID NO: 40785 - DNA, 22 bp, synthetic construct
  misc_feature 1..22: note = chemically synthesized
  source 1..22: mol_type = other DNA
ccccctcagctgctccacattg

SEQ ID NO: 40786 - DNA, 22 bp, synthetic construct
  misc_feature 1..22: note = chemically synthesized
  source 1..22: mol_type = other DNA
agctgctccacattgcctttat

SEQ ID NO: 40787 - DNA, 22 bp, synthetic construct
  misc_feature 1..22: note = chemically synthesized
  source 1..22: mol_type = other DNA
ctccacattgcctttatgtctc

SEQ ID NO: 40788 - DNA, 22 bp, synthetic construct
  misc_feature 1..22: note = chemically synthesized
  source 1..22: mol_type = other DNA
cacattgcctttatgtctcctt

SEQ ID NO: 40789 - DNA, 22 bp, synthetic construct
  misc_feature 1..22: note = chemically synthesized
  source 1..22: mol_type = other DNA
cctttatgtctccttactcctt

SEQ ID NO: 40790 - DNA, 22 bp, synthetic construct
  misc_feature 1..22: note = chemically synthesized
  source 1..22: mol_type = other DNA
tatgtctccttactccttccct

SEQ ID NO: 40791 - DNA, 22 bp, synthetic construct
  misc_feature 1..22: note = chemically synthesized
  source 1..22: mol_type = other DNA
atgtctccttactccttccctc

SEQ ID NO: 40792 - DNA, 22 bp, synthetic construct
  misc_feature 1..22: note = chemically synthesized
  source 1..22: mol_type = other DNA
tgtctccttactccttccctca

SEQ ID NO: 40793 - DNA, 22 bp, synthetic construct
  misc_feature 1..22: note = chemically synthesized
  source 1..22: mol_type = other DNA
cttactccttccctcaccccta

SEQ ID NO: 40794 - DNA, 22 bp, synthetic construct
  misc_feature 1..22: note = chemically synthesized
  source 1..22: mol_type = other DNA
actccttccctcacccctagac

SEQ ID NO: 40795 - DNA, 22 bp, synthetic construct
  misc_feature 1..22: note = chemically synthesized
  source 1..22: mol_type = other DNA
ctccttccctcacccctagacc

SEQ ID NO: 40796 - DNA, 22 bp, synthetic construct
  misc_feature 1..22: note = chemically synthesized
  source 1..22: mol_type = other DNA
cttccctcacccctagaccttc

SEQ ID NO: 40797 - DNA, 22 bp, synthetic construct
  misc_feature 1..22: note = chemically synthesized
  source 1..22: mol_type = other DNA
ccctcacccctagaccttcatc

SEQ ID NO: 40798 - DNA, 22 bp, synthetic construct
  misc_feature 1..22: note = chemically synthesized
  source 1..22: mol_type = other DNA
cctcacccctagaccttcatct

SEQ ID NO: 40799 - DNA, 22 bp, synthetic construct
  misc_feature 1..22: note = chemically synthesized
  source 1..22: mol_type = other DNA
acccctagaccttcatctttcc

SEQ ID NO: 40800 - DNA, 22 bp, synthetic construct
  misc_feature 1..22: note = chemically synthesized
  source 1..22: mol_type = other DNA
gaccttcatctttcctgattag

SEQ ID NO: 40801 - DNA, 22 bp, synthetic construct
  misc_feature 1..22: note = chemically synthesized
  source 1..22: mol_type = other DNA
catctttcctgattagtcttgt

SEQ ID NO: 40802 - DNA, 22 bp, synthetic construct
  misc_feature 1..22: note = chemically synthesized
  source 1..22: mol_type = other DNA
atctttcctgattagtcttgtt

SEQ ID NO: 40803 - DNA, 22 bp, synthetic construct
  misc_feature 1..22: note = chemically synthesized
  source 1..22: mol_type = other DNA
tcctgattagtcttgtttcctc

SEQ ID NO: 40804 - DNA, 22 bp, synthetic construct
  misc_feature 1..22: note = chemically synthesized
  source 1..22: mol_type = other DNA
cctgattagtcttgtttcctcc

SEQ ID NO: 40805 - DNA, 22 bp, synthetic construct
  misc_feature 1..22: note = chemically synthesized
  source 1..22: mol_type = other DNA
ctgattagtcttgtttcctccc

SEQ ID NO: 40806 - DNA, 22 bp, synthetic construct
  misc_feature 1..22: note = chemically synthesized
  source 1..22: mol_type = other DNA
attagtcttgtttcctcccctc

SEQ ID NO: 40807 - DNA, 22 bp, synthetic construct
  misc_feature 1..22: note = chemically synthesized
  source 1..22: mol_type = other DNA
gtcttgtttcctcccctcttct

SEQ ID NO: 40808 - DNA, 22 bp, synthetic construct
  misc_feature 1..22: note = chemically synthesized
  source 1..22: mol_type = other DNA
gtttcctcccctcttctttcat

SEQ ID NO: 40809 - DNA, 22 bp, synthetic construct
  misc_feature 1..22: note = chemically synthesized
  source 1..22: mol_type = other DNA
tttcctcccctcttctttcatt

SEQ ID NO: 40810 - DNA, 22 bp, synthetic construct
  misc_feature 1..22: note = chemically synthesized
  source 1..22: mol_type = other DNA
cctcccctcttctttcattctc

SEQ ID NO: 40811 - DNA, 22 bp, synthetic construct
  misc_feature 1..22: note = chemically synthesized
  source 1..22: mol_type = other DNA
ctcccctcttctttcattctct

SEQ ID NO: 40812 - DNA, 22 bp, synthetic construct
  misc_feature 1..22: note = chemically synthesized
  source 1..22: mol_type = other DNA
ccctcttctttcattctctttc

SEQ ID NO: 40813 - DNA, 22 bp, synthetic construct
  misc_feature 1..22: note = chemically synthesized
  source 1..22: mol_type = other DNA
ttctttcattctctttcttttg

SEQ ID NO: 40814 - DNA, 22 bp, synthetic construct
  misc_feature 1..22: note = chemically synthesized
  source 1..22: mol_type = other DNA
ctttcattctctttcttttgga

SEQ ID NO: 40815 - DNA, 22 bp, synthetic construct
  misc_feature 1..22: note = chemically synthesized
  source 1..22: mol_type = other DNA
tttcattctctttcttttggat

SEQ ID NO: 40816 - DNA, 22 bp, synthetic construct
  misc_feature 1..22: note = chemically synthesized
  source 1..22: mol_type = other DNA
tcattctctttcttttggataa

SEQ ID NO: 40817 - DNA, 22 bp, synthetic construct
  misc_feature 1..22: note = chemically synthesized
  source 1..22: mol_type = other DNA
cattctctttcttttggataaa

SEQ ID NO: 40818 - DNA, 22 bp, synthetic construct
  misc_feature 1..22: note = chemically synthesized
  source 1..22: mol_type = other DNA
attctctttcttttggataaaa

SEQ ID NO: 40819 - DNA, 22 bp, synthetic construct
  misc_feature 1..22: note = chemically synthesized
  source 1..22: mol_type = other DNA
tctttcttttggataaaataaa

SEQ ID NO: 40820 - DNA, 22 bp, synthetic construct
  misc_feature 1..22: note = chemically synthesized
  source 1..22: mol_type = other DNA
tttcttttggataaaataaaat

SEQ ID NO: 40821 - DNA, 22 bp, synthetic construct
  misc_feature 1..22: note = chemically synthesized
  source 1..22: mol_type = other DNA
tcttttggataaaataaaatca

SEQ ID NO: 40822 - DNA, 22 bp, synthetic construct
  misc_feature 1..22: note = chemically synthesized
  source 1..22: mol_type = other DNA
cttttggataaaataaaatcat

SEQ ID NO: 40823 - DNA, 22 bp, synthetic construct
  misc_feature 1..22: note = chemically synthesized
  source 1..22: mol_type = other DNA
ttttggataaaataaaatcata

SEQ ID NO: 40824 - DNA, 22 bp, synthetic construct
  misc_feature 1..22: note = chemically synthesized
  source 1..22: mol_type = other DNA
ttggataaaataaaatcataaa

SEQ ID NO: 40825 - DNA, 22 bp, synthetic construct
  misc_feature 1..22: note = chemically synthesized
  source 1..22: mol_type = other DNA
tggataaaataaaatcataaaa

SEQ ID NO: 40826 - DNA, 22 bp, synthetic construct
  misc_feature 1..22: note = chemically synthesized
  source 1..22: mol_type = other DNA
ggataaaataaaatcataaaag

SEQ ID NO: 40827 - DNA, 22 bp, synthetic construct
  misc_feature 1..22: note = chemically synthesized
  source 1..22: mol_type = other DNA
gataaaataaaatcataaaagt

SEQ ID NO: 40828 - DNA, 22 bp, synthetic construct
  misc_feature 1..22: note = chemically synthesized
  source 1..22: mol_type = other DNA
atatttgctggtaacttccatg

SEQ ID NO: 40829 - DNA, 22 bp, synthetic construct
  misc_feature 1..22: note = chemically synthesized
  source 1..22: mol_type = other DNA
gctggtaacttccatgaccaga

SEQ ID NO: 40830 - DNA, 22 bp, synthetic construct
  misc_feature 1..22: note = chemically synthesized
  source 1..22: mol_type = other DNA
ctggtaacttccatgaccagac

SEQ ID NO: 40831 - DNA, 22 bp, synthetic construct
  misc_feature 1..22: note = chemically synthesized
  source 1..22: mol_type = other DNA
gtaacttccatgaccagaccct

SEQ ID NO: 40832 - DNA, 22 bp, synthetic construct
  misc_feature 1..22: note = chemically synthesized
  source 1..22: mol_type = other DNA
ccatgaccagaccctctgccaa

SEQ ID NO: 40833 - DNA, 22 bp, synthetic construct
  misc_feature 1..22: note = chemically synthesized
  source 1..22: mol_type = other DNA
catgaccagaccctctgccaag

SEQ ID NO: 40834 - DNA, 22 bp, synthetic construct
  misc_feature 1..22: note = chemically synthesized
  source 1..22: mol_type = other DNA
tgccaagtgctgcacatccata

SEQ ID NO: 40835 - DNA, 22 bp, synthetic construct
  misc_feature 1..22: note = chemically synthesized
  source 1..22: mol_type = other DNA
ccaagtgctgcacatccatagc

SEQ ID NO: 40836 - DNA, 22 bp, synthetic construct
  misc_feature 1..22: note = chemically synthesized
  source 1..22: mol_type = other DNA
cacatccatagcctccctcaag

SEQ ID NO: 40837 - DNA, 22 bp, synthetic construct
  misc_feature 1..22: note = chemically synthesized
  source 1..22: mol_type = other DNA
cctcaagctttccaacaggcag

SEQ ID NO: 40838 - DNA, 22 bp, synthetic construct
  misc_feature 1..22: note = chemically synthesized
  source 1..22: mol_type = other DNA
aagctttccaacaggcagtgct

SEQ ID NO: 40839 - DNA, 22 bp, synthetic construct
  misc_feature 1..22: note = chemically synthesized
  source 1..22: mol_type = other DNA
tccaacaggcagtgctgtacga

SEQ ID NO: 40840 - DNA, 22 bp, synthetic construct
  misc_feature 1..22: note = chemically synthesized
  source 1..22: mol_type = other DNA
ccaacaggcagtgctgtacgag

SEQ ID NO: 40841 - DNA, 22 bp, synthetic construct
  misc_feature 1..22: note = chemically synthesized
  source 1..22: mol_type = other DNA
caacaggcagtgctgtacgagg

SEQ ID NO: 40842 - DNA, 22 bp, synthetic construct
  misc_feature 1..22: note = chemically synthesized
  source 1..22: mol_type = other DNA
tacgaggagggggctgaggcct

SEQ ID NO: 40843 - DNA, 22 bp, synthetic construct
  misc_feature 1..22: note = chemically synthesized
  source 1..22: mol_type = other DNA
aggccttcccgaggttgtgtcg

SEQ ID NO: 40844 - DNA, 22 bp, synthetic construct
  misc_feature 1..22: note = chemically synthesized
  source 1..22: mol_type = other DNA
cccgaggttgtgtcgctaccca

SEQ ID NO: 40845 - DNA, 22 bp, synthetic construct
  misc_feature 1..22: note = chemically synthesized
  source 1..22: mol_type = other DNA
ccgaggttgtgtcgctacccag

SEQ ID NO: 40846 - DNA, 22 bp, synthetic construct
  misc_feature 1..22: note = chemically synthesized
  source 1..22: mol_type = other DNA
tgtcgctacccaggggtgcagc

SEQ ID NO: 40847 - DNA, 22 bp, synthetic construct
  misc_feature 1..22: note = chemically synthesized
  source 1..22: mol_type = other DNA
cccaggggtgcagctgatagac

SEQ ID NO: 40848 - DNA, 22 bp, synthetic construct
  misc_feature 1..22: note = chemically synthesized
  source 1..22: mol_type = other DNA
atagacacaaccctttcaggtc

SEQ ID NO: 40849 - DNA, 22 bp, synthetic construct
  misc_feature 1..22: note = chemically synthesized
  source 1..22: mol_type = other DNA
tcaggtcttagtttacgagcaa

SEQ ID NO: 40850 - DNA, 22 bp, synthetic construct
  misc_feature 1..22: note = chemically synthesized
  source 1..22: mol_type = other DNA
caggtcttagtttacgagcaag

SEQ ID NO: 40851 - DNA, 22 bp, synthetic construct
  misc_feature 1..22: note = chemically synthesized
  source 1..22: mol_type = other DNA
aggtcttagtttacgagcaagc

SEQ ID NO: 40852 - DNA, 22 bp, synthetic construct
  misc_feature 1..22: note = chemically synthesized
  source 1..22: mol_type = other DNA
agtttacgagcaagctaggtat

SEQ ID NO: 40853 - DNA, 22 bp, synthetic construct
  misc_feature 1..22: note = chemically synthesized
  source 1..22: mol_type = other DNA
gtttacgagcaagctaggtata

SEQ ID NO: 40854 - DNA, 22 bp, synthetic construct
  misc_feature 1..22: note = chemically synthesized
  source 1..22: mol_type = other DNA
acgagcaagctaggtataaatg

SEQ ID NO: 40855 - DNA, 22 bp, synthetic construct
  misc_feature 1..22: note = chemically synthesized
  source 1..22: mol_type = other DNA
cgagcaagctaggtataaatgt

SEQ ID NO: 40856 - DNA, 22 bp, synthetic construct
  misc_feature 1..22: note = chemically synthesized
  source 1..22: mol_type = other DNA
ggtataaatgttaacatctcca

SEQ ID NO: 40857 - DNA, 22 bp, synthetic construct
  misc_feature 1..22: note = chemically synthesized
  source 1..22: mol_type = other DNA
acatctccacatcctataccaa

SEQ ID NO: 40858 - DNA, 22 bp, synthetic construct
  misc_feature 1..22: note = chemically synthesized
  source 1..22: mol_type = other DNA
cacatcctataccaaactgtgc

SEQ ID NO: 40859 - DNA, 22 bp, synthetic construct
  misc_feature 1..22: note = chemically synthesized
  source 1..22: mol_type = other DNA
taccaaactgtgccgaaatgac

SEQ ID NO: 40860 - DNA, 22 bp, synthetic construct
  misc_feature 1..22: note = chemically synthesized
  source 1..22: mol_type = other DNA
tgccgaaatgacaacataagtg

SEQ ID NO: 40861 - DNA, 22 bp, synthetic construct
  misc_feature 1..22: note = chemically synthesized
  source 1..22: mol_type = other DNA
ttattatcttcaaaatttattt

SEQ ID NO: 40862 - DNA, 22 bp, synthetic construct
  misc_feature 1..22: note = chemically synthesized
  source 1..22: mol_type = other DNA
tattatcttcaaaatttattta

SEQ ID NO: 40863 - DNA, 22 bp, synthetic construct
  misc_feature 1..22: note = chemically synthesized
  source 1..22: mol_type = other DNA
attatcttcaaaatttatttat

SEQ ID NO: 40864 - DNA, 22 bp, synthetic construct
  misc_feature 1..22: note = chemically synthesized
  source 1..22: mol_type = other DNA
ttatcttcaaaatttatttatt

SEQ ID NO: 40865 - DNA, 22 bp, synthetic construct
  misc_feature 1..22: note = chemically synthesized
  source 1..22: mol_type = other DNA
tcttcaaaatttatttattcct

SEQ ID NO: 40866 - DNA, 22 bp, synthetic construct
  misc_feature 1..22: note = chemically synthesized
  source 1..22: mol_type = other DNA
caaaatttatttattcctagtg

SEQ ID NO: 40867 - DNA, 22 bp, synthetic construct
  misc_feature 1..22: note = chemically synthesized
  source 1..22: mol_type = other DNA
aaaatttatttattcctagtga

SEQ ID NO: 40868 - DNA, 22 bp, synthetic construct
  misc_feature 1..22: note = chemically synthesized
  source 1..22: mol_type = other DNA
atttattcctagtgaactcaca

SEQ ID NO: 40869 - DNA, 22 bp, synthetic construct
  misc_feature 1..22: note = chemically synthesized
  source 1..22: mol_type = other DNA
tttattcctagtgaactcacat

SEQ ID NO: 40870 - DNA, 22 bp, synthetic construct
  misc_feature 1..22: note = chemically synthesized
  source 1..22: mol_type = other DNA
attcctagtgaactcacatgtt

SEQ ID NO: 40871 - DNA, 22 bp, synthetic construct
  misc_feature 1..22: note = chemically synthesized
  source 1..22: mol_type = other DNA
ttcctagtgaactcacatgttt

SEQ ID NO: 40872 - DNA, 22 bp, synthetic construct
  misc_feature 1..22: note = chemically synthesized
  source 1..22: mol_type = other DNA
ctagtgaactcacatgttttct

SEQ ID NO: 40873 - DNA, 22 bp, synthetic construct
  misc_feature 1..22: note = chemically synthesized
  source 1..22: mol_type = other DNA
gtgaactcacatgttttctgta

SEQ ID NO: 40874 - DNA, 22 bp, synthetic construct
  misc_feature 1..22: note = chemically synthesized
  source 1..22: mol_type = other DNA
acatgttttctgtaattataaa

SEQ ID NO: 40875 - DNA, 22 bp, synthetic construct
  misc_feature 1..22: note = chemically synthesized
  source 1..22: mol_type = other DNA
tctgtaattataaattatgtta

SEQ ID NO: 40876 - DNA, 22 bp, synthetic construct
  misc_feature 1..22: note = chemically synthesized
  source 1..22: mol_type = other DNA
ctgtaattataaattatgttat

SEQ ID NO: 40877 - DNA, 22 bp, synthetic construct
  misc_feature 1..22: note = chemically synthesized
  source 1..22: mol_type = other DNA
tgtaattataaattatgttata

SEQ ID NO: 40878 - DNA, 22 bp, synthetic construct
  misc_feature 1..22: note = chemically synthesized
  source 1..22: mol_type = other DNA
taattataaattatgttataag

SEQ ID NO: 40879 - DNA, 22 bp, synthetic construct
  misc_feature 1..22: note = chemically synthesized
  source 1..22: mol_type = other DNA
taaattatgttataagatatca

SEQ ID NO: 40880 - DNA, 22 bp, synthetic construct
  misc_feature 1..22: note = chemically synthesized
  source 1..22: mol_type = other DNA
tgttataagatatcaatccttc

SEQ ID NO: 40881 - DNA, 22 bp, synthetic construct
  misc_feature 1..22: note = chemically synthesized
  source 1..22: mol_type = other DNA
taagatatcaatccttccagga

SEQ ID NO: 40882 - DNA, 22 bp, synthetic construct
  misc_feature 1..22: note = chemically synthesized
  source 1..22: mol_type = other DNA
ccaggagggggtggtggctcat

SEQ ID NO: 40883 - DNA, 22 bp, synthetic construct
  misc_feature 1..22: note = chemically synthesized
  source 1..22: mol_type = other DNA
caggagggggtggtggctcatg

SEQ ID NO: 40884 - DNA, 22 bp, synthetic construct
  misc_feature 1..22: note = chemically synthesized
  source 1..22: mol_type = other DNA
atgcctataatcccagcatttt

SEQ ID NO: 40885 - DNA, 22 bp, synthetic construct
  misc_feature 1..22: note = chemically synthesized
  source 1..22: mol_type = other DNA
taatcccagcattttgggaggc

SEQ ID NO: 40886 - DNA, 22 bp, synthetic construct
  misc_feature 1..22: note = chemically synthesized
  source 1..22: mol_type = other DNA
tgggaggccacggcagatggat

SEQ ID NO: 40887 - DNA, 22 bp, synthetic construct
  misc_feature 1..22: note = chemically synthesized
  source 1..22: mol_type = other DNA
gggaggccacggcagatggatc

SEQ ID NO: 40888 - DNA, 22 bp, synthetic construct
  misc_feature 1..22: note = chemically synthesized
  source 1..22: mol_type = other DNA
ggaggccacggcagatggatca

SEQ ID NO: 40889 - DNA, 22 bp, synthetic construct
  misc_feature 1..22: note = chemically synthesized
  source 1..22: mol_type = other DNA
aggccaggagtttgagacaagc

SEQ ID NO: 40890 - DNA, 22 bp, synthetic construct
  misc_feature 1..22: note = chemically synthesized
  source 1..22: mol_type = other DNA
gagacaagcctgggcaacatgc

SEQ ID NO: 40891 - DNA, 22 bp, synthetic construct
  misc_feature 1..22: note = chemically synthesized
  source 1..22: mol_type = other DNA
agacaagcctgggcaacatgcc

SEQ ID NO: 40892 - DNA, 22 bp, synthetic construct
  misc_feature 1..22: note = chemically synthesized
  source 1..22: mol_type = other DNA
ggcaacatgccaaaaccctgtc

SEQ ID NO: 40893 - DNA, 22 bp, synthetic construct
  misc_feature 1..22: note = chemically synthesized
  source 1..22: mol_type = other DNA
tctctacaaaaaatacaaaaat

SEQ ID NO: 40894 - DNA, 22 bp, synthetic construct
  misc_feature 1..22: note = chemically synthesized
  source 1..22: mol_type = other DNA
tacaaaaaatacaaaaattagc

SEQ ID NO: 40895 - DNA, 22 bp, synthetic construct
  misc_feature 1..22: note = chemically synthesized
  source 1..22: mol_type = other DNA
caaaaaatacaaaaattagctg

SEQ ID NO: 40896 - DNA, 22 bp, synthetic construct
  misc_feature 1..22: note = chemically synthesized
  source 1..22: mol_type = other DNA
gctgggtgtggaggcacatgcc

SEQ ID NO: 40897 - DNA, 22 bp, synthetic construct
  misc_feature 1..22: note = chemically synthesized
  source 1..22: mol_type = other DNA
ggtgtggaggcacatgccagtc

SEQ ID NO: 40898 - DNA, 22 bp, synthetic construct
  misc_feature 1..22: note = chemically synthesized
  source 1..22: mol_type = other DNA
ctaagtaggctgaggcactaga

SEQ ID NO: 40899 - DNA, 22 bp, synthetic construct
  misc_feature 1..22: note = chemically synthesized
  source 1..22: mol_type = other DNA
agtaggctgaggcactagaatt

SEQ ID NO: 40900 - DNA, 22 bp, synthetic construct
  misc_feature 1..22: note = chemically synthesized
  source 1..22: mol_type = other DNA
aggcactagaattgcttgaaca

SEQ ID NO: 40901 - DNA, 22 bp, synthetic construct
  misc_feature 1..22: note = chemically synthesized
  source 1..22: mol_type = other DNA
gaattgcttgaacacaggagat

SEQ ID NO: 40902 - DNA, 22 bp, synthetic construct
  misc_feature 1..22: note = chemically synthesized
  source 1..22: mol_type = other DNA
cttgaacacaggagatggaggt

SEQ ID NO: 40903 - DNA, 22 bp, synthetic construct
  misc_feature 1..22: note = chemically synthesized
  source 1..22: mol_type = other DNA
gaacacaggagatggaggttgc

SEQ ID NO: 40904 - DNA, 22 bp, synthetic construct
  misc_feature 1..22: note = chemically synthesized
  source 1..22: mol_type = other DNA
aacacaggagatggaggttgca

SEQ ID NO: 40905 - DNA, 22 bp, synthetic construct
  misc_feature 1..22: note = chemically synthesized
  source 1..22: mol_type = other DNA
cagtgagccaagaatgtgccac

SEQ ID NO: 40906 - DNA, 22 bp, synthetic construct
  misc_feature 1..22: note = chemically synthesized
  source 1..22: mol_type = other DNA
cactccagcctgggtgacagag

SEQ ID NO: 40907 - DNA, 22 bp, synthetic construct
  misc_feature 1..22: note = chemically synthesized
  source 1..22: mol_type = other DNA
cagcctgggtgacagagcaaga

SEQ ID NO: 40908 - DNA, 22 bp, synthetic construct
  misc_feature 1..22: note = chemically synthesized
  source 1..22: mol_type = other DNA
ggtgacagagcaagaatgtctc

SEQ ID NO: 40909 - DNA, 22 bp, synthetic construct
  misc_feature 1..22: note = chemically synthesized
  source 1..22: mol_type = other DNA
aggaaagaaaaaaaaataataa

SEQ ID NO: 40910 - DNA, 22 bp, synthetic construct
  misc_feature 1..22: note = chemically synthesized
  source 1..22: mol_type = other DNA
ataaaatatcaatccttcctat

SEQ ID NO: 40911 - DNA, 22 bp, synthetic construct
  misc_feature 1..22: note = chemically synthesized
  source 1..22: mol_type = other DNA
cctattctagtagttgtggctt

SEQ ID NO: 40912 - DNA, 22 bp, synthetic construct
  misc_feature 1..22: note = chemically synthesized
  source 1..22: mol_type = other DNA
ctattctagtagttgtggctta

SEQ ID NO: 40913 - DNA, 22 bp, synthetic construct
  misc_feature 1..22: note = chemically synthesized
  source 1..22: mol_type = other DNA
ttctagtagttgtggcttaaat

SEQ ID NO: 40914 - DNA, 22 bp, synthetic construct
  misc_feature 1..22: note = chemically synthesized
  source 1..22: mol_type = other DNA
tagtagttgtggcttaaataaa

SEQ ID NO: 40915 - DNA, 22 bp, synthetic construct
  misc_feature 1..22: note = chemically synthesized
  source 1..22: mol_type = other DNA
gtagttgtggcttaaataaata

SEQ ID NO: 40916 - DNA, 22 bp, synthetic construct
  misc_feature 1..22: note = chemically synthesized
  source 1..22: mol_type = other DNA
tggcttaaataaataaataaat

SEQ ID NO: 40917 - DNA, 22 bp, synthetic construct
  misc_feature 1..22: note = chemically synthesized
  source 1..22: mol_type = other DNA
aaataaataaataaatattttt

SEQ ID NO: 40918 - DNA, 22 bp, synthetic construct
  misc_feature 1..22: note = chemically synthesized
  source 1..22: mol_type = other DNA
aataaataaataaatattttta

SEQ ID NO: 40919 - DNA, 22 bp, synthetic construct
  misc_feature 1..22: note = chemically synthesized
  source 1..22: mol_type = other DNA
ttaaaaataaaacatagggtcg

SEQ ID NO: 40920 - DNA, 22 bp, synthetic construct
  misc_feature 1..22: note = chemically synthesized
  source 1..22: mol_type = other DNA
taaaaataaaacatagggtcga

SEQ ID NO: 40921 - DNA, 22 bp, synthetic construct
  misc_feature 1..22: note = chemically synthesized
  source 1..22: mol_type = other DNA
aaaaataaaacatagggtcgag

SEQ ID NO: 40922 - DNA, 22 bp, synthetic construct
  misc_feature 1..22: note = chemically synthesized
  source 1..22: mol_type = other DNA
aaaataaaacatagggtcgagt

SEQ ID NO: 40923 - DNA, 22 bp, synthetic construct
  misc_feature 1..22: note = chemically synthesized
  source 1..22: mol_type = other DNA
aactctgtaatcccagcacttt

SEQ ID NO: 40924 - DNA, 22 bp, synthetic construct
  misc_feature 1..22: note = chemically synthesized
  source 1..22: mol_type = other DNA
tgtaatcccagcactttgggag

SEQ ID NO: 40925 - DNA, 22 bp, synthetic construct
  misc_feature 1..22: note = chemically synthesized
  source 1..22: mol_type = other DNA
taatcccagcactttgggaggc

SEQ ID NO: 40926 - DNA, 22 bp, synthetic construct
  misc_feature 1..22: note = chemically synthesized
  source 1..22: mol_type = other DNA
tgggaggccaagacaggtggat

SEQ ID NO: 40927 - DNA, 22 bp, synthetic construct
  misc_feature 1..22: note = chemically synthesized
  source 1..22: mol_type = other DNA
gggaggccaagacaggtggatc

SEQ ID NO: 40928 - DNA, 22 bp, synthetic construct
  misc_feature 1..22: note = chemically synthesized
  source 1..22: mol_type = other DNA
ggaggccaagacaggtggatca

SEQ ID NO: 40929 - DNA, 22 bp, synthetic construct
  misc_feature 1..22: note = chemically synthesized
  source 1..22: mol_type = other DNA
gagaccagccaggccaatgtgg

SEQ ID NO: 40930 - DNA, 22 bp, synthetic construct
  misc_feature 1..22: note = chemically synthesized
  source 1..22: mol_type = other DNA
agaccagccaggccaatgtggt

SEQ ID NO: 40931 - DNA, 22 bp, synthetic construct
  misc_feature 1..22: note = chemically synthesized
  source 1..22: mol_type = other DNA
tactaaaaatacaaaaattagc

SEQ ID NO: 40932 - DNA, 22 bp, synthetic construct
  misc_feature 1..22: note = chemically synthesized
  source 1..22: mol_type = other DNA
ctaaaaatacaaaaattagcca

SEQ ID NO: 40933 - DNA, 22 bp, synthetic construct
  misc_feature 1..22: note = chemically synthesized
  source 1..22: mol_type = other DNA
aaaatacaaaaattagccaggc

SEQ ID NO: 40934 - DNA, 22 bp, synthetic construct
  misc_feature 1..22: note = chemically synthesized
  source 1..22: mol_type = other DNA
gccaggcgtggtggtgggcacc

SEQ ID NO: 40935 - DNA, 22 bp, synthetic construct
  misc_feature 1..22: note = chemically synthesized
  source 1..22: mol_type = other DNA
taatcccagctactagggaggc

SEQ ID NO: 40936 - DNA, 22 bp, synthetic construct
  misc_feature 1..22: note = chemically synthesized
  source 1..22: mol_type = other DNA
ctagggaggctggagtattcac

SEQ ID NO: 40937 - DNA, 22 bp, synthetic construct
  misc_feature 1..22: note = chemically synthesized
  source 1..22: mol_type = other DNA
gggaggctggagtattcacttg

SEQ ID NO: 40938 - DNA, 22 bp, synthetic construct
  misc_feature 1..22: note = chemically synthesized
  source 1..22: mol_type = other DNA
gagtattcacttgaacccagga

SEQ ID NO: 40939 - DNA, 22 bp, synthetic construct
  misc_feature 1..22: note = chemically synthesized
  source 1..22: mol_type = other DNA
acttgaacccaggaggtggaag

SEQ ID NO: 40940 - DNA, 22 bp, synthetic construct
  misc_feature 1..22: note = chemically synthesized
  source 1..22: mol_type = other DNA
gaacccaggaggtggaagttgc

SEQ ID NO: 40941 - DNA, 22 bp, synthetic construct
  misc_feature 1..22: note = chemically synthesized
  source 1..22: mol_type = other DNA
aacccaggaggtggaagttgca

SEQ ID NO: 40942 - DNA, 22 bp, synthetic construct
  misc_feature 1..22: note = chemically synthesized
  source 1..22: mol_type = other DNA
cagtgagccaaaatcacgtcag

SEQ ID NO: 40943 - DNA, 22 bp, synthetic construct
  misc_feature 1..22: note = chemically synthesized
  source 1..22: mol_type = other DNA
caaccggggtgagagtctcaat

SEQ ID NO: 40944 - DNA, 22 bp, synthetic construct
  misc_feature 1..22: note = chemically synthesized
  source 1..22: mol_type = other DNA
aaccggggtgagagtctcaata

SEQ ID NO: 40945 - DNA, 22 bp, synthetic construct
  misc_feature 1..22: note = chemically synthesized
  source 1..22: mol_type = other DNA
aataaaataaaataaaataaaa

SEQ ID NO: 40946 - DNA, 22 bp, synthetic construct
  misc_feature 1..22: note = chemically synthesized
  source 1..22: mol_type = other DNA
tccgcaaatgaattcatggtgc

SEQ ID NO: 40947 - DNA, 22 bp, synthetic construct
  misc_feature 1..22: note = chemically synthesized
  source 1..22: mol_type = other DNA
ccgcaaatgaattcatggtgca

SEQ ID NO: 40948 - DNA, 22 bp, synthetic construct
  misc_feature 1..22: note = chemically synthesized
  source 1..22: mol_type = other DNA
cgcaaatgaattcatggtgcaa

SEQ ID NO: 40949 - DNA, 22 bp, synthetic construct
  misc_feature 1..22: note = chemically synthesized
  source 1..22: mol_type = other DNA
atggtgcaatcttacattttcg

SEQ ID NO: 40950 - DNA, 22 bp, synthetic construct
  misc_feature 1..22: note = chemically synthesized
  source 1..22: mol_type = other DNA
acattttcgttctcatgaagta

SEQ ID NO: 40951 - DNA, 22 bp, synthetic construct
  misc_feature 1..22: note = chemically synthesized
  source 1..22: mol_type = other DNA
cattttcgttctcatgaagtaa

SEQ ID NO: 40952 - DNA, 22 bp, synthetic construct
  misc_feature 1..22: note = chemically synthesized
  source 1..22: mol_type = other DNA
tcgttctcatgaagtaaagcaa

SEQ ID NO: 40953 - DNA, 22 bp, synthetic construct
  misc_feature 1..22: note = chemically synthesized
  source 1..22: mol_type = other DNA
cgttctcatgaagtaaagcaag

SEQ ID NO: 40954 - DNA, 22 bp, synthetic construct
  misc_feature 1..22: note = chemically synthesized
  source 1..22: mol_type = other DNA
gttctcatgaagtaaagcaaga

SEQ ID NO: 40955 - DNA, 22 bp, synthetic construct
  misc_feature 1..22: note = chemically synthesized
  source 1..22: mol_type = other DNA
tcatgaagtaaagcaagagtgg

SEQ ID NO: 40956 - DNA, 22 bp, synthetic construct
  misc_feature 1..22: note = chemically synthesized
  source 1..22: mol_type = other DNA
atgaagtaaagcaagagtggta

SEQ ID NO: 40957 - DNA, 22 bp, synthetic construct
  misc_feature 1..22: note = chemically synthesized
  source 1..22: mol_type = other DNA
agtggaaagagtctatctctag

SEQ ID NO: 40958 - DNA, 22 bp, synthetic construct
  misc_feature 1..22: note = chemically synthesized
  source 1..22: mol_type = other DNA
tctctagtgtagtcacgtcagt

SEQ ID NO: 40959 - DNA, 22 bp, synthetic construct
  misc_feature 1..22: note = chemically synthesized
  source 1..22: mol_type = other DNA
tagtgtagtcacgtcagtggtt

SEQ ID NO: 40960 - DNA, 22 bp, synthetic construct
  misc_feature 1..22: note = chemically synthesized
  source 1..22: mol_type = other DNA
gtgtagtcacgtcagtggttgt

SEQ ID NO: 40961 - DNA, 22 bp, synthetic construct
  misc_feature 1..22: note = chemically synthesized
  source 1..22: mol_type = other DNA
tgtcaagatggttaggaggctc

SEQ ID NO: 40962 - DNA, 22 bp, synthetic construct
  misc_feature 1..22: note = chemically synthesized
  source 1..22: mol_type = other DNA
ggaggctcctcccgtttaaaac

SEQ ID NO: 40963 - DNA, 22 bp, synthetic construct
  misc_feature 1..22: note = chemically synthesized
  source 1..22: mol_type = other DNA
ctcccgtttaaaacagtatcca

SEQ ID NO: 40964 - DNA, 22 bp, synthetic construct
  misc_feature 1..22: note = chemically synthesized
  source 1..22: mol_type = other DNA
ccgtttaaaacagtatccaagc

SEQ ID NO: 40965 - DNA, 22 bp, synthetic construct
  misc_feature 1..22: note = chemically synthesized
  source 1..22: mol_type = other DNA
aaaacagtatccaagccccagt

SEQ ID NO: 40966 - DNA, 22 bp, synthetic construct
  misc_feature 1..22: note = chemically synthesized
  source 1..22: mol_type = other DNA
aaacagtatccaagccccagtt

SEQ ID NO: 40967 - DNA, 22 bp, synthetic construct
  misc_feature 1..22: note = chemically synthesized
  source 1..22: mol_type = other DNA
taaatcaattggggagacacgc

SEQ ID NO: 40968 - DNA, 22 bp, synthetic construct
  misc_feature 1..22: note = chemically synthesized
  source 1..22: mol_type = other DNA
gggagacacgccaactctgatc

SEQ ID NO: 40969 - DNA, 22 bp, synthetic construct
  misc_feature 1..22: note = chemically synthesized
  source 1..22: mol_type = other DNA
tgatcatcagcaatatctgagc

SEQ ID NO: 40970 - DNA, 22 bp, synthetic construct
  misc_feature 1..22: note = chemically synthesized
  source 1..22: mol_type = other DNA
atcatcagcaatatctgagctc

SEQ ID NO: 40971 - DNA, 22 bp, synthetic construct
  misc_feature 1..22: note = chemically synthesized
  source 1..22: mol_type = other DNA
agctccagtctcagatattgtg

SEQ ID NO: 40972 - DNA, 22 bp, synthetic construct
  misc_feature 1..22: note = chemically synthesized
  source 1..22: mol_type = other DNA
cagtctcagatattgtgtgcag

SEQ ID NO: 40973 - DNA, 22 bp, synthetic construct
  misc_feature 1..22: note = chemically synthesized
  source 1..22: mol_type = other DNA
agatattgtgtgcagttagtct

SEQ ID NO: 40974 - DNA, 22 bp, synthetic construct
  misc_feature 1..22: note = chemically synthesized
  source 1..22: mol_type = other DNA
tgtgcagttagtctctgtcctg

SEQ ID NO: 40975 - DNA, 22 bp, synthetic construct
  misc_feature 1..22: note = chemically synthesized
  source 1..22: mol_type = other DNA
gtctctgtcctgtaccctctac

SEQ ID NO: 40976 - DNA, 22 bp, synthetic construct
  misc_feature 1..22: note = chemically synthesized
  source 1..22: mol_type = other DNA
tgtcctgtaccctctacctcct

SEQ ID NO: 40977 - DNA, 22 bp, synthetic construct
  misc_feature 1..22: note = chemically synthesized
  source 1..22: mol_type = other DNA
tcctgtaccctctacctccttc

SEQ ID NO: 40978 - DNA, 22 bp, synthetic construct
  misc_feature 1..22: note = chemically synthesized
  source 1..22: mol_type = other DNA
taccctctacctccttccctac

SEQ ID NO: 40979 - DNA, 22 bp, synthetic construct
  misc_feature 1..22: note = chemically synthesized
  source 1..22: mol_type = other DNA
tacctccttccctaccagaaaa

SEQ ID NO: 40980 - DNA, 22 bp, synthetic construct
  misc_feature 1..22: note = chemically synthesized
  source 1..22: mol_type = other DNA
cctccttccctaccagaaaaat

SEQ ID NO: 40981 - DNA, 22 bp, synthetic construct
  misc_feature 1..22: note = chemically synthesized
  source 1..22: mol_type = other DNA
cttccctaccagaaaaatcacc

SEQ ID NO: 40982 - DNA, 22 bp, synthetic construct
  misc_feature 1..22: note = chemically synthesized
  source 1..22: mol_type = other DNA
ccctaccagaaaaatcaccact

SEQ ID NO: 40983 - DNA, 22 bp, synthetic construct
  misc_feature 1..22: note = chemically synthesized
  source 1..22: mol_type = other DNA
cctaccagaaaaatcaccactt

SEQ ID NO: 40984 - DNA, 22 bp, synthetic construct
  misc_feature 1..22: note = chemically synthesized
  source 1..22: mol_type = other DNA
ccagaaaaatcaccactttagt

SEQ ID NO: 40985 - DNA, 22 bp, synthetic construct
  misc_feature 1..22: note = chemically synthesized
  source 1..22: mol_type = other DNA
tagtccctggccaccgggacac

SEQ ID NO: 40986 - DNA, 22 bp, synthetic construct
  misc_feature 1..22: note = chemically synthesized
  source 1..22: mol_type = other DNA
agtccctggccaccgggacacc

SEQ ID NO: 40987 - DNA, 22 bp, synthetic construct
  misc_feature 1..22: note = chemically synthesized
  source 1..22: mol_type = other DNA
gtccctggccaccgggacaccc

SEQ ID NO: 40988 - DNA, 22 bp, synthetic construct
  misc_feature 1..22: note = chemically synthesized
  source 1..22: mol_type = other DNA
gccaccgggacaccccaggagg

SEQ ID NO: 40989 - DNA, 22 bp, synthetic construct
  misc_feature 1..22: note = chemically synthesized
  source 1..22: mol_type = other DNA
aggtagttatggcacttatggc

SEQ ID NO: 40990 - DNA, 22 bp, synthetic construct
  misc_feature 1..22: note = chemically synthesized
  source 1..22: mol_type = other DNA
tggcacttatggctcccttgct

SEQ ID NO: 40991 - DNA, 22 bp, synthetic construct
  misc_feature 1..22: note = chemically synthesized
  source 1..22: mol_type = other DNA
atggctcccttgctgctgatct

SEQ ID NO: 40992 - DNA, 22 bp, synthetic construct
  misc_feature 1..22: note = chemically synthesized
  source 1..22: mol_type = other DNA
tggctcccttgctgctgatctg

SEQ ID NO: 40993 - DNA, 22 bp, synthetic construct
  misc_feature 1..22: note = chemically synthesized
  source 1..22: mol_type = other DNA
ccttgctgctgatctggaactc

SEQ ID NO: 40994 - DNA, 22 bp, synthetic construct
  misc_feature 1..22: note = chemically synthesized
  source 1..22: mol_type = other DNA
gctgctgatctggaactcaagc

SEQ ID NO: 40995 - DNA, 22 bp, synthetic construct
  misc_feature 1..22: note = chemically synthesized
  source 1..22: mol_type = other DNA
ctgctgatctggaactcaagcc

SEQ ID NO: 40996 - DNA, 22 bp, synthetic construct
  misc_feature 1..22: note = chemically synthesized
  source 1..22: mol_type = other DNA
ctgatctggaactcaagcccca

SEQ ID NO: 40997 - DNA, 22 bp, synthetic construct
  misc_feature 1..22: note = chemically synthesized
  source 1..22: mol_type = other DNA
atctggaactcaagccccaaga

SEQ ID NO: 40998 - DNA, 22 bp, synthetic construct
  misc_feature 1..22: note = chemically synthesized
  source 1..22: mol_type = other DNA
gaactcaagccccaagaagtcc

SEQ ID NO: 40999 - DNA, 22 bp, synthetic construct
  misc_feature 1..22: note = chemically synthesized
  source 1..22: mol_type = other DNA
aagccccaagaagtccccttgg

SEQ ID NO: 41000 - DNA, 22 bp, synthetic construct
  misc_feature 1..22: note = chemically synthesized
  source 1..22: mol_type = other DNA
ggatgatctgaatatacatttg

SEQ ID NO: 41001 - DNA, 22 bp, synthetic construct
  misc_feature 1..22: note = chemically synthesized
  source 1..22: mol_type = other DNA
gatgatctgaatatacatttgg

SEQ ID NO: 41002 - DNA, 22 bp, synthetic construct
  misc_feature 1..22: note = chemically synthesized
  source 1..22: mol_type = other DNA
aatatacatttgggacagatct

SEQ ID NO: 41003 - DNA, 22 bp, synthetic construct
  misc_feature 1..22: note = chemically synthesized
  source 1..22: mol_type = other DNA
gggacagatctagggagtttct

SEQ ID NO: 41004 - DNA, 22 bp, synthetic construct
  misc_feature 1..22: note = chemically synthesized
  source 1..22: mol_type = other DNA
ggacagatctagggagtttctg

SEQ ID NO: 41005 - DNA, 22 bp, synthetic construct
  misc_feature 1..22: note = chemically synthesized
  source 1..22: mol_type = other DNA
gggagtttctgagcaacactta

SEQ ID NO: 41006 - DNA, 22 bp, synthetic construct
  misc_feature 1..22: note = chemically synthesized
  source 1..22: mol_type = other DNA
ctgagcaacacttagactgggg

SEQ ID NO: 41007 - DNA, 22 bp, synthetic construct
  misc_feature 1..22: note = chemically synthesized
  source 1..22: mol_type = other DNA
tgagcaacacttagactggggt

SEQ ID NO: 41008 - DNA, 22 bp, synthetic construct
  misc_feature 1..22: note = chemically synthesized
  source 1..22: mol_type = other DNA
agcaacacttagactggggtct

SEQ ID NO: 41009 - DNA, 22 bp, synthetic construct
  misc_feature 1..22: note = chemically synthesized
  source 1..22: mol_type = other DNA
agactggggtcttccattgatt

SEQ ID NO: 41010 - DNA, 22 bp, synthetic construct
  misc_feature 1..22: note = chemically synthesized
  source 1..22: mol_type = other DNA
gactggggtcttccattgatta

SEQ ID NO: 41011 - DNA, 22 bp, synthetic construct
  misc_feature 1..22: note = chemically synthesized
  source 1..22: mol_type = other DNA
gggtcttccattgattaaatcc

SEQ ID NO: 41012 - DNA, 22 bp, synthetic construct
  misc_feature 1..22: note = chemically synthesized
  source 1..22: mol_type = other DNA
ccattgattaaatcctacttga

SEQ ID NO: 41013 - DNA, 22 bp, synthetic construct
  misc_feature 1..22: note = chemically synthesized
  source 1..22: mol_type = other DNA
cattgattaaatcctacttgaa

SEQ ID NO: 41014 - DNA, 22 bp, synthetic construct
  misc_feature 1..22: note = chemically synthesized
  source 1..22: mol_type = other DNA
attaaatcctacttgaattcgc

SEQ ID NO: 41015 - DNA, 22 bp, synthetic construct
  misc_feature 1..22: note = chemically synthesized
  source 1..22: mol_type = other DNA
aatcctacttgaattcgctact

SEQ ID NO: 41016 - DNA, 22 bp, synthetic construct
  misc_feature 1..22: note = chemically synthesized
  source 1..22: mol_type = other DNA
cttgaattcgctactttgggac

SEQ ID NO: 41017 - DNA, 22 bp, synthetic construct
  misc_feature 1..22: note = chemically synthesized
  source 1..22: mol_type = other DNA
gaattcgctactttgggactca

SEQ ID NO: 41018 - DNA, 22 bp, synthetic construct
  misc_feature 1..22: note = chemically synthesized
  source 1..22: mol_type = other DNA
aattcgctactttgggactcaa

SEQ ID NO: 41019 - DNA, 22 bp, synthetic construct
  misc_feature 1..22: note = chemically synthesized
  source 1..22: mol_type = other DNA
gctactttgggactcaagtcta

SEQ ID NO: 41020 - DNA, 22 bp, synthetic construct
  misc_feature 1..22: note = chemically synthesized
  source 1..22: mol_type = other DNA
ctttgggactcaagtctaaggg

SEQ ID NO: 41021 - DNA, 22 bp, synthetic construct
  misc_feature 1..22: note = chemically synthesized
  source 1..22: mol_type = other DNA
tgggactcaagtctaagggact

SEQ ID NO: 41022 - DNA, 22 bp, synthetic construct
  misc_feature 1..22: note = chemically synthesized
  source 1..22: mol_type = other DNA
gggactcaagtctaagggactg

SEQ ID NO: 41023 - DNA, 22 bp, synthetic construct
  misc_feature 1..22: note = chemically synthesized
  source 1..22: mol_type = other DNA
ggactcaagtctaagggactga

SEQ ID NO: 41024 - DNA, 22 bp, synthetic construct
  misc_feature 1..22: note = chemically synthesized
  source 1..22: mol_type = other DNA
aagtctaagggactgagactga

SEQ ID NO: 41025 - DNA, 22 bp, synthetic construct
  misc_feature 1..22: note = chemically synthesized
  source 1..22: mol_type = other DNA
agggactgagactgagacagga

SEQ ID NO: 41026 - DNA, 22 bp, synthetic construct
  misc_feature 1..22: note = chemically synthesized
  source 1..22: mol_type = other DNA
agactgagacaggagagcacaa

SEQ ID NO: 41027 - DNA, 22 bp, synthetic construct
  misc_feature 1..22: note = chemically synthesized
  source 1..22: mol_type = other DNA
agacaggagagcacaagactaa

SEQ ID NO: 41028 - DNA, 22 bp, synthetic construct
  misc_feature 1..22: note = chemically synthesized
  source 1..22: mol_type = other DNA
actttggtctcttgatcttttc

SEQ ID NO: 41029 - DNA, 22 bp, synthetic construct
  misc_feature 1..22: note = chemically synthesized
  source 1..22: mol_type = other DNA
tggtctcttgatcttttcttac

SEQ ID NO: 41030 - DNA, 22 bp, synthetic construct
  misc_feature 1..22: note = chemically synthesized
  source 1..22: mol_type = other DNA
ggtctcttgatcttttcttacc

SEQ ID NO: 41031 - DNA, 22 bp, synthetic construct
  misc_feature 1..22: note = chemically synthesized
  source 1..22: mol_type = other DNA
gtctcttgatcttttcttacct

SEQ ID NO: 41032 - DNA, 22 bp, synthetic construct
  misc_feature 1..22: note = chemically synthesized
  source 1..22: mol_type = other DNA
ttgatcttttcttaccttgcaa

SEQ ID NO: 41033 - DNA, 22 bp, synthetic construct
  misc_feature 1..22: note = chemically synthesized
  source 1..22: mol_type = other DNA
gatcttttcttaccttgcaact

SEQ ID NO: 41034 - DNA, 22 bp, synthetic construct
  misc_feature 1..22: note = chemically synthesized
  source 1..22: mol_type = other DNA
atcttttcttaccttgcaactg

SEQ ID NO: 41035 - DNA, 22 bp, synthetic construct
  misc_feature 1..22: note = chemically synthesized
  source 1..22: mol_type = other DNA
ttcttaccttgcaactgtcaat

SEQ ID NO: 41036 - DNA, 22 bp, synthetic construct
  misc_feature 1..22: note = chemically synthesized
  source 1..22: mol_type = other DNA
tcttaccttgcaactgtcaatg

SEQ ID NO: 41037 - DNA, 22 bp, synthetic construct
  misc_feature 1..22: note = chemically synthesized
  source 1..22: mol_type = other DNA
cttaccttgcaactgtcaatgc

SEQ ID NO: 41038 - DNA, 22 bp, synthetic construct
  misc_feature 1..22: note = chemically synthesized
  source 1..22: mol_type = other DNA
ttaccttgcaactgtcaatgcc

SEQ ID NO: 41039 - DNA, 22 bp, synthetic construct
  misc_feature 1..22: note = chemically synthesized
  source 1..22: mol_type = other DNA
accttgcaactgtcaatgcctc

SEQ ID NO: 41040 - DNA, 22 bp, synthetic construct
  misc_feature 1..22: note = chemically synthesized
  source 1..22: mol_type = other DNA
ccttgcaactgtcaatgcctcc

SEQ ID NO: 41041 - DNA, 22 bp, synthetic construct
  misc_feature 1..22: note = chemically synthesized
  source 1..22: mol_type = other DNA
gcaactgtcaatgcctccagcc

SEQ ID NO: 41042 - DNA, 22 bp, synthetic construct
  misc_feature 1..22: note = chemically synthesized
  source 1..22: mol_type = other DNA
caactgtcaatgcctccagcca

SEQ ID NO: 41043 - DNA, 22 bp, synthetic construct
  misc_feature 1..22: note = chemically synthesized
  source 1..22: mol_type = other DNA
tcaatgcctccagccaaatgcc

SEQ ID NO: 41044 - DNA, 22 bp, synthetic construct
  misc_feature 1..22: note = chemically synthesized
  source 1..22: mol_type = other DNA
cagccaaatgcccagcacagag

SEQ ID NO: 41045 - DNA, 22 bp, synthetic construct
  misc_feature 1..22: note = chemically synthesized
  source 1..22: mol_type = other DNA
agtggatttgactcttccattc

SEQ ID NO: 41046 - DNA, 22 bp, synthetic construct
  misc_feature 1..22: note = chemically synthesized
  source 1..22: mol_type = other DNA
gactcttccattcagaaactca

SEQ ID NO: 41047 - DNA, 22 bp, synthetic construct
  misc_feature 1..22: note = chemically synthesized
  source 1..22: mol_type = other DNA
actcttccattcagaaactcat

SEQ ID NO: 41048 - DNA, 22 bp, synthetic construct
  misc_feature 1..22: note = chemically synthesized
  source 1..22: mol_type = other DNA
ttccattcagaaactcatagcg

SEQ ID NO: 41049 - DNA, 22 bp, synthetic construct
  misc_feature 1..22: note = chemically synthesized
  source 1..22: mol_type = other DNA
ccattcagaaactcatagcgat

SEQ ID NO: 41050 - DNA, 22 bp, synthetic construct
  misc_feature 1..22: note = chemically synthesized
  source 1..22: mol_type = other DNA
cattcagaaactcatagcgatt

SEQ ID NO: 41051 - DNA, 22 bp, synthetic construct
  misc_feature 1..22: note = chemically synthesized
  source 1..22: mol_type = other DNA
agaaactcatagcgattgcaca

SEQ ID NO: 41052 - DNA, 22 bp, synthetic construct
  misc_feature 1..22: note = chemically synthesized
  source 1..22: mol_type = other DNA
atagcgattgcacacttcattc

SEQ ID NO: 41053 - DNA, 22 bp, synthetic construct
  misc_feature 1..22: note = chemically synthesized
  source 1..22: mol_type = other DNA
cacacttcattctcaatcacag

SEQ ID NO: 41054 - DNA, 22 bp, synthetic construct
  misc_feature 1..22: note = chemically synthesized
  source 1..22: mol_type = other DNA
cattctcaatcacagggagctg

SEQ ID NO: 41055 - DNA, 22 bp, synthetic construct
  misc_feature 1..22: note = chemically synthesized
  source 1..22: mol_type = other DNA
attctcaatcacagggagctgg

SEQ ID NO: 41056 - DNA, 22 bp, synthetic construct
  misc_feature 1..22: note = chemically synthesized
  source 1..22: mol_type = other DNA
tcaatcacagggagctgggctt

SEQ ID NO: 41057 - DNA, 22 bp, synthetic construct
  misc_feature 1..22: note = chemically synthesized
  source 1..22: mol_type = other DNA
aatcacagggagctgggcttcc

SEQ ID NO: 41058 - DNA, 22 bp, synthetic construct
  misc_feature 1..22: note = chemically synthesized
  source 1..22: mol_type = other DNA
ggcttccttgagaaagccagcc

SEQ ID NO: 41059 - DNA, 22 bp, synthetic construct
  misc_feature 1..22: note = chemically synthesized
  source 1..22: mol_type = other DNA
ccttgagaaagccagccccaaa

SEQ ID NO: 41060 - DNA, 22 bp, synthetic construct
  misc_feature 1..22: note = chemically synthesized
  source 1..22: mol_type = other DNA
cttgagaaagccagccccaaag

SEQ ID NO: 41061 - DNA, 22 bp, synthetic construct
  misc_feature 1..22: note = chemically synthesized
  source 1..22: mol_type = other DNA
gagaaagccagccccaaaggta

SEQ ID NO: 41062 - DNA, 22 bp, synthetic construct
  misc_feature 1..22: note = chemically synthesized
  source 1..22: mol_type = other DNA
agaaagccagccccaaaggtac

SEQ ID NO: 41063 - DNA, 22 bp, synthetic construct
  misc_feature 1..22: note = chemically synthesized
  source 1..22: mol_type = other DNA
tgtttaaaaagatgaaagaaat

SEQ ID NO: 41064 - DNA, 22 bp, synthetic construct
  misc_feature 1..22: note = chemically synthesized
  source 1..22: mol_type = other DNA
aaaaagatgaaagaaatggtaa

SEQ ID NO: 41065 - DNA, 22 bp, synthetic construct
  misc_feature 1..22: note = chemically synthesized
  source 1..22: mol_type = other DNA
aaaagatgaaagaaatggtaac

SEQ ID NO: 41066 - DNA, 22 bp, synthetic construct
  misc_feature 1..22: note = chemically synthesized
  source 1..22: mol_type = other DNA
cgtccacaacatgttcacaagg

SEQ ID NO: 41067 - DNA, 22 bp, synthetic construct
  misc_feature 1..22: note = chemically synthesized
  source 1..22: mol_type = other DNA
acaaggaaactccagaagaaca

SEQ ID NO: 41068 - DNA, 22 bp, synthetic construct
  misc_feature 1..22: note = chemically synthesized
  source 1..22: mol_type = other DNA
cagaagaacagagcagtggtga

SEQ ID NO: 41069 - DNA, 22 bp, synthetic construct
  misc_feature 1..22: note = chemically synthesized
  source 1..22: mol_type = other DNA
ctgtctgtccgtgaggctgtag

SEQ ID NO: 41070 - DNA, 22 bp, synthetic construct
  misc_feature 1..22: note = chemically synthesized
  source 1..22: mol_type = other DNA
tctgtccgtgaggctgtagaac

SEQ ID NO: 41071 - DNA, 22 bp, synthetic construct
  misc_feature 1..22: note = chemically synthesized
  source 1..22: mol_type = other DNA
tccgtgaggctgtagaacacaa

SEQ ID NO: 41072 - DNA, 22 bp, synthetic construct
  misc_feature 1..22: note = chemically synthesized
  source 1..22: mol_type = other DNA
tagaacacaaggcagctcccaa

SEQ ID NO: 41073 - DNA, 22 bp, synthetic construct
  misc_feature 1..22: note = chemically synthesized
  source 1..22: mol_type = other DNA
ccaatgctgccagactctctga

SEQ ID NO: 41074 - DNA, 22 bp, synthetic construct
  misc_feature 1..22: note = chemically synthesized
  source 1..22: mol_type = other DNA
ccagactctctgaaccctggag

SEQ ID NO: 41075 - DNA, 22 bp, synthetic construct
  misc_feature 1..22: note = chemically synthesized
  source 1..22: mol_type = other DNA
tctgaaccctggagagtgtaaa

SEQ ID NO: 41076 - DNA, 22 bp, synthetic construct
  misc_feature 1..22: note = chemically synthesized
  source 1..22: mol_type = other DNA
tgaaccctggagagtgtaaacg

SEQ ID NO: 41077 - DNA, 22 bp, synthetic construct
  misc_feature 1..22: note = chemically synthesized
  source 1..22: mol_type = other DNA
aaccctggagagtgtaaacgtc

SEQ ID NO: 41078 - DNA, 22 bp, synthetic construct
  misc_feature 1..22: note = chemically synthesized
  source 1..22: mol_type = other DNA
gagagtgtaaacgtcatataag

SEQ ID NO: 41079 - DNA, 22 bp, synthetic construct
  misc_feature 1..22: note = chemically synthesized
  source 1..22: mol_type = other DNA
tgttccaaaaacctggatttaa

SEQ ID NO: 41080 - DNA, 22 bp, synthetic construct
  misc_feature 1..22: note = chemically synthesized
  source 1..22: mol_type = other DNA
caaaaacctggatttaacaatc

SEQ ID NO: 41081 - DNA, 22 bp, synthetic construct
  misc_feature 1..22: note = chemically synthesized
  source 1..22: mol_type = other DNA
gatttaacaatctgagctttgt

SEQ ID NO: 41082 - DNA, 22 bp, synthetic construct
  misc_feature 1..22: note = chemically synthesized
  source 1..22: mol_type = other DNA
aacaatctgagctttgtcatgg

SEQ ID NO: 41083 - DNA, 22 bp, synthetic construct
  misc_feature 1..22: note = chemically synthesized
  source 1..22: mol_type = other DNA
acaatctgagctttgtcatggt

SEQ ID NO: 41084 - DNA, 22 bp, synthetic construct
  misc_feature 1..22: note = chemically synthesized
  source 1..22: mol_type = other DNA
agctttgtcatggtgctttgcg

SEQ ID NO: 41085 - DNA, 22 bp, synthetic construct
  misc_feature 1..22: note = chemically synthesized
  source 1..22: mol_type = other DNA
tgtcatggtgctttgcggttgg

SEQ ID NO: 41086 - DNA, 22 bp, synthetic construct
  misc_feature 1..22: note = chemically synthesized
  source 1..22: mol_type = other DNA
gtcatggtgctttgcggttggt

SEQ ID NO: 41087 - DNA, 22 bp, synthetic construct
  misc_feature 1..22: note = chemically synthesized
  source 1..22: mol_type = other DNA
tcatggtgctttgcggttggtt

SEQ ID NO: 41088 - DNA, 22 bp, synthetic construct
  misc_feature 1..22: note = chemically synthesized
  source 1..22: mol_type = other DNA
tgcggttggttgttgtttcttt

SEQ ID NO: 41089 - DNA, 22 bp, synthetic construct
  misc_feature 1..22: note = chemically synthesized
  source 1..22: mol_type = other DNA
gcggttggttgttgtttcttta

SEQ ID NO: 41090 - DNA, 22 bp, synthetic construct
  misc_feature 1..22: note = chemically synthesized
  source 1..22: mol_type = other DNA
cggttggttgttgtttctttac

SEQ ID NO: 41091 - DNA, 22 bp, synthetic construct
  misc_feature 1..22: note = chemically synthesized
  source 1..22: mol_type = other DNA
gttgttgtttctttaccttttt

SEQ ID NO: 41092 - DNA, 22 bp, synthetic construct
  misc_feature 1..22: note = chemically synthesized
  source 1..22: mol_type = other DNA
ttgtttctttacctttttcttt

SEQ ID NO: 41093 - DNA, 22 bp, synthetic construct
  misc_feature 1..22: note = chemically synthesized
  source 1..22: mol_type = other DNA
tttctttacctttttctttgct

SEQ ID NO: 41094 - DNA, 22 bp, synthetic construct
  misc_feature 1..22: note = chemically synthesized
  source 1..22: mol_type = other DNA
ctttacctttttctttgctttt

SEQ ID NO: 41095 - DNA, 22 bp, synthetic construct
  misc_feature 1..22: note = chemically synthesized
  source 1..22: mol_type = other DNA
tttacctttttctttgctttta

SEQ ID NO: 41096 - DNA, 22 bp, synthetic construct
  misc_feature 1..22: note = chemically synthesized
  source 1..22: mol_type = other DNA
tacctttttctttgcttttaaa

SEQ ID NO: 41097 - DNA, 22 bp, synthetic construct
  misc_feature 1..22: note = chemically synthesized
  source 1..22: mol_type = other DNA
acctttttctttgcttttaaaa

SEQ ID NO: 41098 - DNA, 22 bp, synthetic construct
  misc_feature 1..22: note = chemically synthesized
  source 1..22: mol_type = other DNA
cctttttctttgcttttaaaac

SEQ ID NO: 41099 - DNA, 22 bp, synthetic construct
  misc_feature 1..22: note = chemically synthesized
  source 1..22: mol_type = other DNA
tttctttgcttttaaaaccata

SEQ ID NO: 41100 - DNA, 22 bp, synthetic construct
  misc_feature 1..22: note = chemically synthesized
  source 1..22: mol_type = other DNA
ttctttgcttttaaaaccataa

SEQ ID NO: 41101 - DNA, 22 bp, synthetic construct
  misc_feature 1..22: note = chemically synthesized
  source 1..22: mol_type = other DNA
tctttgcttttaaaaccataaa

SEQ ID NO: 41102 - DNA, 22 bp, synthetic construct
  misc_feature 1..22: note = chemically synthesized
  source 1..22: mol_type = other DNA
ctttgcttttaaaaccataaag

SEQ ID NO: 41103 - DNA, 22 bp, synthetic construct
  misc_feature 1..22: note = chemically synthesized
  source 1..22: mol_type = other DNA
tttgcttttaaaaccataaaga

SEQ ID NO: 41104 - DNA, 22 bp, synthetic construct
  misc_feature 1..22: note = chemically synthesized
  source 1..22: mol_type = other DNA
tgcttttaaaaccataaagaat

SEQ ID NO: 41105 - DNA, 22 bp, synthetic construct
  misc_feature 1..22: note = chemically synthesized
  source 1..22: mol_type = other DNA
gcttttaaaaccataaagaata

SEQ ID NO: 41106 - DNA, 22 bp, synthetic construct
  misc_feature 1..22: note = chemically synthesized
  source 1..22: mol_type = other DNA
cttttaaaaccataaagaataa

SEQ ID NO: 41107 - DNA, 22 bp, synthetic construct
  misc_feature 1..22: note = chemically synthesized
  source 1..22: mol_type = other DNA
ttaaaaccataaagaataatgt

SEQ ID NO: 41108 - DNA, 22 bp, synthetic construct
  misc_feature 1..22: note = chemically synthesized
  source 1..22: mol_type = other DNA
taaaaccataaagaataatgtt

SEQ ID NO: 41109 - DNA, 22 bp, synthetic construct
  misc_feature 1..22: note = chemically synthesized
  source 1..22: mol_type = other DNA
aaaaccataaagaataatgttt

SEQ ID NO: 41110 - DNA, 22 bp, synthetic construct
  misc_feature 1..22: note = chemically synthesized
  source 1..22: mol_type = other DNA
aaaccataaagaataatgttta

SEQ ID NO: 41111 - DNA, 22 bp, synthetic construct
  misc_feature 1..22: note = chemically synthesized
  source 1..22: mol_type = other DNA
aaatgtagagtctgagaaatgc

SEQ ID NO: 41112 - DNA, 22 bp, synthetic construct
  misc_feature 1..22: note = chemically synthesized
  source 1..22: mol_type = other DNA
aatgtagagtctgagaaatgca

SEQ ID NO: 41113 - DNA, 22 bp, synthetic construct
  misc_feature 1..22: note = chemically synthesized
  source 1..22: mol_type = other DNA
agaaatgcaattgctattgttt

SEQ ID NO: 41114 - DNA, 22 bp, synthetic construct
  misc_feature 1..22: note = chemically synthesized
  source 1..22: mol_type = other DNA
ctattgtttttatattttcaga

SEQ ID NO: 41115 - DNA, 22 bp, synthetic construct
  misc_feature 1..22: note = chemically synthesized
  source 1..22: mol_type = other DNA
ttgtttttatattttcagactt

SEQ ID NO: 41116 - DNA, 22 bp, synthetic construct
  misc_feature 1..22: note = chemically synthesized
  source 1..22: mol_type = other DNA
tttttatattttcagacttttt

SEQ ID NO: 41117 - DNA, 22 bp, synthetic construct
  misc_feature 1..22: note = chemically synthesized
  source 1..22: mol_type = other DNA
ttatattttcagactttttgta

SEQ ID NO: 41118 - DNA, 22 bp, synthetic construct
  misc_feature 1..22: note = chemically synthesized
  source 1..22: mol_type = other DNA
tatattttcagactttttgtat

SEQ ID NO: 41119 - DNA, 22 bp, synthetic construct
  misc_feature 1..22: note = chemically synthesized
  source 1..22: mol_type = other DNA
atattttcagactttttgtatg

SEQ ID NO: 41120 - DNA, 22 bp, synthetic construct
  misc_feature 1..22: note = chemically synthesized
  source 1..22: mol_type = other DNA
tattttcagactttttgtatgc

SEQ ID NO: 41121 - DNA, 22 bp, synthetic construct
  misc_feature 1..22: note = chemically synthesized
  source 1..22: mol_type = other DNA
tcagactttttgtatgcttctt

SEQ ID NO: 41122 - DNA, 22 bp, synthetic construct
  misc_feature 1..22: note = chemically synthesized
  source 1..22: mol_type = other DNA
cagactttttgtatgcttcttt

SEQ ID NO: 41123 - DNA, 22 bp, synthetic construct
  misc_feature 1..22: note = chemically synthesized
  source 1..22: mol_type = other DNA
agactttttgtatgcttctttc

SEQ ID NO: 41124 - DNA, 22 bp, synthetic construct
  misc_feature 1..22: note = chemically synthesized
  source 1..22: mol_type = other DNA
tttgtatgcttctttcactaat

SEQ ID NO: 41125 - DNA, 22 bp, synthetic construct
  misc_feature 1..22: note = chemically synthesized
  source 1..22: mol_type = other DNA
ttgtatgcttctttcactaatt

SEQ ID NO: 41126 - DNA, 22 bp, synthetic construct
  misc_feature 1..22: note = chemically synthesized
  source 1..22: mol_type = other DNA
tgtatgcttctttcactaatta

SEQ ID NO: 41127 - DNA, 22 bp, synthetic construct
  misc_feature 1..22: note = chemically synthesized
  source 1..22: mol_type = other DNA
gtatgcttctttcactaattac

SEQ ID NO: 41128 - DNA, 22 bp, synthetic construct
  misc_feature 1..22: note = chemically synthesized
  source 1..22: mol_type = other DNA
tatgcttctttcactaattaca

SEQ ID NO: 41129 - DNA, 22 bp, synthetic construct
  misc_feature 1..22: note = chemically synthesized
  source 1..22: mol_type = other DNA
ctttcactaattacatcatatc

SEQ ID NO: 41130 - DNA, 22 bp, synthetic construct
  misc_feature 1..22: note = chemically synthesized
  source 1..22: mol_type = other DNA
tttcactaattacatcatatca

SEQ ID NO: 41131 - DNA, 22 bp, synthetic construct
  misc_feature 1..22: note = chemically synthesized
  source 1..22: mol_type = other DNA
tcactaattacatcatatcaca

SEQ ID NO: 41132 - DNA, 22 bp, synthetic construct
  misc_feature 1..22: note = chemically synthesized
  source 1..22: mol_type = other DNA
cactaattacatcatatcacaa

SEQ ID NO: 41133 - DNA, 22 bp, synthetic construct
  misc_feature 1..22: note = chemically synthesized
  source 1..22: mol_type = other DNA
actaattacatcatatcacaaa

SEQ ID NO: 41134 - DNA, 22 bp, synthetic construct
  misc_feature 1..22: note = chemically synthesized
  source 1..22: mol_type = other DNA
attacatcatatcacaaaattt

SEQ ID NO: 41135 - DNA, 22 bp, synthetic construct
  misc_feature 1..22: note = chemically synthesized
  source 1..22: mol_type = other DNA
catcatatcacaaaatttcaca

SEQ ID NO: 41136 - DNA, 22 bp, synthetic construct
  misc_feature 1..22: note = chemically synthesized
  source 1..22: mol_type = other DNA
cacaccctgattttttcactca

SEQ ID NO: 41137 - DNA, 22 bp, synthetic construct
  misc_feature 1..22: note = chemically synthesized
  source 1..22: mol_type = other DNA
acaccctgattttttcactcaa

SEQ ID NO: 41138 - DNA, 22 bp, synthetic construct
  misc_feature 1..22: note = chemically synthesized
  source 1..22: mol_type = other DNA
attttttcactcaacattacat

SEQ ID NO: 41139 - DNA, 22 bp, synthetic construct
  misc_feature 1..22: note = chemically synthesized
  source 1..22: mol_type = other DNA
tttcactcaacattacataatg

SEQ ID NO: 41140 - DNA, 22 bp, synthetic construct
  misc_feature 1..22: note = chemically synthesized
  source 1..22: mol_type = other DNA
ttcactcaacattacataatga

SEQ ID NO: 41141 - DNA, 22 bp, synthetic construct
  misc_feature 1..22: note = chemically synthesized
  source 1..22: mol_type = other DNA
tcactcaacattacataatgag

SEQ ID NO: 41142 - DNA, 22 bp, synthetic construct
  misc_feature 1..22: note = chemically synthesized
  source 1..22: mol_type = other DNA
cactcaacattacataatgagt

SEQ ID NO: 41143 - DNA, 22 bp, synthetic construct
  misc_feature 1..22: note = chemically synthesized
  source 1..22: mol_type = other DNA
actcaacattacataatgagtt

SEQ ID NO: 41144 - DNA, 22 bp, synthetic construct
  misc_feature 1..22: note = chemically synthesized
  source 1..22: mol_type = other DNA
aacattacataatgagttttgt

SEQ ID NO: 41145 - DNA, 22 bp, synthetic construct
  misc_feature 1..22: note = chemically synthesized
  source 1..22: mol_type = other DNA
cataatgagttttgtatagtgc

SEQ ID NO: 41146 - DNA, 22 bp, synthetic construct
  misc_feature 1..22: note = chemically synthesized
  source 1..22: mol_type = other DNA
tgtatagtgctatgatcttcat

SEQ ID NO: 41147 - DNA, 22 bp, synthetic construct
  misc_feature 1..22: note = chemically synthesized
  source 1..22: mol_type = other DNA
gtatagtgctatgatcttcata

SEQ ID NO: 41148 - DNA, 22 bp, synthetic construct
  misc_feature 1..22: note = chemically synthesized
  source 1..22: mol_type = other DNA
tatagtgctatgatcttcataa

SEQ ID NO: 41149 - DNA, 22 bp, synthetic construct
  misc_feature 1..22: note = chemically synthesized
  source 1..22: mol_type = other DNA
tgatcttcataactaatatttt

SEQ ID NO: 41150 - DNA, 22 bp, synthetic construct
  misc_feature 1..22: note = chemically synthesized
  source 1..22: mol_type = other DNA
cataactaatattttaaaggag

SEQ ID NO: 41151 - DNA, 22 bp, synthetic construct
  misc_feature 1..22: note = chemically synthesized
  source 1..22: mol_type = other DNA
ataactaatattttaaaggaga

SEQ ID NO: 41152 - DNA, 22 bp, synthetic construct
  misc_feature 1..22: note = chemically synthesized
  source 1..22: mol_type = other DNA
atattttaaaggagagctactg

SEQ ID NO: 41153 - DNA, 22 bp, synthetic construct
  misc_feature 1..22: note = chemically synthesized
  source 1..22: mol_type = other DNA
taaaggagagctactgattaat

SEQ ID NO: 41154 - DNA, 22 bp, synthetic construct
  misc_feature 1..22: note = chemically synthesized
  source 1..22: mol_type = other DNA
aaaggagagctactgattaatg

SEQ ID NO: 41155 - DNA, 22 bp, synthetic construct
  misc_feature 1..22: note = chemically synthesized
  source 1..22: mol_type = other DNA
aaggagagctactgattaatga

SEQ ID NO: 41156 - DNA, 22 bp, synthetic construct
  misc_feature 1..22: note = chemically synthesized
  source 1..22: mol_type = other DNA
ctgattaatgagcatgaggttt

SEQ ID NO: 41157 - DNA, 22 bp, synthetic construct
  misc_feature 1..22: note = chemically synthesized
  source 1..22: mol_type = other DNA
attaatgagcatgaggtttcct

SEQ ID NO: 41158 - DNA, 22 bp, synthetic construct
  misc_feature 1..22: note = chemically synthesized
  source 1..22: mol_type = other DNA
atgagcatgaggtttcctttgg

SEQ ID NO: 41159 - DNA, 22 bp, synthetic construct
  misc_feature 1..22: note = chemically synthesized
  source 1..22: mol_type = other DNA
cctttggggatgaggaaaatat

SEQ ID NO: 41160 - DNA, 22 bp, synthetic construct
  misc_feature 1..22: note = chemically synthesized
  source 1..22: mol_type = other DNA
ctttggggatgaggaaaatatt

SEQ ID NO: 41161 - DNA, 22 bp, synthetic construct
  misc_feature 1..22: note = chemically synthesized
  source 1..22: mol_type = other DNA
tggggatgaggaaaatattctg

SEQ ID NO: 41162 - DNA, 22 bp, synthetic construct
  misc_feature 1..22: note = chemically synthesized
  source 1..22: mol_type = other DNA
ggggatgaggaaaatattctgg

SEQ ID NO: 41163 - DNA, 22 bp, synthetic construct
  misc_feature 1..22: note = chemically synthesized
  source 1..22: mol_type = other DNA
gggatgaggaaaatattctgga

SEQ ID NO: 41164 - DNA, 22 bp, synthetic construct
  misc_feature 1..22: note = chemically synthesized
  source 1..22: mol_type = other DNA
tggaaatatgatgatggttgca

SEQ ID NO: 41165 - DNA, 22 bp, synthetic construct
  misc_feature 1..22: note = chemically synthesized
  source 1..22: mol_type = other DNA
gaaatatgatgatggttgcaca

SEQ ID NO: 41166 - DNA, 22 bp, synthetic construct
  misc_feature 1..22: note = chemically synthesized
  source 1..22: mol_type = other DNA
cacaccactgtgaatgtactaa

SEQ ID NO: 41167 - DNA, 22 bp, synthetic construct
  misc_feature 1..22: note = chemically synthesized
  source 1..22: mol_type = other DNA
tgaatgtactaaatgccacttg

SEQ ID NO: 41168 - DNA, 22 bp, synthetic construct
  misc_feature 1..22: note = chemically synthesized
  source 1..22: mol_type = other DNA
aatgccacttggtggtaccctg

SEQ ID NO: 41169 - DNA, 22 bp, synthetic construct
  misc_feature 1..22: note = chemically synthesized
  source 1..22: mol_type = other DNA
ggtggtaccctgcaaaaatggt

SEQ ID NO: 41170 - DNA, 22 bp, synthetic construct
  misc_feature 1..22: note = chemically synthesized
  source 1..22: mol_type = other DNA
gtggtaccctgcaaaaatggtt

SEQ ID NO: 41171 - DNA, 22 bp, synthetic construct
  misc_feature 1..22: note = chemically synthesized
  source 1..22: mol_type = other DNA
caaaaatggttaaaatagtaac

SEQ ID NO: 41172 - DNA, 22 bp, synthetic construct
  misc_feature 1..22: note = chemically synthesized
  source 1..22: mol_type = other DNA
aaatagtaactcttacgctgtg

SEQ ID NO: 41173 - DNA, 22 bp, synthetic construct
  misc_feature 1..22: note = chemically synthesized
  source 1..22: mol_type = other DNA
ttacgctgtgtacattttattg

SEQ ID NO: 41174 - DNA, 22 bp, synthetic construct
  misc_feature 1..22: note = chemically synthesized
  source 1..22: mol_type = other DNA
acgctgtgtacattttattgca

SEQ ID NO: 41175 - DNA, 22 bp, synthetic construct
  misc_feature 1..22: note = chemically synthesized
  source 1..22: mol_type = other DNA
cgctgtgtacattttattgcaa

SEQ ID NO: 41176 - DNA, 22 bp, synthetic construct
  misc_feature 1..22: note = chemically synthesized
  source 1..22: mol_type = other DNA
tgtacattttattgcaataaaa

SEQ ID NO: 41177 - DNA, 22 bp, synthetic construct
  misc_feature 1..22: note = chemically synthesized
  source 1..22: mol_type = other DNA
tattgcaataaaaaagaatagt

SEQ ID NO: 41178 - DNA, 22 bp, synthetic construct
  misc_feature 1..22: note = chemically synthesized
  source 1..22: mol_type = other DNA
attgcaataaaaaagaatagtc

SEQ ID NO: 41179 - DNA, 22 bp, synthetic construct
  misc_feature 1..22: note = chemically synthesized
  source 1..22: mol_type = other DNA
ttgcaataaaaaagaatagtca

SEQ ID NO: 41180 - DNA, 22 bp, synthetic construct
  misc_feature 1..22: note = chemically synthesized
  source 1..22: mol_type = other DNA
caataaaaaagaatagtcatca

SEQ ID NO: 41181 - DNA, 22 bp, synthetic construct
  misc_feature 1..22: note = chemically synthesized
  source 1..22: mol_type = other DNA
actaagcattatcctttccagg

SEQ ID NO: 41182 - DNA, 22 bp, synthetic construct
  misc_feature 1..22: note = chemically synthesized
  source 1..22: mol_type = other DNA
ctaagcattatcctttccaggc

SEQ ID NO: 41183 - DNA, 22 bp, synthetic construct
  misc_feature 1..22: note = chemically synthesized
  source 1..22: mol_type = other DNA
agcattatcctttccaggcaca

SEQ ID NO: 41184 - DNA, 22 bp, synthetic construct
  misc_feature 1..22: note = chemically synthesized
  source 1..22: mol_type = other DNA
tcctttccaggcacaagcttat

SEQ ID NO: 41185 - DNA, 22 bp, synthetic construct
  misc_feature 1..22: note = chemically synthesized
  source 1..22: mol_type = other DNA
tccaggcacaagcttataatgt

SEQ ID NO: 41186 - DNA, 22 bp, synthetic construct
  misc_feature 1..22: note = chemically synthesized
  source 1..22: mol_type = other DNA
ccaggcacaagcttataatgtg

SEQ ID NO: 41187 - DNA, 22 bp, synthetic construct
  misc_feature 1..22: note = chemically synthesized
  source 1..22: mol_type = other DNA
caggcacaagcttataatgtgg

SEQ ID NO: 41188 - DNA, 22 bp, synthetic construct
  misc_feature 1..22: note = chemically synthesized
  source 1..22: mol_type = other DNA
ataatgtggtgtatctcacttc

SEQ ID NO: 41189 - DNA, 22 bp, synthetic construct
  misc_feature 1..22: note = chemically synthesized
  source 1..22: mol_type = other DNA
taatgtggtgtatctcacttca

SEQ ID NO: 41190 - DNA, 22 bp, synthetic construct
  misc_feature 1..22: note = chemically synthesized
  source 1..22: mol_type = other DNA
acttcatcctcacaacagtcct

SEQ ID NO: 41191 - DNA, 22 bp, synthetic construct
  misc_feature 1..22: note = chemically synthesized
  source 1..22: mol_type = other DNA
catcctcacaacagtcctatga

SEQ ID NO: 41192 - DNA, 22 bp, synthetic construct
  misc_feature 1..22: note = chemically synthesized
  source 1..22: mol_type = other DNA
atcctcacaacagtcctatgaa

SEQ ID NO: 41193 - DNA, 22 bp, synthetic construct
  misc_feature 1..22: note = chemically synthesized
  source 1..22: mol_type = other DNA
acaacagtcctatgaaacaggc

SEQ ID NO: 41194 - DNA, 22 bp, synthetic construct
  misc_feature 1..22: note = chemically synthesized
  source 1..22: mol_type = other DNA
tgaaacaggcagttccatcact

SEQ ID NO: 41195 - DNA, 22 bp, synthetic construct
  misc_feature 1..22: note = chemically synthesized
  source 1..22: mol_type = other DNA
catcactcctgctctacagtta

SEQ ID NO: 41196 - DNA, 22 bp, synthetic construct
  misc_feature 1..22: note = chemically synthesized
  source 1..22: mol_type = other DNA
ctgctctacagttaaggaaact

SEQ ID NO: 41197 - DNA, 22 bp, synthetic construct
  misc_feature 1..22: note = chemically synthesized
  source 1..22: mol_type = other DNA
ctctacagttaaggaaactgag

SEQ ID NO: 41198 - DNA, 22 bp, synthetic construct
  misc_feature 1..22: note = chemically synthesized
  source 1..22: mol_type = other DNA
tacagttaaggaaactgaggtg

SEQ ID NO: 41199 - DNA, 22 bp, synthetic construct
  misc_feature 1..22: note = chemically synthesized
  source 1..22: mol_type = other DNA
cagttaaggaaactgaggtgta

SEQ ID NO: 41200 - DNA, 22 bp, synthetic construct
  misc_feature 1..22: note = chemically synthesized
  source 1..22: mol_type = other DNA
aggaaactgaggtgtaaggagg

SEQ ID NO: 41201 - DNA, 22 bp, synthetic construct
  misc_feature 1..22: note = chemically synthesized
  source 1..22: mol_type = other DNA
aggtgtaaggaggttgtctagt

SEQ ID NO: 41202 - DNA, 22 bp, synthetic construct
  misc_feature 1..22: note = chemically synthesized
  source 1..22: mol_type = other DNA
tctagttcaacctgagcctggg

SEQ ID NO: 41203 - DNA, 22 bp, synthetic construct
  misc_feature 1..22: note = chemically synthesized
  source 1..22: mol_type = other DNA
gttcaacctgagcctgggtctg

SEQ ID NO: 41204 - DNA, 22 bp, synthetic construct
  misc_feature 1..22: note = chemically synthesized
  source 1..22: mol_type = other DNA
aacctgagcctgggtctgcgga

SEQ ID NO: 41205 - DNA, 22 bp, synthetic construct
  misc_feature 1..22: note = chemically synthesized
  source 1..22: mol_type = other DNA
agcctgggtctgcggagtcact

SEQ ID NO: 41206 - DNA, 22 bp, synthetic construct
  misc_feature 1..22: note = chemically synthesized
  source 1..22: mol_type = other DNA
ggtctgcggagtcactgcccaa

SEQ ID NO: 41207 - DNA, 22 bp, synthetic construct
  misc_feature 1..22: note = chemically synthesized
  source 1..22: mol_type = other DNA
cggagtcactgcccaaatgctt

SEQ ID NO: 41208 - DNA, 22 bp, synthetic construct
  misc_feature 1..22: note = chemically synthesized
  source 1..22: mol_type = other DNA
cccaaatgcttcctccccgtgc

SEQ ID NO: 41209 - DNA, 22 bp, synthetic construct
  misc_feature 1..22: note = chemically synthesized
  source 1..22: mol_type = other DNA
cctccccgtgcgcgttggcccc

SEQ ID NO: 41210 - DNA, 22 bp, synthetic construct
  misc_feature 1..22: note = chemically synthesized
  source 1..22: mol_type = other DNA
ctccccgtgcgcgttggccccc

SEQ ID NO: 41211 - DNA, 22 bp, synthetic construct
  misc_feature 1..22: note = chemically synthesized
  source 1..22: mol_type = other DNA
cccgtgcgcgttggcccccctc

SEQ ID NO: 41212 - DNA, 22 bp, synthetic construct
  misc_feature 1..22: note = chemically synthesized
  source 1..22: mol_type = other DNA
gcccccctcttgcttccaaccc

SEQ ID NO: 41213 - DNA, 22 bp, synthetic construct
  misc_feature 1..22: note = chemically synthesized
  source 1..22: mol_type = other DNA
ttgcttccaaccctccacatct

SEQ ID NO: 41214 - DNA, 22 bp, synthetic construct
  misc_feature 1..22: note = chemically synthesized
  source 1..22: mol_type = other DNA
gcttccaaccctccacatcttt

SEQ ID NO: 41215 - DNA, 22 bp, synthetic construct
  misc_feature 1..22: note = chemically synthesized
  source 1..22: mol_type = other DNA
cttccaaccctccacatctttg

SEQ ID NO: 41216 - DNA, 22 bp, synthetic construct
  misc_feature 1..22: note = chemically synthesized
  source 1..22: mol_type = other DNA
ccaaccctccacatctttgttc

SEQ ID NO: 41217 - DNA, 22 bp, synthetic construct
  misc_feature 1..22: note = chemically synthesized
  source 1..22: mol_type = other DNA
caaccctccacatctttgttca

SEQ ID NO: 41218 - DNA, 22 bp, synthetic construct
  misc_feature 1..22: note = chemically synthesized
  source 1..22: mol_type = other DNA
cacatctttgttcataaagttc

SEQ ID NO: 41219 - DNA, 22 bp, synthetic construct
  misc_feature 1..22: note = chemically synthesized
  source 1..22: mol_type = other DNA
tgttcataaagttcattcttat

SEQ ID NO: 41220 - DNA, 22 bp, synthetic construct
  misc_feature 1..22: note = chemically synthesized
  source 1..22: mol_type = other DNA
gttcataaagttcattcttatt

SEQ ID NO: 41221 - DNA, 22 bp, synthetic construct
  misc_feature 1..22: note = chemically synthesized
  source 1..22: mol_type = other DNA
ttcataaagttcattcttattc

SEQ ID NO: 41222 - DNA, 22 bp, synthetic construct
  misc_feature 1..22: note = chemically synthesized
  source 1..22: mol_type = other DNA
ataaagttcattcttattcctt

SEQ ID NO: 41223 - DNA, 22 bp, synthetic construct
  misc_feature 1..22: note = chemically synthesized
  source 1..22: mol_type = other DNA
attcttattccttaatattttc

SEQ ID NO: 41224 - DNA, 22 bp, synthetic construct
  misc_feature 1..22: note = chemically synthesized
  source 1..22: mol_type = other DNA
ttattccttaatattttctgag

SEQ ID NO: 41225 - DNA, 22 bp, synthetic construct
  misc_feature 1..22: note = chemically synthesized
  source 1..22: mol_type = other DNA
attccttaatattttctgagcc

SEQ ID NO: 41226 - DNA, 22 bp, synthetic construct
  misc_feature 1..22: note = chemically synthesized
  source 1..22: mol_type = other DNA
ttccttaatattttctgagcct

SEQ ID NO: 41227 - DNA, 22 bp, synthetic construct
  misc_feature 1..22: note = chemically synthesized
  source 1..22: mol_type = other DNA
cttaatattttctgagcctaag

SEQ ID NO: 41228 - DNA, 22 bp, synthetic construct
  misc_feature 1..22: note = chemically synthesized
  source 1..22: mol_type = other DNA
aatattttctgagcctaagttc

SEQ ID NO: 41229 - DNA, 22 bp, synthetic construct
  misc_feature 1..22: note = chemically synthesized
  source 1..22: mol_type = other DNA
atattttctgagcctaagttcc

SEQ ID NO: 41230 - DNA, 22 bp, synthetic construct
  misc_feature 1..22: note = chemically synthesized
  source 1..22: mol_type = other DNA
tctgagcctaagttcccataaa

SEQ ID NO: 41231 - DNA, 22 bp, synthetic construct
  misc_feature 1..22: note = chemically synthesized
  source 1..22: mol_type = other DNA
ctgagcctaagttcccataaat

SEQ ID NO: 41232 - DNA, 22 bp, synthetic construct
  misc_feature 1..22: note = chemically synthesized
  source 1..22: mol_type = other DNA
tgagcctaagttcccataaatt

SEQ ID NO: 41233 - DNA, 22 bp, synthetic construct
  misc_feature 1..22: note = chemically synthesized
  source 1..22: mol_type = other DNA
agcctaagttcccataaattat

SEQ ID NO: 41234 - DNA, 22 bp, synthetic construct
  misc_feature 1..22: note = chemically synthesized
  source 1..22: mol_type = other DNA
agttcccataaattatatagac

SEQ ID NO: 41235 - DNA, 22 bp, synthetic construct
  misc_feature 1..22: note = chemically synthesized
  source 1..22: mol_type = other DNA
ccataaattatatagacatatt

SEQ ID NO: 41236 - DNA, 22 bp, synthetic construct
  misc_feature 1..22: note = chemically synthesized
  source 1..22: mol_type = other DNA
tatagacatatttctgtctccc

SEQ ID NO: 41237 - DNA, 22 bp, synthetic construct
  misc_feature 1..22: note = chemically synthesized
  source 1..22: mol_type = other DNA
ctgtctcccaataacactgcca

SEQ ID NO: 41238 - DNA, 22 bp, synthetic construct
  misc_feature 1..22: note = chemically synthesized
  source 1..22: mol_type = other DNA
tgtctcccaataacactgccaa

SEQ ID NO: 41239 - DNA, 22 bp, synthetic construct
  misc_feature 1..22: note = chemically synthesized
  source 1..22: mol_type = other DNA
tctcccaataacactgccaatt

SEQ ID NO: 41240 - DNA, 22 bp, synthetic construct
  misc_feature 1..22: note = chemically synthesized
  source 1..22: mol_type = other DNA
ccaataacactgccaatttatt

SEQ ID NO: 41241 - DNA, 22 bp, synthetic construct
  misc_feature 1..22: note = chemically synthesized
  source 1..22: mol_type = other DNA
ccaatttattttctagaaggtt

SEQ ID NO: 41242 - DNA, 22 bp, synthetic construct
  misc_feature 1..22: note = chemically synthesized
  source 1..22: mol_type = other DNA
attttctagaaggttatgacag

SEQ ID NO: 41243 - DNA, 22 bp, synthetic construct
  misc_feature 1..22: note = chemically synthesized
  source 1..22: mol_type = other DNA
ttttctagaaggttatgacagt

SEQ ID NO: 41244 - DNA, 22 bp, synthetic construct
  misc_feature 1..22: note = chemically synthesized
  source 1..22: mol_type = other DNA
tctagaaggttatgacagtgta

SEQ ID NO: 41245 - DNA, 22 bp, synthetic construct
  misc_feature 1..22: note = chemically synthesized
  source 1..22: mol_type = other DNA
ctagaaggttatgacagtgtaa

SEQ ID NO: 41246 - DNA, 22 bp, synthetic construct
  misc_feature 1..22: note = chemically synthesized
  source 1..22: mol_type = other DNA
tagaaggttatgacagtgtaaa

SEQ ID NO: 41247 - DNA, 22 bp, synthetic construct
  misc_feature 1..22: note = chemically synthesized
  source 1..22: mol_type = other DNA
gaaggttatgacagtgtaaaat

SEQ ID NO: 41248 - DNA, 22 bp, synthetic construct
  misc_feature 1..22: note = chemically synthesized
  source 1..22: mol_type = other DNA
tgacagtgtaaaatgtcactag

SEQ ID NO: 41249 - DNA, 22 bp, synthetic construct
  misc_feature 1..22: note = chemically synthesized
  source 1..22: mol_type = other DNA
gaaaacaatcacttcaccacac

SEQ ID NO: 41250 - DNA, 22 bp, synthetic construct
  misc_feature 1..22: note = chemically synthesized
  source 1..22: mol_type = other DNA
caccacacttgtatgagtgttc

SEQ ID NO: 41251 - DNA, 22 bp, synthetic construct
  misc_feature 1..22: note = chemically synthesized
  source 1..22: mol_type = other DNA
accacacttgtatgagtgttca

SEQ ID NO: 41252 - DNA, 22 bp, synthetic construct
  misc_feature 1..22: note = chemically synthesized
  source 1..22: mol_type = other DNA
gtatgagtgttcaatttttaaa

SEQ ID NO: 41253 - DNA, 22 bp, synthetic construct
  misc_feature 1..22: note = chemically synthesized
  source 1..22: mol_type = other DNA
tatgagtgttcaatttttaaat

SEQ ID NO: 41254 - DNA, 22 bp, synthetic construct
  misc_feature 1..22: note = chemically synthesized
  source 1..22: mol_type = other DNA
aatttttaaatattagctaatc

SEQ ID NO: 41255 - DNA, 22 bp, synthetic construct
  misc_feature 1..22: note = chemically synthesized
  source 1..22: mol_type = other DNA
ttaaatattagctaatctaaca

SEQ ID NO: 41256 - DNA, 22 bp, synthetic construct
  misc_feature 1..22: note = chemically synthesized
  source 1..22: mol_type = other DNA
taaatattagctaatctaacag

SEQ ID NO: 41257 - DNA, 22 bp, synthetic construct
  misc_feature 1..22: note = chemically synthesized
  source 1..22: mol_type = other DNA
aaatattagctaatctaacagg

SEQ ID NO: 41258 - DNA, 22 bp, synthetic construct
  misc_feature 1..22: note = chemically synthesized
  source 1..22: mol_type = other DNA
aatattagctaatctaacaggt

SEQ ID NO: 41259 - DNA, 22 bp, synthetic construct
  misc_feature 1..22: note = chemically synthesized
  source 1..22: mol_type = other DNA
gctaatctaacaggttgaaatt

SEQ ID NO: 41260 - DNA, 22 bp, synthetic construct
  misc_feature 1..22: note = chemically synthesized
  source 1..22: mol_type = other DNA
atctaacaggttgaaattgtcc

SEQ ID NO: 41261 - DNA, 22 bp, synthetic construct
  misc_feature 1..22: note = chemically synthesized
  source 1..22: mol_type = other DNA
acaggttgaaattgtcctgatt

SEQ ID NO: 41262 - DNA, 22 bp, synthetic construct
  misc_feature 1..22: note = chemically synthesized
  source 1..22: mol_type = other DNA
aaattgtcctgattcattttct

SEQ ID NO: 41263 - DNA, 22 bp, synthetic construct
  misc_feature 1..22: note = chemically synthesized
  source 1..22: mol_type = other DNA
tcctgattcattttctaattta

SEQ ID NO: 41264 - DNA, 22 bp, synthetic construct
  misc_feature 1..22: note = chemically synthesized
  source 1..22: mol_type = other DNA
attcattttctaatttatactt

SEQ ID NO: 41265 - DNA, 22 bp, synthetic construct
  misc_feature 1..22: note = chemically synthesized
  source 1..22: mol_type = other DNA
attttctaatttatacttcttt

SEQ ID NO: 41266 - DNA, 22 bp, synthetic construct
  misc_feature 1..22: note = chemically synthesized
  source 1..22: mol_type = other DNA
tctaatttatacttctttgaca

SEQ ID NO: 41267 - DNA, 22 bp, synthetic construct
  misc_feature 1..22: note = chemically synthesized
  source 1..22: mol_type = other DNA
ctaatttatacttctttgacaa

SEQ ID NO: 41268 - DNA, 22 bp, synthetic construct
  misc_feature 1..22: note = chemically synthesized
  source 1..22: mol_type = other DNA
taatttatacttctttgacaat

SEQ ID NO: 41269 - DNA, 22 bp, synthetic construct
  misc_feature 1..22: note = chemically synthesized
  source 1..22: mol_type = other DNA
atttatacttctttgacaattt

SEQ ID NO: 41270 - DNA, 22 bp, synthetic construct
  misc_feature 1..22: note = chemically synthesized
  source 1..22: mol_type = other DNA
atacttctttgacaatttggga

SEQ ID NO: 41271 - DNA, 22 bp, synthetic construct
  misc_feature 1..22: note = chemically synthesized
  source 1..22: mol_type = other DNA
tacttctttgacaatttgggag

SEQ ID NO: 41272 - DNA, 22 bp, synthetic construct
  misc_feature 1..22: note = chemically synthesized
  source 1..22: mol_type = other DNA
ctttgacaatttgggagagtga

SEQ ID NO: 41273 - DNA, 22 bp, synthetic construct
  misc_feature 1..22: note = chemically synthesized
  source 1..22: mol_type = other DNA
tttgacaatttgggagagtgaa

SEQ ID NO: 41274 - DNA, 22 bp, synthetic construct
  misc_feature 1..22: note = chemically synthesized
  source 1..22: mol_type = other DNA
tgacaatttgggagagtgaaga

SEQ ID NO: 41275 - DNA, 22 bp, synthetic construct
  misc_feature 1..22: note = chemically synthesized
  source 1..22: mol_type = other DNA
gacaatttgggagagtgaagat

SEQ ID NO: 41276 - DNA, 22 bp, synthetic construct
  misc_feature 1..22: note = chemically synthesized
  source 1..22: mol_type = other DNA
acaatttgggagagtgaagatt

SEQ ID NO: 41277 - DNA, 22 bp, synthetic construct
  misc_feature 1..22: note = chemically synthesized
  source 1..22: mol_type = other DNA
gggagagtgaagattctcctgg

SEQ ID NO: 41278 - DNA, 22 bp, synthetic construct
  misc_feature 1..22: note = chemically synthesized
  source 1..22: mol_type = other DNA
ggagagtgaagattctcctggt

SEQ ID NO: 41279 - DNA, 22 bp, synthetic construct
  misc_feature 1..22: note = chemically synthesized
  source 1..22: mol_type = other DNA
tcctggttgtgtttattctttt

SEQ ID NO: 41280 - DNA, 22 bp, synthetic construct
  misc_feature 1..22: note = chemically synthesized
  source 1..22: mol_type = other DNA
ctggttgtgtttattcttttgt

SEQ ID NO: 41281 - DNA, 22 bp, synthetic construct
  misc_feature 1..22: note = chemically synthesized
  source 1..22: mol_type = other DNA
gttgtgtttattcttttgtgaa

SEQ ID NO: 41282 - DNA, 22 bp, synthetic construct
  misc_feature 1..22: note = chemically synthesized
  source 1..22: mol_type = other DNA
tgtttattcttttgtgaaaaac

SEQ ID NO: 41283 - DNA, 22 bp, synthetic construct
  misc_feature 1..22: note = chemically synthesized
  source 1..22: mol_type = other DNA
attcttttgtgaaaaactgctt

SEQ ID NO: 41284 - DNA, 22 bp, synthetic construct
  misc_feature 1..22: note = chemically synthesized
  source 1..22: mol_type = other DNA
ttcttttgtgaaaaactgcttt

SEQ ID NO: 41285 - DNA, 22 bp, synthetic construct
  misc_feature 1..22: note = chemically synthesized
  source 1..22: mol_type = other DNA
ttttgtgaaaaactgctttatt

SEQ ID NO: 41286 - DNA, 22 bp, synthetic construct
  misc_feature 1..22: note = chemically synthesized
  source 1..22: mol_type = other DNA
ttgtgaaaaactgctttatttt

SEQ ID NO: 41287 - DNA, 22 bp, synthetic construct
  misc_feature 1..22: note = chemically synthesized
  source 1..22: mol_type = other DNA
tgtgaaaaactgctttattttc

SEQ ID NO: 41288 - DNA, 22 bp, synthetic construct
  misc_feature 1..22: note = chemically synthesized
  source 1..22: mol_type = other DNA
gtgaaaaactgctttattttct

SEQ ID NO: 41289 - DNA, 22 bp, synthetic construct
  misc_feature 1..22: note = chemically synthesized
  source 1..22: mol_type = other DNA
tgaaaaactgctttattttctt

SEQ ID NO: 41290 - DNA, 22 bp, synthetic construct
  misc_feature 1..22: note = chemically synthesized
  source 1..22: mol_type = other DNA
ctttattttctttgccaaattc

SEQ ID NO: 41291 - DNA, 22 bp, synthetic construct
  misc_feature 1..22: note = chemically synthesized
  source 1..22: mol_type = other DNA
tattttctttgccaaattcaaa

SEQ ID NO: 41292 - DNA, 22 bp, synthetic construct
  misc_feature 1..22: note = chemically synthesized
  source 1..22: mol_type = other DNA
attttctttgccaaattcaaat

SEQ ID NO: 41293 - DNA, 22 bp, synthetic construct
  misc_feature 1..22: note = chemically synthesized
  source 1..22: mol_type = other DNA
ttttctttgccaaattcaaata

SEQ ID NO: 41294 - DNA, 22 bp, synthetic construct
  misc_feature 1..22: note = chemically synthesized
  source 1..22: mol_type = other DNA
tctttgccaaattcaaatagaa

SEQ ID NO: 41295 - DNA, 22 bp, synthetic construct
  misc_feature 1..22: note = chemically synthesized
  source 1..22: mol_type = other DNA
ctttgccaaattcaaatagaac

SEQ ID NO: 41296 - DNA, 22 bp, synthetic construct
  misc_feature 1..22: note = chemically synthesized
  source 1..22: mol_type = other DNA
tttgccaaattcaaatagaacg

SEQ ID NO: 41297 - DNA, 22 bp, synthetic construct
  misc_feature 1..22: note = chemically synthesized
  source 1..22: mol_type = other DNA
tgccaaattcaaatagaacggt

SEQ ID NO: 41298 - DNA, 22 bp, synthetic construct
  misc_feature 1..22: note = chemically synthesized
  source 1..22: mol_type = other DNA
gccaaattcaaatagaacggtt

SEQ ID NO: 41299 - DNA, 22 bp, synthetic construct
  misc_feature 1..22: note = chemically synthesized
  source 1..22: mol_type = other DNA
ccaaattcaaatagaacggttg

SEQ ID NO: 41300 - DNA, 22 bp, synthetic construct
  misc_feature 1..22: note = chemically synthesized
  source 1..22: mol_type = other DNA
aaatagaacggttgcaaaattg

SEQ ID NO: 41301 - DNA, 22 bp, synthetic construct
  misc_feature 1..22: note = chemically synthesized
  source 1..22: mol_type = other DNA
caaaattgccagaggaaatgct

SEQ ID NO: 41302 - DNA, 22 bp, synthetic construct
  misc_feature 1..22: note = chemically synthesized
  source 1..22: mol_type = other DNA
ccagaggaaatgctgtttttcc

SEQ ID NO: 41303 - DNA, 22 bp, synthetic construct
  misc_feature 1..22: note = chemically synthesized
  source 1..22: mol_type = other DNA
tttttccagatggacacaccca

SEQ ID NO: 41304 - DNA, 22 bp, synthetic construct
  misc_feature 1..22: note = chemically synthesized
  source 1..22: mol_type = other DNA
ttccagatggacacacccaggg

SEQ ID NO: 41305 - DNA, 22 bp, synthetic construct
  misc_feature 1..22: note = chemically synthesized
  source 1..22: mol_type = other DNA
tccagatggacacacccaggga

SEQ ID NO: 41306 - DNA, 22 bp, synthetic construct
  misc_feature 1..22: note = chemically synthesized
  source 1..22: mol_type = other DNA
ccagatggacacacccagggat

SEQ ID NO: 41307 - DNA, 22 bp, synthetic construct
  misc_feature 1..22: note = chemically synthesized
  source 1..22: mol_type = other DNA
cagatggacacacccagggatg

SEQ ID NO: 41308 - DNA, 22 bp, synthetic construct
  misc_feature 1..22: note = chemically synthesized
  source 1..22: mol_type = other DNA
cagtgttctcacaaataatcca

SEQ ID NO: 41309 - DNA, 22 bp, synthetic construct
  misc_feature 1..22: note = chemically synthesized
  source 1..22: mol_type = other DNA
agtgttctcacaaataatccag

SEQ ID NO: 41310 - DNA, 22 bp, synthetic construct
  misc_feature 1..22: note = chemically synthesized
  source 1..22: mol_type = other DNA
tcacaaataatccagttttcta

SEQ ID NO: 41311 - DNA, 22 bp, synthetic construct
  misc_feature 1..22: note = chemically synthesized
  source 1..22: mol_type = other DNA
acaaataatccagttttctaat

SEQ ID NO: 41312 - DNA, 22 bp, synthetic construct
  misc_feature 1..22: note = chemically synthesized
  source 1..22: mol_type = other DNA
tctaattttgcaagcccagctt

SEQ ID NO: 41313 - DNA, 22 bp, synthetic construct
  misc_feature 1..22: note = chemically synthesized
  source 1..22: mol_type = other DNA
ctaattttgcaagcccagcttt

SEQ ID NO: 41314 - DNA, 22 bp, synthetic construct
  misc_feature 1..22: note = chemically synthesized
  source 1..22: mol_type = other DNA
taattttgcaagcccagctttc

SEQ ID NO: 41315 - DNA, 22 bp, synthetic construct
  misc_feature 1..22: note = chemically synthesized
  source 1..22: mol_type = other DNA
attttgcaagcccagctttcat

SEQ ID NO: 41316 - DNA, 22 bp, synthetic construct
  misc_feature 1..22: note = chemically synthesized
  source 1..22: mol_type = other DNA
tgcaagcccagctttcattaga

SEQ ID NO: 41317 - DNA, 22 bp, synthetic construct
  misc_feature 1..22: note = chemically synthesized
  source 1..22: mol_type = other DNA
gcaagcccagctttcattagaa

SEQ ID NO: 41318 - DNA, 22 bp, synthetic construct
  misc_feature 1..22: note = chemically synthesized
  source 1..22: mol_type = other DNA
caagcccagctttcattagaat

SEQ ID NO: 41319 - DNA, 22 bp, synthetic construct
  misc_feature 1..22: note = chemically synthesized
  source 1..22: mol_type = other DNA
tcattagaattttgcaaaaatc

SEQ ID NO: 41320 - DNA, 22 bp, synthetic construct
  misc_feature 1..22: note = chemically synthesized
  source 1..22: mol_type = other DNA
cattagaattttgcaaaaatcc

SEQ ID NO: 41321 - DNA, 22 bp, synthetic construct
  misc_feature 1..22: note = chemically synthesized
  source 1..22: mol_type = other DNA
attagaattttgcaaaaatcct

SEQ ID NO: 41322 - DNA, 22 bp, synthetic construct
  misc_feature 1..22: note = chemically synthesized
  source 1..22: mol_type = other DNA
gaattttgcaaaaatccttgct

SEQ ID NO: 41323 - DNA, 22 bp, synthetic construct
  misc_feature 1..22: note = chemically synthesized
  source 1..22: mol_type = other DNA
tgcaaaaatccttgctttgcga

SEQ ID NO: 41324 - DNA, 22 bp, synthetic construct
  misc_feature 1..22: note = chemically synthesized
  source 1..22: mol_type = other DNA
gcaaaaatccttgctttgcgag

SEQ ID NO: 41325 - DNA, 22 bp, synthetic construct
  misc_feature 1..22: note = chemically synthesized
  source 1..22: mol_type = other DNA
caaaaatccttgctttgcgagc

SEQ ID NO: 41326 - DNA, 22 bp, synthetic construct
  misc_feature 1..22: note = chemically synthesized
  source 1..22: mol_type = other DNA
gctttgcgagcatggcacaggc

SEQ ID NO: 41327 - DNA, 22 bp, synthetic construct
  misc_feature 1..22: note = chemically synthesized
  source 1..22: mol_type = other DNA
ctttgcgagcatggcacaggca

SEQ ID NO: 41328 - DNA, 22 bp, synthetic construct
  misc_feature 1..22: note = chemically synthesized
  source 1..22: mol_type = other DNA
tgcgagcatggcacaggcaaga

SEQ ID NO: 41329 - DNA, 22 bp, synthetic construct
  misc_feature 1..22: note = chemically synthesized
  source 1..22: mol_type = other DNA
gcgagcatggcacaggcaagag

SEQ ID NO: 41330 - DNA, 22 bp, synthetic construct
  misc_feature 1..22: note = chemically synthesized
  source 1..22: mol_type = other DNA
cgagcatggcacaggcaagaga

SEQ ID NO: 41331 - DNA, 22 bp, synthetic construct
  misc_feature 1..22: note = chemically synthesized
  source 1..22: mol_type = other DNA
tctctttcttcccccagagcct

SEQ ID NO: 41332 - DNA, 22 bp, synthetic construct
  misc_feature 1..22: note = chemically synthesized
  source 1..22: mol_type = other DNA
tctttcttcccccagagccttt

SEQ ID NO: 41333 - DNA, 22 bp, synthetic construct
  misc_feature 1..22: note = chemically synthesized
  source 1..22: mol_type = other DNA
tttcttcccccagagcctttga

SEQ ID NO: 41334 - DNA, 22 bp, synthetic construct
  misc_feature 1..22: note = chemically synthesized
  source 1..22: mol_type = other DNA
tcttcccccagagcctttgact

SEQ ID NO: 41335 - DNA, 22 bp, synthetic construct
  misc_feature 1..22: note = chemically synthesized
  source 1..22: mol_type = other DNA
cttcccccagagcctttgactg

SEQ ID NO: 41336 - DNA, 22 bp, synthetic construct
  misc_feature 1..22: note = chemically synthesized
  source 1..22: mol_type = other DNA
ttcccccagagcctttgactgc

SEQ ID NO: 41337 - DNA, 22 bp, synthetic construct
  misc_feature 1..22: note = chemically synthesized
  source 1..22: mol_type = other DNA
cccccagagcctttgactgcac

SEQ ID NO: 41338 - DNA, 22 bp, synthetic construct
  misc_feature 1..22: note = chemically synthesized
  source 1..22: mol_type = other DNA
ccccagagcctttgactgcact

SEQ ID NO: 41339 - DNA, 22 bp, synthetic construct
  misc_feature 1..22: note = chemically synthesized
  source 1..22: mol_type = other DNA
tgactgcacttagatcattgac

SEQ ID NO: 41340 - DNA, 22 bp, synthetic construct
  misc_feature 1..22: note = chemically synthesized
  source 1..22: mol_type = other DNA
gactgcacttagatcattgact

SEQ ID NO: 41341 - DNA, 22 bp, synthetic construct
  misc_feature 1..22: note = chemically synthesized
  source 1..22: mol_type = other DNA
actgcacttagatcattgactt

SEQ ID NO: 41342 - DNA, 22 bp, synthetic construct
  misc_feature 1..22: note = chemically synthesized
  source 1..22: mol_type = other DNA
cacttagatcattgactttggt

SEQ ID NO: 41343 - DNA, 22 bp, synthetic construct
  misc_feature 1..22: note = chemically synthesized
  source 1..22: mol_type = other DNA
agatcattgactttggttcaga

SEQ ID NO: 41344 - DNA, 22 bp, synthetic construct
  misc_feature 1..22: note = chemically synthesized
  source 1..22: mol_type = other DNA
gatcattgactttggttcagaa

SEQ ID NO: 41345 - DNA, 22 bp, synthetic construct
  misc_feature 1..22: note = chemically synthesized
  source 1..22: mol_type = other DNA
actttggttcagaaacctgact

SEQ ID NO: 41346 - DNA, 22 bp, synthetic construct
  misc_feature 1..22: note = chemically synthesized
  source 1..22: mol_type = other DNA
tggttcagaaacctgactgcat

SEQ ID NO: 41347 - DNA, 22 bp, synthetic construct
  misc_feature 1..22: note = chemically synthesized
  source 1..22: mol_type = other DNA
ggttcagaaacctgactgcatc

SEQ ID NO: 41348 - DNA, 22 bp, synthetic construct
  misc_feature 1..22: note = chemically synthesized
  source 1..22: mol_type = other DNA
gttcagaaacctgactgcatct

SEQ ID NO: 41349 - DNA, 22 bp, synthetic construct
  misc_feature 1..22: note = chemically synthesized
  source 1..22: mol_type = other DNA
agaaacctgactgcatctggag

SEQ ID NO: 41350 - DNA, 22 bp, synthetic construct
  misc_feature 1..22: note = chemically synthesized
  source 1..22: mol_type = other DNA
actgcatctggagttgacatga

SEQ ID NO: 41351 - DNA, 22 bp, synthetic construct
  misc_feature 1..22: note = chemically synthesized
  source 1..22: mol_type = other DNA
catctggagttgacatgagcag

SEQ ID NO: 41352 - DNA, 22 bp, synthetic construct
  misc_feature 1..22: note = chemically synthesized
  source 1..22: mol_type = other DNA
gagttgacatgagcagcatgga

SEQ ID NO: 41353 - DNA, 22 bp, synthetic construct
  misc_feature 1..22: note = chemically synthesized
  source 1..22: mol_type = other DNA
acatgagcagcatggaagatgt

SEQ ID NO: 41354 - DNA, 22 bp, synthetic construct
  misc_feature 1..22: note = chemically synthesized
  source 1..22: mol_type = other DNA
gtcccagcacctcactccagag

SEQ ID NO: 41355 - DNA, 22 bp, synthetic construct
  misc_feature 1..22: note = chemically synthesized
  source 1..22: mol_type = other DNA
tcccagcacctcactccagagg

SEQ ID NO: 41356 - DNA, 22 bp, synthetic construct
  misc_feature 1..22: note = chemically synthesized
  source 1..22: mol_type = other DNA
actccagaggccagctcagctc

SEQ ID NO: 41357 - DNA, 22 bp, synthetic construct
  misc_feature 1..22: note = chemically synthesized
  source 1..22: mol_type = other DNA
cagaggccagctcagctcaatc

SEQ ID NO: 41358 - DNA, 22 bp, synthetic construct
  misc_feature 1..22: note = chemically synthesized
  source 1..22: mol_type = other DNA
agctcaatctgggcagagctgc

SEQ ID NO: 41359 - DNA, 22 bp, synthetic construct
  misc_feature 1..22: note = chemically synthesized
  source 1..22: mol_type = other DNA
aatctgggcagagctgcatgat

SEQ ID NO: 41360 - DNA, 22 bp, synthetic construct
  misc_feature 1..22: note = chemically synthesized
  source 1..22: mol_type = other DNA
ggcagagctgcatgatggaagt

SEQ ID NO: 41361 - DNA, 22 bp, synthetic construct
  misc_feature 1..22: note = chemically synthesized
  source 1..22: mol_type = other DNA
catgatggaagtttctgactac

SEQ ID NO: 41362 - DNA, 22 bp, synthetic construct
  misc_feature 1..22: note = chemically synthesized
  source 1..22: mol_type = other DNA
ctgactaccaagcatcgggcag

SEQ ID NO: 41363 - DNA, 22 bp, synthetic construct
  misc_feature 1..22: note = chemically synthesized
  source 1..22: mol_type = other DNA
tgactaccaagcatcgggcaga

SEQ ID NO: 41364 - DNA, 22 bp, synthetic construct
  misc_feature 1..22: note = chemically synthesized
  source 1..22: mol_type = other DNA
actaccaagcatcgggcagagg

SEQ ID NO: 41365 - DNA, 22 bp, synthetic construct
  misc_feature 1..22: note = chemically synthesized
  source 1..22: mol_type = other DNA
ccaagcatcgggcagagggtgc

SEQ ID NO: 41366 - DNA, 22 bp, synthetic construct
  misc_feature 1..22: note = chemically synthesized
  source 1..22: mol_type = other DNA
gactacatagttgtgtgaggga

SEQ ID NO: 41367 - DNA, 22 bp, synthetic construct
  misc_feature 1..22: note = chemically synthesized
  source 1..22: mol_type = other DNA
catagttgtgtgagggagcacc

SEQ ID NO: 41368 - DNA, 22 bp, synthetic construct
  misc_feature 1..22: note = chemically synthesized
  source 1..22: mol_type = other DNA
tgtgagggagcaccgttctcta

SEQ ID NO: 41369 - DNA, 22 bp, synthetic construct
  misc_feature 1..22: note = chemically synthesized
  source 1..22: mol_type = other DNA
tctagaatctgctatttgagca

SEQ ID NO: 41370 - DNA, 22 bp, synthetic construct
  misc_feature 1..22: note = chemically synthesized
  source 1..22: mol_type = other DNA
tagaatctgctatttgagcaag

SEQ ID NO: 41371 - DNA, 22 bp, synthetic construct
  misc_feature 1..22: note = chemically synthesized
  source 1..22: mol_type = other DNA
gaatctgctatttgagcaaggc

SEQ ID NO: 41372 - DNA, 22 bp, synthetic construct
  misc_feature 1..22: note = chemically synthesized
  source 1..22: mol_type = other DNA
ctatttgagcaaggcaaacatc

SEQ ID NO: 41373 - DNA, 22 bp, synthetic construct
  misc_feature 1..22: note = chemically synthesized
  source 1..22: mol_type = other DNA
tttgagcaaggcaaacatcctg

SEQ ID NO: 41374 - DNA, 22 bp, synthetic construct
  misc_feature 1..22: note = chemically synthesized
  source 1..22: mol_type = other DNA
gagcaaggcaaacatcctgata

SEQ ID NO: 41375 - DNA, 22 bp, synthetic construct
  misc_feature 1..22: note = chemically synthesized
  source 1..22: mol_type = other DNA
agcaaggcaaacatcctgataa

SEQ ID NO: 41376 - DNA, 22 bp, synthetic construct
  misc_feature 1..22: note = chemically synthesized
  source 1..22: mol_type = other DNA
ataatggtgaaaacctaccgca

SEQ ID NO: 41377 - DNA, 22 bp, synthetic construct
  misc_feature 1..22: note = chemically synthesized
  source 1..22: mol_type = other DNA
ccgcaagttgccaggaaagttg

SEQ ID NO: 41378 - DNA, 22 bp, synthetic construct
  misc_feature 1..22: note = chemically synthesized
  source 1..22: mol_type = other DNA
ccaggaaagttgatgtggtctg

SEQ ID NO: 41379 - DNA, 22 bp, synthetic construct
  misc_feature 1..22: note = chemically synthesized
  source 1..22: mol_type = other DNA
atgtggtctgcgagtaggtgct

SEQ ID NO: 41380 - DNA, 22 bp, synthetic construct
  misc_feature 1..22: note = chemically synthesized
  source 1..22: mol_type = other DNA
cgagtaggtgctgccatccagt

SEQ ID NO: 41381 - DNA, 22 bp, synthetic construct
  misc_feature 1..22: note = chemically synthesized
  source 1..22: mol_type = other DNA
ccatccagtggccgacatagag

SEQ ID NO: 41382 - DNA, 22 bp, synthetic construct
  misc_feature 1..22: note = chemically synthesized
  source 1..22: mol_type = other DNA
tgagggcaggtaggccacaggt

SEQ ID NO: 41383 - DNA, 22 bp, synthetic construct
  misc_feature 1..22: note = chemically synthesized
  source 1..22: mol_type = other DNA
agggcaggtaggccacaggtga

SEQ ID NO: 41384 - DNA, 22 bp, synthetic construct
  misc_feature 1..22: note = chemically synthesized
  source 1..22: mol_type = other DNA
aagccctccctgatggggcctt

SEQ ID NO: 41385 - DNA, 22 bp, synthetic construct
  misc_feature 1..22: note = chemically synthesized
  source 1..22: mol_type = other DNA
cctgatggggccttggggagag

SEQ ID NO: 41386 - DNA, 22 bp, synthetic construct
  misc_feature 1..22: note = chemically synthesized
  source 1..22: mol_type = other DNA
atggggccttggggagagggca

SEQ ID NO: 41387 - DNA, 22 bp, synthetic construct
  misc_feature 1..22: note = chemically synthesized
  source 1..22: mol_type = other DNA
ggggagagggcagcagggtaag

SEQ ID NO: 41388 - DNA, 22 bp, synthetic construct
  misc_feature 1..22: note = chemically synthesized
  source 1..22: mol_type = other DNA
gggagagggcagcagggtaagt

SEQ ID NO: 41389 - DNA, 22 bp, synthetic construct
  misc_feature 1..22: note = chemically synthesized
  source 1..22: mol_type = other DNA
attgtggatgacgactgacctg

SEQ ID NO: 41390 - DNA, 22 bp, synthetic construct
  misc_feature 1..22: note = chemically synthesized
  source 1..22: mol_type = other DNA
tggatgacgactgacctggaaa

SEQ ID NO: 41391 - DNA, 22 bp, synthetic construct
  misc_feature 1..22: note = chemically synthesized
  source 1..22: mol_type = other DNA
acctggaaaatccccttggcct

SEQ ID NO: 41392 - DNA, 22 bp, synthetic construct
  misc_feature 1..22: note = chemically synthesized
  source 1..22: mol_type = other DNA
gaaaatccccttggcctcaaca

SEQ ID NO: 41393 - DNA, 22 bp, synthetic construct
  misc_feature 1..22: note = chemically synthesized
  source 1..22: mol_type = other DNA
ggcctcaacacctccaaactct

SEQ ID NO: 41394 - DNA, 22 bp, synthetic construct
  misc_feature 1..22: note = chemically synthesized
  source 1..22: mol_type = other DNA
gcctcaacacctccaaactctg

SEQ ID NO: 41395 - DNA, 22 bp, synthetic construct
  misc_feature 1..22: note = chemically synthesized
  source 1..22: mol_type = other DNA
aacacctccaaactctgcattt

SEQ ID NO: 41396 - DNA, 22 bp, synthetic construct
  misc_feature 1..22: note = chemically synthesized
  source 1..22: mol_type = other DNA
caaactctgcatttgatccaag

SEQ ID NO: 41397 - DNA, 22 bp, synthetic construct
  misc_feature 1..22: note = chemically synthesized
  source 1..22: mol_type = other DNA
tgcatttgatccaagtcaggga

SEQ ID NO: 41398 - DNA, 22 bp, synthetic construct
  misc_feature 1..22: note = chemically synthesized
  source 1..22: mol_type = other DNA
catttgatccaagtcagggaac

SEQ ID NO: 41399 - DNA, 22 bp, synthetic construct
  misc_feature 1..22: note = chemically synthesized
  source 1..22: mol_type = other DNA
gatccaagtcagggaacacctg

SEQ ID NO: 41400 - DNA, 22 bp, synthetic construct
  misc_feature 1..22: note = chemically synthesized
  source 1..22: mol_type = other DNA
atccaagtcagggaacacctgg

SEQ ID NO: 41401 - DNA, 22 bp, synthetic construct
  misc_feature 1..22: note = chemically synthesized
  source 1..22: mol_type = other DNA
gaaacatgaaggggagagcagg

SEQ ID NO: 41402 - DNA, 22 bp, synthetic construct
  misc_feature 1..22: note = chemically synthesized
  source 1..22: mol_type = other DNA
tgacctccctctcagaggctga

SEQ ID NO: 41403 - DNA, 22 bp, synthetic construct
  misc_feature 1..22: note = chemically synthesized
  source 1..22: mol_type = other DNA
gacctccctctcagaggctgag

SEQ ID NO: 41404 - DNA, 22 bp, synthetic construct
  misc_feature 1..22: note = chemically synthesized
  source 1..22: mol_type = other DNA
acctccctctcagaggctgaga

SEQ ID NO: 41405 - DNA, 22 bp, synthetic construct
  misc_feature 1..22: note = chemically synthesized
  source 1..22: mol_type = other DNA
cctctcagaggctgagaacgcc

SEQ ID NO: 41406 - DNA, 22 bp, synthetic construct
  misc_feature 1..22: note = chemically synthesized
  source 1..22: mol_type = other DNA
tcagaggctgagaacgccaatt

SEQ ID NO: 41407 - DNA, 22 bp, synthetic construct
  misc_feature 1..22: note = chemically synthesized
  source 1..22: mol_type = other DNA
agaggctgagaacgccaattga

SEQ ID NO: 41408 - DNA, 22 bp, synthetic construct
  misc_feature 1..22: note = chemically synthesized
  source 1..22: mol_type = other DNA
agaacgccaattgacctgatgt

SEQ ID NO: 41409 - DNA, 22 bp, synthetic construct
  misc_feature 1..22: note = chemically synthesized
  source 1..22: mol_type = other DNA
acctgatgtcattattgacatg

SEQ ID NO: 41410 - DNA, 22 bp, synthetic construct
  misc_feature 1..22: note = chemically synthesized
  source 1..22: mol_type = other DNA
atgtcattattgacatgtagaa

SEQ ID NO: 41411 - DNA, 22 bp, synthetic construct
  misc_feature 1..22: note = chemically synthesized
  source 1..22: mol_type = other DNA
ttgacatgtagaaaattgatga

SEQ ID NO: 41412 - DNA, 22 bp, synthetic construct
  misc_feature 1..22: note = chemically synthesized
  source 1..22: mol_type = other DNA
acatgtagaaaattgatgaaca

SEQ ID NO: 41413 - DNA, 22 bp, synthetic construct
  misc_feature 1..22: note = chemically synthesized
  source 1..22: mol_type = other DNA
atgaacaggcctgagttatgtt

SEQ ID NO: 41414 - DNA, 22 bp, synthetic construct
  misc_feature 1..22: note = chemically synthesized
  source 1..22: mol_type = other DNA
agttatgttttgtggcacctca

SEQ ID NO: 41415 - DNA, 22 bp, synthetic construct
  misc_feature 1..22: note = chemically synthesized
  source 1..22: mol_type = other DNA
tgttttgtggcacctcatggtc

SEQ ID NO: 41416 - DNA, 22 bp, synthetic construct
  misc_feature 1..22: note = chemically synthesized
  source 1..22: mol_type = other DNA
tgtggcacctcatggtctagtt

SEQ ID NO: 41417 - DNA, 22 bp, synthetic construct
  misc_feature 1..22: note = chemically synthesized
  source 1..22: mol_type = other DNA
gtggcacctcatggtctagtta

SEQ ID NO: 41418 - DNA, 22 bp, synthetic construct
  misc_feature 1..22: note = chemically synthesized
  source 1..22: mol_type = other DNA
tggcacctcatggtctagttag

SEQ ID NO: 41419 - DNA, 22 bp, synthetic construct
  misc_feature 1..22: note = chemically synthesized
  source 1..22: mol_type = other DNA
atggtctagttagtgttctgag

SEQ ID NO: 41420 - DNA, 22 bp, synthetic construct
  misc_feature 1..22: note = chemically synthesized
  source 1..22: mol_type = other DNA
gttagtgttctgagaatcattt

SEQ ID NO: 41421 - DNA, 22 bp, synthetic construct
  misc_feature 1..22: note = chemically synthesized
  source 1..22: mol_type = other DNA
gtgttctgagaatcattttctc

SEQ ID NO: 41422 - DNA, 22 bp, synthetic construct
  misc_feature 1..22: note = chemically synthesized
  source 1..22: mol_type = other DNA
tgagaatcattttctcagtgga

SEQ ID NO: 41423 - DNA, 22 bp, synthetic construct
  misc_feature 1..22: note = chemically synthesized
  source 1..22: mol_type = other DNA
agaatcattttctcagtggacc

SEQ ID NO: 41424 - DNA, 22 bp, synthetic construct
  misc_feature 1..22: note = chemically synthesized
  source 1..22: mol_type = other DNA
tctcagtggacctgcaggtgag

SEQ ID NO: 41425 - DNA, 22 bp, synthetic construct
  misc_feature 1..22: note = chemically synthesized
  source 1..22: mol_type = other DNA
ctcagtggacctgcaggtgaga

SEQ ID NO: 41426 - DNA, 22 bp, synthetic construct
  misc_feature 1..22: note = chemically synthesized
  source 1..22: mol_type = other DNA
tcagtggacctgcaggtgagac

SEQ ID NO: 41427 - DNA, 22 bp, synthetic construct
  misc_feature 1..22: note = chemically synthesized
  source 1..22: mol_type = other DNA
agtggacctgcaggtgagacca

SEQ ID NO: 41428 - DNA, 22 bp, synthetic construct
  misc_feature 1..22: note = chemically synthesized
  source 1..22: mol_type = other DNA
caggtgagaccaggcgaggcag

SEQ ID NO: 41429 - DNA, 22 bp, synthetic construct
  misc_feature 1..22: note = chemically synthesized
  source 1..22: mol_type = other DNA
gtgggggatggtggttagaaat

SEQ ID NO: 41430 - DNA, 22 bp, synthetic construct
  misc_feature 1..22: note = chemically synthesized
  source 1..22: mol_type = other DNA
gaaatgtgtggatggttgtggg

SEQ ID NO: 41431 - DNA, 22 bp, synthetic construct
  misc_feature 1..22: note = chemically synthesized
  source 1..22: mol_type = other DNA
tggggcagaagaaacagcaagt

SEQ ID NO: 41432 - DNA, 22 bp, synthetic construct
  misc_feature 1..22: note = chemically synthesized
  source 1..22: mol_type = other DNA
tgggccagctacaaactggtta

SEQ ID NO: 41433 - DNA, 22 bp, synthetic construct
  misc_feature 1..22: note = chemically synthesized
  source 1..22: mol_type = other DNA
ggccagctacaaactggttata

SEQ ID NO: 41434 - DNA, 22 bp, synthetic construct
  misc_feature 1..22: note = chemically synthesized
  source 1..22: mol_type = other DNA
caaactggttatatgatgtcta

SEQ ID NO: 41435 - DNA, 22 bp, synthetic construct
  misc_feature 1..22: note = chemically synthesized
  source 1..22: mol_type = other DNA
gttatatgatgtctactgatga

SEQ ID NO: 41436 - DNA, 22 bp, synthetic construct
  misc_feature 1..22: note = chemically synthesized
  source 1..22: mol_type = other DNA
tatgatgtctactgatgatgat

SEQ ID NO: 41437 - DNA, 22 bp, synthetic construct
  misc_feature 1..22: note = chemically synthesized
  source 1..22: mol_type = other DNA
ctgatgatgatagtgatggtgg

SEQ ID NO: 41438 - DNA, 22 bp, synthetic construct
  misc_feature 1..22: note = chemically synthesized
  source 1..22: mol_type = other DNA
atgatgatagtgatggtggtgg

SEQ ID NO: 41439 - DNA, 22 bp, synthetic construct
  misc_feature 1..22: note = chemically synthesized
  source 1..22: mol_type = other DNA
tgatggtggtggaatgatgatg

SEQ ID NO: 41440 - DNA, 22 bp, synthetic construct
  misc_feature 1..22: note = chemically synthesized
  source 1..22: mol_type = other DNA
gtgatggtggtagtggtcgtgg

SEQ ID NO: 41441 - DNA, 22 bp, synthetic construct
  misc_feature 1..22: note = chemically synthesized
  source 1..22: mol_type = other DNA
atggtggtggtaatgataatga

SEQ ID NO: 41442 - DNA, 22 bp, synthetic construct
  misc_feature 1..22: note = chemically synthesized
  source 1..22: mol_type = other DNA
tcatgatgatagcggtggtgat

SEQ ID NO: 41443 - DNA, 22 bp, synthetic construct
  misc_feature 1..22: note = chemically synthesized
  source 1..22: mol_type = other DNA
agggtgatgataatagtgacag

SEQ ID NO: 41444 - DNA, 22 bp, synthetic construct
  misc_feature 1..22: note = chemically synthesized
  source 1..22: mol_type = other DNA
agtagtaatgatggtgatggtg

SEQ ID NO: 41445 - DNA, 22 bp, synthetic construct
  misc_feature 1..22: note = chemically synthesized
  source 1..22: mol_type = other DNA
tggtgatgatggtggtggtagt

SEQ ID NO: 41446 - DNA, 22 bp, synthetic construct
  misc_feature 1..22: note = chemically synthesized
  source 1..22: mol_type = other DNA
agggtgatgataatagtgatag

SEQ ID NO: 41447 - DNA, 22 bp, synthetic construct
  misc_feature 1..22: note = chemically synthesized
  source 1..22: mol_type = other DNA
tcactattatcatcaccctcaa

SEQ ID NO: 41448 - DNA, 22 bp, synthetic construct
  misc_feature 1..22: note = chemically synthesized
  source 1..22: mol_type = other DNA
ttatcatcaccctcaacatcat

SEQ ID NO: 41449 - DNA, 22 bp, synthetic construct
  misc_feature 1..22: note = chemically synthesized
  source 1..22: mol_type = other DNA
tcatcaccctcaacatcatcac

SEQ ID NO: 41450 - DNA, 22 bp, synthetic construct
  misc_feature 1..22: note = chemically synthesized
  source 1..22: mol_type = other DNA
aacatcatcaccatcatcacta

SEQ ID NO: 41451 - DNA, 22 bp, synthetic construct
  misc_feature 1..22: note = chemically synthesized
  source 1..22: mol_type = other DNA
tcatcaccaccaccatcatcgt

SEQ ID NO: 41452 - DNA, 22 bp, synthetic construct
  misc_feature 1..22: note = chemically synthesized
  source 1..22: mol_type = other DNA
ctaccactaccaccaccatcat

SEQ ID NO: 41453 - DNA, 22 bp, synthetic construct
  misc_feature 1..22: note = chemically synthesized
  source 1..22: mol_type = other DNA
ccactaccaccaccatcatcac

SEQ ID NO: 41454 - DNA, 22 bp, synthetic construct
  misc_feature 1..22: note = chemically synthesized
  source 1..22: mol_type = other DNA
ccaccaccatcatcaccacagc

SEQ ID NO: 41455 - DNA, 22 bp, synthetic construct
  misc_feature 1..22: note = chemically synthesized
  source 1..22: mol_type = other DNA
ctactcagcaccaccatcatca

SEQ ID NO: 41456 - DNA, 22 bp, synthetic construct
  misc_feature 1..22: note = chemically synthesized
  source 1..22: mol_type = other DNA
ctcagcaccaccatcatcattc

SEQ ID NO: 41457 - DNA, 22 bp, synthetic construct
  misc_feature 1..22: note = chemically synthesized
  source 1..22: mol_type = other DNA
agcaccaccatcatcattccac

SEQ ID NO: 41458 - DNA, 22 bp, synthetic construct
  misc_feature 1..22: note = chemically synthesized
  source 1..22: mol_type = other DNA
caccaccatcaccatcattcca

SEQ ID NO: 41459 - DNA, 22 bp, synthetic construct
  misc_feature 1..22: note = chemically synthesized
  source 1..22: mol_type = other DNA
caccatcaccattatcattacc

SEQ ID NO: 41460 - DNA, 22 bp, synthetic construct
  misc_feature 1..22: note = chemically synthesized
  source 1..22: mol_type = other DNA
tcattaccaccaccactgtcac

SEQ ID NO: 41461 - DNA, 22 bp, synthetic construct
  misc_feature 1..22: note = chemically synthesized
  source 1..22: mol_type = other DNA
ccaccaccactgtcactattat

SEQ ID NO: 41462 - DNA, 22 bp, synthetic construct
  misc_feature 1..22: note = chemically synthesized
  source 1..22: mol_type = other DNA
tcactattatcatcaccctcaa

SEQ ID NO: 41463 - DNA, 22 bp, synthetic construct
  misc_feature 1..22: note = chemically synthesized
  source 1..22: mol_type = other DNA
ttatcatcaccctcaacatcat

SEQ ID NO: 41464 - DNA, 22 bp, synthetic construct
  misc_feature 1..22: note = chemically synthesized
  source 1..22: mol_type = other DNA
tcatcaccctcaacatcatcac

SEQ ID NO: 41465 - DNA, 22 bp, synthetic construct
  misc_feature 1..22: note = chemically synthesized
  source 1..22: mol_type = other DNA
aacatcatcaccaccaccatca

SEQ ID NO: 41466 - DNA, 22 bp, synthetic construct
  misc_feature 1..22: note = chemically synthesized
  source 1..22: mol_type = other DNA
ctaccaccaccaccaccatcac

SEQ ID NO: 41467 - DNA, 22 bp, synthetic construct
  misc_feature 1..22: note = chemically synthesized
  source 1..22: mol_type = other DNA
ccaccaccaccaccatcaccat

SEQ ID NO: 41468 - DNA, 22 bp, synthetic construct
  misc_feature 1..22: note = chemically synthesized
  source 1..22: mol_type = other DNA
taccaccatcaccattatcatc

SEQ ID NO: 41469 - DNA, 22 bp, synthetic construct
  misc_feature 1..22: note = chemically synthesized
  source 1..22: mol_type = other DNA
ccaccatcaccattatcatcac

SEQ ID NO: 41470 - DNA, 22 bp, synthetic construct
  misc_feature 1..22: note = chemically synthesized
  source 1..22: mol_type = other DNA
tcatcaccatcaccatcaccac

SEQ ID NO: 41471 - DNA, 22 bp, synthetic construct
  misc_feature 1..22: note = chemically synthesized
  source 1..22: mol_type = other DNA
tcatcatgataatcattatcat

SEQ ID NO: 41472 - DNA, 22 bp, synthetic construct
  misc_feature 1..22: note = chemically synthesized
  source 1..22: mol_type = other DNA
tcattaccaccaccattagcat

SEQ ID NO: 41473 - DNA, 22 bp, synthetic construct
  misc_feature 1..22: note = chemically synthesized
  source 1..22: mol_type = other DNA
ccaccaccattagcattatcat

SEQ ID NO: 41474 - DNA, 22 bp, synthetic construct
  misc_feature 1..22: note = chemically synthesized
  source 1..22: mol_type = other DNA
gcattatcattaccaccaccat

SEQ ID NO: 41475 - DNA, 22 bp, synthetic construct
  misc_feature 1..22: note = chemically synthesized
  source 1..22: mol_type = other DNA
tcattaccaccaccatcactat

SEQ ID NO: 41476 - DNA, 22 bp, synthetic construct
  misc_feature 1..22: note = chemically synthesized
  source 1..22: mol_type = other DNA
ccaccaccatcactatcactat

SEQ ID NO: 41477 - DNA, 22 bp, synthetic construct
  misc_feature 1..22: note = chemically synthesized
  source 1..22: mol_type = other DNA
tcactatcaccatcaccacgac

SEQ ID NO: 41478 - DNA, 22 bp, synthetic construct
  misc_feature 1..22: note = chemically synthesized
  source 1..22: mol_type = other DNA
tcaccatcaccacgaccactac

SEQ ID NO: 41479 - DNA, 22 bp, synthetic construct
  misc_feature 1..22: note = chemically synthesized
  source 1..22: mol_type = other DNA
ccaccatcaccaacaccatcat

SEQ ID NO: 41480 - DNA, 22 bp, synthetic construct
  misc_feature 1..22: note = chemically synthesized
  source 1..22: mol_type = other DNA
ctacccaccaccaccatcatca

SEQ ID NO: 41481 - DNA, 22 bp, synthetic construct
  misc_feature 1..22: note = chemically synthesized
  source 1..22: mol_type = other DNA
cccaccaccaccatcatcatca

SEQ ID NO: 41482 - DNA, 22 bp, synthetic construct
  misc_feature 1..22: note = chemically synthesized
  source 1..22: mol_type = other DNA
caccaccatcacaattattacc

SEQ ID NO: 41483 - DNA, 22 bp, synthetic construct
  misc_feature 1..22: note = chemically synthesized
  source 1..22: mol_type = other DNA
ttaccaccaccaccatcaccac

SEQ ID NO: 41484 - DNA, 22 bp, synthetic construct
  misc_feature 1..22: note = chemically synthesized
  source 1..22: mol_type = other DNA
ccaccaccaccatcaccaccac

SEQ ID NO: 41485 - DNA, 22 bp, synthetic construct
  misc_feature 1..22: note = chemically synthesized
  source 1..22: mol_type = other DNA
tcatcatcagtagacatcatat

SEQ ID NO: 41486 - DNA, 22 bp, synthetic construct
  misc_feature 1..22: note = chemically synthesized
  source 1..22: mol_type = other DNA
gtagctggcccagagcctactt

SEQ ID NO: 41487 - DNA, 22 bp, synthetic construct
  misc_feature 1..22: note = chemically synthesized
  source 1..22: mol_type = other DNA
tagctggcccagagcctacttg

SEQ ID NO: 41488 - DNA, 22 bp, synthetic construct
  misc_feature 1..22: note = chemically synthesized
  source 1..22: mol_type = other DNA
gcccagagcctacttgctgttt

SEQ ID NO: 41489 - DNA, 22 bp, synthetic construct
  misc_feature 1..22: note = chemically synthesized
  source 1..22: mol_type = other DNA
cttgctgtttcttctgccccac

SEQ ID NO: 41490 - DNA, 22 bp, synthetic construct
  misc_feature 1..22: note = chemically synthesized
  source 1..22: mol_type = other DNA
gctgtttcttctgccccacaac

SEQ ID NO: 41491 - DNA, 22 bp, synthetic construct
  misc_feature 1..22: note = chemically synthesized
  source 1..22: mol_type = other DNA
ctgtttcttctgccccacaacc

SEQ ID NO: 41492 - DNA, 22 bp, synthetic construct
  misc_feature 1..22: note = chemically synthesized
  source 1..22: mol_type = other DNA
tttcttctgccccacaaccatc

SEQ ID NO: 41493 - DNA, 22 bp, synthetic construct
  misc_feature 1..22: note = chemically synthesized
  source 1..22: mol_type = other DNA
cttctgccccacaaccatccac

SEQ ID NO: 41494 - DNA, 22 bp, synthetic construct
  misc_feature 1..22: note = chemically synthesized
  source 1..22: mol_type = other DNA
ttctgccccacaaccatccaca

SEQ ID NO: 41495 - DNA, 22 bp, synthetic construct
  misc_feature 1..22: note = chemically synthesized
  source 1..22: mol_type = other DNA
ctgccccacaaccatccacaca

SEQ ID NO: 41496 - DNA, 22 bp, synthetic construct
  misc_feature 1..22: note = chemically synthesized
  source 1..22: mol_type = other DNA
tgccccacaaccatccacacat

SEQ ID NO: 41497 - DNA, 22 bp, synthetic construct
  misc_feature 1..22: note = chemically synthesized
  source 1..22: mol_type = other DNA
ccccacaaccatccacacattt

SEQ ID NO: 41498 - DNA, 22 bp, synthetic construct
  misc_feature 1..22: note = chemically synthesized
  source 1..22: mol_type = other DNA
ctaaccaccatcccccactagg

SEQ ID NO: 41499 - DNA, 22 bp, synthetic construct
  misc_feature 1..22: note = chemically synthesized
  source 1..22: mol_type = other DNA
taaccaccatcccccactaggc

SEQ ID NO: 41500 - DNA, 22 bp, synthetic construct
  misc_feature 1..22: note = chemically synthesized
  source 1..22: mol_type = other DNA
accaccatcccccactaggctt

SEQ ID NO: 41501 - DNA, 22 bp, synthetic construct
  misc_feature 1..22: note = chemically synthesized
  source 1..22: mol_type = other DNA
ggcttctgcctcgcctggtctc

SEQ ID NO: 41502 - DNA, 22 bp, synthetic construct
  misc_feature 1..22: note = chemically synthesized
  source 1..22: mol_type = other DNA
ctgcctcgcctggtctcacctg

SEQ ID NO: 41503 - DNA, 22 bp, synthetic construct
  misc_feature 1..22: note = chemically synthesized
  source 1..22: mol_type = other DNA
tgcctcgcctggtctcacctgc

SEQ ID NO: 41504 - DNA, 22 bp, synthetic construct
  misc_feature 1..22: note = chemically synthesized
  source 1..22: mol_type = other DNA
cctcgcctggtctcacctgcag

SEQ ID NO: 41505 - DNA, 22 bp, synthetic construct
  misc_feature 1..22: note = chemically synthesized
  source 1..22: mol_type = other DNA
gcctggtctcacctgcaggtcc

SEQ ID NO: 41506 - DNA, 22 bp, synthetic construct
  misc_feature 1..22: note = chemically synthesized
  source 1..22: mol_type = other DNA
gtctcacctgcaggtccactga

SEQ ID NO: 41507 - DNA, 22 bp, synthetic construct
  misc_feature 1..22: note = chemically synthesized
  source 1..22: mol_type = other DNA
acctgcaggtccactgagaaaa

SEQ ID NO: 41508 - DNA, 22 bp, synthetic construct
  misc_feature 1..22: note = chemically synthesized
  source 1..22: mol_type = other DNA
caggtccactgagaaaatgatt

SEQ ID NO: 41509 - DNA, 22 bp, synthetic construct
  misc_feature 1..22: note = chemically synthesized
  source 1..22: mol_type = other DNA
agaaaatgattctcagaacact

SEQ ID NO: 41510 - DNA, 22 bp, synthetic construct
  misc_feature 1..22: note = chemically synthesized
  source 1..22: mol_type = other DNA
tcagaacactaactagaccatg

SEQ ID NO: 41511 - DNA, 22 bp, synthetic construct
  misc_feature 1..22: note = chemically synthesized
  source 1..22: mol_type = other DNA
agaacactaactagaccatgag

SEQ ID NO: 41512 - DNA, 22 bp, synthetic construct
  misc_feature 1..22: note = chemically synthesized
  source 1..22: mol_type = other DNA
actagaccatgaggtgccacaa

SEQ ID NO: 41513 - DNA, 22 bp, synthetic construct
  misc_feature 1..22: note = chemically synthesized
  source 1..22: mol_type = other DNA
gaccatgaggtgccacaaaaca

SEQ ID NO: 41514 - DNA, 22 bp, synthetic construct
  misc_feature 1..22: note = chemically synthesized
  source 1..22: mol_type = other DNA
aggcctgttcatcaattttcta

SEQ ID NO: 41515 - DNA, 22 bp, synthetic construct
  misc_feature 1..22: note = chemically synthesized
  source 1..22: mol_type = other DNA
ttcatcaattttctacatgtca

SEQ ID NO: 41516 - DNA, 22 bp, synthetic construct
  misc_feature 1..22: note = chemically synthesized
  source 1..22: mol_type = other DNA
atcaattttctacatgtcaata

SEQ ID NO: 41517 - DNA, 22 bp, synthetic construct
  misc_feature 1..22: note = chemically synthesized
  source 1..22: mol_type = other DNA
tctacatgtcaataatgacatc

SEQ ID NO: 41518 - DNA, 22 bp, synthetic construct
  misc_feature 1..22: note = chemically synthesized
  source 1..22: mol_type = other DNA
ctacatgtcaataatgacatca

SEQ ID NO: 41519 - DNA, 22 bp, synthetic construct
  misc_feature 1..22: note = chemically synthesized
  source 1..22: mol_type = other DNA
tacatgtcaataatgacatcag

SEQ ID NO: 41520 - DNA, 22 bp, synthetic construct
  misc_feature 1..22: note = chemically synthesized
  source 1..22: mol_type = other DNA
catgtcaataatgacatcaggt

SEQ ID NO: 41521 - DNA, 22 bp, synthetic construct
  misc_feature 1..22: note = chemically synthesized
  source 1..22: mol_type = other DNA
gcgttctcagcctctgagaggg

SEQ ID NO: 41522 - DNA, 22 bp, synthetic construct
  misc_feature 1..22: note = chemically synthesized
  source 1..22: mol_type = other DNA
tcagcctctgagagggaggtca

SEQ ID NO: 41523 - DNA, 22 bp, synthetic construct
  misc_feature 1..22: note = chemically synthesized
  source 1..22: mol_type = other DNA
agcctctgagagggaggtcaaa

SEQ ID NO: 41524 - DNA, 22 bp, synthetic construct
  misc_feature 1..22: note = chemically synthesized
  source 1..22: mol_type = other DNA
tgagagggaggtcaaagttttc

SEQ ID NO: 41525 - DNA, 22 bp, synthetic construct
  misc_feature 1..22: note = chemically synthesized
  source 1..22: mol_type = other DNA
agagggaggtcaaagttttcct

SEQ ID NO: 41526 - DNA, 22 bp, synthetic construct
  misc_feature 1..22: note = chemically synthesized
  source 1..22: mol_type = other DNA
tcctgctctccccttcatgttt

SEQ ID NO: 41527 - DNA, 22 bp, synthetic construct
  misc_feature 1..22: note = chemically synthesized
  source 1..22: mol_type = other DNA
cctgctctccccttcatgtttc

SEQ ID NO: 41528 - DNA, 22 bp, synthetic construct
  misc_feature 1..22: note = chemically synthesized
  source 1..22: mol_type = other DNA
ctgctctccccttcatgtttcc

SEQ ID NO: 41529 - DNA, 22 bp, synthetic construct
  misc_feature 1..22: note = chemically synthesized
  source 1..22: mol_type = other DNA
ctctccccttcatgtttccagg

SEQ ID NO: 41530 - DNA, 22 bp, synthetic construct
  misc_feature 1..22: note = chemically synthesized
  source 1..22: mol_type = other DNA
tccccttcatgtttccaggtgt

SEQ ID NO: 41531 - DNA, 22 bp, synthetic construct
  misc_feature 1..22: note = chemically synthesized
  source 1..22: mol_type = other DNA
cccttcatgtttccaggtgttc

SEQ ID NO: 41532 - DNA, 22 bp, synthetic construct
  misc_feature 1..22: note = chemically synthesized
  source 1..22: mol_type = other DNA
catgtttccaggtgttccctga

SEQ ID NO: 41533 - DNA, 22 bp, synthetic construct
  misc_feature 1..22: note = chemically synthesized
  source 1..22: mol_type = other DNA
atgtttccaggtgttccctgac

SEQ ID NO: 41534 - DNA, 22 bp, synthetic construct
  misc_feature 1..22: note = chemically synthesized
  source 1..22: mol_type = other DNA
ccaggtgttccctgacttggat

SEQ ID NO: 41535 - DNA, 22 bp, synthetic construct
  misc_feature 1..22: note = chemically synthesized
  source 1..22: mol_type = other DNA
caggtgttccctgacttggatc

SEQ ID NO: 41536 - DNA, 22 bp, synthetic construct
  misc_feature 1..22: note = chemically synthesized
  source 1..22: mol_type = other DNA
cctgacttggatcaaatgcaga

SEQ ID NO: 41537 - DNA, 22 bp, synthetic construct
  misc_feature 1..22: note = chemically synthesized
  source 1..22: mol_type = other DNA
acttggatcaaatgcagagttt

SEQ ID NO: 41538 - DNA, 22 bp, synthetic construct
  misc_feature 1..22: note = chemically synthesized
  source 1..22: mol_type = other DNA
ggatcaaatgcagagtttggag

SEQ ID NO: 41539 - DNA, 22 bp, synthetic construct
  misc_feature 1..22: note = chemically synthesized
  source 1..22: mol_type = other DNA
gatcaaatgcagagtttggagg

SEQ ID NO: 41540 - DNA, 22 bp, synthetic construct
  misc_feature 1..22: note = chemically synthesized
  source 1..22: mol_type = other DNA
ggaggtgttgaggccaagggga

SEQ ID NO: 41541 - DNA, 22 bp, synthetic construct
  misc_feature 1..22: note = chemically synthesized
  source 1..22: mol_type = other DNA
gaggtgttgaggccaaggggat

SEQ ID NO: 41542 - DNA, 22 bp, synthetic construct
  misc_feature 1..22: note = chemically synthesized
  source 1..22: mol_type = other DNA
aggccaaggggattttccaggt

SEQ ID NO: 41543 - DNA, 22 bp, synthetic construct
  misc_feature 1..22: note = chemically synthesized
  source 1..22: mol_type = other DNA
tccaggtcagtcgtcatccaca

SEQ ID NO: 41544 - DNA, 22 bp, synthetic construct
  misc_feature 1..22: note = chemically synthesized
  source 1..22: mol_type = other DNA
ccaggtcagtcgtcatccacaa

SEQ ID NO: 41545 - DNA, 22 bp, synthetic construct
  misc_feature 1..22: note = chemically synthesized
  source 1..22: mol_type = other DNA
caggtcagtcgtcatccacaat

SEQ ID NO: 41546 - DNA, 22 bp, synthetic construct
  misc_feature 1..22: note = chemically synthesized
  source 1..22: mol_type = other DNA
atcctgccgctggacttaccct

SEQ ID NO: 41547 - DNA, 22 bp, synthetic construct
  misc_feature 1..22: note = chemically synthesized
  source 1..22: mol_type = other DNA
ccgctggacttaccctgctgcc

SEQ ID NO: 41548 - DNA, 22 bp, synthetic construct
  misc_feature 1..22: note = chemically synthesized
  source 1..22: mol_type = other DNA
gacttaccctgctgccctctcc

SEQ ID NO: 41549 - DNA, 22 bp, synthetic construct
  misc_feature 1..22: note = chemically synthesized
  source 1..22: mol_type = other DNA
accctgctgccctctccccaag

SEQ ID NO: 41550 - DNA, 22 bp, synthetic construct
  misc_feature 1..22: note = chemically synthesized
  source 1..22: mol_type = other DNA
ccctgctgccctctccccaagg

SEQ ID NO: 41551 - DNA, 22 bp, synthetic construct
  misc_feature 1..22: note = chemically synthesized
  source 1..22: mol_type = other DNA
ctgccctctccccaaggcccca

SEQ ID NO: 41552 - DNA, 22 bp, synthetic construct
  misc_feature 1..22: note = chemically synthesized
  source 1..22: mol_type = other DNA
ccctctccccaaggccccatca

SEQ ID NO: 41553 - DNA, 22 bp, synthetic construct
  misc_feature 1..22: note = chemically synthesized
  source 1..22: mol_type = other DNA
tccccaaggccccatcagggag

SEQ ID NO: 41554 - DNA, 22 bp, synthetic construct
  misc_feature 1..22: note = chemically synthesized
  source 1..22: mol_type = other DNA
cccaaggccccatcagggaggg

SEQ ID NO: 41555 - DNA, 22 bp, synthetic construct
  misc_feature 1..22: note = chemically synthesized
  source 1..22: mol_type = other DNA
caatcctcttgtcacctgtggc

SEQ ID NO: 41556 - DNA, 22 bp, synthetic construct
  misc_feature 1..22: note = chemically synthesized
  source 1..22: mol_type = other DNA
aatcctcttgtcacctgtggcc

SEQ ID NO: 41557 - DNA, 22 bp, synthetic construct
  misc_feature 1..22: note = chemically synthesized
  source 1..22: mol_type = other DNA
ttgtcacctgtggcctacctgc

SEQ ID NO: 41558 - DNA, 22 bp, synthetic construct
  misc_feature 1..22: note = chemically synthesized
  source 1..22: mol_type = other DNA
gtcacctgtggcctacctgccc

SEQ ID NO: 41559 - DNA, 22 bp, synthetic construct
  misc_feature 1..22: note = chemically synthesized
  source 1..22: mol_type = other DNA
tcacctgtggcctacctgccct

SEQ ID NO: 41560 - DNA, 22 bp, synthetic construct
  misc_feature 1..22: note = chemically synthesized
  source 1..22: mol_type = other DNA
tggcctacctgccctcagagat

SEQ ID NO: 41561 - DNA, 22 bp, synthetic construct
  misc_feature 1..22: note = chemically synthesized
  source 1..22: mol_type = other DNA
cctgccctcagagatgacatct

SEQ ID NO: 41562 - DNA, 22 bp, synthetic construct
  misc_feature 1..22: note = chemically synthesized
  source 1..22: mol_type = other DNA
ccctcagagatgacatctctat

SEQ ID NO: 41563 - DNA, 22 bp, synthetic construct
  misc_feature 1..22: note = chemically synthesized
  source 1..22: mol_type = other DNA
agagatgacatctctatgtcgg

SEQ ID NO: 41564 - DNA, 22 bp, synthetic construct
  misc_feature 1..22: note = chemically synthesized
  source 1..22: mol_type = other DNA
tatgtcggccactggatggcag

SEQ ID NO: 41565 - DNA, 22 bp, synthetic construct
  misc_feature 1..22: note = chemically synthesized
  source 1..22: mol_type = other DNA
tgtcggccactggatggcagca

SEQ ID NO: 41566 - DNA, 22 bp, synthetic construct
  misc_feature 1..22: note = chemically synthesized
  source 1..22: mol_type = other DNA
gatggcagcacctactcgcaga

SEQ ID NO: 41567 - DNA, 22 bp, synthetic construct
  misc_feature 1..22: note = chemically synthesized
  source 1..22: mol_type = other DNA
ctcgcagaccacatcaactttc

SEQ ID NO: 41568 - DNA, 22 bp, synthetic construct
  misc_feature 1..22: note = chemically synthesized
  source 1..22: mol_type = other DNA
gcagaccacatcaactttcctg

SEQ ID NO: 41569 - DNA, 22 bp, synthetic construct
  misc_feature 1..22: note = chemically synthesized
  source 1..22: mol_type = other DNA
tcctggcaacttgcggtaggtt

SEQ ID NO: 41570 - DNA, 22 bp, synthetic construct
  misc_feature 1..22: note = chemically synthesized
  source 1..22: mol_type = other DNA
cctggcaacttgcggtaggttt

SEQ ID NO: 41571 - DNA, 22 bp, synthetic construct
  misc_feature 1..22: note = chemically synthesized
  source 1..22: mol_type = other DNA
ctggcaacttgcggtaggtttt

SEQ ID NO: 41572 - DNA, 22 bp, synthetic construct
  misc_feature 1..22: note = chemically synthesized
  source 1..22: mol_type = other DNA
gcaacttgcggtaggttttcac

SEQ ID NO: 41573 - DNA, 22 bp, synthetic construct
  misc_feature 1..22: note = chemically synthesized
  source 1..22: mol_type = other DNA
gcggtaggttttcaccattatc

SEQ ID NO: 41574 - DNA, 22 bp, synthetic construct
  misc_feature 1..22: note = chemically synthesized
  source 1..22: mol_type = other DNA
cggtaggttttcaccattatca

SEQ ID NO: 41575 - DNA, 22 bp, synthetic construct
  misc_feature 1..22: note = chemically synthesized
  source 1..22: mol_type = other DNA
tcaccattatcaggatgtttgc

SEQ ID NO: 41576 - DNA, 22 bp, synthetic construct
  misc_feature 1..22: note = chemically synthesized
  source 1..22: mol_type = other DNA
caccattatcaggatgtttgcc

SEQ ID NO: 41577 - DNA, 22 bp, synthetic construct
  misc_feature 1..22: note = chemically synthesized
  source 1..22: mol_type = other DNA
accattatcaggatgtttgcct

SEQ ID NO: 41578 - DNA, 22 bp, synthetic construct
  misc_feature 1..22: note = chemically synthesized
  source 1..22: mol_type = other DNA
tcaggatgtttgccttgctcaa

SEQ ID NO: 41579 - DNA, 22 bp, synthetic construct
  misc_feature 1..22: note = chemically synthesized
  source 1..22: mol_type = other DNA
gccttgctcaaatagcagattc

SEQ ID NO: 41580 - DNA, 22 bp, synthetic construct
  misc_feature 1..22: note = chemically synthesized
  source 1..22: mol_type = other DNA
ccttgctcaaatagcagattct

SEQ ID NO: 41581 - DNA, 22 bp, synthetic construct
  misc_feature 1..22: note = chemically synthesized
  source 1..22: mol_type = other DNA
gctcaaatagcagattctagag

SEQ ID NO: 41582 - DNA, 22 bp, synthetic construct
  misc_feature 1..22: note = chemically synthesized
  source 1..22: mol_type = other DNA
ctcaaatagcagattctagaga

SEQ ID NO: 41583 - DNA, 22 bp, synthetic construct
  misc_feature 1..22: note = chemically synthesized
  source 1..22: mol_type = other DNA
aaatagcagattctagagaacg

SEQ ID NO: 41584 - DNA, 22 bp, synthetic construct
  misc_feature 1..22: note = chemically synthesized
  source 1..22: mol_type = other DNA
tagagaacggtgctccctcaca

SEQ ID NO: 41585 - DNA, 22 bp, synthetic construct
  misc_feature 1..22: note = chemically synthesized
  source 1..22: mol_type = other DNA
gagaacggtgctccctcacaca

SEQ ID NO: 41586 - DNA, 22 bp, synthetic construct
  misc_feature 1..22: note = chemically synthesized
  source 1..22: mol_type = other DNA
cctcacacaactatgtagtcca

SEQ ID NO: 41587 - DNA, 22 bp, synthetic construct
  misc_feature 1..22: note = chemically synthesized
  source 1..22: mol_type = other DNA
acacaactatgtagtccaggtg

SEQ ID NO: 41588 - DNA, 22 bp, synthetic construct
  misc_feature 1..22: note = chemically synthesized
  source 1..22: mol_type = other DNA
tgtagtccaggtgatgcaccct

SEQ ID NO: 41589 - DNA, 22 bp, synthetic construct
  misc_feature 1..22: note = chemically synthesized
  source 1..22: mol_type = other DNA
tgcccgatgcttggtagtcaga

SEQ ID NO: 41590 - DNA, 22 bp, synthetic construct
  misc_feature 1..22: note = chemically synthesized
  source 1..22: mol_type = other DNA
cccgatgcttggtagtcagaaa

SEQ ID NO: 41591 - DNA, 22 bp, synthetic construct
  misc_feature 1..22: note = chemically synthesized
  source 1..22: mol_type = other DNA
ggtagtcagaaacttccatcat

SEQ ID NO: 41592 - DNA, 22 bp, synthetic construct
  misc_feature 1..22: note = chemically synthesized
  source 1..22: mol_type = other DNA
gtagtcagaaacttccatcatg

SEQ ID NO: 41593 - DNA, 22 bp, synthetic construct
  misc_feature 1..22: note = chemically synthesized
  source 1..22: mol_type = other DNA
ccatcatgcagctctgcccaga

SEQ ID NO: 41594 - DNA, 22 bp, synthetic construct
  misc_feature 1..22: note = chemically synthesized
  source 1..22: mol_type = other DNA
catcatgcagctctgcccagat

SEQ ID NO: 41595 - DNA, 22 bp, synthetic construct
  misc_feature 1..22: note = chemically synthesized
  source 1..22: mol_type = other DNA
tgcccagattgagctgagctgg

SEQ ID NO: 41596 - DNA, 22 bp, synthetic construct
  misc_feature 1..22: note = chemically synthesized
  source 1..22: mol_type = other DNA
cccagattgagctgagctggcc

SEQ ID NO: 41597 - DNA, 22 bp, synthetic construct
  misc_feature 1..22: note = chemically synthesized
  source 1..22: mol_type = other DNA
agctgagctggcctctggagtg

SEQ ID NO: 41598 - DNA, 22 bp, synthetic construct
  misc_feature 1..22: note = chemically synthesized
  source 1..22: mol_type = other DNA
agctggcctctggagtgaggtg

SEQ ID NO: 41599 - DNA, 22 bp, synthetic construct
  misc_feature 1..22: note = chemically synthesized
  source 1..22: mol_type = other DNA
gcctctggagtgaggtgctggg

SEQ ID NO: 41600 - DNA, 22 bp, synthetic construct
  misc_feature 1..22: note = chemically synthesized
  source 1..22: mol_type = other DNA
tggagtgaggtgctgggacaaa

SEQ ID NO: 41601 - DNA, 22 bp, synthetic construct
  misc_feature 1..22: note = chemically synthesized
  source 1..22: mol_type = other DNA
gagtgaggtgctgggacaaaca

SEQ ID NO: 41602 - DNA, 22 bp, synthetic construct
  misc_feature 1..22: note = chemically synthesized
  source 1..22: mol_type = other DNA
ggacaaacatcttccatgctgc

SEQ ID NO: 41603 - DNA, 22 bp, synthetic construct
  misc_feature 1..22: note = chemically synthesized
  source 1..22: mol_type = other DNA
ccatgctgctcatgtcaactcc

SEQ ID NO: 41604 - DNA, 22 bp, synthetic construct
  misc_feature 1..22: note = chemically synthesized
  source 1..22: mol_type = other DNA
catgctgctcatgtcaactcca

SEQ ID NO: 41605 - DNA, 22 bp, synthetic construct
  misc_feature 1..22: note = chemically synthesized
  source 1..22: mol_type = other DNA
ctcatgtcaactccagatgcag

SEQ ID NO: 41606 - DNA, 22 bp, synthetic construct
  misc_feature 1..22: note = chemically synthesized
  source 1..22: mol_type = other DNA
atgtcaactccagatgcagtca

SEQ ID NO: 41607 - DNA, 22 bp, synthetic construct
  misc_feature 1..22: note = chemically synthesized
  source 1..22: mol_type = other DNA
cagatgcagtcaggtttctgaa

SEQ ID NO: 41608 - DNA, 22 bp, synthetic construct
  misc_feature 1..22: note = chemically synthesized
  source 1..22: mol_type = other DNA
ctgaaccaaagtcaatgatcta

SEQ ID NO: 41609 - DNA, 22 bp, synthetic construct
  misc_feature 1..22: note = chemically synthesized
  source 1..22: mol_type = other DNA
tgaaccaaagtcaatgatctaa

SEQ ID NO: 41610 - DNA, 22 bp, synthetic construct
  misc_feature 1..22: note = chemically synthesized
  source 1..22: mol_type = other DNA
aaccaaagtcaatgatctaagt

SEQ ID NO: 41611 - DNA, 22 bp, synthetic construct
  misc_feature 1..22: note = chemically synthesized
  source 1..22: mol_type = other DNA
agtgcagtcaaaggctctgggg

SEQ ID NO: 41612 - DNA, 22 bp, synthetic construct
  misc_feature 1..22: note = chemically synthesized
  source 1..22: mol_type = other DNA
tgggggaagaaagagagagtgc

SEQ ID NO: 41613 - DNA, 22 bp, synthetic construct
  misc_feature 1..22: note = chemically synthesized
  source 1..22: mol_type = other DNA
ggggaagaaagagagagtgcct

SEQ ID NO: 41614 - DNA, 22 bp, synthetic construct
  misc_feature 1..22: note = chemically synthesized
  source 1..22: mol_type = other DNA
atctcttgcctgtgccatgctc

SEQ ID NO: 41615 - DNA, 22 bp, synthetic construct
  misc_feature 1..22: note = chemically synthesized
  source 1..22: mol_type = other DNA
ttgcctgtgccatgctcgcaaa

SEQ ID NO: 41616 - DNA, 22 bp, synthetic construct
  misc_feature 1..22: note = chemically synthesized
  source 1..22: mol_type = other DNA
gcctgtgccatgctcgcaaagc

SEQ ID NO: 41617 - DNA, 22 bp, synthetic construct
  misc_feature 1..22: note = chemically synthesized
  source 1..22: mol_type = other DNA
cctgtgccatgctcgcaaagca

SEQ ID NO: 41618 - DNA, 22 bp, synthetic construct
  misc_feature 1..22: note = chemically synthesized
  source 1..22: mol_type = other DNA
tgccatgctcgcaaagcaagga

SEQ ID NO: 41619 - DNA, 22 bp, synthetic construct
  misc_feature 1..22: note = chemically synthesized
  source 1..22: mol_type = other DNA
gcaaagcaaggatttttgcaaa

SEQ ID NO: 41620 - DNA, 22 bp, synthetic construct
  misc_feature 1..22: note = chemically synthesized
  source 1..22: mol_type = other DNA
ttgcaaaattctaatgaaagct

SEQ ID NO: 41621 - DNA, 22 bp, synthetic construct
  misc_feature 1..22: note = chemically synthesized
  source 1..22: mol_type = other DNA
tgcaaaattctaatgaaagctg

SEQ ID NO: 41622 - DNA, 22 bp, synthetic construct
  misc_feature 1..22: note = chemically synthesized
  source 1..22: mol_type = other DNA
gcaaaattctaatgaaagctgg

SEQ ID NO: 41623 - DNA, 22 bp, synthetic construct
  misc_feature 1..22: note = chemically synthesized
  source 1..22: mol_type = other DNA
caaaattctaatgaaagctggg

SEQ ID NO: 41624 - DNA, 22 bp, synthetic construct
  misc_feature 1..22: note = chemically synthesized
  source 1..22: mol_type = other DNA
taatgaaagctgggcttgcaaa

SEQ ID NO: 41625 - DNA, 22 bp, synthetic construct
  misc_feature 1..22: note = chemically synthesized
  source 1..22: mol_type = other DNA
atgaaagctgggcttgcaaaat

SEQ ID NO: 41626 - DNA, 22 bp, synthetic construct
  misc_feature 1..22: note = chemically synthesized
  source 1..22: mol_type = other DNA
ggcttgcaaaattagaaaactg

SEQ ID NO: 41627 - DNA, 22 bp, synthetic construct
  misc_feature 1..22: note = chemically synthesized
  source 1..22: mol_type = other DNA
gcaaaattagaaaactggatta

SEQ ID NO: 41628 - DNA, 22 bp, synthetic construct
  misc_feature 1..22: note = chemically synthesized
  source 1..22: mol_type = other DNA
caaaattagaaaactggattat

SEQ ID NO: 41629 - DNA, 22 bp, synthetic construct
  misc_feature 1..22: note = chemically synthesized
  source 1..22: mol_type = other DNA
gaaaactggattatttgtgaga

SEQ ID NO: 41630 - DNA, 22 bp, synthetic construct
  misc_feature 1..22: note = chemically synthesized
  source 1..22: mol_type = other DNA
gattatttgtgagaacactgaa

SEQ ID NO: 41631 - DNA, 22 bp, synthetic construct
  misc_feature 1..22: note = chemically synthesized
  source 1..22: mol_type = other DNA
tttgtgagaacactgaaacatc

SEQ ID NO: 41632 - DNA, 22 bp, synthetic construct
  misc_feature 1..22: note = chemically synthesized
  source 1..22: mol_type = other DNA
gtgagaacactgaaacatccct

SEQ ID NO: 41633 - DNA, 22 bp, synthetic construct
  misc_feature 1..22: note = chemically synthesized
  source 1..22: mol_type = other DNA
tgagaacactgaaacatccctg

SEQ ID NO: 41634 - DNA, 22 bp, synthetic construct
  misc_feature 1..22: note = chemically synthesized
  source 1..22: mol_type = other DNA
aaacatccctgggtgtgtccat

SEQ ID NO: 41635 - DNA, 22 bp, synthetic construct
  misc_feature 1..22: note = chemically synthesized
  source 1..22: mol_type = other DNA
ggtgtgtccatctggaaaaaca

SEQ ID NO: 41636 - DNA, 22 bp, synthetic construct
  misc_feature 1..22: note = chemically synthesized
  source 1..22: mol_type = other DNA
gaaaaacagcatttcctctggc

SEQ ID NO: 41637 - DNA, 22 bp, synthetic construct
  misc_feature 1..22: note = chemically synthesized
  source 1..22: mol_type = other DNA
cctctggcaattttgcaaccgt

SEQ ID NO: 41638 - DNA, 22 bp, synthetic construct
  misc_feature 1..22: note = chemically synthesized
  source 1..22: mol_type = other DNA
ctctggcaattttgcaaccgtt

SEQ ID NO: 41639 - DNA, 22 bp, synthetic construct
  misc_feature 1..22: note = chemically synthesized
  source 1..22: mol_type = other DNA
tggcaattttgcaaccgttcta

SEQ ID NO: 41640 - DNA, 22 bp, synthetic construct
  misc_feature 1..22: note = chemically synthesized
  source 1..22: mol_type = other DNA
gcaattttgcaaccgttctatt

SEQ ID NO: 41641 - DNA, 22 bp, synthetic construct
  misc_feature 1..22: note = chemically synthesized
  source 1..22: mol_type = other DNA
tgcaaccgttctatttgaattt

SEQ ID NO: 41642 - DNA, 22 bp, synthetic construct
  misc_feature 1..22: note = chemically synthesized
  source 1..22: mol_type = other DNA
gcaaccgttctatttgaatttg

SEQ ID NO: 41643 - DNA, 22 bp, synthetic construct
  misc_feature 1..22: note = chemically synthesized
  source 1..22: mol_type = other DNA
caaccgttctatttgaatttgg

SEQ ID NO: 41644 - DNA, 22 bp, synthetic construct
  misc_feature 1..22: note = chemically synthesized
  source 1..22: mol_type = other DNA
tatttgaatttggcaaagaaaa

SEQ ID NO: 41645 - DNA, 22 bp, synthetic construct
  misc_feature 1..22: note = chemically synthesized
  source 1..22: mol_type = other DNA
tttgaatttggcaaagaaaata

SEQ ID NO: 41646 - DNA, 22 bp, synthetic construct
  misc_feature 1..22: note = chemically synthesized
  source 1..22: mol_type = other DNA
gaatttggcaaagaaaataaag

SEQ ID NO: 41647 - DNA, 22 bp, synthetic construct
  misc_feature 1..22: note = chemically synthesized
  source 1..22: mol_type = other DNA
aatttggcaaagaaaataaagc

SEQ ID NO: 41648 - DNA, 22 bp, synthetic construct
  misc_feature 1..22: note = chemically synthesized
  source 1..22: mol_type = other DNA
ggcaaagaaaataaagcagttt

SEQ ID NO: 41649 - DNA, 22 bp, synthetic construct
  misc_feature 1..22: note = chemically synthesized
  source 1..22: mol_type = other DNA
gcaaagaaaataaagcagtttt

SEQ ID NO: 41650 - DNA, 22 bp, synthetic construct
  misc_feature 1..22: note = chemically synthesized
  source 1..22: mol_type = other DNA
ttcacaaaagaataaacacaac

SEQ ID NO: 41651 - DNA, 22 bp, synthetic construct
  misc_feature 1..22: note = chemically synthesized
  source 1..22: mol_type = other DNA
tcacaaaagaataaacacaacc

SEQ ID NO: 41652 - DNA, 22 bp, synthetic construct
  misc_feature 1..22: note = chemically synthesized
  source 1..22: mol_type = other DNA
cacaaaagaataaacacaacca

SEQ ID NO: 41653 - DNA, 22 bp, synthetic construct
  misc_feature 1..22: note = chemically synthesized
  source 1..22: mol_type = other DNA
acaaaagaataaacacaaccag

SEQ ID NO: 41654 - DNA, 22 bp, synthetic construct
  misc_feature 1..22: note = chemically synthesized
  source 1..22: mol_type = other DNA
cactctcccaaattgtcaaaga

SEQ ID NO: 41655 - DNA, 22 bp, synthetic construct
  misc_feature 1..22: note = chemically synthesized
  source 1..22: mol_type = other DNA
actctcccaaattgtcaaagaa

SEQ ID NO: 41656 - DNA, 22 bp, synthetic construct
  misc_feature 1..22: note = chemically synthesized
  source 1..22: mol_type = other DNA
tcccaaattgtcaaagaagtat

SEQ ID NO: 41657 - DNA, 22 bp, synthetic construct
  misc_feature 1..22: note = chemically synthesized
  source 1..22: mol_type = other DNA
ccaaattgtcaaagaagtataa

SEQ ID NO: 41658 - DNA, 22 bp, synthetic construct
  misc_feature 1..22: note = chemically synthesized
  source 1..22: mol_type = other DNA
tcaaagaagtataaattagaaa

SEQ ID NO: 41659 - DNA, 22 bp, synthetic construct
  misc_feature 1..22: note = chemically synthesized
  source 1..22: mol_type = other DNA
gaaaatgaatcaggacaatttc

SEQ ID NO: 41660 - DNA, 22 bp, synthetic construct
  misc_feature 1..22: note = chemically synthesized
  source 1..22: mol_type = other DNA
caacctgttagattagctaata

SEQ ID NO: 41661 - DNA, 22 bp, synthetic construct
  misc_feature 1..22: note = chemically synthesized
  source 1..22: mol_type = other DNA
aacctgttagattagctaatat

SEQ ID NO: 41662 - DNA, 22 bp, synthetic construct
  misc_feature 1..22: note = chemically synthesized
  source 1..22: mol_type = other DNA
ttagattagctaatatttaaaa

SEQ ID NO: 41663 - DNA, 22 bp, synthetic construct
  misc_feature 1..22: note = chemically synthesized
  source 1..22: mol_type = other DNA
gattagctaatatttaaaaatt

SEQ ID NO: 41664 - DNA, 22 bp, synthetic construct
  misc_feature 1..22: note = chemically synthesized
  source 1..22: mol_type = other DNA
gctaatatttaaaaattgaaca

SEQ ID NO: 41665 - DNA, 22 bp, synthetic construct
  misc_feature 1..22: note = chemically synthesized
  source 1..22: mol_type = other DNA
atatttaaaaattgaacactca

SEQ ID NO: 41666 - DNA, 22 bp, synthetic construct
  misc_feature 1..22: note = chemically synthesized
  source 1..22: mol_type = other DNA
aaaaattgaacactcatacaag

SEQ ID NO: 41667 - DNA, 22 bp, synthetic construct
  misc_feature 1..22: note = chemically synthesized
  source 1..22: mol_type = other DNA
aaaattgaacactcatacaagt

SEQ ID NO: 41668 - DNA, 22 bp, synthetic construct
  misc_feature 1..22: note = chemically synthesized
  source 1..22: mol_type = other DNA
aacactcatacaagtgtggtga

SEQ ID NO: 41669 - DNA, 22 bp, synthetic construct
  misc_feature 1..22: note = chemically synthesized
  source 1..22: mol_type = other DNA
atacaagtgtggtgaagtgatt

SEQ ID NO: 41670 - DNA, 22 bp, synthetic construct
  misc_feature 1..22: note = chemically synthesized
  source 1..22: mol_type = other DNA
ttttctagtgacattttacact

SEQ ID NO: 41671 - DNA, 22 bp, synthetic construct
  misc_feature 1..22: note = chemically synthesized
  source 1..22: mol_type = other DNA
tctagtgacattttacactgtc

SEQ ID NO: 41672 - DNA, 22 bp, synthetic construct
  misc_feature 1..22: note = chemically synthesized
  source 1..22: mol_type = other DNA
ctagtgacattttacactgtca

SEQ ID NO: 41673 - DNA, 22 bp, synthetic construct
  misc_feature 1..22: note = chemically synthesized
  source 1..22: mol_type = other DNA
tagtgacattttacactgtcat

SEQ ID NO: 41674 - DNA, 22 bp, synthetic construct
  misc_feature 1..22: note = chemically synthesized
  source 1..22: mol_type = other DNA
gtgacattttacactgtcataa

SEQ ID NO: 41675 - DNA, 22 bp, synthetic construct
  misc_feature 1..22: note = chemically synthesized
  source 1..22: mol_type = other DNA
tacactgtcataaccttctaga

SEQ ID NO: 41676 - DNA, 22 bp, synthetic construct
  misc_feature 1..22: note = chemically synthesized
  source 1..22: mol_type = other DNA
acactgtcataaccttctagaa

SEQ ID NO: 41677 - DNA, 22 bp, synthetic construct
  misc_feature 1..22: note = chemically synthesized
  source 1..22: mol_type = other DNA
cactgtcataaccttctagaaa

SEQ ID NO: 41678 - DNA, 22 bp, synthetic construct
  misc_feature 1..22: note = chemically synthesized
  source 1..22: mol_type = other DNA
tcataaccttctagaaaataaa

SEQ ID NO: 41679 - DNA, 22 bp, synthetic construct
  misc_feature 1..22: note = chemically synthesized
  source 1..22: mol_type = other DNA
ctagaaaataaattggcagtgt

SEQ ID NO: 41680 - DNA, 22 bp, synthetic construct
  misc_feature 1..22: note = chemically synthesized
  source 1..22: mol_type = other DNA
tagaaaataaattggcagtgtt

SEQ ID NO: 41681 - DNA, 22 bp, synthetic construct
  misc_feature 1..22: note = chemically synthesized
  source 1..22: mol_type = other DNA
gaaaataaattggcagtgttat

SEQ ID NO: 41682 - DNA, 22 bp, synthetic construct
  misc_feature 1..22: note = chemically synthesized
  source 1..22: mol_type = other DNA
gcagtgttattgggagacagaa

SEQ ID NO: 41683 - DNA, 22 bp, synthetic construct
  misc_feature 1..22: note = chemically synthesized
  source 1..22: mol_type = other DNA
ttgggagacagaaatatgtcta

SEQ ID NO: 41684 - DNA, 22 bp, synthetic construct
  misc_feature 1..22: note = chemically synthesized
  source 1..22: mol_type = other DNA
ggagacagaaatatgtctatat

SEQ ID NO: 41685 - DNA, 22 bp, synthetic construct
  misc_feature 1..22: note = chemically synthesized
  source 1..22: mol_type = other DNA
tataatttatgggaacttaggc

SEQ ID NO: 41686 - DNA, 22 bp, synthetic construct
  misc_feature 1..22: note = chemically synthesized
  source 1..22: mol_type = other DNA
atgggaacttaggctcagaaaa

SEQ ID NO: 41687 - DNA, 22 bp, synthetic construct
  misc_feature 1..22: note = chemically synthesized
  source 1..22: mol_type = other DNA
tgggaacttaggctcagaaaat

SEQ ID NO: 41688 - DNA, 22 bp, synthetic construct
  misc_feature 1..22: note = chemically synthesized
  source 1..22: mol_type = other DNA
aggctcagaaaatattaaggaa

SEQ ID NO: 41689 - DNA, 22 bp, synthetic construct
  misc_feature 1..22: note = chemically synthesized
  source 1..22: mol_type = other DNA
ggctcagaaaatattaaggaat

SEQ ID NO: 41690 - DNA, 22 bp, synthetic construct
  misc_feature 1..22: note = chemically synthesized
  source 1..22: mol_type = other DNA
agaaaatattaaggaataagaa

SEQ ID NO: 41691 - DNA, 22 bp, synthetic construct
  misc_feature 1..22: note = chemically synthesized
  source 1..22: mol_type = other DNA
aggaataagaatgaactttatg

SEQ ID NO: 41692 - DNA, 22 bp, synthetic construct
  misc_feature 1..22: note = chemically synthesized
  source 1..22: mol_type = other DNA
tatgaacaaagatgtggagggt

SEQ ID NO: 41693 - DNA, 22 bp, synthetic construct
  misc_feature 1..22: note = chemically synthesized
  source 1..22: mol_type = other DNA
atgaacaaagatgtggagggtt

SEQ ID NO: 41694 - DNA, 22 bp, synthetic construct
  misc_feature 1..22: note = chemically synthesized
  source 1..22: mol_type = other DNA
tgaacaaagatgtggagggttg

SEQ ID NO: 41695 - DNA, 22 bp, synthetic construct
  misc_feature 1..22: note = chemically synthesized
  source 1..22: mol_type = other DNA
gaagcaagaggggggccaacgc

SEQ ID NO: 41696 - DNA, 22 bp, synthetic construct
  misc_feature 1..22: note = chemically synthesized
  source 1..22: mol_type = other DNA
gggcagtgactccgcagaccca

SEQ ID NO: 41697 - DNA, 22 bp, synthetic construct
  misc_feature 1..22: note = chemically synthesized
  source 1..22: mol_type = other DNA
ggcagtgactccgcagacccag

SEQ ID NO: 41698 - DNA, 22 bp, synthetic construct
  misc_feature 1..22: note = chemically synthesized
  source 1..22: mol_type = other DNA
cgcagacccaggctcaggttga

SEQ ID NO: 41699 - DNA, 22 bp, synthetic construct
  misc_feature 1..22: note = chemically synthesized
  source 1..22: mol_type = other DNA
aggttgaactagacaacctcct

SEQ ID NO: 41700 - DNA, 22 bp, synthetic construct
  misc_feature 1..22: note = chemically synthesized
  source 1..22: mol_type = other DNA
aactagacaacctccttacacc

SEQ ID NO: 41701 - DNA, 22 bp, synthetic construct
  misc_feature 1..22: note = chemically synthesized
  source 1..22: mol_type = other DNA
gacaacctccttacacctcagt

SEQ ID NO: 41702 - DNA, 22 bp, synthetic construct
  misc_feature 1..22: note = chemically synthesized
  source 1..22: mol_type = other DNA
cttacacctcagtttccttaac

SEQ ID NO: 41703 - DNA, 22 bp, synthetic construct
  misc_feature 1..22: note = chemically synthesized
  source 1..22: mol_type = other DNA
acacctcagtttccttaactgt

SEQ ID NO: 41704 - DNA, 22 bp, synthetic construct
  misc_feature 1..22: note = chemically synthesized
  source 1..22: mol_type = other DNA
cacctcagtttccttaactgta

SEQ ID NO: 41705 - DNA, 22 bp, synthetic construct
  misc_feature 1..22: note = chemically synthesized
  source 1..22: mol_type = other DNA
agtttccttaactgtagagcag

SEQ ID NO: 41706 - DNA, 22 bp, synthetic construct
  misc_feature 1..22: note = chemically synthesized
  source 1..22: mol_type = other DNA
ccttaactgtagagcaggagtg

SEQ ID NO: 41707 - DNA, 22 bp, synthetic construct
  misc_feature 1..22: note = chemically synthesized
  source 1..22: mol_type = other DNA
cttaactgtagagcaggagtga

SEQ ID NO: 41708 - DNA, 22 bp, synthetic construct
  misc_feature 1..22: note = chemically synthesized
  source 1..22: mol_type = other DNA
aactgtagagcaggagtgatgg

SEQ ID NO: 41709 - DNA, 22 bp, synthetic construct
  misc_feature 1..22: note = chemically synthesized
  source 1..22: mol_type = other DNA
actgtagagcaggagtgatgga

SEQ ID NO: 41710 - DNA, 22 bp, synthetic construct
  misc_feature 1..22: note = chemically synthesized
  source 1..22: mol_type = other DNA
tagagcaggagtgatggaactg

SEQ ID NO: 41711 - DNA, 22 bp, synthetic construct
  misc_feature 1..22: note = chemically synthesized
  source 1..22: mol_type = other DNA
cctgtttcataggactgttgtg

SEQ ID NO: 41712 - DNA, 22 bp, synthetic construct
  misc_feature 1..22: note = chemically synthesized
  source 1..22: mol_type = other DNA
tttcataggactgttgtgagga

SEQ ID NO: 41713 - DNA, 22 bp, synthetic construct
  misc_feature 1..22: note = chemically synthesized
  source 1..22: mol_type = other DNA
cataggactgttgtgaggatga

SEQ ID NO: 41714 - DNA, 22 bp, synthetic construct
  misc_feature 1..22: note = chemically synthesized
  source 1..22: mol_type = other DNA
ataggactgttgtgaggatgaa

SEQ ID NO: 41715 - DNA, 22 bp, synthetic construct
  misc_feature 1..22: note = chemically synthesized
  source 1..22: mol_type = other DNA
ttgtgaggatgaagtgagatac

SEQ ID NO: 41716 - DNA, 22 bp, synthetic construct
  misc_feature 1..22: note = chemically synthesized
  source 1..22: mol_type = other DNA
tgaggatgaagtgagatacacc

SEQ ID NO: 41717 - DNA, 22 bp, synthetic construct
  misc_feature 1..22: note = chemically synthesized
  source 1..22: mol_type = other DNA
taagcttgtgcctggaaaggat

SEQ ID NO: 41718 - DNA, 22 bp, synthetic construct
  misc_feature 1..22: note = chemically synthesized
  source 1..22: mol_type = other DNA
gtgcctggaaaggataatgctt

SEQ ID NO: 41719 - DNA, 22 bp, synthetic construct
  misc_feature 1..22: note = chemically synthesized
  source 1..22: mol_type = other DNA
tgcctggaaaggataatgctta

SEQ ID NO: 41720 - DNA, 22 bp, synthetic construct
  misc_feature 1..22: note = chemically synthesized
  source 1..22: mol_type = other DNA
gaaaggataatgcttagtaaat

SEQ ID NO: 41721 - DNA, 22 bp, synthetic construct
  misc_feature 1..22: note = chemically synthesized
  source 1..22: mol_type = other DNA
agtaaatgatgactattctttt

SEQ ID NO: 41722 - DNA, 22 bp, synthetic construct
  misc_feature 1..22: note = chemically synthesized
  source 1..22: mol_type = other DNA
gtaaatgatgactattcttttt

SEQ ID NO: 41723 - DNA, 22 bp, synthetic construct
  misc_feature 1..22: note = chemically synthesized
  source 1..22: mol_type = other DNA
ttcttttttattgcaataaaat

SEQ ID NO: 41724 - DNA, 22 bp, synthetic construct
  misc_feature 1..22: note = chemically synthesized
  source 1..22: mol_type = other DNA
ttttttattgcaataaaatgta

SEQ ID NO: 41725 - DNA, 22 bp, synthetic construct
  misc_feature 1..22: note = chemically synthesized
  source 1..22: mol_type = other DNA
ttttattgcaataaaatgtaca

SEQ ID NO: 41726 - DNA, 22 bp, synthetic construct
  misc_feature 1..22: note = chemically synthesized
  source 1..22: mol_type = other DNA
tttattgcaataaaatgtacac

SEQ ID NO: 41727 - DNA, 22 bp, synthetic construct
  misc_feature 1..22: note = chemically synthesized
  source 1..22: mol_type = other DNA
ttattgcaataaaatgtacaca

SEQ ID NO: 41728 - DNA, 22 bp, synthetic construct
  misc_feature 1..22: note = chemically synthesized
  source 1..22: mol_type = other DNA
tattgcaataaaatgtacacag

SEQ ID NO: 41729 - DNA, 22 bp, synthetic construct
  misc_feature 1..22: note = chemically synthesized
  source 1..22: mol_type = other DNA
attgcaataaaatgtacacagc

SEQ ID NO: 41730 - DNA, 22 bp, synthetic construct
  misc_feature 1..22: note = chemically synthesized
  source 1..22: mol_type = other DNA
ttgcaataaaatgtacacagcg

SEQ ID NO: 41731 - DNA, 22 bp, synthetic construct
  misc_feature 1..22: note = chemically synthesized
  source 1..22: mol_type = other DNA
caataaaatgtacacagcgtaa

SEQ ID NO: 41732 - DNA, 22 bp, synthetic construct
  misc_feature 1..22: note = chemically synthesized
  source 1..22: mol_type = other DNA
ctattttaaccatttttgcagg

SEQ ID NO: 41733 - DNA, 22 bp, synthetic construct
  misc_feature 1..22: note = chemically synthesized
  source 1..22: mol_type = other DNA
ttttaaccatttttgcagggta

SEQ ID NO: 41734 - DNA, 22 bp, synthetic construct
  misc_feature 1..22: note = chemically synthesized
  source 1..22: mol_type = other DNA
taaccatttttgcagggtacca

SEQ ID NO: 41735 - DNA, 22 bp, synthetic construct
  misc_feature 1..22: note = chemically synthesized
  source 1..22: mol_type = other DNA
aaccatttttgcagggtaccac

SEQ ID NO: 41736 - DNA, 22 bp, synthetic construct
  misc_feature 1..22: note = chemically synthesized
  source 1..22: mol_type = other DNA
accatttttgcagggtaccacc

SEQ ID NO: 41737 - DNA, 22 bp, synthetic construct
  misc_feature 1..22: note = chemically synthesized
  source 1..22: mol_type = other DNA
ttgcagggtaccaccaagtggc

SEQ ID NO: 41738 - DNA, 22 bp, synthetic construct
  misc_feature 1..22: note = chemically synthesized
  source 1..22: mol_type = other DNA
tgcagggtaccaccaagtggca

SEQ ID NO: 41739 - DNA, 22 bp, synthetic construct
  misc_feature 1..22: note = chemically synthesized
  source 1..22: mol_type = other DNA
gcagggtaccaccaagtggcat

SEQ ID NO: 41740 - DNA, 22 bp, synthetic construct
  misc_feature 1..22: note = chemically synthesized
  source 1..22: mol_type = other DNA
cagggtaccaccaagtggcatt

SEQ ID NO: 41741 - DNA, 22 bp, synthetic construct
  misc_feature 1..22: note = chemically synthesized
  source 1..22: mol_type = other DNA
agtacattcacagtggtgtgca

SEQ ID NO: 41742 - DNA, 22 bp, synthetic construct
  misc_feature 1..22: note = chemically synthesized
  source 1..22: mol_type = other DNA
gtacattcacagtggtgtgcaa

SEQ ID NO: 41743 - DNA, 22 bp, synthetic construct
  misc_feature 1..22: note = chemically synthesized
  source 1..22: mol_type = other DNA
acagtggtgtgcaaccatcatc

SEQ ID NO: 41744 - DNA, 22 bp, synthetic construct
  misc_feature 1..22: note = chemically synthesized
  source 1..22: mol_type = other DNA
ccagaatattttcctcatcccc

SEQ ID NO: 41745 - DNA, 22 bp, synthetic construct
  misc_feature 1..22: note = chemically synthesized
  source 1..22: mol_type = other DNA
cagaatattttcctcatcccca

SEQ ID NO: 41746 - DNA, 22 bp, synthetic construct
  misc_feature 1..22: note = chemically synthesized
  source 1..22: mol_type = other DNA
tcctcatccccaaaggaaacct

SEQ ID NO: 41747 - DNA, 22 bp, synthetic construct
  misc_feature 1..22: note = chemically synthesized
  source 1..22: mol_type = other DNA
cctcatccccaaaggaaacctc

SEQ ID NO: 41748 - DNA, 22 bp, synthetic construct
  misc_feature 1..22: note = chemically synthesized
  source 1..22: mol_type = other DNA
ctcatccccaaaggaaacctca

SEQ ID NO: 41749 - DNA, 22 bp, synthetic construct
  misc_feature 1..22: note = chemically synthesized
  source 1..22: mol_type = other DNA
atccccaaaggaaacctcatgc

SEQ ID NO: 41750 - DNA, 22 bp, synthetic construct
  misc_feature 1..22: note = chemically synthesized
  source 1..22: mol_type = other DNA
atgctcattaatcagtagctct

SEQ ID NO: 41751 - DNA, 22 bp, synthetic construct
  misc_feature 1..22: note = chemically synthesized
  source 1..22: mol_type = other DNA
attaatcagtagctctccttta

SEQ ID NO: 41752 - DNA, 22 bp, synthetic construct
  misc_feature 1..22: note = chemically synthesized
  source 1..22: mol_type = other DNA
atcagtagctctcctttaaaat

SEQ ID NO: 41753 - DNA, 22 bp, synthetic construct
  misc_feature 1..22: note = chemically synthesized
  source 1..22: mol_type = other DNA
tcctttaaaatattagttatga

SEQ ID NO: 41754 - DNA, 22 bp, synthetic construct
  misc_feature 1..22: note = chemically synthesized
  source 1..22: mol_type = other DNA
ctttaaaatattagttatgaag

SEQ ID NO: 41755 - DNA, 22 bp, synthetic construct
  misc_feature 1..22: note = chemically synthesized
  source 1..22: mol_type = other DNA
taaaatattagttatgaagatc

SEQ ID NO: 41756 - DNA, 22 bp, synthetic construct
  misc_feature 1..22: note = chemically synthesized
  source 1..22: mol_type = other DNA
aaaatattagttatgaagatca

SEQ ID NO: 41757 - DNA, 22 bp, synthetic construct
  misc_feature 1..22: note = chemically synthesized
  source 1..22: mol_type = other DNA
aaatattagttatgaagatcat

SEQ ID NO: 41758 - DNA, 22 bp, synthetic construct
  misc_feature 1..22: note = chemically synthesized
  source 1..22: mol_type = other DNA
gttatgaagatcatagcactat

SEQ ID NO: 41759 - DNA, 22 bp, synthetic construct
  misc_feature 1..22: note = chemically synthesized
  source 1..22: mol_type = other DNA
tgaagatcatagcactatacaa

SEQ ID NO: 41760 - DNA, 22 bp, synthetic construct
  misc_feature 1..22: note = chemically synthesized
  source 1..22: mol_type = other DNA
tacaaaactcattatgtaatgt

SEQ ID NO: 41761 - DNA, 22 bp, synthetic construct
  misc_feature 1..22: note = chemically synthesized
  source 1..22: mol_type = other DNA
attatgtaatgttgagtgaaaa

SEQ ID NO: 41762 - DNA, 22 bp, synthetic construct
  misc_feature 1..22: note = chemically synthesized
  source 1..22: mol_type = other DNA
tgtaatgttgagtgaaaaaatc

SEQ ID NO: 41763 - DNA, 22 bp, synthetic construct
  misc_feature 1..22: note = chemically synthesized
  source 1..22: mol_type = other DNA
agtgaaaaaatcagggtgtgaa

SEQ ID NO: 41764 - DNA, 22 bp, synthetic construct
  misc_feature 1..22: note = chemically synthesized
  source 1..22: mol_type = other DNA
tgtgatatgatgtaattagtga

SEQ ID NO: 41765 - DNA, 22 bp, synthetic construct
  misc_feature 1..22: note = chemically synthesized
  source 1..22: mol_type = other DNA
gtgatatgatgtaattagtgaa

SEQ ID NO: 41766 - DNA, 22 bp, synthetic construct
  misc_feature 1..22: note = chemically synthesized
  source 1..22: mol_type = other DNA
tgatatgatgtaattagtgaaa

SEQ ID NO: 41767 - DNA, 22 bp, synthetic construct
  misc_feature 1..22: note = chemically synthesized
  source 1..22: mol_type = other DNA
gtgaaagaagcatacaaaaagt

SEQ ID NO: 41768 - DNA, 22 bp, synthetic construct
  misc_feature 1..22: note = chemically synthesized
  source 1..22: mol_type = other DNA
aaaatataaaaacaatagcaat

SEQ ID NO: 41769 - DNA, 22 bp, synthetic construct
  misc_feature 1..22: note = chemically synthesized
  source 1..22: mol_type = other DNA
catttctcagactctacattta

SEQ ID NO: 41770 - DNA, 22 bp, synthetic construct
  misc_feature 1..22: note = chemically synthesized
  source 1..22: mol_type = other DNA
ctcagactctacatttaaacat

SEQ ID NO: 41771 - DNA, 22 bp, synthetic construct
  misc_feature 1..22: note = chemically synthesized
  source 1..22: mol_type = other DNA
tcagactctacatttaaacatt

SEQ ID NO: 41772 - DNA, 22 bp, synthetic construct
  misc_feature 1..22: note = chemically synthesized
  source 1..22: mol_type = other DNA
agactctacatttaaacattat

SEQ ID NO: 41773 - DNA, 22 bp, synthetic construct
  misc_feature 1..22: note = chemically synthesized
  source 1..22: mol_type = other DNA
tacatttaaacattattcttta

SEQ ID NO: 41774 - DNA, 22 bp, synthetic construct
  misc_feature 1..22: note = chemically synthesized
  source 1..22: mol_type = other DNA
catttaaacattattctttatg

SEQ ID NO: 41775 - DNA, 22 bp, synthetic construct
  misc_feature 1..22: note = chemically synthesized
  source 1..22: mol_type = other DNA
aaacattattctttatggtttt

SEQ ID NO: 41776 - DNA, 22 bp, synthetic construct
  misc_feature 1..22: note = chemically synthesized
  source 1..22: mol_type = other DNA
aacattattctttatggtttta

SEQ ID NO: 41777 - DNA, 22 bp, synthetic construct
  misc_feature 1..22: note = chemically synthesized
  source 1..22: mol_type = other DNA
ttctttatggttttaaaagcaa

SEQ ID NO: 41778 - DNA, 22 bp, synthetic construct
  misc_feature 1..22: note = chemically synthesized
  source 1..22: mol_type = other DNA
tttatggttttaaaagcaaaga

SEQ ID NO: 41779 - DNA, 22 bp, synthetic construct
  misc_feature 1..22: note = chemically synthesized
  source 1..22: mol_type = other DNA
tatggttttaaaagcaaagaaa

SEQ ID NO: 41780 - DNA, 22 bp, synthetic construct
  misc_feature 1..22: note = chemically synthesized
  source 1..22: mol_type = other DNA
atggttttaaaagcaaagaaaa

SEQ ID NO: 41781 - DNA, 22 bp, synthetic construct
  misc_feature 1..22: note = chemically synthesized
  source 1..22: mol_type = other DNA
tggttttaaaagcaaagaaaaa

SEQ ID NO: 41782 - DNA, 22 bp, synthetic construct
  misc_feature 1..22: note = chemically synthesized
  source 1..22: mol_type = other DNA
taaaagcaaagaaaaaggtaaa

SEQ ID NO: 41783 - DNA, 22 bp, synthetic construct
  misc_feature 1..22: note = chemically synthesized
  source 1..22: mol_type = other DNA
aaaagcaaagaaaaaggtaaag

SEQ ID NO: 41784 - DNA, 22 bp, synthetic construct
  misc_feature 1..22: note = chemically synthesized
  source 1..22: mol_type = other DNA
aaagcaaagaaaaaggtaaaga

SEQ ID NO: 41785 - DNA, 22 bp, synthetic construct
  misc_feature 1..22: note = chemically synthesized
  source 1..22: mol_type = other DNA
agattgttaaatccaggttttt

SEQ ID NO: 41786 - DNA, 22 bp, synthetic construct
  misc_feature 1..22: note = chemically synthesized
  source 1..22: mol_type = other DNA
ttaaatccaggtttttggaaca

SEQ ID NO: 41787 - DNA, 22 bp, synthetic construct
  misc_feature 1..22: note = chemically synthesized
  source 1..22: mol_type = other DNA
aatccaggtttttggaacatag

SEQ ID NO: 41788 - DNA, 22 bp, synthetic construct
  misc_feature 1..22: note = chemically synthesized
  source 1..22: mol_type = other DNA
ttggaacatagactcttatatg

SEQ ID NO: 41789 - DNA, 22 bp, synthetic construct
  misc_feature 1..22: note = chemically synthesized
  source 1..22: mol_type = other DNA
tggaacatagactcttatatga

SEQ ID NO: 41790 - DNA, 22 bp, synthetic construct
  misc_feature 1..22: note = chemically synthesized
  source 1..22: mol_type = other DNA
ggaacatagactcttatatgac

SEQ ID NO: 41791 - DNA, 22 bp, synthetic construct
  misc_feature 1..22: note = chemically synthesized
  source 1..22: mol_type = other DNA
gaacatagactcttatatgacg

SEQ ID NO: 41792 - DNA, 22 bp, synthetic construct
  misc_feature 1..22: note = chemically synthesized
  source 1..22: mol_type = other DNA
ttatatgacgtttacactctcc

SEQ ID NO: 41793 - DNA, 22 bp, synthetic construct
  misc_feature 1..22: note = chemically synthesized
  source 1..22: mol_type = other DNA
atatgacgtttacactctccag

SEQ ID NO: 41794 - DNA, 22 bp, synthetic construct
  misc_feature 1..22: note = chemically synthesized
  source 1..22: mol_type = other DNA
tatgacgtttacactctccagg

SEQ ID NO: 41795 - DNA, 22 bp, synthetic construct
  misc_feature 1..22: note = chemically synthesized
  source 1..22: mol_type = other DNA
acactctccagggttcagagag

SEQ ID NO: 41796 - DNA, 22 bp, synthetic construct
  misc_feature 1..22: note = chemically synthesized
  source 1..22: mol_type = other DNA
cactctccagggttcagagagt

SEQ ID NO: 41797 - DNA, 22 bp, synthetic construct
  misc_feature 1..22: note = chemically synthesized
  source 1..22: mol_type = other DNA
tccagggttcagagagtctggc

SEQ ID NO: 41798 - DNA, 22 bp, synthetic construct
  misc_feature 1..22: note = chemically synthesized
  source 1..22: mol_type = other DNA
cagggttcagagagtctggcag

SEQ ID NO: 41799 - DNA, 22 bp, synthetic construct
  misc_feature 1..22: note = chemically synthesized
  source 1..22: mol_type = other DNA
agagagtctggcagcattggga

SEQ ID NO: 41800 - DNA, 22 bp, synthetic construct
  misc_feature 1..22: note = chemically synthesized
  source 1..22: mol_type = other DNA
gcagcattgggagctgccttgt

SEQ ID NO: 41801 - DNA, 22 bp, synthetic construct
  misc_feature 1..22: note = chemically synthesized
  source 1..22: mol_type = other DNA
ggagctgccttgtgttctacag

SEQ ID NO: 41802 - DNA, 22 bp, synthetic construct
  misc_feature 1..22: note = chemically synthesized
  source 1..22: mol_type = other DNA
ccttgtgttctacagcctcacg

SEQ ID NO: 41803 - DNA, 22 bp, synthetic construct
  misc_feature 1..22: note = chemically synthesized
  source 1..22: mol_type = other DNA
gtgttctacagcctcacggaca

SEQ ID NO: 41804 - DNA, 22 bp, synthetic construct
  misc_feature 1..22: note = chemically synthesized
  source 1..22: mol_type = other DNA
tgttctacagcctcacggacag

SEQ ID NO: 41805 - DNA, 22 bp, synthetic construct
  misc_feature 1..22: note = chemically synthesized
  source 1..22: mol_type = other DNA
tacagcctcacggacagacagg

SEQ ID NO: 41806 - DNA, 22 bp, synthetic construct
  misc_feature 1..22: note = chemically synthesized
  source 1..22: mol_type = other DNA
cagcctcacggacagacaggag

SEQ ID NO: 41807 - DNA, 22 bp, synthetic construct
  misc_feature 1..22: note = chemically synthesized
  source 1..22: mol_type = other DNA
acggacagacaggaggtccatc

SEQ ID NO: 41808 - DNA, 22 bp, synthetic construct
  misc_feature 1..22: note = chemically synthesized
  source 1..22: mol_type = other DNA
ctctgttcttctggagtttcct

SEQ ID NO: 41809 - DNA, 22 bp, synthetic construct
  misc_feature 1..22: note = chemically synthesized
  source 1..22: mol_type = other DNA
tgttcttctggagtttccttgt

SEQ ID NO: 41810 - DNA, 22 bp, synthetic construct
  misc_feature 1..22: note = chemically synthesized
  source 1..22: mol_type = other DNA
ttcttctggagtttccttgtga

SEQ ID NO: 41811 - DNA, 22 bp, synthetic construct
  misc_feature 1..22: note = chemically synthesized
  source 1..22: mol_type = other DNA
ttctggagtttccttgtgaaca

SEQ ID NO: 41812 - DNA, 22 bp, synthetic construct
  misc_feature 1..22: note = chemically synthesized
  source 1..22: mol_type = other DNA
ctggagtttccttgtgaacatg

SEQ ID NO: 41813 - DNA, 22 bp, synthetic construct
  misc_feature 1..22: note = chemically synthesized
  source 1..22: mol_type = other DNA
tggagtttccttgtgaacatgt

SEQ ID NO: 41814 - DNA, 22 bp, synthetic construct
  misc_feature 1..22: note = chemically synthesized
  source 1..22: mol_type = other DNA
gagtttccttgtgaacatgttg

SEQ ID NO: 41815 - DNA, 22 bp, synthetic construct
  misc_feature 1..22: note = chemically synthesized
  source 1..22: mol_type = other DNA
ccttgtgaacatgttgtggacg

SEQ ID NO: 41816 - DNA, 22 bp, synthetic construct
  misc_feature 1..22: note = chemically synthesized
  source 1..22: mol_type = other DNA
cttgtgaacatgttgtggacgt

SEQ ID NO: 41817 - DNA, 22 bp, synthetic construct
  misc_feature 1..22: note = chemically synthesized
  source 1..22: mol_type = other DNA
gtgaacatgttgtggacgtagt

SEQ ID NO: 41818 - DNA, 22 bp, synthetic construct
  misc_feature 1..22: note = chemically synthesized
  source 1..22: mol_type = other DNA
tgaacatgttgtggacgtagtt

SEQ ID NO: 41819 - DNA, 22 bp, synthetic construct
  misc_feature 1..22: note = chemically synthesized
  source 1..22: mol_type = other DNA
tggacgtagttaccatttcttt

SEQ ID NO: 41820 - DNA, 22 bp, synthetic construct
  misc_feature 1..22: note = chemically synthesized
  source 1..22: mol_type = other DNA
ccatttctttcatctttttaaa

SEQ ID NO: 41821 - DNA, 22 bp, synthetic construct
  misc_feature 1..22: note = chemically synthesized
  source 1..22: mol_type = other DNA
ctttcatctttttaaacacagg

SEQ ID NO: 41822 - DNA, 22 bp, synthetic construct
  misc_feature 1..22: note = chemically synthesized
  source 1..22: mol_type = other DNA
tttcatctttttaaacacaggt

SEQ ID NO: 41823 - DNA, 22 bp, synthetic construct
  misc_feature 1..22: note = chemically synthesized
  source 1..22: mol_type = other DNA
tcatctttttaaacacaggtac

SEQ ID NO: 41824 - DNA, 22 bp, synthetic construct
  misc_feature 1..22: note = chemically synthesized
  source 1..22: mol_type = other DNA
catctttttaaacacaggtacc

SEQ ID NO: 41825 - DNA, 22 bp, synthetic construct
  misc_feature 1..22: note = chemically synthesized
  source 1..22: mol_type = other DNA
atctttttaaacacaggtacct

SEQ ID NO: 41826 - DNA, 22 bp, synthetic construct
  misc_feature 1..22: note = chemically synthesized
  source 1..22: mol_type = other DNA
tttaaacacaggtacctttggg

SEQ ID NO: 41827 - DNA, 22 bp, synthetic construct
  misc_feature 1..22: note = chemically synthesized
  source 1..22: mol_type = other DNA
ttaaacacaggtacctttgggg

SEQ ID NO: 41828 - DNA, 22 bp, synthetic construct
  misc_feature 1..22: note = chemically synthesized
  source 1..22: mol_type = other DNA
taaacacaggtacctttggggc

SEQ ID NO: 41829 - DNA, 22 bp, synthetic construct
  misc_feature 1..22: note = chemically synthesized
  source 1..22: mol_type = other DNA
aaacacaggtacctttggggct

SEQ ID NO: 41830 - DNA, 22 bp, synthetic construct
  misc_feature 1..22: note = chemically synthesized
  source 1..22: mol_type = other DNA
aacacaggtacctttggggctg

SEQ ID NO: 41831 - DNA, 22 bp, synthetic construct
  misc_feature 1..22: note = chemically synthesized
  source 1..22: mol_type = other DNA
tggggctggctttctcaaggaa

SEQ ID NO: 41832 - DNA, 22 bp, synthetic construct
  misc_feature 1..22: note = chemically synthesized
  source 1..22: mol_type = other DNA
ggggctggctttctcaaggaag

SEQ ID NO: 41833 - DNA, 22 bp, synthetic construct
  misc_feature 1..22: note = chemically synthesized
  source 1..22: mol_type = other DNA
gggctggctttctcaaggaagc

SEQ ID NO: 41834 - DNA, 22 bp, synthetic construct
  misc_feature 1..22: note = chemically synthesized
  source 1..22: mol_type = other DNA
gctttctcaaggaagcccagct

SEQ ID NO: 41835 - DNA, 22 bp, synthetic construct
  misc_feature 1..22: note = chemically synthesized
  source 1..22: mol_type = other DNA
tctcaaggaagcccagctccct

SEQ ID NO: 41836 - DNA, 22 bp, synthetic construct
  misc_feature 1..22: note = chemically synthesized
  source 1..22: mol_type = other DNA
ctcaaggaagcccagctccctg

SEQ ID NO: 41837 - DNA, 22 bp, synthetic construct
  misc_feature 1..22: note = chemically synthesized
  source 1..22: mol_type = other DNA
tcaaggaagcccagctccctgt

SEQ ID NO: 41838 - DNA, 22 bp, synthetic construct
  misc_feature 1..22: note = chemically synthesized
  source 1..22: mol_type = other DNA
aaggaagcccagctccctgtga

SEQ ID NO: 41839 - DNA, 22 bp, synthetic construct
  misc_feature 1..22: note = chemically synthesized
  source 1..22: mol_type = other DNA
cctgtgattgagaatgaagtgt

SEQ ID NO: 41840 - DNA, 22 bp, synthetic construct
  misc_feature 1..22: note = chemically synthesized
  source 1..22: mol_type = other DNA
tgattgagaatgaagtgtgcaa

SEQ ID NO: 41841 - DNA, 22 bp, synthetic construct
  misc_feature 1..22: note = chemically synthesized
  source 1..22: mol_type = other DNA
agaatgaagtgtgcaatcgcta

SEQ ID NO: 41842 - DNA, 22 bp, synthetic construct
  misc_feature 1..22: note = chemically synthesized
  source 1..22: mol_type = other DNA
tgagtttctgaatggaagagtc

SEQ ID NO: 41843 - DNA, 22 bp, synthetic construct
  misc_feature 1..22: note = chemically synthesized
  source 1..22: mol_type = other DNA
ctgaatggaagagtcaaatcca

SEQ ID NO: 41844 - DNA, 22 bp, synthetic construct
  misc_feature 1..22: note = chemically synthesized
  source 1..22: mol_type = other DNA
tgaatggaagagtcaaatccac

SEQ ID NO: 41845 - DNA, 22 bp, synthetic construct
  misc_feature 1..22: note = chemically synthesized
  source 1..22: mol_type = other DNA
aatggaagagtcaaatccactg

SEQ ID NO: 41846 - DNA, 22 bp, synthetic construct
  misc_feature 1..22: note = chemically synthesized
  source 1..22: mol_type = other DNA
agctctgtgctgggcatttggc

SEQ ID NO: 41847 - DNA, 22 bp, synthetic construct
  misc_feature 1..22: note = chemically synthesized
  source 1..22: mol_type = other DNA
tgtgctgggcatttggctggag

SEQ ID NO: 41848 - DNA, 22 bp, synthetic construct
  misc_feature 1..22: note = chemically synthesized
  source 1..22: mol_type = other DNA
tgctgggcatttggctggaggc

SEQ ID NO: 41849 - DNA, 22 bp, synthetic construct
  misc_feature 1..22: note = chemically synthesized
  source 1..22: mol_type = other DNA
ggcatttggctggaggcattga

SEQ ID NO: 41850 - DNA, 22 bp, synthetic construct
  misc_feature 1..22: note = chemically synthesized
  source 1..22: mol_type = other DNA
ggctggaggcattgacagttgc

SEQ ID NO: 41851 - DNA, 22 bp, synthetic construct
  misc_feature 1..22: note = chemically synthesized
  source 1..22: mol_type = other DNA
gctggaggcattgacagttgca

SEQ ID NO: 41852 - DNA, 22 bp, synthetic construct
  misc_feature 1..22: note = chemically synthesized
  source 1..22: mol_type = other DNA
gaggcattgacagttgcaaggt

SEQ ID NO: 41853 - DNA, 22 bp, synthetic construct
  misc_feature 1..22: note = chemically synthesized
  source 1..22: mol_type = other DNA
acagttgcaaggtaagaaaaga

SEQ ID NO: 41854 - DNA, 22 bp, synthetic construct
  misc_feature 1..22: note = chemically synthesized
  source 1..22: mol_type = other DNA
caaggtaagaaaagatcaagag

SEQ ID NO: 41855 - DNA, 22 bp, synthetic construct
  misc_feature 1..22: note = chemically synthesized
  source 1..22: mol_type = other DNA
gtcttgtgctctcctgtctcag

SEQ ID NO: 41856 - DNA, 22 bp, synthetic construct
  misc_feature 1..22: note = chemically synthesized
  source 1..22: mol_type = other DNA
gtgctctcctgtctcagtctca

SEQ ID NO: 41857 - DNA, 22 bp, synthetic construct
  misc_feature 1..22: note = chemically synthesized
  source 1..22: mol_type = other DNA
tgctctcctgtctcagtctcag

SEQ ID NO: 41858 - DNA, 22 bp, synthetic construct
  misc_feature 1..22: note = chemically synthesized
  source 1..22: mol_type = other DNA
tcctgtctcagtctcagtccct

SEQ ID NO: 41859 - DNA, 22 bp, synthetic construct
  misc_feature 1..22: note = chemically synthesized
  source 1..22: mol_type = other DNA
ctgtctcagtctcagtccctta

SEQ ID NO: 41860 - DNA, 22 bp, synthetic construct
  misc_feature 1..22: note = chemically synthesized
  source 1..22: mol_type = other DNA
tctcagtctcagtcccttagac

SEQ ID NO: 41861 - DNA, 22 bp, synthetic construct
  misc_feature 1..22: note = chemically synthesized
  source 1..22: mol_type = other DNA
agtctcagtcccttagacttga

SEQ ID NO: 41862 - DNA, 22 bp, synthetic construct
  misc_feature 1..22: note = chemically synthesized
  source 1..22: mol_type = other DNA
agtcccttagacttgagtccca

SEQ ID NO: 41863 - DNA, 22 bp, synthetic construct
  misc_feature 1..22: note = chemically synthesized
  source 1..22: mol_type = other DNA
agacttgagtcccaaagtagcg

SEQ ID NO: 41864 - DNA, 22 bp, synthetic construct
  misc_feature 1..22: note = chemically synthesized
  source 1..22: mol_type = other DNA
gacttgagtcccaaagtagcga

SEQ ID NO: 41865 - DNA, 22 bp, synthetic construct
  misc_feature 1..22: note = chemically synthesized
  source 1..22: mol_type = other DNA
gagtcccaaagtagcgaattca

SEQ ID NO: 41866 - DNA, 22 bp, synthetic construct
  misc_feature 1..22: note = chemically synthesized
  source 1..22: mol_type = other DNA
agtcccaaagtagcgaattcaa

SEQ ID NO: 41867 - DNA, 22 bp, synthetic construct
  misc_feature 1..22: note = chemically synthesized
  source 1..22: mol_type = other DNA
aagtaggatttaatcaatggaa

SEQ ID NO: 41868 - DNA, 22 bp, synthetic construct
  misc_feature 1..22: note = chemically synthesized
  source 1..22: mol_type = other DNA
aatcaatggaagaccccagtct

SEQ ID NO: 41869 - DNA, 22 bp, synthetic construct
  misc_feature 1..22: note = chemically synthesized
  source 1..22: mol_type = other DNA
atcaatggaagaccccagtcta

SEQ ID NO: 41870 - DNA, 22 bp, synthetic construct
  misc_feature 1..22: note = chemically synthesized
  source 1..22: mol_type = other DNA
agtgttgctcagaaactcccta

SEQ ID NO: 41871 - DNA, 22 bp, synthetic construct
  misc_feature 1..22: note = chemically synthesized
  source 1..22: mol_type = other DNA
ctcagaaactccctagatctgt

SEQ ID NO: 41872 - DNA, 22 bp, synthetic construct
  misc_feature 1..22: note = chemically synthesized
  source 1..22: mol_type = other DNA
agaaactccctagatctgtccc

SEQ ID NO: 41873 - DNA, 22 bp, synthetic construct
  misc_feature 1..22: note = chemically synthesized
  source 1..22: mol_type = other DNA
cctagatctgtcccaaatgtat

SEQ ID NO: 41874 - DNA, 22 bp, synthetic construct
  misc_feature 1..22: note = chemically synthesized
  source 1..22: mol_type = other DNA
gatctgtcccaaatgtatattc

SEQ ID NO: 41875 - DNA, 22 bp, synthetic construct
  misc_feature 1..22: note = chemically synthesized
  source 1..22: mol_type = other DNA
tcccaaatgtatattcagatca

SEQ ID NO: 41876 - DNA, 22 bp, synthetic construct
  misc_feature 1..22: note = chemically synthesized
  source 1..22: mol_type = other DNA
agatcatccaaggggacttctt

SEQ ID NO: 41877 - DNA, 22 bp, synthetic construct
  misc_feature 1..22: note = chemically synthesized
  source 1..22: mol_type = other DNA
cttggggcttgagttccagatc

SEQ ID NO: 41878 - DNA, 22 bp, synthetic construct
  misc_feature 1..22: note = chemically synthesized
  source 1..22: mol_type = other DNA
ttggggcttgagttccagatca

SEQ ID NO: 41879 - DNA, 22 bp, synthetic construct
  misc_feature 1..22: note = chemically synthesized
  source 1..22: mol_type = other DNA
ggggcttgagttccagatcagc

SEQ ID NO: 41880 - DNA, 22 bp, synthetic construct
  misc_feature 1..22: note = chemically synthesized
  source 1..22: mol_type = other DNA
gggcttgagttccagatcagca

SEQ ID NO: 41881 - DNA, 22 bp, synthetic construct
  misc_feature 1..22: note = chemically synthesized
  source 1..22: mol_type = other DNA
gagttccagatcagcagcaagg

SEQ ID NO: 41882 - DNA, 22 bp, synthetic construct
  misc_feature 1..22: note = chemically synthesized
  source 1..22: mol_type = other DNA
agttccagatcagcagcaaggg

SEQ ID NO: 41883 - DNA, 22 bp, synthetic construct
  misc_feature 1..22: note = chemically synthesized
  source 1..22: mol_type = other DNA
cagatcagcagcaagggagcca

SEQ ID NO: 41884 - DNA, 22 bp, synthetic construct
  misc_feature 1..22: note = chemically synthesized
  source 1..22: mol_type = other DNA
cctcagaccactcaccctcctg

SEQ ID NO: 41885 - DNA, 22 bp, synthetic construct
  misc_feature 1..22: note = chemically synthesized
  source 1..22: mol_type = other DNA
agaccactcaccctcctggggt

SEQ ID NO: 41886 - DNA, 22 bp, synthetic construct
  misc_feature 1..22: note = chemically synthesized
  source 1..22: mol_type = other DNA
accctcctggggtgtcccggtg

SEQ ID NO: 41887 - DNA, 22 bp, synthetic construct
  misc_feature 1..22: note = chemically synthesized
  source 1..22: mol_type = other DNA
ctggggtgtcccggtggccagg

SEQ ID NO: 41888 - DNA, 22 bp, synthetic construct
  misc_feature 1..22: note = chemically synthesized
  source 1..22: mol_type = other DNA
gggtgtcccggtggccagggac

SEQ ID NO: 41889 - DNA, 22 bp, synthetic construct
  misc_feature 1..22: note = chemically synthesized
  source 1..22: mol_type = other DNA
aagtggtgatttttctggtagg

SEQ ID NO: 41890 - DNA, 22 bp, synthetic construct
  misc_feature 1..22: note = chemically synthesized
  source 1..22: mol_type = other DNA
ttctggtagggaaggaggtaga

SEQ ID NO: 41891 - DNA, 22 bp, synthetic construct
  misc_feature 1..22: note = chemically synthesized
  source 1..22: mol_type = other DNA
tctggtagggaaggaggtagag

SEQ ID NO: 41892 - DNA, 22 bp, synthetic construct
  misc_feature 1..22: note = chemically synthesized
  source 1..22: mol_type = other DNA
ctggtagggaaggaggtagagg

SEQ ID NO: 41893 - DNA, 22 bp, synthetic construct
  misc_feature 1..22: note = chemically synthesized
  source 1..22: mol_type = other DNA
tggtagggaaggaggtagaggg

SEQ ID NO: 41894 - DNA, 22 bp, synthetic construct
  misc_feature 1..22: note = chemically synthesized
  source 1..22: mol_type = other DNA
gtagggaaggaggtagagggta

SEQ ID NO: 41895 - DNA, 22 bp, synthetic construct
  misc_feature 1..22: note = chemically synthesized
  source 1..22: mol_type = other DNA
actgcacacaatatctgagact

SEQ ID NO: 41896 - DNA, 22 bp, synthetic construct
  misc_feature 1..22: note = chemically synthesized
  source 1..22: mol_type = other DNA
cacacaatatctgagactggag

SEQ ID NO: 41897 - DNA, 22 bp, synthetic construct
  misc_feature 1..22: note = chemically synthesized
  source 1..22: mol_type = other DNA
agactggagctcagatattgct

SEQ ID NO: 41898 - DNA, 22 bp, synthetic construct
  misc_feature 1..22: note = chemically synthesized
  source 1..22: mol_type = other DNA
gagctcagatattgctgatgat

SEQ ID NO: 41899 - DNA, 22 bp, synthetic construct
  misc_feature 1..22: note = chemically synthesized
  source 1..22: mol_type = other DNA
agatattgctgatgatcagagt

SEQ ID NO: 41900 - DNA, 22 bp, synthetic construct
  misc_feature 1..22: note = chemically synthesized
  source 1..22: mol_type = other DNA
ctgatgatcagagttggcgtgt

SEQ ID NO: 41901 - DNA, 22 bp, synthetic construct
  misc_feature 1..22: note = chemically synthesized
  source 1..22: mol_type = other DNA
atgatcagagttggcgtgtctc

SEQ ID NO: 41902 - DNA, 22 bp, synthetic construct
  misc_feature 1..22: note = chemically synthesized
  source 1..22: mol_type = other DNA
gcgtgtctccccaattgattta

SEQ ID NO: 41903 - DNA, 22 bp, synthetic construct
  misc_feature 1..22: note = chemically synthesized
  source 1..22: mol_type = other DNA
cccaattgatttacaactgggg

SEQ ID NO: 41904 - DNA, 22 bp, synthetic construct
  misc_feature 1..22: note = chemically synthesized
  source 1..22: mol_type = other DNA
atttacaactggggcttggata

SEQ ID NO: 41905 - DNA, 22 bp, synthetic construct
  misc_feature 1..22: note = chemically synthesized
  source 1..22: mol_type = other DNA
acaactggggcttggatactgt

SEQ ID NO: 41906 - DNA, 22 bp, synthetic construct
  misc_feature 1..22: note = chemically synthesized
  source 1..22: mol_type = other DNA
caactggggcttggatactgtt

SEQ ID NO: 41907 - DNA, 22 bp, synthetic construct
  misc_feature 1..22: note = chemically synthesized
  source 1..22: mol_type = other DNA
gggcttggatactgttttaaac

SEQ ID NO: 41908 - DNA, 22 bp, synthetic construct
  misc_feature 1..22: note = chemically synthesized
  source 1..22: mol_type = other DNA
ggatactgttttaaacgggagg

SEQ ID NO: 41909 - DNA, 22 bp, synthetic construct
  misc_feature 1..22: note = chemically synthesized
  source 1..22: mol_type = other DNA
gatactgttttaaacgggagga

SEQ ID NO: 41910 - DNA, 22 bp, synthetic construct
  misc_feature 1..22: note = chemically synthesized
  source 1..22: mol_type = other DNA
ttttaaacgggaggagcctcct

SEQ ID NO: 41911 - DNA, 22 bp, synthetic construct
  misc_feature 1..22: note = chemically synthesized
  source 1..22: mol_type = other DNA
taaacgggaggagcctcctaac

SEQ ID NO: 41912 - DNA, 22 bp, synthetic construct
  misc_feature 1..22: note = chemically synthesized
  source 1..22: mol_type = other DNA
aaacgggaggagcctcctaacc

SEQ ID NO: 41913 - DNA, 22 bp, synthetic construct
  misc_feature 1..22: note = chemically synthesized
  source 1..22: mol_type = other DNA
aacgggaggagcctcctaacca

SEQ ID NO: 41914 - DNA, 22 bp, synthetic construct
  misc_feature 1..22: note = chemically synthesized
  source 1..22: mol_type = other DNA
ctaaccatcttgacacaaccac

SEQ ID NO: 41915 - DNA, 22 bp, synthetic construct
  misc_feature 1..22: note = chemically synthesized
  source 1..22: mol_type = other DNA
accatcttgacacaaccactga

SEQ ID NO: 41916 - DNA, 22 bp, synthetic construct
  misc_feature 1..22: note = chemically synthesized
  source 1..22: mol_type = other DNA
gacacaaccactgacgtgacta

SEQ ID NO: 41917 - DNA, 22 bp, synthetic construct
  misc_feature 1..22: note = chemically synthesized
  source 1..22: mol_type = other DNA
acacaaccactgacgtgactac

SEQ ID NO: 41918 - DNA, 22 bp, synthetic construct
  misc_feature 1..22: note = chemically synthesized
  source 1..22: mol_type = other DNA
acgtgactacactagagataga

SEQ ID NO: 41919 - DNA, 22 bp, synthetic construct
  misc_feature 1..22: note = chemically synthesized
  source 1..22: mol_type = other DNA
cactagagatagactctttcca

SEQ ID NO: 41920 - DNA, 22 bp, synthetic construct
  misc_feature 1..22: note = chemically synthesized
  source 1..22: mol_type = other DNA
gagatagactctttccacttaa

SEQ ID NO: 41921 - DNA, 22 bp, synthetic construct
  misc_feature 1..22: note = chemically synthesized
  source 1..22: mol_type = other DNA
tttccacttaattctaccactc

SEQ ID NO: 41922 - DNA, 22 bp, synthetic construct
  misc_feature 1..22: note = chemically synthesized
  source 1..22: mol_type = other DNA
tccacttaattctaccactctt

SEQ ID NO: 41923 - DNA, 22 bp, synthetic construct
  misc_feature 1..22: note = chemically synthesized
  source 1..22: mol_type = other DNA
ccacttaattctaccactcttg

SEQ ID NO: 41924 - DNA, 22 bp, synthetic construct
  misc_feature 1..22: note = chemically synthesized
  source 1..22: mol_type = other DNA
cacttaattctaccactcttgc

SEQ ID NO: 41925 - DNA, 22 bp, synthetic construct
  misc_feature 1..22: note = chemically synthesized
  source 1..22: mol_type = other DNA
aattctaccactcttgctttac

SEQ ID NO: 41926 - DNA, 22 bp, synthetic construct
  misc_feature 1..22: note = chemically synthesized
  source 1..22: mol_type = other DNA
attctaccactcttgctttact

SEQ ID NO: 41927 - DNA, 22 bp, synthetic construct
  misc_feature 1..22: note = chemically synthesized
  source 1..22: mol_type = other DNA
taccactcttgctttacttcat

SEQ ID NO: 41928 - DNA, 22 bp, synthetic construct
  misc_feature 1..22: note = chemically synthesized
  source 1..22: mol_type = other DNA
ccactcttgctttacttcatga

SEQ ID NO: 41929 - DNA, 22 bp, synthetic construct
  misc_feature 1..22: note = chemically synthesized
  source 1..22: mol_type = other DNA
ttgctttacttcatgagaacga

SEQ ID NO: 41930 - DNA, 22 bp, synthetic construct
  misc_feature 1..22: note = chemically synthesized
  source 1..22: mol_type = other DNA
gctttacttcatgagaacgaaa

SEQ ID NO: 41931 - DNA, 22 bp, synthetic construct
  misc_feature 1..22: note = chemically synthesized
  source 1..22: mol_type = other DNA
ctttacttcatgagaacgaaaa

SEQ ID NO: 41932 - DNA, 22 bp, synthetic construct
  misc_feature 1..22: note = chemically synthesized
  source 1..22: mol_type = other DNA
tacttcatgagaacgaaaatgt

SEQ ID NO: 41933 - DNA, 22 bp, synthetic construct
  misc_feature 1..22: note = chemically synthesized
  source 1..22: mol_type = other DNA
acttcatgagaacgaaaatgta

SEQ ID NO: 41934 - DNA, 22 bp, synthetic construct
  misc_feature 1..22: note = chemically synthesized
  source 1..22: mol_type = other DNA
cttcatgagaacgaaaatgtaa

SEQ ID NO: 41935 - DNA, 22 bp, synthetic construct
  misc_feature 1..22: note = chemically synthesized
  source 1..22: mol_type = other DNA
catgagaacgaaaatgtaagat

SEQ ID NO: 41936 - DNA, 22 bp, synthetic construct
  misc_feature 1..22: note = chemically synthesized
  source 1..22: mol_type = other DNA
atgagaacgaaaatgtaagatt

SEQ ID NO: 41937 - DNA, 22 bp, synthetic construct
  misc_feature 1..22: note = chemically synthesized
  source 1..22: mol_type = other DNA
caccatgaattcatttgcggaa

SEQ ID NO: 41938 - DNA, 22 bp, synthetic construct
  misc_feature 1..22: note = chemically synthesized
  source 1..22: mol_type = other DNA
atttgcggaaagattgatacta

SEQ ID NO: 41939 - DNA, 22 bp, synthetic construct
  misc_feature 1..22: note = chemically synthesized
  source 1..22: mol_type = other DNA
gcggaaagattgatactatgct

SEQ ID NO: 41940 - DNA, 22 bp, synthetic construct
  misc_feature 1..22: note = chemically synthesized
  source 1..22: mol_type = other DNA
cggaaagattgatactatgctt

SEQ ID NO: 41941 - DNA, 22 bp, synthetic construct
  misc_feature 1..22: note = chemically synthesized
  source 1..22: mol_type = other DNA
atactatgcttttattttattt

SEQ ID NO: 41942 - DNA, 22 bp, synthetic construct
  misc_feature 1..22: note = chemically synthesized
  source 1..22: mol_type = other DNA
tgcttttattttattttatttt

SEQ ID NO: 41943 - DNA, 22 bp, synthetic construct
  misc_feature 1..22: note = chemically synthesized
  source 1..22: mol_type = other DNA
ttattttattttattttatttt

SEQ ID NO: 41944 - DNA, 22 bp, synthetic construct
  misc_feature 1..22: note = chemically synthesized
  source 1..22: mol_type = other DNA
tattttattttattttatttta

SEQ ID NO: 41945 - DNA, 22 bp, synthetic construct
  misc_feature 1..22: note = chemically synthesized
  source 1..22: mol_type = other DNA
attttattttattttattttat

SEQ ID NO: 41946 - DNA, 22 bp, synthetic construct
  misc_feature 1..22: note = chemically synthesized
  source 1..22: mol_type = other DNA
ttttattttattttattttatt

SEQ ID NO: 41947 - DNA, 22 bp, synthetic construct
  misc_feature 1..22: note = chemically synthesized
  source 1..22: mol_type = other DNA
tattttattttattttatttta

SEQ ID NO: 41948 - DNA, 22 bp, synthetic construct
  misc_feature 1..22: note = chemically synthesized
  source 1..22: mol_type = other DNA
attttattttattttattttat

SEQ ID NO: 41949 - DNA, 22 bp, synthetic construct
  misc_feature 1..22: note = chemically synthesized
  source 1..22: mol_type = other DNA
ttttattttattttattttatt

SEQ ID NO: 41950 - DNA, 22 bp, synthetic construct
  misc_feature 1..22: note = chemically synthesized
  source 1..22: mol_type = other DNA
tattttattttattttatttta

SEQ ID NO: 41951 - DNA, 22 bp, synthetic construct
  misc_feature 1..22: note = chemically synthesized
  source 1..22: mol_type = other DNA
attttattttattttattttat

SEQ ID NO: 41952 - DNA, 22 bp, synthetic construct
  misc_feature 1..22: note = chemically synthesized
  source 1..22: mol_type = other DNA
ttttattttattttattttatt

SEQ ID NO: 41953 - DNA, 22 bp, synthetic construct
  misc_feature 1..22: note = chemically synthesized
  source 1..22: mol_type = other DNA
tattttattttattttatttta

SEQ ID NO: 41954 - DNA, 22 bp, synthetic construct
  misc_feature 1..22: note = chemically synthesized
  source 1..22: mol_type = other DNA
attttattttattttattttat

SEQ ID NO: 41955 - DNA, 22 bp, synthetic construct
  misc_feature 1..22: note = chemically synthesized
  source 1..22: mol_type = other DNA
ttttattttattttattttatt

SEQ ID NO: 41956 - DNA, 22 bp, synthetic construct
  misc_feature 1..22: note = chemically synthesized
  source 1..22: mol_type = other DNA
tattttattttattttatttta

SEQ ID NO: 41957 - DNA, 22 bp, synthetic construct
  misc_feature 1..22: note = chemically synthesized
  source 1..22: mol_type = other DNA
attttattttattttattttat

SEQ ID NO: 41958 - DNA, 22 bp, synthetic construct
  misc_feature 1..22: note = chemically synthesized
  source 1..22: mol_type = other DNA
ttttattttattttattttatt

SEQ ID NO: 41959 - DNA, 22 bp, synthetic construct
  misc_feature 1..22: note = chemically synthesized
  source 1..22: mol_type = other DNA
tattttattttattttattgag

SEQ ID NO: 41960 - DNA, 22 bp, synthetic construct
  misc_feature 1..22: note = chemically synthesized
  source 1..22: mol_type = other DNA
attttattttattttattgaga

SEQ ID NO: 41961 - DNA, 22 bp, synthetic construct
  misc_feature 1..22: note = chemically synthesized
  source 1..22: mol_type = other DNA
ttttattttattttattgagac

SEQ ID NO: 41962 - DNA, 22 bp, synthetic construct
  misc_feature 1..22: note = chemically synthesized
  source 1..22: mol_type = other DNA
tattttattttattgagactct

SEQ ID NO: 41963 - DNA, 22 bp, synthetic construct
  misc_feature 1..22: note = chemically synthesized
  source 1..22: mol_type = other DNA
attttattttattgagactctc

SEQ ID NO: 41964 - DNA, 22 bp, synthetic construct
  misc_feature 1..22: note = chemically synthesized
  source 1..22: mol_type = other DNA
ttttattttattgagactctca

SEQ ID NO: 41965 - DNA, 22 bp, synthetic construct
  misc_feature 1..22: note = chemically synthesized
  source 1..22: mol_type = other DNA
tattttattgagactctcaccc

SEQ ID NO: 41966 - DNA, 22 bp, synthetic construct
  misc_feature 1..22: note = chemically synthesized
  source 1..22: mol_type = other DNA
attttattgagactctcacccc

SEQ ID NO: 41967 - DNA, 22 bp, synthetic construct
  misc_feature 1..22: note = chemically synthesized
  source 1..22: mol_type = other DNA
ttttattgagactctcaccccg

SEQ ID NO: 41968 - DNA, 22 bp, synthetic construct
  misc_feature 1..22: note = chemically synthesized
  source 1..22: mol_type = other DNA
tattgagactctcaccccggtt

SEQ ID NO: 41969 - DNA, 22 bp, synthetic construct
  misc_feature 1..22: note = chemically synthesized
  source 1..22: mol_type = other DNA
attgagactctcaccccggttg

SEQ ID NO: 41970 - DNA, 22 bp, synthetic construct
  misc_feature 1..22: note = chemically synthesized
  source 1..22: mol_type = other DNA
ttgagactctcaccccggttga

SEQ ID NO: 41971 - DNA, 22 bp, synthetic construct
  misc_feature 1..22: note = chemically synthesized
  source 1..22: mol_type = other DNA
agactctcaccccggttgaagt

SEQ ID NO: 41972 - DNA, 22 bp, synthetic construct
  misc_feature 1..22: note = chemically synthesized
  source 1..22: mol_type = other DNA
tcaccccggttgaagtgcactg

SEQ ID NO: 41973 - DNA, 22 bp, synthetic construct
  misc_feature 1..22: note = chemically synthesized
  source 1..22: mol_type = other DNA
accccggttgaagtgcactgac

SEQ ID NO: 41974 - DNA, 22 bp, synthetic construct
  misc_feature 1..22: note = chemically synthesized
  source 1..22: mol_type = other DNA
aagtgcactgacgtgattttgg

SEQ ID NO: 41975 - DNA, 22 bp, synthetic construct
  misc_feature 1..22: note = chemically synthesized
  source 1..22: mol_type = other DNA
acgtgattttggctcactgcaa

SEQ ID NO: 41976 - DNA, 22 bp, synthetic construct
  misc_feature 1..22: note = chemically synthesized
  source 1..22: mol_type = other DNA
tggctcactgcaacttccacct

SEQ ID NO: 41977 - DNA, 22 bp, synthetic construct
  misc_feature 1..22: note = chemically synthesized
  source 1..22: mol_type = other DNA
ggctcactgcaacttccacctc

SEQ ID NO: 41978 - DNA, 22 bp, synthetic construct
  misc_feature 1..22: note = chemically synthesized
  source 1..22: mol_type = other DNA
gctcactgcaacttccacctcc

SEQ ID NO: 41979 - DNA, 22 bp, synthetic construct
  misc_feature 1..22: note = chemically synthesized
  source 1..22: mol_type = other DNA
actgcaacttccacctcctggg

SEQ ID NO: 41980 - DNA, 22 bp, synthetic construct
  misc_feature 1..22: note = chemically synthesized
  source 1..22: mol_type = other DNA
caacttccacctcctgggttca

SEQ ID NO: 41981 - DNA, 22 bp, synthetic construct
  misc_feature 1..22: note = chemically synthesized
  source 1..22: mol_type = other DNA
ccacctcctgggttcaagtgaa

SEQ ID NO: 41982 - DNA, 22 bp, synthetic construct
  misc_feature 1..22: note = chemically synthesized
  source 1..22: mol_type = other DNA
cacctcctgggttcaagtgaat

SEQ ID NO: 41983 - DNA, 22 bp, synthetic construct
  misc_feature 1..22: note = chemically synthesized
  source 1..22: mol_type = other DNA
ctgggttcaagtgaatactcca

SEQ ID NO: 41984 - DNA, 22 bp, synthetic construct
  misc_feature 1..22: note = chemically synthesized
  source 1..22: mol_type = other DNA
ggttcaagtgaatactccagcc

SEQ ID NO: 41985 - DNA, 22 bp, synthetic construct
  misc_feature 1..22: note = chemically synthesized
  source 1..22: mol_type = other DNA
aagtgaatactccagcctccct

SEQ ID NO: 41986 - DNA, 22 bp, synthetic construct
  misc_feature 1..22: note = chemically synthesized
  source 1..22: mol_type = other DNA
cagcctccctagtagctgggat

SEQ ID NO: 41987 - DNA, 22 bp, synthetic construct
  misc_feature 1..22: note = chemically synthesized
  source 1..22: mol_type = other DNA
cctagtagctgggattacaggt

SEQ ID NO: 41988 - DNA, 22 bp, synthetic construct
  misc_feature 1..22: note = chemically synthesized
  source 1..22: mol_type = other DNA
gtagctgggattacaggtgccc

SEQ ID NO: 41989 - DNA, 22 bp, synthetic construct
  misc_feature 1..22: note = chemically synthesized
  source 1..22: mol_type = other DNA
ggattacaggtgcccaccacca

SEQ ID NO: 41990 - DNA, 22 bp, synthetic construct
  misc_feature 1..22: note = chemically synthesized
  source 1..22: mol_type = other DNA
caggtgcccaccaccacgcctg

SEQ ID NO: 41991 - DNA, 22 bp, synthetic construct
  misc_feature 1..22: note = chemically synthesized
  source 1..22: mol_type = other DNA
gctaatttttgtatttttagta

SEQ ID NO: 41992 - DNA, 22 bp, synthetic construct
  misc_feature 1..22: note = chemically synthesized
  source 1..22: mol_type = other DNA
atttttgtatttttagtagaga

SEQ ID NO: 41993 - DNA, 22 bp, synthetic construct
  misc_feature 1..22: note = chemically synthesized
  source 1..22: mol_type = other DNA
ttgtatttttagtagagatggg

SEQ ID NO: 41994 - DNA, 22 bp, synthetic construct
  misc_feature 1..22: note = chemically synthesized
  source 1..22: mol_type = other DNA
tgtatttttagtagagatgggg

SEQ ID NO: 41995 - DNA, 22 bp, synthetic construct
  misc_feature 1..22: note = chemically synthesized
  source 1..22: mol_type = other DNA
gtatttttagtagagatggggt

SEQ ID NO: 41996 - DNA, 22 bp, synthetic construct
  misc_feature 1..22: note = chemically synthesized
  source 1..22: mol_type = other DNA
tatttttagtagagatggggtt

SEQ ID NO: 41997 - DNA, 22 bp, synthetic construct
  misc_feature 1..22: note = chemically synthesized
  source 1..22: mol_type = other DNA
ttagtagagatggggtttcacc

SEQ ID NO: 41998 - DNA, 22 bp, synthetic construct
  misc_feature 1..22: note = chemically synthesized
  source 1..22: mol_type = other DNA
tagtagagatggggtttcacca

SEQ ID NO: 41999 - DNA, 22 bp, synthetic construct
  misc_feature 1..22: note = chemically synthesized
  source 1..22: mol_type = other DNA
agtagagatggggtttcaccac

SEQ ID NO: 42000 - DNA, 22 bp, synthetic construct
  misc_feature 1..22: note = chemically synthesized
  source 1..22: mol_type = other DNA
gtagagatggggtttcaccaca

SEQ ID NO: 42001 - DNA, 22 bp, synthetic construct
  misc_feature 1..22: note = chemically synthesized
  source 1..22: mol_type = other DNA
caccacattggcctggctggtc

SEQ ID NO: 42002 - DNA, 22 bp, synthetic construct
  misc_feature 1..22: note = chemically synthesized
  source 1..22: mol_type = other DNA
accacattggcctggctggtct

SEQ ID NO: 42003 - DNA, 22 bp, synthetic construct
  misc_feature 1..22: note = chemically synthesized
  source 1..22: mol_type = other DNA
gcctggctggtctcaaactcct

SEQ ID NO: 42004 - DNA, 22 bp, synthetic construct
  misc_feature 1..22: note = chemically synthesized
  source 1..22: mol_type = other DNA
gctggtctcaaactcctgacct

SEQ ID NO: 42005 - DNA, 22 bp, synthetic construct
  misc_feature 1..22: note = chemically synthesized
  source 1..22: mol_type = other DNA
gtctcaaactcctgaccttgtg

SEQ ID NO: 42006 - DNA, 22 bp, synthetic construct
  misc_feature 1..22: note = chemically synthesized
  source 1..22: mol_type = other DNA
aaactcctgaccttgtgatcca

SEQ ID NO: 42007 - DNA, 22 bp, synthetic construct
  misc_feature 1..22: note = chemically synthesized
  source 1..22: mol_type = other DNA
ctgaccttgtgatccacctgtc

SEQ ID NO: 42008 - DNA, 22 bp, synthetic construct
  misc_feature 1..22: note = chemically synthesized
  source 1..22: mol_type = other DNA
accttgtgatccacctgtcttg

SEQ ID NO: 42009 - DNA, 22 bp, synthetic construct
  misc_feature 1..22: note = chemically synthesized
  source 1..22: mol_type = other DNA
gtgatccacctgtcttggcctc

SEQ ID NO: 42010 - DNA, 22 bp, synthetic construct
  misc_feature 1..22: note = chemically synthesized
  source 1..22: mol_type = other DNA
tgatccacctgtcttggcctcc

SEQ ID NO: 42011 - DNA, 22 bp, synthetic construct
  misc_feature 1..22: note = chemically synthesized
  source 1..22: mol_type = other DNA
tcttggcctcccaaagtgctgg

SEQ ID NO: 42012 - DNA, 22 bp, synthetic construct
  misc_feature 1..22: note = chemically synthesized
  source 1..22: mol_type = other DNA
ggcctcccaaagtgctgggatt

SEQ ID NO: 42013 - DNA, 22 bp, synthetic construct
  misc_feature 1..22: note = chemically synthesized
  source 1..22: mol_type = other DNA
gcctcccaaagtgctgggatta

SEQ ID NO: 42014 - DNA, 22 bp, synthetic construct
  misc_feature 1..22: note = chemically synthesized
  source 1..22: mol_type = other DNA
ccaaagtgctgggattacagag

SEQ ID NO: 42015 - DNA, 22 bp, synthetic construct
  misc_feature 1..22: note = chemically synthesized
  source 1..22: mol_type = other DNA
ggattacagagttgagccaccg

SEQ ID NO: 42016 - DNA, 22 bp, synthetic construct
  misc_feature 1..22: note = chemically synthesized
  source 1..22: mol_type = other DNA
cagagttgagccaccgcactcg

SEQ ID NO: 42017 - DNA, 22 bp, synthetic construct
  misc_feature 1..22: note = chemically synthesized
  source 1..22: mol_type = other DNA
agccaccgcactcgaccctatg

SEQ ID NO: 42018 - DNA, 22 bp, synthetic construct
  misc_feature 1..22: note = chemically synthesized
  source 1..22: mol_type = other DNA
gaccctatgttttatttttaaa

SEQ ID NO: 42019 - DNA, 22 bp, synthetic construct
  misc_feature 1..22: note = chemically synthesized
  source 1..22: mol_type = other DNA
tgttttatttttaaaaatattt

SEQ ID NO: 42020 - DNA, 22 bp, synthetic construct
  misc_feature 1..22: note = chemically synthesized
  source 1..22: mol_type = other DNA
tatttttaaaaatatttattta

SEQ ID NO: 42021 - DNA, 22 bp, synthetic construct
  misc_feature 1..22: note = chemically synthesized
  source 1..22: mol_type = other DNA
atttttaaaaatatttatttat

SEQ ID NO: 42022 - DNA, 22 bp, synthetic construct
  misc_feature 1..22: note = chemically synthesized
  source 1..22: mol_type = other DNA
tttttaaaaatatttatttatt

SEQ ID NO: 42023 - DNA, 22 bp, synthetic construct
  misc_feature 1..22: note = chemically synthesized
  source 1..22: mol_type = other DNA
ttaaaaatatttatttatttat

SEQ ID NO: 42024 - DNA, 22 bp, synthetic construct
  misc_feature 1..22: note = chemically synthesized
  source 1..22: mol_type = other DNA
taaaaatatttatttatttatt

SEQ ID NO: 42025 - DNA, 22 bp, synthetic construct
  misc_feature 1..22: note = chemically synthesized
  source 1..22: mol_type = other DNA
aaaaatatttatttatttattt

SEQ ID NO: 42026 - DNA, 22 bp, synthetic construct
  misc_feature 1..22: note = chemically synthesized
  source 1..22: mol_type = other DNA
aaaatatttatttatttattta

SEQ ID NO: 42027 - DNA, 22 bp, synthetic construct
  misc_feature 1..22: note = chemically synthesized
  source 1..22: mol_type = other DNA
atttatttatttaagccacaac

SEQ ID NO: 42028 - DNA, 22 bp, synthetic construct
  misc_feature 1..22: note = chemically synthesized
  source 1..22: mol_type = other DNA
tttatttatttaagccacaact

SEQ ID NO: 42029 - DNA, 22 bp, synthetic construct
  misc_feature 1..22: note = chemically synthesized
  source 1..22: mol_type = other DNA
atttatttaagccacaactact

SEQ ID NO: 42030 - DNA, 22 bp, synthetic construct
  misc_feature 1..22: note = chemically synthesized
  source 1..22: mol_type = other DNA
tttatttaagccacaactacta

SEQ ID NO: 42031 - DNA, 22 bp, synthetic construct
  misc_feature 1..22: note = chemically synthesized
  source 1..22: mol_type = other DNA
atttaagccacaactactagaa

SEQ ID NO: 42032 - DNA, 22 bp, synthetic construct
  misc_feature 1..22: note = chemically synthesized
  source 1..22: mol_type = other DNA
tttaagccacaactactagaat

SEQ ID NO: 42033 - DNA, 22 bp, synthetic construct
  misc_feature 1..22: note = chemically synthesized
  source 1..22: mol_type = other DNA
aagccacaactactagaatagg

SEQ ID NO: 42034 - DNA, 22 bp, synthetic construct
  misc_feature 1..22: note = chemically synthesized
  source 1..22: mol_type = other DNA
agccacaactactagaatagga

SEQ ID NO: 42035 - DNA, 22 bp, synthetic construct
  misc_feature 1..22: note = chemically synthesized
  source 1..22: mol_type = other DNA
ctagaataggaaggattgatat

SEQ ID NO: 42036 - DNA, 22 bp, synthetic construct
  misc_feature 1..22: note = chemically synthesized
  source 1..22: mol_type = other DNA
gaataggaaggattgatatttt

SEQ ID NO: 42037 - DNA, 22 bp, synthetic construct
  misc_feature 1..22: note = chemically synthesized
  source 1..22: mol_type = other DNA
atattttattaattttatttgg

SEQ ID NO: 42038 - DNA, 22 bp, synthetic construct
  misc_feature 1..22: note = chemically synthesized
  source 1..22: mol_type = other DNA
tattaattttatttggtattta

SEQ ID NO: 42039 - DNA, 22 bp, synthetic construct
  misc_feature 1..22: note = chemically synthesized
  source 1..22: mol_type = other DNA
attaattttatttggtatttat

SEQ ID NO: 42040 - DNA, 22 bp, synthetic construct
  misc_feature 1..22: note = chemically synthesized
  source 1..22: mol_type = other DNA
ttaattttatttggtatttatt

SEQ ID NO: 42041 - DNA, 22 bp, synthetic construct
  misc_feature 1..22: note = chemically synthesized
  source 1..22: mol_type = other DNA
attttatttggtatttattatt

SEQ ID NO: 42042 - DNA, 22 bp, synthetic construct
  misc_feature 1..22: note = chemically synthesized
  source 1..22: mol_type = other DNA
tatttggtatttattatttttt

SEQ ID NO: 42043 - DNA, 22 bp, synthetic construct
  misc_feature 1..22: note = chemically synthesized
  source 1..22: mol_type = other DNA
atttggtatttattattttttt

SEQ ID NO: 42044 - DNA, 22 bp, synthetic construct
  misc_feature 1..22: note = chemically synthesized
  source 1..22: mol_type = other DNA
tttggtatttattatttttttt

SEQ ID NO: 42045 - DNA, 22 bp, synthetic construct
  misc_feature 1..22: note = chemically synthesized
  source 1..22: mol_type = other DNA
ggtatttattatttttttttct

SEQ ID NO: 42046 - DNA, 22 bp, synthetic construct
  misc_feature 1..22: note = chemically synthesized
  source 1..22: mol_type = other DNA
gtatttattatttttttttctt

SEQ ID NO: 42047 - DNA, 22 bp, synthetic construct
  misc_feature 1..22: note = chemically synthesized
  source 1..22: mol_type = other DNA
attatttttttttctttcctga

SEQ ID NO: 42048 - DNA, 22 bp, synthetic construct
  misc_feature 1..22: note = chemically synthesized
  source 1..22: mol_type = other DNA
ttatttttttttctttcctgag

SEQ ID NO: 42049 - DNA, 22 bp, synthetic construct
  misc_feature 1..22: note = chemically synthesized
  source 1..22: mol_type = other DNA
tttttttttctttcctgagaca

SEQ ID NO: 42050 - DNA, 22 bp, synthetic construct
  misc_feature 1..22: note = chemically synthesized
  source 1..22: mol_type = other DNA
ttttttctttcctgagacattc

SEQ ID NO: 42051 - DNA, 22 bp, synthetic construct
  misc_feature 1..22: note = chemically synthesized
  source 1..22: mol_type = other DNA
tttttctttcctgagacattct

SEQ ID NO: 42052 - DNA, 22 bp, synthetic construct
  misc_feature 1..22: note = chemically synthesized
  source 1..22: mol_type = other DNA
ttttctttcctgagacattctt

SEQ ID NO: 42053 - DNA, 22 bp, synthetic construct
  misc_feature 1..22: note = chemically synthesized
  source 1..22: mol_type = other DNA
tttctttcctgagacattcttg

SEQ ID NO: 42054 - DNA, 22 bp, synthetic construct
  misc_feature 1..22: note = chemically synthesized
  source 1..22: mol_type = other DNA
ttctttcctgagacattcttgc

SEQ ID NO: 42055 - DNA, 22 bp, synthetic construct
  misc_feature 1..22: note = chemically synthesized
  source 1..22: mol_type = other DNA
tctttcctgagacattcttgct

SEQ ID NO: 42056 - DNA, 22 bp, synthetic construct
  misc_feature 1..22: note = chemically synthesized
  source 1..22: mol_type = other DNA
ctttcctgagacattcttgctc

SEQ ID NO: 42057 - DNA, 22 bp, synthetic construct
  misc_feature 1..22: note = chemically synthesized
  source 1..22: mol_type = other DNA
tttcctgagacattcttgctct

SEQ ID NO: 42058 - DNA, 22 bp, synthetic construct
  misc_feature 1..22: note = chemically synthesized
  source 1..22: mol_type = other DNA
tcctgagacattcttgctctgt

SEQ ID NO: 42059 - DNA, 22 bp, synthetic construct
  misc_feature 1..22: note = chemically synthesized
  source 1..22: mol_type = other DNA
cctgagacattcttgctctgtc

SEQ ID NO: 42060 - DNA, 22 bp, synthetic construct
  misc_feature 1..22: note = chemically synthesized
  source 1..22: mol_type = other DNA
ctgagacattcttgctctgtca

SEQ ID NO: 42061 - DNA, 22 bp, synthetic construct
  misc_feature 1..22: note = chemically synthesized
  source 1..22: mol_type = other DNA
agacattcttgctctgtcaccc

SEQ ID NO: 42062 - DNA, 22 bp, synthetic construct
  misc_feature 1..22: note = chemically synthesized
  source 1..22: mol_type = other DNA
ttgctctgtcacccaggctgga

SEQ ID NO: 42063 - DNA, 22 bp, synthetic construct
  misc_feature 1..22: note = chemically synthesized
  source 1..22: mol_type = other DNA
gctctgtcacccaggctggagt

SEQ ID NO: 42064 - DNA, 22 bp, synthetic construct
  misc_feature 1..22: note = chemically synthesized
  source 1..22: mol_type = other DNA
ctctgtcacccaggctggagtg

SEQ ID NO: 42065 - DNA, 22 bp, synthetic construct
  misc_feature 1..22: note = chemically synthesized
  source 1..22: mol_type = other DNA
tgtcacccaggctggagtgcag

SEQ ID NO: 42066 - DNA, 22 bp, synthetic construct
  misc_feature 1..22: note = chemically synthesized
  source 1..22: mol_type = other DNA
tcacccaggctggagtgcagtg

SEQ ID NO: 42067 - DNA, 22 bp, synthetic construct
  misc_feature 1..22: note = chemically synthesized
  source 1..22: mol_type = other DNA
gagtgcagtggcacattcttgg

SEQ ID NO: 42068 - DNA, 22 bp, synthetic construct
  misc_feature 1..22: note = chemically synthesized
  source 1..22: mol_type = other DNA
ttggctcactgcaacctccatc

SEQ ID NO: 42069 - DNA, 22 bp, synthetic construct
  misc_feature 1..22: note = chemically synthesized
  source 1..22: mol_type = other DNA
ggctcactgcaacctccatctc

SEQ ID NO: 42070 - DNA, 22 bp, synthetic construct
  misc_feature 1..22: note = chemically synthesized
  source 1..22: mol_type = other DNA
gctcactgcaacctccatctcc

SEQ ID NO: 42071 - DNA, 22 bp, synthetic construct
  misc_feature 1..22: note = chemically synthesized
  source 1..22: mol_type = other DNA
actgcaacctccatctcctgtg

SEQ ID NO: 42072 - DNA, 22 bp, synthetic construct
  misc_feature 1..22: note = chemically synthesized
  source 1..22: mol_type = other DNA
caacctccatctcctgtgttca

SEQ ID NO: 42073 - DNA, 22 bp, synthetic construct
  misc_feature 1..22: note = chemically synthesized
  source 1..22: mol_type = other DNA
catctcctgtgttcaagcaatt

SEQ ID NO: 42074 - DNA, 22 bp, synthetic construct
  misc_feature 1..22: note = chemically synthesized
  source 1..22: mol_type = other DNA
ctgtgttcaagcaattctagtg

SEQ ID NO: 42075 - DNA, 22 bp, synthetic construct
  misc_feature 1..22: note = chemically synthesized
  source 1..22: mol_type = other DNA
tgttcaagcaattctagtgcct

SEQ ID NO: 42076 - DNA, 22 bp, synthetic construct
  misc_feature 1..22: note = chemically synthesized
  source 1..22: mol_type = other DNA
aagcaattctagtgcctcagcc

SEQ ID NO: 42077 - DNA, 22 bp, synthetic construct
  misc_feature 1..22: note = chemically synthesized
  source 1..22: mol_type = other DNA
tagtgcctcagcctacttagta

SEQ ID NO: 42078 - DNA, 22 bp, synthetic construct
  misc_feature 1..22: note = chemically synthesized
  source 1..22: mol_type = other DNA
gtgcctcagcctacttagtagc

SEQ ID NO: 42079 - DNA, 22 bp, synthetic construct
  misc_feature 1..22: note = chemically synthesized
  source 1..22: mol_type = other DNA
agcctacttagtagctgggatg

SEQ ID NO: 42080 - DNA, 22 bp, synthetic construct
  misc_feature 1..22: note = chemically synthesized
  source 1..22: mol_type = other DNA
cttagtagctgggatgactggc

SEQ ID NO: 42081 - DNA, 22 bp, synthetic construct
  misc_feature 1..22: note = chemically synthesized
  source 1..22: mol_type = other DNA
agtagctgggatgactggcatg

SEQ ID NO: 42082 - DNA, 22 bp, synthetic construct
  misc_feature 1..22: note = chemically synthesized
  source 1..22: mol_type = other DNA
gtagctgggatgactggcatgt

SEQ ID NO: 42083 - DNA, 22 bp, synthetic construct
  misc_feature 1..22: note = chemically synthesized
  source 1..22: mol_type = other DNA
ggatgactggcatgtgcctcca

SEQ ID NO: 42084 - DNA, 22 bp, synthetic construct
  misc_feature 1..22: note = chemically synthesized
  source 1..22: mol_type = other DNA
gcatgtgcctccacacccagct

SEQ ID NO: 42085 - DNA, 22 bp, synthetic construct
  misc_feature 1..22: note = chemically synthesized
  source 1..22: mol_type = other DNA
cacacccagctaatttttgtat

SEQ ID NO: 42086 - DNA, 22 bp, synthetic construct
  misc_feature 1..22: note = chemically synthesized
  source 1..22: mol_type = other DNA
atttttgtattttttgtagaga

SEQ ID NO: 42087 - DNA, 22 bp, synthetic construct
  misc_feature 1..22: note = chemically synthesized
  source 1..22: mol_type = other DNA
ttgtattttttgtagagacagg

SEQ ID NO: 42088 - DNA, 22 bp, synthetic construct
  misc_feature 1..22: note = chemically synthesized
  source 1..22: mol_type = other DNA
tgtattttttgtagagacaggg

SEQ ID NO: 42089 - DNA, 22 bp, synthetic construct
  misc_feature 1..22: note = chemically synthesized
  source 1..22: mol_type = other DNA
gtattttttgtagagacagggt

SEQ ID NO: 42090 - DNA, 22 bp, synthetic construct
  misc_feature 1..22: note = chemically synthesized
  source 1..22: mol_type = other DNA
tattttttgtagagacagggtt

SEQ ID NO: 42091 - DNA, 22 bp, synthetic construct
  misc_feature 1..22: note = chemically synthesized
  source 1..22: mol_type = other DNA
tttgtagagacagggttttggc

SEQ ID NO: 42092 - DNA, 22 bp, synthetic construct
  misc_feature 1..22: note = chemically synthesized
  source 1..22: mol_type = other DNA
ttgtagagacagggttttggca

SEQ ID NO: 42093 - DNA, 22 bp, synthetic construct
  misc_feature 1..22: note = chemically synthesized
  source 1..22: mol_type = other DNA
tgtagagacagggttttggcat

SEQ ID NO: 42094 - DNA, 22 bp, synthetic construct
  misc_feature 1..22: note = chemically synthesized
  source 1..22: mol_type = other DNA
gtagagacagggttttggcatg

SEQ ID NO: 42095 - DNA, 22 bp, synthetic construct
  misc_feature 1..22: note = chemically synthesized
  source 1..22: mol_type = other DNA
tagagacagggttttggcatgt

SEQ ID NO: 42096 - DNA, 22 bp, synthetic construct
  misc_feature 1..22: note = chemically synthesized
  source 1..22: mol_type = other DNA
tggcatgttgcccaggcttgtc

SEQ ID NO: 42097 - DNA, 22 bp, synthetic construct
  misc_feature 1..22: note = chemically synthesized
  source 1..22: mol_type = other DNA
ggcatgttgcccaggcttgtct

SEQ ID NO: 42098 - DNA, 22 bp, synthetic construct
  misc_feature 1..22: note = chemically synthesized
  source 1..22: mol_type = other DNA
gcatgttgcccaggcttgtctc

SEQ ID NO: 42099 - DNA, 22 bp, synthetic construct
  misc_feature 1..22: note = chemically synthesized
  source 1..22: mol_type = other DNA
cccaggcttgtctcaaactcct

SEQ ID NO: 42100 - DNA, 22 bp, synthetic construct
  misc_feature 1..22: note = chemically synthesized
  source 1..22: mol_type = other DNA
gtctcaaactcctggcctcagg

SEQ ID NO: 42101 - DNA, 22 bp, synthetic construct
  misc_feature 1..22: note = chemically synthesized
  source 1..22: mol_type = other DNA
tctcaaactcctggcctcaggt

SEQ ID NO: 42102 - DNA, 22 bp, synthetic construct
  misc_feature 1..22: note = chemically synthesized
  source 1..22: mol_type = other DNA
aaactcctggcctcaggtgatc

SEQ ID NO: 42103 - DNA, 22 bp, synthetic construct
  misc_feature 1..22: note = chemically synthesized
  source 1..22: mol_type = other DNA
ctggcctcaggtgatccatctg

SEQ ID NO: 42104 - DNA, 22 bp, synthetic construct
  misc_feature 1..22: note = chemically synthesized
  source 1..22: mol_type = other DNA
gcctcaggtgatccatctgccg

SEQ ID NO: 42105 - DNA, 22 bp, synthetic construct
  misc_feature 1..22: note = chemically synthesized
  source 1..22: mol_type = other DNA
aggtgatccatctgccgtggcc

SEQ ID NO: 42106 - DNA, 22 bp, synthetic construct
  misc_feature 1..22: note = chemically synthesized
  source 1..22: mol_type = other DNA
ccgtggcctcccaaaatgctgg

SEQ ID NO: 42107 - DNA, 22 bp, synthetic construct
  misc_feature 1..22: note = chemically synthesized
  source 1..22: mol_type = other DNA
ccaaaatgctgggattataggc

SEQ ID NO: 42108 - DNA, 22 bp, synthetic construct
  misc_feature 1..22: note = chemically synthesized
  source 1..22: mol_type = other DNA
ggattataggcatgagccacca

SEQ ID NO: 42109 - DNA, 22 bp, synthetic construct
  misc_feature 1..22: note = chemically synthesized
  source 1..22: mol_type = other DNA
taggcatgagccaccaccccct

SEQ ID NO: 42110 - DNA, 22 bp, synthetic construct
  misc_feature 1..22: note = chemically synthesized
  source 1..22: mol_type = other DNA
ctggaaggattgatatcttata

SEQ ID NO: 42111 - DNA, 22 bp, synthetic construct
  misc_feature 1..22: note = chemically synthesized
  source 1..22: mol_type = other DNA
gaaggattgatatcttataaca

SEQ ID NO: 42112 - DNA, 22 bp, synthetic construct
  misc_feature 1..22: note = chemically synthesized
  source 1..22: mol_type = other DNA
atatcttataacataatttata

SEQ ID NO: 42113 - DNA, 22 bp, synthetic construct
  misc_feature 1..22: note = chemically synthesized
  source 1..22: mol_type = other DNA
ataacataatttataattacag

SEQ ID NO: 42114 - DNA, 22 bp, synthetic construct
  misc_feature 1..22: note = chemically synthesized
  source 1..22: mol_type = other DNA
taacataatttataattacaga

SEQ ID NO: 42115 - DNA, 22 bp, synthetic construct
  misc_feature 1..22: note = chemically synthesized
  source 1..22: mol_type = other DNA
ataattacagaaaacatgtgag

SEQ ID NO: 42116 - DNA, 22 bp, synthetic construct
  misc_feature 1..22: note = chemically synthesized
  source 1..22: mol_type = other DNA
taattacagaaaacatgtgagt

SEQ ID NO: 42117 - DNA, 22 bp, synthetic construct
  misc_feature 1..22: note = chemically synthesized
  source 1..22: mol_type = other DNA
cagaaaacatgtgagttcacta

SEQ ID NO: 42118 - DNA, 22 bp, synthetic construct
  misc_feature 1..22: note = chemically synthesized
  source 1..22: mol_type = other DNA
actaggaataaataaattttga

SEQ ID NO: 42119 - DNA, 22 bp, synthetic construct
  misc_feature 1..22: note = chemically synthesized
  source 1..22: mol_type = other DNA
ggaataaataaattttgaagat

SEQ ID NO: 42120 - DNA, 22 bp, synthetic construct
  misc_feature 1..22: note = chemically synthesized
  source 1..22: mol_type = other DNA
tgaagataataaaagattttca

SEQ ID NO: 42121 - DNA, 22 bp, synthetic construct
  misc_feature 1..22: note = chemically synthesized
  source 1..22: mol_type = other DNA
gaagataataaaagattttcac

SEQ ID NO: 42122 - DNA, 22 bp, synthetic construct
  misc_feature 1..22: note = chemically synthesized
  source 1..22: mol_type = other DNA
aagataataaaagattttcact

SEQ ID NO: 42123 - DNA, 22 bp, synthetic construct
  misc_feature 1..22: note = chemically synthesized
  source 1..22: mol_type = other DNA
tcacttatgttgtcatttcggc

SEQ ID NO: 42124 - DNA, 22 bp, synthetic construct
  misc_feature 1..22: note = chemically synthesized
  source 1..22: mol_type = other DNA
cacttatgttgtcatttcggca

SEQ ID NO: 42125 - DNA, 22 bp, synthetic construct
  misc_feature 1..22: note = chemically synthesized
  source 1..22: mol_type = other DNA
acttatgttgtcatttcggcac

SEQ ID NO: 42126 - DNA, 22 bp, synthetic construct
  misc_feature 1..22: note = chemically synthesized
  source 1..22: mol_type = other DNA
atgttgtcatttcggcacagtt

SEQ ID NO: 42127 - DNA, 22 bp, synthetic construct
  misc_feature 1..22: note = chemically synthesized
  source 1..22: mol_type = other DNA
tgttgtcatttcggcacagttt

SEQ ID NO: 42128 - DNA, 22 bp, synthetic construct
  misc_feature 1..22: note = chemically synthesized
  source 1..22: mol_type = other DNA
tcatttcggcacagtttggtat

SEQ ID NO: 42129 - DNA, 22 bp, synthetic construct
  misc_feature 1..22: note = chemically synthesized
  source 1..22: mol_type = other DNA
cggcacagtttggtataggatg

SEQ ID NO: 42130 - DNA, 22 bp, synthetic construct
  misc_feature 1..22: note = chemically synthesized
  source 1..22: mol_type = other DNA
ggcacagtttggtataggatgt

SEQ ID NO: 42131 - DNA, 22 bp, synthetic construct
  misc_feature 1..22: note = chemically synthesized
  source 1..22: mol_type = other DNA
ggtataggatgtggagatgtta

SEQ ID NO: 42132 - DNA, 22 bp, synthetic construct
  misc_feature 1..22: note = chemically synthesized
  source 1..22: mol_type = other DNA
gtataggatgtggagatgttaa

SEQ ID NO: 42133 - DNA, 22 bp, synthetic construct
  misc_feature 1..22: note = chemically synthesized
  source 1..22: mol_type = other DNA
acatttatacctagcttgctcg

SEQ ID NO: 42134 - DNA, 22 bp, synthetic construct
  misc_feature 1..22: note = chemically synthesized
  source 1..22: mol_type = other DNA
atacctagcttgctcgtaaact

SEQ ID NO: 42135 - DNA, 22 bp, synthetic construct
  misc_feature 1..22: note = chemically synthesized
  source 1..22: mol_type = other DNA
tacctagcttgctcgtaaacta

SEQ ID NO: 42136 - DNA, 22 bp, synthetic construct
  misc_feature 1..22: note = chemically synthesized
  source 1..22: mol_type = other DNA
gcttgctcgtaaactaagacct

SEQ ID NO: 42137 - DNA, 22 bp, synthetic construct
  misc_feature 1..22: note = chemically synthesized
  source 1..22: mol_type = other DNA
gctcgtaaactaagacctgaaa

SEQ ID NO: 42138 - DNA, 22 bp, synthetic construct
  misc_feature 1..22: note = chemically synthesized
  source 1..22: mol_type = other DNA
ctcgtaaactaagacctgaaag

SEQ ID NO: 42139 - DNA, 22 bp, synthetic construct
  misc_feature 1..22: note = chemically synthesized
  source 1..22: mol_type = other DNA
gtaaactaagacctgaaagggt

SEQ ID NO: 42140 - DNA, 22 bp, synthetic construct
  misc_feature 1..22: note = chemically synthesized
  source 1..22: mol_type = other DNA
agacctgaaagggttgtgtcta

SEQ ID NO: 42141 - DNA, 22 bp, synthetic construct
  misc_feature 1..22: note = chemically synthesized
  source 1..22: mol_type = other DNA
aaagggttgtgtctatcagctg

SEQ ID NO: 42142 - DNA, 22 bp, synthetic construct
  misc_feature 1..22: note = chemically synthesized
  source 1..22: mol_type = other DNA
tgtctatcagctgcacccctgg

SEQ ID NO: 42143 - DNA, 22 bp, synthetic construct
  misc_feature 1..22: note = chemically synthesized
  source 1..22: mol_type = other DNA
tcagctgcacccctgggtagcg

SEQ ID NO: 42144 - DNA, 22 bp, synthetic construct
  misc_feature 1..22: note = chemically synthesized
  source 1..22: mol_type = other DNA
cacccctgggtagcgacacaac

SEQ ID NO: 42145 - DNA, 22 bp, synthetic construct
  misc_feature 1..22: note = chemically synthesized
  source 1..22: mol_type = other DNA
ggtagcgacacaacctcgggaa

SEQ ID NO: 42146 - DNA, 22 bp, synthetic construct
  misc_feature 1..22: note = chemically synthesized
  source 1..22: mol_type = other DNA
gggaaggcctcagccccctcct

SEQ ID NO: 42147 - DNA, 22 bp, synthetic construct
  misc_feature 1..22: note = chemically synthesized
  source 1..22: mol_type = other DNA
agccccctcctcgtacagcact

SEQ ID NO: 42148 - DNA, 22 bp, synthetic construct
  misc_feature 1..22: note = chemically synthesized
  source 1..22: mol_type = other DNA
ctcgtacagcactgcctgttgg

SEQ ID NO: 42149 - DNA, 22 bp, synthetic construct
  misc_feature 1..22: note = chemically synthesized
  source 1..22: mol_type = other DNA
gtacagcactgcctgttggaaa

SEQ ID NO: 42150 - DNA, 22 bp, synthetic construct
  misc_feature 1..22: note = chemically synthesized
  source 1..22: mol_type = other DNA
cctgttggaaagcttgagggag

SEQ ID NO: 42151 - DNA, 22 bp, synthetic construct
  misc_feature 1..22: note = chemically synthesized
  source 1..22: mol_type = other DNA
ttggaaagcttgagggaggcta

SEQ ID NO: 42152 - DNA, 22 bp, synthetic construct
  misc_feature 1..22: note = chemically synthesized
  source 1..22: mol_type = other DNA
gaaagcttgagggaggctatgg

SEQ ID NO: 42153 - DNA, 22 bp, synthetic construct
  misc_feature 1..22: note = chemically synthesized
  source 1..22: mol_type = other DNA
gagggaggctatggatgtgcag

SEQ ID NO: 42154 - DNA, 22 bp, synthetic construct
  misc_feature 1..22: note = chemically synthesized
  source 1..22: mol_type = other DNA
agggaggctatggatgtgcagc

SEQ ID NO: 42155 - DNA, 22 bp, synthetic construct
  misc_feature 1..22: note = chemically synthesized
  source 1..22: mol_type = other DNA
tggatgtgcagcacttggcaga

SEQ ID NO: 42156 - DNA, 22 bp, synthetic construct
  misc_feature 1..22: note = chemically synthesized
  source 1..22: mol_type = other DNA
ggcagagggtctggtcatggaa

SEQ ID NO: 42157 - DNA, 22 bp, synthetic construct
  misc_feature 1..22: note = chemically synthesized
  source 1..22: mol_type = other DNA
gcagagggtctggtcatggaag

SEQ ID NO: 42158 - DNA, 22 bp, synthetic construct
  misc_feature 1..22: note = chemically synthesized
  source 1..22: mol_type = other DNA
gtcatggaagttaccagcaaat

SEQ ID NO: 42159 - DNA, 22 bp, synthetic construct
  misc_feature 1..22: note = chemically synthesized
  source 1..22: mol_type = other DNA
ccagcaaatatgagctactttt

SEQ ID NO: 42160 - DNA, 22 bp, synthetic construct
  misc_feature 1..22: note = chemically synthesized
  source 1..22: mol_type = other DNA
cttttatgattttattttatcc

SEQ ID NO: 42161 - DNA, 22 bp, synthetic construct
  misc_feature 1..22: note = chemically synthesized
  source 1..22: mol_type = other DNA
ttatgattttattttatccaaa

SEQ ID NO: 42162 - DNA, 22 bp, synthetic construct
  misc_feature 1..22: note = chemically synthesized
  source 1..22: mol_type = other DNA
tatgattttattttatccaaaa

SEQ ID NO: 42163 - DNA, 22 bp, synthetic construct
  misc_feature 1..22: note = chemically synthesized
  source 1..22: mol_type = other DNA
atgattttattttatccaaaag

SEQ ID NO: 42164 - DNA, 22 bp, synthetic construct
  misc_feature 1..22: note = chemically synthesized
  source 1..22: mol_type = other DNA
tgattttattttatccaaaaga

SEQ ID NO: 42165 - DNA, 22 bp, synthetic construct
  misc_feature 1..22: note = chemically synthesized
  source 1..22: mol_type = other DNA
tattttatccaaaagaaagaga

SEQ ID NO: 42166 - DNA, 22 bp, synthetic construct
  misc_feature 1..22: note = chemically synthesized
  source 1..22: mol_type = other DNA
attttatccaaaagaaagagaa

SEQ ID NO: 42167 - DNA, 22 bp, synthetic construct
  misc_feature 1..22: note = chemically synthesized
  source 1..22: mol_type = other DNA
ttttatccaaaagaaagagaat

SEQ ID NO: 42168 - DNA, 22 bp, synthetic construct
  misc_feature 1..22: note = chemically synthesized
  source 1..22: mol_type = other DNA
tatccaaaagaaagagaatgaa

SEQ ID NO: 42169 - DNA, 22 bp, synthetic construct
  misc_feature 1..22: note = chemically synthesized
  source 1..22: mol_type = other DNA
atccaaaagaaagagaatgaaa

SEQ ID NO: 42170 - DNA, 22 bp, synthetic construct
  misc_feature 1..22: note = chemically synthesized
  source 1..22: mol_type = other DNA
tccaaaagaaagagaatgaaag

SEQ ID NO: 42171 - DNA, 22 bp, synthetic construct
  misc_feature 1..22: note = chemically synthesized
  source 1..22: mol_type = other DNA
atcaggaaagatgaaggtctag

SEQ ID NO: 42172 - DNA, 22 bp, synthetic construct
  misc_feature 1..22: note = chemically synthesized
  source 1..22: mol_type = other DNA
ggggtgagggaaggagtaagga

SEQ ID NO: 42173 - DNA, 22 bp, synthetic construct
  misc_feature 1..22: note = chemically synthesized
  source 1..22: mol_type = other DNA
aggggggaaatggctttcacca

SEQ ID NO: 42174 - DNA, 22 bp, synthetic construct
  misc_feature 1..22: note = chemically synthesized
  source 1..22: mol_type = other DNA
tcaccacttcccagcatctatt

SEQ ID NO: 42175 - DNA, 22 bp, synthetic construct
  misc_feature 1..22: note = chemically synthesized
  source 1..22: mol_type = other DNA
caccacttcccagcatctattg

SEQ ID NO: 42176 - DNA, 22 bp, synthetic construct
  misc_feature 1..22: note = chemically synthesized
  source 1..22: mol_type = other DNA
accacttcccagcatctattga

SEQ ID NO: 42177 - DNA, 22 bp, synthetic construct
  misc_feature 1..22: note = chemically synthesized
  source 1..22: mol_type = other DNA
cccagcatctattgacattgca

SEQ ID NO: 42178 - DNA, 22 bp, synthetic construct
  misc_feature 1..22: note = chemically synthesized
  source 1..22: mol_type = other DNA
ccagcatctattgacattgcac

SEQ ID NO: 42179 - DNA, 22 bp, synthetic construct
  misc_feature 1..22: note = chemically synthesized
  source 1..22: mol_type = other DNA
ttgacattgcactctcaaatat

SEQ ID NO: 42180 - DNA, 22 bp, synthetic construct
  misc_feature 1..22: note = chemically synthesized
  source 1..22: mol_type = other DNA
acattgcactctcaaatatttt

SEQ ID NO: 42181 - DNA, 22 bp, synthetic construct
  misc_feature 1..22: note = chemically synthesized
  source 1..22: mol_type = other DNA
cactctcaaatattttataaga

SEQ ID NO: 42182 - DNA, 22 bp, synthetic construct
  misc_feature 1..22: note = chemically synthesized
  source 1..22: mol_type = other DNA
tcaaatattttataagactcta

SEQ ID NO: 42183 - DNA, 22 bp, synthetic construct
  misc_feature 1..22: note = chemically synthesized
  source 1..22: mol_type = other DNA
aaatattttataagactctata

SEQ ID NO: 42184 - DNA, 22 bp, synthetic construct
  misc_feature 1..22: note = chemically synthesized
  source 1..22: mol_type = other DNA
tataagactctatattcaaggt

SEQ ID NO: 42185 - DNA, 22 bp, synthetic construct
  misc_feature 1..22: note = chemically synthesized
  source 1..22: mol_type = other DNA
ataagactctatattcaaggta

SEQ ID NO: 42186 - DNA, 22 bp, synthetic construct
  misc_feature 1..22: note = chemically synthesized
  source 1..22: mol_type = other DNA
taagactctatattcaaggtaa

SEQ ID NO: 42187 - DNA, 22 bp, synthetic construct
  misc_feature 1..22: note = chemically synthesized
  source 1..22: mol_type = other DNA
tatattcaaggtaatgtttgaa

SEQ ID NO: 42188 - DNA, 22 bp, synthetic construct
  misc_feature 1..22: note = chemically synthesized
  source 1..22: mol_type = other DNA
tattcaaggtaatgtttgaacc

SEQ ID NO: 42189 - DNA, 22 bp, synthetic construct
  misc_feature 1..22: note = chemically synthesized
  source 1..22: mol_type = other DNA
aaggtaatgtttgaaccctgct

SEQ ID NO: 42190 - DNA, 22 bp, synthetic construct
  misc_feature 1..22: note = chemically synthesized
  source 1..22: mol_type = other DNA
gaaccctgctgagccagtggca

SEQ ID NO: 42191 - DNA, 22 bp, synthetic construct
  misc_feature 1..22: note = chemically synthesized
  source 1..22: mol_type = other DNA
aaccctgctgagccagtggcat

SEQ ID NO: 42192 - DNA, 22 bp, synthetic construct
  misc_feature 1..22: note = chemically synthesized
  source 1..22: mol_type = other DNA
ctgagccagtggcatgggtctc

SEQ ID NO: 42193 - DNA, 22 bp, synthetic construct
  misc_feature 1..22: note = chemically synthesized
  source 1..22: mol_type = other DNA
agccagtggcatgggtctctga

SEQ ID NO: 42194 - DNA, 22 bp, synthetic construct
  misc_feature 1..22: note = chemically synthesized
  source 1..22: mol_type = other DNA
tgagagaatcattaacttaatt

SEQ ID NO: 42195 - DNA, 22 bp, synthetic construct
  misc_feature 1..22: note = chemically synthesized
  source 1..22: mol_type = other DNA
agagaatcattaacttaatttg

SEQ ID NO: 42196 - DNA, 22 bp, synthetic construct
  misc_feature 1..22: note = chemically synthesized
  source 1..22: mol_type = other DNA
acttaatttgactatctggttt

SEQ ID NO: 42197 - DNA, 22 bp, synthetic construct
  misc_feature 1..22: note = chemically synthesized
  source 1..22: mol_type = other DNA
aatttgactatctggtttgtgg

SEQ ID NO: 42198 - DNA, 22 bp, synthetic construct
  misc_feature 1..22: note = chemically synthesized
  source 1..22: mol_type = other DNA
atttgactatctggtttgtggg

SEQ ID NO: 42199 - DNA, 22 bp, synthetic construct
  misc_feature 1..22: note = chemically synthesized
  source 1..22: mol_type = other DNA
gactatctggtttgtgggtgcg

SEQ ID NO: 42200 - DNA, 22 bp, synthetic construct
  misc_feature 1..22: note = chemically synthesized
  source 1..22: mol_type = other DNA
actatctggtttgtgggtgcgt

SEQ ID NO: 42201 - DNA, 22 bp, synthetic construct
  misc_feature 1..22: note = chemically synthesized
  source 1..22: mol_type = other DNA
tctggtttgtgggtgcgtttac

SEQ ID NO: 42202 - DNA, 22 bp, synthetic construct
  misc_feature 1..22: note = chemically synthesized
  source 1..22: mol_type = other DNA
gtttgtgggtgcgtttactctc

SEQ ID NO: 42203 - DNA, 22 bp, synthetic construct
  misc_feature 1..22: note = chemically synthesized
  source 1..22: mol_type = other DNA
gtgggtgcgtttactctcatgt

SEQ ID NO: 42204 - DNA, 22 bp, synthetic construct
  misc_feature 1..22: note = chemically synthesized
  source 1..22: mol_type = other DNA
tgggtgcgtttactctcatgta

SEQ ID NO: 42205 - DNA, 22 bp, synthetic construct
  misc_feature 1..22: note = chemically synthesized
  source 1..22: mol_type = other DNA
actctcatgtaagtcaacaatg

SEQ ID NO: 42206 - DNA, 22 bp, synthetic construct
  misc_feature 1..22: note = chemically synthesized
  source 1..22: mol_type = other DNA
ctctcatgtaagtcaacaatgt

SEQ ID NO: 42207 - DNA, 22 bp, synthetic construct
  misc_feature 1..22: note = chemically synthesized
  source 1..22: mol_type = other DNA
tcatgtaagtcaacaatgtcct

SEQ ID NO: 42208 - DNA, 22 bp, synthetic construct
  misc_feature 1..22: note = chemically synthesized
  source 1..22: mol_type = other DNA
atgtaagtcaacaatgtcctgg

SEQ ID NO: 42209 - DNA, 22 bp, synthetic construct
  misc_feature 1..22: note = chemically synthesized
  source 1..22: mol_type = other DNA
ggattgggacacactttctggg

SEQ ID NO: 42210 - DNA, 22 bp, synthetic construct
  misc_feature 1..22: note = chemically synthesized
  source 1..22: mol_type = other DNA
ggacacactttctgggcactgc

SEQ ID NO: 42211 - DNA, 22 bp, synthetic construct
  misc_feature 1..22: note = chemically synthesized
  source 1..22: mol_type = other DNA
tctgggcactgctggccagtcc

SEQ ID NO: 42212 - DNA, 22 bp, synthetic construct
  misc_feature 1..22: note = chemically synthesized
  source 1..22: mol_type = other DNA
ctgggcactgctggccagtccc

SEQ ID NO: 42213 - DNA, 22 bp, synthetic construct
  misc_feature 1..22: note = chemically synthesized
  source 1..22: mol_type = other DNA
tgggcactgctggccagtccca

SEQ ID NO: 42214 - DNA, 22 bp, synthetic construct
  misc_feature 1..22: note = chemically synthesized
  source 1..22: mol_type = other DNA
ggcactgctggccagtcccaaa

SEQ ID NO: 42215 - DNA, 22 bp, synthetic construct
  misc_feature 1..22: note = chemically synthesized
  source 1..22: mol_type = other DNA
ctggccagtcccaaaatggaac

SEQ ID NO: 42216 - DNA, 22 bp, synthetic construct
  misc_feature 1..22: note = chemically synthesized
  source 1..22: mol_type = other DNA
gccagtcccaaaatggaacata

SEQ ID NO: 42217 - DNA, 22 bp, synthetic construct
  misc_feature 1..22: note = chemically synthesized
  source 1..22: mol_type = other DNA
ttctacttcttttatttctgaa

SEQ ID NO: 42218 - DNA, 22 bp, synthetic construct
  misc_feature 1..22: note = chemically synthesized
  source 1..22: mol_type = other DNA
ctacttcttttatttctgaaat

SEQ ID NO: 42219 - DNA, 22 bp, synthetic construct
  misc_feature 1..22: note = chemically synthesized
  source 1..22: mol_type = other DNA
tacttcttttatttctgaaatc

SEQ ID NO: 42220 - DNA, 22 bp, synthetic construct
  misc_feature 1..22: note = chemically synthesized
  source 1..22: mol_type = other DNA
cttcttttatttctgaaatcag

SEQ ID NO: 42221 - DNA, 22 bp, synthetic construct
  misc_feature 1..22: note = chemically synthesized
  source 1..22: mol_type = other DNA
cttttatttctgaaatcaggta

SEQ ID NO: 42222 - DNA, 22 bp, synthetic construct
  misc_feature 1..22: note = chemically synthesized
  source 1..22: mol_type = other DNA
ttttatttctgaaatcaggtaa

SEQ ID NO: 42223 - DNA, 22 bp, synthetic construct
  misc_feature 1..22: note = chemically synthesized
  source 1..22: mol_type = other DNA
ttatttctgaaatcaggtaaga

SEQ ID NO: 42224 - DNA, 22 bp, synthetic construct
  misc_feature 1..22: note = chemically synthesized
  source 1..22: mol_type = other DNA
tatttctgaaatcaggtaagac

SEQ ID NO: 42225 - DNA, 22 bp, synthetic construct
  misc_feature 1..22: note = chemically synthesized
  source 1..22: mol_type = other DNA
atttctgaaatcaggtaagaca

SEQ ID NO: 42226 - DNA, 22 bp, synthetic construct
  misc_feature 1..22: note = chemically synthesized
  source 1..22: mol_type = other DNA
tttctgaaatcaggtaagacat

SEQ ID NO: 42227 - DNA, 22 bp, synthetic construct
  misc_feature 1..22: note = chemically synthesized
  source 1..22: mol_type = other DNA
ctgaaatcaggtaagacatagt

SEQ ID NO: 42228 - DNA, 22 bp, synthetic construct
  misc_feature 1..22: note = chemically synthesized
  source 1..22: mol_type = other DNA
tgaaatcaggtaagacatagtt

SEQ ID NO: 42229 - DNA, 22 bp, synthetic construct
  misc_feature 1..22: note = chemically synthesized
  source 1..22: mol_type = other DNA
aaatcaggtaagacatagtttt

SEQ ID NO: 42230 - DNA, 22 bp, synthetic construct
  misc_feature 1..22: note = chemically synthesized
  source 1..22: mol_type = other DNA
ttttaaattataagaattattt

SEQ ID NO: 42231 - DNA, 22 bp, synthetic construct
  misc_feature 1..22: note = chemically synthesized
  source 1..22: mol_type = other DNA
tttaaattataagaattatttt

SEQ ID NO: 42232 - DNA, 22 bp, synthetic construct
  misc_feature 1..22: note = chemically synthesized
  source 1..22: mol_type = other DNA
ttaaattataagaattattttt

SEQ ID NO: 42233 - DNA, 22 bp, synthetic construct
  misc_feature 1..22: note = chemically synthesized
  source 1..22: mol_type = other DNA
taaattataagaattatttttt

SEQ ID NO: 42234 - DNA, 22 bp, synthetic construct
  misc_feature 1..22: note = chemically synthesized
  source 1..22: mol_type = other DNA
aaattataagaattattttttc

SEQ ID NO: 42235 - DNA, 22 bp, synthetic construct
  misc_feature 1..22: note = chemically synthesized
  source 1..22: mol_type = other DNA
aattataagaattattttttct

SEQ ID NO: 42236 - DNA, 22 bp, synthetic construct
  misc_feature 1..22: note = chemically synthesized
  source 1..22: mol_type = other DNA
taagaattattttttctcccac

SEQ ID NO: 42237 - DNA, 22 bp, synthetic construct
  misc_feature 1..22: note = chemically synthesized
  source 1..22: mol_type = other DNA
ttttttctcccacaatgtagta

SEQ ID NO: 42238 - DNA, 22 bp, synthetic construct
  misc_feature 1..22: note = chemically synthesized
  source 1..22: mol_type = other DNA
tttctcccacaatgtagtaaaa

SEQ ID NO: 42239 - DNA, 22 bp, synthetic construct
  misc_feature 1..22: note = chemically synthesized
  source 1..22: mol_type = other DNA
ttctcccacaatgtagtaaaaa

SEQ ID NO: 42240 - DNA, 22 bp, synthetic construct
  misc_feature 1..22: note = chemically synthesized
  source 1..22: mol_type = other DNA
tctcccacaatgtagtaaaaat

SEQ ID NO: 42241 - DNA, 22 bp, synthetic construct
  misc_feature 1..22: note = chemically synthesized
  source 1..22: mol_type = other DNA
ctcccacaatgtagtaaaaata

SEQ ID NO: 42242 - DNA, 22 bp, synthetic construct
  misc_feature 1..22: note = chemically synthesized
  source 1..22: mol_type = other DNA
tcccacaatgtagtaaaaatac

SEQ ID NO: 42243 - DNA, 22 bp, synthetic construct
  misc_feature 1..22: note = chemically synthesized
  source 1..22: mol_type = other DNA
ccacaatgtagtaaaaatacat

SEQ ID NO: 42244 - DNA, 22 bp, synthetic construct
  misc_feature 1..22: note = chemically synthesized
  source 1..22: mol_type = other DNA
tatgtgcaattcatttaatttt

SEQ ID NO: 42245 - DNA, 22 bp, synthetic construct
  misc_feature 1..22: note = chemically synthesized
  source 1..22: mol_type = other DNA
atgtgcaattcatttaattttt

SEQ ID NO: 42246 - DNA, 22 bp, synthetic construct
  misc_feature 1..22: note = chemically synthesized
  source 1..22: mol_type = other DNA
tgtgcaattcatttaatttttg

SEQ ID NO: 42247 - DNA, 22 bp, synthetic construct
  misc_feature 1..22: note = chemically synthesized
  source 1..22: mol_type = other DNA
atttaatttttgattcatgaaa

SEQ ID NO: 42248 - DNA, 22 bp, synthetic construct
  misc_feature 1..22: note = chemically synthesized
  source 1..22: mol_type = other DNA
aatttttgattcatgaaattcc

SEQ ID NO: 42249 - DNA, 22 bp, synthetic construct
  misc_feature 1..22: note = chemically synthesized
  source 1..22: mol_type = other DNA
atttttgattcatgaaattccc

SEQ ID NO: 42250 - DNA, 22 bp, synthetic construct
  misc_feature 1..22: note = chemically synthesized
  source 1..22: mol_type = other DNA
ttgattcatgaaattcccagtt

SEQ ID NO: 42251 - DNA, 22 bp, synthetic construct
  misc_feature 1..22: note = chemically synthesized
  source 1..22: mol_type = other DNA
tgattcatgaaattcccagttc

SEQ ID NO: 42252 - DNA, 22 bp, synthetic construct
  misc_feature 1..22: note = chemically synthesized
  source 1..22: mol_type = other DNA
gattcatgaaattcccagttca

SEQ ID NO: 42253 - DNA, 22 bp, synthetic construct
  misc_feature 1..22: note = chemically synthesized
  source 1..22: mol_type = other DNA
attcatgaaattcccagttcaa

SEQ ID NO: 42254 - DNA, 22 bp, synthetic construct
  misc_feature 1..22: note = chemically synthesized
  source 1..22: mol_type = other DNA
atgaaattcccagttcaaaatc

SEQ ID NO: 42255 - DNA, 22 bp, synthetic construct
  misc_feature 1..22: note = chemically synthesized
  source 1..22: mol_type = other DNA
ccagttcaaaatcttgtatatg

SEQ ID NO: 42256 - DNA, 22 bp, synthetic construct
  misc_feature 1..22: note = chemically synthesized
  source 1..22: mol_type = other DNA
aaaatcttgtatatgattgaaa

SEQ ID NO: 42257 - DNA, 22 bp, synthetic construct
  misc_feature 1..22: note = chemically synthesized
  source 1..22: mol_type = other DNA
gtatatgattgaaaaattctta

SEQ ID NO: 42258 - DNA, 22 bp, synthetic construct
  misc_feature 1..22: note = chemically synthesized
  source 1..22: mol_type = other DNA
tatatgattgaaaaattcttaa

SEQ ID NO: 42259 - DNA, 22 bp, synthetic construct
  misc_feature 1..22: note = chemically synthesized
  source 1..22: mol_type = other DNA
aaaaattcttaaaaaaataagt

SEQ ID NO: 42260 - DNA, 22 bp, synthetic construct
  misc_feature 1..22: note = chemically synthesized
  source 1..22: mol_type = other DNA
ttaaaaaaataagtttaatttc

SEQ ID NO: 42261 - DNA, 22 bp, synthetic construct
  misc_feature 1..22: note = chemically synthesized
  source 1..22: mol_type = other DNA
aaaaaaataagtttaatttccc

SEQ ID NO: 42262 - DNA, 22 bp, synthetic construct
  misc_feature 1..22: note = chemically synthesized
  source 1..22: mol_type = other DNA
aaaaaataagtttaatttcccc

SEQ ID NO: 42263 - DNA, 22 bp, synthetic construct
  misc_feature 1..22: note = chemically synthesized
  source 1..22: mol_type = other DNA
aatttccccgtgaagactgtca

SEQ ID NO: 42264 - DNA, 22 bp, synthetic construct
  misc_feature 1..22: note = chemically synthesized
  source 1..22: mol_type = other DNA
atttccccgtgaagactgtcac

SEQ ID NO: 42265 - DNA, 22 bp, synthetic construct
  misc_feature 1..22: note = chemically synthesized
  source 1..22: mol_type = other DNA
ccccgtgaagactgtcacggtg

SEQ ID NO: 42266 - DNA, 22 bp, synthetic construct
  misc_feature 1..22: note = chemically synthesized
  source 1..22: mol_type = other DNA
cccgtgaagactgtcacggtgc

SEQ ID NO: 42267 - DNA, 22 bp, synthetic construct
  misc_feature 1..22: note = chemically synthesized
  source 1..22: mol_type = other DNA
tcacggtgctggaatgaatggg

SEQ ID NO: 42268 - DNA, 22 bp, synthetic construct
  misc_feature 1..22: note = chemically synthesized
  source 1..22: mol_type = other DNA
gaatgaatgggcagaaaaaata

SEQ ID NO: 42269 - DNA, 22 bp, synthetic construct
  misc_feature 1..22: note = chemically synthesized
  source 1..22: mol_type = other DNA
atttttctaatctaaaagagtg

SEQ ID NO: 42270 - DNA, 22 bp, synthetic construct
  misc_feature 1..22: note = chemically synthesized
  source 1..22: mol_type = other DNA
ttctaatctaaaagagtgtgcc

SEQ ID NO: 42271 - DNA, 22 bp, synthetic construct
  misc_feature 1..22: note = chemically synthesized
  source 1..22: mol_type = other DNA
tctaatctaaaagagtgtgcct

SEQ ID NO: 42272 - DNA, 22 bp, synthetic construct
  misc_feature 1..22: note = chemically synthesized
  source 1..22: mol_type = other DNA
ctaatctaaaagagtgtgccta

SEQ ID NO: 42273 - DNA, 22 bp, synthetic construct
  misc_feature 1..22: note = chemically synthesized
  source 1..22: mol_type = other DNA
taatctaaaagagtgtgcctac

SEQ ID NO: 42274 - DNA, 22 bp, synthetic construct
  misc_feature 1..22: note = chemically synthesized
  source 1..22: mol_type = other DNA
atctaaaagagtgtgcctacat

SEQ ID NO: 42275 - DNA, 22 bp, synthetic construct
  misc_feature 1..22: note = chemically synthesized
  source 1..22: mol_type = other DNA
aaagagtgtgcctacatgatgg

SEQ ID NO: 42276 - DNA, 22 bp, synthetic construct
  misc_feature 1..22: note = chemically synthesized
  source 1..22: mol_type = other DNA
catgatggccagtctggctgaa

SEQ ID NO: 42277 - DNA, 22 bp, synthetic construct
  misc_feature 1..22: note = chemically synthesized
  source 1..22: mol_type = other DNA
gctgaaaaataaatagccattg

SEQ ID NO: 42278 - DNA, 22 bp, synthetic construct
  misc_feature 1..22: note = chemically synthesized
  source 1..22: mol_type = other DNA
aaaaataaatagccattgtagc

SEQ ID NO: 42279 - DNA, 22 bp, synthetic construct
  misc_feature 1..22: note = chemically synthesized
  source 1..22: mol_type = other DNA
tagctaactatgcaaaggatgg

SEQ ID NO: 42280 - DNA, 22 bp, synthetic construct
  misc_feature 1..22: note = chemically synthesized
  source 1..22: mol_type = other DNA
actatgcaaaggatggctaagc

SEQ ID NO: 42281 - DNA, 22 bp, synthetic construct
  misc_feature 1..22: note = chemically synthesized
  source 1..22: mol_type = other DNA
tgcaaaggatggctaagctctt

SEQ ID NO: 42282 - DNA, 22 bp, synthetic construct
  misc_feature 1..22: note = chemically synthesized
  source 1..22: mol_type = other DNA
agctcttcgcttggttctcagt

SEQ ID NO: 42283 - DNA, 22 bp, synthetic construct
  misc_feature 1..22: note = chemically synthesized
  source 1..22: mol_type = other DNA
ttcgcttggttctcagtttcat

SEQ ID NO: 42284 - DNA, 22 bp, synthetic construct
  misc_feature 1..22: note = chemically synthesized
  source 1..22: mol_type = other DNA
cgcttggttctcagtttcatta

SEQ ID NO: 42285 - DNA, 22 bp, synthetic construct
  misc_feature 1..22: note = chemically synthesized
  source 1..22: mol_type = other DNA
gcttggttctcagtttcattaa

SEQ ID NO: 42286 - DNA, 22 bp, synthetic construct
  misc_feature 1..22: note = chemically synthesized
  source 1..22: mol_type = other DNA
ggttctcagtttcattaattta

SEQ ID NO: 42287 - DNA, 22 bp, synthetic construct
  misc_feature 1..22: note = chemically synthesized
  source 1..22: mol_type = other DNA
gttctcagtttcattaatttat

SEQ ID NO: 42288 - DNA, 22 bp, synthetic construct
  misc_feature 1..22: note = chemically synthesized
  source 1..22: mol_type = other DNA
tcagtttcattaatttatatca

SEQ ID NO: 42289 - DNA, 22 bp, synthetic construct
  misc_feature 1..22: note = chemically synthesized
  source 1..22: mol_type = other DNA
agtttcattaatttatatcatc

SEQ ID NO: 42290 - DNA, 22 bp, synthetic construct
  misc_feature 1..22: note = chemically synthesized
  source 1..22: mol_type = other DNA
cattaatttatatcatctctgt

SEQ ID NO: 42291 - DNA, 22 bp, synthetic construct
  misc_feature 1..22: note = chemically synthesized
  source 1..22: mol_type = other DNA
attaatttatatcatctctgtt

SEQ ID NO: 42292 - DNA, 22 bp, synthetic construct
  misc_feature 1..22: note = chemically synthesized
  source 1..22: mol_type = other DNA
atttatatcatctctgttcagg

SEQ ID NO: 42293 - DNA, 22 bp, synthetic construct
  misc_feature 1..22: note = chemically synthesized
  source 1..22: mol_type = other DNA
atatcatctctgttcaggtgcc

SEQ ID NO: 42294 - DNA, 22 bp, synthetic construct
  misc_feature 1..22: note = chemically synthesized
  source 1..22: mol_type = other DNA
tatcatctctgttcaggtgcca

SEQ ID NO: 42295 - DNA, 22 bp, synthetic construct
  misc_feature 1..22: note = chemically synthesized
  source 1..22: mol_type = other DNA
tgttcaggtgccatgctcccct

SEQ ID NO: 42296 - DNA, 22 bp, synthetic construct
  misc_feature 1..22: note = chemically synthesized
  source 1..22: mol_type = other DNA
ttcaggtgccatgctcccctca

SEQ ID NO: 42297 - DNA, 22 bp, synthetic construct
  misc_feature 1..22: note = chemically synthesized
  source 1..22: mol_type = other DNA
aggtgccatgctcccctcacta

SEQ ID NO: 42298 - DNA, 22 bp, synthetic construct
  misc_feature 1..22: note = chemically synthesized
  source 1..22: mol_type = other DNA
ccctcactagcaagttgaaaca

SEQ ID NO: 42299 - DNA, 22 bp, synthetic construct
  misc_feature 1..22: note = chemically synthesized
  source 1..22: mol_type = other DNA
actagcaagttgaaacaatgaa

SEQ ID NO: 42300 - DNA, 22 bp, synthetic construct
  misc_feature 1..22: note = chemically synthesized
  source 1..22: mol_type = other DNA
gcaagttgaaacaatgaaataa

SEQ ID NO: 42301 - DNA, 22 bp, synthetic construct
  misc_feature 1..22: note = chemically synthesized
  source 1..22: mol_type = other DNA
aaacaatgaaataactctttga

SEQ ID NO: 42302 - DNA, 22 bp, synthetic construct
  misc_feature 1..22: note = chemically synthesized
  source 1..22: mol_type = other DNA
tttgaatatgtttggttccttg

SEQ ID NO: 42303 - DNA, 22 bp, synthetic construct
  misc_feature 1..22: note = chemically synthesized
  source 1..22: mol_type = other DNA
tgaatatgtttggttccttgac

SEQ ID NO: 42304 - DNA, 22 bp, synthetic construct
  misc_feature 1..22: note = chemically synthesized
  source 1..22: mol_type = other DNA
gaatatgtttggttccttgacc

SEQ ID NO: 42305 - DNA, 22 bp, synthetic construct
  misc_feature 1..22: note = chemically synthesized
  source 1..22: mol_type = other DNA
aatatgtttggttccttgacct

SEQ ID NO: 42306 - DNA, 22 bp, synthetic construct
  misc_feature 1..22: note = chemically synthesized
  source 1..22: mol_type = other DNA
ggttccttgacctgttcatgga

SEQ ID NO: 42307 - DNA, 22 bp, synthetic construct
  misc_feature 1..22: note = chemically synthesized
  source 1..22: mol_type = other DNA
gttccttgacctgttcatggag

SEQ ID NO: 42308 - DNA, 22 bp, synthetic construct
  misc_feature 1..22: note = chemically synthesized
  source 1..22: mol_type = other DNA
cttgacctgttcatggagtggg

SEQ ID NO: 42309 - DNA, 22 bp, synthetic construct
  misc_feature 1..22: note = chemically synthesized
  source 1..22: mol_type = other DNA
gacctgttcatggagtgggact

SEQ ID NO: 42310 - DNA, 22 bp, synthetic construct
  misc_feature 1..22: note = chemically synthesized
  source 1..22: mol_type = other DNA
acctgttcatggagtgggactc

SEQ ID NO: 42311 - DNA, 22 bp, synthetic construct
  misc_feature 1..22: note = chemically synthesized
  source 1..22: mol_type = other DNA
ttcatggagtgggactcagcat

SEQ ID NO: 42312 - DNA, 22 bp, synthetic construct
  misc_feature 1..22: note = chemically synthesized
  source 1..22: mol_type = other DNA
atggagtgggactcagcatttc

SEQ ID NO: 42313 - DNA, 22 bp, synthetic construct
  misc_feature 1..22: note = chemically synthesized
  source 1..22: mol_type = other DNA
agcatttctctctttgttatgg

SEQ ID NO: 42314 - DNA, 22 bp, synthetic construct
  misc_feature 1..22: note = chemically synthesized
  source 1..22: mol_type = other DNA
ctctctttgttatggcctgagt

SEQ ID NO: 42315 - DNA, 22 bp, synthetic construct
  misc_feature 1..22: note = chemically synthesized
  source 1..22: mol_type = other DNA
tctctttgttatggcctgagta

SEQ ID NO: 42316 - DNA, 22 bp, synthetic construct
  misc_feature 1..22: note = chemically synthesized
  source 1..22: mol_type = other DNA
tctttgttatggcctgagtaag

SEQ ID NO: 42317 - DNA, 22 bp, synthetic construct
  misc_feature 1..22: note = chemically synthesized
  source 1..22: mol_type = other DNA
tttgttatggcctgagtaaggc

SEQ ID NO: 42318 - DNA, 22 bp, synthetic construct
  misc_feature 1..22: note = chemically synthesized
  source 1..22: mol_type = other DNA
tgttatggcctgagtaaggctt

SEQ ID NO: 42319 - DNA, 22 bp, synthetic construct
  misc_feature 1..22: note = chemically synthesized
  source 1..22: mol_type = other DNA
gttatggcctgagtaaggcttt

SEQ ID NO: 42320 - DNA, 22 bp, synthetic construct
  misc_feature 1..22: note = chemically synthesized
  source 1..22: mol_type = other DNA
ttatggcctgagtaaggctttc

SEQ ID NO: 42321 - DNA, 22 bp, synthetic construct
  misc_feature 1..22: note = chemically synthesized
  source 1..22: mol_type = other DNA
tggcctgagtaaggctttccat

SEQ ID NO: 42322 - DNA, 22 bp, synthetic construct
  misc_feature 1..22: note = chemically synthesized
  source 1..22: mol_type = other DNA
agtaaggctttccatcggtata

SEQ ID NO: 42323 - DNA, 22 bp, synthetic construct
  misc_feature 1..22: note = chemically synthesized
  source 1..22: mol_type = other DNA
tccatcggtatacatttgcttc

SEQ ID NO: 42324 - DNA, 22 bp, synthetic construct
  misc_feature 1..22: note = chemically synthesized
  source 1..22: mol_type = other DNA
ccatcggtatacatttgcttct

SEQ ID NO: 42325 - DNA, 22 bp, synthetic construct
  misc_feature 1..22: note = chemically synthesized
  source 1..22: mol_type = other DNA
catcggtatacatttgcttctt

SEQ ID NO: 42326 - DNA, 22 bp, synthetic construct
  misc_feature 1..22: note = chemically synthesized
  source 1..22: mol_type = other DNA
gcttcttatccctggagaaatt

SEQ ID NO: 42327 - DNA, 22 bp, synthetic construct
  misc_feature 1..22: note = chemically synthesized
  source 1..22: mol_type = other DNA
cttcttatccctggagaaatta

SEQ ID NO: 42328 - DNA, 22 bp, synthetic construct
  misc_feature 1..22: note = chemically synthesized
  source 1..22: mol_type = other DNA
cttatccctggagaaattatac

SEQ ID NO: 42329 - DNA, 22 bp, synthetic construct
  misc_feature 1..22: note = chemically synthesized
  source 1..22: mol_type = other DNA
ttatccctggagaaattataca

SEQ ID NO: 42330 - DNA, 22 bp, synthetic construct
  misc_feature 1..22: note = chemically synthesized
  source 1..22: mol_type = other DNA
atccctggagaaattatacaca

SEQ ID NO: 42331 - DNA, 22 bp, synthetic construct
  misc_feature 1..22: note = chemically synthesized
  source 1..22: mol_type = other DNA
tccctggagaaattatacacat

SEQ ID NO: 42332 - DNA, 22 bp, synthetic construct
  misc_feature 1..22: note = chemically synthesized
  source 1..22: mol_type = other DNA
gagaaattatacacatccattt

SEQ ID NO: 42333 - DNA, 22 bp, synthetic construct
  misc_feature 1..22: note = chemically synthesized
  source 1..22: mol_type = other DNA
tacacatccatttgccagatga

SEQ ID NO: 42334 - DNA, 22 bp, synthetic construct
  misc_feature 1..22: note = chemically synthesized
  source 1..22: mol_type = other DNA
gccagatgatatacgcatataa

SEQ ID NO: 42335 - DNA, 22 bp, synthetic construct
  misc_feature 1..22: note = chemically synthesized
  source 1..22: mol_type = other DNA
ccagatgatatacgcatataat

SEQ ID NO: 42336 - DNA, 22 bp, synthetic construct
  misc_feature 1..22: note = chemically synthesized
  source 1..22: mol_type = other DNA
aacaaatactcagggtatttgt

SEQ ID NO: 42337 - DNA, 22 bp, synthetic construct
  misc_feature 1..22: note = chemically synthesized
  source 1..22: mol_type = other DNA
agggtatttgttgagtgggtta

SEQ ID NO: 42338 - DNA, 22 bp, synthetic construct
  misc_feature 1..22: note = chemically synthesized
  source 1..22: mol_type = other DNA
gttgagtgggttaggtccccac

SEQ ID NO: 42339 - DNA, 22 bp, synthetic construct
  misc_feature 1..22: note = chemically synthesized
  source 1..22: mol_type = other DNA
ttgagtgggttaggtccccaca

SEQ ID NO: 42340 - DNA, 22 bp, synthetic construct
  misc_feature 1..22: note = chemically synthesized
  source 1..22: mol_type = other DNA
agtgggttaggtccccacattt

SEQ ID NO: 42341 - DNA, 22 bp, synthetic construct
  misc_feature 1..22: note = chemically synthesized
  source 1..22: mol_type = other DNA
ggtccccacatttttatacata

SEQ ID NO: 42342 - DNA, 22 bp, synthetic construct
  misc_feature 1..22: note = chemically synthesized
  source 1..22: mol_type = other DNA
ttatacatacatacacacatac

SEQ ID NO: 42343 - DNA, 22 bp, synthetic construct
  misc_feature 1..22: note = chemically synthesized
  source 1..22: mol_type = other DNA
tatacatacatacacacataca

SEQ ID NO: 42344 - DNA, 22 bp, synthetic construct
  misc_feature 1..22: note = chemically synthesized
  source 1..22: mol_type = other DNA
atacatacatacacacatacac

SEQ ID NO: 42345 - DNA, 22 bp, synthetic construct
  misc_feature 1..22: note = chemically synthesized
  source 1..22: mol_type = other DNA
tacatacatacacacatacaca

SEQ ID NO: 42346 - DNA, 22 bp, synthetic construct
  misc_feature 1..22: note = chemically synthesized
  source 1..22: mol_type = other DNA
tgaatgtaagtgtgtgtccttt

SEQ ID NO: 42347 - DNA, 22 bp, synthetic construct
  misc_feature 1..22: note = chemically synthesized
  source 1..22: mol_type = other DNA
tacaaatactagcttatttagc

SEQ ID NO: 42348 - DNA, 22 bp, synthetic construct
  misc_feature 1..22: note = chemically synthesized
  source 1..22: mol_type = other DNA
acaaatactagcttatttagct

SEQ ID NO: 42349 - DNA, 22 bp, synthetic construct
  misc_feature 1..22: note = chemically synthesized
  source 1..22: mol_type = other DNA
caaatactagcttatttagctc

SEQ ID NO: 42350 - DNA, 22 bp, synthetic construct
  misc_feature 1..22: note = chemically synthesized
  source 1..22: mol_type = other DNA
gcttatttagctcatggtatag

SEQ ID NO: 42351 - DNA, 22 bp, synthetic construct
  misc_feature 1..22: note = chemically synthesized
  source 1..22: mol_type = other DNA
atttagctcatggtataggtag

SEQ ID NO: 42352 - DNA, 22 bp, synthetic construct
  misc_feature 1..22: note = chemically synthesized
  source 1..22: mol_type = other DNA
tttagctcatggtataggtagg

SEQ ID NO: 42353 - DNA, 22 bp, synthetic construct
  misc_feature 1..22: note = chemically synthesized
  source 1..22: mol_type = other DNA
agctcatggtataggtagggta

SEQ ID NO: 42354 - DNA, 22 bp, synthetic construct
  misc_feature 1..22: note = chemically synthesized
  source 1..22: mol_type = other DNA
gctcatggtataggtagggtag

SEQ ID NO: 42355 - DNA, 22 bp, synthetic construct
  misc_feature 1..22: note = chemically synthesized
  source 1..22: mol_type = other DNA
atggtataggtagggtagcata

SEQ ID NO: 42356 - DNA, 22 bp, synthetic construct
  misc_feature 1..22: note = chemically synthesized
  source 1..22: mol_type = other DNA
tataaacaaagaaatctagact

SEQ ID NO: 42357 - DNA, 22 bp, synthetic construct
  misc_feature 1..22: note = chemically synthesized
  source 1..22: mol_type = other DNA
ataaacaaagaaatctagactt

SEQ ID NO: 42358 - DNA, 22 bp, synthetic construct
  misc_feature 1..22: note = chemically synthesized
  source 1..22: mol_type = other DNA
taaacaaagaaatctagactta

SEQ ID NO: 42359 - DNA, 22 bp, synthetic construct
  misc_feature 1..22: note = chemically synthesized
  source 1..22: mol_type = other DNA
gacttaggaaaatcatgttatt

SEQ ID NO: 42360 - DNA, 22 bp, synthetic construct
  misc_feature 1..22: note = chemically synthesized
  source 1..22: mol_type = other DNA
aggaaaatcatgttatttgtct

SEQ ID NO: 42361 - DNA, 22 bp, synthetic construct
  misc_feature 1..22: note = chemically synthesized
  source 1..22: mol_type = other DNA
ggaaaatcatgttatttgtctc

SEQ ID NO: 42362 - DNA, 22 bp, synthetic construct
  misc_feature 1..22: note = chemically synthesized
  source 1..22: mol_type = other DNA
tttgtctcgtgaccaaattccc

SEQ ID NO: 42363 - DNA, 22 bp, synthetic construct
  misc_feature 1..22: note = chemically synthesized
  source 1..22: mol_type = other DNA
gtctcgtgaccaaattcccaaa

SEQ ID NO: 42364 - DNA, 22 bp, synthetic construct
  misc_feature 1..22: note = chemically synthesized
  source 1..22: mol_type = other DNA
tctcgtgaccaaattcccaaat

SEQ ID NO: 42365 - DNA, 22 bp, synthetic construct
  misc_feature 1..22: note = chemically synthesized
  source 1..22: mol_type = other DNA
gtgaccaaattcccaaatcaag

SEQ ID NO: 42366 - DNA, 22 bp, synthetic construct
  misc_feature 1..22: note = chemically synthesized
  source 1..22: mol_type = other DNA
ccaaatcaaggaaataaagaaa

SEQ ID NO: 42367 - DNA, 22 bp, synthetic construct
  misc_feature 1..22: note = chemically synthesized
  source 1..22: mol_type = other DNA
gatttaagccagatttccaaga

SEQ ID NO: 42368 - DNA, 22 bp, synthetic construct
  misc_feature 1..22: note = chemically synthesized
  source 1..22: mol_type = other DNA
aagccagatttccaagaaaaaa

SEQ ID NO: 42369 - DNA, 22 bp, synthetic construct
  misc_feature 1..22: note = chemically synthesized
  source 1..22: mol_type = other DNA
agccagatttccaagaaaaaat

SEQ ID NO: 42370 - DNA, 22 bp, synthetic construct
  misc_feature 1..22: note = chemically synthesized
  source 1..22: mol_type = other DNA
ccaagaaaaaatctagggctct

SEQ ID NO: 42371 - DNA, 22 bp, synthetic construct
  misc_feature 1..22: note = chemically synthesized
  source 1..22: mol_type = other DNA
caagaaaaaatctagggctctt

SEQ ID NO: 42372 - DNA, 22 bp, synthetic construct
  misc_feature 1..22: note = chemically synthesized
  source 1..22: mol_type = other DNA
gggctcttctcactttttcatc

SEQ ID NO: 42373 - DNA, 22 bp, synthetic construct
  misc_feature 1..22: note = chemically synthesized
  source 1..22: mol_type = other DNA
ttctcactttttcatctttgtt

SEQ ID NO: 42374 - DNA, 22 bp, synthetic construct
  misc_feature 1..22: note = chemically synthesized
  source 1..22: mol_type = other DNA
ctcactttttcatctttgttcc

SEQ ID NO: 42375 - DNA, 22 bp, synthetic construct
  misc_feature 1..22: note = chemically synthesized
  source 1..22: mol_type = other DNA
tcactttttcatctttgttcca

SEQ ID NO: 42376 - DNA, 22 bp, synthetic construct
  misc_feature 1..22: note = chemically synthesized
  source 1..22: mol_type = other DNA
actttttcatctttgttccaac

SEQ ID NO: 42377 - DNA, 22 bp, synthetic construct
  misc_feature 1..22: note = chemically synthesized
  source 1..22: mol_type = other DNA
tttcatctttgttccaacattt

SEQ ID NO: 42378 - DNA, 22 bp, synthetic construct
  misc_feature 1..22: note = chemically synthesized
  source 1..22: mol_type = other DNA
ttcatctttgttccaacatttg

SEQ ID NO: 42379 - DNA, 22 bp, synthetic construct
  misc_feature 1..22: note = chemically synthesized
  source 1..22: mol_type = other DNA
tcatctttgttccaacatttga

SEQ ID NO: 42380 - DNA, 22 bp, synthetic construct
  misc_feature 1..22: note = chemically synthesized
  source 1..22: mol_type = other DNA
catctttgttccaacatttgaa

SEQ ID NO: 42381 - DNA, 22 bp, synthetic construct
  misc_feature 1..22: note = chemically synthesized
  source 1..22: mol_type = other DNA
atctttgttccaacatttgaaa

SEQ ID NO: 42382 - DNA, 22 bp, synthetic construct
  misc_feature 1..22: note = chemically synthesized
  source 1..22: mol_type = other DNA
tgttccaacatttgaaaaaata

SEQ ID NO: 42383 - DNA, 22 bp, synthetic construct
  misc_feature 1..22: note = chemically synthesized
  source 1..22: mol_type = other DNA
gttccaacatttgaaaaaataa

SEQ ID NO: 42384 - DNA, 22 bp, synthetic construct
  misc_feature 1..22: note = chemically synthesized
  source 1..22: mol_type = other DNA
ttccaacatttgaaaaaataaa

SEQ ID NO: 42385 - DNA, 22 bp, synthetic construct
  misc_feature 1..22: note = chemically synthesized
  source 1..22: mol_type = other DNA
caacatttgaaaaaataaatct

SEQ ID NO: 42386 - DNA, 22 bp, synthetic construct
  misc_feature 1..22: note = chemically synthesized
  source 1..22: mol_type = other DNA
gaaaaaataaatctaaacacat

SEQ ID NO: 42387 - DNA, 22 bp, synthetic construct
  misc_feature 1..22: note = chemically synthesized
  source 1..22: mol_type = other DNA
aaaaaataaatctaaacacatt

SEQ ID NO: 42388 - DNA, 22 bp, synthetic construct
  misc_feature 1..22: note = chemically synthesized
  source 1..22: mol_type = other DNA
aacacattccaatgtaactgaa

SEQ ID NO: 42389 - DNA, 22 bp, synthetic construct
  misc_feature 1..22: note = chemically synthesized
  source 1..22: mol_type = other DNA
caatgtaactgaagagcaggtt

SEQ ID NO: 42390 - DNA, 22 bp, synthetic construct
  misc_feature 1..22: note = chemically synthesized
  source 1..22: mol_type = other DNA
aagagcaggttaattgtttgcc

SEQ ID NO: 42391 - DNA, 22 bp, synthetic construct
  misc_feature 1..22: note = chemically synthesized
  source 1..22: mol_type = other DNA
attgtttgccacttgcagaatc

SEQ ID NO: 42392 - DNA, 22 bp, synthetic construct
  misc_feature 1..22: note = chemically synthesized
  source 1..22: mol_type = other DNA
tttgccacttgcagaatccaat

SEQ ID NO: 42393 - DNA, 22 bp, synthetic construct
  misc_feature 1..22: note = chemically synthesized
  source 1..22: mol_type = other DNA
gccacttgcagaatccaattaa

SEQ ID NO: 42394 - DNA, 22 bp, synthetic construct
  misc_feature 1..22: note = chemically synthesized
  source 1..22: mol_type = other DNA
ccacttgcagaatccaattaag

SEQ ID NO: 42395 - DNA, 22 bp, synthetic construct
  misc_feature 1..22: note = chemically synthesized
  source 1..22: mol_type = other DNA
gcagaatccaattaagaagaga

SEQ ID NO: 42396 - DNA, 22 bp, synthetic construct
  misc_feature 1..22: note = chemically synthesized
  source 1..22: mol_type = other DNA
cagaatccaattaagaagagag

SEQ ID NO: 42397 - DNA, 22 bp, synthetic construct
  misc_feature 1..22: note = chemically synthesized
  source 1..22: mol_type = other DNA
agaagagagaagtctggtataa

SEQ ID NO: 42398 - DNA, 22 bp, synthetic construct
  misc_feature 1..22: note = chemically synthesized
  source 1..22: mol_type = other DNA
gtataaagaaagtgatttgctt

SEQ ID NO: 42399 - DNA, 22 bp, synthetic construct
  misc_feature 1..22: note = chemically synthesized
  source 1..22: mol_type = other DNA
gcttccaaagctagcttagggg

SEQ ID NO: 42400 - DNA, 22 bp, synthetic construct
  misc_feature 1..22: note = chemically synthesized
  source 1..22: mol_type = other DNA
cttccaaagctagcttagggga

SEQ ID NO: 42401 - DNA, 22 bp, synthetic construct
  misc_feature 1..22: note = chemically synthesized
  source 1..22: mol_type = other DNA
ccaaagctagcttaggggaaga

SEQ ID NO: 42402 - DNA, 22 bp, synthetic construct
  misc_feature 1..22: note = chemically synthesized
  source 1..22: mol_type = other DNA
caaagctagcttaggggaagaa

SEQ ID NO: 42403 - DNA, 22 bp, synthetic construct
  misc_feature 1..22: note = chemically synthesized
  source 1..22: mol_type = other DNA
gcttaggggaagaaatgcagca

SEQ ID NO: 42404 - DNA, 22 bp, synthetic construct
  misc_feature 1..22: note = chemically synthesized
  source 1..22: mol_type = other DNA
aggggaagaaatgcagcagtcc

SEQ ID NO: 42405 - DNA, 22 bp, synthetic construct
  misc_feature 1..22: note = chemically synthesized
  source 1..22: mol_type = other DNA
ggggaagaaatgcagcagtcct

SEQ ID NO: 42406 - DNA, 22 bp, synthetic construct
  misc_feature 1..22: note = chemically synthesized
  source 1..22: mol_type = other DNA
ccgtactacttcactttaggag

SEQ ID NO: 42407 - DNA, 22 bp, synthetic construct
  misc_feature 1..22: note = chemically synthesized
  source 1..22: mol_type = other DNA
cttcactttaggagcagaaagt

SEQ ID NO: 42408 - DNA, 22 bp, synthetic construct
  misc_feature 1..22: note = chemically synthesized
  source 1..22: mol_type = other DNA
cactttaggagcagaaagtggc

SEQ ID NO: 42409 - DNA, 22 bp, synthetic construct
  misc_feature 1..22: note = chemically synthesized
  source 1..22: mol_type = other DNA
actttaggagcagaaagtggca

SEQ ID NO: 42410 - DNA, 22 bp, synthetic construct
  misc_feature 1..22: note = chemically synthesized
  source 1..22: mol_type = other DNA
taggagcagaaagtggcacttt

SEQ ID NO: 42411 - DNA, 22 bp, synthetic construct
  misc_feature 1..22: note = chemically synthesized
  source 1..22: mol_type = other DNA
aggagcagaaagtggcactttt

SEQ ID NO: 42412 - DNA, 22 bp, synthetic construct
  misc_feature 1..22: note = chemically synthesized
  source 1..22: mol_type = other DNA
ggagcagaaagtggcactttta

SEQ ID NO: 42413 - DNA, 22 bp, synthetic construct
  misc_feature 1..22: note = chemically synthesized
  source 1..22: mol_type = other DNA
ttaaaaggcaacagaggaggcg

SEQ ID NO: 42414 - DNA, 22 bp, synthetic construct
  misc_feature 1..22: note = chemically synthesized
  source 1..22: mol_type = other DNA
taaaaggcaacagaggaggcga

SEQ ID NO: 42415 - DNA, 22 bp, synthetic construct
  misc_feature 1..22: note = chemically synthesized
  source 1..22: mol_type = other DNA
aaaaggcaacagaggaggcgag

SEQ ID NO: 42416 - DNA, 22 bp, synthetic construct
  misc_feature 1..22: note = chemically synthesized
  source 1..22: mol_type = other DNA
aaaggcaacagaggaggcgagc

SEQ ID NO: 42417 - DNA, 22 bp, synthetic construct
  misc_feature 1..22: note = chemically synthesized
  source 1..22: mol_type = other DNA
aggggtccatgctagcttgggc

SEQ ID NO: 42418 - DNA, 22 bp, synthetic construct
  misc_feature 1..22: note = chemically synthesized
  source 1..22: mol_type = other DNA
gcttgggcaccttatccaccag

SEQ ID NO: 42419 - DNA, 22 bp, synthetic construct
  misc_feature 1..22: note = chemically synthesized
  source 1..22: mol_type = other DNA
gggcaccttatccaccaggtag

SEQ ID NO: 42420 - DNA, 22 bp, synthetic construct
  misc_feature 1..22: note = chemically synthesized
  source 1..22: mol_type = other DNA
ggcaccttatccaccaggtagt

SEQ ID NO: 42421 - DNA, 22 bp, synthetic construct
  misc_feature 1..22: note = chemically synthesized
  source 1..22: mol_type = other DNA
atccaccaggtagttgagcagt

SEQ ID NO: 42422 - DNA, 22 bp, synthetic construct
  misc_feature 1..22: note = chemically synthesized
  source 1..22: mol_type = other DNA
tccaccaggtagttgagcagtt

SEQ ID NO: 42423 - DNA, 22 bp, synthetic construct
  misc_feature 1..22: note = chemically synthesized
  source 1..22: mol_type = other DNA
agcagttgcctgctggtgcctt

SEQ ID NO: 42424 - DNA, 22 bp, synthetic construct
  misc_feature 1..22: note = chemically synthesized
  source 1..22: mol_type = other DNA
cctgctggtgcctttgtgagca

SEQ ID NO: 42425 - DNA, 22 bp, synthetic construct
  misc_feature 1..22: note = chemically synthesized
  source 1..22: mol_type = other DNA
ctggtgcctttgtgagcagggt

SEQ ID NO: 42426 - DNA, 22 bp, synthetic construct
  misc_feature 1..22: note = chemically synthesized
  source 1..22: mol_type = other DNA
gtgcctttgtgagcagggtgtt

SEQ ID NO: 42427 - DNA, 22 bp, synthetic construct
  misc_feature 1..22: note = chemically synthesized
  source 1..22: mol_type = other DNA
tgtgagcagggtgttgtccctt

SEQ ID NO: 42428 - DNA, 22 bp, synthetic construct
  misc_feature 1..22: note = chemically synthesized
  source 1..22: mol_type = other DNA
gtgagcagggtgttgtcccttg

SEQ ID NO: 42429 - DNA, 22 bp, synthetic construct
  misc_feature 1..22: note = chemically synthesized
  source 1..22: mol_type = other DNA
tgagcagggtgttgtcccttga

SEQ ID NO: 42430 - DNA, 22 bp, synthetic construct
  misc_feature 1..22: note = chemically synthesized
  source 1..22: mol_type = other DNA
tcccttgaggcaaatctctgga

SEQ ID NO: 42431 - DNA, 22 bp, synthetic construct
  misc_feature 1..22: note = chemically synthesized
  source 1..22: mol_type = other DNA
gaggcaaatctctggagggtga

SEQ ID NO: 42432 - DNA, 22 bp, synthetic construct
  misc_feature 1..22: note = chemically synthesized
  source 1..22: mol_type = other DNA
aggcaaatctctggagggtgag

SEQ ID NO: 42433 - DNA, 22 bp, synthetic construct
  misc_feature 1..22: note = chemically synthesized
  source 1..22: mol_type = other DNA
tggagggtgagagttttgtagt

SEQ ID NO: 42434 - DNA, 22 bp, synthetic construct
  misc_feature 1..22: note = chemically synthesized
  source 1..22: mol_type = other DNA
gagggtgagagttttgtagtgg

SEQ ID NO: 42435 - DNA, 22 bp, synthetic construct
  misc_feature 1..22: note = chemically synthesized
  source 1..22: mol_type = other DNA
tgtagtgggcatgctttggttt

SEQ ID NO: 42436 - DNA, 22 bp, synthetic construct
  misc_feature 1..22: note = chemically synthesized
  source 1..22: mol_type = other DNA
gtagtgggcatgctttggttta

SEQ ID NO: 42437 - DNA, 22 bp, synthetic construct
  misc_feature 1..22: note = chemically synthesized
  source 1..22: mol_type = other DNA
tagtgggcatgctttggtttat

SEQ ID NO: 42438 - DNA, 22 bp, synthetic construct
  misc_feature 1..22: note = chemically synthesized
  source 1..22: mol_type = other DNA
tggtttataaatcacctgtgaa

SEQ ID NO: 42439 - DNA, 22 bp, synthetic construct
  misc_feature 1..22: note = chemically synthesized
  source 1..22: mol_type = other DNA
ggtttataaatcacctgtgaac

SEQ ID NO: 42440 - DNA, 22 bp, synthetic construct
  misc_feature 1..22: note = chemically synthesized
  source 1..22: mol_type = other DNA
gtttataaatcacctgtgaact

SEQ ID NO: 42441 - DNA, 22 bp, synthetic construct
  misc_feature 1..22: note = chemically synthesized
  source 1..22: mol_type = other DNA
ataaatcacctgtgaactcagg

SEQ ID NO: 42442 - DNA, 22 bp, synthetic construct
  misc_feature 1..22: note = chemically synthesized
  source 1..22: mol_type = other DNA
taaatcacctgtgaactcagga

SEQ ID NO: 42443 - DNA, 22 bp, synthetic construct
  misc_feature 1..22: note = chemically synthesized
  source 1..22: mol_type = other DNA
tgaactcaggagttccatcttg

SEQ ID NO: 42444 - DNA, 22 bp, synthetic construct
  misc_feature 1..22: note = chemically synthesized
  source 1..22: mol_type = other DNA
aggagttccatcttgaagcaca

SEQ ID NO: 42445 - DNA, 22 bp, synthetic construct
  misc_feature 1..22: note = chemically synthesized
  source 1..22: mol_type = other DNA
catcttgaagcacatacatagt

SEQ ID NO: 42446 - DNA, 22 bp, synthetic construct
  misc_feature 1..22: note = chemically synthesized
  source 1..22: mol_type = other DNA
gaagcacatacatagttagatg

SEQ ID NO: 42447 - DNA, 22 bp, synthetic construct
  misc_feature 1..22: note = chemically synthesized
  source 1..22: mol_type = other DNA
aagcacatacatagttagatga

SEQ ID NO: 42448 - DNA, 22 bp, synthetic construct
  misc_feature 1..22: note = chemically synthesized
  source 1..22: mol_type = other DNA
gatgaacttgccctgcagggag

SEQ ID NO: 42449 - DNA, 22 bp, synthetic construct
  misc_feature 1..22: note = chemically synthesized
  source 1..22: mol_type = other DNA
gccctgcagggagagtctgatg

SEQ ID NO: 42450 - DNA, 22 bp, synthetic construct
  misc_feature 1..22: note = chemically synthesized
  source 1..22: mol_type = other DNA
ccctgcagggagagtctgatga

SEQ ID NO: 42451 - DNA, 22 bp, synthetic construct
  misc_feature 1..22: note = chemically synthesized
  source 1..22: mol_type = other DNA
cagggagagtctgatgaaaggg

SEQ ID NO: 42452 - DNA, 22 bp, synthetic construct
  misc_feature 1..22: note = chemically synthesized
  source 1..22: mol_type = other DNA
atgaaagggaggtagatgcttg

SEQ ID NO: 42453 - DNA, 22 bp, synthetic construct
  misc_feature 1..22: note = chemically synthesized
  source 1..22: mol_type = other DNA
gcaatttaatctataaattacc

SEQ ID NO: 42454 - DNA, 22 bp, synthetic construct
  misc_feature 1..22: note = chemically synthesized
  source 1..22: mol_type = other DNA
caatttaatctataaattacca

SEQ ID NO: 42455 - DNA, 22 bp, synthetic construct
  misc_feature 1..22: note = chemically synthesized
  source 1..22: mol_type = other DNA
aatctataaattaccagataaa

SEQ ID NO: 42456 - DNA, 22 bp, synthetic construct
  misc_feature 1..22: note = chemically synthesized
  source 1..22: mol_type = other DNA
atctataaattaccagataaaa

SEQ ID NO: 42457 - DNA, 22 bp, synthetic construct
  misc_feature 1..22: note = chemically synthesized
  source 1..22: mol_type = other DNA
taaattaccagataaaatttta

SEQ ID NO: 42458 - DNA, 22 bp, synthetic construct
  misc_feature 1..22: note = chemically synthesized
  source 1..22: mol_type = other DNA
ccagataaaattttacaagttg

SEQ ID NO: 42459 - DNA, 22 bp, synthetic construct
  misc_feature 1..22: note = chemically synthesized
  source 1..22: mol_type = other DNA
tacaagttgactttaaagtcaa

SEQ ID NO: 42460 - DNA, 22 bp, synthetic construct
  misc_feature 1..22: note = chemically synthesized
  source 1..22: mol_type = other DNA
acaagttgactttaaagtcaaa

SEQ ID NO: 42461 - DNA, 22 bp, synthetic construct
  misc_feature 1..22: note = chemically synthesized
  source 1..22: mol_type = other DNA
caagttgactttaaagtcaaac

SEQ ID NO: 42462 - DNA, 22 bp, synthetic construct
  misc_feature 1..22: note = chemically synthesized
  source 1..22: mol_type = other DNA
actttaaagtcaaacacatttg

SEQ ID NO: 42463 - DNA, 22 bp, synthetic construct
  misc_feature 1..22: note = chemically synthesized
  source 1..22: mol_type = other DNA
taaagtcaaacacatttgaatt

SEQ ID NO: 42464 - DNA, 22 bp, synthetic construct
  misc_feature 1..22: note = chemically synthesized
  source 1..22: mol_type = other DNA
aaagtcaaacacatttgaattt

SEQ ID NO: 42465 - DNA, 22 bp, synthetic construct
  misc_feature 1..22: note = chemically synthesized
  source 1..22: mol_type = other DNA
aagtcaaacacatttgaattta

SEQ ID NO: 42466 - DNA, 22 bp, synthetic construct
  misc_feature 1..22: note = chemically synthesized
  source 1..22: mol_type = other DNA
gaatttagtggaagccattcaa

SEQ ID NO: 42467 - DNA, 22 bp, synthetic construct
  misc_feature 1..22: note = chemically synthesized
  source 1..22: mol_type = other DNA
aatttagtggaagccattcaag

SEQ ID NO: 42468 - DNA, 22 bp, synthetic construct
  misc_feature 1..22: note = chemically synthesized
  source 1..22: mol_type = other DNA
agtggaagccattcaagaaaat

SEQ ID NO: 42469 - DNA, 22 bp, synthetic construct
  misc_feature 1..22: note = chemically synthesized
  source 1..22: mol_type = other DNA
gtggaagccattcaagaaaata

SEQ ID NO: 42470 - DNA, 22 bp, synthetic construct
  misc_feature 1..22: note = chemically synthesized
  source 1..22: mol_type = other DNA
aagaaaatatcaaagaaaatac

SEQ ID NO: 42471 - DNA, 22 bp, synthetic construct
  misc_feature 1..22: note = chemically synthesized
  source 1..22: mol_type = other DNA
agcaaagagttttttggggaaa

SEQ ID NO: 42472 - DNA, 22 bp, synthetic construct
  misc_feature 1..22: note = chemically synthesized
  source 1..22: mol_type = other DNA
tttggggaaattggtgtctatg

SEQ ID NO: 42473 - DNA, 22 bp, synthetic construct
  misc_feature 1..22: note = chemically synthesized
  source 1..22: mol_type = other DNA
ttggggaaattggtgtctatgt

SEQ ID NO: 42474 - DNA, 22 bp, synthetic construct
  misc_feature 1..22: note = chemically synthesized
  source 1..22: mol_type = other DNA
tggggaaattggtgtctatgtc

SEQ ID NO: 42475 - DNA, 22 bp, synthetic construct
  misc_feature 1..22: note = chemically synthesized
  source 1..22: mol_type = other DNA
ggggaaattggtgtctatgtct

SEQ ID NO: 42476 - DNA, 22 bp, synthetic construct
  misc_feature 1..22: note = chemically synthesized
  source 1..22: mol_type = other DNA
gggaaattggtgtctatgtctg

SEQ ID NO: 42477 - DNA, 22 bp, synthetic construct
  misc_feature 1..22: note = chemically synthesized
  source 1..22: mol_type = other DNA
gtgtctatgtctgtgtgtgtag

SEQ ID NO: 42478 - DNA, 22 bp, synthetic construct
  misc_feature 1..22: note = chemically synthesized
  source 1..22: mol_type = other DNA
tgtctgtgtgtgtagggagtgc

SEQ ID NO: 42479 - DNA, 22 bp, synthetic construct
  misc_feature 1..22: note = chemically synthesized
  source 1..22: mol_type = other DNA
tgtgtgtagggagtgcagggga

SEQ ID NO: 42480 - DNA, 22 bp, synthetic construct
  misc_feature 1..22: note = chemically synthesized
  source 1..22: mol_type = other DNA
tatttcagcccatggaaactag

SEQ ID NO: 42481 - DNA, 22 bp, synthetic construct
  misc_feature 1..22: note = chemically synthesized
  source 1..22: mol_type = other DNA
tttcagcccatggaaactagga

SEQ ID NO: 42482 - DNA, 22 bp, synthetic construct
  misc_feature 1..22: note = chemically synthesized
  source 1..22: mol_type = other DNA
cagcccatggaaactaggatgt

SEQ ID NO: 42483 - DNA, 22 bp, synthetic construct
  misc_feature 1..22: note = chemically synthesized
  source 1..22: mol_type = other DNA
agcccatggaaactaggatgta

SEQ ID NO: 42484 - DNA, 22 bp, synthetic construct
  misc_feature 1..22: note = chemically synthesized
  source 1..22: mol_type = other DNA
ggatgtagatcactgtgaactt

SEQ ID NO: 42485 - DNA, 22 bp, synthetic construct
  misc_feature 1..22: note = chemically synthesized
  source 1..22: mol_type = other DNA
tgaacttattcagcaggctaca

SEQ ID NO: 42486 - DNA, 22 bp, synthetic construct
  misc_feature 1..22: note = chemically synthesized
  source 1..22: mol_type = other DNA
attcagcaggctacacccaaag

SEQ ID NO: 42487 - DNA, 22 bp, synthetic construct
  misc_feature 1..22: note = chemically synthesized
  source 1..22: mol_type = other DNA
ttcagcaggctacacccaaagg

SEQ ID NO: 42488 - DNA, 22 bp, synthetic construct
  misc_feature 1..22: note = chemically synthesized
  source 1..22: mol_type = other DNA
agcaggctacacccaaaggcta

SEQ ID NO: 42489 - DNA, 22 bp, synthetic construct
  misc_feature 1..22: note = chemically synthesized
  source 1..22: mol_type = other DNA
cacccaaaggctagaacaaact

SEQ ID NO: 42490 - DNA, 22 bp, synthetic construct
  misc_feature 1..22: note = chemically synthesized
  source 1..22: mol_type = other DNA
gaacaaacttctctgccacagg

SEQ ID NO: 42491 - DNA, 22 bp, synthetic construct
  misc_feature 1..22: note = chemically synthesized
  source 1..22: mol_type = other DNA
ctctgccacaggattaacatat

SEQ ID NO: 42492 - DNA, 22 bp, synthetic construct
  misc_feature 1..22: note = chemically synthesized
  source 1..22: mol_type = other DNA
tctgccacaggattaacatatg

SEQ ID NO: 42493 - DNA, 22 bp, synthetic construct
  misc_feature 1..22: note = chemically synthesized
  source 1..22: mol_type = other DNA
tgccacaggattaacatatgtt

SEQ ID NO: 42494 - DNA, 22 bp, synthetic construct
  misc_feature 1..22: note = chemically synthesized
  source 1..22: mol_type = other DNA
ccacaggattaacatatgtttt

SEQ ID NO: 42495 - DNA, 22 bp, synthetic construct
  misc_feature 1..22: note = chemically synthesized
  source 1..22: mol_type = other DNA
acatatgttttaatcgacctgg

SEQ ID NO: 42496 - DNA, 22 bp, synthetic construct
  misc_feature 1..22: note = chemically synthesized
  source 1..22: mol_type = other DNA
taatcgacctggggggcacatt

SEQ ID NO: 42497 - DNA, 22 bp, synthetic construct
  misc_feature 1..22: note = chemically synthesized
  source 1..22: mol_type = other DNA
aatcgacctggggggcacattc

SEQ ID NO: 42498 - DNA, 22 bp, synthetic construct
  misc_feature 1..22: note = chemically synthesized
  source 1..22: mol_type = other DNA
atcgacctggggggcacattct

SEQ ID NO: 42499 - DNA, 22 bp, synthetic construct
  misc_feature 1..22: note = chemically synthesized
  source 1..22: mol_type = other DNA
gggggcacattctctgataagc

SEQ ID NO: 42500 - DNA, 22 bp, synthetic construct
  misc_feature 1..22: note = chemically synthesized
  source 1..22: mol_type = other DNA
tctgataagctcttttggaaag

SEQ ID NO: 42501 - DNA, 22 bp, synthetic construct
  misc_feature 1..22: note = chemically synthesized
  source 1..22: mol_type = other DNA
tgataagctcttttggaaagcc

SEQ ID NO: 42502 - DNA, 22 bp, synthetic construct
  misc_feature 1..22: note = chemically synthesized
  source 1..22: mol_type = other DNA
ataagctcttttggaaagccag

SEQ ID NO: 42503 - DNA, 22 bp, synthetic construct
  misc_feature 1..22: note = chemically synthesized
  source 1..22: mol_type = other DNA
ttttggaaagccaggctttctg

SEQ ID NO: 42504 - DNA, 22 bp, synthetic construct
  misc_feature 1..22: note = chemically synthesized
  source 1..22: mol_type = other DNA
ttggaaagccaggctttctgtg

SEQ ID NO: 42505 - DNA, 22 bp, synthetic construct
  misc_feature 1..22: note = chemically synthesized
  source 1..22: mol_type = other DNA
tggaaagccaggctttctgtgg

SEQ ID NO: 42506 - DNA, 22 bp, synthetic construct
  misc_feature 1..22: note = chemically synthesized
  source 1..22: mol_type = other DNA
ggaaagccaggctttctgtgga

SEQ ID NO: 42507 - DNA, 22 bp, synthetic construct
  misc_feature 1..22: note = chemically synthesized
  source 1..22: mol_type = other DNA
gaaagccaggctttctgtggac

SEQ ID NO: 42508 - DNA, 22 bp, synthetic construct
  misc_feature 1..22: note = chemically synthesized
  source 1..22: mol_type = other DNA
tctgtggacgtgttatctttcc

SEQ ID NO: 42509 - DNA, 22 bp, synthetic construct
  misc_feature 1..22: note = chemically synthesized
  source 1..22: mol_type = other DNA
ctgtggacgtgttatctttcca

SEQ ID NO: 42510 - DNA, 22 bp, synthetic construct
  misc_feature 1..22: note = chemically synthesized
  source 1..22: mol_type = other DNA
tgtggacgtgttatctttccaa

SEQ ID NO: 42511 - DNA, 22 bp, synthetic construct
  misc_feature 1..22: note = chemically synthesized
  source 1..22: mol_type = other DNA
tggacgtgttatctttccaatg

SEQ ID NO: 42512 - DNA, 22 bp, synthetic construct
  misc_feature 1..22: note = chemically synthesized
  source 1..22: mol_type = other DNA
tctttccaatgtgtgctggaat

SEQ ID NO: 42513 - DNA, 22 bp, synthetic construct
  misc_feature 1..22: note = chemically synthesized
  source 1..22: mol_type = other DNA
tccaatgtgtgctggaatgccc

SEQ ID NO: 42514 - DNA, 22 bp, synthetic construct
  misc_feature 1..22: note = chemically synthesized
  source 1..22: mol_type = other DNA
ccaatgtgtgctggaatgcccg

SEQ ID NO: 42515 - DNA, 22 bp, synthetic construct
  misc_feature 1..22: note = chemically synthesized
  source 1..22: mol_type = other DNA
caatgtgtgctggaatgcccgg

SEQ ID NO: 42516 - DNA, 22 bp, synthetic construct
  misc_feature 1..22: note = chemically synthesized
  source 1..22: mol_type = other DNA
gaatgcccggggagaggaaaaa

SEQ ID NO: 42517 - DNA, 22 bp, synthetic construct
  misc_feature 1..22: note = chemically synthesized
  source 1..22: mol_type = other DNA
cttttacagccatgctcagtga

SEQ ID NO: 42518 - DNA, 22 bp, synthetic construct
  misc_feature 1..22: note = chemically synthesized
  source 1..22: mol_type = other DNA
ttttacagccatgctcagtgag

SEQ ID NO: 42519 - DNA, 22 bp, synthetic construct
  misc_feature 1..22: note = chemically synthesized
  source 1..22: mol_type = other DNA
ttacagccatgctcagtgagaa

SEQ ID NO: 42520 - DNA, 22 bp, synthetic construct
  misc_feature 1..22: note = chemically synthesized
  source 1..22: mol_type = other DNA
tacagccatgctcagtgagaag

SEQ ID NO: 42521 - DNA, 22 bp, synthetic construct
  misc_feature 1..22: note = chemically synthesized
  source 1..22: mol_type = other DNA
acagccatgctcagtgagaagc

SEQ ID NO: 42522 - DNA, 22 bp, synthetic construct
  misc_feature 1..22: note = chemically synthesized
  source 1..22: mol_type = other DNA
cagccatgctcagtgagaagcg

SEQ ID NO: 42523 - DNA, 22 bp, synthetic construct
  misc_feature 1..22: note = chemically synthesized
  source 1..22: mol_type = other DNA
agtgagaagcggagaaacatct

SEQ ID NO: 42524 - DNA, 22 bp, synthetic construct
  misc_feature 1..22: note = chemically synthesized
  source 1..22: mol_type = other DNA
ctattcacaaattgctaagtct

SEQ ID NO: 42525 - DNA, 22 bp, synthetic construct
  misc_feature 1..22: note = chemically synthesized
  source 1..22: mol_type = other DNA
tattcacaaattgctaagtctt

SEQ ID NO: 42526 - DNA, 22 bp, synthetic construct
  misc_feature 1..22: note = chemically synthesized
  source 1..22: mol_type = other DNA
ttcacaaattgctaagtctttt

SEQ ID NO: 42527 - DNA, 22 bp, synthetic construct
  misc_feature 1..22: note = chemically synthesized
  source 1..22: mol_type = other DNA
acaaattgctaagtcttttaca

SEQ ID NO: 42528 - DNA, 22 bp, synthetic construct
  misc_feature 1..22: note = chemically synthesized
  source 1..22: mol_type = other DNA
ctaagtcttttacacatgcaaa

SEQ ID NO: 42529 - DNA, 22 bp, synthetic construct
  misc_feature 1..22: note = chemically synthesized
  source 1..22: mol_type = other DNA
agtcttttacacatgcaaatat

SEQ ID NO: 42530 - DNA, 22 bp, synthetic construct
  misc_feature 1..22: note = chemically synthesized
  source 1..22: mol_type = other DNA
ttacacatgcaaatatgcatac

SEQ ID NO: 42531 - DNA, 22 bp, synthetic construct
  misc_feature 1..22: note = chemically synthesized
  source 1..22: mol_type = other DNA
tacacatgcaaatatgcataca

SEQ ID NO: 42532 - DNA, 22 bp, synthetic construct
  misc_feature 1..22: note = chemically synthesized
  source 1..22: mol_type = other DNA
acacatgcaaatatgcatacac

SEQ ID NO: 42533 - DNA, 22 bp, synthetic construct
  misc_feature 1..22: note = chemically synthesized
  source 1..22: mol_type = other DNA
cacatgcaaatatgcatacaca

SEQ ID NO: 42534 - DNA, 22 bp, synthetic construct
  misc_feature 1..22: note = chemically synthesized
  source 1..22: mol_type = other DNA
acacaccacagtgaggaagaaa

SEQ ID NO: 42535 - DNA, 22 bp, synthetic construct
  misc_feature 1..22: note = chemically synthesized
  source 1..22: mol_type = other DNA
tcacaccattaataaaatacat

SEQ ID NO: 42536 - DNA, 22 bp, synthetic construct
  misc_feature 1..22: note = chemically synthesized
  source 1..22: mol_type = other DNA
acaccattaataaaatacattt

SEQ ID NO: 42537 - DNA, 22 bp, synthetic construct
  misc_feature 1..22: note = chemically synthesized
  source 1..22: mol_type = other DNA
ataaaatacatttacttcagta

SEQ ID NO: 42538 - DNA, 22 bp, synthetic construct
  misc_feature 1..22: note = chemically synthesized
  source 1..22: mol_type = other DNA
acttcagtagcaatatacatct

SEQ ID NO: 42539 - DNA, 22 bp, synthetic construct
  misc_feature 1..22: note = chemically synthesized
  source 1..22: mol_type = other DNA
cttcagtagcaatatacatcta

SEQ ID NO: 42540 - DNA, 22 bp, synthetic construct
  misc_feature 1..22: note = chemically synthesized
  source 1..22: mol_type = other DNA
cagtagcaatatacatctacat

SEQ ID NO: 42541 - DNA, 22 bp, synthetic construct
  misc_feature 1..22: note = chemically synthesized
  source 1..22: mol_type = other DNA
agtagcaatatacatctacatt

SEQ ID NO: 42542 - DNA, 22 bp, synthetic construct
  misc_feature 1..22: note = chemically synthesized
  source 1..22: mol_type = other DNA
cattttgcctataatataaaag

SEQ ID NO: 42543 - DNA, 22 bp, synthetic construct
  misc_feature 1..22: note = chemically synthesized
  source 1..22: mol_type = other DNA
tgcctataatataaaagtattt

SEQ ID NO: 42544 - DNA, 22 bp, synthetic construct
  misc_feature 1..22: note = chemically synthesized
  source 1..22: mol_type = other DNA
gcctataatataaaagtatttt

SEQ ID NO: 42545 - DNA, 22 bp, synthetic construct
  misc_feature 1..22: note = chemically synthesized
  source 1..22: mol_type = other DNA
cctataatataaaagtattttt

SEQ ID NO: 42546 - DNA, 22 bp, synthetic construct
  misc_feature 1..22: note = chemically synthesized
  source 1..22: mol_type = other DNA
taatataaaagtatttttccta

SEQ ID NO: 42547 - DNA, 22 bp, synthetic construct
  misc_feature 1..22: note = chemically synthesized
  source 1..22: mol_type = other DNA
ttcctattaaaagatttgttta

SEQ ID NO: 42548 - DNA, 22 bp, synthetic construct
  misc_feature 1..22: note = chemically synthesized
  source 1..22: mol_type = other DNA
tcctattaaaagatttgtttaa

SEQ ID NO: 42549 - DNA, 22 bp, synthetic construct
  misc_feature 1..22: note = chemically synthesized
  source 1..22: mol_type = other DNA
cctattaaaagatttgtttaat

SEQ ID NO: 42550 - DNA, 22 bp, synthetic construct
  misc_feature 1..22: note = chemically synthesized
  source 1..22: mol_type = other DNA
ctattaaaagatttgtttaatg

SEQ ID NO: 42551 - DNA, 22 bp, synthetic construct
  misc_feature 1..22: note = chemically synthesized
  source 1..22: mol_type = other DNA
ttaaaagatttgtttaatgttt

SEQ ID NO: 42552 - DNA, 22 bp, synthetic construct
  misc_feature 1..22: note = chemically synthesized
  source 1..22: mol_type = other DNA
aaagatttgtttaatgtttctt

SEQ ID NO: 42553 - DNA, 22 bp, synthetic construct
  misc_feature 1..22: note = chemically synthesized
  source 1..22: mol_type = other DNA
gtttaatgtttcttcaccaaca

SEQ ID NO: 42554 - DNA, 22 bp, synthetic construct
  misc_feature 1..22: note = chemically synthesized
  source 1..22: mol_type = other DNA
tttaatgtttcttcaccaacaa

SEQ ID NO: 42555 - DNA, 22 bp, synthetic construct
  misc_feature 1..22: note = chemically synthesized
  source 1..22: mol_type = other DNA
aatgtttcttcaccaacaaata

SEQ ID NO: 42556 - DNA, 22 bp, synthetic construct
  misc_feature 1..22: note = chemically synthesized
  source 1..22: mol_type = other DNA
atgtttcttcaccaacaaataa

SEQ ID NO: 42557 - DNA, 22 bp, synthetic construct
  misc_feature 1..22: note = chemically synthesized
  source 1..22: mol_type = other DNA
cttcaccaacaaataaacccta

SEQ ID NO: 42558 - DNA, 22 bp, synthetic construct
  misc_feature 1..22: note = chemically synthesized
  source 1..22: mol_type = other DNA
ttcaccaacaaataaaccctat

SEQ ID NO: 42559 - DNA, 22 bp, synthetic construct
  misc_feature 1..22: note = chemically synthesized
  source 1..22: mol_type = other DNA
caccaacaaataaaccctatta

SEQ ID NO: 42560 - DNA, 22 bp, synthetic construct
  misc_feature 1..22: note = chemically synthesized
  source 1..22: mol_type = other DNA
accaacaaataaaccctattaa

SEQ ID NO: 42561 - DNA, 22 bp, synthetic construct
  misc_feature 1..22: note = chemically synthesized
  source 1..22: mol_type = other DNA
ttaaatccccattgccatatga

SEQ ID NO: 42562 - DNA, 22 bp, synthetic construct
  misc_feature 1..22: note = chemically synthesized
  source 1..22: mol_type = other DNA
aatccccattgccatatgagcc

SEQ ID NO: 42563 - DNA, 22 bp, synthetic construct
  misc_feature 1..22: note = chemically synthesized
  source 1..22: mol_type = other DNA
ccatatgagccctggaggtgaa

SEQ ID NO: 42564 - DNA, 22 bp, synthetic construct
  misc_feature 1..22: note = chemically synthesized
  source 1..22: mol_type = other DNA
gaggtgaatcagagaaacaaaa

SEQ ID NO: 42565 - DNA, 22 bp, synthetic construct
  misc_feature 1..22: note = chemically synthesized
  source 1..22: mol_type = other DNA
tggaaaaatcatcaggttaaaa

SEQ ID NO: 42566 - DNA, 22 bp, synthetic construct
  misc_feature 1..22: note = chemically synthesized
  source 1..22: mol_type = other DNA
aaaaaagaaaaattgattctgt

SEQ ID NO: 42567 - DNA, 22 bp, synthetic construct
  misc_feature 1..22: note = chemically synthesized
  source 1..22: mol_type = other DNA
attctgttttgggatatttcct

SEQ ID NO: 42568 - DNA, 22 bp, synthetic construct
  misc_feature 1..22: note = chemically synthesized
  source 1..22: mol_type = other DNA
tgttttgggatatttcctagca

SEQ ID NO: 42569 - DNA, 22 bp, synthetic construct
  misc_feature 1..22: note = chemically synthesized
  source 1..22: mol_type = other DNA
ttttgggatatttcctagcaac

SEQ ID NO: 42570 - DNA, 22 bp, synthetic construct
  misc_feature 1..22: note = chemically synthesized
  source 1..22: mol_type = other DNA
tgggatatttcctagcaacatg

SEQ ID NO: 42571 - DNA, 22 bp, synthetic construct
  misc_feature 1..22: note = chemically synthesized
  source 1..22: mol_type = other DNA
gggatatttcctagcaacatga

SEQ ID NO: 42572 - DNA, 22 bp, synthetic construct
  misc_feature 1..22: note = chemically synthesized
  source 1..22: mol_type = other DNA
ggatatttcctagcaacatgag

SEQ ID NO: 42573 - DNA, 22 bp, synthetic construct
  misc_feature 1..22: note = chemically synthesized
  source 1..22: mol_type = other DNA
cctagcaacatgagctggggag

SEQ ID NO: 42574 - DNA, 22 bp, synthetic construct
  misc_feature 1..22: note = chemically synthesized
  source 1..22: mol_type = other DNA
ctagcaacatgagctggggagg

SEQ ID NO: 42575 - DNA, 22 bp, synthetic construct
  misc_feature 1..22: note = chemically synthesized
  source 1..22: mol_type = other DNA
gcaacatgagctggggagggga

SEQ ID NO: 42576 - DNA, 22 bp, synthetic construct
  misc_feature 1..22: note = chemically synthesized
  source 1..22: mol_type = other DNA
gggaggggatctcagcagtgat

SEQ ID NO: 42577 - DNA, 22 bp, synthetic construct
  misc_feature 1..22: note = chemically synthesized
  source 1..22: mol_type = other DNA
agcagtgatgctctatgaagca

SEQ ID NO: 42578 - DNA, 22 bp, synthetic construct
  misc_feature 1..22: note = chemically synthesized
  source 1..22: mol_type = other DNA
tatgaagcataataaaatgaca

SEQ ID NO: 42579 - DNA, 22 bp, synthetic construct
  misc_feature 1..22: note = chemically synthesized
  source 1..22: mol_type = other DNA
tgaagcataataaaatgacaca

SEQ ID NO: 42580 - DNA, 22 bp, synthetic construct
  misc_feature 1..22: note = chemically synthesized
  source 1..22: mol_type = other DNA
caggtaacttagttaaaggggg

SEQ ID NO: 42581 - DNA, 22 bp, synthetic construct
  misc_feature 1..22: note = chemically synthesized
  source 1..22: mol_type = other DNA
agttaaagggggaaataaatgg

SEQ ID NO: 42582 - DNA, 22 bp, synthetic construct
  misc_feature 1..22: note = chemically synthesized
  source 1..22: mol_type = other DNA
gttaaagggggaaataaatgga

SEQ ID NO: 42583 - DNA, 22 bp, synthetic construct
  misc_feature 1..22: note = chemically synthesized
  source 1..22: mol_type = other DNA
aagggggaaataaatggaagtt

SEQ ID NO: 42584 - DNA, 22 bp, synthetic construct
  misc_feature 1..22: note = chemically synthesized
  source 1..22: mol_type = other DNA
cctctttttgaatatcaattgt

SEQ ID NO: 42585 - DNA, 22 bp, synthetic construct
  misc_feature 1..22: note = chemically synthesized
  source 1..22: mol_type = other DNA
ctctttttgaatatcaattgta

SEQ ID NO: 42586 - DNA, 22 bp, synthetic construct
  misc_feature 1..22: note = chemically synthesized
  source 1..22: mol_type = other DNA
tttttgaatatcaattgtagcc

SEQ ID NO: 42587 - DNA, 22 bp, synthetic construct
  misc_feature 1..22: note = chemically synthesized
  source 1..22: mol_type = other DNA
tttgaatatcaattgtagcctg

SEQ ID NO: 42588 - DNA, 22 bp, synthetic construct
  misc_feature 1..22: note = chemically synthesized
  source 1..22: mol_type = other DNA
ttgaatatcaattgtagcctgc

SEQ ID NO: 42589 - DNA, 22 bp, synthetic construct
  misc_feature 1..22: note = chemically synthesized
  source 1..22: mol_type = other DNA
tgaatatcaattgtagcctgct

SEQ ID NO: 42590 - DNA, 22 bp, synthetic construct
  misc_feature 1..22: note = chemically synthesized
  source 1..22: mol_type = other DNA
gaatatcaattgtagcctgctc

SEQ ID NO: 42591 - DNA, 22 bp, synthetic construct
  misc_feature 1..22: note = chemically synthesized
  source 1..22: mol_type = other DNA
aatatcaattgtagcctgctct

SEQ ID NO: 42592 - DNA, 22 bp, synthetic construct
  misc_feature 1..22: note = chemically synthesized
  source 1..22: mol_type = other DNA
tagcctgctctgctacatttca

SEQ ID NO: 42593 - DNA, 22 bp, synthetic construct
  misc_feature 1..22: note = chemically synthesized
  source 1..22: mol_type = other DNA
ctctgctacatttcaaaaacac

SEQ ID NO: 42594 - DNA, 22 bp, synthetic construct
  misc_feature 1..22: note = chemically synthesized
  source 1..22: mol_type = other DNA
tgctacatttcaaaaacactct

SEQ ID NO: 42595 - DNA, 22 bp, synthetic construct
  misc_feature 1..22: note = chemically synthesized
  source 1..22: mol_type = other DNA
ctacatttcaaaaacactcttc

SEQ ID NO: 42596 - DNA, 22 bp, synthetic construct
  misc_feature 1..22: note = chemically synthesized
  source 1..22: mol_type = other DNA
catttcaaaaacactcttcaaa

SEQ ID NO: 42597 - DNA, 22 bp, synthetic construct
  misc_feature 1..22: note = chemically synthesized
  source 1..22: mol_type = other DNA
caaaaacactcttcaaaatgtt

SEQ ID NO: 42598 - DNA, 22 bp, synthetic construct
  misc_feature 1..22: note = chemically synthesized
  source 1..22: mol_type = other DNA
aaaaacactcttcaaaatgttt

SEQ ID NO: 42599 - DNA, 22 bp, synthetic construct
  misc_feature 1..22: note = chemically synthesized
  source 1..22: mol_type = other DNA
ttcaaaatgtttaactgaactc

SEQ ID NO: 42600 - DNA, 22 bp, synthetic construct
  misc_feature 1..22: note = chemically synthesized
  source 1..22: mol_type = other DNA
caaaatgtttaactgaactcac

SEQ ID NO: 42601 - DNA, 22 bp, synthetic construct
  misc_feature 1..22: note = chemically synthesized
  source 1..22: mol_type = other DNA
aaaatgtttaactgaactcact

SEQ ID NO: 42602 - DNA, 22 bp, synthetic construct
  misc_feature 1..22: note = chemically synthesized
  source 1..22: mol_type = other DNA
aactgaactcactgtaggaagc

SEQ ID NO: 42603 - DNA, 22 bp, synthetic construct
  misc_feature 1..22: note = chemically synthesized
  source 1..22: mol_type = other DNA
actgaactcactgtaggaagca

SEQ ID NO: 42604 - DNA, 22 bp, synthetic construct
  misc_feature 1..22: note = chemically synthesized
  source 1..22: mol_type = other DNA
aactcactgtaggaagcacctt

SEQ ID NO: 42605 - DNA, 22 bp, synthetic construct
  misc_feature 1..22: note = chemically synthesized
  source 1..22: mol_type = other DNA
actgtaggaagcaccttattaa

SEQ ID NO: 42606 - DNA, 22 bp, synthetic construct
  misc_feature 1..22: note = chemically synthesized
  source 1..22: mol_type = other DNA
taggaagcaccttattaattta

SEQ ID NO: 42607 - DNA, 22 bp, synthetic construct
  misc_feature 1..22: note = chemically synthesized
  source 1..22: mol_type = other DNA
attaatttattgtgtgttttga

SEQ ID NO: 42608 - DNA, 22 bp, synthetic construct
  misc_feature 1..22: note = chemically synthesized
  source 1..22: mol_type = other DNA
ttaatttattgtgtgttttgaa

SEQ ID NO: 42609 - DNA, 22 bp, synthetic construct
  misc_feature 1..22: note = chemically synthesized
  source 1..22: mol_type = other DNA
atttattgtgtgttttgaagtc

SEQ ID NO: 42610 - DNA, 22 bp, synthetic construct
  misc_feature 1..22: note = chemically synthesized
  source 1..22: mol_type = other DNA
attgtgtgttttgaagtcacac

SEQ ID NO: 42611 - DNA, 22 bp, synthetic construct
  misc_feature 1..22: note = chemically synthesized
  source 1..22: mol_type = other DNA
ttgtgtgttttgaagtcacact

SEQ ID NO: 42612 - DNA, 22 bp, synthetic construct
  misc_feature 1..22: note = chemically synthesized
  source 1..22: mol_type = other DNA
tgtgttttgaagtcacactgtg

SEQ ID NO: 42613 - DNA, 22 bp, synthetic construct
  misc_feature 1..22: note = chemically synthesized
  source 1..22: mol_type = other DNA
tgaagtcacactgtgagctata

SEQ ID NO: 42614 - DNA, 22 bp, synthetic construct
  misc_feature 1..22: note = chemically synthesized
  source 1..22: mol_type = other DNA
gaagtcacactgtgagctatag

SEQ ID NO: 42615 - DNA, 22 bp, synthetic construct
  misc_feature 1..22: note = chemically synthesized
  source 1..22: mol_type = other DNA
aagtcacactgtgagctataga

SEQ ID NO: 42616 - DNA, 22 bp, synthetic construct
  misc_feature 1..22: note = chemically synthesized
  source 1..22: mol_type = other DNA
tgagctatagaatttacccaag

SEQ ID NO: 42617 - DNA, 22 bp, synthetic construct
  misc_feature 1..22: note = chemically synthesized
  source 1..22: mol_type = other DNA
tagaatttacccaagcacaact

SEQ ID NO: 42618 - DNA, 22 bp, synthetic construct
  misc_feature 1..22: note = chemically synthesized
  source 1..22: mol_type = other DNA
acccaagcacaactcttcctgg

SEQ ID NO: 42619 - DNA, 22 bp, synthetic construct
  misc_feature 1..22: note = chemically synthesized
  source 1..22: mol_type = other DNA
cccaagcacaactcttcctgga

SEQ ID NO: 42620 - DNA, 22 bp, synthetic construct
  misc_feature 1..22: note = chemically synthesized
  source 1..22: mol_type = other DNA
ttcctggaaaagagagttcaaa

SEQ ID NO: 42621 - DNA, 22 bp, synthetic construct
  misc_feature 1..22: note = chemically synthesized
  source 1..22: mol_type = other DNA
cctggaaaagagagttcaaatg

SEQ ID NO: 42622 - DNA, 22 bp, synthetic construct
  misc_feature 1..22: note = chemically synthesized
  source 1..22: mol_type = other DNA
ctggaaaagagagttcaaatga

SEQ ID NO: 42623 - DNA, 22 bp, synthetic construct
  misc_feature 1..22: note = chemically synthesized
  source 1..22: mol_type = other DNA
gaaaagagagttcaaatgagaa

SEQ ID NO: 42624 - DNA, 22 bp, synthetic construct
  misc_feature 1..22: note = chemically synthesized
  source 1..22: mol_type = other DNA
aaatgagaaacagtgcggggtg

SEQ ID NO: 42625 - DNA, 22 bp, synthetic construct
  misc_feature 1..22: note = chemically synthesized
  source 1..22: mol_type = other DNA
aaatatctatttctcaatgata

SEQ ID NO: 42626 - DNA, 22 bp, synthetic construct
  misc_feature 1..22: note = chemically synthesized
  source 1..22: mol_type = other DNA
tttctcaatgatattttgatat

SEQ ID NO: 42627 - DNA, 22 bp, synthetic construct
  misc_feature 1..22: note = chemically synthesized
  source 1..22: mol_type = other DNA
ctcaatgatattttgatatatc

SEQ ID NO: 42628 - DNA, 22 bp, synthetic construct
  misc_feature 1..22: note = chemically synthesized
  source 1..22: mol_type = other DNA
tcaatgatattttgatatatct

SEQ ID NO: 42629 - DNA, 22 bp, synthetic construct
  misc_feature 1..22: note = chemically synthesized
  source 1..22: mol_type = other DNA
aatgatattttgatatatctat

SEQ ID NO: 42630 - DNA, 22 bp, synthetic construct
  misc_feature 1..22: note = chemically synthesized
  source 1..22: mol_type = other DNA
tgatatatctatcaagtgcttt

SEQ ID NO: 42631 - DNA, 22 bp, synthetic construct
  misc_feature 1..22: note = chemically synthesized
  source 1..22: mol_type = other DNA
gatatatctatcaagtgctttt

SEQ ID NO: 42632 - DNA, 22 bp, synthetic construct
  misc_feature 1..22: note = chemically synthesized
  source 1..22: mol_type = other DNA
atatatctatcaagtgcttttt

SEQ ID NO: 42633 - DNA, 22 bp, synthetic construct
  misc_feature 1..22: note = chemically synthesized
  source 1..22: mol_type = other DNA
tcaagtgctttttagtggatta

SEQ ID NO: 42634 - DNA, 22 bp, synthetic construct
  misc_feature 1..22: note = chemically synthesized
  source 1..22: mol_type = other DNA
tttagtggattaggttcagaat

SEQ ID NO: 42635 - DNA, 22 bp, synthetic construct
  misc_feature 1..22: note = chemically synthesized
  source 1..22: mol_type = other DNA
ttagtggattaggttcagaatg

SEQ ID NO: 42636 - DNA, 22 bp, synthetic construct
  misc_feature 1..22: note = chemically synthesized
  source 1..22: mol_type = other DNA
tagtggattaggttcagaatgc

SEQ ID NO: 42637 - DNA, 22 bp, synthetic construct
  misc_feature 1..22: note = chemically synthesized
  source 1..22: mol_type = other DNA
agtggattaggttcagaatgca

SEQ ID NO: 42638 - DNA, 22 bp, synthetic construct
  misc_feature 1..22: note = chemically synthesized
  source 1..22: mol_type = other DNA
gtggattaggttcagaatgcat

SEQ ID NO: 42639 - DNA, 22 bp, synthetic construct
  misc_feature 1..22: note = chemically synthesized
  source 1..22: mol_type = other DNA
ggttcagaatgcatcagccaat

SEQ ID NO: 42640 - DNA, 22 bp, synthetic construct
  misc_feature 1..22: note = chemically synthesized
  source 1..22: mol_type = other DNA
agaatgcatcagccaatgcctg

SEQ ID NO: 42641 - DNA, 22 bp, synthetic construct
  misc_feature 1..22: note = chemically synthesized
  source 1..22: mol_type = other DNA
ttcaataatccagttttccagc

SEQ ID NO: 42642 - DNA, 22 bp, synthetic construct
  misc_feature 1..22: note = chemically synthesized
  source 1..22: mol_type = other DNA
aataatccagttttccagcata

SEQ ID NO: 42643 - DNA, 22 bp, synthetic construct
  misc_feature 1..22: note = chemically synthesized
  source 1..22: mol_type = other DNA
tccagcatagagcatattaaat

SEQ ID NO: 42644 - DNA, 22 bp, synthetic construct
  misc_feature 1..22: note = chemically synthesized
  source 1..22: mol_type = other DNA
ccagcatagagcatattaaatt

SEQ ID NO: 42645 - DNA, 22 bp, synthetic construct
  misc_feature 1..22: note = chemically synthesized
  source 1..22: mol_type = other DNA
cagcatagagcatattaaattg

SEQ ID NO: 42646 - DNA, 22 bp, synthetic construct
  misc_feature 1..22: note = chemically synthesized
  source 1..22: mol_type = other DNA
aattgaggaaggacaaagtcac

SEQ ID NO: 42647 - DNA, 22 bp, synthetic construct
  misc_feature 1..22: note = chemically synthesized
  source 1..22: mol_type = other DNA
aggaaggacaaagtcacagagg

SEQ ID NO: 42648 - DNA, 22 bp, synthetic construct
  misc_feature 1..22: note = chemically synthesized
  source 1..22: mol_type = other DNA
tggccaaggactttgcatgaaa

SEQ ID NO: 42649 - DNA, 22 bp, synthetic construct
  misc_feature 1..22: note = chemically synthesized
  source 1..22: mol_type = other DNA
tgcatgaaacagtgagcgtgca

SEQ ID NO: 42650 - DNA, 22 bp, synthetic construct
  misc_feature 1..22: note = chemically synthesized
  source 1..22: mol_type = other DNA
gcatgaaacagtgagcgtgcat

SEQ ID NO: 42651 - DNA, 22 bp, synthetic construct
  misc_feature 1..22: note = chemically synthesized
  source 1..22: mol_type = other DNA
catgaaacagtgagcgtgcatc

SEQ ID NO: 42652 - DNA, 22 bp, synthetic construct
  misc_feature 1..22: note = chemically synthesized
  source 1..22: mol_type = other DNA
ctccttgccctgccctcatggt

SEQ ID NO: 42653 - DNA, 22 bp, synthetic construct
  misc_feature 1..22: note = chemically synthesized
  source 1..22: mol_type = other DNA
cttgccctgccctcatggtctg

SEQ ID NO: 42654 - DNA, 22 bp, synthetic construct
  misc_feature 1..22: note = chemically synthesized
  source 1..22: mol_type = other DNA
gccctgccctcatggtctgtgt

SEQ ID NO: 42655 - DNA, 22 bp, synthetic construct
  misc_feature 1..22: note = chemically synthesized
  source 1..22: mol_type = other DNA
ccctgccctcatggtctgtgta

SEQ ID NO: 42656 - DNA, 22 bp, synthetic construct
  misc_feature 1..22: note = chemically synthesized
  source 1..22: mol_type = other DNA
ccctcatggtctgtgtactctc

SEQ ID NO: 42657 - DNA, 22 bp, synthetic construct
  misc_feature 1..22: note = chemically synthesized
  source 1..22: mol_type = other DNA
atggtctgtgtactctcaggag

SEQ ID NO: 42658 - DNA, 22 bp, synthetic construct
  misc_feature 1..22: note = chemically synthesized
  source 1..22: mol_type = other DNA
tgtactctcaggaggtcaggac

SEQ ID NO: 42659 - DNA, 22 bp, synthetic construct
  misc_feature 1..22: note = chemically synthesized
  source 1..22: mol_type = other DNA
tcaggaggtcaggacaggcctt

SEQ ID NO: 42660 - DNA, 22 bp, synthetic construct
  misc_feature 1..22: note = chemically synthesized
  source 1..22: mol_type = other DNA
aggaggtcaggacaggcctttc

SEQ ID NO: 42661 - DNA, 22 bp, synthetic construct
  misc_feature 1..22: note = chemically synthesized
  source 1..22: mol_type = other DNA
tctgagaatgagaatctgttca

SEQ ID NO: 42662 - DNA, 22 bp, synthetic construct
  misc_feature 1..22: note = chemically synthesized
  source 1..22: mol_type = other DNA
ctgagaatgagaatctgttcat

SEQ ID NO: 42663 - DNA, 22 bp, synthetic construct
  misc_feature 1..22: note = chemically synthesized
  source 1..22: mol_type = other DNA
tgagaatgagaatctgttcatc

SEQ ID NO: 42664 - DNA, 22 bp, synthetic construct
  misc_feature 1..22: note = chemically synthesized
  source 1..22: mol_type = other DNA
agaatgagaatctgttcatctg

SEQ ID NO: 42665 - DNA, 22 bp, synthetic construct
  misc_feature 1..22: note = chemically synthesized
  source 1..22: mol_type = other DNA
ttcatctgcctttctactggat

SEQ ID NO: 42666 - DNA, 22 bp, synthetic construct
  misc_feature 1..22: note = chemically synthesized
  source 1..22: mol_type = other DNA
atctgcctttctactggatact

SEQ ID NO: 42667 - DNA, 22 bp, synthetic construct
  misc_feature 1..22: note = chemically synthesized
  source 1..22: mol_type = other DNA
cctttctactggatacttgtca

SEQ ID NO: 42668 - DNA, 22 bp, synthetic construct
  misc_feature 1..22: note = chemically synthesized
  source 1..22: mol_type = other DNA
tctactggatacttgtcatcgg

SEQ ID NO: 42669 - DNA, 22 bp, synthetic construct
  misc_feature 1..22: note = chemically synthesized
  source 1..22: mol_type = other DNA
ctactggatacttgtcatcggc

SEQ ID NO: 42670 - DNA, 22 bp, synthetic construct
  misc_feature 1..22: note = chemically synthesized
  source 1..22: mol_type = other DNA
tactggatacttgtcatcggca

SEQ ID NO: 42671 - DNA, 22 bp, synthetic construct
  misc_feature 1..22: note = chemically synthesized
  source 1..22: mol_type = other DNA
ctggatacttgtcatcggcata

SEQ ID NO: 42672 - DNA, 22 bp, synthetic construct
  misc_feature 1..22: note = chemically synthesized
  source 1..22: mol_type = other DNA
gatacttgtcatcggcatacaa

SEQ ID NO: 42673 - DNA, 22 bp, synthetic construct
  misc_feature 1..22: note = chemically synthesized
  source 1..22: mol_type = other DNA
gtcatcggcatacaaacacatg

SEQ ID NO: 42674 - DNA, 22 bp, synthetic construct
  misc_feature 1..22: note = chemically synthesized
  source 1..22: mol_type = other DNA
tcatcggcatacaaacacatgt

SEQ ID NO: 42675 - DNA, 22 bp, synthetic construct
  misc_feature 1..22: note = chemically synthesized
  source 1..22: mol_type = other DNA
tctgcagtgtgtcatctttcag

SEQ ID NO: 42676 - DNA, 22 bp, synthetic construct
  misc_feature 1..22: note = chemically synthesized
  source 1..22: mol_type = other DNA
tgcagtgtgtcatctttcagaa

SEQ ID NO: 42677 - DNA, 22 bp, synthetic construct
  misc_feature 1..22: note = chemically synthesized
  source 1..22: mol_type = other DNA
cagtgtgtcatctttcagaacc

SEQ ID NO: 42678 - DNA, 22 bp, synthetic construct
  misc_feature 1..22: note = chemically synthesized
  source 1..22: mol_type = other DNA
tcagaacctcccctgaccctgt

SEQ ID NO: 42679 - DNA, 22 bp, synthetic construct
  misc_feature 1..22: note = chemically synthesized
  source 1..22: mol_type = other DNA
cagaacctcccctgaccctgta

SEQ ID NO: 42680 - DNA, 22 bp, synthetic construct
  misc_feature 1..22: note = chemically synthesized
  source 1..22: mol_type = other DNA
agaacctcccctgaccctgtat

SEQ ID NO: 42681 - DNA, 22 bp, synthetic construct
  misc_feature 1..22: note = chemically synthesized
  source 1..22: mol_type = other DNA
ccctgaccctgtattccctaga

SEQ ID NO: 42682 - DNA, 22 bp, synthetic construct
  misc_feature 1..22: note = chemically synthesized
  source 1..22: mol_type = other DNA
accctgtattccctagaagtct

SEQ ID NO: 42683 - DNA, 22 bp, synthetic construct
  misc_feature 1..22: note = chemically synthesized
  source 1..22: mol_type = other DNA
tattccctagaagtctcgctgc

SEQ ID NO: 42684 - DNA, 22 bp, synthetic construct
  misc_feature 1..22: note = chemically synthesized
  source 1..22: mol_type = other DNA
cctagaagtctcgctgctttca

SEQ ID NO: 42685 - DNA, 22 bp, synthetic construct
  misc_feature 1..22: note = chemically synthesized
  source 1..22: mol_type = other DNA
gaagtctcgctgctttcagagc

SEQ ID NO: 42686 - DNA, 22 bp, synthetic construct
  misc_feature 1..22: note = chemically synthesized
  source 1..22: mol_type = other DNA
gctgctttcagagccaggcttc

SEQ ID NO: 42687 - DNA, 22 bp, synthetic construct
  misc_feature 1..22: note = chemically synthesized
  source 1..22: mol_type = other DNA
ctttcagagccaggcttctctc

SEQ ID NO: 42688 - DNA, 22 bp, synthetic construct
  misc_feature 1..22: note = chemically synthesized
  source 1..22: mol_type = other DNA
tcagagccaggcttctctcctg

SEQ ID NO: 42689 - DNA, 22 bp, synthetic construct
  misc_feature 1..22: note = chemically synthesized
  source 1..22: mol_type = other DNA
cagagccaggcttctctcctgc

SEQ ID NO: 42690 - DNA, 22 bp, synthetic construct
  misc_feature 1..22: note = chemically synthesized
  source 1..22: mol_type = other DNA
agagccaggcttctctcctgct

SEQ ID NO: 42691 - DNA, 22 bp, synthetic construct
  misc_feature 1..22: note = chemically synthesized
  source 1..22: mol_type = other DNA
ctctcctgctgccacccccact

SEQ ID NO: 42692 - DNA, 22 bp, synthetic construct
  misc_feature 1..22: note = chemically synthesized
  source 1..22: mol_type = other DNA
tctcctgctgccacccccactg

SEQ ID NO: 42693 - DNA, 22 bp, synthetic construct
  misc_feature 1..22: note = chemically synthesized
  source 1..22: mol_type = other DNA
tcctgctgccacccccactgct

SEQ ID NO: 42694 - DNA, 22 bp, synthetic construct
  misc_feature 1..22: note = chemically synthesized
  source 1..22: mol_type = other DNA
ctgctgccacccccactgctct

SEQ ID NO: 42695 - DNA, 22 bp, synthetic construct
  misc_feature 1..22: note = chemically synthesized
  source 1..22: mol_type = other DNA
ctgccacccccactgctcttct

SEQ ID NO: 42696 - DNA, 22 bp, synthetic construct
  misc_feature 1..22: note = chemically synthesized
  source 1..22: mol_type = other DNA
ccacccccactgctcttctagt

SEQ ID NO: 42697 - DNA, 22 bp, synthetic construct
  misc_feature 1..22: note = chemically synthesized
  source 1..22: mol_type = other DNA
ctcttctagtcactctttaacc

SEQ ID NO: 42698 - DNA, 22 bp, synthetic construct
  misc_feature 1..22: note = chemically synthesized
  source 1..22: mol_type = other DNA
ttctagtcactctttaacccac

SEQ ID NO: 42699 - DNA, 22 bp, synthetic construct
  misc_feature 1..22: note = chemically synthesized
  source 1..22: mol_type = other DNA
ctagtcactctttaacccactc

SEQ ID NO: 42700 - DNA, 22 bp, synthetic construct
  misc_feature 1..22: note = chemically synthesized
  source 1..22: mol_type = other DNA
tagtcactctttaacccactcc

SEQ ID NO: 42701 - DNA, 22 bp, synthetic construct
  misc_feature 1..22: note = chemically synthesized
  source 1..22: mol_type = other DNA
gtcactctttaacccactccat

SEQ ID NO: 42702 - DNA, 22 bp, synthetic construct
  misc_feature 1..22: note = chemically synthesized
  source 1..22: mol_type = other DNA
tttaacccactccatctgcatg

SEQ ID NO: 42703 - DNA, 22 bp, synthetic construct
  misc_feature 1..22: note = chemically synthesized
  source 1..22: mol_type = other DNA
taacccactccatctgcatgtg

SEQ ID NO: 42704 - DNA, 22 bp, synthetic construct
  misc_feature 1..22: note = chemically synthesized
  source 1..22: mol_type = other DNA
aacccactccatctgcatgtgg

SEQ ID NO: 42705 - DNA, 22 bp, synthetic construct
  misc_feature 1..22: note = chemically synthesized
  source 1..22: mol_type = other DNA
acccactccatctgcatgtggc

SEQ ID NO: 42706 - DNA, 22 bp, synthetic construct
  misc_feature 1..22: note = chemically synthesized
  source 1..22: mol_type = other DNA
catctgcatgtggcccccacca

SEQ ID NO: 42707 - DNA, 22 bp, synthetic construct
  misc_feature 1..22: note = chemically synthesized
  source 1..22: mol_type = other DNA
catgtggcccccaccacacccc

SEQ ID NO: 42708 - DNA, 22 bp, synthetic construct
  misc_feature 1..22: note = chemically synthesized
  source 1..22: mol_type = other DNA
aaagtggtcaaggttgtcctgt

SEQ ID NO: 42709 - DNA, 22 bp, synthetic construct
  misc_feature 1..22: note = chemically synthesized
  source 1..22: mol_type = other DNA
tcctgttgcttaattccatgga

SEQ ID NO: 42710 - DNA, 22 bp, synthetic construct
  misc_feature 1..22: note = chemically synthesized
  source 1..22: mol_type = other DNA
ttgcttaattccatggaagctt

SEQ ID NO: 42711 - DNA, 22 bp, synthetic construct
  misc_feature 1..22: note = chemically synthesized
  source 1..22: mol_type = other DNA
cttaattccatggaagcttggc

SEQ ID NO: 42712 - DNA, 22 bp, synthetic construct
  misc_feature 1..22: note = chemically synthesized
  source 1..22: mol_type = other DNA
aattccatggaagcttggctat

SEQ ID NO: 42713 - DNA, 22 bp, synthetic construct
  misc_feature 1..22: note = chemically synthesized
  source 1..22: mol_type = other DNA
attccatggaagcttggctatc

SEQ ID NO: 42714 - DNA, 22 bp, synthetic construct
  misc_feature 1..22: note = chemically synthesized
  source 1..22: mol_type = other DNA
catggaagcttggctatcttca

SEQ ID NO: 42715 - DNA, 22 bp, synthetic construct
  misc_feature 1..22: note = chemically synthesized
  source 1..22: mol_type = other DNA
ggctatcttcattttattagcc

SEQ ID NO: 42716 - DNA, 22 bp, synthetic construct
  misc_feature 1..22: note = chemically synthesized
  source 1..22: mol_type = other DNA
gctatcttcattttattagcct

SEQ ID NO: 42717 - DNA, 22 bp, synthetic construct
  misc_feature 1..22: note = chemically synthesized
  source 1..22: mol_type = other DNA
tcttcattttattagcctcttt

SEQ ID NO: 42718 - DNA, 22 bp, synthetic construct
  misc_feature 1..22: note = chemically synthesized
  source 1..22: mol_type = other DNA
cattttattagcctcttttggc

SEQ ID NO: 42719 - DNA, 22 bp, synthetic construct
  misc_feature 1..22: note = chemically synthesized
  source 1..22: mol_type = other DNA
attttattagcctcttttggcc

SEQ ID NO: 42720 - DNA, 22 bp, synthetic construct
  misc_feature 1..22: note = chemically synthesized
  source 1..22: mol_type = other DNA
tattagcctcttttggcctctc

SEQ ID NO: 42721 - DNA, 22 bp, synthetic construct
  misc_feature 1..22: note = chemically synthesized
  source 1..22: mol_type = other DNA
attagcctcttttggcctctca

SEQ ID NO: 42722 - DNA, 22 bp, synthetic construct
  misc_feature 1..22: note = chemically synthesized
  source 1..22: mol_type = other DNA
ttagcctcttttggcctctcac

SEQ ID NO: 42723 - DNA, 22 bp, synthetic construct
  misc_feature 1..22: note = chemically synthesized
  source 1..22: mol_type = other DNA
gcctcttttggcctctcaccct

SEQ ID NO: 42724 - DNA, 22 bp, synthetic construct
  misc_feature 1..22: note = chemically synthesized
  source 1..22: mol_type = other DNA
ttttggcctctcaccctgtgaa

SEQ ID NO: 42725 - DNA, 22 bp, synthetic construct
  misc_feature 1..22: note = chemically synthesized
  source 1..22: mol_type = other DNA
ttggcctctcaccctgtgaaaa

SEQ ID NO: 42726 - DNA, 22 bp, synthetic construct
  misc_feature 1..22: note = chemically synthesized
  source 1..22: mol_type = other DNA
tggcctctcaccctgtgaaaat

SEQ ID NO: 42727 - DNA, 22 bp, synthetic construct
  misc_feature 1..22: note = chemically synthesized
  source 1..22: mol_type = other DNA
ggcctctcaccctgtgaaaatc

SEQ ID NO: 42728 - DNA, 22 bp, synthetic construct
  misc_feature 1..22: note = chemically synthesized
  source 1..22: mol_type = other DNA
gcctctcaccctgtgaaaatca

SEQ ID NO: 42729 - DNA, 22 bp, synthetic construct
  misc_feature 1..22: note = chemically synthesized
  source 1..22: mol_type = other DNA
tcaccctgtgaaaatcactaca

SEQ ID NO: 42730 - DNA, 22 bp, synthetic construct
  misc_feature 1..22: note = chemically synthesized
  source 1..22: mol_type = other DNA
accctgtgaaaatcactacatt

SEQ ID NO: 42731 - DNA, 22 bp, synthetic construct
  misc_feature 1..22: note = chemically synthesized
  source 1..22: mol_type = other DNA
tgaaaatcactacattttgtgc

SEQ ID NO: 42732 - DNA, 22 bp, synthetic construct
  misc_feature 1..22: note = chemically synthesized
  source 1..22: mol_type = other DNA
cattttgtgccagagatggagc

SEQ ID NO: 42733 - DNA, 22 bp, synthetic construct
  misc_feature 1..22: note = chemically synthesized
  source 1..22: mol_type = other DNA
tgtgccagagatggagctggca

SEQ ID NO: 42734 - DNA, 22 bp, synthetic construct
  misc_feature 1..22: note = chemically synthesized
  source 1..22: mol_type = other DNA
gtgccagagatggagctggcat

SEQ ID NO: 42735 - DNA, 22 bp, synthetic construct
  misc_feature 1..22: note = chemically synthesized
  source 1..22: mol_type = other DNA
tgccagagatggagctggcatc

SEQ ID NO: 42736 - DNA, 22 bp, synthetic construct
  misc_feature 1..22: note = chemically synthesized
  source 1..22: mol_type = other DNA
gcatctccaggcttggaagagg

SEQ ID NO: 42737 - DNA, 22 bp, synthetic construct
  misc_feature 1..22: note = chemically synthesized
  source 1..22: mol_type = other DNA
caggcttggaagagggctgctg

SEQ ID NO: 42738 - DNA, 22 bp, synthetic construct
  misc_feature 1..22: note = chemically synthesized
  source 1..22: mol_type = other DNA
ggaagagggctgctgaagctca

SEQ ID NO: 42739 - DNA, 22 bp, synthetic construct
  misc_feature 1..22: note = chemically synthesized
  source 1..22: mol_type = other DNA
gaagagggctgctgaagctcag

SEQ ID NO: 42740 - DNA, 22 bp, synthetic construct
  misc_feature 1..22: note = chemically synthesized
  source 1..22: mol_type = other DNA
ctgaagctcagccaggtgtcct

SEQ ID NO: 42741 - DNA, 22 bp, synthetic construct
  misc_feature 1..22: note = chemically synthesized
  source 1..22: mol_type = other DNA
aagctcagccaggtgtcctaag

SEQ ID NO: 42742 - DNA, 22 bp, synthetic construct
  misc_feature 1..22: note = chemically synthesized
  source 1..22: mol_type = other DNA
agccaggtgtcctaaggagcct

SEQ ID NO: 42743 - DNA, 22 bp, synthetic construct
  misc_feature 1..22: note = chemically synthesized
  source 1..22: mol_type = other DNA
aggagcctcaggacaggggatg

SEQ ID NO: 42744 - DNA, 22 bp, synthetic construct
  misc_feature 1..22: note = chemically synthesized
  source 1..22: mol_type = other DNA
aggacaggggatgctcagtagc

SEQ ID NO: 42745 - DNA, 22 bp, synthetic construct
  misc_feature 1..22: note = chemically synthesized
  source 1..22: mol_type = other DNA
agtagccttgcaatgggaacac

SEQ ID NO: 42746 - DNA, 22 bp, synthetic construct
  misc_feature 1..22: note = chemically synthesized
  source 1..22: mol_type = other DNA
gcaatgggaacacagctgagcc

SEQ ID NO: 42747 - DNA, 22 bp, synthetic construct
  misc_feature 1..22: note = chemically synthesized
  source 1..22: mol_type = other DNA
caatgggaacacagctgagccc

SEQ ID NO: 42748 - DNA, 22 bp, synthetic construct
  misc_feature 1..22: note = chemically synthesized
  source 1..22: mol_type = other DNA
agccccacttggccaccctttg

SEQ ID NO: 42749 - DNA, 22 bp, synthetic construct
  misc_feature 1..22: note = chemically synthesized
  source 1..22: mol_type = other DNA
ggccaccctttgccacaaccag

SEQ ID NO: 42750 - DNA, 22 bp, synthetic construct
  misc_feature 1..22: note = chemically synthesized
  source 1..22: mol_type = other DNA
gccaccctttgccacaaccagg

SEQ ID NO: 42751 - DNA, 22 bp, synthetic construct
  misc_feature 1..22: note = chemically synthesized
  source 1..22: mol_type = other DNA
tgccacaaccaggcagaaagca

SEQ ID NO: 42752 - DNA, 22 bp, synthetic construct
  misc_feature 1..22: note = chemically synthesized
  source 1..22: mol_type = other DNA
gccacaaccaggcagaaagcag

SEQ ID NO: 42753 - DNA, 22 bp, synthetic construct
  misc_feature 1..22: note = chemically synthesized
  source 1..22: mol_type = other DNA
ccacaaccaggcagaaagcagc

SEQ ID NO: 42754 - DNA, 22 bp, synthetic construct
  misc_feature 1..22: note = chemically synthesized
  source 1..22: mol_type = other DNA
ttgaacagatttgttgcctcag

SEQ ID NO: 42755 - DNA, 22 bp, synthetic construct
  misc_feature 1..22: note = chemically synthesized
  source 1..22: mol_type = other DNA
tgaacagatttgttgcctcaga

SEQ ID NO: 42756 - DNA, 22 bp, synthetic construct
  misc_feature 1..22: note = chemically synthesized
  source 1..22: mol_type = other DNA
gaacagatttgttgcctcagat

SEQ ID NO: 42757 - DNA, 22 bp, synthetic construct
  misc_feature 1..22: note = chemically synthesized
  source 1..22: mol_type = other DNA
aacagatttgttgcctcagatt

SEQ ID NO: 42758 - DNA, 22 bp, synthetic construct
  misc_feature 1..22: note = chemically synthesized
  source 1..22: mol_type = other DNA
gttgcctcagatttgatctcaa

SEQ ID NO: 42759 - DNA, 22 bp, synthetic construct
  misc_feature 1..22: note = chemically synthesized
  source 1..22: mol_type = other DNA
ttgcctcagatttgatctcaaa

SEQ ID NO: 42760 - DNA, 22 bp, synthetic construct
  misc_feature 1..22: note = chemically synthesized
  source 1..22: mol_type = other DNA
cctcagatttgatctcaaagaa

SEQ ID NO: 42761 - DNA, 22 bp, synthetic construct
  misc_feature 1..22: note = chemically synthesized
  source 1..22: mol_type = other DNA
agatttgatctcaaagaaaaat

SEQ ID NO: 42762 - DNA, 22 bp, synthetic construct
  misc_feature 1..22: note = chemically synthesized
  source 1..22: mol_type = other DNA
gatctcaaagaaaaatcgtggg

SEQ ID NO: 42763 - DNA, 22 bp, synthetic construct
  misc_feature 1..22: note = chemically synthesized
  source 1..22: mol_type = other DNA
atctcaaagaaaaatcgtgggc

SEQ ID NO: 42764 - DNA, 22 bp, synthetic construct
  misc_feature 1..22: note = chemically synthesized
  source 1..22: mol_type = other DNA
aaagaaaaatcgtgggcagtat

SEQ ID NO: 42765 - DNA, 22 bp, synthetic construct
  misc_feature 1..22: note = chemically synthesized
  source 1..22: mol_type = other DNA
gtcccaggttctgcttttttac

SEQ ID NO: 42766 - DNA, 22 bp, synthetic construct
  misc_feature 1..22: note = chemically synthesized
  source 1..22: mol_type = other DNA
tgcttttttacaatttcctctg

SEQ ID NO: 42767 - DNA, 22 bp, synthetic construct
  misc_feature 1..22: note = chemically synthesized
  source 1..22: mol_type = other DNA
cttttttacaatttcctctgaa

SEQ ID NO: 42768 - DNA, 22 bp, synthetic construct
  misc_feature 1..22: note = chemically synthesized
  source 1..22: mol_type = other DNA
ttttacaatttcctctgaaatc

SEQ ID NO: 42769 - DNA, 22 bp, synthetic construct
  misc_feature 1..22: note = chemically synthesized
  source 1..22: mol_type = other DNA
tttacaatttcctctgaaatct

SEQ ID NO: 42770 - DNA, 22 bp, synthetic construct
  misc_feature 1..22: note = chemically synthesized
  source 1..22: mol_type = other DNA
ttacaatttcctctgaaatctg

SEQ ID NO: 42771 - DNA, 22 bp, synthetic construct
  misc_feature 1..22: note = chemically synthesized
  source 1..22: mol_type = other DNA
tacaatttcctctgaaatctgg

SEQ ID NO: 42772 - DNA, 22 bp, synthetic construct
  misc_feature 1..22: note = chemically synthesized
  source 1..22: mol_type = other DNA
acaatttcctctgaaatctgga

SEQ ID NO: 42773 - DNA, 22 bp, synthetic construct
  misc_feature 1..22: note = chemically synthesized
  source 1..22: mol_type = other DNA
caatttcctctgaaatctggat

SEQ ID NO: 42774 - DNA, 22 bp, synthetic construct
  misc_feature 1..22: note = chemically synthesized
  source 1..22: mol_type = other DNA
cctctgaaatctggatgcctat

SEQ ID NO: 42775 - DNA, 22 bp, synthetic construct
  misc_feature 1..22: note = chemically synthesized
  source 1..22: mol_type = other DNA
ctctgaaatctggatgcctatc

SEQ ID NO: 42776 - DNA, 22 bp, synthetic construct
  misc_feature 1..22: note = chemically synthesized
  source 1..22: mol_type = other DNA
tgaaatctggatgcctatcaac

SEQ ID NO: 42777 - DNA, 22 bp, synthetic construct
  misc_feature 1..22: note = chemically synthesized
  source 1..22: mol_type = other DNA
aaatctggatgcctatcaacac

SEQ ID NO: 42778 - DNA, 22 bp, synthetic construct
  misc_feature 1..22: note = chemically synthesized
  source 1..22: mol_type = other DNA
gatgcctatcaacaccttggaa

SEQ ID NO: 42779 - DNA, 22 bp, synthetic construct
  misc_feature 1..22: note = chemically synthesized
  source 1..22: mol_type = other DNA
tcaacaccttggaaaaactgaa

SEQ ID NO: 42780 - DNA, 22 bp, synthetic construct
  misc_feature 1..22: note = chemically synthesized
  source 1..22: mol_type = other DNA
ggaaaaactgaattctccccaa

SEQ ID NO: 42781 - DNA, 22 bp, synthetic construct
  misc_feature 1..22: note = chemically synthesized
  source 1..22: mol_type = other DNA
gaaaaactgaattctccccaac

SEQ ID NO: 42782 - DNA, 22 bp, synthetic construct
  misc_feature 1..22: note = chemically synthesized
  source 1..22: mol_type = other DNA
aattctccccaactaatagtgg

SEQ ID NO: 42783 - DNA, 22 bp, synthetic construct
  misc_feature 1..22: note = chemically synthesized
  source 1..22: mol_type = other DNA
tccccaactaatagtggtgtgt

SEQ ID NO: 42784 - DNA, 22 bp, synthetic construct
  misc_feature 1..22: note = chemically synthesized
  source 1..22: mol_type = other DNA
cccaactaatagtggtgtgtca

SEQ ID NO: 42785 - DNA, 22 bp, synthetic construct
  misc_feature 1..22: note = chemically synthesized
  source 1..22: mol_type = other DNA
atagtggtgtgtcactgtagta

SEQ ID NO: 42786 - DNA, 22 bp, synthetic construct
  misc_feature 1..22: note = chemically synthesized
  source 1..22: mol_type = other DNA
tagtaagcctagtacaaaaatg

SEQ ID NO: 42787 - DNA, 22 bp, synthetic construct
  misc_feature 1..22: note = chemically synthesized
  source 1..22: mol_type = other DNA
gtacaaaaatggccttctttgt

SEQ ID NO: 42788 - DNA, 22 bp, synthetic construct
  misc_feature 1..22: note = chemically synthesized
  source 1..22: mol_type = other DNA
ctttgtggaggagcttcatatc

SEQ ID NO: 42789 - DNA, 22 bp, synthetic construct
  misc_feature 1..22: note = chemically synthesized
  source 1..22: mol_type = other DNA
tttgtggaggagcttcatatcc

SEQ ID NO: 42790 - DNA, 22 bp, synthetic construct
  misc_feature 1..22: note = chemically synthesized
  source 1..22: mol_type = other DNA
tgtggaggagcttcatatcctc

SEQ ID NO: 42791 - DNA, 22 bp, synthetic construct
  misc_feature 1..22: note = chemically synthesized
  source 1..22: mol_type = other DNA
gtggaggagcttcatatcctcc

SEQ ID NO: 42792 - DNA, 22 bp, synthetic construct
  misc_feature 1..22: note = chemically synthesized
  source 1..22: mol_type = other DNA
tggaggagcttcatatcctcca

SEQ ID NO: 42793 - DNA, 22 bp, synthetic construct
  misc_feature 1..22: note = chemically synthesized
  source 1..22: mol_type = other DNA
catatcctccattttttttttg

SEQ ID NO: 42794 - DNA, 22 bp, synthetic construct
  misc_feature 1..22: note = chemically synthesized
  source 1..22: mol_type = other DNA
atatcctccattttttttttgc

SEQ ID NO: 42795 - DNA, 22 bp, synthetic construct
  misc_feature 1..22: note = chemically synthesized
  source 1..22: mol_type = other DNA
cattttttttttgcttaatttt

SEQ ID NO: 42796 - DNA, 22 bp, synthetic construct
  misc_feature 1..22: note = chemically synthesized
  source 1..22: mol_type = other DNA
tttttttgcttaatttttgccc

SEQ ID NO: 42797 - DNA, 22 bp, synthetic construct
  misc_feature 1..22: note = chemically synthesized
  source 1..22: mol_type = other DNA
ttttttgcttaatttttgccca

SEQ ID NO: 42798 - DNA, 22 bp, synthetic construct
  misc_feature 1..22: note = chemically synthesized
  source 1..22: mol_type = other DNA
tttttgcttaatttttgcccaa

SEQ ID NO: 42799 - DNA, 22 bp, synthetic construct
  misc_feature 1..22: note = chemically synthesized
  source 1..22: mol_type = other DNA
ttttgcttaatttttgcccaag

SEQ ID NO: 42800 - DNA, 22 bp, synthetic construct
  misc_feature 1..22: note = chemically synthesized
  source 1..22: mol_type = other DNA
tttgcttaatttttgcccaaga

SEQ ID NO: 42801 - DNA, 22 bp, synthetic construct
  misc_feature 1..22: note = chemically synthesized
  source 1..22: mol_type = other DNA
ttgcttaatttttgcccaagat

SEQ ID NO: 42802 - DNA, 22 bp, synthetic construct
  misc_feature 1..22: note = chemically synthesized
  source 1..22: mol_type = other DNA
tgcttaatttttgcccaagatg

SEQ ID NO: 42803 - DNA, 22 bp, synthetic construct
  misc_feature 1..22: note = chemically synthesized
  source 1..22: mol_type = other DNA
gcttaatttttgcccaagatga

SEQ ID NO: 42804 - DNA, 22 bp, synthetic construct
  misc_feature 1..22: note = chemically synthesized
  source 1..22: mol_type = other DNA
cttaatttttgcccaagatgag

SEQ ID NO: 42805 - DNA, 22 bp, synthetic construct
  misc_feature 1..22: note = chemically synthesized
  source 1..22: mol_type = other DNA
aatttttgcccaagatgagaac

SEQ ID NO: 42806 - DNA, 22 bp, synthetic construct
  misc_feature 1..22: note = chemically synthesized
  source 1..22: mol_type = other DNA
atttttgcccaagatgagaaca

SEQ ID NO: 42807 - DNA, 22 bp, synthetic construct
  misc_feature 1..22: note = chemically synthesized
  source 1..22: mol_type = other DNA
ttgcccaagatgagaacataat

SEQ ID NO: 42808 - DNA, 22 bp, synthetic construct
  misc_feature 1..22: note = chemically synthesized
  source 1..22: mol_type = other DNA
tgcccaagatgagaacataatt

SEQ ID NO: 42809 - DNA, 22 bp, synthetic construct
  misc_feature 1..22: note = chemically synthesized
  source 1..22: mol_type = other DNA
gcccaagatgagaacataattt

SEQ ID NO: 42810 - DNA, 22 bp, synthetic construct
  misc_feature 1..22: note = chemically synthesized
  source 1..22: mol_type = other DNA
cccaagatgagaacataattta

SEQ ID NO: 42811 - DNA, 22 bp, synthetic construct
  misc_feature 1..22: note = chemically synthesized
  source 1..22: mol_type = other DNA
agttcactttttatttattccc

SEQ ID NO: 42812 - DNA, 22 bp, synthetic construct
  misc_feature 1..22: note = chemically synthesized
  source 1..22: mol_type = other DNA
gttcactttttatttattccca

SEQ ID NO: 42813 - DNA, 22 bp, synthetic construct
  misc_feature 1..22: note = chemically synthesized
  source 1..22: mol_type = other DNA
actttttatttattcccaacat

SEQ ID NO: 42814 - DNA, 22 bp, synthetic construct
  misc_feature 1..22: note = chemically synthesized
  source 1..22: mol_type = other DNA
tttatttattcccaacatcatc

SEQ ID NO: 42815 - DNA, 22 bp, synthetic construct
  misc_feature 1..22: note = chemically synthesized
  source 1..22: mol_type = other DNA
ttatttattcccaacatcatcc

SEQ ID NO: 42816 - DNA, 22 bp, synthetic construct
  misc_feature 1..22: note = chemically synthesized
  source 1..22: mol_type = other DNA
tatttattcccaacatcatcca

SEQ ID NO: 42817 - DNA, 22 bp, synthetic construct
  misc_feature 1..22: note = chemically synthesized
  source 1..22: mol_type = other DNA
atttattcccaacatcatccat

SEQ ID NO: 42818 - DNA, 22 bp, synthetic construct
  misc_feature 1..22: note = chemically synthesized
  source 1..22: mol_type = other DNA
tttattcccaacatcatccatg

SEQ ID NO: 42819 - DNA, 22 bp, synthetic construct
  misc_feature 1..22: note = chemically synthesized
  source 1..22: mol_type = other DNA
attcccaacatcatccatgcac

SEQ ID NO: 42820 - DNA, 22 bp, synthetic construct
  misc_feature 1..22: note = chemically synthesized
  source 1..22: mol_type = other DNA
ttcccaacatcatccatgcacc

SEQ ID NO: 42821 - DNA, 22 bp, synthetic construct
  misc_feature 1..22: note = chemically synthesized
  source 1..22: mol_type = other DNA
ccaacatcatccatgcaccaac

SEQ ID NO: 42822 - DNA, 22 bp, synthetic construct
  misc_feature 1..22: note = chemically synthesized
  source 1..22: mol_type = other DNA
ttgtaactaaaggagggaccat

SEQ ID NO: 42823 - DNA, 22 bp, synthetic construct
  misc_feature 1..22: note = chemically synthesized
  source 1..22: mol_type = other DNA
tgtaactaaaggagggaccatt

SEQ ID NO: 42824 - DNA, 22 bp, synthetic construct
  misc_feature 1..22: note = chemically synthesized
  source 1..22: mol_type = other DNA
gtaactaaaggagggaccattc

SEQ ID NO: 42825 - DNA, 22 bp, synthetic construct
  misc_feature 1..22: note = chemically synthesized
  source 1..22: mol_type = other DNA
taactaaaggagggaccattca

SEQ ID NO: 42826 - DNA, 22 bp, synthetic construct
  misc_feature 1..22: note = chemically synthesized
  source 1..22: mol_type = other DNA
aaggagggaccattcagaagat

SEQ ID NO: 42827 - DNA, 22 bp, synthetic construct
  misc_feature 1..22: note = chemically synthesized
  source 1..22: mol_type = other DNA
agaagatgcttatcaactgtca

SEQ ID NO: 42828 - DNA, 22 bp, synthetic construct
  misc_feature 1..22: note = chemically synthesized
  source 1..22: mol_type = other DNA
atcaactgtcaaagtgacagtg

SEQ ID NO: 42829 - DNA, 22 bp, synthetic construct
  misc_feature 1..22: note = chemically synthesized
  source 1..22: mol_type = other DNA
tcaactgtcaaagtgacagtgt

SEQ ID NO: 42830 - DNA, 22 bp, synthetic construct
  misc_feature 1..22: note = chemically synthesized
  source 1..22: mol_type = other DNA
tcaaagtgacagtgttacaacc

SEQ ID NO: 42831 - DNA, 22 bp, synthetic construct
  misc_feature 1..22: note = chemically synthesized
  source 1..22: mol_type = other DNA
caaccaatgcacatattgtaag

SEQ ID NO: 42832 - DNA, 22 bp, synthetic construct
  misc_feature 1..22: note = chemically synthesized
  source 1..22: mol_type = other DNA
taagaaatcaaacaatggcctc

SEQ ID NO: 42833 - DNA, 22 bp, synthetic construct
  misc_feature 1..22: note = chemically synthesized
  source 1..22: mol_type = other DNA
caaggttcatttctacacaggg

SEQ ID NO: 42834 - DNA, 22 bp, synthetic construct
  misc_feature 1..22: note = chemically synthesized
  source 1..22: mol_type = other DNA
atttctacacagggattagcag

SEQ ID NO: 42835 - DNA, 22 bp, synthetic construct
  misc_feature 1..22: note = chemically synthesized
  source 1..22: mol_type = other DNA
ctacacagggattagcagatca

SEQ ID NO: 42836 - DNA, 22 bp, synthetic construct
  misc_feature 1..22: note = chemically synthesized
  source 1..22: mol_type = other DNA
tacacagggattagcagatcaa

SEQ ID NO: 42837 - DNA, 22 bp, synthetic construct
  misc_feature 1..22: note = chemically synthesized
  source 1..22: mol_type = other DNA
cacagggattagcagatcaaca

SEQ ID NO: 42838 - DNA, 22 bp, synthetic construct
  misc_feature 1..22: note = chemically synthesized
  source 1..22: mol_type = other DNA
gcagatcaacatcaatcttggc

SEQ ID NO: 42839 - DNA, 22 bp, synthetic construct
  misc_feature 1..22: note = chemically synthesized
  source 1..22: mol_type = other DNA
ggcaacacagttgccactgatg

SEQ ID NO: 42840 - DNA, 22 bp, synthetic construct
  misc_feature 1..22: note = chemically synthesized
  source 1..22: mol_type = other DNA
gcaacacagttgccactgatgg

SEQ ID NO: 42841 - DNA, 22 bp, synthetic construct
  misc_feature 1..22: note = chemically synthesized
  source 1..22: mol_type = other DNA
ccactgatggtgtcttattttt

SEQ ID NO: 42842 - DNA, 22 bp, synthetic construct
  misc_feature 1..22: note = chemically synthesized
  source 1..22: mol_type = other DNA
atggtgtcttattttttttatc

SEQ ID NO: 42843 - DNA, 22 bp, synthetic construct
  misc_feature 1..22: note = chemically synthesized
  source 1..22: mol_type = other DNA
attttttttatcatgacatggc

SEQ ID NO: 42844 - DNA, 22 bp, synthetic construct
  misc_feature 1..22: note = chemically synthesized
  source 1..22: mol_type = other DNA
ttttttttatcatgacatggca

SEQ ID NO: 42845 - DNA, 22 bp, synthetic construct
  misc_feature 1..22: note = chemically synthesized
  source 1..22: mol_type = other DNA
tttttatcatgacatggcaatc

SEQ ID NO: 42846 - DNA, 22 bp, synthetic construct
  misc_feature 1..22: note = chemically synthesized
  source 1..22: mol_type = other DNA
ttttatcatgacatggcaatca

SEQ ID NO: 42847 - DNA, 22 bp, synthetic construct
  misc_feature 1..22: note = chemically synthesized
  source 1..22: mol_type = other DNA
tttatcatgacatggcaatcaa

SEQ ID NO: 42848 - DNA, 22 bp, synthetic construct
  misc_feature 1..22: note = chemically synthesized
  source 1..22: mol_type = other DNA
ttatcatgacatggcaatcaag

SEQ ID NO: 42849 - DNA, 22 bp, synthetic construct
  misc_feature 1..22: note = chemically synthesized
  source 1..22: mol_type = other DNA
tatcatgacatggcaatcaaga

SEQ ID NO: 42850 - DNA, 22 bp, synthetic construct
  misc_feature 1..22: note = chemically synthesized
  source 1..22: mol_type = other DNA
atcatgacatggcaatcaagag

SEQ ID NO: 42851 - DNA, 22 bp, synthetic construct
  misc_feature 1..22: note = chemically synthesized
  source 1..22: mol_type = other DNA
tcatgacatggcaatcaagagc

SEQ ID NO: 42852 - DNA, 22 bp, synthetic construct
  misc_feature 1..22: note = chemically synthesized
  source 1..22: mol_type = other DNA
attcttatttaagattttatgg

SEQ ID NO: 42853 - DNA, 22 bp, synthetic construct
  misc_feature 1..22: note = chemically synthesized
  source 1..22: mol_type = other DNA
ttcttatttaagattttatggt

SEQ ID NO: 42854 - DNA, 22 bp, synthetic construct
  misc_feature 1..22: note = chemically synthesized
  source 1..22: mol_type = other DNA
ttatttaagattttatggttag

SEQ ID NO: 42855 - DNA, 22 bp, synthetic construct
  misc_feature 1..22: note = chemically synthesized
  source 1..22: mol_type = other DNA
atttaagattttatggttagac

SEQ ID NO: 42856 - DNA, 22 bp, synthetic construct
  misc_feature 1..22: note = chemically synthesized
  source 1..22: mol_type = other DNA
tttaagattttatggttagact

SEQ ID NO: 42857 - DNA, 22 bp, synthetic construct
  misc_feature 1..22: note = chemically synthesized
  source 1..22: mol_type = other DNA
aagattttatggttagactagg

SEQ ID NO: 42858 - DNA, 22 bp, synthetic construct
  misc_feature 1..22: note = chemically synthesized
  source 1..22: mol_type = other DNA
agattttatggttagactaggc

SEQ ID NO: 42859 - DNA, 22 bp, synthetic construct
  misc_feature 1..22: note = chemically synthesized
  source 1..22: mol_type = other DNA
tatggttagactaggcagatag

SEQ ID NO: 42860 - DNA, 22 bp, synthetic construct
  misc_feature 1..22: note = chemically synthesized
  source 1..22: mol_type = other DNA
atggttagactaggcagatagc

SEQ ID NO: 42861 - DNA, 22 bp, synthetic construct
  misc_feature 1..22: note = chemically synthesized
  source 1..22: mol_type = other DNA
tggttagactaggcagatagct

SEQ ID NO: 42862 - DNA, 22 bp, synthetic construct
  misc_feature 1..22: note = chemically synthesized
  source 1..22: mol_type = other DNA
gactaggcagatagctagatat

SEQ ID NO: 42863 - DNA, 22 bp, synthetic construct
  misc_feature 1..22: note = chemically synthesized
  source 1..22: mol_type = other DNA
ggcagatagctagatatgagca

SEQ ID NO: 42864 - DNA, 22 bp, synthetic construct
  misc_feature 1..22: note = chemically synthesized
  source 1..22: mol_type = other DNA
gatatgagcaggaggtggaagc

SEQ ID NO: 42865 - DNA, 22 bp, synthetic construct
  misc_feature 1..22: note = chemically synthesized
  source 1..22: mol_type = other DNA
agagaatggaggtctggagaat

SEQ ID NO: 42866 - DNA, 22 bp, synthetic construct
  misc_feature 1..22: note = chemically synthesized
  source 1..22: mol_type = other DNA
gagaatctgaaaccccagagat

SEQ ID NO: 42867 - DNA, 22 bp, synthetic construct
  misc_feature 1..22: note = chemically synthesized
  source 1..22: mol_type = other DNA
aaaccccagagattacccaagt

SEQ ID NO: 42868 - DNA, 22 bp, synthetic construct
  misc_feature 1..22: note = chemically synthesized
  source 1..22: mol_type = other DNA
cccaagtcctgcatgctagaca

SEQ ID NO: 42869 - DNA, 22 bp, synthetic construct
  misc_feature 1..22: note = chemically synthesized
  source 1..22: mol_type = other DNA
catgctagacatgagtggagga

SEQ ID NO: 42870 - DNA, 22 bp, synthetic construct
  misc_feature 1..22: note = chemically synthesized
  source 1..22: mol_type = other DNA
gacatgagtggaggagggggaa

SEQ ID NO: 42871 - DNA, 22 bp, synthetic construct
  misc_feature 1..22: note = chemically synthesized
  source 1..22: mol_type = other DNA
ggtagaaaagaatgccccttaa

SEQ ID NO: 42872 - DNA, 22 bp, synthetic construct
  misc_feature 1..22: note = chemically synthesized
  source 1..22: mol_type = other DNA
aagatgcccagcagtcgctcac

SEQ ID NO: 42873 - DNA, 22 bp, synthetic construct
  misc_feature 1..22: note = chemically synthesized
  source 1..22: mol_type = other DNA
agatgcccagcagtcgctcact

SEQ ID NO: 42874 - DNA, 22 bp, synthetic construct
  misc_feature 1..22: note = chemically synthesized
  source 1..22: mol_type = other DNA
actgtgcagttaacttttcaga

SEQ ID NO: 42875 - DNA, 22 bp, synthetic construct
  misc_feature 1..22: note = chemically synthesized
  source 1..22: mol_type = other DNA
tgcagttaacttttcagaatgc

SEQ ID NO: 42876 - DNA, 22 bp, synthetic construct
  misc_feature 1..22: note = chemically synthesized
  source 1..22: mol_type = other DNA
acttttcagaatgctgctagat

SEQ ID NO: 42877 - DNA, 22 bp, synthetic construct
  misc_feature 1..22: note = chemically synthesized
  source 1..22: mol_type = other DNA
ttcagaatgctgctagatacat

SEQ ID NO: 42878 - DNA, 22 bp, synthetic construct
  misc_feature 1..22: note = chemically synthesized
  source 1..22: mol_type = other DNA
tcagaatgctgctagatacatg

SEQ ID NO: 42879 - DNA, 22 bp, synthetic construct
  misc_feature 1..22: note = chemically synthesized
  source 1..22: mol_type = other DNA
cagaatgctgctagatacatgc

SEQ ID NO: 42880 - DNA, 22 bp, synthetic construct
  misc_feature 1..22: note = chemically synthesized
  source 1..22: mol_type = other DNA
agaatgctgctagatacatgct

SEQ ID NO: 42881 - DNA, 22 bp, synthetic construct
  misc_feature 1..22: note = chemically synthesized
  source 1..22: mol_type = other DNA
ctagatacatgctgatagggag

SEQ ID NO: 42882 - DNA, 22 bp, synthetic construct
  misc_feature 1..22: note = chemically synthesized
  source 1..22: mol_type = other DNA
gatacatgctgatagggaggga

SEQ ID NO: 42883 - DNA, 22 bp, synthetic construct
  misc_feature 1..22: note = chemically synthesized
  source 1..22: mol_type = other DNA
atagggagggaagagggcaaag

SEQ ID NO: 42884 - DNA, 22 bp, synthetic construct
  misc_feature 1..22: note = chemically synthesized
  source 1..22: mol_type = other DNA
ctaagagatacacggttgcagt

SEQ ID NO: 42885 - DNA, 22 bp, synthetic construct
  misc_feature 1..22: note = chemically synthesized
  source 1..22: mol_type = other DNA
agagatacacggttgcagttag

SEQ ID NO: 42886 - DNA, 22 bp, synthetic construct
  misc_feature 1..22: note = chemically synthesized
  source 1..22: mol_type = other DNA
cagttagtatacatctgagtgc

SEQ ID NO: 42887 - DNA, 22 bp, synthetic construct
  misc_feature 1..22: note = chemically synthesized
  source 1..22: mol_type = other DNA
gtatacatctgagtgctataca

SEQ ID NO: 42888 - DNA, 22 bp, synthetic construct
  misc_feature 1..22: note = chemically synthesized
  source 1..22: mol_type = other DNA
agtgctatacaaccttctttgg

SEQ ID NO: 42889 - DNA, 22 bp, synthetic construct
  misc_feature 1..22: note = chemically synthesized
  source 1..22: mol_type = other DNA
tacaaccttctttgggtggtgg

SEQ ID NO: 42890 - DNA, 22 bp, synthetic construct
  misc_feature 1..22: note = chemically synthesized
  source 1..22: mol_type = other DNA
ctttgggtggtggcaagaagca

SEQ ID NO: 42891 - DNA, 22 bp, synthetic construct
  misc_feature 1..22: note = chemically synthesized
  source 1..22: mol_type = other DNA
tttgggtggtggcaagaagcaa

SEQ ID NO: 42892 - DNA, 22 bp, synthetic construct
  misc_feature 1..22: note = chemically synthesized
  source 1..22: mol_type = other DNA
tgggtggtggcaagaagcaatg

SEQ ID NO: 42893 - DNA, 22 bp, synthetic construct
  misc_feature 1..22: note = chemically synthesized
  source 1..22: mol_type = other DNA
gggtggtggcaagaagcaatgc

SEQ ID NO: 42894 - DNA, 22 bp, synthetic construct
  misc_feature 1..22: note = chemically synthesized
  source 1..22: mol_type = other DNA
ggtggtggcaagaagcaatgca

SEQ ID NO: 42895 - DNA, 22 bp, synthetic construct
  misc_feature 1..22: note = chemically synthesized
  source 1..22: mol_type = other DNA
cgtagaattcatatcaaacacc

SEQ ID NO: 42896 - DNA, 22 bp, synthetic construct
  misc_feature 1..22: note = chemically synthesized
  source 1..22: mol_type = other DNA
atatcaaacacctgtatcacag

SEQ ID NO: 42897 - DNA, 22 bp, synthetic construct
  misc_feature 1..22: note = chemically synthesized
  source 1..22: mol_type = other DNA
tatcacaggtgttaaagaaaca

SEQ ID NO: 42898 - DNA, 22 bp, synthetic construct
  misc_feature 1..22: note = chemically synthesized
  source 1..22: mol_type = other DNA
aagaaacaagaaacattgtact

SEQ ID NO: 42899 - DNA, 22 bp, synthetic construct
  misc_feature 1..22: note = chemically synthesized
  source 1..22: mol_type = other DNA
tacttcttgtattcttaataat

SEQ ID NO: 42900 - DNA, 22 bp, synthetic construct
  misc_feature 1..22: note = chemically synthesized
  source 1..22: mol_type = other DNA
cttgtattcttaataatgattt

SEQ ID NO: 42901 - DNA, 22 bp, synthetic construct
  misc_feature 1..22: note = chemically synthesized
  source 1..22: mol_type = other DNA
ttgtattcttaataatgatttg

SEQ ID NO: 42902 - DNA, 22 bp, synthetic construct
  misc_feature 1..22: note = chemically synthesized
  source 1..22: mol_type = other DNA
gtattcttaataatgatttgca

SEQ ID NO: 42903 - DNA, 22 bp, synthetic construct
  misc_feature 1..22: note = chemically synthesized
  source 1..22: mol_type = other DNA
tattcttaataatgatttgcaa

SEQ ID NO: 42904 - DNA, 22 bp, synthetic construct
  misc_feature 1..22: note = chemically synthesized
  source 1..22: mol_type = other DNA
ttaataatgatttgcaatattg

SEQ ID NO: 42905 - DNA, 22 bp, synthetic construct
  misc_feature 1..22: note = chemically synthesized
  source 1..22: mol_type = other DNA
aataatgatttgcaatattgtc

SEQ ID NO: 42906 - DNA, 22 bp, synthetic construct
  misc_feature 1..22: note = chemically synthesized
  source 1..22: mol_type = other DNA
ataatgatttgcaatattgtct

SEQ ID NO: 42907 - DNA, 22 bp, synthetic construct
  misc_feature 1..22: note = chemically synthesized
  source 1..22: mol_type = other DNA
gcaatattgtctttagtatcac

SEQ ID NO: 42908 - DNA, 22 bp, synthetic construct
  misc_feature 1..22: note = chemically synthesized
  source 1..22: mol_type = other DNA
caatattgtctttagtatcact

SEQ ID NO: 42909 - DNA, 22 bp, synthetic construct
  misc_feature 1..22: note = chemically synthesized
  source 1..22: mol_type = other DNA
tctttagtatcactgcaaacct

SEQ ID NO: 42910 - DNA, 22 bp, synthetic construct
  misc_feature 1..22: note = chemically synthesized
  source 1..22: mol_type = other DNA
tagtatcactgcaaacctctat

SEQ ID NO: 42911 - DNA, 22 bp, synthetic construct
  misc_feature 1..22: note = chemically synthesized
  source 1..22: mol_type = other DNA
agtatcactgcaaacctctata

SEQ ID NO: 42912 - DNA, 22 bp, synthetic construct
  misc_feature 1..22: note = chemically synthesized
  source 1..22: mol_type = other DNA
gtatcactgcaaacctctataa

SEQ ID NO: 42913 - DNA, 22 bp, synthetic construct
  misc_feature 1..22: note = chemically synthesized
  source 1..22: mol_type = other DNA
caaacctctataaatatgattt

SEQ ID NO: 42914 - DNA, 22 bp, synthetic construct
  misc_feature 1..22: note = chemically synthesized
  source 1..22: mol_type = other DNA
tataaatatgatttttaaaaag

SEQ ID NO: 42915 - DNA, 22 bp, synthetic construct
  misc_feature 1..22: note = chemically synthesized
  source 1..22: mol_type = other DNA
taaatatgatttttaaaaagta

SEQ ID NO: 42916 - DNA, 22 bp, synthetic construct
  misc_feature 1..22: note = chemically synthesized
  source 1..22: mol_type = other DNA
ttaaaaagtatttctttaggtt

SEQ ID NO: 42917 - DNA, 22 bp, synthetic construct
  misc_feature 1..22: note = chemically synthesized
  source 1..22: mol_type = other DNA
taaaaagtatttctttaggttg

SEQ ID NO: 42918 - DNA, 22 bp, synthetic construct
  misc_feature 1..22: note = chemically synthesized
  source 1..22: mol_type = other DNA
aaaaagtatttctttaggttgg

SEQ ID NO: 42919 - DNA, 22 bp, synthetic construct
  misc_feature 1..22: note = chemically synthesized
  source 1..22: mol_type = other DNA
aaaagtatttctttaggttgga

SEQ ID NO: 42920 - DNA, 22 bp, synthetic construct
  misc_feature 1..22: note = chemically synthesized
  source 1..22: mol_type = other DNA
ctttaggttggaattacttcta

SEQ ID NO: 42921 - DNA, 22 bp, synthetic construct
  misc_feature 1..22: note = chemically synthesized
  source 1..22: mol_type = other DNA
tttaggttggaattacttctac

SEQ ID NO: 42922 - DNA, 22 bp, synthetic construct
  misc_feature 1..22: note = chemically synthesized
  source 1..22: mol_type = other DNA
taggttggaattacttctacgc

SEQ ID NO: 42923 - DNA, 22 bp, synthetic construct
  misc_feature 1..22: note = chemically synthesized
  source 1..22: mol_type = other DNA
aggttggaattacttctacgca

SEQ ID NO: 42924 - DNA, 22 bp, synthetic construct
  misc_feature 1..22: note = chemically synthesized
  source 1..22: mol_type = other DNA
ggttggaattacttctacgcat

SEQ ID NO: 42925 - DNA, 22 bp, synthetic construct
  misc_feature 1..22: note = chemically synthesized
  source 1..22: mol_type = other DNA
gaattacttctacgcattgact

SEQ ID NO: 42926 - DNA, 22 bp, synthetic construct
  misc_feature 1..22: note = chemically synthesized
  source 1..22: mol_type = other DNA
cttctacgcattgacttatctt

SEQ ID NO: 42927 - DNA, 22 bp, synthetic construct
  misc_feature 1..22: note = chemically synthesized
  source 1..22: mol_type = other DNA
ctacgcattgacttatcttcct

SEQ ID NO: 42928 - DNA, 22 bp, synthetic construct
  misc_feature 1..22: note = chemically synthesized
  source 1..22: mol_type = other DNA
tacgcattgacttatcttcctg

SEQ ID NO: 42929 - DNA, 22 bp, synthetic construct
  misc_feature 1..22: note = chemically synthesized
  source 1..22: mol_type = other DNA
cgcattgacttatcttcctggg

SEQ ID NO: 42930 - DNA, 22 bp, synthetic construct
  misc_feature 1..22: note = chemically synthesized
  source 1..22: mol_type = other DNA
acttatcttcctgggtttcatt

SEQ ID NO: 42931 - DNA, 22 bp, synthetic construct
  misc_feature 1..22: note = chemically synthesized
  source 1..22: mol_type = other DNA
atcttcctgggtttcattagcc

SEQ ID NO: 42932 - DNA, 22 bp, synthetic construct
  misc_feature 1..22: note = chemically synthesized
  source 1..22: mol_type = other DNA
tcttcctgggtttcattagccg

SEQ ID NO: 42933 - DNA, 22 bp, synthetic construct
  misc_feature 1..22: note = chemically synthesized
  source 1..22: mol_type = other DNA
cctgggtttcattagccgtacc

SEQ ID NO: 42934 - DNA, 22 bp, synthetic construct
  misc_feature 1..22: note = chemically synthesized
  source 1..22: mol_type = other DNA
ctgggtttcattagccgtaccc

SEQ ID NO: 42935 - DNA, 22 bp, synthetic construct
  misc_feature 1..22: note = chemically synthesized
  source 1..22: mol_type = other DNA
ggtttcattagccgtacccgtt

SEQ ID NO: 42936 - DNA, 22 bp, synthetic construct
  misc_feature 1..22: note = chemically synthesized
  source 1..22: mol_type = other DNA
cattagccgtacccgttgtact

SEQ ID NO: 42937 - DNA, 22 bp, synthetic construct
  misc_feature 1..22: note = chemically synthesized
  source 1..22: mol_type = other DNA
attagccgtacccgttgtactt

SEQ ID NO: 42938 - DNA, 22 bp, synthetic construct
  misc_feature 1..22: note = chemically synthesized
  source 1..22: mol_type = other DNA
gccgtacccgttgtactttctt

SEQ ID NO: 42939 - DNA, 22 bp, synthetic construct
  misc_feature 1..22: note = chemically synthesized
  source 1..22: mol_type = other DNA
tactttcttccttaccactgtt

SEQ ID NO: 42940 - DNA, 22 bp, synthetic construct
  misc_feature 1..22: note = chemically synthesized
  source 1..22: mol_type = other DNA
tcttccttaccactgtttatct

SEQ ID NO: 42941 - DNA, 22 bp, synthetic construct
  misc_feature 1..22: note = chemically synthesized
  source 1..22: mol_type = other DNA
cttccttaccactgtttatctc

SEQ ID NO: 42942 - DNA, 22 bp, synthetic construct
  misc_feature 1..22: note = chemically synthesized
  source 1..22: mol_type = other DNA
ttccttaccactgtttatctca

SEQ ID NO: 42943 - DNA, 22 bp, synthetic construct
  misc_feature 1..22: note = chemically synthesized
  source 1..22: mol_type = other DNA
ccttaccactgtttatctcaaa

SEQ ID NO: 42944 - DNA, 22 bp, synthetic construct
  misc_feature 1..22: note = chemically synthesized
  source 1..22: mol_type = other DNA
cttaccactgtttatctcaaac

SEQ ID NO: 42945 - DNA, 22 bp, synthetic construct
  misc_feature 1..22: note = chemically synthesized
  source 1..22: mol_type = other DNA
accactgtttatctcaaactct

SEQ ID NO: 42946 - DNA, 22 bp, synthetic construct
  misc_feature 1..22: note = chemically synthesized
  source 1..22: mol_type = other DNA
ccactgtttatctcaaactctt

SEQ ID NO: 42947 - DNA, 22 bp, synthetic construct
  misc_feature 1..22: note = chemically synthesized
  source 1..22: mol_type = other DNA
tttatctcaaactcttgagatt

SEQ ID NO: 42948 - DNA, 22 bp, synthetic construct
  misc_feature 1..22: note = chemically synthesized
  source 1..22: mol_type = other DNA
atctcaaactcttgagattaaa

SEQ ID NO: 42949 - DNA, 22 bp, synthetic construct
  misc_feature 1..22: note = chemically synthesized
  source 1..22: mol_type = other DNA
tctcaaactcttgagattaaag

SEQ ID NO: 42950 - DNA, 22 bp, synthetic construct
  misc_feature 1..22: note = chemically synthesized
  source 1..22: mol_type = other DNA
aaactcttgagattaaagtatg

SEQ ID NO: 42951 - DNA, 22 bp, synthetic construct
  misc_feature 1..22: note = chemically synthesized
  source 1..22: mol_type = other DNA
ttgagattaaagtatgggctca

SEQ ID NO: 42952 - DNA, 22 bp, synthetic construct
  misc_feature 1..22: note = chemically synthesized
  source 1..22: mol_type = other DNA
gagattaaagtatgggctcagg

SEQ ID NO: 42953 - DNA, 22 bp, synthetic construct
  misc_feature 1..22: note = chemically synthesized
  source 1..22: mol_type = other DNA
agattaaagtatgggctcagga

SEQ ID NO: 42954 - DNA, 22 bp, synthetic construct
  misc_feature 1..22: note = chemically synthesized
  source 1..22: mol_type = other DNA
aagtatgggctcaggagggagc

SEQ ID NO: 42955 - DNA, 22 bp, synthetic construct
  misc_feature 1..22: note = chemically synthesized
  source 1..22: mol_type = other DNA
aggagggagcgaggagcttcag

SEQ ID NO: 42956 - DNA, 22 bp, synthetic construct
  misc_feature 1..22: note = chemically synthesized
  source 1..22: mol_type = other DNA
caggactctcacggacctccag

SEQ ID NO: 42957 - DNA, 22 bp, synthetic construct
  misc_feature 1..22: note = chemically synthesized
  source 1..22: mol_type = other DNA
aggactctcacggacctccagc

SEQ ID NO: 42958 - DNA, 22 bp, synthetic construct
  misc_feature 1..22: note = chemically synthesized
  source 1..22: mol_type = other DNA
tcacggacctccagcacagtgt

SEQ ID NO: 42959 - DNA, 22 bp, synthetic construct
  misc_feature 1..22: note = chemically synthesized
  source 1..22: mol_type = other DNA
acggacctccagcacagtgtag

SEQ ID NO: 42960 - DNA, 22 bp, synthetic construct
  misc_feature 1..22: note = chemically synthesized
  source 1..22: mol_type = other DNA
cagcacagtgtagctgccttat

SEQ ID NO: 42961 - DNA, 22 bp, synthetic construct
  misc_feature 1..22: note = chemically synthesized
  source 1..22: mol_type = other DNA
ccttatggaaaagtggccacac

SEQ ID NO: 42962 - DNA, 22 bp, synthetic construct
  misc_feature 1..22: note = chemically synthesized
  source 1..22: mol_type = other DNA
atggaaaagtggccacactgtt

SEQ ID NO: 42963 - DNA, 22 bp, synthetic construct
  misc_feature 1..22: note = chemically synthesized
  source 1..22: mol_type = other DNA
tggaaaagtggccacactgttt

SEQ ID NO: 42964 - DNA, 22 bp, synthetic construct
  misc_feature 1..22: note = chemically synthesized
  source 1..22: mol_type = other DNA
ttttctgcactggtccctgccc

SEQ ID NO: 42965 - DNA, 22 bp, synthetic construct
  misc_feature 1..22: note = chemically synthesized
  source 1..22: mol_type = other DNA
tctgcactggtccctgccccta

SEQ ID NO: 42966 - DNA, 22 bp, synthetic construct
  misc_feature 1..22: note = chemically synthesized
  source 1..22: mol_type = other DNA
ctgcactggtccctgcccctac

SEQ ID NO: 42967 - DNA, 22 bp, synthetic construct
  misc_feature 1..22: note = chemically synthesized
  source 1..22: mol_type = other DNA
tgcactggtccctgcccctact

SEQ ID NO: 42968 - DNA, 22 bp, synthetic construct
  misc_feature 1..22: note = chemically synthesized
  source 1..22: mol_type = other DNA
cactggtccctgcccctactat

SEQ ID NO: 42969 - DNA, 22 bp, synthetic construct
  misc_feature 1..22: note = chemically synthesized
  source 1..22: mol_type = other DNA
gtccctgcccctactattcctc

SEQ ID NO: 42970 - DNA, 22 bp, synthetic construct
  misc_feature 1..22: note = chemically synthesized
  source 1..22: mol_type = other DNA
cccctactattcctcactgggc

SEQ ID NO: 42971 - DNA, 22 bp, synthetic construct
  misc_feature 1..22: note = chemically synthesized
  source 1..22: mol_type = other DNA
ctattcctcactgggcagagca

SEQ ID NO: 42972 - DNA, 22 bp, synthetic construct
  misc_feature 1..22: note = chemically synthesized
  source 1..22: mol_type = other DNA
ttcctcactgggcagagcacag

SEQ ID NO: 42973 - DNA, 22 bp, synthetic construct
  misc_feature 1..22: note = chemically synthesized
  source 1..22: mol_type = other DNA
ctcactgggcagagcacagcca

SEQ ID NO: 42974 - DNA, 22 bp, synthetic construct
  misc_feature 1..22: note = chemically synthesized
  source 1..22: mol_type = other DNA
actgggcagagcacagccaccc

SEQ ID NO: 42975 - DNA, 22 bp, synthetic construct
  misc_feature 1..22: note = chemically synthesized
  source 1..22: mol_type = other DNA
ggcagagcacagccaccctggc

SEQ ID NO: 42976 - DNA, 22 bp, synthetic construct
  misc_feature 1..22: note = chemically synthesized
  source 1..22: mol_type = other DNA
gccctgcctgaacattttagtc

SEQ ID NO: 42977 - DNA, 22 bp, synthetic construct
  misc_feature 1..22: note = chemically synthesized
  source 1..22: mol_type = other DNA
cctgaacattttagtcagtgtt

SEQ ID NO: 42978 - DNA, 22 bp, synthetic construct
  misc_feature 1..22: note = chemically synthesized
  source 1..22: mol_type = other DNA
aacattttagtcagtgttggct

SEQ ID NO: 42979 - DNA, 22 bp, synthetic construct
  misc_feature 1..22: note = chemically synthesized
  source 1..22: mol_type = other DNA
tagtcagtgttggctctgtgct

SEQ ID NO: 42980 - DNA, 22 bp, synthetic construct
  misc_feature 1..22: note = chemically synthesized
  source 1..22: mol_type = other DNA
agtcagtgttggctctgtgctt

SEQ ID NO: 42981 - DNA, 22 bp, synthetic construct
  misc_feature 1..22: note = chemically synthesized
  source 1..22: mol_type = other DNA
gtcagtgttggctctgtgcttc

SEQ ID NO: 42982 - DNA, 22 bp, synthetic construct
  misc_feature 1..22: note = chemically synthesized
  source 1..22: mol_type = other DNA
gctctgtgcttctctggggagg

SEQ ID NO: 42983 - DNA, 22 bp, synthetic construct
  misc_feature 1..22: note = chemically synthesized
  source 1..22: mol_type = other DNA
tgtgcttctctggggaggaaat

SEQ ID NO: 42984 - DNA, 22 bp, synthetic construct
  misc_feature 1..22: note = chemically synthesized
  source 1..22: mol_type = other DNA
tgcttctctggggaggaaatcc

SEQ ID NO: 42985 - DNA, 22 bp, synthetic construct
  misc_feature 1..22: note = chemically synthesized
  source 1..22: mol_type = other DNA
ctctggggaggaaatccaagag

SEQ ID NO: 42986 - DNA, 22 bp, synthetic construct
  misc_feature 1..22: note = chemically synthesized
  source 1..22: mol_type = other DNA
tctggggaggaaatccaagaga

SEQ ID NO: 42987 - DNA, 22 bp, synthetic construct
  misc_feature 1..22: note = chemically synthesized
  source 1..22: mol_type = other DNA
tggggaggaaatccaagagaca

SEQ ID NO: 42988 - DNA, 22 bp, synthetic construct
  misc_feature 1..22: note = chemically synthesized
  source 1..22: mol_type = other DNA
gggaggaaatccaagagacaac

SEQ ID NO: 42989 - DNA, 22 bp, synthetic construct
  misc_feature 1..22: note = chemically synthesized
  source 1..22: mol_type = other DNA
tgccatttcagctgcagcagta

SEQ ID NO: 42990 - DNA, 22 bp, synthetic construct
  misc_feature 1..22: note = chemically synthesized
  source 1..22: mol_type = other DNA
ccatttcagctgcagcagtacc

SEQ ID NO: 42991 - DNA, 22 bp, synthetic construct
  misc_feature 1..22: note = chemically synthesized
  source 1..22: mol_type = other DNA
cagctgcagcagtaccaccgtt

SEQ ID NO: 42992 - DNA, 22 bp, synthetic construct
  misc_feature 1..22: note = chemically synthesized
  source 1..22: mol_type = other DNA
agctgcagcagtaccaccgtta

SEQ ID NO: 42993 - DNA, 22 bp, synthetic construct
  misc_feature 1..22: note = chemically synthesized
  source 1..22: mol_type = other DNA
cagcagtaccaccgttaatgcc

SEQ ID NO: 42994 - DNA, 22 bp, synthetic construct
  misc_feature 1..22: note = chemically synthesized
  source 1..22: mol_type = other DNA
atgcccttgggcttgagaaaga

SEQ ID NO: 42995 - DNA, 22 bp, synthetic construct
  misc_feature 1..22: note = chemically synthesized
  source 1..22: mol_type = other DNA
gggcttgagaaagaagggacct

SEQ ID NO: 42996 - DNA, 22 bp, synthetic construct
  misc_feature 1..22: note = chemically synthesized
  source 1..22: mol_type = other DNA
ggcttgagaaagaagggacctg

SEQ ID NO: 42997 - DNA, 22 bp, synthetic construct
  misc_feature 1..22: note = chemically synthesized
  source 1..22: mol_type = other DNA
gagaaagaagggacctggccac

SEQ ID NO: 42998 - DNA, 22 bp, synthetic construct
  misc_feature 1..22: note = chemically synthesized
  source 1..22: mol_type = other DNA
agaaagaagggacctggccact

SEQ ID NO: 42999 - DNA, 22 bp, synthetic construct
  misc_feature 1..22: note = chemically synthesized
  source 1..22: mol_type = other DNA
gccacttccctgacacctccag

SEQ ID NO: 43000 - DNA, 22 bp, synthetic construct
  misc_feature 1..22: note = chemically synthesized
  source 1..22: mol_type = other DNA
ccctgacacctccagcacacag

SEQ ID NO: 43001 - DNA, 22 bp, synthetic construct
  misc_feature 1..22: note = chemically synthesized
  source 1..22: mol_type = other DNA
cctgacacctccagcacacagc

SEQ ID NO: 43002 - DNA, 22 bp, synthetic construct
  misc_feature 1..22: note = chemically synthesized
  source 1..22: mol_type = other DNA
acacctccagcacacagcaggg

SEQ ID NO: 43003 - DNA, 22 bp, synthetic construct
  misc_feature 1..22: note = chemically synthesized
  source 1..22: mol_type = other DNA
cagcacacagcagggaaagaat

SEQ ID NO: 43004 - DNA, 22 bp, synthetic construct
  misc_feature 1..22: note = chemically synthesized
  source 1..22: mol_type = other DNA
cagtttctctttcttgtgagct

SEQ ID NO: 43005 - DNA, 22 bp, synthetic construct
  misc_feature 1..22: note = chemically synthesized
  source 1..22: mol_type = other DNA
ctctttcttgtgagctttcacc

SEQ ID NO: 43006 - DNA, 22 bp, synthetic construct
  misc_feature 1..22: note = chemically synthesized
  source 1..22: mol_type = other DNA
tctttcttgtgagctttcacct

SEQ ID NO: 43007 - DNA, 22 bp, synthetic construct
  misc_feature 1..22: note = chemically synthesized
  source 1..22: mol_type = other DNA
tttcttgtgagctttcacctgc

SEQ ID NO: 43008 - DNA, 22 bp, synthetic construct
  misc_feature 1..22: note = chemically synthesized
  source 1..22: mol_type = other DNA
tcttgtgagctttcacctgcta

SEQ ID NO: 43009 - DNA, 22 bp, synthetic construct
  misc_feature 1..22: note = chemically synthesized
  source 1..22: mol_type = other DNA
cttgtgagctttcacctgctac

SEQ ID NO: 43010 - DNA, 22 bp, synthetic construct
  misc_feature 1..22: note = chemically synthesized
  source 1..22: mol_type = other DNA
ttgtgagctttcacctgctact

SEQ ID NO: 43011 - DNA, 22 bp, synthetic construct
  misc_feature 1..22: note = chemically synthesized
  source 1..22: mol_type = other DNA
gtgagctttcacctgctactct

SEQ ID NO: 43012 - DNA, 22 bp, synthetic construct
  misc_feature 1..22: note = chemically synthesized
  source 1..22: mol_type = other DNA
tgagctttcacctgctactctt

SEQ ID NO: 43013 - DNA, 22 bp, synthetic construct
  misc_feature 1..22: note = chemically synthesized
  source 1..22: mol_type = other DNA
tcacctgctactcttcaccagg

SEQ ID NO: 43014 - DNA, 22 bp, synthetic construct
  misc_feature 1..22: note = chemically synthesized
  source 1..22: mol_type = other DNA
cacctgctactcttcaccaggc

SEQ ID NO: 43015 - DNA, 22 bp, synthetic construct
  misc_feature 1..22: note = chemically synthesized
  source 1..22: mol_type = other DNA
acctgctactcttcaccaggca

SEQ ID NO: 43016 - DNA, 22 bp, synthetic construct
  misc_feature 1..22: note = chemically synthesized
  source 1..22: mol_type = other DNA
ctactcttcaccaggcaaggct

SEQ ID NO: 43017 - DNA, 22 bp, synthetic construct
  misc_feature 1..22: note = chemically synthesized
  source 1..22: mol_type = other DNA
ctcttcaccaggcaaggctcct

SEQ ID NO: 43018 - DNA, 22 bp, synthetic construct
  misc_feature 1..22: note = chemically synthesized
  source 1..22: mol_type = other DNA
ttcaccaggcaaggctcctggc

SEQ ID NO: 43019 - DNA, 22 bp, synthetic construct
  misc_feature 1..22: note = chemically synthesized
  source 1..22: mol_type = other DNA
caccaggcaaggctcctggctt

SEQ ID NO: 43020 - DNA, 22 bp, synthetic construct
  misc_feature 1..22: note = chemically synthesized
  source 1..22: mol_type = other DNA
accaggcaaggctcctggcttg

SEQ ID NO: 43021 - DNA, 22 bp, synthetic construct
  misc_feature 1..22: note = chemically synthesized
  source 1..22: mol_type = other DNA
ctggcttgggcccacagtgcag

SEQ ID NO: 43022 - DNA, 22 bp, synthetic construct
  misc_feature 1..22: note = chemically synthesized
  source 1..22: mol_type = other DNA
gcttgggcccacagtgcaggca

SEQ ID NO: 43023 - DNA, 22 bp, synthetic construct
  misc_feature 1..22: note = chemically synthesized
  source 1..22: mol_type = other DNA
gggcccacagtgcaggcacctc

SEQ ID NO: 43024 - DNA, 22 bp, synthetic construct
  misc_feature 1..22: note = chemically synthesized
  source 1..22: mol_type = other DNA
ggcccacagtgcaggcacctcg

SEQ ID NO: 43025 - DNA, 22 bp, synthetic construct
  misc_feature 1..22: note = chemically synthesized
  source 1..22: mol_type = other DNA
gaactcagttgaacatttccac

SEQ ID NO: 43026 - DNA, 22 bp, synthetic construct
  misc_feature 1..22: note = chemically synthesized
  source 1..22: mol_type = other DNA
agttgaacatttccactggctg

SEQ ID NO: 43027 - DNA, 22 bp, synthetic construct
  misc_feature 1..22: note = chemically synthesized
  source 1..22: mol_type = other DNA
aacatttccactggctgcactc

SEQ ID NO: 43028 - DNA, 22 bp, synthetic construct
  misc_feature 1..22: note = chemically synthesized
  source 1..22: mol_type = other DNA
ccactggctgcactctgtgttt

SEQ ID NO: 43029 - DNA, 22 bp, synthetic construct
  misc_feature 1..22: note = chemically synthesized
  source 1..22: mol_type = other DNA
cactggctgcactctgtgtttt

SEQ ID NO: 43030 - DNA, 22 bp, synthetic construct
  misc_feature 1..22: note = chemically synthesized
  source 1..22: mol_type = other DNA
gctgcactctgtgtttttgtgg

SEQ ID NO: 43031 - DNA, 22 bp, synthetic construct
  misc_feature 1..22: note = chemically synthesized
  source 1..22: mol_type = other DNA
cactctgtgtttttgtggggtg

SEQ ID NO: 43032 - DNA, 22 bp, synthetic construct
  misc_feature 1..22: note = chemically synthesized
  source 1..22: mol_type = other DNA
tgtgtttttgtggggtgaagct

SEQ ID NO: 43033 - DNA, 22 bp, synthetic construct
  misc_feature 1..22: note = chemically synthesized
  source 1..22: mol_type = other DNA
tgtttttgtggggtgaagctcc

SEQ ID NO: 43034 - DNA, 22 bp, synthetic construct
  misc_feature 1..22: note = chemically synthesized
  source 1..22: mol_type = other DNA
ttgtggggtgaagctcccagag

SEQ ID NO: 43035 - DNA, 22 bp, synthetic construct
  misc_feature 1..22: note = chemically synthesized
  source 1..22: mol_type = other DNA
tgtggggtgaagctcccagagg

SEQ ID NO: 43036 - DNA, 22 bp, synthetic construct
  misc_feature 1..22: note = chemically synthesized
  source 1..22: mol_type = other DNA
gtggggtgaagctcccagaggt

SEQ ID NO: 43037 - DNA, 22 bp, synthetic construct
  misc_feature 1..22: note = chemically synthesized
  source 1..22: mol_type = other DNA
tggggtgaagctcccagaggtg

SEQ ID NO: 43038 - DNA, 22 bp, synthetic construct
  misc_feature 1..22: note = chemically synthesized
  source 1..22: mol_type = other DNA
ccagaggtgactgaaagtcctt

SEQ ID NO: 43039 - DNA, 22 bp, synthetic construct
  misc_feature 1..22: note = chemically synthesized
  source 1..22: mol_type = other DNA
aaagtccttctgccactaacac

SEQ ID NO: 43040 - DNA, 22 bp, synthetic construct
  misc_feature 1..22: note = chemically synthesized
  source 1..22: mol_type = other DNA
ctgccactaacactgcagtcat

SEQ ID NO: 43041 - DNA, 22 bp, synthetic construct
  misc_feature 1..22: note = chemically synthesized
  source 1..22: mol_type = other DNA
tgccactaacactgcagtcata

SEQ ID NO: 43042 - DNA, 22 bp, synthetic construct
  misc_feature 1..22: note = chemically synthesized
  source 1..22: mol_type = other DNA
ccactaacactgcagtcatact

SEQ ID NO: 43043 - DNA, 22 bp, synthetic construct
  misc_feature 1..22: note = chemically synthesized
  source 1..22: mol_type = other DNA
acactgcagtcatactgccctt

SEQ ID NO: 43044 - DNA, 22 bp, synthetic construct
  misc_feature 1..22: note = chemically synthesized
  source 1..22: mol_type = other DNA
cagtcatactgcccttgctgta

SEQ ID NO: 43045 - DNA, 22 bp, synthetic construct
  misc_feature 1..22: note = chemically synthesized
  source 1..22: mol_type = other DNA
cccttgctgtacttggactagg

SEQ ID NO: 43046 - DNA, 22 bp, synthetic construct
  misc_feature 1..22: note = chemically synthesized
  source 1..22: mol_type = other DNA
gctgtacttggactagggaagg

SEQ ID NO: 43047 - DNA, 22 bp, synthetic construct
  misc_feature 1..22: note = chemically synthesized
  source 1..22: mol_type = other DNA
ctgtacttggactagggaagga

SEQ ID NO: 43048 - DNA, 22 bp, synthetic construct
  misc_feature 1..22: note = chemically synthesized
  source 1..22: mol_type = other DNA
tacttggactagggaaggaaaa

SEQ ID NO: 43049 - DNA, 22 bp, synthetic construct
  misc_feature 1..22: note = chemically synthesized
  source 1..22: mol_type = other DNA
ggactagggaaggaaaaaagat

SEQ ID NO: 43050 - DNA, 22 bp, synthetic construct
  misc_feature 1..22: note = chemically synthesized
  source 1..22: mol_type = other DNA
gactagggaaggaaaaaagatc

SEQ ID NO: 43051 - DNA, 22 bp, synthetic construct
  misc_feature 1..22: note = chemically synthesized
  source 1..22: mol_type = other DNA
gggaaggaaaaaagatcctgag

SEQ ID NO: 43052 - DNA, 22 bp, synthetic construct
  misc_feature 1..22: note = chemically synthesized
  source 1..22: mol_type = other DNA
agtgctttactcacaccccagt

SEQ ID NO: 43053 - DNA, 22 bp, synthetic construct
  misc_feature 1..22: note = chemically synthesized
  source 1..22: mol_type = other DNA
tactcacaccccagtgtgcccc

SEQ ID NO: 43054 - DNA, 22 bp, synthetic construct
  misc_feature 1..22: note = chemically synthesized
  source 1..22: mol_type = other DNA
actcacaccccagtgtgcccca

SEQ ID NO: 43055 - DNA, 22 bp, synthetic construct
  misc_feature 1..22: note = chemically synthesized
  source 1..22: mol_type = other DNA
ctcacaccccagtgtgccccag

SEQ ID NO: 43056 - DNA, 22 bp, synthetic construct
  misc_feature 1..22: note = chemically synthesized
  source 1..22: mol_type = other DNA
acaccccagtgtgccccagcca

SEQ ID NO: 43057 - DNA, 22 bp, synthetic construct
  misc_feature 1..22: note = chemically synthesized
  source 1..22: mol_type = other DNA
tggaaaagaggccagtgtgtca

SEQ ID NO: 43058 - DNA, 22 bp, synthetic construct
  misc_feature 1..22: note = chemically synthesized
  source 1..22: mol_type = other DNA
caagcaccctgaggcccctgcc

SEQ ID NO: 43059 - DNA, 22 bp, synthetic construct
  misc_feature 1..22: note = chemically synthesized
  source 1..22: mol_type = other DNA
aggcccctgcccctgctgcccc

SEQ ID NO: 43060 - DNA, 22 bp, synthetic construct
  misc_feature 1..22: note = chemically synthesized
  source 1..22: mol_type = other DNA
cccctgctgcccccaagctgta

SEQ ID NO: 43061 - DNA, 22 bp, synthetic construct
  misc_feature 1..22: note = chemically synthesized
  source 1..22: mol_type = other DNA
ctgcccccaagctgtagagcca

SEQ ID NO: 43062 - DNA, 22 bp, synthetic construct
  misc_feature 1..22: note = chemically synthesized
  source 1..22: mol_type = other DNA
cccccaagctgtagagccagaa

SEQ ID NO: 43063 - DNA, 22 bp, synthetic construct
  misc_feature 1..22: note = chemically synthesized
  source 1..22: mol_type = other DNA
tagagccagaatataaagctgg

SEQ ID NO: 43064 - DNA, 22 bp, synthetic construct
  misc_feature 1..22: note = chemically synthesized
  source 1..22: mol_type = other DNA
gcagaaaaatgtaaaaaggcta

SEQ ID NO: 43065 - DNA, 22 bp, synthetic construct
  misc_feature 1..22: note = chemically synthesized
  source 1..22: mol_type = other DNA
gactggcttagcctcccagcct

SEQ ID NO: 43066 - DNA, 22 bp, synthetic construct
  misc_feature 1..22: note = chemically synthesized
  source 1..22: mol_type = other DNA
gcttagcctcccagcctacatc

SEQ ID NO: 43067 - DNA, 22 bp, synthetic construct
  misc_feature 1..22: note = chemically synthesized
  source 1..22: mol_type = other DNA
agcctcccagcctacatctttc

SEQ ID NO: 43068 - DNA, 22 bp, synthetic construct
  misc_feature 1..22: note = chemically synthesized
  source 1..22: mol_type = other DNA
gcctcccagcctacatctttct

SEQ ID NO: 43069 - DNA, 22 bp, synthetic construct
  misc_feature 1..22: note = chemically synthesized
  source 1..22: mol_type = other DNA
ccagcctacatctttctcctgt

SEQ ID NO: 43070 - DNA, 22 bp, synthetic construct
  misc_feature 1..22: note = chemically synthesized
  source 1..22: mol_type = other DNA
catctttctcctgtgctggatc

SEQ ID NO: 43071 - DNA, 22 bp, synthetic construct
  misc_feature 1..22: note = chemically synthesized
  source 1..22: mol_type = other DNA
tctcctgtgctggatccttcct

SEQ ID NO: 43072 - DNA, 22 bp, synthetic construct
  misc_feature 1..22: note = chemically synthesized
  source 1..22: mol_type = other DNA
ctcctgtgctggatccttcctg

SEQ ID NO: 43073 - DNA, 22 bp, synthetic construct
  misc_feature 1..22: note = chemically synthesized
  source 1..22: mol_type = other DNA
tcctgtgctggatccttcctgc

SEQ ID NO: 43074 - DNA, 22 bp, synthetic construct
  misc_feature 1..22: note = chemically synthesized
  source 1..22: mol_type = other DNA
ctgtgctggatccttcctgctc

SEQ ID NO: 43075 - DNA, 22 bp, synthetic construct
  misc_feature 1..22: note = chemically synthesized
  source 1..22: mol_type = other DNA
tgctggatccttcctgctcttg

SEQ ID NO: 43076 - DNA, 22 bp, synthetic construct
  misc_feature 1..22: note = chemically synthesized
  source 1..22: mol_type = other DNA
gatccttcctgctcttgaacat

SEQ ID NO: 43077 - DNA, 22 bp, synthetic construct
  misc_feature 1..22: note = chemically synthesized
  source 1..22: mol_type = other DNA
cctgctcttgaacatcggactc

SEQ ID NO: 43078 - DNA, 22 bp, synthetic construct
  misc_feature 1..22: note = chemically synthesized
  source 1..22: mol_type = other DNA
ctgctcttgaacatcggactcc

SEQ ID NO: 43079 - DNA, 22 bp, synthetic construct
  misc_feature 1..22: note = chemically synthesized
  source 1..22: mol_type = other DNA
ctcttgaacatcggactccaag

SEQ ID NO: 43080 - DNA, 22 bp, synthetic construct
  misc_feature 1..22: note = chemically synthesized
  source 1..22: mol_type = other DNA
ttgaacatcggactccaagttc

SEQ ID NO: 43081 - DNA, 22 bp, synthetic construct
  misc_feature 1..22: note = chemically synthesized
  source 1..22: mol_type = other DNA
gaacatcggactccaagttctt

SEQ ID NO: 43082 - DNA, 22 bp, synthetic construct
  misc_feature 1..22: note = chemically synthesized
  source 1..22: mol_type = other DNA
aacatcggactccaagttcttc

SEQ ID NO: 43083 - DNA, 22 bp, synthetic construct
  misc_feature 1..22: note = chemically synthesized
  source 1..22: mol_type = other DNA
caagttcttcagctgtgggact

SEQ ID NO: 43084 - DNA, 22 bp, synthetic construct
  misc_feature 1..22: note = chemically synthesized
  source 1..22: mol_type = other DNA
ttcagctgtgggacttggactg

SEQ ID NO: 43085 - DNA, 22 bp, synthetic construct
  misc_feature 1..22: note = chemically synthesized
  source 1..22: mol_type = other DNA
cagctgtgggacttggactgtc

SEQ ID NO: 43086 - DNA, 22 bp, synthetic construct
  misc_feature 1..22: note = chemically synthesized
  source 1..22: mol_type = other DNA
agctgtgggacttggactgtct

SEQ ID NO: 43087 - DNA, 22 bp, synthetic construct
  misc_feature 1..22: note = chemically synthesized
  source 1..22: mol_type = other DNA
tgggacttggactgtcttcctt

SEQ ID NO: 43088 - DNA, 22 bp, synthetic construct
  misc_feature 1..22: note = chemically synthesized
  source 1..22: mol_type = other DNA
ggactgtcttccttgctcctca

SEQ ID NO: 43089 - DNA, 22 bp, synthetic construct
  misc_feature 1..22: note = chemically synthesized
  source 1..22: mol_type = other DNA
gactgtcttccttgctcctcag

SEQ ID NO: 43090 - DNA, 22 bp, synthetic construct
  misc_feature 1..22: note = chemically synthesized
  source 1..22: mol_type = other DNA
tcttccttgctcctcagattgc

SEQ ID NO: 43091 - DNA, 22 bp, synthetic construct
  misc_feature 1..22: note = chemically synthesized
  source 1..22: mol_type = other DNA
ccttgctcctcagattgcaggt

SEQ ID NO: 43092 - DNA, 22 bp, synthetic construct
  misc_feature 1..22: note = chemically synthesized
  source 1..22: mol_type = other DNA
cttgctcctcagattgcaggtg

SEQ ID NO: 43093 - DNA, 22 bp, synthetic construct
  misc_feature 1..22: note = chemically synthesized
  source 1..22: mol_type = other DNA
gctcctcagattgcaggtggcc

SEQ ID NO: 43094 - DNA, 22 bp, synthetic construct
  misc_feature 1..22: note = chemically synthesized
  source 1..22: mol_type = other DNA
ctcctcagattgcaggtggcct

SEQ ID NO: 43095 - DNA, 22 bp, synthetic construct
  misc_feature 1..22: note = chemically synthesized
  source 1..22: mol_type = other DNA
ctcagattgcaggtggcctatt

SEQ ID NO: 43096 - DNA, 22 bp, synthetic construct
  misc_feature 1..22: note = chemically synthesized
  source 1..22: mol_type = other DNA
agattgcaggtggcctattatg

SEQ ID NO: 43097 - DNA, 22 bp, synthetic construct
  misc_feature 1..22: note = chemically synthesized
  source 1..22: mol_type = other DNA
caggtggcctattatgggacct

SEQ ID NO: 43098 - DNA, 22 bp, synthetic construct
  misc_feature 1..22: note = chemically synthesized
  source 1..22: mol_type = other DNA
ttatgggaccttgtaatcttgt

SEQ ID NO: 43099 - DNA, 22 bp, synthetic construct
  misc_feature 1..22: note = chemically synthesized
  source 1..22: mol_type = other DNA
tgggaccttgtaatcttgtgag

SEQ ID NO: 43100 - DNA, 22 bp, synthetic construct
  misc_feature 1..22: note = chemically synthesized
  source 1..22: mol_type = other DNA
gtaatcttgtgagttaatacca

SEQ ID NO: 43101 - DNA, 22 bp, synthetic construct
  misc_feature 1..22: note = chemically synthesized
  source 1..22: mol_type = other DNA
taatcttgtgagttaataccac

SEQ ID NO: 43102 - DNA, 22 bp, synthetic construct
  misc_feature 1..22: note = chemically synthesized
  source 1..22: mol_type = other DNA
gtgagttaataccacttaataa

SEQ ID NO: 43103 - DNA, 22 bp, synthetic construct
  misc_feature 1..22: note = chemically synthesized
  source 1..22: mol_type = other DNA
tgagttaataccacttaataag

SEQ ID NO: 43104 - DNA, 22 bp, synthetic construct
  misc_feature 1..22: note = chemically synthesized
  source 1..22: mol_type = other DNA
ataccacttaataagctcccct

SEQ ID NO: 43105 - DNA, 22 bp, synthetic construct
  misc_feature 1..22: note = chemically synthesized
  source 1..22: mol_type = other DNA
aataagctcccctttgtgtgag

SEQ ID NO: 43106 - DNA, 22 bp, synthetic construct
  misc_feature 1..22: note = chemically synthesized
  source 1..22: mol_type = other DNA
ataagctcccctttgtgtgagt

SEQ ID NO: 43107 - DNA, 22 bp, synthetic construct
  misc_feature 1..22: note = chemically synthesized
  source 1..22: mol_type = other DNA
ccctttgtgtgagtatatctat

SEQ ID NO: 43108 - DNA, 22 bp, synthetic construct
  misc_feature 1..22: note = chemically synthesized
  source 1..22: mol_type = other DNA
tgtgtgagtatatctatatcta

SEQ ID NO: 43109 - DNA, 22 bp, synthetic construct
  misc_feature 1..22: note = chemically synthesized
  source 1..22: mol_type = other DNA
gtgtgagtatatctatatctat

SEQ ID NO: 43110 - DNA, 22 bp, synthetic construct
  misc_feature 1..22: note = chemically synthesized
  source 1..22: mol_type = other DNA
tgtgagtatatctatatctata

SEQ ID NO: 43111 - DNA, 22 bp, synthetic construct
  misc_feature 1..22: note = chemically synthesized
  source 1..22: mol_type = other DNA
tatctatagatagatataggta

SEQ ID NO: 43112 - DNA, 22 bp, synthetic construct
  misc_feature 1..22: note = chemically synthesized
  source 1..22: mol_type = other DNA
tagatagatataggtatactca

SEQ ID NO: 43113 - DNA, 22 bp, synthetic construct
  misc_feature 1..22: note = chemically synthesized
  source 1..22: mol_type = other DNA
actatatatacacatatataca

SEQ ID NO: 43114 - DNA, 22 bp, synthetic construct
  misc_feature 1..22: note = chemically synthesized
  source 1..22: mol_type = other DNA
tatatacacatatatacatata

SEQ ID NO: 43115 - DNA, 22 bp, synthetic construct
  misc_feature 1..22: note = chemically synthesized
  source 1..22: mol_type = other DNA
tctctctctctctctcatatat

SEQ ID NO: 43116 - DNA, 22 bp, synthetic construct
  misc_feature 1..22: note = chemically synthesized
  source 1..22: mol_type = other DNA
tctctctctctctcatatatat

SEQ ID NO: 43117 - DNA, 22 bp, synthetic construct
  misc_feature 1..22: note = chemically synthesized
  source 1..22: mol_type = other DNA
tctctctctctcatatatatat

SEQ ID NO: 43118 - DNA, 22 bp, synthetic construct
  misc_feature 1..22: note = chemically synthesized
  source 1..22: mol_type = other DNA
tctctctctcatatatatatat

SEQ ID NO: 43119 - DNA, 22 bp, synthetic construct
  misc_feature 1..22: note = chemically synthesized
  source 1..22: mol_type = other DNA
tctctctcatatatatatatat

SEQ ID NO: 43120 - DNA, 22 bp, synthetic construct
  misc_feature 1..22: note = chemically synthesized
  source 1..22: mol_type = other DNA
tctctcatatatatatatatat

SEQ ID NO: 43121 - DNA, 22 bp, synthetic construct
  misc_feature 1..22: note = chemically synthesized
  source 1..22: mol_type = other DNA
tctcatatatatatatatataa

SEQ ID NO: 43122 - DNA, 22 bp, synthetic construct
  misc_feature 1..22: note = chemically synthesized
  source 1..22: mol_type = other DNA
tcatatatatatatatataatc

SEQ ID NO: 43123 - DNA, 22 bp, synthetic construct
  misc_feature 1..22: note = chemically synthesized
  source 1..22: mol_type = other DNA
atatatatatatatataatctc

SEQ ID NO: 43124 - DNA, 22 bp, synthetic construct
  misc_feature 1..22: note = chemically synthesized
  source 1..22: mol_type = other DNA
ctattagttctgtccctctaga

SEQ ID NO: 43125 - DNA, 22 bp, synthetic construct
  misc_feature 1..22: note = chemically synthesized
  source 1..22: mol_type = other DNA
ttagttctgtccctctagagaa

SEQ ID NO: 43126 - DNA, 22 bp, synthetic construct
  misc_feature 1..22: note = chemically synthesized
  source 1..22: mol_type = other DNA
gttctgtccctctagagaaccc

SEQ ID NO: 43127 - DNA, 22 bp, synthetic construct
  misc_feature 1..22: note = chemically synthesized
  source 1..22: mol_type = other DNA
tgtccctctagagaaccccgac

SEQ ID NO: 43128 - DNA, 22 bp, synthetic construct
  misc_feature 1..22: note = chemically synthesized
  source 1..22: mol_type = other DNA
tccctctagagaaccccgacta

SEQ ID NO: 43129 - DNA, 22 bp, synthetic construct
  misc_feature 1..22: note = chemically synthesized
  source 1..22: mol_type = other DNA
tagagaaccccgactaatacag

SEQ ID NO: 43130 - DNA, 22 bp, synthetic construct
  misc_feature 1..22: note = chemically synthesized
  source 1..22: mol_type = other DNA
gagaaccccgactaatacagat

SEQ ID NO: 43131 - DNA, 22 bp, synthetic construct
  misc_feature 1..22: note = chemically synthesized
  source 1..22: mol_type = other DNA
atacagattttcataccagaag

SEQ ID NO: 43132 - DNA, 22 bp, synthetic construct
  misc_feature 1..22: note = chemically synthesized
  source 1..22: mol_type = other DNA
tcataccagaagtggttcttga

SEQ ID NO: 43133 - DNA, 22 bp, synthetic construct
  misc_feature 1..22: note = chemically synthesized
  source 1..22: mol_type = other DNA
cataccagaagtggttcttgag

SEQ ID NO: 43134 - DNA, 22 bp, synthetic construct
  misc_feature 1..22: note = chemically synthesized
  source 1..22: mol_type = other DNA
ataccagaagtggttcttgagg

SEQ ID NO: 43135 - DNA, 22 bp, synthetic construct
  misc_feature 1..22: note = chemically synthesized
  source 1..22: mol_type = other DNA
ttgaggaacagaatattaagga

SEQ ID NO: 43136 - DNA, 22 bp, synthetic construct
  misc_feature 1..22: note = chemically synthesized
  source 1..22: mol_type = other DNA
gaggaacagaatattaaggatg

SEQ ID NO: 43137 - DNA, 22 bp, synthetic construct
  misc_feature 1..22: note = chemically synthesized
  source 1..22: mol_type = other DNA
aggaacagaatattaaggatgg

SEQ ID NO: 43138 - DNA, 22 bp, synthetic construct
  misc_feature 1..22: note = chemically synthesized
  source 1..22: mol_type = other DNA
aggatggaattctttcattggt

SEQ ID NO: 43139 - DNA, 22 bp, synthetic construct
  misc_feature 1..22: note = chemically synthesized
  source 1..22: mol_type = other DNA
tttcattggttttgggacttct

SEQ ID NO: 43140 - DNA, 22 bp, synthetic construct
  misc_feature 1..22: note = chemically synthesized
  source 1..22: mol_type = other DNA
tcattggttttgggacttctgg

SEQ ID NO: 43141 - DNA, 22 bp, synthetic construct
  misc_feature 1..22: note = chemically synthesized
  source 1..22: mol_type = other DNA
cattggttttgggacttctggt

SEQ ID NO: 43142 - DNA, 22 bp, synthetic construct
  misc_feature 1..22: note = chemically synthesized
  source 1..22: mol_type = other DNA
attggttttgggacttctggtg

SEQ ID NO: 43143 - DNA, 22 bp, synthetic construct
  misc_feature 1..22: note = chemically synthesized
  source 1..22: mol_type = other DNA
gttttgggacttctggtgttgg

SEQ ID NO: 43144 - DNA, 22 bp, synthetic construct
  misc_feature 1..22: note = chemically synthesized
  source 1..22: mol_type = other DNA
tgggacttctggtgttggctga

SEQ ID NO: 43145 - DNA, 22 bp, synthetic construct
  misc_feature 1..22: note = chemically synthesized
  source 1..22: mol_type = other DNA
gggacttctggtgttggctgat

SEQ ID NO: 43146 - DNA, 22 bp, synthetic construct
  misc_feature 1..22: note = chemically synthesized
  source 1..22: mol_type = other DNA
ggacttctggtgttggctgatt

SEQ ID NO: 43147 - DNA, 22 bp, synthetic construct
  misc_feature 1..22: note = chemically synthesized
  source 1..22: mol_type = other DNA
ctggtgttggctgattaatatg

SEQ ID NO: 43148 - DNA, 22 bp, synthetic construct
  misc_feature 1..22: note = chemically synthesized
  source 1..22: mol_type = other DNA
tggtgttggctgattaatatga

SEQ ID NO: 43149 - DNA, 22 bp, synthetic construct
  misc_feature 1..22: note = chemically synthesized
  source 1..22: mol_type = other DNA
gtgttggctgattaatatgatt

SEQ ID NO: 43150 - DNA, 22 bp, synthetic construct
  misc_feature 1..22: note = chemically synthesized
  source 1..22: mol_type = other DNA
gctgattaatatgattagacca

SEQ ID NO: 43151 - DNA, 22 bp, synthetic construct
  misc_feature 1..22: note = chemically synthesized
  source 1..22: mol_type = other DNA
attaatatgattagaccaaaaa

SEQ ID NO: 43152 - DNA, 22 bp, synthetic construct
  misc_feature 1..22: note = chemically synthesized
  source 1..22: mol_type = other DNA
atatgattagaccaaaaaatgc

SEQ ID NO: 43153 - DNA, 22 bp, synthetic construct
  misc_feature 1..22: note = chemically synthesized
  source 1..22: mol_type = other DNA
gaccaaaaaatgctaaggactc

SEQ ID NO: 43154 - DNA, 22 bp, synthetic construct
  misc_feature 1..22: note = chemically synthesized
  source 1..22: mol_type = other DNA
aggactctacttctaatagtat

SEQ ID NO: 43155 - DNA, 22 bp, synthetic construct
  misc_feature 1..22: note = chemically synthesized
  source 1..22: mol_type = other DNA
tacttctaatagtatggagaac

SEQ ID NO: 43156 - DNA, 22 bp, synthetic construct
  misc_feature 1..22: note = chemically synthesized
  source 1..22: mol_type = other DNA
cttctaatagtatggagaacac

SEQ ID NO: 43157 - DNA, 22 bp, synthetic construct
  misc_feature 1..22: note = chemically synthesized
  source 1..22: mol_type = other DNA
ctaatagtatggagaacactga

SEQ ID NO: 43158 - DNA, 22 bp, synthetic construct
  misc_feature 1..22: note = chemically synthesized
  source 1..22: mol_type = other DNA
taatagtatggagaacactgat

SEQ ID NO: 43159 - DNA, 22 bp, synthetic construct
  misc_feature 1..22: note = chemically synthesized
  source 1..22: mol_type = other DNA
atagtatggagaacactgatag

SEQ ID NO: 43160 - DNA, 22 bp, synthetic construct
  misc_feature 1..22: note = chemically synthesized
  source 1..22: mol_type = other DNA
atagtacttggcctgaattgtt

SEQ ID NO: 43161 - DNA, 22 bp, synthetic construct
  misc_feature 1..22: note = chemically synthesized
  source 1..22: mol_type = other DNA
ggcctgaattgtttagagagtt

SEQ ID NO: 43162 - DNA, 22 bp, synthetic construct
  misc_feature 1..22: note = chemically synthesized
  source 1..22: mol_type = other DNA
gcctgaattgtttagagagtta

SEQ ID NO: 43163 - DNA, 22 bp, synthetic construct
  misc_feature 1..22: note = chemically synthesized
  source 1..22: mol_type = other DNA
aattgtttagagagttatgcaa

SEQ ID NO: 43164 - DNA, 22 bp, synthetic construct
  misc_feature 1..22: note = chemically synthesized
  source 1..22: mol_type = other DNA
tttagagagttatgcaaaataa

SEQ ID NO: 43165 - DNA, 22 bp, synthetic construct
  misc_feature 1..22: note = chemically synthesized
  source 1..22: mol_type = other DNA
agagagttatgcaaaataaatg

SEQ ID NO: 43166 - DNA, 22 bp, synthetic construct
  misc_feature 1..22: note = chemically synthesized
  source 1..22: mol_type = other DNA
gagagttatgcaaaataaatgc

SEQ ID NO: 43167 - DNA, 22 bp, synthetic construct
  misc_feature 1..22: note = chemically synthesized
  source 1..22: mol_type = other DNA
tgcaaaataaatgcatttgaca

SEQ ID NO: 43168 - DNA, 22 bp, synthetic construct
  misc_feature 1..22: note = chemically synthesized
  source 1..22: mol_type = other DNA
gacactactgattcatcactta

SEQ ID NO: 43169 - DNA, 22 bp, synthetic construct
  misc_feature 1..22: note = chemically synthesized
  source 1..22: mol_type = other DNA
acactactgattcatcacttat

SEQ ID NO: 43170 - DNA, 22 bp, synthetic construct
  misc_feature 1..22: note = chemically synthesized
  source 1..22: mol_type = other DNA
ctgattcatcacttatgagagg

SEQ ID NO: 43171 - DNA, 22 bp, synthetic construct
  misc_feature 1..22: note = chemically synthesized
  source 1..22: mol_type = other DNA
attcatcacttatgagaggcaa

SEQ ID NO: 43172 - DNA, 22 bp, synthetic construct
  misc_feature 1..22: note = chemically synthesized
  source 1..22: mol_type = other DNA
atcacttatgagaggcaaggag

SEQ ID NO: 43173 - DNA, 22 bp, synthetic construct
  misc_feature 1..22: note = chemically synthesized
  source 1..22: mol_type = other DNA
atgagaggcaaggagtttagtg

SEQ ID NO: 43174 - DNA, 22 bp, synthetic construct
  misc_feature 1..22: note = chemically synthesized
  source 1..22: mol_type = other DNA
tgagaggcaaggagtttagtga

SEQ ID NO: 43175 - DNA, 22 bp, synthetic construct
  misc_feature 1..22: note = chemically synthesized
  source 1..22: mol_type = other DNA
agtgactctatacataatacct

SEQ ID NO: 43176 - DNA, 22 bp, synthetic construct
  misc_feature 1..22: note = chemically synthesized
  source 1..22: mol_type = other DNA
gtgactctatacataatacctt

SEQ ID NO: 43177 - DNA, 22 bp, synthetic construct
  misc_feature 1..22: note = chemically synthesized
  source 1..22: mol_type = other DNA
tatacataatacctttgactat

SEQ ID NO: 43178 - DNA, 22 bp, synthetic construct
  misc_feature 1..22: note = chemically synthesized
  source 1..22: mol_type = other DNA
tacataatacctttgactatat

SEQ ID NO: 43179 - DNA, 22 bp, synthetic construct
  misc_feature 1..22: note = chemically synthesized
  source 1..22: mol_type = other DNA
tgactatatgtggagaaccaag

SEQ ID NO: 43180 - DNA, 22 bp, synthetic construct
  misc_feature 1..22: note = chemically synthesized
  source 1..22: mol_type = other DNA
gactatatgtggagaaccaagg

SEQ ID NO: 43181 - DNA, 22 bp, synthetic construct
  misc_feature 1..22: note = chemically synthesized
  source 1..22: mol_type = other DNA
actatatgtggagaaccaagga

SEQ ID NO: 43182 - DNA, 22 bp, synthetic construct
  misc_feature 1..22: note = chemically synthesized
  source 1..22: mol_type = other DNA
tatgtggagaaccaaggaacat

SEQ ID NO: 43183 - DNA, 22 bp, synthetic construct
  misc_feature 1..22: note = chemically synthesized
  source 1..22: mol_type = other DNA
gttgattgctcctaagttctct

SEQ ID NO: 43184 - DNA, 22 bp, synthetic construct
  misc_feature 1..22: note = chemically synthesized
  source 1..22: mol_type = other DNA
attgctcctaagttctctggag

SEQ ID NO: 43185 - DNA, 22 bp, synthetic construct
  misc_feature 1..22: note = chemically synthesized
  source 1..22: mol_type = other DNA
ctcctaagttctctggagaaag

SEQ ID NO: 43186 - DNA, 22 bp, synthetic construct
  misc_feature 1..22: note = chemically synthesized
  source 1..22: mol_type = other DNA
ctaagttctctggagaaagaga

SEQ ID NO: 43187 - DNA, 22 bp, synthetic construct
  misc_feature 1..22: note = chemically synthesized
  source 1..22: mol_type = other DNA
agttctctggagaaagagatga

SEQ ID NO: 43188 - DNA, 22 bp, synthetic construct
  misc_feature 1..22: note = chemically synthesized
  source 1..22: mol_type = other DNA
tctggagaaagagatgaaagaa

SEQ ID NO: 43189 - DNA, 22 bp, synthetic construct
  misc_feature 1..22: note = chemically synthesized
  source 1..22: mol_type = other DNA
tggagaaagagatgaaagaaaa

SEQ ID NO: 43190 - DNA, 22 bp, synthetic construct
  misc_feature 1..22: note = chemically synthesized
  source 1..22: mol_type = other DNA
gagaaagagatgaaagaaaatg

SEQ ID NO: 43191 - DNA, 22 bp, synthetic construct
  misc_feature 1..22: note = chemically synthesized
  source 1..22: mol_type = other DNA
aggggatctgtctcccaccttc

SEQ ID NO: 43192 - DNA, 22 bp, synthetic construct
  misc_feature 1..22: note = chemically synthesized
  source 1..22: mol_type = other DNA
tctcccaccttcagaagcagat

SEQ ID NO: 43193 - DNA, 22 bp, synthetic construct
  misc_feature 1..22: note = chemically synthesized
  source 1..22: mol_type = other DNA
ccaccttcagaagcagatactg

SEQ ID NO: 43194 - DNA, 22 bp, synthetic construct
  misc_feature 1..22: note = chemically synthesized
  source 1..22: mol_type = other DNA
cagaagcagatactgagccaca

SEQ ID NO: 43195 - DNA, 22 bp, synthetic construct
  misc_feature 1..22: note = chemically synthesized
  source 1..22: mol_type = other DNA
agaagcagatactgagccacaa

SEQ ID NO: 43196 - DNA, 22 bp, synthetic construct
  misc_feature 1..22: note = chemically synthesized
  source 1..22: mol_type = other DNA
agccacaaatctgctaagattg

SEQ ID NO: 43197 - DNA, 22 bp, synthetic construct
  misc_feature 1..22: note = chemically synthesized
  source 1..22: mol_type = other DNA
ctaagattgccctgaatgagag

SEQ ID NO: 43198 - DNA, 22 bp, synthetic construct
  misc_feature 1..22: note = chemically synthesized
  source 1..22: mol_type = other DNA
agattgccctgaatgagagttt

SEQ ID NO: 43199 - DNA, 22 bp, synthetic construct
  misc_feature 1..22: note = chemically synthesized
  source 1..22: mol_type = other DNA
ccctgaatgagagttttaactc

SEQ ID NO: 43200 - DNA, 22 bp, synthetic construct
  misc_feature 1..22: note = chemically synthesized
  source 1..22: mol_type = other DNA
aatgagagttttaactcctgta

SEQ ID NO: 43201 - DNA, 22 bp, synthetic construct
  misc_feature 1..22: note = chemically synthesized
  source 1..22: mol_type = other DNA
taactcctgtagagaaagagtt

SEQ ID NO: 43202 - DNA, 22 bp, synthetic construct
  misc_feature 1..22: note = chemically synthesized
  source 1..22: mol_type = other DNA
aactcctgtagagaaagagttg

SEQ ID NO: 43203 - DNA, 22 bp, synthetic construct
  misc_feature 1..22: note = chemically synthesized
  source 1..22: mol_type = other DNA
actcctgtagagaaagagttga

SEQ ID NO: 43204 - DNA, 22 bp, synthetic construct
  misc_feature 1..22: note = chemically synthesized
  source 1..22: mol_type = other DNA
ctgtagagaaagagttgaaatt

SEQ ID NO: 43205 - DNA, 22 bp, synthetic construct
  misc_feature 1..22: note = chemically synthesized
  source 1..22: mol_type = other DNA
tagagaaagagttgaaattgtg

SEQ ID NO: 43206 - DNA, 22 bp, synthetic construct
  misc_feature 1..22: note = chemically synthesized
  source 1..22: mol_type = other DNA
aaattgtgaaaaaacagagaca

SEQ ID NO: 43207 - DNA, 22 bp, synthetic construct
  misc_feature 1..22: note = chemically synthesized
  source 1..22: mol_type = other DNA
tgaaaaaacagagacaagctgt

SEQ ID NO: 43208 - DNA, 22 bp, synthetic construct
  misc_feature 1..22: note = chemically synthesized
  source 1..22: mol_type = other DNA
ttatcatgcgagtagctgatct

SEQ ID NO: 43209 - DNA, 22 bp, synthetic construct
  misc_feature 1..22: note = chemically synthesized
  source 1..22: mol_type = other DNA
tcatgcgagtagctgatctgca

SEQ ID NO: 43210 - DNA, 22 bp, synthetic construct
  misc_feature 1..22: note = chemically synthesized
  source 1..22: mol_type = other DNA
atctgcaacaagaggtgcatgc

SEQ ID NO: 43211 - DNA, 22 bp, synthetic construct
  misc_feature 1..22: note = chemically synthesized
  source 1..22: mol_type = other DNA
caacaagaggtgcatgcacagc

SEQ ID NO: 43212 - DNA, 22 bp, synthetic construct
  misc_feature 1..22: note = chemically synthesized
  source 1..22: mol_type = other DNA
gccaggtgtttactgttaaagt

SEQ ID NO: 43213 - DNA, 22 bp, synthetic construct
  misc_feature 1..22: note = chemically synthesized
  source 1..22: mol_type = other DNA
ccaggtgtttactgttaaagtg

SEQ ID NO: 43214 - DNA, 22 bp, synthetic construct
  misc_feature 1..22: note = chemically synthesized
  source 1..22: mol_type = other DNA
actgttaaagtgagggcattga

SEQ ID NO: 43215 - DNA, 22 bp, synthetic construct
  misc_feature 1..22: note = chemically synthesized
  source 1..22: mol_type = other DNA
ctgttaaagtgagggcattgac

SEQ ID NO: 43216 - DNA, 22 bp, synthetic construct
  misc_feature 1..22: note = chemically synthesized
  source 1..22: mol_type = other DNA
ttaaagtgagggcattgactgg

SEQ ID NO: 43217 - DNA, 22 bp, synthetic construct
  misc_feature 1..22: note = chemically synthesized
  source 1..22: mol_type = other DNA
aagtgagggcattgactggaaa

SEQ ID NO: 43218 - DNA, 22 bp, synthetic construct
  misc_feature 1..22: note = chemically synthesized
  source 1..22: mol_type = other DNA
actggaaaaaaatgggaccctg

SEQ ID NO: 43219 - DNA, 22 bp, synthetic construct
  misc_feature 1..22: note = chemically synthesized
  source 1..22: mol_type = other DNA
gaaaaaaatgggaccctggaac

SEQ ID NO: 43220 - DNA, 22 bp, synthetic construct
  misc_feature 1..22: note = chemically synthesized
  source 1..22: mol_type = other DNA
gaacttggagtggggatgtgtg

SEQ ID NO: 43221 - DNA, 22 bp, synthetic construct
  misc_feature 1..22: note = chemically synthesized
  source 1..22: mol_type = other DNA
ggagtggggatgtgtgggagaa

SEQ ID NO: 43222 - DNA, 22 bp, synthetic construct
  misc_feature 1..22: note = chemically synthesized
  source 1..22: mol_type = other DNA
gagtggggatgtgtgggagaac

SEQ ID NO: 43223 - DNA, 22 bp, synthetic construct
  misc_feature 1..22: note = chemically synthesized
  source 1..22: mol_type = other DNA
atgaagctgaggacactgagtt

SEQ ID NO: 43224 - DNA, 22 bp, synthetic construct
  misc_feature 1..22: note = chemically synthesized
  source 1..22: mol_type = other DNA
aggacactgagtttgtgaactc

SEQ ID NO: 43225 - DNA, 22 bp, synthetic construct
  misc_feature 1..22: note = chemically synthesized
  source 1..22: mol_type = other DNA
agtttgtgaactctgatgaaac

SEQ ID NO: 43226 - DNA, 22 bp, synthetic construct
  misc_feature 1..22: note = chemically synthesized
  source 1..22: mol_type = other DNA
gtgaactctgatgaaacttttt

SEQ ID NO: 43227 - DNA, 22 bp, synthetic construct
  misc_feature 1..22: note = chemically synthesized
  source 1..22: mol_type = other DNA
tgaactctgatgaaactttttt

SEQ ID NO: 43228 - DNA, 22 bp, synthetic construct
  misc_feature 1..22: note = chemically synthesized
  source 1..22: mol_type = other DNA
tgatgaaacttttttgccagaa

SEQ ID NO: 43229 - DNA, 22 bp, synthetic construct
  misc_feature 1..22: note = chemically synthesized
  source 1..22: mol_type = other DNA
atgaaacttttttgccagaaga

SEQ ID NO: 43230 - DNA, 22 bp, synthetic construct
  misc_feature 1..22: note = chemically synthesized
  source 1..22: mol_type = other DNA
ttttgccagaagaaacagtttc

SEQ ID NO: 43231 - DNA, 22 bp, synthetic construct
  misc_feature 1..22: note = chemically synthesized
  source 1..22: mol_type = other DNA
tttgccagaagaaacagtttcc

SEQ ID NO: 43232 - DNA, 22 bp, synthetic construct
  misc_feature 1..22: note = chemically synthesized
  source 1..22: mol_type = other DNA
ttgccagaagaaacagtttccc

SEQ ID NO: 43233 - DNA, 22 bp, synthetic construct
  misc_feature 1..22: note = chemically synthesized
  source 1..22: mol_type = other DNA
tgccagaagaaacagtttcccc

SEQ ID NO: 43234 - DNA, 22 bp, synthetic construct
  misc_feature 1..22: note = chemically synthesized
  source 1..22: mol_type = other DNA
gccagaagaaacagtttcccca

SEQ ID NO: 43235 - DNA, 22 bp, synthetic construct
  misc_feature 1..22: note = chemically synthesized
  source 1..22: mol_type = other DNA
ccagaagaaacagtttccccat

SEQ ID NO: 43236 - DNA, 22 bp, synthetic construct
  misc_feature 1..22: note = chemically synthesized
  source 1..22: mol_type = other DNA
ccccatccccagtagtggtaac

SEQ ID NO: 43237 - DNA, 22 bp, synthetic construct
  misc_feature 1..22: note = chemically synthesized
  source 1..22: mol_type = other DNA
cccatccccagtagtggtaaca

SEQ ID NO: 43238 - DNA, 22 bp, synthetic construct
  misc_feature 1..22: note = chemically synthesized
  source 1..22: mol_type = other DNA
cctgacccgtgctgccattagc

SEQ ID NO: 43239 - DNA, 22 bp, synthetic construct
  misc_feature 1..22: note = chemically synthesized
  source 1..22: mol_type = other DNA
acccgtgctgccattagccttt

SEQ ID NO: 43240 - DNA, 22 bp, synthetic construct
  misc_feature 1..22: note = chemically synthesized
  source 1..22: mol_type = other DNA
ccattagcctttccacctttgt

SEQ ID NO: 43241 - DNA, 22 bp, synthetic construct
  misc_feature 1..22: note = chemically synthesized
  source 1..22: mol_type = other DNA
gcctttccacctttgtctgagg

SEQ ID NO: 43242 - DNA, 22 bp, synthetic construct
  misc_feature 1..22: note = chemically synthesized
  source 1..22: mol_type = other DNA
tccacctttgtctgaggatgta

SEQ ID NO: 43243 - DNA, 22 bp, synthetic construct
  misc_feature 1..22: note = chemically synthesized
  source 1..22: mol_type = other DNA
ccacctttgtctgaggatgtaa

SEQ ID NO: 43244 - DNA, 22 bp, synthetic construct
  misc_feature 1..22: note = chemically synthesized
  source 1..22: mol_type = other DNA
cacctttgtctgaggatgtaaa

SEQ ID NO: 43245 - DNA, 22 bp, synthetic construct
  misc_feature 1..22: note = chemically synthesized
  source 1..22: mol_type = other DNA
tgtctgaggatgtaaaccctgc

SEQ ID NO: 43246 - DNA, 22 bp, synthetic construct
  misc_feature 1..22: note = chemically synthesized
  source 1..22: mol_type = other DNA
gtctgaggatgtaaaccctgca

SEQ ID NO: 43247 - DNA, 22 bp, synthetic construct
  misc_feature 1..22: note = chemically synthesized
  source 1..22: mol_type = other DNA
tctgaggatgtaaaccctgcac

SEQ ID NO: 43248 - DNA, 22 bp, synthetic construct
  misc_feature 1..22: note = chemically synthesized
  source 1..22: mol_type = other DNA
aggatgtaaaccctgcactgct

SEQ ID NO: 43249 - DNA, 22 bp, synthetic construct
  misc_feature 1..22: note = chemically synthesized
  source 1..22: mol_type = other DNA
cactgcttgaggcaacagtgat

SEQ ID NO: 43250 - DNA, 22 bp, synthetic construct
  misc_feature 1..22: note = chemically synthesized
  source 1..22: mol_type = other DNA
cttgaggcaacagtgatggcct

SEQ ID NO: 43251 - DNA, 22 bp, synthetic construct
  misc_feature 1..22: note = chemically synthesized
  source 1..22: mol_type = other DNA
gaggcaacagtgatggccttcc

SEQ ID NO: 43252 - DNA, 22 bp, synthetic construct
  misc_feature 1..22: note = chemically synthesized
  source 1..22: mol_type = other DNA
aggcaacagtgatggccttccc

SEQ ID NO: 43253 - DNA, 22 bp, synthetic construct
  misc_feature 1..22: note = chemically synthesized
  source 1..22: mol_type = other DNA
ccctgaggcagctgccaggcaa

SEQ ID NO: 43254 - DNA, 22 bp, synthetic construct
  misc_feature 1..22: note = chemically synthesized
  source 1..22: mol_type = other DNA
cctgaggcagctgccaggcaag

SEQ ID NO: 43255 - DNA, 22 bp, synthetic construct
  misc_feature 1..22: note = chemically synthesized
  source 1..22: mol_type = other DNA
aggcagctgccaggcaagataa

SEQ ID NO: 43256 - DNA, 22 bp, synthetic construct
  misc_feature 1..22: note = chemically synthesized
  source 1..22: mol_type = other DNA
ccaggcaagataatgttgattc

SEQ ID NO: 43257 - DNA, 22 bp, synthetic construct
  misc_feature 1..22: note = chemically synthesized
  source 1..22: mol_type = other DNA
attctcctcaagaggcacccct

SEQ ID NO: 43258 - DNA, 22 bp, synthetic construct
  misc_feature 1..22: note = chemically synthesized
  source 1..22: mol_type = other DNA
tcctcaagaggcacccctaatg

SEQ ID NO: 43259 - DNA, 22 bp, synthetic construct
  misc_feature 1..22: note = chemically synthesized
  source 1..22: mol_type = other DNA
ctcaagaggcacccctaatgcc

SEQ ID NO: 43260 - DNA, 22 bp, synthetic construct
  misc_feature 1..22: note = chemically synthesized
  source 1..22: mol_type = other DNA
aagaggcacccctaatgcccct

SEQ ID NO: 43261 - DNA, 22 bp, synthetic construct
  misc_feature 1..22: note = chemically synthesized
  source 1..22: mol_type = other DNA
atgcccctgaatgcttctagac

SEQ ID NO: 43262 - DNA, 22 bp, synthetic construct
  misc_feature 1..22: note = chemically synthesized
  source 1..22: mol_type = other DNA
aatgcttctagacctataacta

SEQ ID NO: 43263 - DNA, 22 bp, synthetic construct
  misc_feature 1..22: note = chemically synthesized
  source 1..22: mol_type = other DNA
ctagacctataactaggctaaa

SEQ ID NO: 43264 - DNA, 22 bp, synthetic construct
  misc_feature 1..22: note = chemically synthesized
  source 1..22: mol_type = other DNA
tagacctataactaggctaaat

SEQ ID NO: 43265 - DNA, 22 bp, synthetic construct
  misc_feature 1..22: note = chemically synthesized
  source 1..22: mol_type = other DNA
gacctataactaggctaaattc

SEQ ID NO: 43266 - DNA, 22 bp, synthetic construct
  misc_feature 1..22: note = chemically synthesized
  source 1..22: mol_type = other DNA
taactaggctaaattccttgcg

SEQ ID NO: 43267 - DNA, 22 bp, synthetic construct
  misc_feature 1..22: note = chemically synthesized
  source 1..22: mol_type = other DNA
ggctaaattccttgcgggcccc

SEQ ID NO: 43268 - DNA, 22 bp, synthetic construct
  misc_feature 1..22: note = chemically synthesized
  source 1..22: mol_type = other DNA
aattccttgcgggccccagagg

SEQ ID NO: 43269 - DNA, 22 bp, synthetic construct
  misc_feature 1..22: note = chemically synthesized
  source 1..22: mol_type = other DNA
cttgcgggccccagaggtgagg

SEQ ID NO: 43270 - DNA, 22 bp, synthetic construct
  misc_feature 1..22: note = chemically synthesized
  source 1..22: mol_type = other DNA
gcgggccccagaggtgaggttc

SEQ ID NO: 43271 - DNA, 22 bp, synthetic construct
  misc_feature 1..22: note = chemically synthesized
  source 1..22: mol_type = other DNA
cgggccccagaggtgaggttca

SEQ ID NO: 43272 - DNA, 22 bp, synthetic construct
  misc_feature 1..22: note = chemically synthesized
  source 1..22: mol_type = other DNA
agagtgtgacccatgaggaggt

SEQ ID NO: 43273 - DNA, 22 bp, synthetic construct
  misc_feature 1..22: note = chemically synthesized
  source 1..22: mol_type = other DNA
tactctaaaagaactgcttaag

SEQ ID NO: 43274 - DNA, 22 bp, synthetic construct
  misc_feature 1..22: note = chemically synthesized
  source 1..22: mol_type = other DNA
taaaagaactgcttaagctttc

SEQ ID NO: 43275 - DNA, 22 bp, synthetic construct
  misc_feature 1..22: note = chemically synthesized
  source 1..22: mol_type = other DNA
aaagaactgcttaagctttcta

SEQ ID NO: 43276 - DNA, 22 bp, synthetic construct
  misc_feature 1..22: note = chemically synthesized
  source 1..22: mol_type = other DNA
cttaagctttctaatttatatt

SEQ ID NO: 43277 - DNA, 22 bp, synthetic construct
  misc_feature 1..22: note = chemically synthesized
  source 1..22: mol_type = other DNA
aagctttctaatttatattggc

SEQ ID NO: 43278 - DNA, 22 bp, synthetic construct
  misc_feature 1..22: note = chemically synthesized
  source 1..22: mol_type = other DNA
agctttctaatttatattggca

SEQ ID NO: 43279 - DNA, 22 bp, synthetic construct
  misc_feature 1..22: note = chemically synthesized
  source 1..22: mol_type = other DNA
tctaatttatattggcagaaat

SEQ ID NO: 43280 - DNA, 22 bp, synthetic construct
  misc_feature 1..22: note = chemically synthesized
  source 1..22: mol_type = other DNA
ctaatttatattggcagaaatc

SEQ ID NO: 43281 - DNA, 22 bp, synthetic construct
  misc_feature 1..22: note = chemically synthesized
  source 1..22: mol_type = other DNA
taatttatattggcagaaatct

SEQ ID NO: 43282 - DNA, 22 bp, synthetic construct
  misc_feature 1..22: note = chemically synthesized
  source 1..22: mol_type = other DNA
atttatattggcagaaatctgg

SEQ ID NO: 43283 - DNA, 22 bp, synthetic construct
  misc_feature 1..22: note = chemically synthesized
  source 1..22: mol_type = other DNA
atattggcagaaatctggagaa

SEQ ID NO: 43284 - DNA, 22 bp, synthetic construct
  misc_feature 1..22: note = chemically synthesized
  source 1..22: mol_type = other DNA
tattggcagaaatctggagaac

SEQ ID NO: 43285 - DNA, 22 bp, synthetic construct
  misc_feature 1..22: note = chemically synthesized
  source 1..22: mol_type = other DNA
gcagaaatctggagaacaggca

SEQ ID NO: 43286 - DNA, 22 bp, synthetic construct
  misc_feature 1..22: note = chemically synthesized
  source 1..22: mol_type = other DNA
gagaacaggcatgggaatggat

SEQ ID NO: 43287 - DNA, 22 bp, synthetic construct
  misc_feature 1..22: note = chemically synthesized
  source 1..22: mol_type = other DNA
agggtaagggataatggtggaa

SEQ ID NO: 43288 - DNA, 22 bp, synthetic construct
  misc_feature 1..22: note = chemically synthesized
  source 1..22: mol_type = other DNA
gatcaagctgaatttattggtt

SEQ ID NO: 43289 - DNA, 22 bp, synthetic construct
  misc_feature 1..22: note = chemically synthesized
  source 1..22: mol_type = other DNA
aatttattggtttggccctact

SEQ ID NO: 43290 - DNA, 22 bp, synthetic construct
  misc_feature 1..22: note = chemically synthesized
  source 1..22: mol_type = other DNA
attggtttggccctactaagta

SEQ ID NO: 43291 - DNA, 22 bp, synthetic construct
  misc_feature 1..22: note = chemically synthesized
  source 1..22: mol_type = other DNA
ttggtttggccctactaagtag

SEQ ID NO: 43292 - DNA, 22 bp, synthetic construct
  misc_feature 1..22: note = chemically synthesized
  source 1..22: mol_type = other DNA
gtttggccctactaagtaggga

SEQ ID NO: 43293 - DNA, 22 bp, synthetic construct
  misc_feature 1..22: note = chemically synthesized
  source 1..22: mol_type = other DNA
ggccctactaagtagggattct

SEQ ID NO: 43294 - DNA, 22 bp, synthetic construct
  misc_feature 1..22: note = chemically synthesized
  source 1..22: mol_type = other DNA
gccctactaagtagggattctg

SEQ ID NO: 43295 - DNA, 22 bp, synthetic construct
  misc_feature 1..22: note = chemically synthesized
  source 1..22: mol_type = other DNA
ctaagtagggattctgcattta

SEQ ID NO: 43296 - DNA, 22 bp, synthetic construct
  misc_feature 1..22: note = chemically synthesized
  source 1..22: mol_type = other DNA
agtagggattctgcatttaatg

SEQ ID NO: 43297 - DNA, 22 bp, synthetic construct
  misc_feature 1..22: note = chemically synthesized
  source 1..22: mol_type = other DNA
tgcatttaatgttgcagctcgg

SEQ ID NO: 43298 - DNA, 22 bp, synthetic construct
  misc_feature 1..22: note = chemically synthesized
  source 1..22: mol_type = other DNA
catttaatgttgcagctcgggg

SEQ ID NO: 43299 - DNA, 22 bp, synthetic construct
  misc_feature 1..22: note = chemically synthesized
  source 1..22: mol_type = other DNA
aatgttgcagctcggggactta

SEQ ID NO: 43300 - DNA, 22 bp, synthetic construct
  misc_feature 1..22: note = chemically synthesized
  source 1..22: mol_type = other DNA
atgttgcagctcggggacttag

SEQ ID NO: 43301 - DNA, 22 bp, synthetic construct
  misc_feature 1..22: note = chemically synthesized
  source 1..22: mol_type = other DNA
cagctcggggacttagaaaagg

SEQ ID NO: 43302 - DNA, 22 bp, synthetic construct
  misc_feature 1..22: note = chemically synthesized
  source 1..22: mol_type = other DNA
ggggacttagaaaaggttctga

SEQ ID NO: 43303 - DNA, 22 bp, synthetic construct
  misc_feature 1..22: note = chemically synthesized
  source 1..22: mol_type = other DNA
agaaaaggttctgatagggccg

SEQ ID NO: 43304 - DNA, 22 bp, synthetic construct
  misc_feature 1..22: note = chemically synthesized
  source 1..22: mol_type = other DNA
gaaaaggttctgatagggccgg

SEQ ID NO: 43305 - DNA, 22 bp, synthetic construct
  misc_feature 1..22: note = chemically synthesized
  source 1..22: mol_type = other DNA
tgatagggccgggagcagtggc

SEQ ID NO: 43306 - DNA, 22 bp, synthetic construct
  misc_feature 1..22: note = chemically synthesized
  source 1..22: mol_type = other DNA
atagggccgggagcagtggctc

SEQ ID NO: 43307 - DNA, 22 bp, synthetic construct
  misc_feature 1..22: note = chemically synthesized
  source 1..22: mol_type = other DNA
acgcctgtaatcccagcacctt

SEQ ID NO: 43308 - DNA, 22 bp, synthetic construct
  misc_feature 1..22: note = chemically synthesized
  source 1..22: mol_type = other DNA
taatcccagcaccttgggaggc

SEQ ID NO: 43309 - DNA, 22 bp, synthetic construct
  misc_feature 1..22: note = chemically synthesized
  source 1..22: mol_type = other DNA
gggaggcgggggcgggcagatc

SEQ ID NO: 43310 - DNA, 22 bp, synthetic construct
  misc_feature 1..22: note = chemically synthesized
  source 1..22: mol_type = other DNA
ggaggcgggggcgggcagatca

SEQ ID NO: 43311 - DNA, 22 bp, synthetic construct
  misc_feature 1..22: note = chemically synthesized
  source 1..22: mol_type = other DNA
agacaattctggctaaaatggt

SEQ ID NO: 43312 - DNA, 22 bp, synthetic construct
  misc_feature 1..22: note = chemically synthesized
  source 1..22: mol_type = other DNA
tggctaaaatggtgaaacccca

SEQ ID NO: 43313 - DNA, 22 bp, synthetic construct
  misc_feature 1..22: note = chemically synthesized
  source 1..22: mol_type = other DNA
gctaaaatggtgaaaccccatc

SEQ ID NO: 43314 - DNA, 22 bp, synthetic construct
  misc_feature 1..22: note = chemically synthesized
  source 1..22: mol_type = other DNA
aaatggtgaaaccccatctctg

SEQ ID NO: 43315 - DNA, 22 bp, synthetic construct
  misc_feature 1..22: note = chemically synthesized
  source 1..22: mol_type = other DNA
tgctaaaaatacaaaaattagc

SEQ ID NO: 43316 - DNA, 22 bp, synthetic construct
  misc_feature 1..22: note = chemically synthesized
  source 1..22: mol_type = other DNA
ctaaaaatacaaaaattagctg

SEQ ID NO: 43317 - DNA, 22 bp, synthetic construct
  misc_feature 1..22: note = chemically synthesized
  source 1..22: mol_type = other DNA
aaaatacaaaaattagctgggc

SEQ ID NO: 43318 - DNA, 22 bp, synthetic construct
  misc_feature 1..22: note = chemically synthesized
  source 1..22: mol_type = other DNA
gctgggcatggtgatgcgtaac

SEQ ID NO: 43319 - DNA, 22 bp, synthetic construct
  misc_feature 1..22: note = chemically synthesized
  source 1..22: mol_type = other DNA
ggcatggtgatgcgtaactgta

SEQ ID NO: 43320 - DNA, 22 bp, synthetic construct
  misc_feature 1..22: note = chemically synthesized
  source 1..22: mol_type = other DNA
taatctcatctacttgggaggc

SEQ ID NO: 43321 - DNA, 22 bp, synthetic construct
  misc_feature 1..22: note = chemically synthesized
  source 1..22: mol_type = other DNA
atctacttgggaggctgaggca

SEQ ID NO: 43322 - DNA, 22 bp, synthetic construct
  misc_feature 1..22: note = chemically synthesized
  source 1..22: mol_type = other DNA
cttgggaggctgaggcaagaga

SEQ ID NO: 43323 - DNA, 22 bp, synthetic construct
  misc_feature 1..22: note = chemically synthesized
  source 1..22: mol_type = other DNA
gggaggctgaggcaagagaact

SEQ ID NO: 43324 - DNA, 22 bp, synthetic construct
  misc_feature 1..22: note = chemically synthesized
  source 1..22: mol_type = other DNA
ggaggctgaggcaagagaactg

SEQ ID NO: 43325 - DNA, 22 bp, synthetic construct
  misc_feature 1..22: note = chemically synthesized
  source 1..22: mol_type = other DNA
aggcaagagaactgcttgaacc

SEQ ID NO: 43326 - DNA, 22 bp, synthetic construct
  misc_feature 1..22: note = chemically synthesized
  source 1..22: mol_type = other DNA
cttgaacctgtgaggcagagat

SEQ ID NO: 43327 - DNA, 22 bp, synthetic construct
  misc_feature 1..22: note = chemically synthesized
  source 1..22: mol_type = other DNA
gaacctgtgaggcagagattgc

SEQ ID NO: 43328 - DNA, 22 bp, synthetic construct
  misc_feature 1..22: note = chemically synthesized
  source 1..22: mol_type = other DNA
aacctgtgaggcagagattgca

SEQ ID NO: 43329 - DNA, 22 bp, synthetic construct
  misc_feature 1..22: note = chemically synthesized
  source 1..22: mol_type = other DNA
tgaggcagagattgcagtgagc

SEQ ID NO: 43330 - DNA, 22 bp, synthetic construct
  misc_feature 1..22: note = chemically synthesized
  source 1..22: mol_type = other DNA
cagtgagccaagatcgccccac

SEQ ID NO: 43331 - DNA, 22 bp, synthetic construct
  misc_feature 1..22: note = chemically synthesized
  source 1..22: mol_type = other DNA
cattccagcctggtaacagagc

SEQ ID NO: 43332 - DNA, 22 bp, synthetic construct
  misc_feature 1..22: note = chemically synthesized
  source 1..22: mol_type = other DNA
cagcctggtaacagagcaagac

SEQ ID NO: 43333 - DNA, 22 bp, synthetic construct
  misc_feature 1..22: note = chemically synthesized
  source 1..22: mol_type = other DNA
gtaacagagcaagactccattt

SEQ ID NO: 43334 - DNA, 22 bp, synthetic construct
  misc_feature 1..22: note = chemically synthesized
  source 1..22: mol_type = other DNA
catttccaaaaaaaaaaaaaaa

SEQ ID NO: 43335 - DNA, 22 bp, synthetic construct
  misc_feature 1..22: note = chemically synthesized
  source 1..22: mol_type = other DNA
ccaaaaaaaaaaaaaaaaaagt

SEQ ID NO: 43336 - DNA, 22 bp, synthetic construct
  misc_feature 1..22: note = chemically synthesized
  source 1..22: mol_type = other DNA
caaaaaaaaaaaaaaaaaagtt

SEQ ID NO: 43337 - DNA, 22 bp, synthetic construct
  misc_feature 1..22: note = chemically synthesized
  source 1..22: mol_type = other DNA
taatagtttatttgcttggtta

SEQ ID NO: 43338 - DNA, 22 bp, synthetic construct
  misc_feature 1..22: note = chemically synthesized
  source 1..22: mol_type = other DNA
atttgcttggttagctgaaata

SEQ ID NO: 43339 - DNA, 22 bp, synthetic construct
  misc_feature 1..22: note = chemically synthesized
  source 1..22: mol_type = other DNA
tttgcttggttagctgaaatat

SEQ ID NO: 43340 - DNA, 22 bp, synthetic construct
  misc_feature 1..22: note = chemically synthesized
  source 1..22: mol_type = other DNA
gcttggttagctgaaatatgga

SEQ ID NO: 43341 - DNA, 22 bp, synthetic construct
  misc_feature 1..22: note = chemically synthesized
  source 1..22: mol_type = other DNA
cttggttagctgaaatatggat

SEQ ID NO: 43342 - DNA, 22 bp, synthetic construct
  misc_feature 1..22: note = chemically synthesized
  source 1..22: mol_type = other DNA
ggttagctgaaatatggattaa

SEQ ID NO: 43343 - DNA, 22 bp, synthetic construct
  misc_feature 1..22: note = chemically synthesized
  source 1..22: mol_type = other DNA
gttagctgaaatatggattaaa

SEQ ID NO: 43344 - DNA, 22 bp, synthetic construct
  misc_feature 1..22: note = chemically synthesized
  source 1..22: mol_type = other DNA
gctgaaatatggattaaaagat

SEQ ID NO: 43345 - DNA, 22 bp, synthetic construct
  misc_feature 1..22: note = chemically synthesized
  source 1..22: mol_type = other DNA
aaatatggattaaaagatggtc

SEQ ID NO: 43346 - DNA, 22 bp, synthetic construct
  misc_feature 1..22: note = chemically synthesized
  source 1..22: mol_type = other DNA
aaagatggtccaatgttagtga

SEQ ID NO: 43347 - DNA, 22 bp, synthetic construct
  misc_feature 1..22: note = chemically synthesized
  source 1..22: mol_type = other DNA
gtgagctggaaatgccttggtt

SEQ ID NO: 43348 - DNA, 22 bp, synthetic construct
  misc_feature 1..22: note = chemically synthesized
  source 1..22: mol_type = other DNA
gaaatgccttggtttaatgtag

SEQ ID NO: 43349 - DNA, 22 bp, synthetic construct
  misc_feature 1..22: note = chemically synthesized
  source 1..22: mol_type = other DNA
ggtttaatgtagaggaagtgat

SEQ ID NO: 43350 - DNA, 22 bp, synthetic construct
  misc_feature 1..22: note = chemically synthesized
  source 1..22: mol_type = other DNA
gtttaatgtagaggaagtgatc

SEQ ID NO: 43351 - DNA, 22 bp, synthetic construct
  misc_feature 1..22: note = chemically synthesized
  source 1..22: mol_type = other DNA
aatgtagaggaagtgatccaaa

SEQ ID NO: 43352 - DNA, 22 bp, synthetic construct
  misc_feature 1..22: note = chemically synthesized
  source 1..22: mol_type = other DNA
atgtagaggaagtgatccaaag

SEQ ID NO: 43353 - DNA, 22 bp, synthetic construct
  misc_feature 1..22: note = chemically synthesized
  source 1..22: mol_type = other DNA
agggagattaggatggtggagt

SEQ ID NO: 43354 - DNA, 22 bp, synthetic construct
  misc_feature 1..22: note = chemically synthesized
  source 1..22: mol_type = other DNA
gggagattaggatggtggagtg

SEQ ID NO: 43355 - DNA, 22 bp, synthetic construct
  misc_feature 1..22: note = chemically synthesized
  source 1..22: mol_type = other DNA
ggatggtggagtggattagtca

SEQ ID NO: 43356 - DNA, 22 bp, synthetic construct
  misc_feature 1..22: note = chemically synthesized
  source 1..22: mol_type = other DNA
gtcactttagacctactcatcc

SEQ ID NO: 43357 - DNA, 22 bp, synthetic construct
  misc_feature 1..22: note = chemically synthesized
  source 1..22: mol_type = other DNA
tagacctactcatcccagctgg

SEQ ID NO: 43358 - DNA, 22 bp, synthetic construct
  misc_feature 1..22: note = chemically synthesized
  source 1..22: mol_type = other DNA
agacctactcatcccagctggg

SEQ ID NO: 43359 - DNA, 22 bp, synthetic construct
  misc_feature 1..22: note = chemically synthesized
  source 1..22: mol_type = other DNA
gacctactcatcccagctggga

SEQ ID NO: 43360 - DNA, 22 bp, synthetic construct
  misc_feature 1..22: note = chemically synthesized
  source 1..22: mol_type = other DNA
ctcatcccagctgggagggtcc

SEQ ID NO: 43361 - DNA, 22 bp, synthetic construct
  misc_feature 1..22: note = chemically synthesized
  source 1..22: mol_type = other DNA
atcccagctgggagggtccaga

SEQ ID NO: 43362 - DNA, 22 bp, synthetic construct
  misc_feature 1..22: note = chemically synthesized
  source 1..22: mol_type = other DNA
ggagggtccagaagatacaccc

SEQ ID NO: 43363 - DNA, 22 bp, synthetic construct
  misc_feature 1..22: note = chemically synthesized
  source 1..22: mol_type = other DNA
ggccgaagctttgtgaaataga

SEQ ID NO: 43364 - DNA, 22 bp, synthetic construct
  misc_feature 1..22: note = chemically synthesized
  source 1..22: mol_type = other DNA
gccgaagctttgtgaaatagat

SEQ ID NO: 43365 - DNA, 22 bp, synthetic construct
  misc_feature 1..22: note = chemically synthesized
  source 1..22: mol_type = other DNA
tgtgaaatagatttgtgagagc

SEQ ID NO: 43366 - DNA, 22 bp, synthetic construct
  misc_feature 1..22: note = chemically synthesized
  source 1..22: mol_type = other DNA
gtgaaatagatttgtgagagca

SEQ ID NO: 43367 - DNA, 22 bp, synthetic construct
  misc_feature 1..22: note = chemically synthesized
  source 1..22: mol_type = other DNA
tgaaatagatttgtgagagcag

SEQ ID NO: 43368 - DNA, 22 bp, synthetic construct
  misc_feature 1..22: note = chemically synthesized
  source 1..22: mol_type = other DNA
gtgagagcagcacctgtatttt

SEQ ID NO: 43369 - DNA, 22 bp, synthetic construct
  misc_feature 1..22: note = chemically synthesized
  source 1..22: mol_type = other DNA
tgagagcagcacctgtattttt

SEQ ID NO: 43370 - DNA, 22 bp, synthetic construct
  misc_feature 1..22: note = chemically synthesized
  source 1..22: mol_type = other DNA
tatttttgaagagcccgtaatt

SEQ ID NO: 43371 - DNA, 22 bp, synthetic construct
  misc_feature 1..22: note = chemically synthesized
  source 1..22: mol_type = other DNA
ttgaagagcccgtaattgctct

SEQ ID NO: 43372 - DNA, 22 bp, synthetic construct
  misc_feature 1..22: note = chemically synthesized
  source 1..22: mol_type = other DNA
tgaagagcccgtaattgctctt

SEQ ID NO: 43373 - DNA, 22 bp, synthetic construct
  misc_feature 1..22: note = chemically synthesized
  source 1..22: mol_type = other DNA
gaagagcccgtaattgctcttc

SEQ ID NO: 43374 - DNA, 22 bp, synthetic construct
  misc_feature 1..22: note = chemically synthesized
  source 1..22: mol_type = other DNA
aagagcccgtaattgctcttct

SEQ ID NO: 43375 - DNA, 22 bp, synthetic construct
  misc_feature 1..22: note = chemically synthesized
  source 1..22: mol_type = other DNA
ctcttctctgtatgtcagatct

SEQ ID NO: 43376 - DNA, 22 bp, synthetic construct
  misc_feature 1..22: note = chemically synthesized
  source 1..22: mol_type = other DNA
ttctctgtatgtcagatctaac

SEQ ID NO: 43377 - DNA, 22 bp, synthetic construct
  misc_feature 1..22: note = chemically synthesized
  source 1..22: mol_type = other DNA
ctctgtatgtcagatctaacag

SEQ ID NO: 43378 - DNA, 22 bp, synthetic construct
  misc_feature 1..22: note = chemically synthesized
  source 1..22: mol_type = other DNA
tctgtatgtcagatctaacagt

SEQ ID NO: 43379 - DNA, 22 bp, synthetic construct
  misc_feature 1..22: note = chemically synthesized
  source 1..22: mol_type = other DNA
tgtatgtcagatctaacagtag

SEQ ID NO: 43380 - DNA, 22 bp, synthetic construct
  misc_feature 1..22: note = chemically synthesized
  source 1..22: mol_type = other DNA
tatgtcagatctaacagtagga

SEQ ID NO: 43381 - DNA, 22 bp, synthetic construct
  misc_feature 1..22: note = chemically synthesized
  source 1..22: mol_type = other DNA
acagtaggaaccacagtcactc

SEQ ID NO: 43382 - DNA, 22 bp, synthetic construct
  misc_feature 1..22: note = chemically synthesized
  source 1..22: mol_type = other DNA
aactacaaaatttaaatacaat

SEQ ID NO: 43383 - DNA, 22 bp, synthetic construct
  misc_feature 1..22: note = chemically synthesized
  source 1..22: mol_type = other DNA
caaaatttaaatacaatgggaa

SEQ ID NO: 43384 - DNA, 22 bp, synthetic construct
  misc_feature 1..22: note = chemically synthesized
  source 1..22: mol_type = other DNA
aaatacaatgggaataattgga

SEQ ID NO: 43385 - DNA, 22 bp, synthetic construct
  misc_feature 1..22: note = chemically synthesized
  source 1..22: mol_type = other DNA
aatacaatgggaataattggat

SEQ ID NO: 43386 - DNA, 22 bp, synthetic construct
  misc_feature 1..22: note = chemically synthesized
  source 1..22: mol_type = other DNA
gatcctgaggtggcaggggcca

SEQ ID NO: 43387 - DNA, 22 bp, synthetic construct
  misc_feature 1..22: note = chemically synthesized
  source 1..22: mol_type = other DNA
aggtggcaggggccaagtgttg

SEQ ID NO: 43388 - DNA, 22 bp, synthetic construct
  misc_feature 1..22: note = chemically synthesized
  source 1..22: mol_type = other DNA
gcactgaaccatcaaaggcaag

SEQ ID NO: 43389 - DNA, 22 bp, synthetic construct
  misc_feature 1..22: note = chemically synthesized
  source 1..22: mol_type = other DNA
aaccatcaaaggcaaggtgggc

SEQ ID NO: 43390 - DNA, 22 bp, synthetic construct
  misc_feature 1..22: note = chemically synthesized
  source 1..22: mol_type = other DNA
ccataatagacagcagaggcaa

SEQ ID NO: 43391 - DNA, 22 bp, synthetic construct
  misc_feature 1..22: note = chemically synthesized
  source 1..22: mol_type = other DNA
actcatgtagagctctggcatt

SEQ ID NO: 43392 - DNA, 22 bp, synthetic construct
  misc_feature 1..22: note = chemically synthesized
  source 1..22: mol_type = other DNA
atgtagagctctggcattggct

SEQ ID NO: 43393 - DNA, 22 bp, synthetic construct
  misc_feature 1..22: note = chemically synthesized
  source 1..22: mol_type = other DNA
tggcattggctaattaatcatg

SEQ ID NO: 43394 - DNA, 22 bp, synthetic construct
  misc_feature 1..22: note = chemically synthesized
  source 1..22: mol_type = other DNA
gcattggctaattaatcatggt

SEQ ID NO: 43395 - DNA, 22 bp, synthetic construct
  misc_feature 1..22: note = chemically synthesized
  source 1..22: mol_type = other DNA
gctaattaatcatggtgttcct

SEQ ID NO: 43396 - DNA, 22 bp, synthetic construct
  misc_feature 1..22: note = chemically synthesized
  source 1..22: mol_type = other DNA
attaatcatggtgttcctagaa

SEQ ID NO: 43397 - DNA, 22 bp, synthetic construct
  misc_feature 1..22: note = chemically synthesized
  source 1..22: mol_type = other DNA
atcatggtgttcctagaagtga

SEQ ID NO: 43398 - DNA, 22 bp, synthetic construct
  misc_feature 1..22: note = chemically synthesized
  source 1..22: mol_type = other DNA
ctagaagtgaaattgatgggaa

SEQ ID NO: 43399 - DNA, 22 bp, synthetic construct
  misc_feature 1..22: note = chemically synthesized
  source 1..22: mol_type = other DNA
gaagtgaaattgatgggaaacc

SEQ ID NO: 43400 - DNA, 22 bp, synthetic construct
  misc_feature 1..22: note = chemically synthesized
  source 1..22: mol_type = other DNA
atgggaaacctactgtattcct

SEQ ID NO: 43401 - DNA, 22 bp, synthetic construct
  misc_feature 1..22: note = chemically synthesized
  source 1..22: mol_type = other DNA
ctgtattcctacttgatttata

SEQ ID NO: 43402 - DNA, 22 bp, synthetic construct
  misc_feature 1..22: note = chemically synthesized
  source 1..22: mol_type = other DNA
tattcctacttgatttatataa

SEQ ID NO: 43403 - DNA, 22 bp, synthetic construct
  misc_feature 1..22: note = chemically synthesized
  source 1..22: mol_type = other DNA
ctacttgatttatataaacaaa

SEQ ID NO: 43404 - DNA, 22 bp, synthetic construct
  misc_feature 1..22: note = chemically synthesized
  source 1..22: mol_type = other DNA
cttgatttatataaacaaaaaa

SEQ ID NO: 43405 - DNA, 22 bp, synthetic construct
  misc_feature 1..22: note = chemically synthesized
  source 1..22: mol_type = other DNA
gatttatataaacaaaaaactg

SEQ ID NO: 43406 - DNA, 22 bp, synthetic construct
  misc_feature 1..22: note = chemically synthesized
  source 1..22: mol_type = other DNA
atttatataaacaaaaaactgc

SEQ ID NO: 43407 - DNA, 22 bp, synthetic construct
  misc_feature 1..22: note = chemically synthesized
  source 1..22: mol_type = other DNA
atataaacaaaaaactgccagg

SEQ ID NO: 43408 - DNA, 22 bp, synthetic construct
  misc_feature 1..22: note = chemically synthesized
  source 1..22: mol_type = other DNA
tataaacaaaaaactgccaggt

SEQ ID NO: 43409 - DNA, 22 bp, synthetic construct
  misc_feature 1..22: note = chemically synthesized
  source 1..22: mol_type = other DNA
ccaggtagaatggactaaagac

SEQ ID NO: 43410 - DNA, 22 bp, synthetic construct
  misc_feature 1..22: note = chemically synthesized
  source 1..22: mol_type = other DNA
aagactaatctgaattataaaa

SEQ ID NO: 43411 - DNA, 22 bp, synthetic construct
  misc_feature 1..22: note = chemically synthesized
  source 1..22: mol_type = other DNA
atctgaattataaaaacagaga

SEQ ID NO: 43412 - DNA, 22 bp, synthetic construct
  misc_feature 1..22: note = chemically synthesized
  source 1..22: mol_type = other DNA
aattataaaaacagagaatcat

SEQ ID NO: 43413 - DNA, 22 bp, synthetic construct
  misc_feature 1..22: note = chemically synthesized
  source 1..22: mol_type = other DNA
taaaaacagagaatcatgggcc

SEQ ID NO: 43414 - DNA, 22 bp, synthetic construct
  misc_feature 1..22: note = chemically synthesized
  source 1..22: mol_type = other DNA
aatcaatttccagactcgaacc

SEQ ID NO: 43415 - DNA, 22 bp, synthetic construct
  misc_feature 1..22: note = chemically synthesized
  source 1..22: mol_type = other DNA
ccagactcgaacctgttacagt

SEQ ID NO: 43416 - DNA, 22 bp, synthetic construct
  misc_feature 1..22: note = chemically synthesized
  source 1..22: mol_type = other DNA
cagactcgaacctgttacagtt

SEQ ID NO: 43417 - DNA, 22 bp, synthetic construct
  misc_feature 1..22: note = chemically synthesized
  source 1..22: mol_type = other DNA
gaacctgttacagttccagaac

SEQ ID NO: 43418 - DNA, 22 bp, synthetic construct
  misc_feature 1..22: note = chemically synthesized
  source 1..22: mol_type = other DNA
ttacagttccagaacccactga

SEQ ID NO: 43419 - DNA, 22 bp, synthetic construct
  misc_feature 1..22: note = chemically synthesized
  source 1..22: mol_type = other DNA
cagttccagaacccactgaatg

SEQ ID NO: 43420 - DNA, 22 bp, synthetic construct
  misc_feature 1..22: note = chemically synthesized
  source 1..22: mol_type = other DNA
cagaacccactgaatgaagggg

SEQ ID NO: 43421 - DNA, 22 bp, synthetic construct
  misc_feature 1..22: note = chemically synthesized
  source 1..22: mol_type = other DNA
aatgaaggggaggctggatccc

SEQ ID NO: 43422 - DNA, 22 bp, synthetic construct
  misc_feature 1..22: note = chemically synthesized
  source 1..22: mol_type = other DNA
gatccccttgaggaaggacacc

SEQ ID NO: 43423 - DNA, 22 bp, synthetic construct
  misc_feature 1..22: note = chemically synthesized
  source 1..22: mol_type = other DNA
gaggaaggacaccactaggcta

SEQ ID NO: 43424 - DNA, 22 bp, synthetic construct
  misc_feature 1..22: note = chemically synthesized
  source 1..22: mol_type = other DNA
aggaaggacaccactaggctac

SEQ ID NO: 43425 - DNA, 22 bp, synthetic construct
  misc_feature 1..22: note = chemically synthesized
  source 1..22: mol_type = other DNA
ggctactgacaacttatgctgt

SEQ ID NO: 43426 - DNA, 22 bp, synthetic construct
  misc_feature 1..22: note = chemically synthesized
  source 1..22: mol_type = other DNA
ctgacaacttatgctgttactc

SEQ ID NO: 43427 - DNA, 22 bp, synthetic construct
  misc_feature 1..22: note = chemically synthesized
  source 1..22: mol_type = other DNA
acaacttatgctgttactcttt

SEQ ID NO: 43428 - DNA, 22 bp, synthetic construct
  misc_feature 1..22: note = chemically synthesized
  source 1..22: mol_type = other DNA
atgctgttactctttctcccat

SEQ ID NO: 43429 - DNA, 22 bp, synthetic construct
  misc_feature 1..22: note = chemically synthesized
  source 1..22: mol_type = other DNA
tgctgttactctttctcccatc

SEQ ID NO: 43430 - DNA, 22 bp, synthetic construct
  misc_feature 1..22: note = chemically synthesized
  source 1..22: mol_type = other DNA
ttactctttctcccatccttcc

SEQ ID NO: 43431 - DNA, 22 bp, synthetic construct
  misc_feature 1..22: note = chemically synthesized
  source 1..22: mol_type = other DNA
ctctttctcccatccttcccta

SEQ ID NO: 43432 - DNA, 22 bp, synthetic construct
  misc_feature 1..22: note = chemically synthesized
  source 1..22: mol_type = other DNA
tttctcccatccttccctaagg

SEQ ID NO: 43433 - DNA, 22 bp, synthetic construct
  misc_feature 1..22: note = chemically synthesized
  source 1..22: mol_type = other DNA
tctcccatccttccctaaggag

SEQ ID NO: 43434 - DNA, 22 bp, synthetic construct
  misc_feature 1..22: note = chemically synthesized
  source 1..22: mol_type = other DNA
ctcccatccttccctaaggaga

SEQ ID NO: 43435 - DNA, 22 bp, synthetic construct
  misc_feature 1..22: note = chemically synthesized
  source 1..22: mol_type = other DNA
tcccatccttccctaaggagac

SEQ ID NO: 43436 - DNA, 22 bp, synthetic construct
  misc_feature 1..22: note = chemically synthesized
  source 1..22: mol_type = other DNA
ccatccttccctaaggagacct

SEQ ID NO: 43437 - DNA, 22 bp, synthetic construct
  misc_feature 1..22: note = chemically synthesized
  source 1..22: mol_type = other DNA
ccctaaggagacctctggcctt

SEQ ID NO: 43438 - DNA, 22 bp, synthetic construct
  misc_feature 1..22: note = chemically synthesized
  source 1..22: mol_type = other DNA
cctaaggagacctctggccttt

SEQ ID NO: 43439 - DNA, 22 bp, synthetic construct
  misc_feature 1..22: note = chemically synthesized
  source 1..22: mol_type = other DNA
aggagacctctggccttttacc

SEQ ID NO: 43440 - DNA, 22 bp, synthetic construct
  misc_feature 1..22: note = chemically synthesized
  source 1..22: mol_type = other DNA
tggccttttaccagggtaactg

SEQ ID NO: 43441 - DNA, 22 bp, synthetic construct
  misc_feature 1..22: note = chemically synthesized
  source 1..22: mol_type = other DNA
gccttttaccagggtaactgtg

SEQ ID NO: 43442 - DNA, 22 bp, synthetic construct
  misc_feature 1..22: note = chemically synthesized
  source 1..22: mol_type = other DNA
ttaccagggtaactgtgtgtac

SEQ ID NO: 43443 - DNA, 22 bp, synthetic construct
  misc_feature 1..22: note = chemically synthesized
  source 1..22: mol_type = other DNA
taccagggtaactgtgtgtact

SEQ ID NO: 43444 - DNA, 22 bp, synthetic construct
  misc_feature 1..22: note = chemically synthesized
  source 1..22: mol_type = other DNA
accagggtaactgtgtgtactg

SEQ ID NO: 43445 - DNA, 22 bp, synthetic construct
  misc_feature 1..22: note = chemically synthesized
  source 1..22: mol_type = other DNA
ccagggtaactgtgtgtactgg

SEQ ID NO: 43446 - DNA, 22 bp, synthetic construct
  misc_feature 1..22: note = chemically synthesized
  source 1..22: mol_type = other DNA
tgtgtactggagaaagggaagt

SEQ ID NO: 43447 - DNA, 22 bp, synthetic construct
  misc_feature 1..22: note = chemically synthesized
  source 1..22: mol_type = other DNA
gagaaagggaagtaatgagaca

SEQ ID NO: 43448 - DNA, 22 bp, synthetic construct
  misc_feature 1..22: note = chemically synthesized
  source 1..22: mol_type = other DNA
cagaaagtactggacactggct

SEQ ID NO: 43449 - DNA, 22 bp, synthetic construct
  misc_feature 1..22: note = chemically synthesized
  source 1..22: mol_type = other DNA
agaaagtactggacactggctc

SEQ ID NO: 43450 - DNA, 22 bp, synthetic construct
  misc_feature 1..22: note = chemically synthesized
  source 1..22: mol_type = other DNA
gacactggctctgagctgacgt

SEQ ID NO: 43451 - DNA, 22 bp, synthetic construct
  misc_feature 1..22: note = chemically synthesized
  source 1..22: mol_type = other DNA
gctctgagctgacgttgattcc

SEQ ID NO: 43452 - DNA, 22 bp, synthetic construct
  misc_feature 1..22: note = chemically synthesized
  source 1..22: mol_type = other DNA
tgagctgacgttgattccaggg

SEQ ID NO: 43453 - DNA, 22 bp, synthetic construct
  misc_feature 1..22: note = chemically synthesized
  source 1..22: mol_type = other DNA
agctgacgttgattccagggta

SEQ ID NO: 43454 - DNA, 22 bp, synthetic construct
  misc_feature 1..22: note = chemically synthesized
  source 1..22: mol_type = other DNA
acgttgattccagggtacccaa

SEQ ID NO: 43455 - DNA, 22 bp, synthetic construct
  misc_feature 1..22: note = chemically synthesized
  source 1..22: mol_type = other DNA
attccagggtacccaaaacgtt

SEQ ID NO: 43456 - DNA, 22 bp, synthetic construct
  misc_feature 1..22: note = chemically synthesized
  source 1..22: mol_type = other DNA
cagggtacccaaaacgttattg

SEQ ID NO: 43457 - DNA, 22 bp, synthetic construct
  misc_feature 1..22: note = chemically synthesized
  source 1..22: mol_type = other DNA
ttgtggttccccagttaaagta

SEQ ID NO: 43458 - DNA, 22 bp, synthetic construct
  misc_feature 1..22: note = chemically synthesized
  source 1..22: mol_type = other DNA
tggttccccagttaaagtaggg

SEQ ID NO: 43459 - DNA, 22 bp, synthetic construct
  misc_feature 1..22: note = chemically synthesized
  source 1..22: mol_type = other DNA
cccagttaaagtaggggcttat

SEQ ID NO: 43460 - DNA, 22 bp, synthetic construct
  misc_feature 1..22: note = chemically synthesized
  source 1..22: mol_type = other DNA
aagtaggggcttatggaggtta

SEQ ID NO: 43461 - DNA, 22 bp, synthetic construct
  misc_feature 1..22: note = chemically synthesized
  source 1..22: mol_type = other DNA
atggaggttaggtaattaatgg

SEQ ID NO: 43462 - DNA, 22 bp, synthetic construct
  misc_feature 1..22: note = chemically synthesized
  source 1..22: mol_type = other DNA
tggaggttaggtaattaatgga

SEQ ID NO: 43463 - DNA, 22 bp, synthetic construct
  misc_feature 1..22: note = chemically synthesized
  source 1..22: mol_type = other DNA
ggtaattaatggagttttagct

SEQ ID NO: 43464 - DNA, 22 bp, synthetic construct
  misc_feature 1..22: note = chemically synthesized
  source 1..22: mol_type = other DNA
atggagttttagctcatttctg

SEQ ID NO: 43465 - DNA, 22 bp, synthetic construct
  misc_feature 1..22: note = chemically synthesized
  source 1..22: mol_type = other DNA
tagctcatttctgacttacagt

SEQ ID NO: 43466 - DNA, 22 bp, synthetic construct
  misc_feature 1..22: note = chemically synthesized
  source 1..22: mol_type = other DNA
agctcatttctgacttacagtg

SEQ ID NO: 43467 - DNA, 22 bp, synthetic construct
  misc_feature 1..22: note = chemically synthesized
  source 1..22: mol_type = other DNA
gctcatttctgacttacagtgg

SEQ ID NO: 43468 - DNA, 22 bp, synthetic construct
  misc_feature 1..22: note = chemically synthesized
  source 1..22: mol_type = other DNA
atttctgacttacagtggttcc

SEQ ID NO: 43469 - DNA, 22 bp, synthetic construct
  misc_feature 1..22: note = chemically synthesized
  source 1..22: mol_type = other DNA
ctgacttacagtggttccagtg

SEQ ID NO: 43470 - DNA, 22 bp, synthetic construct
  misc_feature 1..22: note = chemically synthesized
  source 1..22: mol_type = other DNA
tgacttacagtggttccagtgg

SEQ ID NO: 43471 - DNA, 22 bp, synthetic construct
  misc_feature 1..22: note = chemically synthesized
  source 1..22: mol_type = other DNA
acttacagtggttccagtgggt

SEQ ID NO: 43472 - DNA, 22 bp, synthetic construct
  misc_feature 1..22: note = chemically synthesized
  source 1..22: mol_type = other DNA
acagtggttccagtgggtccct

SEQ ID NO: 43473 - DNA, 22 bp, synthetic construct
  misc_feature 1..22: note = chemically synthesized
  source 1..22: mol_type = other DNA
cagtggttccagtgggtccctg

SEQ ID NO: 43474 - DNA, 22 bp, synthetic construct
  misc_feature 1..22: note = chemically synthesized
  source 1..22: mol_type = other DNA
cagtgggtccctggacttatcc

SEQ ID NO: 43475 - DNA, 22 bp, synthetic construct
  misc_feature 1..22: note = chemically synthesized
  source 1..22: mol_type = other DNA
gacttatcctctggtcattttc

SEQ ID NO: 43476 - DNA, 22 bp, synthetic construct
  misc_feature 1..22: note = chemically synthesized
  source 1..22: mol_type = other DNA
atcctctggtcattttcccagt

SEQ ID NO: 43477 - DNA, 22 bp, synthetic construct
  misc_feature 1..22: note = chemically synthesized
  source 1..22: mol_type = other DNA
tcctctggtcattttcccagtg

SEQ ID NO: 43478 - DNA, 22 bp, synthetic construct
  misc_feature 1..22: note = chemically synthesized
  source 1..22: mol_type = other DNA
tggtcattttcccagtgccaaa

SEQ ID NO: 43479 - DNA, 22 bp, synthetic construct
  misc_feature 1..22: note = chemically synthesized
  source 1..22: mol_type = other DNA
gtcattttcccagtgccaaaat

SEQ ID NO: 43480 - DNA, 22 bp, synthetic construct
  misc_feature 1..22: note = chemically synthesized
  source 1..22: mol_type = other DNA
tcccagtgccaaaatgcataat

SEQ ID NO: 43481 - DNA, 22 bp, synthetic construct
  misc_feature 1..22: note = chemically synthesized
  source 1..22: mol_type = other DNA
cccagtgccaaaatgcataatt

SEQ ID NO: 43482 - DNA, 22 bp, synthetic construct
  misc_feature 1..22: note = chemically synthesized
  source 1..22: mol_type = other DNA
ccagtgccaaaatgcataattt

SEQ ID NO: 43483 - DNA, 22 bp, synthetic construct
  misc_feature 1..22: note = chemically synthesized
  source 1..22: mol_type = other DNA
gtatagacatacttattagctg

SEQ ID NO: 43484 - DNA, 22 bp, synthetic construct
  misc_feature 1..22: note = chemically synthesized
  source 1..22: mol_type = other DNA
tatagacatacttattagctgg

SEQ ID NO: 43485 - DNA, 22 bp, synthetic construct
  misc_feature 1..22: note = chemically synthesized
  source 1..22: mol_type = other DNA
attagctggcagaaatgccaca

SEQ ID NO: 43486 - DNA, 22 bp, synthetic construct
  misc_feature 1..22: note = chemically synthesized
  source 1..22: mol_type = other DNA
ttagctggcagaaatgccacat

SEQ ID NO: 43487 - DNA, 22 bp, synthetic construct
  misc_feature 1..22: note = chemically synthesized
  source 1..22: mol_type = other DNA
gctggcagaaatgccacattgg

SEQ ID NO: 43488 - DNA, 22 bp, synthetic construct
  misc_feature 1..22: note = chemically synthesized
  source 1..22: mol_type = other DNA
gcagaaatgccacattggctcc

SEQ ID NO: 43489 - DNA, 22 bp, synthetic construct
  misc_feature 1..22: note = chemically synthesized
  source 1..22: mol_type = other DNA
gctccctgactggtaggatgag

SEQ ID NO: 43490 - DNA, 22 bp, synthetic construct
  misc_feature 1..22: note = chemically synthesized
  source 1..22: mol_type = other DNA
cctgactggtaggatgagggct

SEQ ID NO: 43491 - DNA, 22 bp, synthetic construct
  misc_feature 1..22: note = chemically synthesized
  source 1..22: mol_type = other DNA
actggtaggatgagggctatta

SEQ ID NO: 43492 - DNA, 22 bp, synthetic construct
  misc_feature 1..22: note = chemically synthesized
  source 1..22: mol_type = other DNA
gtaggatgagggctattatggt

SEQ ID NO: 43493 - DNA, 22 bp, synthetic construct
  misc_feature 1..22: note = chemically synthesized
  source 1..22: mol_type = other DNA
ttatggtgggaaaggccaaaca

SEQ ID NO: 43494 - DNA, 22 bp, synthetic construct
  misc_feature 1..22: note = chemically synthesized
  source 1..22: mol_type = other DNA
tggtgggaaaggccaaacagaa

SEQ ID NO: 43495 - DNA, 22 bp, synthetic construct
  misc_feature 1..22: note = chemically synthesized
  source 1..22: mol_type = other DNA
gagctgtctctacctagaaaaa

SEQ ID NO: 43496 - DNA, 22 bp, synthetic construct
  misc_feature 1..22: note = chemically synthesized
  source 1..22: mol_type = other DNA
tctctacctagaaaaataaaaa

SEQ ID NO: 43497 - DNA, 22 bp, synthetic construct
  misc_feature 1..22: note = chemically synthesized
  source 1..22: mol_type = other DNA
tacctagaaaaataaaaaaatc

SEQ ID NO: 43498 - DNA, 22 bp, synthetic construct
  misc_feature 1..22: note = chemically synthesized
  source 1..22: mol_type = other DNA
cctagaaaaataaaaaaatcaa

SEQ ID NO: 43499 - DNA, 22 bp, synthetic construct
  misc_feature 1..22: note = chemically synthesized
  source 1..22: mol_type = other DNA
gaaaaataaaaaaatcaaaaac

SEQ ID NO: 43500 - DNA, 22 bp, synthetic construct
  misc_feature 1..22: note = chemically synthesized
  source 1..22: mol_type = other DNA
gagggactgaagtgattagtgt

SEQ ID NO: 43501 - DNA, 22 bp, synthetic construct
  misc_feature 1..22: note = chemically synthesized
  source 1..22: mol_type = other DNA
aagtgattagtgtcaccatcaa

SEQ ID NO: 43502 - DNA, 22 bp, synthetic construct
  misc_feature 1..22: note = chemically synthesized
  source 1..22: mol_type = other DNA
gtgtcaccatcaaggacttgaa

SEQ ID NO: 43503 - DNA, 22 bp, synthetic construct
  misc_feature 1..22: note = chemically synthesized
  source 1..22: mol_type = other DNA
gaaagacgcaggggtggtgatt

SEQ ID NO: 43504 - DNA, 22 bp, synthetic construct
  misc_feature 1..22: note = chemically synthesized
  source 1..22: mol_type = other DNA
aaagacgcaggggtggtgattc

SEQ ID NO: 43505 - DNA, 22 bp, synthetic construct
  misc_feature 1..22: note = chemically synthesized
  source 1..22: mol_type = other DNA
ccaccacatccctgttcaactc

SEQ ID NO: 43506 - DNA, 22 bp, synthetic construct
  misc_feature 1..22: note = chemically synthesized
  source 1..22: mol_type = other DNA
ttcaactctcccatttgacctg

SEQ ID NO: 43507 - DNA, 22 bp, synthetic construct
  misc_feature 1..22: note = chemically synthesized
  source 1..22: mol_type = other DNA
aactctcccatttgacctgtgc

SEQ ID NO: 43508 - DNA, 22 bp, synthetic construct
  misc_feature 1..22: note = chemically synthesized
  source 1..22: mol_type = other DNA
tcccatttgacctgtgcagagg

SEQ ID NO: 43509 - DNA, 22 bp, synthetic construct
  misc_feature 1..22: note = chemically synthesized
  source 1..22: mol_type = other DNA
ccatttgacctgtgcagaggac

SEQ ID NO: 43510 - DNA, 22 bp, synthetic construct
  misc_feature 1..22: note = chemically synthesized
  source 1..22: mol_type = other DNA
gacctgtgcagaggacagatgg

SEQ ID NO: 43511 - DNA, 22 bp, synthetic construct
  misc_feature 1..22: note = chemically synthesized
  source 1..22: mol_type = other DNA
acctgtgcagaggacagatgga

SEQ ID NO: 43512 - DNA, 22 bp, synthetic construct
  misc_feature 1..22: note = chemically synthesized
  source 1..22: mol_type = other DNA
tgcagaggacagatggatcttg

SEQ ID NO: 43513 - DNA, 22 bp, synthetic construct
  misc_feature 1..22: note = chemically synthesized
  source 1..22: mol_type = other DNA
ggaaaatgatggtggattattt

SEQ ID NO: 43514 - DNA, 22 bp, synthetic construct
  misc_feature 1..22: note = chemically synthesized
  source 1..22: mol_type = other DNA
gaaaatgatggtggattatttt

SEQ ID NO: 43515 - DNA, 22 bp, synthetic construct
  misc_feature 1..22: note = chemically synthesized
  source 1..22: mol_type = other DNA
ttttaagcttaaccaagtggtg

SEQ ID NO: 43516 - DNA, 22 bp, synthetic construct
  misc_feature 1..22: note = chemically synthesized
  source 1..22: mol_type = other DNA
taagcttaaccaagtggtgact

SEQ ID NO: 43517 - DNA, 22 bp, synthetic construct
  misc_feature 1..22: note = chemically synthesized
  source 1..22: mol_type = other DNA
aagcttaaccaagtggtgactc

SEQ ID NO: 43518 - DNA, 22 bp, synthetic construct
  misc_feature 1..22: note = chemically synthesized
  source 1..22: mol_type = other DNA
agcttaaccaagtggtgactcc

SEQ ID NO: 43519 - DNA, 22 bp, synthetic construct
  misc_feature 1..22: note = chemically synthesized
  source 1..22: mol_type = other DNA
aaccaagtggtgactccaattg

SEQ ID NO: 43520 - DNA, 22 bp, synthetic construct
  misc_feature 1..22: note = chemically synthesized
  source 1..22: mol_type = other DNA
accaagtggtgactccaattgc

SEQ ID NO: 43521 - DNA, 22 bp, synthetic construct
  misc_feature 1..22: note = chemically synthesized
  source 1..22: mol_type = other DNA
caattgcagctgctctaccagt

SEQ ID NO: 43522 - DNA, 22 bp, synthetic construct
  misc_feature 1..22: note = chemically synthesized
  source 1..22: mol_type = other DNA
cagctgctctaccagttgtggt

SEQ ID NO: 43523 - DNA, 22 bp, synthetic construct
  misc_feature 1..22: note = chemically synthesized
  source 1..22: mol_type = other DNA
ctctaccagttgtggttttgtt

SEQ ID NO: 43524 - DNA, 22 bp, synthetic construct
  misc_feature 1..22: note = chemically synthesized
  source 1..22: mol_type = other DNA
taccagttgtggttttgttgct

SEQ ID NO: 43525 - DNA, 22 bp, synthetic construct
  misc_feature 1..22: note = chemically synthesized
  source 1..22: mol_type = other DNA
ccagttgtggttttgttgcttg

SEQ ID NO: 43526 - DNA, 22 bp, synthetic construct
  misc_feature 1..22: note = chemically synthesized
  source 1..22: mol_type = other DNA
tggttttgttgcttgagcaaat

SEQ ID NO: 43527 - DNA, 22 bp, synthetic construct
  misc_feature 1..22: note = chemically synthesized
  source 1..22: mol_type = other DNA
tgttgcttgagcaaattaacac

SEQ ID NO: 43528 - DNA, 22 bp, synthetic construct
  misc_feature 1..22: note = chemically synthesized
  source 1..22: mol_type = other DNA
gttgcttgagcaaattaacaca

SEQ ID NO: 43529 - DNA, 22 bp, synthetic construct
  misc_feature 1..22: note = chemically synthesized
  source 1..22: mol_type = other DNA
ttgcttgagcaaattaacacat

SEQ ID NO: 43530 - DNA, 22 bp, synthetic construct
  misc_feature 1..22: note = chemically synthesized
  source 1..22: mol_type = other DNA
cttgagcaaattaacacatctc

SEQ ID NO: 43531 - DNA, 22 bp, synthetic construct
  misc_feature 1..22: note = chemically synthesized
  source 1..22: mol_type = other DNA
gagcaaattaacacatctcctg

SEQ ID NO: 43532 - DNA, 22 bp, synthetic construct
  misc_feature 1..22: note = chemically synthesized
  source 1..22: mol_type = other DNA
agcaaattaacacatctcctgg

SEQ ID NO: 43533 - DNA, 22 bp, synthetic construct
  misc_feature 1..22: note = chemically synthesized
  source 1..22: mol_type = other DNA
acacatctcctggtgcctggta

SEQ ID NO: 43534 - DNA, 22 bp, synthetic construct
  misc_feature 1..22: note = chemically synthesized
  source 1..22: mol_type = other DNA
ctggtgcctggtatgcagccat

SEQ ID NO: 43535 - DNA, 22 bp, synthetic construct
  misc_feature 1..22: note = chemically synthesized
  source 1..22: mol_type = other DNA
gtgcctggtatgcagccattgg

SEQ ID NO: 43536 - DNA, 22 bp, synthetic construct
  misc_feature 1..22: note = chemically synthesized
  source 1..22: mol_type = other DNA
gtatgcagccattggcttggca

SEQ ID NO: 43537 - DNA, 22 bp, synthetic construct
  misc_feature 1..22: note = chemically synthesized
  source 1..22: mol_type = other DNA
gcttggcaagtggctttttctc

SEQ ID NO: 43538 - DNA, 22 bp, synthetic construct
  misc_feature 1..22: note = chemically synthesized
  source 1..22: mol_type = other DNA
ggcaagtggctttttctccatt

SEQ ID NO: 43539 - DNA, 22 bp, synthetic construct
  misc_feature 1..22: note = chemically synthesized
  source 1..22: mol_type = other DNA
gcaagtggctttttctccattc

SEQ ID NO: 43540 - DNA, 22 bp, synthetic construct
  misc_feature 1..22: note = chemically synthesized
  source 1..22: mol_type = other DNA
tttctccattcctgtccataag

SEQ ID NO: 43541 - DNA, 22 bp, synthetic construct
  misc_feature 1..22: note = chemically synthesized
  source 1..22: mol_type = other DNA
ttctccattcctgtccataaga

SEQ ID NO: 43542 - DNA, 22 bp, synthetic construct
  misc_feature 1..22: note = chemically synthesized
  source 1..22: mol_type = other DNA
tctccattcctgtccataagac

SEQ ID NO: 43543 - DNA, 22 bp, synthetic construct
  misc_feature 1..22: note = chemically synthesized
  source 1..22: mol_type = other DNA
ctccattcctgtccataagacc

SEQ ID NO: 43544 - DNA, 22 bp, synthetic construct
  misc_feature 1..22: note = chemically synthesized
  source 1..22: mol_type = other DNA
tccattcctgtccataagaccc

SEQ ID NO: 43545 - DNA, 22 bp, synthetic construct
  misc_feature 1..22: note = chemically synthesized
  source 1..22: mol_type = other DNA
cattcctgtccataagacccac

SEQ ID NO: 43546 - DNA, 22 bp, synthetic construct
  misc_feature 1..22: note = chemically synthesized
  source 1..22: mol_type = other DNA
ctgtccataagacccaccagaa

SEQ ID NO: 43547 - DNA, 22 bp, synthetic construct
  misc_feature 1..22: note = chemically synthesized
  source 1..22: mol_type = other DNA
tccataagacccaccagaagca

SEQ ID NO: 43548 - DNA, 22 bp, synthetic construct
  misc_feature 1..22: note = chemically synthesized
  source 1..22: mol_type = other DNA
gccttcagctgacaaggccagc

SEQ ID NO: 43549 - DNA, 22 bp, synthetic construct
  misc_feature 1..22: note = chemically synthesized
  source 1..22: mol_type = other DNA
ccttcagctgacaaggccagca

SEQ ID NO: 43550 - DNA, 22 bp, synthetic construct
  misc_feature 1..22: note = chemically synthesized
  source 1..22: mol_type = other DNA
cagctgacaaggccagcattat

SEQ ID NO: 43551 - DNA, 22 bp, synthetic construct
  misc_feature 1..22: note = chemically synthesized
  source 1..22: mol_type = other DNA
agctgacaaggccagcattata

SEQ ID NO: 43552 - DNA, 22 bp, synthetic construct
  misc_feature 1..22: note = chemically synthesized
  source 1..22: mol_type = other DNA
acaaggccagcattataccttt

SEQ ID NO: 43553 - DNA, 22 bp, synthetic construct
  misc_feature 1..22: note = chemically synthesized
  source 1..22: mol_type = other DNA
tacctttaccaccctacctcag

SEQ ID NO: 43554 - DNA, 22 bp, synthetic construct
  misc_feature 1..22: note = chemically synthesized
  source 1..22: mol_type = other DNA
taccaccctacctcaggggtgt

SEQ ID NO: 43555 - DNA, 22 bp, synthetic construct
  misc_feature 1..22: note = chemically synthesized
  source 1..22: mol_type = other DNA
accaccctacctcaggggtgta

SEQ ID NO: 43556 - DNA, 22 bp, synthetic construct
  misc_feature 1..22: note = chemically synthesized
  source 1..22: mol_type = other DNA
ccaccctacctcaggggtgtat

SEQ ID NO: 43557 - DNA, 22 bp, synthetic construct
  misc_feature 1..22: note = chemically synthesized
  source 1..22: mol_type = other DNA
cctcaggggtgtatcaactctc

SEQ ID NO: 43558 - DNA, 22 bp, synthetic construct
  misc_feature 1..22: note = chemically synthesized
  source 1..22: mol_type = other DNA
aggggtgtatcaactctccagc

SEQ ID NO: 43559 - DNA, 22 bp, synthetic construct
  misc_feature 1..22: note = chemically synthesized
  source 1..22: mol_type = other DNA
tccagctttgtgtcataatctt

SEQ ID NO: 43560 - DNA, 22 bp, synthetic construct
  misc_feature 1..22: note = chemically synthesized
  source 1..22: mol_type = other DNA
cagctttgtgtcataatcttat

SEQ ID NO: 43561 - DNA, 22 bp, synthetic construct
  misc_feature 1..22: note = chemically synthesized
  source 1..22: mol_type = other DNA
tgtgtcataatcttatttggag

SEQ ID NO: 43562 - DNA, 22 bp, synthetic construct
  misc_feature 1..22: note = chemically synthesized
  source 1..22: mol_type = other DNA
gtgtcataatcttatttggaga

SEQ ID NO: 43563 - DNA, 22 bp, synthetic construct
  misc_feature 1..22: note = chemically synthesized
  source 1..22: mol_type = other DNA
tgtcataatcttatttggagag

SEQ ID NO: 43564 - DNA, 22 bp, synthetic construct
  misc_feature 1..22: note = chemically synthesized
  source 1..22: mol_type = other DNA
atttggagagaccttgctcgct

SEQ ID NO: 43565 - DNA, 22 bp, synthetic construct
  misc_feature 1..22: note = chemically synthesized
  source 1..22: mol_type = other DNA
tttggagagaccttgctcgctt

SEQ ID NO: 43566 - DNA, 22 bp, synthetic construct
  misc_feature 1..22: note = chemically synthesized
  source 1..22: mol_type = other DNA
ggagagaccttgctcgcttttc

SEQ ID NO: 43567 - DNA, 22 bp, synthetic construct
  misc_feature 1..22: note = chemically synthesized
  source 1..22: mol_type = other DNA
gagagaccttgctcgcttttca

SEQ ID NO: 43568 - DNA, 22 bp, synthetic construct
  misc_feature 1..22: note = chemically synthesized
  source 1..22: mol_type = other DNA
gctcgcttttcacttccacgag

SEQ ID NO: 43569 - DNA, 22 bp, synthetic construct
  misc_feature 1..22: note = chemically synthesized
  source 1..22: mol_type = other DNA
ctcgcttttcacttccacgaga

SEQ ID NO: 43570 - DNA, 22 bp, synthetic construct
  misc_feature 1..22: note = chemically synthesized
  source 1..22: mol_type = other DNA
gcttttcacttccacgagatat

SEQ ID NO: 43571 - DNA, 22 bp, synthetic construct
  misc_feature 1..22: note = chemically synthesized
  source 1..22: mol_type = other DNA
ttcacttccacgagatataaca

SEQ ID NO: 43572 - DNA, 22 bp, synthetic construct
  misc_feature 1..22: note = chemically synthesized
  source 1..22: mol_type = other DNA
tcacttccacgagatataacac

SEQ ID NO: 43573 - DNA, 22 bp, synthetic construct
  misc_feature 1..22: note = chemically synthesized
  source 1..22: mol_type = other DNA
cacttccacgagatataacact

SEQ ID NO: 43574 - DNA, 22 bp, synthetic construct
  misc_feature 1..22: note = chemically synthesized
  source 1..22: mol_type = other DNA
acttccacgagatataacactg

SEQ ID NO: 43575 - DNA, 22 bp, synthetic construct
  misc_feature 1..22: note = chemically synthesized
  source 1..22: mol_type = other DNA
ccacgagatataacactggtcc

SEQ ID NO: 43576 - DNA, 22 bp, synthetic construct
  misc_feature 1..22: note = chemically synthesized
  source 1..22: mol_type = other DNA
cacgagatataacactggtcca

SEQ ID NO: 43577 - DNA, 22 bp, synthetic construct
  misc_feature 1..22: note = chemically synthesized
  source 1..22: mol_type = other DNA
gtccattacattcatgacatta

SEQ ID NO: 43578 - DNA, 22 bp, synthetic construct
  misc_feature 1..22: note = chemically synthesized
  source 1..22: mol_type = other DNA
cattcatgacattatgatgatt

SEQ ID NO: 43579 - DNA, 22 bp, synthetic construct
  misc_feature 1..22: note = chemically synthesized
  source 1..22: mol_type = other DNA
atgacattatgatgattggata

SEQ ID NO: 43580 - DNA, 22 bp, synthetic construct
  misc_feature 1..22: note = chemically synthesized
  source 1..22: mol_type = other DNA
tgatgattggatacagtgagca

SEQ ID NO: 43581 - DNA, 22 bp, synthetic construct
  misc_feature 1..22: note = chemically synthesized
  source 1..22: mol_type = other DNA
gatacagtgagcaagaagtagc

SEQ ID NO: 43582 - DNA, 22 bp, synthetic construct
  misc_feature 1..22: note = chemically synthesized
  source 1..22: mol_type = other DNA
aacttattggtgagacatttgt

SEQ ID NO: 43583 - DNA, 22 bp, synthetic construct
  misc_feature 1..22: note = chemically synthesized
  source 1..22: mol_type = other DNA
attggtgagacatttgtatgcc

SEQ ID NO: 43584 - DNA, 22 bp, synthetic construct
  misc_feature 1..22: note = chemically synthesized
  source 1..22: mol_type = other DNA
ttggtgagacatttgtatgcca

SEQ ID NO: 43585 - DNA, 22 bp, synthetic construct
  misc_feature 1..22: note = chemically synthesized
  source 1..22: mol_type = other DNA
gtgagacatttgtatgccagag

SEQ ID NO: 43586 - DNA, 22 bp, synthetic construct
  misc_feature 1..22: note = chemically synthesized
  source 1..22: mol_type = other DNA
gtatgccagaggatgggaaata

SEQ ID NO: 43587 - DNA, 22 bp, synthetic construct
  misc_feature 1..22: note = chemically synthesized
  source 1..22: mol_type = other DNA
tatgccagaggatgggaaataa

SEQ ID NO: 43588 - DNA, 22 bp, synthetic construct
  misc_feature 1..22: note = chemically synthesized
  source 1..22: mol_type = other DNA
aaatttagggactttctacctc

SEQ ID NO: 43589 - DNA, 22 bp, synthetic construct
  misc_feature 1..22: note = chemically synthesized
  source 1..22: mol_type = other DNA
agggactttctacctcggtaaa

SEQ ID NO: 43590 - DNA, 22 bp, synthetic construct
  misc_feature 1..22: note = chemically synthesized
  source 1..22: mol_type = other DNA
gggactttctacctcggtaaaa

SEQ ID NO: 43591 - DNA, 22 bp, synthetic construct
  misc_feature 1..22: note = chemically synthesized
  source 1..22: mol_type = other DNA
tctacctcggtaaaatttctag

SEQ ID NO: 43592 - DNA, 22 bp, synthetic construct
  misc_feature 1..22: note = chemically synthesized
  source 1..22: mol_type = other DNA
ctacctcggtaaaatttctagg

SEQ ID NO: 43593 - DNA, 22 bp, synthetic construct
  misc_feature 1..22: note = chemically synthesized
  source 1..22: mol_type = other DNA
tacctcggtaaaatttctaggg

SEQ ID NO: 43594 - DNA, 22 bp, synthetic construct
  misc_feature 1..22: note = chemically synthesized
  source 1..22: mol_type = other DNA
cctcggtaaaatttctagggtt

SEQ ID NO: 43595 - DNA, 22 bp, synthetic construct
  misc_feature 1..22: note = chemically synthesized
  source 1..22: mol_type = other DNA
ggtaaaatttctagggttccag

SEQ ID NO: 43596 - DNA, 22 bp, synthetic construct
  misc_feature 1..22: note = chemically synthesized
  source 1..22: mol_type = other DNA
ctagggttccagtggcatgaga

SEQ ID NO: 43597 - DNA, 22 bp, synthetic construct
  misc_feature 1..22: note = chemically synthesized
  source 1..22: mol_type = other DNA
tagggttccagtggcatgagac

SEQ ID NO: 43598 - DNA, 22 bp, synthetic construct
  misc_feature 1..22: note = chemically synthesized
  source 1..22: mol_type = other DNA
gggttccagtggcatgagacct

SEQ ID NO: 43599 - DNA, 22 bp, synthetic construct
  misc_feature 1..22: note = chemically synthesized
  source 1..22: mol_type = other DNA
cagtggcatgagacctatggag

SEQ ID NO: 43600 - DNA, 22 bp, synthetic construct
  misc_feature 1..22: note = chemically synthesized
  source 1..22: mol_type = other DNA
tggagatattccttctaaggtg

SEQ ID NO: 43601 - DNA, 22 bp, synthetic construct
  misc_feature 1..22: note = chemically synthesized
  source 1..22: mol_type = other DNA
cttctaaggtgaagcataactt

SEQ ID NO: 43602 - DNA, 22 bp, synthetic construct
  misc_feature 1..22: note = chemically synthesized
  source 1..22: mol_type = other DNA
ctaaggtgaagcataacttgct

SEQ ID NO: 43603 - DNA, 22 bp, synthetic construct
  misc_feature 1..22: note = chemically synthesized
  source 1..22: mol_type = other DNA
taaggtgaagcataacttgctg

SEQ ID NO: 43604 - DNA, 22 bp, synthetic construct
  misc_feature 1..22: note = chemically synthesized
  source 1..22: mol_type = other DNA
aggtgaagcataacttgctgcg

SEQ ID NO: 43605 - DNA, 22 bp, synthetic construct
  misc_feature 1..22: note = chemically synthesized
  source 1..22: mol_type = other DNA
gctgcgtttggcccctcttaca

SEQ ID NO: 43606 - DNA, 22 bp, synthetic construct
  misc_feature 1..22: note = chemically synthesized
  source 1..22: mol_type = other DNA
ctgcgtttggcccctcttacaa

SEQ ID NO: 43607 - DNA, 22 bp, synthetic construct
  misc_feature 1..22: note = chemically synthesized
  source 1..22: mol_type = other DNA
cgtttggcccctcttacaacca

SEQ ID NO: 43608 - DNA, 22 bp, synthetic construct
  misc_feature 1..22: note = chemically synthesized
  source 1..22: mol_type = other DNA
ggcccctcttacaaccaagaaa

SEQ ID NO: 43609 - DNA, 22 bp, synthetic construct
  misc_feature 1..22: note = chemically synthesized
  source 1..22: mol_type = other DNA
gcccctcttacaaccaagaaag

SEQ ID NO: 43610 - DNA, 22 bp, synthetic construct
  misc_feature 1..22: note = chemically synthesized
  source 1..22: mol_type = other DNA
ttacaaccaagaaagaggcaca

SEQ ID NO: 43611 - DNA, 22 bp, synthetic construct
  misc_feature 1..22: note = chemically synthesized
  source 1..22: mol_type = other DNA
acaaccaagaaagaggcacaat

SEQ ID NO: 43612 - DNA, 22 bp, synthetic construct
  misc_feature 1..22: note = chemically synthesized
  source 1..22: mol_type = other DNA
caaccaagaaagaggcacaatg

SEQ ID NO: 43613 - DNA, 22 bp, synthetic construct
  misc_feature 1..22: note = chemically synthesized
  source 1..22: mol_type = other DNA
gtgggcctatttggattttgga

SEQ ID NO: 43614 - DNA, 22 bp, synthetic construct
  misc_feature 1..22: note = chemically synthesized
  source 1..22: mol_type = other DNA
tttggattttggaggcaacaca

SEQ ID NO: 43615 - DNA, 22 bp, synthetic construct
  misc_feature 1..22: note = chemically synthesized
  source 1..22: mol_type = other DNA
ggattttggaggcaacacattc

SEQ ID NO: 43616 - DNA, 22 bp, synthetic construct
  misc_feature 1..22: note = chemically synthesized
  source 1..22: mol_type = other DNA
gattttggaggcaacacattcc

SEQ ID NO: 43617 - DNA, 22 bp, synthetic construct
  misc_feature 1..22: note = chemically synthesized
  source 1..22: mol_type = other DNA
tggaggcaacacattcctcgtt

SEQ ID NO: 43618 - DNA, 22 bp, synthetic construct
  misc_feature 1..22: note = chemically synthesized
  source 1..22: mol_type = other DNA
ggaggcaacacattcctcgttt

SEQ ID NO: 43619 - DNA, 22 bp, synthetic construct
  misc_feature 1..22: note = chemically synthesized
  source 1..22: mol_type = other DNA
gaggcaacacattcctcgtttg

SEQ ID NO: 43620 - DNA, 22 bp, synthetic construct
  misc_feature 1..22: note = chemically synthesized
  source 1..22: mol_type = other DNA
ctcgtttgggtgtgttactctg

SEQ ID NO: 43621 - DNA, 22 bp, synthetic construct
  misc_feature 1..22: note = chemically synthesized
  source 1..22: mol_type = other DNA
gtttgggtgtgttactctggcc

SEQ ID NO: 43622 - DNA, 22 bp, synthetic construct
  misc_feature 1..22: note = chemically synthesized
  source 1..22: mol_type = other DNA
gggtgtgttactctggcccatt

SEQ ID NO: 43623 - DNA, 22 bp, synthetic construct
  misc_feature 1..22: note = chemically synthesized
  source 1..22: mol_type = other DNA
ggtgtgttactctggcccattt

SEQ ID NO: 43624 - DNA, 22 bp, synthetic construct
  misc_feature 1..22: note = chemically synthesized
  source 1..22: mol_type = other DNA
ctctggcccatttatcgagtga

SEQ ID NO: 43625 - DNA, 22 bp, synthetic construct
  misc_feature 1..22: note = chemically synthesized
  source 1..22: mol_type = other DNA
tggcccatttatcgagtgacct

SEQ ID NO: 43626 - DNA, 22 bp, synthetic construct
  misc_feature 1..22: note = chemically synthesized
  source 1..22: mol_type = other DNA
gcccatttatcgagtgacctga

SEQ ID NO: 43627 - DNA, 22 bp, synthetic construct
  misc_feature 1..22: note = chemically synthesized
  source 1..22: mol_type = other DNA
atcgagtgacctgaaaggctgc

SEQ ID NO: 43628 - DNA, 22 bp, synthetic construct
  misc_feature 1..22: note = chemically synthesized
  source 1..22: mol_type = other DNA
tcgagtgacctgaaaggctgcc

SEQ ID NO: 43629 - DNA, 22 bp, synthetic construct
  misc_feature 1..22: note = chemically synthesized
  source 1..22: mol_type = other DNA
aaaggctgccagatttaagtgc

SEQ ID NO: 43630 - DNA, 22 bp, synthetic construct
  misc_feature 1..22: note = chemically synthesized
  source 1..22: mol_type = other DNA
ccagatttaagtgcagtctaga

SEQ ID NO: 43631 - DNA, 22 bp, synthetic construct
  misc_feature 1..22: note = chemically synthesized
  source 1..22: mol_type = other DNA
aagtgcagtctagaacaaaaga

SEQ ID NO: 43632 - DNA, 22 bp, synthetic construct
  misc_feature 1..22: note = chemically synthesized
  source 1..22: mol_type = other DNA
agtgcagtctagaacaaaagaa

SEQ ID NO: 43633 - DNA, 22 bp, synthetic construct
  misc_feature 1..22: note = chemically synthesized
  source 1..22: mol_type = other DNA
gaacaaaagaaggctctgaaac

SEQ ID NO: 43634 - DNA, 22 bp, synthetic construct
  misc_feature 1..22: note = chemically synthesized
  source 1..22: mol_type = other DNA
tgaaacaggtccaggctgctgt

SEQ ID NO: 43635 - DNA, 22 bp, synthetic construct
  misc_feature 1..22: note = chemically synthesized
  source 1..22: mol_type = other DNA
aaacaggtccaggctgctgtga

SEQ ID NO: 43636 - DNA, 22 bp, synthetic construct
  misc_feature 1..22: note = chemically synthesized
  source 1..22: mol_type = other DNA
ctgtgaaagctgctctgccatt

SEQ ID NO: 43637 - DNA, 22 bp, synthetic construct
  misc_feature 1..22: note = chemically synthesized
  source 1..22: mol_type = other DNA
tgaaagctgctctgccatttgg

SEQ ID NO: 43638 - DNA, 22 bp, synthetic construct
  misc_feature 1..22: note = chemically synthesized
  source 1..22: mol_type = other DNA
ctctgccatttgggccacatga

SEQ ID NO: 43639 - DNA, 22 bp, synthetic construct
  misc_feature 1..22: note = chemically synthesized
  source 1..22: mol_type = other DNA
tgccatttgggccacatgaccc

SEQ ID NO: 43640 - DNA, 22 bp, synthetic construct
  misc_feature 1..22: note = chemically synthesized
  source 1..22: mol_type = other DNA
ccatttgggccacatgaccccg

SEQ ID NO: 43641 - DNA, 22 bp, synthetic construct
  misc_feature 1..22: note = chemically synthesized
  source 1..22: mol_type = other DNA
gggccacatgaccccgcagatc

SEQ ID NO: 43642 - DNA, 22 bp, synthetic construct
  misc_feature 1..22: note = chemically synthesized
  source 1..22: mol_type = other DNA
ggccacatgaccccgcagatcc

SEQ ID NO: 43643 - DNA, 22 bp, synthetic construct
  misc_feature 1..22: note = chemically synthesized
  source 1..22: mol_type = other DNA
gaggtgtcagtggcagataggg

SEQ ID NO: 43644 - DNA, 22 bp, synthetic construct
  misc_feature 1..22: note = chemically synthesized
  source 1..22: mol_type = other DNA
aggtgtcagtggcagataggga

SEQ ID NO: 43645 - DNA, 22 bp, synthetic construct
  misc_feature 1..22: note = chemically synthesized
  source 1..22: mol_type = other DNA
tttggagcctttggcaggcccc

SEQ ID NO: 43646 - DNA, 22 bp, synthetic construct
  misc_feature 1..22: note = chemically synthesized
  source 1..22: mol_type = other DNA
ggagcctttggcaggcccccat

SEQ ID NO: 43647 - DNA, 22 bp, synthetic construct
  misc_feature 1..22: note = chemically synthesized
  source 1..22: mol_type = other DNA
gagcctttggcaggcccccata

SEQ ID NO: 43648 - DNA, 22 bp, synthetic construct
  misc_feature 1..22: note = chemically synthesized
  source 1..22: mol_type = other DNA
tggcaggcccccataggtgaat

SEQ ID NO: 43649 - DNA, 22 bp, synthetic construct
  misc_feature 1..22: note = chemically synthesized
  source 1..22: mol_type = other DNA
ggcaggcccccataggtgaatc

SEQ ID NO: 43650 - DNA, 22 bp, synthetic construct
  misc_feature 1..22: note = chemically synthesized
  source 1..22: mol_type = other DNA
gcaggcccccataggtgaatca

SEQ ID NO: 43651 - DNA, 22 bp, synthetic construct
  misc_feature 1..22: note = chemically synthesized
  source 1..22: mol_type = other DNA
taggattttggagcaaggccct

SEQ ID NO: 43652 - DNA, 22 bp, synthetic construct
  misc_feature 1..22: note = chemically synthesized
  source 1..22: mol_type = other DNA
ggattttggagcaaggccctgc

SEQ ID NO: 43653 - DNA, 22 bp, synthetic construct
  misc_feature 1..22: note = chemically synthesized
  source 1..22: mol_type = other DNA
tggagcaaggccctgccacttc

SEQ ID NO: 43654 - DNA, 22 bp, synthetic construct
  misc_feature 1..22: note = chemically synthesized
  source 1..22: mol_type = other DNA
ggagcaaggccctgccacttct

SEQ ID NO: 43655 - DNA, 22 bp, synthetic construct
  misc_feature 1..22: note = chemically synthesized
  source 1..22: mol_type = other DNA
gagcaaggccctgccacttctg

SEQ ID NO: 43656 - DNA, 22 bp, synthetic construct
  misc_feature 1..22: note = chemically synthesized
  source 1..22: mol_type = other DNA
ccacttctgcagataactactc

SEQ ID NO: 43657 - DNA, 22 bp, synthetic construct
  misc_feature 1..22: note = chemically synthesized
  source 1..22: mol_type = other DNA
ctgcagataactactctccttt

SEQ ID NO: 43658 - DNA, 22 bp, synthetic construct
  misc_feature 1..22: note = chemically synthesized
  source 1..22: mol_type = other DNA
tgcagataactactctcctttt

SEQ ID NO: 43659 - DNA, 22 bp, synthetic construct
  misc_feature 1..22: note = chemically synthesized
  source 1..22: mol_type = other DNA
cagataactactctccttttga

SEQ ID NO: 43660 - DNA, 22 bp, synthetic construct
  misc_feature 1..22: note = chemically synthesized
  source 1..22: mol_type = other DNA
ctctccttttgagagacagcta

SEQ ID NO: 43661 - DNA, 22 bp, synthetic construct
  misc_feature 1..22: note = chemically synthesized
  source 1..22: mol_type = other DNA
tccttttgagagacagctattg

SEQ ID NO: 43662 - DNA, 22 bp, synthetic construct
  misc_feature 1..22: note = chemically synthesized
  source 1..22: mol_type = other DNA
cttttgagagacagctattggt

SEQ ID NO: 43663 - DNA, 22 bp, synthetic construct
  misc_feature 1..22: note = chemically synthesized
  source 1..22: mol_type = other DNA
ttgagagacagctattggtctg

SEQ ID NO: 43664 - DNA, 22 bp, synthetic construct
  misc_feature 1..22: note = chemically synthesized
  source 1..22: mol_type = other DNA
tgagagacagctattggtctgt

SEQ ID NO: 43665 - DNA, 22 bp, synthetic construct
  misc_feature 1..22: note = chemically synthesized
  source 1..22: mol_type = other DNA
gagagacagctattggtctgtt

SEQ ID NO: 43666 - DNA, 22 bp, synthetic construct
  misc_feature 1..22: note = chemically synthesized
  source 1..22: mol_type = other DNA
agagacagctattggtctgtta

SEQ ID NO: 43667 - DNA, 22 bp, synthetic construct
  misc_feature 1..22: note = chemically synthesized
  source 1..22: mol_type = other DNA
ttggtctgttattgggctttgg

SEQ ID NO: 43668 - DNA, 22 bp, synthetic construct
  misc_feature 1..22: note = chemically synthesized
  source 1..22: mol_type = other DNA
gtctgttattgggctttggtgg

SEQ ID NO: 43669 - DNA, 22 bp, synthetic construct
  misc_feature 1..22: note = chemically synthesized
  source 1..22: mol_type = other DNA
ttattgggctttggtggtaact

SEQ ID NO: 43670 - DNA, 22 bp, synthetic construct
  misc_feature 1..22: note = chemically synthesized
  source 1..22: mol_type = other DNA
ttgggctttggtggtaactgaa

SEQ ID NO: 43671 - DNA, 22 bp, synthetic construct
  misc_feature 1..22: note = chemically synthesized
  source 1..22: mol_type = other DNA
ggctttggtggtaactgaacgt

SEQ ID NO: 43672 - DNA, 22 bp, synthetic construct
  misc_feature 1..22: note = chemically synthesized
  source 1..22: mol_type = other DNA
tggtggtaactgaacgtttgac

SEQ ID NO: 43673 - DNA, 22 bp, synthetic construct
  misc_feature 1..22: note = chemically synthesized
  source 1..22: mol_type = other DNA
ggtggtaactgaacgtttgact

SEQ ID NO: 43674 - DNA, 22 bp, synthetic construct
  misc_feature 1..22: note = chemically synthesized
  source 1..22: mol_type = other DNA
gtggtaactgaacgtttgactg

SEQ ID NO: 43675 - DNA, 22 bp, synthetic construct
  misc_feature 1..22: note = chemically synthesized
  source 1..22: mol_type = other DNA
aacgtttgactgtgggtcataa

SEQ ID NO: 43676 - DNA, 22 bp, synthetic construct
  misc_feature 1..22: note = chemically synthesized
  source 1..22: mol_type = other DNA
gactgtgggtcataaagtcacc

SEQ ID NO: 43677 - DNA, 22 bp, synthetic construct
  misc_feature 1..22: note = chemically synthesized
  source 1..22: mol_type = other DNA
actgtgggtcataaagtcacca

SEQ ID NO: 43678 - DNA, 22 bp, synthetic construct
  misc_feature 1..22: note = chemically synthesized
  source 1..22: mol_type = other DNA
tgggtcataaagtcaccatgct

SEQ ID NO: 43679 - DNA, 22 bp, synthetic construct
  misc_feature 1..22: note = chemically synthesized
  source 1..22: mol_type = other DNA
cctgaacctgcctatcatgaac

SEQ ID NO: 43680 - DNA, 22 bp, synthetic construct
  misc_feature 1..22: note = chemically synthesized
  source 1..22: mol_type = other DNA
aacctgcctatcatgaactggt

SEQ ID NO: 43681 - DNA, 22 bp, synthetic construct
  misc_feature 1..22: note = chemically synthesized
  source 1..22: mol_type = other DNA
cctatcatgaactggttgcttt

SEQ ID NO: 43682 - DNA, 22 bp, synthetic construct
  misc_feature 1..22: note = chemically synthesized
  source 1..22: mol_type = other DNA
tcatgaactggttgctttctga

SEQ ID NO: 43683 - DNA, 22 bp, synthetic construct
  misc_feature 1..22: note = chemically synthesized
  source 1..22: mol_type = other DNA
gttgctttctgacccatctagc

SEQ ID NO: 43684 - DNA, 22 bp, synthetic construct
  misc_feature 1..22: note = chemically synthesized
  source 1..22: mol_type = other DNA
ctttctgacccatctagccatg

SEQ ID NO: 43685 - DNA, 22 bp, synthetic construct
  misc_feature 1..22: note = chemically synthesized
  source 1..22: mol_type = other DNA
tctgacccatctagccatgaag

SEQ ID NO: 43686 - DNA, 22 bp, synthetic construct
  misc_feature 1..22: note = chemically synthesized
  source 1..22: mol_type = other DNA
ctgacccatctagccatgaagt

SEQ ID NO: 43687 - DNA, 22 bp, synthetic construct
  misc_feature 1..22: note = chemically synthesized
  source 1..22: mol_type = other DNA
tgacccatctagccatgaagtg

SEQ ID NO: 43688 - DNA, 22 bp, synthetic construct
  misc_feature 1..22: note = chemically synthesized
  source 1..22: mol_type = other DNA
acccatctagccatgaagtggg

SEQ ID NO: 43689 - DNA, 22 bp, synthetic construct
  misc_feature 1..22: note = chemically synthesized
  source 1..22: mol_type = other DNA
gccatgaagtgggtcagcacag

SEQ ID NO: 43690 - DNA, 22 bp, synthetic construct
  misc_feature 1..22: note = chemically synthesized
  source 1..22: mol_type = other DNA
catcatcaaattgaagtggtgt

SEQ ID NO: 43691 - DNA, 22 bp, synthetic construct
  misc_feature 1..22: note = chemically synthesized
  source 1..22: mol_type = other DNA
atcatcaaattgaagtggtgtg

SEQ ID NO: 43692 - DNA, 22 bp, synthetic construct
  misc_feature 1..22: note = chemically synthesized
  source 1..22: mol_type = other DNA
aagtggtgtgtatgtgatcggg

SEQ ID NO: 43693 - DNA, 22 bp, synthetic construct
  misc_feature 1..22: note = chemically synthesized
  source 1..22: mol_type = other DNA
gagcaggtcctgaaggcacaag

SEQ ID NO: 43694 - DNA, 22 bp, synthetic construct
  misc_feature 1..22: note = chemically synthesized
  source 1..22: mol_type = other DNA
agcaggtcctgaaggcacaagt

SEQ ID NO: 43695 - DNA, 22 bp, synthetic construct
  misc_feature 1..22: note = chemically synthesized
  source 1..22: mol_type = other DNA
aaggcacaagtaagttacataa

SEQ ID NO: 43696 - DNA, 22 bp, synthetic construct
  misc_feature 1..22: note = chemically synthesized
  source 1..22: mol_type = other DNA
cataaggaagtggctcaaatgc

SEQ ID NO: 43697 - DNA, 22 bp, synthetic construct
  misc_feature 1..22: note = chemically synthesized
  source 1..22: mol_type = other DNA
aaatgcccatgttctccactca

SEQ ID NO: 43698 - DNA, 22 bp, synthetic construct
  misc_feature 1..22: note = chemically synthesized
  source 1..22: mol_type = other DNA
tccactcatgccaccctgcctt

SEQ ID NO: 43699 - DNA, 22 bp, synthetic construct
  misc_feature 1..22: note = chemically synthesized
  source 1..22: mol_type = other DNA
cactcatgccaccctgccttcc

SEQ ID NO: 43700 - DNA, 22 bp, synthetic construct
  misc_feature 1..22: note = chemically synthesized
  source 1..22: mol_type = other DNA
atgccaccctgccttccctccc

SEQ ID NO: 43701 - DNA, 22 bp, synthetic construct
  misc_feature 1..22: note = chemically synthesized
  source 1..22: mol_type = other DNA
ccttccctcccccagcctgcac

SEQ ID NO: 43702 - DNA, 22 bp, synthetic construct
  misc_feature 1..22: note = chemically synthesized
  source 1..22: mol_type = other DNA
ccctcccccagcctgcaccaat

SEQ ID NO: 43703 - DNA, 22 bp, synthetic construct
  misc_feature 1..22: note = chemically synthesized
  source 1..22: mol_type = other DNA
cctcccccagcctgcaccaatg

SEQ ID NO: 43704 - DNA, 22 bp, synthetic construct
  misc_feature 1..22: note = chemically synthesized
  source 1..22: mol_type = other DNA
ccccagcctgcaccaatggcct

SEQ ID NO: 43705 - DNA, 22 bp, synthetic construct
  misc_feature 1..22: note = chemically synthesized
  source 1..22: mol_type = other DNA
caccaatggcctcatggggagt

SEQ ID NO: 43706 - DNA, 22 bp, synthetic construct
  misc_feature 1..22: note = chemically synthesized
  source 1..22: mol_type = other DNA
atggggagttccctatgatcag

SEQ ID NO: 43707 - DNA, 22 bp, synthetic construct
  misc_feature 1..22: note = chemically synthesized
  source 1..22: mol_type = other DNA
cctatgatcagttgacagagga

SEQ ID NO: 43708 - DNA, 22 bp, synthetic construct
  misc_feature 1..22: note = chemically synthesized
  source 1..22: mol_type = other DNA
tgatcagttgacagaggaaggg

SEQ ID NO: 43709 - DNA, 22 bp, synthetic construct
  misc_feature 1..22: note = chemically synthesized
  source 1..22: mol_type = other DNA
acagaggaagggaagactaagg

SEQ ID NO: 43710 - DNA, 22 bp, synthetic construct
  misc_feature 1..22: note = chemically synthesized
  source 1..22: mol_type = other DNA
aggactggttcatagatggttc

SEQ ID NO: 43711 - DNA, 22 bp, synthetic construct
  misc_feature 1..22: note = chemically synthesized
  source 1..22: mol_type = other DNA
gttcatagatggttctgcacga

SEQ ID NO: 43712 - DNA, 22 bp, synthetic construct
  misc_feature 1..22: note = chemically synthesized
  source 1..22: mol_type = other DNA
atagatggttctgcacgatatg

SEQ ID NO: 43713 - DNA, 22 bp, synthetic construct
  misc_feature 1..22: note = chemically synthesized
  source 1..22: mol_type = other DNA
tgcacgatatgcaggcaccacc

SEQ ID NO: 43714 - DNA, 22 bp, synthetic construct
  misc_feature 1..22: note = chemically synthesized
  source 1..22: mol_type = other DNA
cacgatatgcaggcaccacccg

SEQ ID NO: 43715 - DNA, 22 bp, synthetic construct
  misc_feature 1..22: note = chemically synthesized
  source 1..22: mol_type = other DNA
cagcactatatccactttctaa

SEQ ID NO: 43716 - DNA, 22 bp, synthetic construct
  misc_feature 1..22: note = chemically synthesized
  source 1..22: mol_type = other DNA
tatccactttctaaatgcatgt

SEQ ID NO: 43717 - DNA, 22 bp, synthetic construct
  misc_feature 1..22: note = chemically synthesized
  source 1..22: mol_type = other DNA
tctaaatgcatgtgtacacttg

SEQ ID NO: 43718 - DNA, 22 bp, synthetic construct
  misc_feature 1..22: note = chemically synthesized
  source 1..22: mol_type = other DNA
ctaaatgcatgtgtacacttgt

SEQ ID NO: 43719 - DNA, 22 bp, synthetic construct
  misc_feature 1..22: note = chemically synthesized
  source 1..22: mol_type = other DNA
taaatgcatgtgtacacttgtg

SEQ ID NO: 43720 - DNA, 22 bp, synthetic construct
  misc_feature 1..22: note = chemically synthesized
  source 1..22: mol_type = other DNA
aatgcatgtgtacacttgtgct

SEQ ID NO: 43721 - DNA, 22 bp, synthetic construct
  misc_feature 1..22: note = chemically synthesized
  source 1..22: mol_type = other DNA
gtgctaagaaaatatctttatt

SEQ ID NO: 43722 - DNA, 22 bp, synthetic construct
  misc_feature 1..22: note = chemically synthesized
  source 1..22: mol_type = other DNA
tgctaagaaaatatctttattt

SEQ ID NO: 43723 - DNA, 22 bp, synthetic construct
  misc_feature 1..22: note = chemically synthesized
  source 1..22: mol_type = other DNA
agaaaatatctttattttattt

SEQ ID NO: 43724 - DNA, 22 bp, synthetic construct
  misc_feature 1..22: note = chemically synthesized
  source 1..22: mol_type = other DNA
tattttatttcctttatttttc

SEQ ID NO: 43725 - DNA, 22 bp, synthetic construct
  misc_feature 1..22: note = chemically synthesized
  source 1..22: mol_type = other DNA
attttatttcctttatttttcc

SEQ ID NO: 43726 - DNA, 22 bp, synthetic construct
  misc_feature 1..22: note = chemically synthesized
  source 1..22: mol_type = other DNA
ttttatttcctttatttttcct

SEQ ID NO: 43727 - DNA, 22 bp, synthetic construct
  misc_feature 1..22: note = chemically synthesized
  source 1..22: mol_type = other DNA
tatttcctttatttttccttta

SEQ ID NO: 43728 - DNA, 22 bp, synthetic construct
  misc_feature 1..22: note = chemically synthesized
  source 1..22: mol_type = other DNA
atttcctttatttttcctttat

SEQ ID NO: 43729 - DNA, 22 bp, synthetic construct
  misc_feature 1..22: note = chemically synthesized
  source 1..22: mol_type = other DNA
tttcctttatttttcctttatc

SEQ ID NO: 43730 - DNA, 22 bp, synthetic construct
  misc_feature 1..22: note = chemically synthesized
  source 1..22: mol_type = other DNA
cctttatttttcctttatcatg

SEQ ID NO: 43731 - DNA, 22 bp, synthetic construct
  misc_feature 1..22: note = chemically synthesized
  source 1..22: mol_type = other DNA
ctttatttttcctttatcatgt

SEQ ID NO: 43732 - DNA, 22 bp, synthetic construct
  misc_feature 1..22: note = chemically synthesized
  source 1..22: mol_type = other DNA
tatttttcctttatcatgtgac

SEQ ID NO: 43733 - DNA, 22 bp, synthetic construct
  misc_feature 1..22: note = chemically synthesized
  source 1..22: mol_type = other DNA
atttttcctttatcatgtgacc

SEQ ID NO: 43734 - DNA, 22 bp, synthetic construct
  misc_feature 1..22: note = chemically synthesized
  source 1..22: mol_type = other DNA
tttttcctttatcatgtgacct

SEQ ID NO: 43735 - DNA, 22 bp, synthetic construct
  misc_feature 1..22: note = chemically synthesized
  source 1..22: mol_type = other DNA
ttcctttatcatgtgaccttag

SEQ ID NO: 43736 - DNA, 22 bp, synthetic construct
  misc_feature 1..22: note = chemically synthesized
  source 1..22: mol_type = other DNA
tcctttatcatgtgaccttaga

SEQ ID NO: 43737 - DNA, 22 bp, synthetic construct
  misc_feature 1..22: note = chemically synthesized
  source 1..22: mol_type = other DNA
cctttatcatgtgaccttagat

SEQ ID NO: 43738 - DNA, 22 bp, synthetic construct
  misc_feature 1..22: note = chemically synthesized
  source 1..22: mol_type = other DNA
ctttatcatgtgaccttagatt

SEQ ID NO: 43739 - DNA, 22 bp, synthetic construct
  misc_feature 1..22: note = chemically synthesized
  source 1..22: mol_type = other DNA
tatcatgtgaccttagatttat

SEQ ID NO: 43740 - DNA, 22 bp, synthetic construct
  misc_feature 1..22: note = chemically synthesized
  source 1..22: mol_type = other DNA
atcatgtgaccttagatttatg

SEQ ID NO: 43741 - DNA, 22 bp, synthetic construct
  misc_feature 1..22: note = chemically synthesized
  source 1..22: mol_type = other DNA
tcatgtgaccttagatttatgg

SEQ ID NO: 43742 - DNA, 22 bp, synthetic construct
  misc_feature 1..22: note = chemically synthesized
  source 1..22: mol_type = other DNA
agatttatggacttcacatcag

SEQ ID NO: 43743 - DNA, 22 bp, synthetic construct
  misc_feature 1..22: note = chemically synthesized
  source 1..22: mol_type = other DNA
gatttatggacttcacatcagc

SEQ ID NO: 43744 - DNA, 22 bp, synthetic construct
  misc_feature 1..22: note = chemically synthesized
  source 1..22: mol_type = other DNA
atggacttcacatcagcattta

SEQ ID NO: 43745 - DNA, 22 bp, synthetic construct
  misc_feature 1..22: note = chemically synthesized
  source 1..22: mol_type = other DNA
tggacttcacatcagcatttaa

SEQ ID NO: 43746 - DNA, 22 bp, synthetic construct
  misc_feature 1..22: note = chemically synthesized
  source 1..22: mol_type = other DNA
cacatcagcatttaagcattta

SEQ ID NO: 43747 - DNA, 22 bp, synthetic construct
  misc_feature 1..22: note = chemically synthesized
  source 1..22: mol_type = other DNA
acatcagcatttaagcatttaa

SEQ ID NO: 43748 - DNA, 22 bp, synthetic construct
  misc_feature 1..22: note = chemically synthesized
  source 1..22: mol_type = other DNA
aagcatttaagtgttgttcata

SEQ ID NO: 43749 - DNA, 22 bp, synthetic construct
  misc_feature 1..22: note = chemically synthesized
  source 1..22: mol_type = other DNA
agcatttaagtgttgttcatat

SEQ ID NO: 43750 - DNA, 22 bp, synthetic construct
  misc_feature 1..22: note = chemically synthesized
  source 1..22: mol_type = other DNA
aagtgttgttcatatcagcatt

SEQ ID NO: 43751 - DNA, 22 bp, synthetic construct
  misc_feature 1..22: note = chemically synthesized
  source 1..22: mol_type = other DNA
agtgttgttcatatcagcattt

SEQ ID NO: 43752 - DNA, 22 bp, synthetic construct
  misc_feature 1..22: note = chemically synthesized
  source 1..22: mol_type = other DNA
ttcatatcagcatttaaatatt

SEQ ID NO: 43753 - DNA, 22 bp, synthetic construct
  misc_feature 1..22: note = chemically synthesized
  source 1..22: mol_type = other DNA
atatcagcatttaaatattgtt

SEQ ID NO: 43754 - DNA, 22 bp, synthetic construct
  misc_feature 1..22: note = chemically synthesized
  source 1..22: mol_type = other DNA
aaatattgttaaccttatgtaa

SEQ ID NO: 43755 - DNA, 22 bp, synthetic construct
  misc_feature 1..22: note = chemically synthesized
  source 1..22: mol_type = other DNA
aatattgttaaccttatgtaat

SEQ ID NO: 43756 - DNA, 22 bp, synthetic construct
  misc_feature 1..22: note = chemically synthesized
  source 1..22: mol_type = other DNA
ttaaccttatgtaataactttt

SEQ ID NO: 43757 - DNA, 22 bp, synthetic construct
  misc_feature 1..22: note = chemically synthesized
  source 1..22: mol_type = other DNA
accttatgtaataacttttggt

SEQ ID NO: 43758 - DNA, 22 bp, synthetic construct
  misc_feature 1..22: note = chemically synthesized
  source 1..22: mol_type = other DNA
atgtaataacttttggtttggg

SEQ ID NO: 43759 - DNA, 22 bp, synthetic construct
  misc_feature 1..22: note = chemically synthesized
  source 1..22: mol_type = other DNA
tgtaataacttttggtttgggg

SEQ ID NO: 43760 - DNA, 22 bp, synthetic construct
  misc_feature 1..22: note = chemically synthesized
  source 1..22: mol_type = other DNA
ttggtttggggattggtgcgtt

SEQ ID NO: 43761 - DNA, 22 bp, synthetic construct
  misc_feature 1..22: note = chemically synthesized
  source 1..22: mol_type = other DNA
tggtttggggattggtgcgttt

SEQ ID NO: 43762 - DNA, 22 bp, synthetic construct
  misc_feature 1..22: note = chemically synthesized
  source 1..22: mol_type = other DNA
ggtttggggattggtgcgtttc

SEQ ID NO: 43763 - DNA, 22 bp, synthetic construct
  misc_feature 1..22: note = chemically synthesized
  source 1..22: mol_type = other DNA
gtttggggattggtgcgtttct

SEQ ID NO: 43764 - DNA, 22 bp, synthetic construct
  misc_feature 1..22: note = chemically synthesized
  source 1..22: mol_type = other DNA
ggggattggtgcgtttctggtt

SEQ ID NO: 43765 - DNA, 22 bp, synthetic construct
  misc_feature 1..22: note = chemically synthesized
  source 1..22: mol_type = other DNA
gggattggtgcgtttctggttg

SEQ ID NO: 43766 - DNA, 22 bp, synthetic construct
  misc_feature 1..22: note = chemically synthesized
  source 1..22: mol_type = other DNA
gtgcgtttctggttgtatgagg

SEQ ID NO: 43767 - DNA, 22 bp, synthetic construct
  misc_feature 1..22: note = chemically synthesized
  source 1..22: mol_type = other DNA
ctggttgtatgaggatagttgt

SEQ ID NO: 43768 - DNA, 22 bp, synthetic construct
  misc_feature 1..22: note = chemically synthesized
  source 1..22: mol_type = other DNA
tggttgtatgaggatagttgta

SEQ ID NO: 43769 - DNA, 22 bp, synthetic construct
  misc_feature 1..22: note = chemically synthesized
  source 1..22: mol_type = other DNA
gttgtatgaggatagttgtatt

SEQ ID NO: 43770 - DNA, 22 bp, synthetic construct
  misc_feature 1..22: note = chemically synthesized
  source 1..22: mol_type = other DNA
tatgaggatagttgtattatat

SEQ ID NO: 43771 - DNA, 22 bp, synthetic construct
  misc_feature 1..22: note = chemically synthesized
  source 1..22: mol_type = other DNA
tattatattaggcataattatg

SEQ ID NO: 43772 - DNA, 22 bp, synthetic construct
  misc_feature 1..22: note = chemically synthesized
  source 1..22: mol_type = other DNA
tattaggcataattatgacctt

SEQ ID NO: 43773 - DNA, 22 bp, synthetic construct
  misc_feature 1..22: note = chemically synthesized
  source 1..22: mol_type = other DNA
ggcataattatgaccttattat

SEQ ID NO: 43774 - DNA, 22 bp, synthetic construct
  misc_feature 1..22: note = chemically synthesized
  source 1..22: mol_type = other DNA
tgaccttattattgtctttatt

SEQ ID NO: 43775 - DNA, 22 bp, synthetic construct
  misc_feature 1..22: note = chemically synthesized
  source 1..22: mol_type = other DNA
attattgtctttatttgaagat

SEQ ID NO: 43776 - DNA, 22 bp, synthetic construct
  misc_feature 1..22: note = chemically synthesized
  source 1..22: mol_type = other DNA
ttattgtctttatttgaagatt

SEQ ID NO: 43777 - DNA, 22 bp, synthetic construct
  misc_feature 1..22: note = chemically synthesized
  source 1..22: mol_type = other DNA
ttgtctttatttgaagattatg

SEQ ID NO: 43778 - DNA, 22 bp, synthetic construct
  misc_feature 1..22: note = chemically synthesized
  source 1..22: mol_type = other DNA
tctttatttgaagattatgtat

SEQ ID NO: 43779 - DNA, 22 bp, synthetic construct
  misc_feature 1..22: note = chemically synthesized
  source 1..22: mol_type = other DNA
tatttgaagattatgtatgatt

SEQ ID NO: 43780 - DNA, 22 bp, synthetic construct
  misc_feature 1..22: note = chemically synthesized
  source 1..22: mol_type = other DNA
atttgaagattatgtatgattt

SEQ ID NO: 43781 - DNA, 22 bp, synthetic construct
  misc_feature 1..22: note = chemically synthesized
  source 1..22: mol_type = other DNA
tttgaagattatgtatgatttc

SEQ ID NO: 43782 - DNA, 22 bp, synthetic construct
  misc_feature 1..22: note = chemically synthesized
  source 1..22: mol_type = other DNA
gaagattatgtatgatttcagg

SEQ ID NO: 43783 - DNA, 22 bp, synthetic construct
  misc_feature 1..22: note = chemically synthesized
  source 1..22: mol_type = other DNA
aagattatgtatgatttcagga

SEQ ID NO: 43784 - DNA, 22 bp, synthetic construct
  misc_feature 1..22: note = chemically synthesized
  source 1..22: mol_type = other DNA
tgtatgatttcaggatgtgtgt

SEQ ID NO: 43785 - DNA, 22 bp, synthetic construct
  misc_feature 1..22: note = chemically synthesized
  source 1..22: mol_type = other DNA
caggatgtgtgtatgggttcaa

SEQ ID NO: 43786 - DNA, 22 bp, synthetic construct
  misc_feature 1..22: note = chemically synthesized
  source 1..22: mol_type = other DNA
aggatgtgtgtatgggttcaag

SEQ ID NO: 43787 - DNA, 22 bp, synthetic construct
  misc_feature 1..22: note = chemically synthesized
  source 1..22: mol_type = other DNA
aagttgacaaggagttggactt

SEQ ID NO: 43788 - DNA, 22 bp, synthetic construct
  misc_feature 1..22: note = chemically synthesized
  source 1..22: mol_type = other DNA
acaaggagttggacttgtgatg

SEQ ID NO: 43789 - DNA, 22 bp, synthetic construct
  misc_feature 1..22: note = chemically synthesized
  source 1..22: mol_type = other DNA
gacttgtgatggttaatactgt

SEQ ID NO: 43790 - DNA, 22 bp, synthetic construct
  misc_feature 1..22: note = chemically synthesized
  source 1..22: mol_type = other DNA
gtgatggttaatactgtcaact

SEQ ID NO: 43791 - DNA, 22 bp, synthetic construct
  misc_feature 1..22: note = chemically synthesized
  source 1..22: mol_type = other DNA
tgatggttaatactgtcaactt

SEQ ID NO: 43792 - DNA, 22 bp, synthetic construct
  misc_feature 1..22: note = chemically synthesized
  source 1..22: mol_type = other DNA
atactgtcaacttgattggatt

SEQ ID NO: 43793 - DNA, 22 bp, synthetic construct
  misc_feature 1..22: note = chemically synthesized
  source 1..22: mol_type = other DNA
tcaacttgattggattgaaaga

SEQ ID NO: 43794 - DNA, 22 bp, synthetic construct
  misc_feature 1..22: note = chemically synthesized
  source 1..22: mol_type = other DNA
gattggattgaaagatgcaaag

SEQ ID NO: 43795 - DNA, 22 bp, synthetic construct
  misc_feature 1..22: note = chemically synthesized
  source 1..22: mol_type = other DNA
attggattgaaagatgcaaagt

SEQ ID NO: 43796 - DNA, 22 bp, synthetic construct
  misc_feature 1..22: note = chemically synthesized
  source 1..22: mol_type = other DNA
gattgaaagatgcaaagtatta

SEQ ID NO: 43797 - DNA, 22 bp, synthetic construct
  misc_feature 1..22: note = chemically synthesized
  source 1..22: mol_type = other DNA
aaagatgcaaagtattaatctc

SEQ ID NO: 43798 - DNA, 22 bp, synthetic construct
  misc_feature 1..22: note = chemically synthesized
  source 1..22: mol_type = other DNA
atctcggttatgtctgtgaggg

SEQ ID NO: 43799 - DNA, 22 bp, synthetic construct
  misc_feature 1..22: note = chemically synthesized
  source 1..22: mol_type = other DNA
ggttatgtctgtgagggtgtgg

SEQ ID NO: 43800 - DNA, 22 bp, synthetic construct
  misc_feature 1..22: note = chemically synthesized
  source 1..22: mol_type = other DNA
tgtctgtgagggtgtggcaaaa

SEQ ID NO: 43801 - DNA, 22 bp, synthetic construct
  misc_feature 1..22: note = chemically synthesized
  source 1..22: mol_type = other DNA
tgagggtgtggcaaaaggagat

SEQ ID NO: 43802 - DNA, 22 bp, synthetic construct
  misc_feature 1..22: note = chemically synthesized
  source 1..22: mol_type = other DNA
acatttgagtcagtgggctggg

SEQ ID NO: 43803 - DNA, 20 bp, synthetic construct
  misc_feature 1..20: note = chemically synthesized
  source 1..20: mol_type = other DNA
taacgaccccggtaggtgag

SEQ ID NO: 43804 - DNA, 20 bp, synthetic construct
  misc_feature 1..20: note = chemically synthesized
  source 1..20: mol_type = other DNA
accccggtaggtgagaggcc

SEQ ID NO: 43805 - DNA, 20 bp, synthetic construct
  misc_feature 1..20: note = chemically synthesized
  source 1..20: mol_type = other DNA
ccccggtaggtgagaggcca

SEQ ID NO: 43806 - DNA, 20 bp, synthetic construct
  misc_feature 1..20: note = chemically synthesized
  source 1..20: mol_type = other DNA
ggtgagaggccaaggtccca

SEQ ID NO: 43807 - DNA, 20 bp, synthetic construct
  misc_feature 1..20: note = chemically synthesized
  source 1..20: mol_type = other DNA
gtgagaggccaaggtcccaa

SEQ ID NO: 43808 - DNA, 20 bp, synthetic construct
  misc_feature 1..20: note = chemically synthesized
  source 1..20: mol_type = other DNA
tgagaggccaaggtcccaaa

SEQ ID NO: 43809 - DNA, 20 bp, synthetic construct
  misc_feature 1..20: note = chemically synthesized
  source 1..20: mol_type = other DNA
gagaggccaaggtcccaaag

SEQ ID NO: 43810 - DNA, 20 bp, synthetic construct
  misc_feature 1..20: note = chemically synthesized
  source 1..20: mol_type = other DNA
gaggccaaggtcccaaaggg

SEQ ID NO: 43811 - DNA, 20 bp, synthetic construct
  misc_feature 1..20: note = chemically synthesized
  source 1..20: mol_type = other DNA
gccaaggtcccaaaggggag

SEQ ID NO: 43812 - DNA, 20 bp, synthetic construct
  misc_feature 1..20: note = chemically synthesized
  source 1..20: mol_type = other DNA
aaggtcccaaaggggagcag

SEQ ID NO: 43813 - DNA, 20 bp, synthetic construct
  misc_feature 1..20: note = chemically synthesized
  source 1..20: mol_type = other DNA
aggtcccaaaggggagcagc

SEQ ID NO: 43814 - DNA, 20 bp, synthetic construct
  misc_feature 1..20: note = chemically synthesized
  source 1..20: mol_type = other DNA
ggtcccaaaggggagcagca

SEQ ID NO: 43815 - DNA, 20 bp, synthetic construct
  misc_feature 1..20: note = chemically synthesized
  source 1..20: mol_type = other DNA
ccaaaggggagcagcaggga

SEQ ID NO: 43816 - DNA, 20 bp, synthetic construct
  misc_feature 1..20: note = chemically synthesized
  source 1..20: mol_type = other DNA
aggggagcagcagggaaagt

SEQ ID NO: 43817 - DNA, 20 bp, synthetic construct
  misc_feature 1..20: note = chemically synthesized
  source 1..20: mol_type = other DNA
gctcccatctattcttgctc

SEQ ID NO: 43818 - DNA, 20 bp, synthetic construct
  misc_feature 1..20: note = chemically synthesized
  source 1..20: mol_type = other DNA
ctcccatctattcttgctcc

SEQ ID NO: 43819 - DNA, 20 bp, synthetic construct
  misc_feature 1..20: note = chemically synthesized
  source 1..20: mol_type = other DNA
tcccatctattcttgctcca

SEQ ID NO: 43820 - DNA, 20 bp, synthetic construct
  misc_feature 1..20: note = chemically synthesized
  source 1..20: mol_type = other DNA
cccatctattcttgctccag

SEQ ID NO: 43821 - DNA, 20 bp, synthetic construct
  misc_feature 1..20: note = chemically synthesized
  source 1..20: mol_type = other DNA
catctattcttgctccaggg

SEQ ID NO: 43822 - DNA, 20 bp, synthetic construct
  misc_feature 1..20: note = chemically synthesized
  source 1..20: mol_type = other DNA
atctattcttgctccagggg

SEQ ID NO: 43823 - DNA, 20 bp, synthetic construct
  misc_feature 1..20: note = chemically synthesized
  source 1..20: mol_type = other DNA
ctccaggggaggcctttgat

SEQ ID NO: 43824 - DNA, 20 bp, synthetic construct
  misc_feature 1..20: note = chemically synthesized
  source 1..20: mol_type = other DNA
tccaggggaggcctttgatg

SEQ ID NO: 43825 - DNA, 20 bp, synthetic construct
  misc_feature 1..20: note = chemically synthesized
  source 1..20: mol_type = other DNA
aggggaggcctttgatgagg

SEQ ID NO: 43826 - DNA, 20 bp, synthetic construct
  misc_feature 1..20: note = chemically synthesized
  source 1..20: mol_type = other DNA
tttgatgaggaagctgccaa

SEQ ID NO: 43827 - DNA, 20 bp, synthetic construct
  misc_feature 1..20: note = chemically synthesized
  source 1..20: mol_type = other DNA
tgcaaatacaattccaatta

SEQ ID NO: 43828 - DNA, 20 bp, synthetic construct
  misc_feature 1..20: note = chemically synthesized
  source 1..20: mol_type = other DNA
gcaaatacaattccaattac

SEQ ID NO: 43829 - DNA, 20 bp, synthetic construct
  misc_feature 1..20: note = chemically synthesized
  source 1..20: mol_type = other DNA
acaattccaattacaggcaa

SEQ ID NO: 43830 - DNA, 20 bp, synthetic construct
  misc_feature 1..20: note = chemically synthesized
  source 1..20: mol_type = other DNA
caattccaattacaggcaac

SEQ ID NO: 43831 - DNA, 20 bp, synthetic construct
  misc_feature 1..20: note = chemically synthesized
  source 1..20: mol_type = other DNA
ttccaattacaggcaacagg

SEQ ID NO: 43832 - DNA, 20 bp, synthetic construct
  misc_feature 1..20: note = chemically synthesized
  source 1..20: mol_type = other DNA
tccaattacaggcaacagga

SEQ ID NO: 43833 - DNA, 20 bp, synthetic construct
  misc_feature 1..20: note = chemically synthesized
  source 1..20: mol_type = other DNA
caattacaggcaacaggaag

SEQ ID NO: 43834 - DNA, 20 bp, synthetic construct
  misc_feature 1..20: note = chemically synthesized
  source 1..20: mol_type = other DNA
accacctctgccacctctgt

SEQ ID NO: 43835 - DNA, 20 bp, synthetic construct
  misc_feature 1..20: note = chemically synthesized
  source 1..20: mol_type = other DNA
cacctctgtcagcaaaccat

SEQ ID NO: 43836 - DNA, 20 bp, synthetic construct
  misc_feature 1..20: note = chemically synthesized
  source 1..20: mol_type = other DNA
gctcctactctgtgctgcga

SEQ ID NO: 43837 - DNA, 20 bp, synthetic construct
  misc_feature 1..20: note = chemically synthesized
  source 1..20: mol_type = other DNA
cctactctgtgctgcgatgg

SEQ ID NO: 43838 - DNA, 20 bp, synthetic construct
  misc_feature 1..20: note = chemically synthesized
  source 1..20: mol_type = other DNA
ctactctgtgctgcgatggc

SEQ ID NO: 43839 - DNA, 20 bp, synthetic construct
  misc_feature 1..20: note = chemically synthesized
  source 1..20: mol_type = other DNA
tgctgcgatggcgggctcga

SEQ ID NO: 43840 - DNA, 20 bp, synthetic construct
  misc_feature 1..20: note = chemically synthesized
  source 1..20: mol_type = other DNA
gctgcgatggcgggctcgat

SEQ ID NO: 43841 - DNA, 20 bp, synthetic construct
  misc_feature 1..20: note = chemically synthesized
  source 1..20: mol_type = other DNA
ctgcgatggcgggctcgatg

SEQ ID NO: 43842 - DNA, 20 bp, synthetic construct
  misc_feature 1..20: note = chemically synthesized
  source 1..20: mol_type = other DNA
ataactctgaccttacctca

SEQ ID NO: 43843 - DNA, 20 bp, synthetic construct
  misc_feature 1..20: note = chemically synthesized
  source 1..20: mol_type = other DNA
aactctgaccttacctcatg

SEQ ID NO: 43844 - DNA, 20 bp, synthetic construct
  misc_feature 1..20: note = chemically synthesized
  source 1..20: mol_type = other DNA
tggagtcactgtcaacccac

SEQ ID NO: 43845 - DNA, 20 bp, synthetic construct
  misc_feature 1..20: note = chemically synthesized
  source 1..20: mol_type = other DNA
gttgcactgtctttgtgcac

SEQ ID NO: 43846 - DNA, 20 bp, synthetic construct
  misc_feature 1..20: note = chemically synthesized
  source 1..20: mol_type = other DNA
gtctttgtgcactggctctc

SEQ ID NO: 43847 - DNA, 20 bp, synthetic construct
  misc_feature 1..20: note = chemically synthesized
  source 1..20: mol_type = other DNA
ctttgtgcactggctctctg

SEQ ID NO: 43848 - DNA, 20 bp, synthetic construct
  misc_feature 1..20: note = chemically synthesized
  source 1..20: mol_type = other DNA
gtgcactggctctctggagt

SEQ ID NO: 43849 - DNA, 20 bp, synthetic construct
  misc_feature 1..20: note = chemically synthesized
  source 1..20: mol_type = other DNA
tgcactggctctctggagtg

SEQ ID NO: 43850 - DNA, 20 bp, synthetic construct
  misc_feature 1..20: note = chemically synthesized
  source 1..20: mol_type = other DNA
gagtgaggtctttgcaaaca

SEQ ID NO: 43851 - DNA, 20 bp, synthetic construct
  misc_feature 1..20: note = chemically synthesized
  source 1..20: mol_type = other DNA
tgaggtctttgcaaacaaag

SEQ ID NO: 43852 - DNA, 20 bp, synthetic construct
  misc_feature 1..20: note = chemically synthesized
  source 1..20: mol_type = other DNA
gtctttgcaaacaaagtgga

SEQ ID NO: 43853 - DNA, 20 bp, synthetic construct
  misc_feature 1..20: note = chemically synthesized
  source 1..20: mol_type = other DNA
ctttgcaaacaaagtggaaa

SEQ ID NO: 43854 - DNA, 20 bp, synthetic construct
  misc_feature 1..20: note = chemically synthesized
  source 1..20: mol_type = other DNA
agtggaaagagcatcaactt

SEQ ID NO: 43855 - DNA, 20 bp, synthetic construct
  misc_feature 1..20: note = chemically synthesized
  source 1..20: mol_type = other DNA
agagcatcaactttggactc

SEQ ID NO: 43856 - DNA, 20 bp, synthetic construct
  misc_feature 1..20: note = chemically synthesized
  source 1..20: mol_type = other DNA
caactttggactccagcacc

SEQ ID NO: 43857 - DNA, 20 bp, synthetic construct
  misc_feature 1..20: note = chemically synthesized
  source 1..20: mol_type = other DNA
tggactccagcacctagatt

SEQ ID NO: 43858 - DNA, 20 bp, synthetic construct
  misc_feature 1..20: note = chemically synthesized
  source 1..20: mol_type = other DNA
gactccagcacctagattca

SEQ ID NO: 43859 - DNA, 20 bp, synthetic construct
  misc_feature 1..20: note = chemically synthesized
  source 1..20: mol_type = other DNA
tccagcacctagattcagag

SEQ ID NO: 43860 - DNA, 20 bp, synthetic construct
  misc_feature 1..20: note = chemically synthesized
  source 1..20: mol_type = other DNA
ccagcacctagattcagagc

SEQ ID NO: 43861 - DNA, 20 bp, synthetic construct
  misc_feature 1..20: note = chemically synthesized
  source 1..20: mol_type = other DNA
tcagagcaggccatttcact

SEQ ID NO: 43862 - DNA, 20 bp, synthetic construct
  misc_feature 1..20: note = chemically synthesized
  source 1..20: mol_type = other DNA
ggaatctgctgtgcatctgc

SEQ ID NO: 43863 - DNA, 20 bp, synthetic construct
  misc_feature 1..20: note = chemically synthesized
  source 1..20: mol_type = other DNA
gaatctgctgtgcatctgca

SEQ ID NO: 43864 - DNA, 20 bp, synthetic construct
  misc_feature 1..20: note = chemically synthesized
  source 1..20: mol_type = other DNA
aatctgctgtgcatctgcaa

SEQ ID NO: 43865 - DNA, 20 bp, synthetic construct
  misc_feature 1..20: note = chemically synthesized
  source 1..20: mol_type = other DNA
tctgctgtgcatctgcaagg

SEQ ID NO: 43866 - DNA, 20 bp, synthetic construct
  misc_feature 1..20: note = chemically synthesized
  source 1..20: mol_type = other DNA
ctgctgtgcatctgcaaggg

SEQ ID NO: 43867 - DNA, 20 bp, synthetic construct
  misc_feature 1..20: note = chemically synthesized
  source 1..20: mol_type = other DNA
aattcgcctttgtttcttcc

SEQ ID NO: 43868 - DNA, 20 bp, synthetic construct
  misc_feature 1..20: note = chemically synthesized
  source 1..20: mol_type = other DNA
ttgtttcttcccagtatcga

SEQ ID NO: 43869 - DNA, 20 bp, synthetic construct
  misc_feature 1..20: note = chemically synthesized
  source 1..20: mol_type = other DNA
cccagtatcgacagcccttc

SEQ ID NO: 43870 - DNA, 20 bp, synthetic construct
  misc_feature 1..20: note = chemically synthesized
  source 1..20: mol_type = other DNA
gtatcgacagcccttccaga

SEQ ID NO: 43871 - DNA, 20 bp, synthetic construct
  misc_feature 1..20: note = chemically synthesized
  source 1..20: mol_type = other DNA
atcgacagcccttccagaaa

SEQ ID NO: 43872 - DNA, 20 bp, synthetic construct
  misc_feature 1..20: note = chemically synthesized
  source 1..20: mol_type = other DNA
acagcccttccagaaagagc

SEQ ID NO: 43873 - DNA, 20 bp, synthetic construct
  misc_feature 1..20: note = chemically synthesized
  source 1..20: mol_type = other DNA
tcatgccacatgtacaatct

SEQ ID NO: 43874 - DNA, 20 bp, synthetic construct
  misc_feature 1..20: note = chemically synthesized
  source 1..20: mol_type = other DNA
catgccacatgtacaatctg

SEQ ID NO: 43875 - DNA, 20 bp, synthetic construct
  misc_feature 1..20: note = chemically synthesized
  source 1..20: mol_type = other DNA
ccacatgtacaatctgaggc

SEQ ID NO: 43876 - DNA, 20 bp, synthetic construct
  misc_feature 1..20: note = chemically synthesized
  source 1..20: mol_type = other DNA
cacatgtacaatctgaggcc

SEQ ID NO: 43877 - DNA, 20 bp, synthetic construct
  misc_feature 1..20: note = chemically synthesized
  source 1..20: mol_type = other DNA
catgtacaatctgaggccag

SEQ ID NO: 43878 - DNA, 20 bp, synthetic construct
  misc_feature 1..20: note = chemically synthesized
  source 1..20: mol_type = other DNA
ccccttttcatcctcctgcc

SEQ ID NO: 43879 - DNA, 20 bp, synthetic construct
  misc_feature 1..20: note = chemically synthesized
  source 1..20: mol_type = other DNA
tcctcctgcctggtacacaa

SEQ ID NO: 43880 - DNA, 20 bp, synthetic construct
  misc_feature 1..20: note = chemically synthesized
  source 1..20: mol_type = other DNA
cctcctgcctggtacacaat

SEQ ID NO: 43881 - DNA, 20 bp, synthetic construct
  misc_feature 1..20: note = chemically synthesized
  source 1..20: mol_type = other DNA
ggtacacaataggtgtttac

SEQ ID NO: 43882 - DNA, 20 bp, synthetic construct
  misc_feature 1..20: note = chemically synthesized
  source 1..20: mol_type = other DNA
gtgtttactggatgcttgtc

SEQ ID NO: 43883 - DNA, 20 bp, synthetic construct
  misc_feature 1..20: note = chemically synthesized
  source 1..20: mol_type = other DNA
tccagttgatttcttgaaca

SEQ ID NO: 43884 - DNA, 20 bp, synthetic construct
  misc_feature 1..20: note = chemically synthesized
  source 1..20: mol_type = other DNA
ttcttgaacatggtgtgtaa

SEQ ID NO: 43885 - DNA, 20 bp, synthetic construct
  misc_feature 1..20: note = chemically synthesized
  source 1..20: mol_type = other DNA
tcttgaacatggtgtgtaaa

SEQ ID NO: 43886 - DNA, 20 bp, synthetic construct
  misc_feature 1..20: note = chemically synthesized
  source 1..20: mol_type = other DNA
tctttgcaaattgaatcttc

SEQ ID NO: 43887 - DNA, 20 bp, synthetic construct
  misc_feature 1..20: note = chemically synthesized
  source 1..20: mol_type = other DNA
tgcaaattgaatcttctgga

SEQ ID NO: 43888 - DNA, 20 bp, synthetic construct
  misc_feature 1..20: note = chemically synthesized
  source 1..20: mol_type = other DNA
attgaatcttctggaaagct

SEQ ID NO: 43889 - DNA, 20 bp, synthetic construct
  misc_feature 1..20: note = chemically synthesized
  source 1..20: mol_type = other DNA
agctgagcttgtgcctacca

SEQ ID NO: 43890 - DNA, 20 bp, synthetic construct
  misc_feature 1..20: note = chemically synthesized
  source 1..20: mol_type = other DNA
acttaaaacctgaatctttg

SEQ ID NO: 43891 - DNA, 20 bp, synthetic construct
  misc_feature 1..20: note = chemically synthesized
  source 1..20: mol_type = other DNA
taaatcccttgaaatgcatg

SEQ ID NO: 43892 - DNA, 20 bp, synthetic construct
  misc_feature 1..20: note = chemically synthesized
  source 1..20: mol_type = other DNA
aaatcccttgaaatgcatgt

SEQ ID NO: 43893 - DNA, 20 bp, synthetic construct
  misc_feature 1..20: note = chemically synthesized
  source 1..20: mol_type = other DNA
cccttgaaatgcatgtaggc

SEQ ID NO: 43894 - DNA, 20 bp, synthetic construct
  misc_feature 1..20: note = chemically synthesized
  source 1..20: mol_type = other DNA
gcatgtaggctggacatcaa

SEQ ID NO: 43895 - DNA, 20 bp, synthetic construct
  misc_feature 1..20: note = chemically synthesized
  source 1..20: mol_type = other DNA
gtaggctggacatcaaaagc

SEQ ID NO: 43896 - DNA, 20 bp, synthetic construct
  misc_feature 1..20: note = chemically synthesized
  source 1..20: mol_type = other DNA
caaaagcaagcaatctcttc

SEQ ID NO: 43897 - DNA, 20 bp, synthetic construct
  misc_feature 1..20: note = chemically synthesized
  source 1..20: mol_type = other DNA
aaaagcaagcaatctcttca

SEQ ID NO: 43898 - DNA, 20 bp, synthetic construct
  misc_feature 1..20: note = chemically synthesized
  source 1..20: mol_type = other DNA
aagcaagcaatctcttcaag

SEQ ID NO: 43899 - DNA, 20 bp, synthetic construct
  misc_feature 1..20: note = chemically synthesized
  source 1..20: mol_type = other DNA
caagcaatctcttcaaggag

SEQ ID NO: 43900 - DNA, 20 bp, synthetic construct
  misc_feature 1..20: note = chemically synthesized
  source 1..20: mol_type = other DNA
caatctcttcaaggagcagc

SEQ ID NO: 43901 - DNA, 20 bp, synthetic construct
  misc_feature 1..20: note = chemically synthesized
  source 1..20: mol_type = other DNA
ctcttcaaggagcagctagt

SEQ ID NO: 43902 - DNA, 20 bp, synthetic construct
  misc_feature 1..20: note = chemically synthesized
  source 1..20: mol_type = other DNA
tcaaggagcagctagttggt

SEQ ID NO: 43903 - DNA, 20 bp, synthetic construct
  misc_feature 1..20: note = chemically synthesized
  source 1..20: mol_type = other DNA
caaggagcagctagttggta

SEQ ID NO: 43904 - DNA, 20 bp, synthetic construct
  misc_feature 1..20: note = chemically synthesized
  source 1..20: mol_type = other DNA
gagcagctagttggtaaggt

SEQ ID NO: 43905 - DNA, 20 bp, synthetic construct
  misc_feature 1..20: note = chemically synthesized
  source 1..20: mol_type = other DNA
tagttggtaaggtcagtgtg

SEQ ID NO: 43906 - DNA, 20 bp, synthetic construct
  misc_feature 1..20: note = chemically synthesized
  source 1..20: mol_type = other DNA
agttggtaaggtcagtgtgc

SEQ ID NO: 43907 - DNA, 20 bp, synthetic construct
  misc_feature 1..20: note = chemically synthesized
  source 1..20: mol_type = other DNA
gttggtaaggtcagtgtgca

SEQ ID NO: 43908 - DNA, 20 bp, synthetic construct
  misc_feature 1..20: note = chemically synthesized
  source 1..20: mol_type = other DNA
gtcagtgtgcagggtgcata

SEQ ID NO: 43909 - DNA, 20 bp, synthetic construct
  misc_feature 1..20: note = chemically synthesized
  source 1..20: mol_type = other DNA
tcagtgtgcagggtgcataa

SEQ ID NO: 43910 - DNA, 20 bp, synthetic construct
  misc_feature 1..20: note = chemically synthesized
  source 1..20: mol_type = other DNA
cagtgtgcagggtgcataaa

SEQ ID NO: 43911 - DNA, 20 bp, synthetic construct
  misc_feature 1..20: note = chemically synthesized
  source 1..20: mol_type = other DNA
tgtgcagggtgcataaaggg

SEQ ID NO: 43912 - DNA, 20 bp, synthetic construct
  misc_feature 1..20: note = chemically synthesized
  source 1..20: mol_type = other DNA
tgcagggtgcataaagggca

SEQ ID NO: 43913 - DNA, 20 bp, synthetic construct
  misc_feature 1..20: note = chemically synthesized
  source 1..20: mol_type = other DNA
gcagggtgcataaagggcag

SEQ ID NO: 43914 - DNA, 20 bp, synthetic construct
  misc_feature 1..20: note = chemically synthesized
  source 1..20: mol_type = other DNA
ggtgcataaagggcagaggc

SEQ ID NO: 43915 - DNA, 20 bp, synthetic construct
  misc_feature 1..20: note = chemically synthesized
  source 1..20: mol_type = other DNA
tgcataaagggcagaggccg

SEQ ID NO: 43916 - DNA, 20 bp, synthetic construct
  misc_feature 1..20: note = chemically synthesized
  source 1..20: mol_type = other DNA
gcataaagggcagaggccgg

SEQ ID NO: 43917 - DNA, 20 bp, synthetic construct
  misc_feature 1..20: note = chemically synthesized
  source 1..20: mol_type = other DNA
cataaagggcagaggccgga

SEQ ID NO: 43918 - DNA, 20 bp, synthetic construct
  misc_feature 1..20: note = chemically synthesized
  source 1..20: mol_type = other DNA
ataaagggcagaggccggag

SEQ ID NO: 43919 - DNA, 20 bp, synthetic construct
  misc_feature 1..20: note = chemically synthesized
  source 1..20: mol_type = other DNA
taaagggcagaggccggagg

SEQ ID NO: 43920 - DNA, 20 bp, synthetic construct
  misc_feature 1..20: note = chemically synthesized
  source 1..20: mol_type = other DNA
ggcagaggccggagggggtc

SEQ ID NO: 43921 - DNA, 20 bp, synthetic construct
  misc_feature 1..20: note = chemically synthesized
  source 1..20: mol_type = other DNA
gcagaggccggagggggtcc

SEQ ID NO: 43922 - DNA, 20 bp, synthetic construct
  misc_feature 1..20: note = chemically synthesized
  source 1..20: mol_type = other DNA
ggccggagggggtccaggct

SEQ ID NO: 43923 - DNA, 20 bp, synthetic construct
  misc_feature 1..20: note = chemically synthesized
  source 1..20: mol_type = other DNA
gagggggtccaggctaagtt

SEQ ID NO: 43924 - DNA, 20 bp, synthetic construct
  misc_feature 1..20: note = chemically synthesized
  source 1..20: mol_type = other DNA
ggggtccaggctaagtttag

SEQ ID NO: 43925 - DNA, 20 bp, synthetic construct
  misc_feature 1..20: note = chemically synthesized
  source 1..20: mol_type = other DNA
gggtccaggctaagtttaga

SEQ ID NO: 43926 - DNA, 20 bp, synthetic construct
  misc_feature 1..20: note = chemically synthesized
  source 1..20: mol_type = other DNA
ggctaagtttagaaggctgc

SEQ ID NO: 43927 - DNA, 20 bp, synthetic construct
  misc_feature 1..20: note = chemically synthesized
  source 1..20: mol_type = other DNA
gctaagtttagaaggctgcc

SEQ ID NO: 43928 - DNA, 20 bp, synthetic construct
  misc_feature 1..20: note = chemically synthesized
  source 1..20: mol_type = other DNA
gtttagaaggctgccaggtt

SEQ ID NO: 43929 - DNA, 20 bp, synthetic construct
  misc_feature 1..20: note = chemically synthesized
  source 1..20: mol_type = other DNA
tttagaaggctgccaggtta

SEQ ID NO: 43930 - DNA, 20 bp, synthetic construct
  misc_feature 1..20: note = chemically synthesized
  source 1..20: mol_type = other DNA
gaaggctgccaggttaaggc

SEQ ID NO: 43931 - DNA, 20 bp, synthetic construct
  misc_feature 1..20: note = chemically synthesized
  source 1..20: mol_type = other DNA
ggctgccaggttaaggccag

SEQ ID NO: 43932 - DNA, 20 bp, synthetic construct
  misc_feature 1..20: note = chemically synthesized
  source 1..20: mol_type = other DNA
gccaggttaaggccagtgga

SEQ ID NO: 43933 - DNA, 20 bp, synthetic construct
  misc_feature 1..20: note = chemically synthesized
  source 1..20: mol_type = other DNA
taaggccagtggaaagaatt

SEQ ID NO: 43934 - DNA, 20 bp, synthetic construct
  misc_feature 1..20: note = chemically synthesized
  source 1..20: mol_type = other DNA
ggccagtggaaagaattcgg

SEQ ID NO: 43935 - DNA, 20 bp, synthetic construct
  misc_feature 1..20: note = chemically synthesized
  source 1..20: mol_type = other DNA
gccagtggaaagaattcggt

SEQ ID NO: 43936 - DNA, 20 bp, synthetic construct
  misc_feature 1..20: note = chemically synthesized
  source 1..20: mol_type = other DNA
agtggaaagaattcggtggg

SEQ ID NO: 43937 - DNA, 20 bp, synthetic construct
  misc_feature 1..20: note = chemically synthesized
  source 1..20: mol_type = other DNA
gaaagaattcggtgggcagc

SEQ ID NO: 43938 - DNA, 20 bp, synthetic construct
  misc_feature 1..20: note = chemically synthesized
  source 1..20: mol_type = other DNA
aaagaattcggtgggcagcg

SEQ ID NO: 43939 - DNA, 20 bp, synthetic construct
  misc_feature 1..20: note = chemically synthesized
  source 1..20: mol_type = other DNA
agaattcggtgggcagcgag

SEQ ID NO: 43940 - DNA, 20 bp, synthetic construct
  misc_feature 1..20: note = chemically synthesized
  source 1..20: mol_type = other DNA
ggtgggcagcgaggagtcca

SEQ ID NO: 43941 - DNA, 20 bp, synthetic construct
  misc_feature 1..20: note = chemically synthesized
  source 1..20: mol_type = other DNA
gggcagcgaggagtccacag

SEQ ID NO: 43942 - DNA, 20 bp, synthetic construct
  misc_feature 1..20: note = chemically synthesized
  source 1..20: mol_type = other DNA
ggcagcgaggagtccacagt

SEQ ID NO: 43943 - DNA, 20 bp, synthetic construct
  misc_feature 1..20: note = chemically synthesized
  source 1..20: mol_type = other DNA
agtccacagtaggattgatt

SEQ ID NO: 43944 - DNA, 20 bp, synthetic construct
  misc_feature 1..20: note = chemically synthesized
  source 1..20: mol_type = other DNA
ccacagtaggattgattcag

SEQ ID NO: 43945 - DNA, 20 bp, synthetic construct
  misc_feature 1..20: note = chemically synthesized
  source 1..20: mol_type = other DNA
gattgattcagaagtctcac

SEQ ID NO: 43946 - DNA, 20 bp, synthetic construct
  misc_feature 1..20: note = chemically synthesized
  source 1..20: mol_type = other DNA
gattcagaagtctcactggt

SEQ ID NO: 43947 - DNA, 20 bp, synthetic construct
  misc_feature 1..20: note = chemically synthesized
  source 1..20: mol_type = other DNA
tcagaagtctcactggtcag

SEQ ID NO: 43948 - DNA, 20 bp, synthetic construct
  misc_feature 1..20: note = chemically synthesized
  source 1..20: mol_type = other DNA
cagaagtctcactggtcagc

SEQ ID NO: 43949 - DNA, 20 bp, synthetic construct
  misc_feature 1..20: note = chemically synthesized
  source 1..20: mol_type = other DNA
gaagtctcactggtcagcag

SEQ ID NO: 43950 - DNA, 20 bp, synthetic construct
  misc_feature 1..20: note = chemically synthesized
  source 1..20: mol_type = other DNA
ctcactggtcagcaggagac

SEQ ID NO: 43951 - DNA, 20 bp, synthetic construct
  misc_feature 1..20: note = chemically synthesized
  source 1..20: mol_type = other DNA
tcactggtcagcaggagaca

SEQ ID NO: 43952 - DNA, 20 bp, synthetic construct
  misc_feature 1..20: note = chemically synthesized
  source 1..20: mol_type = other DNA
ctggtcagcaggagacaagg

SEQ ID NO: 43953 - DNA, 20 bp, synthetic construct
  misc_feature 1..20: note = chemically synthesized
  source 1..20: mol_type = other DNA
agcaggagacaaggtggacc

SEQ ID NO: 43954 - DNA, 20 bp, synthetic construct
  misc_feature 1..20: note = chemically synthesized
  source 1..20: mol_type = other DNA
gcaggagacaaggtggaccc

SEQ ID NO: 43955 - DNA, 20 bp, synthetic construct
  misc_feature 1..20: note = chemically synthesized
  source 1..20: mol_type = other DNA
tggacccaggaaacactgaa

SEQ ID NO: 43956 - DNA, 20 bp, synthetic construct
  misc_feature 1..20: note = chemically synthesized
  source 1..20: mol_type = other DNA
ggacccaggaaacactgaaa

SEQ ID NO: 43957 - DNA, 20 bp, synthetic construct
  misc_feature 1..20: note = chemically synthesized
  source 1..20: mol_type = other DNA
cccaggaaacactgaaaagg

SEQ ID NO: 43958 - DNA, 20 bp, synthetic construct
  misc_feature 1..20: note = chemically synthesized
  source 1..20: mol_type = other DNA
ccaggaaacactgaaaaggt

SEQ ID NO: 43959 - DNA, 20 bp, synthetic construct
  misc_feature 1..20: note = chemically synthesized
  source 1..20: mol_type = other DNA
aaacactgaaaaggtgggcc

SEQ ID NO: 43960 - DNA, 20 bp, synthetic construct
  misc_feature 1..20: note = chemically synthesized
  source 1..20: mol_type = other DNA
cactgaaaaggtgggcccgg

SEQ ID NO: 43961 - DNA, 20 bp, synthetic construct
  misc_feature 1..20: note = chemically synthesized
  source 1..20: mol_type = other DNA
aaggtgggcccggcagaact

SEQ ID NO: 43962 - DNA, 20 bp, synthetic construct
  misc_feature 1..20: note = chemically synthesized
  source 1..20: mol_type = other DNA
ggtgggcccggcagaacttg

SEQ ID NO: 43963 - DNA, 20 bp, synthetic construct
  misc_feature 1..20: note = chemically synthesized
  source 1..20: mol_type = other DNA
gcccggcagaacttggagtc

SEQ ID NO: 43964 - DNA, 20 bp, synthetic construct
  misc_feature 1..20: note = chemically synthesized
  source 1..20: mol_type = other DNA
ttggagtctggcatcccacg

SEQ ID NO: 43965 - DNA, 20 bp, synthetic construct
  misc_feature 1..20: note = chemically synthesized
  source 1..20: mol_type = other DNA
tggagtctggcatcccacgc

SEQ ID NO: 43966 - DNA, 20 bp, synthetic construct
  misc_feature 1..20: note = chemically synthesized
  source 1..20: mol_type = other DNA
ggagtctggcatcccacgca

SEQ ID NO: 43967 - DNA, 20 bp, synthetic construct
  misc_feature 1..20: note = chemically synthesized
  source 1..20: mol_type = other DNA
tctggcatcccacgcagggt

SEQ ID NO: 43968 - DNA, 20 bp, synthetic construct
  misc_feature 1..20: note = chemically synthesized
  source 1..20: mol_type = other DNA
tggcatcccacgcagggtga

SEQ ID NO: 43969 - DNA, 20 bp, synthetic construct
  misc_feature 1..20: note = chemically synthesized
  source 1..20: mol_type = other DNA
ggcatcccacgcagggtgag

SEQ ID NO: 43970 - DNA, 20 bp, synthetic construct
  misc_feature 1..20: note = chemically synthesized
  source 1..20: mol_type = other DNA
atcccacgcagggtgagagg

SEQ ID NO: 43971 - DNA, 20 bp, synthetic construct
  misc_feature 1..20: note = chemically synthesized
  source 1..20: mol_type = other DNA
tcccacgcagggtgagaggc

SEQ ID NO: 43972 - DNA, 20 bp, synthetic construct
  misc_feature 1..20: note = chemically synthesized
  source 1..20: mol_type = other DNA
ccacgcagggtgagaggcgg

SEQ ID NO: 43973 - DNA, 20 bp, synthetic construct
  misc_feature 1..20: note = chemically synthesized
  source 1..20: mol_type = other DNA
acgcagggtgagaggcggga

SEQ ID NO: 43974 - DNA, 20 bp, synthetic construct
  misc_feature 1..20: note = chemically synthesized
  source 1..20: mol_type = other DNA
cgcagggtgagaggcgggag

SEQ ID NO: 43975 - DNA, 20 bp, synthetic construct
  misc_feature 1..20: note = chemically synthesized
  source 1..20: mol_type = other DNA
cagggtgagaggcgggagag

SEQ ID NO: 43976 - DNA, 20 bp, synthetic construct
  misc_feature 1..20: note = chemically synthesized
  source 1..20: mol_type = other DNA
agggtgagaggcgggagagg

SEQ ID NO: 43977 - DNA, 20 bp, synthetic construct
  misc_feature 1..20: note = chemically synthesized
  source 1..20: mol_type = other DNA
ggtgagaggcgggagaggag

SEQ ID NO: 43978 - DNA, 20 bp, synthetic construct
  misc_feature 1..20: note = chemically synthesized
  source 1..20: mol_type = other DNA
ggcgggagaggaggagcccc

SEQ ID NO: 43979 - DNA, 20 bp, synthetic construct
  misc_feature 1..20: note = chemically synthesized
  source 1..20: mol_type = other DNA
gcgggagaggaggagcccct

SEQ ID NO: 43980 - DNA, 20 bp, synthetic construct
  misc_feature 1..20: note = chemically synthesized
  source 1..20: mol_type = other DNA
cgggagaggaggagccccta

SEQ ID NO: 43981 - DNA, 20 bp, synthetic construct
  misc_feature 1..20: note = chemically synthesized
  source 1..20: mol_type = other DNA
aggaggagcccctagggcgc

SEQ ID NO: 43982 - DNA, 20 bp, synthetic construct
  misc_feature 1..20: note = chemically synthesized
  source 1..20: mol_type = other DNA
tagggcgccggcctgccttc

SEQ ID NO: 43983 - DNA, 20 bp, synthetic construct
  misc_feature 1..20: note = chemically synthesized
  source 1..20: mol_type = other DNA
cgccggcctgccttccagcc

SEQ ID NO: 43984 - DNA, 20 bp, synthetic construct
  misc_feature 1..20: note = chemically synthesized
  source 1..20: mol_type = other DNA
ggcctgccttccagcccagt

SEQ ID NO: 43985 - DNA, 20 bp, synthetic construct
  misc_feature 1..20: note = chemically synthesized
  source 1..20: mol_type = other DNA
gcctgccttccagcccagtt

SEQ ID NO: 43986 - DNA, 20 bp, synthetic construct
  misc_feature 1..20: note = chemically synthesized
  source 1..20: mol_type = other DNA
cttccagcccagttaggatt

SEQ ID NO: 43987 - DNA, 20 bp, synthetic construct
  misc_feature 1..20: note = chemically synthesized
  source 1..20: mol_type = other DNA
ttccagcccagttaggattt

SEQ ID NO: 43988 - DNA, 20 bp, synthetic construct
  misc_feature 1..20: note = chemically synthesized
  source 1..20: mol_type = other DNA
ccagcccagttaggatttgg

SEQ ID NO: 43989 - DNA, 20 bp, synthetic construct
  misc_feature 1..20: note = chemically synthesized
  source 1..20: mol_type = other DNA
gcgcgtaatctgacgctgtt

SEQ ID NO: 43990 - DNA, 20 bp, synthetic construct
  misc_feature 1..20: note = chemically synthesized
  source 1..20: mol_type = other DNA
cgcgtaatctgacgctgttt

SEQ ID NO: 43991 - DNA, 20 bp, synthetic construct
  misc_feature 1..20: note = chemically synthesized
  source 1..20: mol_type = other DNA
gcgtaatctgacgctgtttg

SEQ ID NO: 43992 - DNA, 20 bp, synthetic construct
  misc_feature 1..20: note = chemically synthesized
  source 1..20: mol_type = other DNA
gtaatctgacgctgtttggg

SEQ ID NO: 43993 - DNA, 20 bp, synthetic construct
  misc_feature 1..20: note = chemically synthesized
  source 1..20: mol_type = other DNA
taatctgacgctgtttgggg

SEQ ID NO: 43994 - DNA, 20 bp, synthetic construct
  misc_feature 1..20: note = chemically synthesized
  source 1..20: mol_type = other DNA
aatctgacgctgtttgggga

SEQ ID NO: 43995 - DNA, 20 bp, synthetic construct
  misc_feature 1..20: note = chemically synthesized
  source 1..20: mol_type = other DNA
tgacgctgtttggggagggc

SEQ ID NO: 43996 - DNA, 20 bp, synthetic construct
  misc_feature 1..20: note = chemically synthesized
  source 1..20: mol_type = other DNA
gacgctgtttggggagggcg

SEQ ID NO: 43997 - DNA, 20 bp, synthetic construct
  misc_feature 1..20: note = chemically synthesized
  source 1..20: mol_type = other DNA
gaggccgaaacctgatcctc

SEQ ID NO: 43998 - DNA, 20 bp, synthetic construct
  misc_feature 1..20: note = chemically synthesized
  source 1..20: mol_type = other DNA
cgaaacctgatcctccagtc

SEQ ID NO: 43999 - DNA, 20 bp, synthetic construct
  misc_feature 1..20: note = chemically synthesized
  source 1..20: mol_type = other DNA
gaaacctgatcctccagtcc

SEQ ID NO: 44000 - DNA, 20 bp, synthetic construct
  misc_feature 1..20: note = chemically synthesized
  source 1..20: mol_type = other DNA
aaacctgatcctccagtccg

SEQ ID NO: 44001 - DNA, 20 bp, synthetic construct
  misc_feature 1..20: note = chemically synthesized
  source 1..20: mol_type = other DNA
aacctgatcctccagtccgg

SEQ ID NO: 44002 - DNA, 20 bp, synthetic construct
  misc_feature 1..20: note = chemically synthesized
  source 1..20: mol_type = other DNA
gggttccgttaatgtttaat

SEQ ID NO: 44003 - DNA, 20 bp, synthetic construct
  misc_feature 1..20: note = chemically synthesized
  source 1..20: mol_type = other DNA
tccgttaatgtttaatcaga

SEQ ID NO: 44004 - DNA, 20 bp, synthetic construct
  misc_feature 1..20: note = chemically synthesized
  source 1..20: mol_type = other DNA
ccgttaatgtttaatcagat

SEQ ID NO: 44005 - DNA, 20 bp, synthetic construct
  misc_feature 1..20: note = chemically synthesized
  source 1..20: mol_type = other DNA
aatcagataggatcgtccga

SEQ ID NO: 44006 - DNA, 20 bp, synthetic construct
  misc_feature 1..20: note = chemically synthesized
  source 1..20: mol_type = other DNA
atcagataggatcgtccgat

SEQ ID NO: 44007 - DNA, 20 bp, synthetic construct
  misc_feature 1..20: note = chemically synthesized
  source 1..20: mol_type = other DNA
tcagataggatcgtccgatg

SEQ ID NO: 44008 - DNA, 20 bp, synthetic construct
  misc_feature 1..20: note = chemically synthesized
  source 1..20: mol_type = other DNA
aggatcgtccgatggggctc

SEQ ID NO: 44009 - DNA, 20 bp, synthetic construct
  misc_feature 1..20: note = chemically synthesized
  source 1..20: mol_type = other DNA
atcgtccgatggggctctgg

SEQ ID NO: 44010 - DNA, 20 bp, synthetic construct
  misc_feature 1..20: note = chemically synthesized
  source 1..20: mol_type = other DNA
gtggcgtgatctgcgcgccc

SEQ ID NO: 44011 - DNA, 20 bp, synthetic construct
  misc_feature 1..20: note = chemically synthesized
  source 1..20: mol_type = other DNA
tggcgtgatctgcgcgcccc

SEQ ID NO: 44012 - DNA, 20 bp, synthetic construct
  misc_feature 1..20: note = chemically synthesized
  source 1..20: mol_type = other DNA
atctgcgcgccccaggcgtc

SEQ ID NO: 44013 - DNA, 20 bp, synthetic construct
  misc_feature 1..20: note = chemically synthesized
  source 1..20: mol_type = other DNA
ggcgtcaagcacccacaccc

SEQ ID NO: 44014 - DNA, 20 bp, synthetic construct
  misc_feature 1..20: note = chemically synthesized
  source 1..20: mol_type = other DNA
gtcaagcacccacaccctag

SEQ ID NO: 44015 - DNA, 20 bp, synthetic construct
  misc_feature 1..20: note = chemically synthesized
  source 1..20: mol_type = other DNA
tcaagcacccacaccctaga

SEQ ID NO: 44016 - DNA, 20 bp, synthetic construct
  misc_feature 1..20: note = chemically synthesized
  source 1..20: mol_type = other DNA
cacaccctagaaggtttccg

SEQ ID NO: 44017 - DNA, 20 bp, synthetic construct
  misc_feature 1..20: note = chemically synthesized
  source 1..20: mol_type = other DNA
aaggtttccgcagcgacgtc

SEQ ID NO: 44018 - DNA, 20 bp, synthetic construct
  misc_feature 1..20: note = chemically synthesized
  source 1..20: mol_type = other DNA
aggtttccgcagcgacgtcg

SEQ ID NO: 44019 - DNA, 20 bp, synthetic construct
  misc_feature 1..20: note = chemically synthesized
  source 1..20: mol_type = other DNA
cagcgacgtcgaggcgctca

SEQ ID NO: 44020 - DNA, 20 bp, synthetic construct
  misc_feature 1..20: note = chemically synthesized
  source 1..20: mol_type = other DNA
cgtcgaggcgctcatggttg

SEQ ID NO: 44021 - DNA, 20 bp, synthetic construct
  misc_feature 1..20: note = chemically synthesized
  source 1..20: mol_type = other DNA
gtcgaggcgctcatggttgc

SEQ ID NO: 44022 - DNA, 20 bp, synthetic construct
  misc_feature 1..20: note = chemically synthesized
  source 1..20: mol_type = other DNA
gaggcgctcatggttgcagg

SEQ ID NO: 44023 - DNA, 20 bp, synthetic construct
  misc_feature 1..20: note = chemically synthesized
  source 1..20: mol_type = other DNA
aggcgctcatggttgcaggc

SEQ ID NO: 44024 - DNA, 20 bp, synthetic construct
  misc_feature 1..20: note = chemically synthesized
  source 1..20: mol_type = other DNA
tgcaggcgggcgccgccgtt

SEQ ID NO: 44025 - DNA, 20 bp, synthetic construct
  misc_feature 1..20: note = chemically synthesized
  source 1..20: mol_type = other DNA
gcgggcgccgccgttcagtt

SEQ ID NO: 44026 - DNA, 20 bp, synthetic construct
  misc_feature 1..20: note = chemically synthesized
  source 1..20: mol_type = other DNA
cgggcgccgccgttcagttc

SEQ ID NO: 44027 - DNA, 20 bp, synthetic construct
  misc_feature 1..20: note = chemically synthesized
  source 1..20: mol_type = other DNA
gggcgccgccgttcagttca

SEQ ID NO: 44028 - DNA, 20 bp, synthetic construct
  misc_feature 1..20: note = chemically synthesized
  source 1..20: mol_type = other DNA
cgccgttcagttcagggtct

SEQ ID NO: 44029 - DNA, 20 bp, synthetic construct
  misc_feature 1..20: note = chemically synthesized
  source 1..20: mol_type = other DNA
ttcagttcagggtctgagcc

SEQ ID NO: 44030 - DNA, 20 bp, synthetic construct
  misc_feature 1..20: note = chemically synthesized
  source 1..20: mol_type = other DNA
cagttcagggtctgagcctg

SEQ ID NO: 44031 - DNA, 20 bp, synthetic construct
  misc_feature 1..20: note = chemically synthesized
  source 1..20: mol_type = other DNA
agttcagggtctgagcctgg

SEQ ID NO: 44032 - DNA, 20 bp, synthetic construct
  misc_feature 1..20: note = chemically synthesized
  source 1..20: mol_type = other DNA
ttcagggtctgagcctggag

SEQ ID NO: 44033 - DNA, 20 bp, synthetic construct
  misc_feature 1..20: note = chemically synthesized
  source 1..20: mol_type = other DNA
gggtctgagcctggaggagt

SEQ ID NO: 44034 - DNA, 20 bp, synthetic construct
  misc_feature 1..20: note = chemically synthesized
  source 1..20: mol_type = other DNA
ctgagcctggaggagtgagc

SEQ ID NO: 44035 - DNA, 20 bp, synthetic construct
  misc_feature 1..20: note = chemically synthesized
  source 1..20: mol_type = other DNA
tgagcctggaggagtgagcc

SEQ ID NO: 44036 - DNA, 20 bp, synthetic construct
  misc_feature 1..20: note = chemically synthesized
  source 1..20: mol_type = other DNA
gcctggaggagtgagccagg

SEQ ID NO: 44037 - DNA, 20 bp, synthetic construct
  misc_feature 1..20: note = chemically synthesized
  source 1..20: mol_type = other DNA
ggaggagtgagccaggcagt

SEQ ID NO: 44038 - DNA, 20 bp, synthetic construct
  misc_feature 1..20: note = chemically synthesized
  source 1..20: mol_type = other DNA
agtgagccaggcagtgagac

SEQ ID NO: 44039 - DNA, 20 bp, synthetic construct
  misc_feature 1..20: note = chemically synthesized
  source 1..20: mol_type = other DNA
gccaggcagtgagactggct

SEQ ID NO: 44040 - DNA, 20 bp, synthetic construct
  misc_feature 1..20: note = chemically synthesized
  source 1..20: mol_type = other DNA
ccaggcagtgagactggctc

SEQ ID NO: 44041 - DNA, 20 bp, synthetic construct
  misc_feature 1..20: note = chemically synthesized
  source 1..20: mol_type = other DNA
ggcagtgagactggctcggg

SEQ ID NO: 44042 - DNA, 20 bp, synthetic construct
  misc_feature 1..20: note = chemically synthesized
  source 1..20: mol_type = other DNA
gcagtgagactggctcgggc

SEQ ID NO: 44043 - DNA, 20 bp, synthetic construct
  misc_feature 1..20: note = chemically synthesized
  source 1..20: mol_type = other DNA
tgagactggctcgggcgggc

SEQ ID NO: 44044 - DNA, 20 bp, synthetic construct
  misc_feature 1..20: note = chemically synthesized
  source 1..20: mol_type = other DNA
gagactggctcgggcgggcc

SEQ ID NO: 44045 - DNA, 20 bp, synthetic construct
  misc_feature 1..20: note = chemically synthesized
  source 1..20: mol_type = other DNA
cgggccgggacgcgtcgttg

SEQ ID NO: 44046 - DNA, 20 bp, synthetic construct
  misc_feature 1..20: note = chemically synthesized
  source 1..20: mol_type = other DNA
gccgggacgcgtcgttgcag

SEQ ID NO: 44047 - DNA, 20 bp, synthetic construct
  misc_feature 1..20: note = chemically synthesized
  source 1..20: mol_type = other DNA
gggacgcgtcgttgcagcag

SEQ ID NO: 44048 - DNA, 20 bp, synthetic construct
  misc_feature 1..20: note = chemically synthesized
  source 1..20: mol_type = other DNA
gtcgttgcagcagcggctcc

SEQ ID NO: 44049 - DNA, 20 bp, synthetic construct
  misc_feature 1..20: note = chemically synthesized
  source 1..20: mol_type = other DNA
cagcagcggctcccagctcc

SEQ ID NO: 44050 - DNA, 20 bp, synthetic construct
  misc_feature 1..20: note = chemically synthesized
  source 1..20: mol_type = other DNA
agcggctcccagctcccagc

SEQ ID NO: 44051 - DNA, 20 bp, synthetic construct
  misc_feature 1..20: note = chemically synthesized
  source 1..20: mol_type = other DNA
gcggctcccagctcccagcc

SEQ ID NO: 44052 - DNA, 20 bp, synthetic construct
  misc_feature 1..20: note = chemically synthesized
  source 1..20: mol_type = other DNA
cgcgccctgctcctgaactt

SEQ ID NO: 44053 - DNA, 20 bp, synthetic construct
  misc_feature 1..20: note = chemically synthesized
  source 1..20: mol_type = other DNA
cctgaacttcagctcctgca

SEQ ID NO: 44054 - DNA, 20 bp, synthetic construct
  misc_feature 1..20: note = chemically synthesized
  source 1..20: mol_type = other DNA
tgcacagtcctccccaccgc

SEQ ID NO: 44055 - DNA, 20 bp, synthetic construct
  misc_feature 1..20: note = chemically synthesized
  source 1..20: mol_type = other DNA
gcacagtcctccccaccgca

SEQ ID NO: 44056 - DNA, 20 bp, synthetic construct
  misc_feature 1..20: note = chemically synthesized
  source 1..20: mol_type = other DNA
tcctccccaccgcaaggctc

SEQ ID NO: 44057 - DNA, 20 bp, synthetic construct
  misc_feature 1..20: note = chemically synthesized
  source 1..20: mol_type = other DNA
cctccccaccgcaaggctca

SEQ ID NO: 44058 - DNA, 20 bp, synthetic construct
  misc_feature 1..20: note = chemically synthesized
  source 1..20: mol_type = other DNA
cgcaaggctcaaggcgccgc

SEQ ID NO: 44059 - DNA, 20 bp, synthetic construct
  misc_feature 1..20: note = chemically synthesized
  source 1..20: mol_type = other DNA
ggctcaaggcgccgccggcg

SEQ ID NO: 44060 - DNA, 20 bp, synthetic construct
  misc_feature 1..20: note = chemically synthesized
  source 1..20: mol_type = other DNA
ccgccggcgtggaccgcgca

SEQ ID NO: 44061 - DNA, 20 bp, synthetic construct
  misc_feature 1..20: note = chemically synthesized
  source 1..20: mol_type = other DNA
cgtggaccgcgcacggcctc

SEQ ID NO: 44062 - DNA, 20 bp, synthetic construct
  misc_feature 1..20: note = chemically synthesized
  source 1..20: mol_type = other DNA
gtggaccgcgcacggcctct

SEQ ID NO: 44063 - DNA, 20 bp, synthetic construct
  misc_feature 1..20: note = chemically synthesized
  source 1..20: mol_type = other DNA
cggcctctaggtctcctcgc

SEQ ID NO: 44064 - DNA, 20 bp, synthetic construct
  misc_feature 1..20: note = chemically synthesized
  source 1..20: mol_type = other DNA
ggcctctaggtctcctcgcc

SEQ ID NO: 44065 - DNA, 20 bp, synthetic construct
  misc_feature 1..20: note = chemically synthesized
  source 1..20: mol_type = other DNA
tctaggtctcctcgccagga

SEQ ID NO: 44066 - DNA, 20 bp, synthetic construct
  misc_feature 1..20: note = chemically synthesized
  source 1..20: mol_type = other DNA
caggacagcaacctctcccc

SEQ ID NO: 44067 - DNA, 20 bp, synthetic construct
  misc_feature 1..20: note = chemically synthesized
  source 1..20: mol_type = other DNA
aacctctcccctggccctca

SEQ ID NO: 44068 - DNA, 20 bp, synthetic construct
  misc_feature 1..20: note = chemically synthesized
  source 1..20: mol_type = other DNA
acctctcccctggccctcat

SEQ ID NO: 44069 - DNA, 20 bp, synthetic construct
  misc_feature 1..20: note = chemically synthesized
  source 1..20: mol_type = other DNA
ctggccctcatgggcaccgt

SEQ ID NO: 44070 - DNA, 20 bp, synthetic construct
  misc_feature 1..20: note = chemically synthesized
  source 1..20: mol_type = other DNA
ctcatgggcaccgtcagctc

SEQ ID NO: 44071 - DNA, 20 bp, synthetic construct
  misc_feature 1..20: note = chemically synthesized
  source 1..20: mol_type = other DNA
tcatgggcaccgtcagctcc

SEQ ID NO: 44072 - DNA, 20 bp, synthetic construct
  misc_feature 1..20: note = chemically synthesized
  source 1..20: mol_type = other DNA
tgggcaccgtcagctccagg

SEQ ID NO: 44073 - DNA, 20 bp, synthetic construct
  misc_feature 1..20: note = chemically synthesized
  source 1..20: mol_type = other DNA
ccgtcagctccaggcggtcc

SEQ ID NO: 44074 - DNA, 20 bp, synthetic construct
  misc_feature 1..20: note = chemically synthesized
  source 1..20: mol_type = other DNA
tcagctccaggcggtcctgg

SEQ ID NO: 44075 - DNA, 20 bp, synthetic construct
  misc_feature 1..20: note = chemically synthesized
  source 1..20: mol_type = other DNA
gctgctgctgctgctgctcc

SEQ ID NO: 44076 - DNA, 20 bp, synthetic construct
  misc_feature 1..20: note = chemically synthesized
  source 1..20: mol_type = other DNA
ctgctgctgctgctgctcct

SEQ ID NO: 44077 - DNA, 20 bp, synthetic construct
  misc_feature 1..20: note = chemically synthesized
  source 1..20: mol_type = other DNA
gctgctgctcctgggtcccg

SEQ ID NO: 44078 - DNA, 20 bp, synthetic construct
  misc_feature 1..20: note = chemically synthesized
  source 1..20: mol_type = other DNA
ctgctgctcctgggtcccgc

SEQ ID NO: 44079 - DNA, 20 bp, synthetic construct
  misc_feature 1..20: note = chemically synthesized
  source 1..20: mol_type = other DNA
gtcccgcgggcgcccgtgcg

SEQ ID NO: 44080 - DNA, 20 bp, synthetic construct
  misc_feature 1..20: note = chemically synthesized
  source 1..20: mol_type = other DNA
tcccgcgggcgcccgtgcgc

SEQ ID NO: 44081 - DNA, 20 bp, synthetic construct
  misc_feature 1..20: note = chemically synthesized
  source 1..20: mol_type = other DNA
ccgcgggcgcccgtgcgcag

SEQ ID NO: 44082 - DNA, 20 bp, synthetic construct
  misc_feature 1..20: note = chemically synthesized
  source 1..20: mol_type = other DNA
cgcgggcgcccgtgcgcagg

SEQ ID NO: 44083 - DNA, 20 bp, synthetic construct
  misc_feature 1..20: note = chemically synthesized
  source 1..20: mol_type = other DNA
gcgcccgtgcgcaggaggac

SEQ ID NO: 44084 - DNA, 20 bp, synthetic construct
  misc_feature 1..20: note = chemically synthesized
  source 1..20: mol_type = other DNA
cgcccgtgcgcaggaggacg

SEQ ID NO: 44085 - DNA, 20 bp, synthetic construct
  misc_feature 1..20: note = chemically synthesized
  source 1..20: mol_type = other DNA
cgtgcgcaggaggacgagga

SEQ ID NO: 44086 - DNA, 20 bp, synthetic construct
  misc_feature 1..20: note = chemically synthesized
  source 1..20: mol_type = other DNA
aggacgaggacggcgactac

SEQ ID NO: 44087 - DNA, 20 bp, synthetic construct
  misc_feature 1..20: note = chemically synthesized
  source 1..20: mol_type = other DNA
ggacgaggacggcgactacg

SEQ ID NO: 44088 - DNA, 20 bp, synthetic construct
  misc_feature 1..20: note = chemically synthesized
  source 1..20: mol_type = other DNA
acgaggacggcgactacgag

SEQ ID NO: 44089 - DNA, 20 bp, synthetic construct
  misc_feature 1..20: note = chemically synthesized
  source 1..20: mol_type = other DNA
ggacggcgactacgaggagc

SEQ ID NO: 44090 - DNA, 20 bp, synthetic construct
  misc_feature 1..20: note = chemically synthesized
  source 1..20: mol_type = other DNA
cgactacgaggagctggtgc

SEQ ID NO: 44091 - DNA, 20 bp, synthetic construct
  misc_feature 1..20: note = chemically synthesized
  source 1..20: mol_type = other DNA
tggtgctagccttgcgttcc

SEQ ID NO: 44092 - DNA, 20 bp, synthetic construct
  misc_feature 1..20: note = chemically synthesized
  source 1..20: mol_type = other DNA
ggtgctagccttgcgttccg

SEQ ID NO: 44093 - DNA, 20 bp, synthetic construct
  misc_feature 1..20: note = chemically synthesized
  source 1..20: mol_type = other DNA
tgctagccttgcgttccgag

SEQ ID NO: 44094 - DNA, 20 bp, synthetic construct
  misc_feature 1..20: note = chemically synthesized
  source 1..20: mol_type = other DNA
gctagccttgcgttccgagg

SEQ ID NO: 44095 - DNA, 20 bp, synthetic construct
  misc_feature 1..20: note = chemically synthesized
  source 1..20: mol_type = other DNA
gccttgcgttccgaggagga

SEQ ID NO: 44096 - DNA, 20 bp, synthetic construct
  misc_feature 1..20: note = chemically synthesized
  source 1..20: mol_type = other DNA
gcgttccgaggaggacggcc

SEQ ID NO: 44097 - DNA, 20 bp, synthetic construct
  misc_feature 1..20: note = chemically synthesized
  source 1..20: mol_type = other DNA
cgaggaggacggcctggccg

SEQ ID NO: 44098 - DNA, 20 bp, synthetic construct
  misc_feature 1..20: note = chemically synthesized
  source 1..20: mol_type = other DNA
acggcctggccgaagcaccc

SEQ ID NO: 44099 - DNA, 20 bp, synthetic construct
  misc_feature 1..20: note = chemically synthesized
  source 1..20: mol_type = other DNA
ctggccgaagcacccgagca

SEQ ID NO: 44100 - DNA, 20 bp, synthetic construct
  misc_feature 1..20: note = chemically synthesized
  source 1..20: mol_type = other DNA
agcacccgagcacggaacca

SEQ ID NO: 44101 - DNA, 20 bp, synthetic construct
  misc_feature 1..20: note = chemically synthesized
  source 1..20: mol_type = other DNA
ccaccttccaccgctgcgcc

SEQ ID NO: 44102 - DNA, 20 bp, synthetic construct
  misc_feature 1..20: note = chemically synthesized
  source 1..20: mol_type = other DNA
caccttccaccgctgcgcca

SEQ ID NO: 44103 - DNA, 20 bp, synthetic construct
  misc_feature 1..20: note = chemically synthesized
  source 1..20: mol_type = other DNA
tccaccgctgcgccaaggtg

SEQ ID NO: 44104 - DNA, 20 bp, synthetic construct
  misc_feature 1..20: note = chemically synthesized
  source 1..20: mol_type = other DNA
ccaccgctgcgccaaggtgc

SEQ ID NO: 44105 - DNA, 20 bp, synthetic construct
  misc_feature 1..20: note = chemically synthesized
  source 1..20: mol_type = other DNA
gctgcgccaaggtgcgggtg

SEQ ID NO: 44106 - DNA, 20 bp, synthetic construct
  misc_feature 1..20: note = chemically synthesized
  source 1..20: mol_type = other DNA
ctgcgccaaggtgcgggtgt

SEQ ID NO: 44107 - DNA, 20 bp, synthetic construct
  misc_feature 1..20: note = chemically synthesized
  source 1..20: mol_type = other DNA
tgcgccaaggtgcgggtgta

SEQ ID NO: 44108 - DNA, 20 bp, synthetic construct
  misc_feature 1..20: note = chemically synthesized
  source 1..20: mol_type = other DNA
ccaaggtgcgggtgtaggga

SEQ ID NO: 44109 - DNA, 20 bp, synthetic construct
  misc_feature 1..20: note = chemically synthesized
  source 1..20: mol_type = other DNA
caaggtgcgggtgtagggat

SEQ ID NO: 44110 - DNA, 20 bp, synthetic construct
  misc_feature 1..20: note = chemically synthesized
  source 1..20: mol_type = other DNA
aggtgcgggtgtagggatgg

SEQ ID NO: 44111 - DNA, 20 bp, synthetic construct
  misc_feature 1..20: note = chemically synthesized
  source 1..20: mol_type = other DNA
ggtgcgggtgtagggatggg

SEQ ID NO: 44112 - DNA, 20 bp, synthetic construct
  misc_feature 1..20: note = chemically synthesized
  source 1..20: mol_type = other DNA
cgggtgtagggatgggaggc

SEQ ID NO: 44113 - DNA, 20 bp, synthetic construct
  misc_feature 1..20: note = chemically synthesized
  source 1..20: mol_type = other DNA
gggtgtagggatgggaggcc

SEQ ID NO: 44114 - DNA, 20 bp, synthetic construct
  misc_feature 1..20: note = chemically synthesized
  source 1..20: mol_type = other DNA
ggtgtagggatgggaggccg

SEQ ID NO: 44115 - DNA, 20 bp, synthetic construct
  misc_feature 1..20: note = chemically synthesized
  source 1..20: mol_type = other DNA
gggaggccggggcgaacccg

SEQ ID NO: 44116 - DNA, 20 bp, synthetic construct
  misc_feature 1..20: note = chemically synthesized
  source 1..20: mol_type = other DNA
ggccggggcgaacccgcagc

SEQ ID NO: 44117 - DNA, 20 bp, synthetic construct
  misc_feature 1..20: note = chemically synthesized
  source 1..20: mol_type = other DNA
gccggggcgaacccgcagcc

SEQ ID NO: 44118 - DNA, 20 bp, synthetic construct
  misc_feature 1..20: note = chemically synthesized
  source 1..20: mol_type = other DNA
gggcgaacccgcagccggga

SEQ ID NO: 44119 - DNA, 20 bp, synthetic construct
  misc_feature 1..20: note = chemically synthesized
  source 1..20: mol_type = other DNA
aacccgcagccgggacggtg

SEQ ID NO: 44120 - DNA, 20 bp, synthetic construct
  misc_feature 1..20: note = chemically synthesized
  source 1..20: mol_type = other DNA
ggtgcggtgctgtttcctct

SEQ ID NO: 44121 - DNA, 20 bp, synthetic construct
  misc_feature 1..20: note = chemically synthesized
  source 1..20: mol_type = other DNA
gtgcggtgctgtttcctctc

SEQ ID NO: 44122 - DNA, 20 bp, synthetic construct
  misc_feature 1..20: note = chemically synthesized
  source 1..20: mol_type = other DNA
tgctgtttcctctcgggcct

SEQ ID NO: 44123 - DNA, 20 bp, synthetic construct
  misc_feature 1..20: note = chemically synthesized
  source 1..20: mol_type = other DNA
gcctcagtttccccccatgt

SEQ ID NO: 44124 - DNA, 20 bp, synthetic construct
  misc_feature 1..20: note = chemically synthesized
  source 1..20: mol_type = other DNA
ctcagtttccccccatgtaa

SEQ ID NO: 44125 - DNA, 20 bp, synthetic construct
  misc_feature 1..20: note = chemically synthesized
  source 1..20: mol_type = other DNA
cagtttccccccatgtaaga

SEQ ID NO: 44126 - DNA, 20 bp, synthetic construct
  misc_feature 1..20: note = chemically synthesized
  source 1..20: mol_type = other DNA
agtttccccccatgtaagag

SEQ ID NO: 44127 - DNA, 20 bp, synthetic construct
  misc_feature 1..20: note = chemically synthesized
  source 1..20: mol_type = other DNA
ttccccccatgtaagagagg

SEQ ID NO: 44128 - DNA, 20 bp, synthetic construct
  misc_feature 1..20: note = chemically synthesized
  source 1..20: mol_type = other DNA
cccccatgtaagagaggaag

SEQ ID NO: 44129 - DNA, 20 bp, synthetic construct
  misc_feature 1..20: note = chemically synthesized
  source 1..20: mol_type = other DNA
cccatgtaagagaggaagtg

SEQ ID NO: 44130 - DNA, 20 bp, synthetic construct
  misc_feature 1..20: note = chemically synthesized
  source 1..20: mol_type = other DNA
gtaagagaggaagtggagtg

SEQ ID NO: 44131 - DNA, 20 bp, synthetic construct
  misc_feature 1..20: note = chemically synthesized
  source 1..20: mol_type = other DNA
taagagaggaagtggagtgc

SEQ ID NO: 44132 - DNA, 20 bp, synthetic construct
  misc_feature 1..20: note = chemically synthesized
  source 1..20: mol_type = other DNA
gaagtggagtgcaggtcgcc

SEQ ID NO: 44133 - DNA, 20 bp, synthetic construct
  misc_feature 1..20: note = chemically synthesized
  source 1..20: mol_type = other DNA
aagtggagtgcaggtcgccg

SEQ ID NO: 44134 - DNA, 20 bp, synthetic construct
  misc_feature 1..20: note = chemically synthesized
  source 1..20: mol_type = other DNA
agtggagtgcaggtcgccga

SEQ ID NO: 44135 - DNA, 20 bp, synthetic construct
  misc_feature 1..20: note = chemically synthesized
  source 1..20: mol_type = other DNA
gtcgccgagggctcttcgct

SEQ ID NO: 44136 - DNA, 20 bp, synthetic construct
  misc_feature 1..20: note = chemically synthesized
  source 1..20: mol_type = other DNA
ctcttcgcttggcacgatct

SEQ ID NO: 44137 - DNA, 20 bp, synthetic construct
  misc_feature 1..20: note = chemically synthesized
  source 1..20: mol_type = other DNA
tcttcgcttggcacgatctt

SEQ ID NO: 44138 - DNA, 20 bp, synthetic construct
  misc_feature 1..20: note = chemically synthesized
  source 1..20: mol_type = other DNA
cttcgcttggcacgatcttg

SEQ ID NO: 44139 - DNA, 20 bp, synthetic construct
  misc_feature 1..20: note = chemically synthesized
  source 1..20: mol_type = other DNA
tggcacgatcttggggactg

SEQ ID NO: 44140 - DNA, 20 bp, synthetic construct
  misc_feature 1..20: note = chemically synthesized
  source 1..20: mol_type = other DNA
ggcacgatcttggggactgc

SEQ ID NO: 44141 - DNA, 20 bp, synthetic construct
  misc_feature 1..20: note = chemically synthesized
  source 1..20: mol_type = other DNA
cgatcttggggactgcaggc

SEQ ID NO: 44142 - DNA, 20 bp, synthetic construct
  misc_feature 1..20: note = chemically synthesized
  source 1..20: mol_type = other DNA
gatcttggggactgcaggca

SEQ ID NO: 44143 - DNA, 20 bp, synthetic construct
  misc_feature 1..20: note = chemically synthesized
  source 1..20: mol_type = other DNA
cttggggactgcaggcaagg

SEQ ID NO: 44144 - DNA, 20 bp, synthetic construct
  misc_feature 1..20: note = chemically synthesized
  source 1..20: mol_type = other DNA
ggggactgcaggcaaggcgg

SEQ ID NO: 44145 - DNA, 20 bp, synthetic construct
  misc_feature 1..20: note = chemically synthesized
  source 1..20: mol_type = other DNA
gggactgcaggcaaggcggc

SEQ ID NO: 44146 - DNA, 20 bp, synthetic construct
  misc_feature 1..20: note = chemically synthesized
  source 1..20: mol_type = other DNA
ggactgcaggcaaggcggcg

SEQ ID NO: 44147 - DNA, 20 bp, synthetic construct
  misc_feature 1..20: note = chemically synthesized
  source 1..20: mol_type = other DNA
gactgcaggcaaggcggcgg

SEQ ID NO: 44148 - DNA, 20 bp, synthetic construct
  misc_feature 1..20: note = chemically synthesized
  source 1..20: mol_type = other DNA
ctgcaggcaaggcggcgggg

SEQ ID NO: 44149 - DNA, 20 bp, synthetic construct
  misc_feature 1..20: note = chemically synthesized
  source 1..20: mol_type = other DNA
tgcaggcaaggcggcggggg

SEQ ID NO: 44150 - DNA, 20 bp, synthetic construct
  misc_feature 1..20: note = chemically synthesized
  source 1..20: mol_type = other DNA
ggcaaggcggcgggggagga

SEQ ID NO: 44151 - DNA, 20 bp, synthetic construct
  misc_feature 1..20: note = chemically synthesized
  source 1..20: mol_type = other DNA
gcaaggcggcgggggaggac

SEQ ID NO: 44152 - DNA, 20 bp, synthetic construct
  misc_feature 1..20: note = chemically synthesized
  source 1..20: mol_type = other DNA
aggcggcgggggaggacggg

SEQ ID NO: 44153 - DNA, 20 bp, synthetic construct
  misc_feature 1..20: note = chemically synthesized
  source 1..20: mol_type = other DNA
cggcgggggaggacgggtag

SEQ ID NO: 44154 - DNA, 20 bp, synthetic construct
  misc_feature 1..20: note = chemically synthesized
  source 1..20: mol_type = other DNA
ggcgggggaggacgggtagt

SEQ ID NO: 44155 - DNA, 20 bp, synthetic construct
  misc_feature 1..20: note = chemically synthesized
  source 1..20: mol_type = other DNA
gcgggggaggacgggtagtg

SEQ ID NO: 44156 - DNA, 20 bp, synthetic construct
  misc_feature 1..20: note = chemically synthesized
  source 1..20: mol_type = other DNA
gggggaggacgggtagtggg

SEQ ID NO: 44157 - DNA, 20 bp, synthetic construct
  misc_feature 1..20: note = chemically synthesized
  source 1..20: mol_type = other DNA
aggacgggtagtggggagca

SEQ ID NO: 44158 - DNA, 20 bp, synthetic construct
  misc_feature 1..20: note = chemically synthesized
  source 1..20: mol_type = other DNA
acgggtagtggggagcacgg

SEQ ID NO: 44159 - DNA, 20 bp, synthetic construct
  misc_feature 1..20: note = chemically synthesized
  source 1..20: mol_type = other DNA
gggtagtggggagcacggtg

SEQ ID NO: 44160 - DNA, 20 bp, synthetic construct
  misc_feature 1..20: note = chemically synthesized
  source 1..20: mol_type = other DNA
gtagtggggagcacggtgga

SEQ ID NO: 44161 - DNA, 20 bp, synthetic construct
  misc_feature 1..20: note = chemically synthesized
  source 1..20: mol_type = other DNA
gtggggagcacggtggagag

SEQ ID NO: 44162 - DNA, 20 bp, synthetic construct
  misc_feature 1..20: note = chemically synthesized
  source 1..20: mol_type = other DNA
tggggagcacggtggagagc

SEQ ID NO: 44163 - DNA, 20 bp, synthetic construct
  misc_feature 1..20: note = chemically synthesized
  source 1..20: mol_type = other DNA
ggggagcacggtggagagcg

SEQ ID NO: 44164 - DNA, 20 bp, synthetic construct
  misc_feature 1..20: note = chemically synthesized
  source 1..20: mol_type = other DNA
agcacggtggagagcgggga

SEQ ID NO: 44165 - DNA, 20 bp, synthetic construct
  misc_feature 1..20: note = chemically synthesized
  source 1..20: mol_type = other DNA
cggtggagagcggggacggc

SEQ ID NO: 44166 - DNA, 20 bp, synthetic construct
  misc_feature 1..20: note = chemically synthesized
  source 1..20: mol_type = other DNA
agcggggacggccggctctt

SEQ ID NO: 44167 - DNA, 20 bp, synthetic construct
  misc_feature 1..20: note = chemically synthesized
  source 1..20: mol_type = other DNA
gcggggacggccggctcttt

SEQ ID NO: 44168 - DNA, 20 bp, synthetic construct
  misc_feature 1..20: note = chemically synthesized
  source 1..20: mol_type = other DNA
cggggacggccggctctttg

SEQ ID NO: 44169 - DNA, 20 bp, synthetic construct
  misc_feature 1..20: note = chemically synthesized
  source 1..20: mol_type = other DNA
ccggctctttggggacttgc

SEQ ID NO: 44170 - DNA, 20 bp, synthetic construct
  misc_feature 1..20: note = chemically synthesized
  source 1..20: mol_type = other DNA
cggctctttggggacttgct

SEQ ID NO: 44171 - DNA, 20 bp, synthetic construct
  misc_feature 1..20: note = chemically synthesized
  source 1..20: mol_type = other DNA
ggctctttggggacttgctg

SEQ ID NO: 44172 - DNA, 20 bp, synthetic construct
  misc_feature 1..20: note = chemically synthesized
  source 1..20: mol_type = other DNA
tggggacttgctggggcgtg

SEQ ID NO: 44173 - DNA, 20 bp, synthetic construct
  misc_feature 1..20: note = chemically synthesized
  source 1..20: mol_type = other DNA
gggcgtgcggctgcgctatt

SEQ ID NO: 44174 - DNA, 20 bp, synthetic construct
  misc_feature 1..20: note = chemically synthesized
  source 1..20: mol_type = other DNA
cgtgcggctgcgctattcag

SEQ ID NO: 44175 - DNA, 20 bp, synthetic construct
  misc_feature 1..20: note = chemically synthesized
  source 1..20: mol_type = other DNA
gtgcggctgcgctattcagt

SEQ ID NO: 44176 - DNA, 20 bp, synthetic construct
  misc_feature 1..20: note = chemically synthesized
  source 1..20: mol_type = other DNA
cggctgcgctattcagtggg

SEQ ID NO: 44177 - DNA, 20 bp, synthetic construct
  misc_feature 1..20: note = chemically synthesized
  source 1..20: mol_type = other DNA
ggctgcgctattcagtggga

SEQ ID NO: 44178 - DNA, 20 bp, synthetic construct
  misc_feature 1..20: note = chemically synthesized
  source 1..20: mol_type = other DNA
ctattcagtgggaaggttcg

SEQ ID NO: 44179 - DNA, 20 bp, synthetic construct
  misc_feature 1..20: note = chemically synthesized
  source 1..20: mol_type = other DNA
tattcagtgggaaggttcgc

SEQ ID NO: 44180 - DNA, 20 bp, synthetic construct
  misc_feature 1..20: note = chemically synthesized
  source 1..20: mol_type = other DNA
attcagtgggaaggttcgcg

SEQ ID NO: 44181 - DNA, 20 bp, synthetic construct
  misc_feature 1..20: note = chemically synthesized
  source 1..20: mol_type = other DNA
agtgggaaggttcgcggggt

SEQ ID NO: 44182 - DNA, 20 bp, synthetic construct
  misc_feature 1..20: note = chemically synthesized
  source 1..20: mol_type = other DNA
gtgggaaggttcgcggggtt

SEQ ID NO: 44183 - DNA, 20 bp, synthetic construct
  misc_feature 1..20: note = chemically synthesized
  source 1..20: mol_type = other DNA
gggaaggttcgcggggttgg

SEQ ID NO: 44184 - DNA, 20 bp, synthetic construct
  misc_feature 1..20: note = chemically synthesized
  source 1..20: mol_type = other DNA
gttcgcggggttgggagacc

SEQ ID NO: 44185 - DNA, 20 bp, synthetic construct
  misc_feature 1..20: note = chemically synthesized
  source 1..20: mol_type = other DNA
tcgcggggttgggagacccg

SEQ ID NO: 44186 - DNA, 20 bp, synthetic construct
  misc_feature 1..20: note = chemically synthesized
  source 1..20: mol_type = other DNA
cgcggggttgggagacccgg

SEQ ID NO: 44187 - DNA, 20 bp, synthetic construct
  misc_feature 1..20: note = chemically synthesized
  source 1..20: mol_type = other DNA
ggttgggagacccggaggcc

SEQ ID NO: 44188 - DNA, 20 bp, synthetic construct
  misc_feature 1..20: note = chemically synthesized
  source 1..20: mol_type = other DNA
gttgggagacccggaggccg

SEQ ID NO: 44189 - DNA, 20 bp, synthetic construct
  misc_feature 1..20: note = chemically synthesized
  source 1..20: mol_type = other DNA
gggagacccggaggccgagg

SEQ ID NO: 44190 - DNA, 20 bp, synthetic construct
  misc_feature 1..20: note = chemically synthesized
  source 1..20: mol_type = other DNA
ggagacccggaggccgagga

SEQ ID NO: 44191 - DNA, 20 bp, synthetic construct
  misc_feature 1..20: note = chemically synthesized
  source 1..20: mol_type = other DNA
gagacccggaggccgaggaa

SEQ ID NO: 44192 - DNA, 20 bp, synthetic construct
  misc_feature 1..20: note = chemically synthesized
  source 1..20: mol_type = other DNA
cccggaggccgaggaagggc

SEQ ID NO: 44193 - DNA, 20 bp, synthetic construct
  misc_feature 1..20: note = chemically synthesized
  source 1..20: mol_type = other DNA
ggaggccgaggaagggcgag

SEQ ID NO: 44194 - DNA, 20 bp, synthetic construct
  misc_feature 1..20: note = chemically synthesized
  source 1..20: mol_type = other DNA
aggccgaggaagggcgagca

SEQ ID NO: 44195 - DNA, 20 bp, synthetic construct
  misc_feature 1..20: note = chemically synthesized
  source 1..20: mol_type = other DNA
aagggcgagcagagcactgc

SEQ ID NO: 44196 - DNA, 20 bp, synthetic construct
  misc_feature 1..20: note = chemically synthesized
  source 1..20: mol_type = other DNA
agggcgagcagagcactgcc

SEQ ID NO: 44197 - DNA, 20 bp, synthetic construct
  misc_feature 1..20: note = chemically synthesized
  source 1..20: mol_type = other DNA
cactgccaggatatcctgcc

SEQ ID NO: 44198 - DNA, 20 bp, synthetic construct
  misc_feature 1..20: note = chemically synthesized
  source 1..20: mol_type = other DNA
gatatcctgcccagatttcc

SEQ ID NO: 44199 - DNA, 20 bp, synthetic construct
  misc_feature 1..20: note = chemically synthesized
  source 1..20: mol_type = other DNA
tcccagtttctgcctcgccg

SEQ ID NO: 44200 - DNA, 20 bp, synthetic construct
  misc_feature 1..20: note = chemically synthesized
  source 1..20: mol_type = other DNA
gtttctgcctcgccgcggca

SEQ ID NO: 44201 - DNA, 20 bp, synthetic construct
  misc_feature 1..20: note = chemically synthesized
  source 1..20: mol_type = other DNA
tttctgcctcgccgcggcac

SEQ ID NO: 44202 - DNA, 20 bp, synthetic construct
  misc_feature 1..20: note = chemically synthesized
  source 1..20: mol_type = other DNA
ctgcctcgccgcggcacagg

SEQ ID NO: 44203 - DNA, 20 bp, synthetic construct
  misc_feature 1..20: note = chemically synthesized
  source 1..20: mol_type = other DNA
tgcctcgccgcggcacaggt

SEQ ID NO: 44204 - DNA, 20 bp, synthetic construct
  misc_feature 1..20: note = chemically synthesized
  source 1..20: mol_type = other DNA
cgccgcggcacaggtgggtg

SEQ ID NO: 44205 - DNA, 20 bp, synthetic construct
  misc_feature 1..20: note = chemically synthesized
  source 1..20: mol_type = other DNA
gccgcggcacaggtgggtga

SEQ ID NO: 44206 - DNA, 20 bp, synthetic construct
  misc_feature 1..20: note = chemically synthesized
  source 1..20: mol_type = other DNA
cgcggcacaggtgggtgaag

SEQ ID NO: 44207 - DNA, 20 bp, synthetic construct
  misc_feature 1..20: note = chemically synthesized
  source 1..20: mol_type = other DNA
tgggtgaaggagtgaatgcc

SEQ ID NO: 44208 - DNA, 20 bp, synthetic construct
  misc_feature 1..20: note = chemically synthesized
  source 1..20: mol_type = other DNA
agtgaatgcctggaacgtac

SEQ ID NO: 44209 - DNA, 20 bp, synthetic construct
  misc_feature 1..20: note = chemically synthesized
  source 1..20: mol_type = other DNA
gtgaatgcctggaacgtact

SEQ ID NO: 44210 - DNA, 20 bp, synthetic construct
  misc_feature 1..20: note = chemically synthesized
  source 1..20: mol_type = other DNA
gaacgtactgggaactgcac

SEQ ID NO: 44211 - DNA, 20 bp, synthetic construct
  misc_feature 1..20: note = chemically synthesized
  source 1..20: mol_type = other DNA
aacgtactgggaactgcacc

SEQ ID NO: 44212 - DNA, 20 bp, synthetic construct
  misc_feature 1..20: note = chemically synthesized
  source 1..20: mol_type = other DNA
actgggaactgcaccaggca

SEQ ID NO: 44213 - DNA, 20 bp, synthetic construct
  misc_feature 1..20: note = chemically synthesized
  source 1..20: mol_type = other DNA
tgggaactgcaccaggcaca

SEQ ID NO: 44214 - DNA, 20 bp, synthetic construct
  misc_feature 1..20: note = chemically synthesized
  source 1..20: mol_type = other DNA
aactgcaccaggcacagaga

SEQ ID NO: 44215 - DNA, 20 bp, synthetic construct
  misc_feature 1..20: note = chemically synthesized
  source 1..20: mol_type = other DNA
tgcaccaggcacagagaaag

SEQ ID NO: 44216 - DNA, 20 bp, synthetic construct
  misc_feature 1..20: note = chemically synthesized
  source 1..20: mol_type = other DNA
gcaccaggcacagagaaagc

SEQ ID NO: 44217 - DNA, 20 bp, synthetic construct
  misc_feature 1..20: note = chemically synthesized
  source 1..20: mol_type = other DNA
agaaagcgggcttgccatta

SEQ ID NO: 44218 - DNA, 20 bp, synthetic construct
  misc_feature 1..20: note = chemically synthesized
  source 1..20: mol_type = other DNA
aagcgggcttgccattatag

SEQ ID NO: 44219 - DNA, 20 bp, synthetic construct
  misc_feature 1..20: note = chemically synthesized
  source 1..20: mol_type = other DNA
agcgggcttgccattatagt

SEQ ID NO: 44220 - DNA, 20 bp, synthetic construct
  misc_feature 1..20: note = chemically synthesized
  source 1..20: mol_type = other DNA
cattatagtgggttccgatt

SEQ ID NO: 44221 - DNA, 20 bp, synthetic construct
  misc_feature 1..20: note = chemically synthesized
  source 1..20: mol_type = other DNA
tagtgggttccgatttggtt

SEQ ID NO: 44222 - DNA, 20 bp, synthetic construct
  misc_feature 1..20: note = chemically synthesized
  source 1..20: mol_type = other DNA
ccgatttggtttggaaaaca

SEQ ID NO: 44223 - DNA, 20 bp, synthetic construct
  misc_feature 1..20: note = chemically synthesized
  source 1..20: mol_type = other DNA
cgatttggtttggaaaacat

SEQ ID NO: 44224 - DNA, 20 bp, synthetic construct
  misc_feature 1..20: note = chemically synthesized
  source 1..20: mol_type = other DNA
tttggtttggaaaacatggg

SEQ ID NO: 44225 - DNA, 20 bp, synthetic construct
  misc_feature 1..20: note = chemically synthesized
  source 1..20: mol_type = other DNA
ggtttggaaaacatgggcag

SEQ ID NO: 44226 - DNA, 20 bp, synthetic construct
  misc_feature 1..20: note = chemically synthesized
  source 1..20: mol_type = other DNA
tttggaaaacatgggcagcg

SEQ ID NO: 44227 - DNA, 20 bp, synthetic construct
  misc_feature 1..20: note = chemically synthesized
  source 1..20: mol_type = other DNA
ttggaaaacatgggcagcgg

SEQ ID NO: 44228 - DNA, 20 bp, synthetic construct
  misc_feature 1..20: note = chemically synthesized
  source 1..20: mol_type = other DNA
tggaaaacatgggcagcgga

SEQ ID NO: 44229 - DNA, 20 bp, synthetic construct
  misc_feature 1..20: note = chemically synthesized
  source 1..20: mol_type = other DNA
aaaacatgggcagcggaggg

SEQ ID NO: 44230 - DNA, 20 bp, synthetic construct
  misc_feature 1..20: note = chemically synthesized
  source 1..20: mol_type = other DNA
aacatgggcagcggagggtg

SEQ ID NO: 44231 - DNA, 20 bp, synthetic construct
  misc_feature 1..20: note = chemically synthesized
  source 1..20: mol_type = other DNA
acatgggcagcggagggtgg

SEQ ID NO: 44232 - DNA, 20 bp, synthetic construct
  misc_feature 1..20: note = chemically synthesized
  source 1..20: mol_type = other DNA
catgggcagcggagggtgga

SEQ ID NO: 44233 - DNA, 20 bp, synthetic construct
  misc_feature 1..20: note = chemically synthesized
  source 1..20: mol_type = other DNA
gcagcggagggtggagggcc

SEQ ID NO: 44234 - DNA, 20 bp, synthetic construct
  misc_feature 1..20: note = chemically synthesized
  source 1..20: mol_type = other DNA
agcggagggtggagggcctg

SEQ ID NO: 44235 - DNA, 20 bp, synthetic construct
  misc_feature 1..20: note = chemically synthesized
  source 1..20: mol_type = other DNA
cggagggtggagggcctgga

SEQ ID NO: 44236 - DNA, 20 bp, synthetic construct
  misc_feature 1..20: note = chemically synthesized
  source 1..20: mol_type = other DNA
agggtggagggcctggagag

SEQ ID NO: 44237 - DNA, 20 bp, synthetic construct
  misc_feature 1..20: note = chemically synthesized
  source 1..20: mol_type = other DNA
gggtggagggcctggagaga

SEQ ID NO: 44238 - DNA, 20 bp, synthetic construct
  misc_feature 1..20: note = chemically synthesized
  source 1..20: mol_type = other DNA
ctggagagaaggccctaccc

SEQ ID NO: 44239 - DNA, 20 bp, synthetic construct
  misc_feature 1..20: note = chemically synthesized
  source 1..20: mol_type = other DNA
agagaaggccctacccgaga

SEQ ID NO: 44240 - DNA, 20 bp, synthetic construct
  misc_feature 1..20: note = chemically synthesized
  source 1..20: mol_type = other DNA
gagaaggccctacccgagac

SEQ ID NO: 44241 - DNA, 20 bp, synthetic construct
  misc_feature 1..20: note = chemically synthesized
  source 1..20: mol_type = other DNA
agaaggccctacccgagaca

SEQ ID NO: 44242 - DNA, 20 bp, synthetic construct
  misc_feature 1..20: note = chemically synthesized
  source 1..20: mol_type = other DNA
gaaggccctacccgagacag

SEQ ID NO: 44243 - DNA, 20 bp, synthetic construct
  misc_feature 1..20: note = chemically synthesized
  source 1..20: mol_type = other DNA
ggccctacccgagacagggg

SEQ ID NO: 44244 - DNA, 20 bp, synthetic construct
  misc_feature 1..20: note = chemically synthesized
  source 1..20: mol_type = other DNA
gccctacccgagacaggggc

SEQ ID NO: 44245 - DNA, 20 bp, synthetic construct
  misc_feature 1..20: note = chemically synthesized
  source 1..20: mol_type = other DNA
ccctacccgagacaggggcg

SEQ ID NO: 44246 - DNA, 20 bp, synthetic construct
  misc_feature 1..20: note = chemically synthesized
  source 1..20: mol_type = other DNA
tacccgagacaggggcgggg

SEQ ID NO: 44247 - DNA, 20 bp, synthetic construct
  misc_feature 1..20: note = chemically synthesized
  source 1..20: mol_type = other DNA
acccgagacaggggcggggt

SEQ ID NO: 44248 - DNA, 20 bp, synthetic construct
  misc_feature 1..20: note = chemically synthesized
  source 1..20: mol_type = other DNA
cgagacaggggcggggtggg

SEQ ID NO: 44249 - DNA, 20 bp, synthetic construct
  misc_feature 1..20: note = chemically synthesized
  source 1..20: mol_type = other DNA
gagacaggggcggggtggga

SEQ ID NO: 44250 - DNA, 20 bp, synthetic construct
  misc_feature 1..20: note = chemically synthesized
  source 1..20: mol_type = other DNA
caggggcggggtgggaagga

SEQ ID NO: 44251 - DNA, 20 bp, synthetic construct
  misc_feature 1..20: note = chemically synthesized
  source 1..20: mol_type = other DNA
gggcggggtgggaaggacgg

SEQ ID NO: 44252 - DNA, 20 bp, synthetic construct
  misc_feature 1..20: note = chemically synthesized
  source 1..20: mol_type = other DNA
gtgggaaggacggcagatgc

SEQ ID NO: 44253 - DNA, 20 bp, synthetic construct
  misc_feature 1..20: note = chemically synthesized
  source 1..20: mol_type = other DNA
tgggaaggacggcagatgct

SEQ ID NO: 44254 - DNA, 20 bp, synthetic construct
  misc_feature 1..20: note = chemically synthesized
  source 1..20: mol_type = other DNA
ggaaggacggcagatgctgg

SEQ ID NO: 44255 - DNA, 20 bp, synthetic construct
  misc_feature 1..20: note = chemically synthesized
  source 1..20: mol_type = other DNA
acggcagatgctgggagcac

SEQ ID NO: 44256 - DNA, 20 bp, synthetic construct
  misc_feature 1..20: note = chemically synthesized
  source 1..20: mol_type = other DNA
cggcagatgctgggagcacg

SEQ ID NO: 44257 - DNA, 20 bp, synthetic construct
  misc_feature 1..20: note = chemically synthesized
  source 1..20: mol_type = other DNA
gaggcaatttctttatgaca

SEQ ID NO: 44258 - DNA, 20 bp, synthetic construct
  misc_feature 1..20: note = chemically synthesized
  source 1..20: mol_type = other DNA
atgacacagaactcatgctc

SEQ ID NO: 44259 - DNA, 20 bp, synthetic construct
  misc_feature 1..20: note = chemically synthesized
  source 1..20: mol_type = other DNA
ctctagtattccatctgttt

SEQ ID NO: 44260 - DNA, 20 bp, synthetic construct
  misc_feature 1..20: note = chemically synthesized
  source 1..20: mol_type = other DNA
tattccatctgtttcagccg

SEQ ID NO: 44261 - DNA, 20 bp, synthetic construct
  misc_feature 1..20: note = chemically synthesized
  source 1..20: mol_type = other DNA
catctgtttcagccgaagaa

SEQ ID NO: 44262 - DNA, 20 bp, synthetic construct
  misc_feature 1..20: note = chemically synthesized
  source 1..20: mol_type = other DNA
tttcagccgaagaaaagaac

SEQ ID NO: 44263 - DNA, 20 bp, synthetic construct
  misc_feature 1..20: note = chemically synthesized
  source 1..20: mol_type = other DNA
ccgaagaaaagaaccagctg

SEQ ID NO: 44264 - DNA, 20 bp, synthetic construct
  misc_feature 1..20: note = chemically synthesized
  source 1..20: mol_type = other DNA
cgaagaaaagaaccagctga

SEQ ID NO: 44265 - DNA, 20 bp, synthetic construct
  misc_feature 1..20: note = chemically synthesized
  source 1..20: mol_type = other DNA
gaagaaaagaaccagctgaa

SEQ ID NO: 44266 - DNA, 20 bp, synthetic construct
  misc_feature 1..20: note = chemically synthesized
  source 1..20: mol_type = other DNA
aagaaaagaaccagctgaag

SEQ ID NO: 44267 - DNA, 20 bp, synthetic construct
  misc_feature 1..20: note = chemically synthesized
  source 1..20: mol_type = other DNA
aaaagaaccagctgaagggg

SEQ ID NO: 44268 - DNA, 20 bp, synthetic construct
  misc_feature 1..20: note = chemically synthesized
  source 1..20: mol_type = other DNA
aaagaaccagctgaaggggc

SEQ ID NO: 44269 - DNA, 20 bp, synthetic construct
  misc_feature 1..20: note = chemically synthesized
  source 1..20: mol_type = other DNA
aagaaccagctgaaggggca

SEQ ID NO: 44270 - DNA, 20 bp, synthetic construct
  misc_feature 1..20: note = chemically synthesized
  source 1..20: mol_type = other DNA
agaaccagctgaaggggcag

SEQ ID NO: 44271 - DNA, 20 bp, synthetic construct
  misc_feature 1..20: note = chemically synthesized
  source 1..20: mol_type = other DNA
aaccagctgaaggggcaggg

SEQ ID NO: 44272 - DNA, 20 bp, synthetic construct
  misc_feature 1..20: note = chemically synthesized
  source 1..20: mol_type = other DNA
cagctgaaggggcaggggag

SEQ ID NO: 44273 - DNA, 20 bp, synthetic construct
  misc_feature 1..20: note = chemically synthesized
  source 1..20: mol_type = other DNA
agctgaaggggcaggggaga

SEQ ID NO: 44274 - DNA, 20 bp, synthetic construct
  misc_feature 1..20: note = chemically synthesized
  source 1..20: mol_type = other DNA
gctgaaggggcaggggagaa

SEQ ID NO: 44275 - DNA, 20 bp, synthetic construct
  misc_feature 1..20: note = chemically synthesized
  source 1..20: mol_type = other DNA
ctgaaggggcaggggagaag

SEQ ID NO: 44276 - DNA, 20 bp, synthetic construct
  misc_feature 1..20: note = chemically synthesized
  source 1..20: mol_type = other DNA
aaggggcaggggagaagggg

SEQ ID NO: 44277 - DNA, 20 bp, synthetic construct
  misc_feature 1..20: note = chemically synthesized
  source 1..20: mol_type = other DNA
ggggcaggggagaaggggcg
